United States Patent Application Publication US 2022/0213167 A1 - sequence listing, part 8

SEQ ID NO: 152807 - protein, 16 aa, Homo sapiens
  CDR3 for alpha chain variable domain of TCR clone 76404 (TRAV3, TRAJ10)
CAVRDMRAGGGNKLTF

SEQ ID NO: 152808 - protein, 19 aa, Homo sapiens
  CDR3 for beta chain variable domain of TCR clone 76404 (TRBV6-3, TRBJ1-2)
CASSYSKCRTGPPNYGYTF

SEQ ID NO: 152809 - protein, 15 aa, Homo sapiens
  CDR3 for alpha chain variable domain of TCR clone 76405 (TRAV27, TRAJ38)
CAARRNAGNNRKLVW

SEQ ID NO: 152810 - protein, 13 aa, Homo sapiens
  CDR3 for beta chain variable domain of TCR clone 76405 (TRBV7-3, TRBJ2-1)
CASSLDSYNEQFF

SEQ ID NO: 152811 - protein, 13 aa, Homo sapiens
  CDR3 for alpha chain variable domain of TCR clone 76406 (TRAV3, TRAJ20)
CAVRSLNDYKLSF

SEQ ID NO: 152812 - protein, 13 aa, Homo sapiens
  CDR3 for beta chain variable domain of TCR clone 76406 (TRBV6-1, TRBJ2-1)
CAGMDLTNNEQFF

SEQ ID NO: 152813 - protein, 13 aa, Homo sapiens
  CDR3 for alpha chain variable domain of TCR clone 76407 (TRAV12-3, TRAJ9)
CAMRNTGGFKTIF

SEQ ID NO: 152814 - protein, 14 aa, Homo sapiens
  CDR3 for beta chain variable domain of TCR clone 76407 (TRBV6-1, TRBJ1-3)
CASVQGGGGNTIYF

SEQ ID NO: 152815 - protein, 13 aa, Homo sapiens
  CDR3 for alpha chain variable domain of TCR clone 76408 (TRAV16, TRAJ27)
CAIRRTNAGKSTF

SEQ ID NO: 152816 - protein, 15 aa, Homo sapiens
  CDR3 for beta chain variable domain of TCR clone 76408 (TRBV18, TRBJ2-1)
CASSPPSASYNEQFF

SEQ ID NO: 152817 - protein, 13 aa, Homo sapiens
  CDR3 for alpha chain variable domain of TCR clone 76409 (TRAV17, TRAJ42)
CATSRGSQGNLIF

SEQ ID NO: 152818 - protein, 15 aa, Homo sapiens
  CDR3 for beta chain variable domain of TCR clone 76409 (TRBV29-1, TRBJ2-7)
CSAEFFDRGSYEQYF

SEQ ID NO: 152819 - protein, 13 aa, Homo sapiens
  CDR3 for alpha chain variable domain of TCR clone 76410 (TRAV27, TRAJ41)
CAGEGNSGYALNF

SEQ ID NO: 152820 - protein, 14 aa, Homo sapiens
  CDR3 for beta chain variable domain of TCR clone 76410 (TRBV7-2, TRBJ1-1)
CASSFLRGTTEAFF

SEQ ID NO: 152821 - protein, 18 aa, Homo sapiens
  CDR3 for alpha chain variable domain of TCR clone 76411 (TRAV12-3, TRAJ52)
CAMSVGGAGGTSYGELTF

SEQ ID NO: 152822 - protein, 15 aa, Homo sapiens
  CDR3 for beta chain variable domain of TCR clone 76411 (TRBV7-2, TRBJ1-2)
CASSPRAGWNYGYTF

SEQ ID NO: 152823 - protein, 13 aa, Homo sapiens
  CDR3 for alpha chain variable domain of TCR clone 76412 (TRAV12-3, TRAJ33)
CAMSLNSDYQLIW

SEQ ID NO: 152824 - protein, 13 aa, Homo sapiens
  CDR3 for beta chain variable domain of TCR clone 76412 (TRBV7-2, TRBJ2-2)
CASSLAVTGELFF

SEQ ID NO: 152825 - protein, 14 aa, Homo sapiens
  CDR3 for alpha chain variable domain of TCR clone 76413 (TRAV38-1, TRAJ45)
CAYYSGGGADGLTF

SEQ ID NO: 152826 - protein, 15 aa, Homo sapiens
  CDR3 for beta chain variable domain of TCR clone 76413 (TRBV20-1, TRBJ2-7)
CSARDRVSGMDEQYF

SEQ ID NO: 152827 - protein, 18 aa, Homo sapiens
  CDR3 for alpha chain variable domain of TCR clone 76414 (TRAV21, TRAJ52)
CAVRPSPAGGTSYGKLTF

SEQ ID NO: 152828 - protein, 14 aa, Homo sapiens
  CDR3 for beta chain variable domain of TCR clone 76414 (TRBV7-3, TRBJ1-1)
CASSLGTGYTEAFF

SEQ ID NO: 152829 - protein, 18 aa, Homo sapiens
  CDR3 for alpha chain variable domain of TCR clone 76415 (TRAV21, TRAJ52)
CAVRPSSAGGTSYGKLTF

SEQ ID NO: 152830 - protein, 13 aa, Homo sapiens
  CDR3 for beta chain variable domain of TCR clone 76415 (TRBV7-3, TRBJ1-1)
CASSQDWGAEAFF

SEQ ID NO: 152831 - protein, 13 aa, Homo sapiens
  CDR3 for alpha chain variable domain of TCR clone 76416 (TRAV8-6, TRAJ34)
CAVSDQGTDKLIF

SEQ ID NO: 152832 - protein, 14 aa, Homo sapiens
  CDR3 for beta chain variable domain of TCR clone 76416 (TRBV12-4, TRBJ1-1)
CASTWAGHDTEAFF

SEQ ID NO: 152833 - protein, 14 aa, Homo sapiens
  CDR3 for alpha chain variable domain of TCR clone 76417 (TRAV8-4, TRAJ9)
CAVRINTGGFKTIF

SEQ ID NO: 152834 - protein, 15 aa, Homo sapiens
  CDR3 for beta chain variable domain of TCR clone 76417 (TRBV28, TRBJ1-5)
CASSRTGGYVQPQHF

SEQ ID NO: 152835 - protein, 14 aa, Homo sapiens
  CDR3 for alpha chain variable domain of TCR clone 76418 (TRAV1-2, TRAJ8)
CAVREDTGFQKLVF

SEQ ID NO: 152836 - protein, 15 aa, Homo sapiens
  CDR3 for beta chain variable domain of TCR clone 76418 (TRBV28, TRBJ1-2)
CASIPQGSDDYGYTF

SEQ ID NO: 152837 - protein, 13 aa, Homo sapiens
  CDR3 for alpha chain variable domain of TCR clone 76419 (TRAV16, TRAJ27)
CALSGGNAGKSTF

SEQ ID NO: 152838 - protein, 14 aa, Homo sapiens
  CDR3 for beta chain variable domain of TCR clone 76419 (TRBV5-1, TRBJ2-3)
CASRGQTSTDTQYF

SEQ ID NO: 152839 - protein, 15 aa, Homo sapiens
  CDR3 for alpha chain variable domain of TCR clone 76420 (TRAV14/DV4, TRAJ40)
CAMRERGSGTYKYIF

SEQ ID NO: 152840 - protein, 16 aa, Homo sapiens
  CDR3 for beta chain variable domain of TCR clone 76420 (TRBV20-1, TRBJ2-5)
CSARDSSGGLGETQYF

SEQ ID NO: 152841 - protein, 13 aa, Homo sapiens
  CDR3 for alpha chain variable domain of TCR clone 76421 (TRAV3, TRAJ21)
CAVRGPDFNKFYF

SEQ ID NO: 152842 - protein, 18 aa, Homo sapiens
  CDR3 for beta chain variable domain of TCR clone 76421 (TRBV11-2, TRBJ2-3)
CASSLGGASRGAPNTQYF

SEQ ID NO: 152843 - protein, 15 aa, Homo sapiens
  CDR3 for alpha chain variable domain of TCR clone 76422 (TRAV12-2, TRAJ52)
CAVTSGGTSYGKLTF

SEQ ID NO: 152844 - protein, 11 aa, Homo sapiens
  CDR3 for beta chain variable domain of TCR clone 76422 (TRBV29-1, TRBJ2-5)
CSEDRTGTQYF

SEQ ID NO: 152845 - protein, 14 aa, Homo sapiens
  CDR3 for alpha chain variable domain of TCR clone 76423 (TRAV12-2, TRAJ6)
CASKWGGGSYIPPF

SEQ ID NO: 152846 - protein, 13 aa, Homo sapiens
  CDR3 for beta chain variable domain of TCR clone 76423 (TRBV2, TRBJ1-1)
CASSEGGNTEAFF

SEQ ID NO: 152847 - protein, 15 aa, Homo sapiens
  CDR3 for alpha chain variable domain of TCR clone 76424 (TRAV3, TRAJ20)
CAVRDIKLSDYKLSF

SEQ ID NO: 152848 - protein, 15 aa, Homo sapiens
  CDR3 for beta chain variable domain of TCR clone 76424 (TRBV7-9, TRBJ1-6)
CARSSPGRGNSPLHF

SEQ ID NO: 152849 - protein, 12 aa, Homo sapiens
  CDR3 for alpha chain variable domain of TCR clone 76425 (TRAV1-2, TRAJ33)
CAALDSNYQLIW

SEQ ID NO: 152850 - protein, 14 aa, Homo sapiens
  CDR3 for beta chain variable domain of TCR clone 76425 (TRBV20-1, TRBJ2-1)
CSAQIGGAANEQFF

SEQ ID NO: 152851 - protein, 18 aa, Homo sapiens
  CDR3 for alpha chain variable domain of TCR clone 76426 (TRAV21, TRAJ52)
CAVRPSPAGGTSYGNLTF

SEQ ID NO: 152852 - protein, 16 aa, Homo sapiens
  CDR3 for beta chain variable domain of TCR clone 76426 (TRBV7-3, TRBJ2-1)
CASSLEGYRSYNEQFF

SEQ ID NO: 152853 - protein, 11 aa, Homo sapiens
  CDR3 for alpha chain variable domain of TCR clone 76427 (TRAV12-2, TRAJ43)
CAAYNSNDMRF

SEQ ID NO: 152854 - protein, 14 aa, Homo sapiens
  CDR3 for beta chain variable domain of TCR clone 76427 (TRBV7-8, TRBJ1-2)
CASSAGTAIYGYTF

SEQ ID NO: 152855 - protein, 11 aa, Homo sapiens
  CDR3 for alpha chain variable domain of TCR clone 76428 (TRAV13-1, TRAJ8)
CAARGFQKLVF

SEQ ID NO: 152856 - protein, 16 aa, Homo sapiens
  CDR3 for beta chain variable domain of TCR clone 76428 (TRBV19, TRBJ1-5)
CASSARGTRSNQPQHF

SEQ ID NO: 152857 - protein, 14 aa, Homo sapiens
  CDR3 for alpha chain variable domain of TCR clone 76429 (TRAV17, TRAJ6)
CATFSSGGSYIPTF

SEQ ID NO: 152858 - protein, 15 aa, Homo sapiens
  CDR3 for beta chain variable domain of TCR clone 76429 (TRBV19, TRBJ2-7)
CASSPAGSGEALRYL

SEQ ID NO: 152859 - protein, 12 aa, Homo sapiens
  CDR3 for alpha chain variable domain of TCR clone 76430 (TRAV13-1, TRAJ23)
CAERHRGGKLIF

SEQ ID NO: 152860 - protein, 16 aa, Homo sapiens
  CDR3 for beta chain variable domain of TCR clone 76430 (TRBV20-1, TRBJ1-4)
CSAPGQGLLTNEKLFF

SEQ ID NO: 152861 - protein, 13 aa, Homo sapiens
  CDR3 for alpha chain variable domain of TCR clone 76431 (TRAV8-3, TRAJ6)
CAVGSGGSYIPTF

SEQ ID NO: 152862 - protein, 15 aa, Homo sapiens
  CDR3 for beta chain variable domain of TCR clone 76431 (TRBV6-1, TRBJ2-3)
CASSERGGITDTQYF

SEQ ID NO: 152863 - protein, 14 aa, Homo sapiens
  CDR3 for alpha chain variable domain of TCR clone 76432 (TRAV2, TRAJ9)
CAVEDRSGGFTTIF

SEQ ID NO: 152864 - protein, 12 aa, Homo sapiens
  CDR3 for beta chain variable domain of TCR clone 76432 (TRBV12-4, TRBJ2-4)
CASSSSGNIQYF

SEQ ID NO: 152865 - protein, 22 aa, Homo sapiens
  CDR3 for alpha chain variable domain of TCR clone 76433 (TRAV3, TRAJ9)
CAVRLNTGGFKTILEQEQDYLL

SEQ ID NO: 152866 - protein, 15 aa, Homo sapiens
  CDR3 for beta chain variable domain of TCR clone 76433 (TRBV7-2, TRBJ2-1)
CASSLASGRVNEQFF

SEQ ID NO: 152867 - protein, 12 aa, Homo sapiens
  CDR3 for alpha chain variable domain of TCR clone 76434 (TRAV21, TRAJ39)
CAADNAGNMLTF

SEQ ID NO: 152868 - protein, 13 aa, Homo sapiens
  CDR3 for beta chain variable domain of TCR clone 76434 (TRBV10-3, TRBJ2-7)
CASKLAVNYEQYF

SEQ ID NO: 152869 - protein, 20 aa, Homo sapiens
  CDR3 for alpha chain variable domain of TCR clone 76435 (TRAV26-1, TRAJ42)
CFVLLHRQTYYGGSQGNLIF

SEQ ID NO: 152870 - protein, 16 aa, Homo sapiens
  CDR3 for beta chain variable domain of TCR clone 76435 (TRBV7-3, TRBJ2-2)
CASSLKRGTLSGELFF

SEQ ID NO: 152871 - protein, 10 aa, Homo sapiens
  CDR3 for alpha chain variable domain of TCR clone 76436 (TRAV8-4, TRAJ43)
CAVSADDMRF

SEQ ID NO: 152872 - protein, 15 aa, Homo sapiens
  CDR3 for beta chain variable domain of TCR clone 76436 (TRBV5-1, TRBJ2-3)
CASSVTSWSTDTQYF

SEQ ID NO: 152873 - protein, 15 aa, Homo sapiens
  CDR3 for alpha chain variable domain of TCR clone 76437 (TRAV26-1, TRAJ44)
CIVRANTGTASKLTF

SEQ ID NO: 152874 - protein, 16 aa, Homo sapiens
  CDR3 for beta chain variable domain of TCR clone 76437 (TRBV7-7, TRBJ2-1)
CASSLASGTSYNEQVF

SEQ ID NO: 152875 - protein, 13 aa, Homo sapiens
  CDR3 for alpha chain variable domain of TCR clone 76438 (TRAV2, TRAJ20)
CAVEDSSEYKLSF

SEQ ID NO: 152876 - protein, 16 aa, Homo sapiens
  CDR3 for beta chain variable domain of TCR clone 76438 (TRBV25-1, TRBJ2-7)
CASSELTGGGIYEQYF

SEQ ID NO: 152877 - protein, 12 aa, Homo sapiens
  CDR3 for alpha chain variable domain of TCR clone 76439 (TRAV2, TRAJ33)
CAFMDSDYQLIW

SEQ ID NO: 152878 - protein, 16 aa, Homo sapiens
  CDR3 for beta chain variable domain of TCR clone 76439 (TRBV2, TRBJ2-7)
CASSEPWTGPSYEQYF

SEQ ID NO: 152879 - protein, 14 aa, Homo sapiens
  CDR3 for alpha chain variable domain of TCR clone 76440 (TRAV8-4, TRAJ34)
CAVSDPGDTDKLIF

SEQ ID NO: 152880 - protein, 13 aa, Homo sapiens
  CDR3 for beta chain variable domain of TCR clone 76440 (TRBV7-9, TRBJ2-5)
CASLSPGQETQYL

SEQ ID NO: 152881 - protein, 16 aa, Homo sapiens
  CDR3 for alpha chain variable domain of TCR clone 76441 (TRAV13-1, TRAJ18)
CAASRMRGSTLGRLNF

SEQ ID NO: 152882 - protein, 16 aa, Homo sapiens
  CDR3 for beta chain variable domain of TCR clone 76441 (TRBV27, TRBJ1-1)
CASSSRGRTGYTEAFF

SEQ ID NO: 152883 - protein, 14 aa, Homo sapiens
  CDR3 for alpha chain variable domain of TCR clone 76442 (TRAV12-3, TRAJ10)
SHLPLTGGGNKLTF

SEQ ID NO: 152884 - protein, 13 aa, Homo sapiens
  CDR3 for beta chain variable domain of TCR clone 76442 (TRBV11-2, TRBJ1-1)
CASSLGNGAEAFF

SEQ ID NO: 152885 - protein, 14 aa, Homo sapiens
  CDR3 for alpha chain variable domain of TCR clone 76443 (TRAV38-1, TRAJ45)
CASHSGGGADGLTF

SEQ ID NO: 152886 - protein, 13 aa, Homo sapiens
  CDR3 for beta chain variable domain of TCR clone 76443 (TRBV10-3, TRBJ1-2)
CASSERDSYGYTF

SEQ ID NO: 152887 - protein, 14 aa, Homo sapiens
  CDR3 for alpha chain variable domain of TCR clone 76444 (TRAV12-2, TRAJ45)
FAVNIGGGADGLTF

SEQ ID NO: 152888 - protein, 13 aa, Homo sapiens
  CDR3 for beta chain variable domain of TCR clone 76444 (TRBV19, TRBJ2-2)
CASSIWSTGELFF

SEQ ID NO: 152889 - protein, 13 aa, Homo sapiens
  CDR3 for alpha chain variable domain of TCR clone 76445 (TRAV25, TRAJ17)
CAGLRAAGNKLTF

SEQ ID NO: 152890 - protein, 14 aa, Homo sapiens
  CDR3 for beta chain variable domain of TCR clone 76445 (TRBV19, TRBJ2-1)
CASPTFVLSGEQFF

SEQ ID NO: 152891 - protein, 13 aa, Homo sapiens
  CDR3 for alpha chain variable domain of TCR clone 76446 (TRAV2, TRAJ40)
CAVVTSGTYKYIF

SEQ ID NO: 152892 - protein, 14 aa, Homo sapiens
  CDR3 for beta chain variable domain of TCR clone 76446 (TRBV11-1, TRBJ2-7)
CASSFRQGSYEQYF

SEQ ID NO: 152893 - protein, 11 aa, Homo sapiens
  CDR3 for alpha chain variable domain of TCR clone 76447 (TRAV13-1, TRAJ52)
TGGTSYGKLTF

SEQ ID NO: 152894 - protein, 16 aa, Homo sapiens
  CDR3 for beta chain variable domain of TCR clone 76447 (TRBV28, TRBJ2-7)
CASSPWVATGDLSQYF

SEQ ID NO: 152895 - protein, 13 aa, Homo sapiens
  CDR3 for alpha chain variable domain of TCR clone 76448 (TRAV2, TRAJ15)
CAVASQAGTALIF

SEQ ID NO: 152896 - protein, 14 aa, Homo sapiens
  CDR3 for beta chain variable domain of TCR clone 76448 (TRBV19, TRBJ1-2)
CASEGTGVTYGYTF

SEQ ID NO: 152897 - protein, 12 aa, Homo sapiens
  CDR3 for alpha chain variable domain of TCR clone 76449 (TRAV2, TRAJ31)
CAVEDNNARLMF

SEQ ID NO: 152898 - protein, 16 aa, Homo sapiens
  CDR3 for beta chain variable domain of TCR clone 76449 (TRBV10-3, TRBJ2-1)
CDISGVGDGGGGEQFF

SEQ ID NO: 152899 - protein, 11 aa, Homo sapiens
  CDR3 for alpha chain variable domain of TCR clone 76450 (TRAV17, TRAJ36)
CAPTGANNLFF

SEQ ID NO: 152900 - protein, 13 aa, Homo sapiens
  CDR3 for beta chain variable domain of TCR clone 76450 (TRBV12-4, TRBJ2-7)
CASSPTETYEQYL

SEQ ID NO: 152901 - protein, 13 aa, Homo sapiens
  CDR3 for alpha chain variable domain of TCR clone 76451 (TRAV13-2, TRAJ53)
CAESMGSNYKLTF

SEQ ID NO: 152902 - protein, 13 aa, Homo sapiens
  CDR3 for beta chain variable domain of TCR clone 76451 (TRBV4-1, TRBJ2-2)
CASSQENTGELFF

SEQ ID NO: 152903 - protein, 10 aa, Homo sapiens
  CDR3 for alpha chain variable domain of TCR clone 76452 (TRAV23/DV6, TRAJ57)
CAASSTLSQG

SEQ ID NO: 152904 - protein, 15 aa, Homo sapiens
  CDR3 for beta chain variable domain of TCR clone 76452 (TRBV25-1, TRBJ1-4)
CASSPGDSNNEKLFF

SEQ ID NO: 152905 - protein, 15 aa, Homo sapiens
  CDR3 for alpha chain variable domain of TCR clone 76453 (TRAV21, TRAJ24)
CAARSSTDSWGKLQF

SEQ ID NO: 152906 - protein, 13 aa, Homo sapiens
  CDR3 for beta chain variable domain of TCR clone 76453 (TRBV11-2, TRBJ2-5)
CASSSTGEETQCF

SEQ ID NO: 152907 - protein, 13 aa, Homo sapiens
  CDR3 for alpha chain variable domain of TCR clone 76454 (TRAV12-2, TRAJ52)
CAVGGTSYGKLTS

SEQ ID NO: 152908 - protein, 14 aa, Homo sapiens
  CDR3 for beta chain variable domain of TCR clone 76454 (TRBV19, TRBJ2-1)
CASPTFVLSGEQFF

SEQ ID NO: 152909 - protein, 14 aa, Homo sapiens
  CDR3 for alpha chain variable domain of TCR clone 76455 (TRAV35, TRAJ13)
CAGSPSGGYQKVTF

SEQ ID NO: 152910 - protein, 13 aa, Homo sapiens
  CDR3 for beta chain variable domain of TCR clone 76455 (TRBV20-1, TRBJ1-1)
CSAPLGGGTEAFF

SEQ ID NO: 152911 - protein, 14 aa, Homo sapiens
  CDR3 for alpha chain variable domain of TCR clone 76456 (TRAV12-1, TRAJ17)
CVVDEGAAGNKLTF

SEQ ID NO: 152912 - protein, 13 aa, Homo sapiens
  CDR3 for beta chain variable domain of TCR clone 76456 (TRBV19, TRBJ2-1)
CATSRGVYNEQFF

SEQ ID NO: 152913 - protein, 14 aa, Homo sapiens
  CDR3 for alpha chain variable domain of TCR clone 76457 (TRAV12-2, TRAJ40)
CAVKIPSGTYKYIF

SEQ ID NO: 152914 - protein, 16 aa, Homo sapiens
  CDR3 for beta chain variable domain of TCR clone 76457 (TRBV20-1, TRBJ1-2)
CSASMGQGVANYGYTF

SEQ ID NO: 152915 - protein, 14 aa, Homo sapiens
  CDR3 for alpha chain variable domain of TCR clone 76458 (TRAV1-2, TRAJ16)
CAVNRFSDGQKLLF

SEQ ID NO: 152916 - protein, 16 aa, Homo sapiens
  CDR3 for beta chain variable domain of TCR clone 76458 (TRBV7-2, TRBJ2-1)
CASTLDSGGSRNEQFF

SEQ ID NO: 152917 - protein, 13 aa, Homo sapiens
  CDR3 for alpha chain variable domain of TCR clone 76459 (TRAV12-2, TRAJ12)
CAVNWDSSYKLIF

SEQ ID NO: 152918 - protein, 13 aa, Homo sapiens
  CDR3 for beta chain variable domain of TCR clone 76459 (TRBV7-8, TRBJ1-2)
CASSAQSYYGYTF

SEQ ID NO: 152919 - protein, 11 aa, Homo sapiens
  CDR3 for alpha chain variable domain of TCR clone 76460 (TRAV17, TRAJ31)
CATSNNARLMF

SEQ ID NO: 152920 - protein, 16 aa, Homo sapiens
  CDR3 for beta chain variable domain of TCR clone 76460 (TRBV7-8, TRBJ2-4)
CASSAERTPAKNIQYF

SEQ ID NO: 152921 - protein, 16 aa, Homo sapiens
  CDR3 for alpha chain variable domain of TCR clone 76461 (TRAV8-3, TRAJ8)
CAIPRDGNTGFQKLVF

SEQ ID NO: 152922 - protein, 15 aa, Homo sapiens
  CDR3 for beta chain variable domain of TCR clone 76461 (TRBV6-1, TRBJ2-6)
CASSSRPSGANVLTF

SEQ ID NO: 152923 - protein, 15 aa, Homo sapiens
  CDR3 for alpha chain variable domain of TCR clone 76462 (TRAV25, TRAJ53)
CAATGGGGSNYKLTF

SEQ ID NO: 152924 - protein, 14 aa, Homo sapiens
  CDR3 for beta chain variable domain of TCR clone 76462 (TRBV18, TRBJ2-5)
CASSPGVSQETQYF

SEQ ID NO: 152925 - protein, 12 aa, Homo sapiens
  CDR3 for alpha chain variable domain of TCR clone 76463 (TRAV1-1, TRAJ8)
CAGGTGFQKLVV

SEQ ID NO: 152926 - protein, 15 aa, Homo sapiens
  CDR3 for beta chain variable domain of TCR clone 76463 (TRBV7-9, TRBJ1-4)
CASSRTGGFNEKLFF

SEQ ID NO: 152927 - protein, 14 aa, Homo sapiens
  CDR3 for alpha chain variable domain of TCR clone 76464 (TRAV12-1, TRAJ12)
CVVFWMDSSYKLIF

SEQ ID NO: 152928 - protein, 13 aa, Homo sapiens
  CDR3 for beta chain variable domain of TCR clone 76464 (TRBV11-2, TRBJ2-7)
CASSTLDRYEQYF

SEQ ID NO: 152929 - protein, 12 aa, Homo sapiens
  CDR3 for alpha chain variable domain of TCR clone 76465 (TRAV1-1, TRAJ39)
CAVPVVGNMLTF

SEQ ID NO: 152930 - protein, 16 aa, Homo sapiens
  CDR3 for beta chain variable domain of TCR clone 76465 (TRBV28, TRBJ2-7)
CASSPWVATGDRSQYF

SEQ ID NO: 152931 - protein, 14 aa, Homo sapiens
  CDR3 for alpha chain variable domain of TCR clone 76466 (TRAV1-2, TRAJ8)
CAVREDTDFQKLVF

SEQ ID NO: 152932 - protein, 13 aa, Homo sapiens
  CDR3 for beta chain variable domain of TCR clone 76466 (TRBV12-4, TRBJ2-5)
CASRKRGKETQYF

SEQ ID NO: 152933 - protein, 11 aa, Homo sapiens
  CDR3 for alpha chain variable domain of TCR clone 76467 (TRAV21, TRAJ34)
CAVTNTDKLIF

SEQ ID NO: 152934 - protein, 12 aa, Homo sapiens
  CDR3 for beta chain variable domain of TCR clone 76467 (TRBV11-2, TRBJ2-1)
CASSPGNNEQFF

SEQ ID NO: 152935 - protein, 11 aa, Homo sapiens
  CDR3 for alpha chain variable domain of TCR clone 76468 (TRAV12-3, TRAJ27)
CAMANAGKSTF

SEQ ID NO: 152936 - protein, 16 aa, Homo sapiens
  CDR3 for beta chain variable domain of TCR clone 76468 (TRBV19, TRBJ2-1)
CASSKAGPSSYNEQFF

SEQ ID NO: 152937 - protein, 13 aa, Homo sapiens
  CDR3 for alpha chain variable domain of TCR clone 76469 (TRAV12-3, TRAJ46)
CAVKKSSGDKLTF

SEQ ID NO: 152938 - protein, 13 aa, Homo sapiens
  CDR3 for beta chain variable domain of TCR clone 76469 (TRBV6-1, TRBJ2-1)
CASSHDRKNEQFF

SEQ ID NO: 152939 - protein, 14 aa, Homo sapiens
  CDR3 for alpha chain variable domain of TCR clone 76470 (TRAV4, TRAJ12)
CLAGDADSSYKLIF

SEQ ID NO: 152940 - protein, 17 aa, Homo sapiens
  CDR3 for beta chain variable domain of TCR clone 76470 (TRBV13, TRBJ2-3)
CASSLSRVAGGRNTQYF

SEQ ID NO: 152941 - protein, 17 aa, Homo sapiens
  CDR3 for alpha chain variable domain of TCR clone 76471 (TRAV20, TRAJ28)
CAVQGGYSGAGRYQLTF

SEQ ID NO: 152942 - protein, 15 aa, Homo sapiens
  CDR3 for beta chain variable domain of TCR clone 76471 (TRBV7-2, TRBJ2-7)
CASSLSSGRTYEQYF

SEQ ID NO: 152943 - protein, 15 aa, Homo sapiens
  CDR3 for alpha chain variable domain of TCR clone 76472 (TRAV34, TRAJ36)
CGAPSRLGGANNPFF

SEQ ID NO: 152944 - protein, 16 aa, Homo sapiens
  CDR3 for beta chain variable domain of TCR clone 76472 (TRBV4-3, TRBJ2-1)
CASSYRRLGSWDEQFF

SEQ ID NO: 152945 - protein, 11 aa, Homo sapiens
  CDR3 for alpha chain variable domain of TCR clone 76473 (TRAV1-1, TRAJ23)
CAVRQGGKLIF

SEQ ID NO: 152946 - protein, 13 aa, Homo sapiens
  CDR3 for beta chain variable domain of TCR clone 76473 (TRBV12-4, TRBJ2-2)
RASSPLPPGELFF

SEQ ID NO: 152947 - protein, 13 aa, Homo sapiens
  CDR3 for alpha chain variable domain of TCR clone 76474 (TRAV26-2, TRAJ43)
CILRAVNNNDTRF

SEQ ID NO: 152948 - protein, 16 aa, Homo sapiens
  CDR3 for beta chain variable domain of TCR clone 76474 (TRBV7-6, TRBJ1-6)
CASSLSSRIGDSPLHF

SEQ ID NO: 152949 - protein, 15 aa, Homo sapiens
  CDR3 for alpha chain variable domain of TCR clone 76475 (TRAV35, TRAJ50)
CAGQLRKTSYDKVIF

SEQ ID NO: 152950 - protein, 12 aa, Homo sapiens
  CDR3 for beta chain variable domain of TCR clone 76475 (TRBV5-1, TRBJ2-5)
CASGLGLETQYF

SEQ ID NO: 152951 - protein, 14 aa, Homo sapiens
  CDR3 for alpha chain variable domain of TCR clone 76476 (TRAV12-2, TRAJ13)
CAVKKTGGYQKVTF

SEQ ID NO: 152952 - protein, 14 aa, Homo sapiens
  CDR3 for beta chain variable domain of TCR clone 76476 (TRBV7-2, TRBJ2-7)
CASSLYPGRYEQYF

SEQ ID NO: 152953 - protein, 14 aa, Homo sapiens
  CDR3 for alpha chain variable domain of TCR clone 76477 (TRAV16, TRAJ39)
CALRKNNAGNMLTF

SEQ ID NO: 152954 - protein, 16 aa, Homo sapiens
  CDR3 for beta chain variable domain of TCR clone 76477 (TRBV6-6, TRBJ2-1)
CASSYSFSGSYNEQFF

SEQ ID NO: 152955 - protein, 13 aa, Homo sapiens
  CDR3 for alpha chain variable domain of TCR clone 76478 (TRAV26-1, TRAJ34)
CIVRPWITDKLIF

SEQ ID NO: 152956 - protein, 15 aa, Homo sapiens
  CDR3 for beta chain variable domain of TCR clone 76478 (TRBV19, TRBJ1-1)
CASMGFRDVNTEAFF

SEQ ID NO: 152957 - protein, 13 aa, Homo sapiens
  CDR3 for alpha chain variable domain of TCR clone 76479 (TRAV26-1, TRAJ36)
CIVVGAGANNLFF

SEQ ID NO: 152958 - protein, 16 aa, Homo sapiens
  CDR3 for beta chain variable domain of TCR clone 76479 (TRBV10-3, TRBJ2-1)
CAISGVGDGGGGEQFF

SEQ ID NO: 152959 - protein, 17 aa, Homo sapiens
  CDR3 for alpha chain variable domain of TCR clone 76480 (TRAV36/DV7, TRAJ52)
CAVAQRAGGTSYGKLTF

SEQ ID NO: 152960 - protein, 15 aa, Homo sapiens
  CDR3 for beta chain variable domain of TCR clone 76480 (TRBV12-4, TRBJ2-5)
CASSPPTGLQETQYF

SEQ ID NO: 152961 - protein, 15 aa, Homo sapiens
  CDR3 for alpha chain variable domain of TCR clone 76481 (TRAV12-1, TRAJ44)
CVVDTPQGTASKLTF

SEQ ID NO: 152962 - protein, 13 aa, Homo sapiens
  CDR3 for beta chain variable domain of TCR clone 76481 (TRBV27, TRBJ2-1)
CASSSGFYNEQFF

SEQ ID NO: 152963 - protein, 16 aa, Homo sapiens
  CDR3 for alpha chain variable domain of TCR clone 76482 (TRAV14/DV4, TRAJ12)
CAMREVLMDSSYKLIF

SEQ ID NO: 152964 - protein, 20 aa, Homo sapiens
  CDR3 for beta chain variable domain of TCR clone 76482 (TRBV7-8, TRBJ2-2)
CASSHLFPGPTIHITGELFF

SEQ ID NO: 152965 - protein, 16 aa, Homo sapiens
  CDR3 for alpha chain variable domain of TCR clone 76483 (TRAV3, TRAJ10)
CAVRDIRAGGGNKLTF

SEQ ID NO: 152966 - protein, 14 aa, Homo sapiens
  CDR3 for beta chain variable domain of TCR clone 76483 (TRBV25-1, TRBJ1-1)
CASTHLGGNTEAFF

SEQ ID NO: 152967 - protein, 13 aa, Homo sapiens
  CDR3 for alpha chain variable domain of TCR clone 76484 (TRAV13-2, TRAJ53)
CAENMGVNYKLTF

SEQ ID NO: 152968 - protein, 13 aa, Homo sapiens
  CDR3 for beta chain variable domain of TCR clone 76484 (TRBV4-1, TRBJ2-2)
CASSQENTGELFF

SEQ ID NO: 152969 - protein, 13 aa, Homo sapiens
  CDR3 for alpha chain variable domain of TCR clone 76485 (TRAV8-3, TRAJ28)
CAVGAVGSYQLTI

SEQ ID NO: 152970 - protein, 14 aa, Homo sapiens
  CDR3 for beta chain variable domain of TCR clone 76485 (TRBV7-2, TRBJ2-7)
CASRSQGAAYEQYF

SEQ ID NO: 152971 - protein, 14 aa, Homo sapiens
  CDR3 for alpha chain variable domain of TCR clone 76486 (TRAV13-1, TRAJ40)
CAASMTSGTYKYIF

SEQ ID NO: 152972 - protein, 15 aa, Homo sapiens
  CDR3 for beta chain variable domain of TCR clone 76486 (TRBV6-3, TRBJ2-7)
CASSSPGTVFYEQYF

SEQ ID NO: 152973 - protein, 14 aa, Homo sapiens
  CDR3 for alpha chain variable domain of TCR clone 76487 (TRAV1-2, TRAJ16)
CAVNRFSDGLKLLF

SEQ ID NO: 152974 - protein, 13 aa, Homo sapiens
  CDR3 for beta chain variable domain of TCR clone 76487 (TRBV19, TRBJ1-2)
CASSVPGQDGYTF

SEQ ID NO: 152975 - protein, 12 aa, Homo sapiens
  CDR3 for alpha chain variable domain of TCR clone 76488 (TRAV12-2, TRAJ10)
WGVTGGGNKLTF

SEQ ID NO: 152976 - protein, 16 aa, Homo sapiens
  CDR3 for beta chain variable domain of TCR clone 76488 (TRBV6-4, TRBJ1-2)
CASSEAVGEPNYGYTF

SEQ ID NO: 152977 - protein, 11 aa, Homo sapiens
  CDR3 for alpha chain variable domain of TCR clone 76489 (TRAV3, TRAJ21)
CAVGNFNKFYS

SEQ ID NO: 152978 - protein, 13 aa, Homo sapiens
  CDR3 for beta chain variable domain of TCR clone 76489 (TRBV7-9, TRBJ1-2)
CASSLKQNYGYTF

SEQ ID NO: 152979 - protein, 14 aa, Homo sapiens
  CDR3 for alpha chain variable domain of TCR clone 76490 (TRAV1-1, TRAJ23)
CAVSIYNQGGKLIF

SEQ ID NO: 152980 - protein, 18 aa, Homo sapiens
  CDR3 for beta chain variable domain of TCR clone 76490 (TRBV6-3, TRBJ2-1)
CASSLLTSGRVSYNEQFF

SEQ ID NO: 152981 - protein, 10 aa, Homo sapiens
  CDR3 for alpha chain variable domain of TCR clone 76491 (TRAV35, TRAJ26)
CAGQRQNFVF

SEQ ID NO: 152982 - protein, 15 aa, Homo sapiens
  CDR3 for beta chain variable domain of TCR clone 76491 (TRBV20-1, TRBJ1-1)
CSASRGVTGNTEAFF

SEQ ID NO: 152983 - protein, 12 aa, Homo sapiens
  CDR3 for alpha chain variable domain of TCR clone 76492 (TRAV29/DV5, TRAJ49)
CAATDTGNQFYF

SEQ ID NO: 152984 - protein, 12 aa, Homo sapiens
  CDR3 for beta chain variable domain of TCR clone 76492 (TRBV11-2, TRBJ2-2)
CASSLGGGELFF

SEQ ID NO: 152985 - protein, 16 aa, Homo sapiens
  CDR3 for alpha chain variable domain of TCR clone 76493 (TRAV21, TRAJ45)
CAVSRGSGGGADGLTF

SEQ ID NO: 152986 - protein, 14 aa, Homo sapiens
  CDR3 for beta chain variable domain of TCR clone 76493 (TRBV4-2, TRBJ1-2)
CASSPGGSNYGYTF

SEQ ID NO: 152987 - protein, 14 aa, Homo sapiens
  CDR3 for alpha chain variable domain of TCR clone 76494 (TRAV12-2, TRAJ13)
CAVKKTGGYQKVTL

SEQ ID NO: 152988 - protein, 16 aa, Homo sapiens
  CDR3 for beta chain variable domain of TCR clone 76494 (TRBV27, TRBJ2-2)
CASSSSGVSNTGELFF

SEQ ID NO: 152989 - protein, 18 aa, Homo sapiens
  CDR3 for alpha chain variable domain of TCR clone 76495 (TRAV12-3, TRAJ52)
CAMSRTNAGGTSYGMLTF

SEQ ID NO: 152990 - protein, 17 aa, Homo sapiens
  CDR3 for beta chain variable domain of TCR clone 76495 (TRBV7-3, TRBJ2-3)
CASSLMKWMRGADTQYF

SEQ ID NO: 152991 - protein, 13 aa, Homo sapiens
  CDR3 for alpha chain variable domain of TCR clone 76496 (TRAV12-3, TRAJ29)
CAMTLSGNTPLVF

SEQ ID NO: 152992 - protein, 15 aa, Homo sapiens
  CDR3 for beta chain variable domain of TCR clone 76496 (TRBV28, TRBJ2-3)
CAPTFRDWSTDTQYF

SEQ ID NO: 152993 - protein, 12 aa, Homo sapiens
  CDR3 for alpha chain variable domain of TCR clone 76497 (TRAV5, TRAJ42)
CAVGGSQGNLSF

SEQ ID NO: 152994 - protein, 14 aa, Homo sapiens
  CDR3 for beta chain variable domain of TCR clone 76497 (TRBV10-2, TRBJ2-1)
CASSEGTSEDEQFL

SEQ ID NO: 152995 - protein, 13 aa, Homo sapiens
  CDR3 for alpha chain variable domain of TCR clone 76498 (TRAV21, TRAJ27)
CAARPGNAGNSTF

SEQ ID NO: 152996 - protein, 13 aa, Homo sapiens
  CDR3 for beta chain variable domain of TCR clone 76498 (TRBV18, TRBJ2-7)
CASQSGGGYEQYF

SEQ ID NO: 152997 - protein, 14 aa, Homo sapiens
  CDR3 for alpha chain variable domain of TCR clone 76499 (TRAV12-1, TRAJ27)
CGEHIRTNAGRSTF

SEQ ID NO: 152998 - protein, 15 aa, Homo sapiens
  CDR3 for beta chain variable domain of TCR clone 76499 (TRBV19, TRBJ1-1)
CASTSGQIQNTEAFF

SEQ ID NO: 152999 - protein, 23 aa, Homo sapiens
  CDR3 for alpha chain variable domain of TCR clone 76500 (TRAV26-1, TRAJ38)
CIADNAGNNHIQNPDPAVYQLSD

SEQ ID NO: 153000 - protein, 13 aa, Homo sapiens
  CDR3 for beta chain variable domain of TCR clone 76500 (TRBV10-3, TRBJ2-7)
CASKLAVNYEQYF

SEQ ID NO: 153001 - protein, 12 aa, Homo sapiens
  CDR3 for alpha chain variable domain of TCR clone 76501 (TRAV26-2, TRAJ21)
CILKGNFNKFYF

SEQ ID NO: 153002 - protein, 14 aa, Homo sapiens
  CDR3 for beta chain variable domain of TCR clone 76501 (TRBV7-9, TRBJ1-1)
CASTPLQSYTEAFV

SEQ ID NO: 153003 - protein, 16 aa, Homo sapiens
  CDR3 for alpha chain variable domain of TCR clone 76502 (TRAV23/DV6, TRAJ9)
CAASIGGNTGGFKTIF

SEQ ID NO: 153004 - protein, 15 aa, Homo sapiens
  CDR3 for beta chain variable domain of TCR clone 76502 (TRBV10-2, TRBJ2-6)
CASSEQGTGANVLTF

SEQ ID NO: 153005 - protein, 14 aa, Homo sapiens
  CDR3 for alpha chain variable domain of TCR clone 76503 (TRAV1-2, TRAJ16)
CAVNRFSDGQKLLF

SEQ ID NO: 153006 - protein, 16 aa, Homo sapiens
  CDR3 for beta chain variable domain of TCR clone 76503 (TRBV20-1, TRBJ1-4)
CSAPGQGLLTNETLFF

SEQ ID NO: 153007 - protein, 16 aa, Homo sapiens
  CDR3 for alpha chain variable domain of TCR clone 76504 (TRAV12-2, TRAJ10)
CAVNRVLTGGGNKLAF

SEQ ID NO: 153008 - protein, 12 aa, Homo sapiens
  CDR3 for beta chain variable domain of TCR clone 76504 (TRBV28, TRBJ2-7)
CASSFSSYEQYF

SEQ ID NO: 153009 - protein, 12 aa, Homo sapiens
  CDR3 for alpha chain variable domain of TCR clone 76505 (TRAV12-3, TRAJ17)
CAMTLTGNKLTF

SEQ ID NO: 153010 - protein, 14 aa, Homo sapiens
  CDR3 for beta chain variable domain of TCR clone 76505 (TRBV12-4, TRBJ1-1)
CASSLDGLNTEAFF

SEQ ID NO: 153011 - protein, 14 aa, Homo sapiens
  CDR3 for alpha chain variable domain of TCR clone 76506 (TRAV8-3, TRAJ21)
CAVDARDNFNKFYF

SEQ ID NO: 153012 - protein, 16 aa, Homo sapiens
  CDR3 for beta chain variable domain of TCR clone 76506 (TRBV20-1, TRBJ2-1)
CSARDLAGHPYNEQFF

SEQ ID NO: 153013 - protein, 14 aa, Homo sapiens
  CDR3 for alpha chain variable domain of TCR clone 76507 (TRAV9-2, TRAJ39)
CALYIYNAGNMLTF

SEQ ID NO: 153014 - protein, 14 aa, Homo sapiens
  CDR3 for beta chain variable domain of TCR clone 76507 (TRBV6-1, TRBJ1-3)
CASVQGGSGNTIYF

SEQ ID NO: 153015 - protein, 21 aa, Homo sapiens
  CDR3 for alpha chain variable domain of TCR clone 76508 (TRAV16, TRAJ22)
HLKKPFAQEEDSATYLRQLTF

SEQ ID NO: 153016 - protein, 15 aa, Homo sapiens
  CDR3 for beta chain variable domain of TCR clone 76508 (TRBV7-9, TRBJ1-6)
CASSSPGRGNSPLHF

SEQ ID NO: 153017 - protein, 15 aa, Homo sapiens
  CDR3 for alpha chain variable domain of TCR clone 76509 (TRAV21, TRAJ40)
CAVRPQTSGTYKYIF

SEQ ID NO: 153018 - protein, 14 aa, Homo sapiens
  CDR3 for beta chain variable domain of TCR clone 76509 (TRBV24-1, TRBJ1-1)
CATSIPRGDTEAFF

SEQ ID NO: 153019 - protein, 16 aa, Homo sapiens
  CDR3 for alpha chain variable domain of TCR clone 76510 (TRAV35, TRAJ28)
CAWQRYSGAGSYQLTF

SEQ ID NO: 153020 - protein, 13 aa, Homo sapiens
  CDR3 for beta chain variable domain of TCR clone 76510 (TRBV19, TRBJ1-2)
CASSQGQVYGYTF

SEQ ID NO: 153021 - protein, 13 aa, Homo sapiens
  CDR3 for alpha chain variable domain of TCR clone 76511 (TRAV17, TRAJ21)
CATDGGNFNKFYF

SEQ ID NO: 153022 - protein, 15 aa, Homo sapiens
  CDR3 for beta chain variable domain of TCR clone 76511 (TRBV5-1, TRBJ2-7)
CASSLMTSGSNEQYF

SEQ ID NO: 153023 - protein, 13 aa, Homo sapiens
  CDR3 for alpha chain variable domain of TCR clone 76512 (TRAV2, TRAJ40)
CAVVTSGTYKYIF

SEQ ID NO: 153024 - protein, 15 aa, Homo sapiens
  CDR3 for beta chain variable domain of TCR clone 76512 (TRBV11-3, TRBJ2-3)
CASLEEGREGDTQYF

SEQ ID NO: 153025 - protein, 12 aa, Homo sapiens
  CDR3 for alpha chain variable domain of TCR clone 76513 (TRAV12-3, TRAJ20)
CAMVRGDYKLSF

SEQ ID NO: 153026 - protein, 16 aa, Homo sapiens
  CDR3 for beta chain variable domain of TCR clone 76513 (TRBV7-3, TRBJ2-2)
CASSLKRGTLSGELFF

SEQ ID NO: 153027 - protein, 14 aa, Homo sapiens
  CDR3 for alpha chain variable domain of TCR clone 76514 (TRAV12-3, TRAJ33)
CAMSAGDSNYQLIW

SEQ ID NO: 153028 - protein, 16 aa, Homo sapiens
  CDR3 for beta chain variable domain of TCR clone 76514 (TRBV28, TRBJ2-7)
CTSVPAKRGGVYEQYF

SEQ ID NO: 153029 - protein, 11 aa, Homo sapiens
  CDR3 for alpha chain variable domain of TCR clone 76515 (TRAV2, TRAJ33)
CAVDSNYQLIW

SEQ ID NO: 153030 - protein, 11 aa, Homo sapiens
  CDR3 for beta chain variable domain of TCR clone 76515 (TRBV19, TRBJ1-1)
CASSIGSEAFF

SEQ ID NO: 153031 - protein, 12 aa, Homo sapiens
  CDR3 for alpha chain variable domain of TCR clone 76516 (TRAV21, TRAJ37)
CAVRGNAGKLIF

SEQ ID NO: 153032 - protein, 14 aa, Homo sapiens
  CDR3 for beta chain variable domain of TCR clone 76516 (TRBV19, TRBJ2-1)
CASEVTGARNEQFF

SEQ ID NO: 153033 - protein, 14 aa, Homo sapiens
  CDR3 for alpha chain variable domain of TCR clone 76517 (TRAV12-1, TRAJ6)
CVVARIRRKLHTYI

SEQ ID NO: 153034 - protein, 15 aa, Homo sapiens
  CDR3 for beta chain variable domain of TCR clone 76517 (TRBV7-3, TRBJ2-1)
CASSLKASEYNERLF

SEQ ID NO: 153035 - protein, 14 aa, Homo sapiens
  CDR3 for alpha chain variable domain of TCR clone 76518 (TRAV1-2, TRAJ16)
CAVNRFSDGQKLPF

SEQ ID NO: 153036 - protein, 13 aa, Homo sapiens
  CDR3 for beta chain variable domain of TCR clone 76518 (TRBV10-3, TRBJ2-7)
CASRLAVNYEQYF

SEQ ID NO: 153037 - protein, 12 aa, Homo sapiens
  CDR3 for alpha chain variable domain of TCR clone 76519 (TRAV8-4, TRAJ43)
CAVGVNNNDMRF

SEQ ID NO: 153038 - protein, 13 aa, Homo sapiens
  CDR3 for beta chain variable domain of TCR clone 76519 (TRBV7-9, TRBJ1-2)
CASSLKQNYGYTF

SEQ ID NO: 153039 - protein, 12 aa, Homo sapiens
  CDR3 for alpha chain variable domain of TCR clone 76520 (TRAV8-3, TRAJ20)
CAVGANDYKLSF

SEQ ID NO: 153040 - protein, 15 aa, Homo sapiens
  CDR3 for beta chain variable domain of TCR clone 76520 (TRBV11-2, TRBJ1-6)
CASSLDPWAVSPLHF

SEQ ID NO: 153041 - protein, 14 aa, Homo sapiens
  CDR3 for alpha chain variable domain of TCR clone 76521 (TRAV12-3, TRAJ10)
SHLPLTGGGNKLTF

SEQ ID NO: 153042 - protein, 14 aa, Homo sapiens
  CDR3 for beta chain variable domain of TCR clone 76521 (TRBV6-1, TRBJ1-3)
CASVQGGGGNTIHF

SEQ ID NO: 153043 - protein, 14 aa, Homo sapiens
  CDR3 for alpha chain variable domain of TCR clone 76522 (TRAV12-3, TRAJ10)
SHLPLTGGGNKLTF

SEQ ID NO: 153044 - protein, 14 aa, Homo sapiens
  CDR3 for beta chain variable domain of TCR clone 76522 (TRBV27, TRBJ2-1)
CAGSIAETYNEQFF

SEQ ID NO: 153045 - protein, 12 aa, Homo sapiens
  CDR3 for alpha chain variable domain of TCR clone 76523 (TRAV12-3, TRAJ17)
CAMTLTGNKLTF

SEQ ID NO: 153046 - protein, 15 aa, Homo sapiens
  CDR3 for beta chain variable domain of TCR clone 76523 (TRBV7-3, TRBJ2-1)
CASSYSTSAHNEQFF

SEQ ID NO: 153047 - protein, 16 aa, Homo sapiens
  CDR3 for alpha chain variable domain of TCR clone 76524 (TRAV12-1, TRAJ12)
CVVNTLLMDSSYKLIF

SEQ ID NO: 153048 - protein, 12 aa, Homo sapiens
  CDR3 for beta chain variable domain of TCR clone 76524 (TRBV11-2, TRBJ2-2)
CASSLPTGELFF

SEQ ID NO: 153049 - protein, 11 aa, Homo sapiens
  CDR3 for alpha chain variable domain of TCR clone 76525 (TRAV2, TRAJ13)
CASGGYQKVTF

SEQ ID NO: 153050 - protein, 18 aa, Homo sapiens
  CDR3 for beta chain variable domain of TCR clone 76525 (TRBV28, TRBJ2-1)
CASSSPSGLAGAIYEQFF

SEQ ID NO: 153051 - protein, 11 aa, Homo sapiens
  CDR3 for alpha chain variable domain of TCR clone 76526 (TRAV2, TRAJ33)
CAVESNYQLIW

SEQ ID NO: 153052 - protein, 17 aa, Homo sapiens
  CDR3 for beta chain variable domain of TCR clone 76526 (TRBV13, TRBJ2-3)
CASSLSRVAGGRSTQYF

SEQ ID NO: 153053 - protein, 14 aa, Homo sapiens
  CDR3 for alpha chain variable domain of TCR clone 76527 (TRAV8-4, TRAJ13)
CAVTLSGGYQKVTF

SEQ ID NO: 153054 - protein, 14 aa, Homo sapiens
  CDR3 for beta chain variable domain of TCR clone 76527 (TRBV28, TRBJ1-4)
CASSFGTFDEKLFF

SEQ ID NO: 153055 - protein, 15 aa, Homo sapiens
  CDR3 for alpha chain variable domain of TCR clone 76528 (TRAV25, TRAJ53)
CPTSNSGGSNYKLTF

SEQ ID NO: 153056 - protein, 14 aa, Homo sapiens
  CDR3 for beta chain variable domain of TCR clone 76528 (TRBV11-2, TRBJ2-3)
CASSRLARTDTQYS

SEQ ID NO: 153057 - protein, 14 aa, Homo sapiens
  CDR3 for alpha chain variable domain of TCR clone 76529 (TRAV38-1, TRAJ40)
CALRPTSGTYKYIF

SEQ ID NO: 153058 - protein, 15 aa, Homo sapiens
  CDR3 for beta chain variable domain of TCR clone 76529 (TRBV12-4, TRBJ2-5)
CASSPPTGLQETQYF

SEQ ID NO: 153059 - protein, 14 aa, Homo sapiens
  CDR3 for alpha chain variable domain of TCR clone 76530 (TRAV8-2, TRAJ4)
CVVSPSGGYNKLIL

SEQ ID NO: 153060 - protein, 14 aa, Homo sapiens
  CDR3 for beta chain variable domain of TCR clone 76530 (TRBV19, TRBJ2-5)
CASSSSGIQETQYF

SEQ ID NO: 153061 - protein, 13 aa, Homo sapiens
  CDR3 for alpha chain variable domain of TCR clone 76531 (TRAV27, TRAJ49)
CAPRPYTGNQFYF

SEQ ID NO: 153062 - protein, 16 aa, Homo sapiens
  CDR3 for beta chain variable domain of TCR clone 76531 (TRBV4-1, TRBJ1-2)
CSSSQDAGQVLYGYTF

SEQ ID NO: 153063 - protein, 14 aa, Homo sapiens
  CDR3 for alpha chain variable domain of TCR clone 76532 (TRAV1-2, TRAJ8)
CAVREDTGFQKLVF

SEQ ID NO: 153064 - protein, 13 aa, Homo sapiens
  CDR3 for beta chain variable domain of TCR clone 76532 (TRBV7-9, TRBJ2-7)
CASSFAGAYEQYF

SEQ ID NO: 153065 - protein, 15 aa, Homo sapiens
  CDR3 for alpha chain variable domain of TCR clone 76533 (TRAV17, TRAJ57)
CATGPSQGGSEKLAF

SEQ ID NO: 153066 - protein, 15 aa, Homo sapiens
  CDR3 for beta chain variable domain of TCR clone 76533 (TRBV25-1, TRBJ1-4)
CASSPGDSTNEKLFF

SEQ ID NO: 153067 - protein, 14 aa, Homo sapiens
  CDR3 for alpha chain variable domain of TCR clone 76534 (TRAV12-2, TRAJ17)
CAVLFKAAGNKLTF

SEQ ID NO: 153068 - protein, 17 aa, Homo sapiens
  CDR3 for beta chain variable domain of TCR clone 76534 (TRBV20-1, TRBJ2-2)
CSASGSGQGGLTGELCF

SEQ ID NO: 153069 - protein, 12 aa, Homo sapiens
  CDR3 for alpha chain variable domain of TCR clone 76535 (TRAV12-3, TRAJ17)
CAMTLTGNKLTF

SEQ ID NO: 153070 - protein, 14 aa, Homo sapiens
  CDR3 for beta chain variable domain of TCR clone 76535 (TRBV5-1, TRBJ1-2)
CASSLEPVNYGYTF

SEQ ID NO: 153071 - protein, 13 aa, Homo sapiens
  CDR3 for alpha chain variable domain of TCR clone 76536 (TRAV12-1, TRAJ47)
CVVNMEYGNKLVF

SEQ ID NO: 153072 - protein, 13 aa, Homo sapiens
  CDR3 for beta chain variable domain of TCR clone 76536 (TRBV7-2, TRBJ2-7)
CASSSPSGSEQYF

SEQ ID NO: 153073 - protein, 17 aa, Homo sapiens
  CDR3 for alpha chain variable domain of TCR clone 76537 (TRAV13-1, TRAJ52)
CAAGSNAGGTSYGKLTF

SEQ ID NO: 153074 - protein, 13 aa, Homo sapiens
  CDR3 for beta chain variable domain of TCR clone 76537 (TRBV7-2, TRBJ1-1)
CASNLKGAKVAFF

SEQ ID NO: 153075 - protein, 16 aa, Homo sapiens
  CDR3 for alpha chain variable domain of TCR clone 76538 (TRAV22, TRAJ45)
CAVERGKRGGADGLTF

SEQ ID NO: 153076 - protein, 11 aa, Homo sapiens
  CDR3 for beta chain variable domain of TCR clone 76538 (TRBV29-1, TRBJ2-5)
CSQDRTGTQYF

SEQ ID NO: 153077 - protein, 16 aa, Homo sapiens
  CDR3 for alpha chain variable domain of TCR clone 76539 (TRAV8-3, TRAJ13)
CAVGAYPSRGYQKVTF

SEQ ID NO: 153078 - protein, 13 aa, Homo sapiens
  CDR3 for beta chain variable domain of TCR clone 76539 (TRBV7-2, TRBJ2-2)
CASSLAVTGELFF

SEQ ID NO: 153079 - protein, 12 aa, Homo sapiens
  CDR3 for alpha chain variable domain of TCR clone 76540 (TRAV3, TRAJ27)
CAVRDKAGISTF

SEQ ID NO: 153080 - protein, 14 aa, Homo sapiens
  CDR3 for beta chain variable domain of TCR clone 76540 (TRBV5-1, TRBJ1-2)
CASSVDSTNYGYTF

SEQ ID NO: 153081 - protein, 14 aa, Homo sapiens
  CDR3 for alpha chain variable domain of TCR clone 76541 (TRAV8-1, TRAJ5)
CAVSMDTGRRALTF

SEQ ID NO: 153082 - protein, 15 aa, Homo sapiens
  CDR3 for beta chain variable domain of TCR clone 76541 (TRBV19, TRBJ2-4)
CASRGPRRGENIQCF

SEQ ID NO: 153083 - protein, 14 aa, Homo sapiens
  CDR3 for alpha chain variable domain of TCR clone 76542 (TRAV26-1, TRAJ45)
CIEVTGGGADGPTF

SEQ ID NO: 153084 - protein, 19 aa, Homo sapiens
  CDR3 for beta chain variable domain of TCR clone 76542 (TRBV19, TRBJ2-2)
CASTRPGLAGGRVTGELFF

SEQ ID NO: 153085 - protein, 12 aa, Homo sapiens
  CDR3 for alpha chain variable domain of TCR clone 76543 (TRAV13-2, TRAJ23)
CAERHRGGKLIF

SEQ ID NO: 153086 - protein, 16 aa, Homo sapiens
  CDR3 for beta chain variable domain of TCR clone 76543 (TRBV12-4, TRBJ2-5)
CASSFFVRGRQETQYF

SEQ ID NO: 153087 - protein, 12 aa, Homo sapiens
  CDR3 for alpha chain variable domain of TCR clone 76544 (TRAV3, TRAJ34)
CAVLGNTDKLIF

SEQ ID NO: 153088 - protein, 13 aa, Homo sapiens
  CDR3 for beta chain variable domain of TCR clone 76544 (TRBV19, TRBJ2-1)
CASSIGTSNEQFF

SEQ ID NO: 153089 - protein, 11 aa, Homo sapiens
  CDR3 for alpha chain variable domain of TCR clone 76545 (TRAV12-2, TRAJ43)
CASPIGNDMHF

SEQ ID NO: 153090 - protein, 12 aa, Homo sapiens
  CDR3 for beta chain variable domain of TCR clone 76545 (TRBV7-3, TRBJ1-2)
CQQLKRGYGYTF

SEQ ID NO: 153091 - protein, 10 aa, Homo sapiens
  CDR3 for alpha chain variable domain of TCR clone 76546 (TRAV23/DV6, TRAJ57)
CAASSTLPQG

SEQ ID NO: 153092 - protein, 14 aa, Homo sapiens
  CDR3 for beta chain variable domain of TCR clone 76546 (TRBV25-1, TRBJ1-1)
CASTHLGGNSEAFF

SEQ ID NO: 153093 - protein, 15 aa, Homo sapiens
  CDR3 for alpha chain variable domain of TCR clone 76547 (TRAV17, TRAJ57)
CATGPSQGGSEKLVF

SEQ ID NO: 153094 - protein, 15 aa, Homo sapiens
  CDR3 for beta chain variable domain of TCR clone 76547 (TRBV25-1, TRBJ1-4)
CAGSPGDSTNEKLFF

SEQ ID NO: 153095 - protein, 12 aa, Homo sapiens
  CDR3 for alpha chain variable domain of TCR clone 76548 (TRAV13-1, TRAJ9)
CASHTGGFKTIF

SEQ ID NO: 153096 - protein, 15 aa, Homo sapiens
  CDR3 for beta chain variable domain of TCR clone 76548 (TRBV4-1, TRBJ1-4)
CASSDTGGTNEKLFF

SEQ ID NO: 153097 - protein, 14 aa, Homo sapiens
  CDR3 for alpha chain variable domain of TCR clone 76549 (TRAV34, TRAJ44)
CGADGTGTASKLTF

SEQ ID NO: 153098 - protein, 14 aa, Homo sapiens
  CDR3 for beta chain variable domain of TCR clone 76549 (TRBV7-8, TRBJ2-7)
CASSPRDRVYEQYF

SEQ ID NO: 153099 - protein, 15 aa, Homo sapiens
  CDR3 for alpha chain variable domain of TCR clone 76550 (TRAV21, TRAJ52)
CAVRGGGTSYGKLTF

SEQ ID NO: 153100 - protein, 15 aa, Homo sapiens
  CDR3 for beta chain variable domain of TCR clone 76550 (TRBV18, TRBJ1-5)
CASSPSDRSNKPQHF

SEQ ID NO: 153101 - protein, 13 aa, Homo sapiens
  CDR3 for alpha chain variable domain of TCR clone 76551 (TRAV2, TRAJ40)
CAVVTSGTYKYIF

SEQ ID NO: 153102 - protein, 14 aa, Homo sapiens
  CDR3 for beta chain variable domain of TCR clone 76551 (TRBV5-1, TRBJ2-4)
CASSPQGGQNIQYF

SEQ ID NO: 153103 - protein, 15 aa, Homo sapiens
  CDR3 for alpha chain variable domain of TCR clone 76552 (TRAV26-1, TRAJ44)
CIVRANTGTASKLTF

SEQ ID NO: 153104 - protein, 16 aa, Homo sapiens
  CDR3 for beta chain variable domain of TCR clone 76552 (TRBV2, TRBJ2-3)
CASSTSVEGVTDTQYF

SEQ ID NO: 153105 - protein, 14 aa, Homo sapiens
  CDR3 for alpha chain variable domain of TCR clone 76553 (TRAV1-2, TRAJ16)
CAVNRFSDGQKLLF

SEQ ID NO: 153106 - protein, 13 aa, Homo sapiens
  CDR3 for beta chain variable domain of TCR clone 76553 (TRBV24-1, TRBJ2-1)
CATSAGPYNEQFF

SEQ ID NO: 153107 - protein, 15 aa, Homo sapiens
  CDR3 for alpha chain variable domain of TCR clone 76554 (TRAV3, TRAJ22)
CAVRDRGGSARQLTF

SEQ ID NO: 153108 - protein, 13 aa, Homo sapiens
  CDR3 for beta chain variable domain of TCR clone 76554 (TRBV7-3, TRBJ2-1)
CASSPVAYNEKFF

SEQ ID NO: 153109 - protein, 15 aa, Homo sapiens
  CDR3 for alpha chain variable domain of TCR clone 76555 (TRAV12-1, TRAJ44)
SVADLPTGTASKLTF

SEQ ID NO: 153110 - protein, 13 aa, Homo sapiens
  CDR3 for beta chain variable domain of TCR clone 76555 (TRBV6-5, TRBJ2-5)
CASSPQGGETQYF

SEQ ID NO: 153111 - protein, 11 aa, Homo sapiens
  CDR3 for alpha chain variable domain of TCR clone 76556 (TRAV12-3, TRAJ27)
CTMANAGKSTF

SEQ ID NO: 153112 - protein, 13 aa, Homo sapiens
  CDR3 for beta chain variable domain of TCR clone 76556 (TRBV3-1, TRBJ1-1)
CASSPGVITEAFF

SEQ ID NO: 153113 - protein, 14 aa, Homo sapiens
  CDR3 for alpha chain variable domain of TCR clone 76557 (TRAV13-1, TRAJ35)
CPASKGGFGNVPHC

SEQ ID NO: 153114 - protein, 13 aa, Homo sapiens
  CDR3 for beta chain variable domain of TCR clone 76557 (TRBV7-3, TRBJ1-1)
CASSQDWGAEAFF

SEQ ID NO: 153115 - protein, 14 aa, Homo sapiens
  CDR3 for alpha chain variable domain of TCR clone 76558 (TRAV1-2, TRAJ8)
CAVREDTGFQKLVF

SEQ ID NO: 153116 - protein, 15 aa, Homo sapiens
  CDR3 for beta chain variable domain of TCR clone 76558 (TRBV7-3, TRBJ2-2)
CASSETGQGTGQLFF

SEQ ID NO: 153117 - protein, 15 aa, Homo sapiens
  CDR3 for alpha chain variable domain of TCR clone 76559 (TRAV3, TRAJ32)
CAGSSYGGATNKLIF

SEQ ID NO: 153118 - protein, 13 aa, Homo sapiens
  CDR3 for beta chain variable domain of TCR clone 76559 (TRBV20-1, TRBJ2-7)
CSARPSTNYEQYF

SEQ ID NO: 153119 - protein, 13 aa, Homo sapiens
  CDR3 for alpha chain variable domain of TCR clone 76560 (TRAV2, TRAJ15)
CAVASQAGTALIF

SEQ ID NO: 153120 - protein, 13 aa, Homo sapiens
  CDR3 for beta chain variable domain of TCR clone 76560 (TRBV7-9, TRBJ2-7)
CASSFAGAYEQYF

SEQ ID NO: 153121 - protein, 13 aa, Homo sapiens
  CDR3 for alpha chain variable domain of TCR clone 76561 (TRAV27, TRAJ45)
CRSSGGGADGLTF

SEQ ID NO: 153122 - protein, 13 aa, Homo sapiens
  CDR3 for beta chain variable domain of TCR clone 76561 (TRBV15, TRBJ1-6)
CATSGGLNSPLHF

SEQ ID NO: 153123 - protein, 13 aa, Homo sapiens
  CDR3 for alpha chain variable domain of TCR clone 76562 (TRAV12-1, TRAJ17)
CVVNKAAGNKLNF

SEQ ID NO: 153124 - protein, 16 aa, Homo sapiens
  CDR3 for beta chain variable domain of TCR clone 76562 (TRBV11-2, TRBJ2-2)
CASSLRTGNLIGELFF

SEQ ID NO: 153125 - protein, 13 aa, Homo sapiens
  CDR3 for alpha chain variable domain of TCR clone 76563 (TRAV23/DV6, TRAJ22)
CAPYSGSARQLTF

SEQ ID NO: 153126 - protein, 15 aa, Homo sapiens
  CDR3 for beta chain variable domain of TCR clone 76563 (TRBV11-2, TRBJ1-6)
CASSLDPWAVSPLHV

SEQ ID NO: 153127 - protein, 13 aa, Homo sapiens
  CDR3 for alpha chain variable domain of TCR clone 76564 (TRAV20, TRAJ21)
CAVEEYNFNKFYF

SEQ ID NO: 153128 - protein, 14 aa, Homo sapiens
  CDR3 for beta chain variable domain of TCR clone 76564 (TRBV3-1, TRBJ2-5)
CASSQGPDQETQYF

SEQ ID NO: 153129 - protein, 12 aa, Homo sapiens
  CDR3 for alpha chain variable domain of TCR clone 76565 (TRAV13-2, TRAJ39)
CAESRPGNMPTF

SEQ ID NO: 153130 - protein, 15 aa, Homo sapiens
  CDR3 for beta chain variable domain of TCR clone 76565 (TRBV9, TRBJ1-6)
CASSVAGTGDSPLHF

SEQ ID NO: 153131 - protein, 12 aa, Homo sapiens
  CDR3 for alpha chain variable domain of TCR clone 76566 (TRAV12-1, TRAJ20)
CVVNPDDYKLSL

SEQ ID NO: 153132 - protein, 15 aa, Homo sapiens
  CDR3 for beta chain variable domain of TCR clone 76566 (TRBV11-3, TRBJ2-2)
CASSLVGTGAGELFF

SEQ ID NO: 153133 - protein, 17 aa, Homo sapiens
  CDR3 for alpha chain variable domain of TCR clone 76567 (TRAV26-2, TRAJ42)
CILRDVGYGGSQGHLIF

SEQ ID NO: 153134 - protein, 16 aa, Homo sapiens
  CDR3 for beta chain variable domain of TCR clone 76567 (TRBV12-4, TRBJ2-7)
CASSLIGGTGTYEQYF

SEQ ID NO: 153135 - protein, 14 aa, Homo sapiens
  CDR3 for alpha chain variable domain of TCR clone 76568 (TRAV2, TRAJ37)
CAVDYTSNTGKLIF

SEQ ID NO: 153136 - protein, 15 aa, Homo sapiens
  CDR3 for beta chain variable domain of TCR clone 76568 (TRBV20-1, TRBJ1-1)
CSASRGVTGNTEAFF

SEQ ID NO: 153137 - protein, 14 aa, Homo sapiens
  CDR3 for alpha chain variable domain of TCR clone 76569 (TRAV12-1, TRAJ9)
CVVTGYTGGFKTIF

SEQ ID NO: 153138 - protein, 14 aa, Homo sapiens
  CDR3 for beta chain variable domain of TCR clone 76569 (TRBV7-2, TRBJ2-7)
CASSPKTSFYEQYF

SEQ ID NO: 153139 - protein, 14 aa, Homo sapiens
  CDR3 for alpha chain variable domain of TCR clone 76570 (TRAV13-1, TRAJ35)
CAASKGGFGNVLHC

SEQ ID NO: 153140 - protein, 12 aa, Homo sapiens
  CDR3 for beta chain variable domain of TCR clone 76570 (TRBV19, TRBJ1-1)
CASSIGTEEAFF

SEQ ID NO: 153141 - protein, 14 aa, Homo sapiens
  CDR3 for alpha chain variable domain of TCR clone 76571 (TRAV26-1, TRAJ34)
CIVIVAYNTDKPIF

SEQ ID NO: 153142 - protein, 15 aa, Homo sapiens
  CDR3 for beta chain variable domain of TCR clone 76571 (TRBV20-1, TRBJ2-7)
CSARVPAAYFYKQYF

SEQ ID NO: 153143 - protein, 12 aa, Homo sapiens
  CDR3 for alpha chain variable domain of TCR clone 76572 (TRAV8-3, TRAJ40)
CAVTSGSYKYIF

SEQ ID NO: 153144 - protein, 14 aa, Homo sapiens
  CDR3 for beta chain variable domain of TCR clone 76572 (TRBV12-4, TRBJ2-3)
CASSGQGSTDTQYF

SEQ ID NO: 153145 - protein, 17 aa, Homo sapiens
  CDR3 for alpha chain variable domain of TCR clone 76573 (TRAV12-2, TRAJ6)
CAPQGPPRPGGSYIPTF

SEQ ID NO: 153146 - protein, 16 aa, Homo sapiens
  CDR3 for beta chain variable domain of TCR clone 76573 (TRBV19, TRBJ2-2)
CASSTARASNTGELFF

SEQ ID NO: 153147 - protein, 17 aa, Homo sapiens
  CDR3 for alpha chain variable domain of TCR clone 76574 (TRAV3, TRAJ6)
CAVRDGPRAGGSNIPTL

SEQ ID NO: 153148 - protein, 14 aa, Homo sapiens
  CDR3 for beta chain variable domain of TCR clone 76574 (TRBV7-2, TRBJ2-7)
CASSPKTSFYEQYF

SEQ ID NO: 153149 - protein, 14 aa, Homo sapiens
  CDR3 for alpha chain variable domain of TCR clone 76575 (TRAV26-1, TRAJ39)
CIVRGSRAGNMLTF

SEQ ID NO: 153150 - protein, 15 aa, Homo sapiens
  CDR3 for beta chain variable domain of TCR clone 76575 (TRBV7-9, TRBJ1-5)
CARSQGHQPNQPQHF

SEQ ID NO: 153151 - protein, 12 aa, Homo sapiens
  CDR3 for alpha chain variable domain of TCR clone 76576 (TRAV12-1, TRAJ40)
CVVYSGTYKYII

SEQ ID NO: 153152 - protein, 18 aa, Homo sapiens
  CDR3 for beta chain variable domain of TCR clone 76576 (TRBV11-2, TRBJ2-3)
CASSLGGASRGAPNTQYF

SEQ ID NO: 153153 - protein, 16 aa, Homo sapiens
  CDR3 for alpha chain variable domain of TCR clone 76577 (TRAV17, TRAJ28)
CATDEYSGAGSYKLTF

SEQ ID NO: 153154 - protein, 13 aa, Homo sapiens
  CDR3 for beta chain variable domain of TCR clone 76577 (TRBV7-9, TRBJ1-2)
CASRTGPNYGYTF

SEQ ID NO: 153155 - protein, 16 aa, Homo sapiens
  CDR3 for alpha chain variable domain of TCR clone 76578 (TRAV1-2, TRAJ10)
CAVRGVLTGGGNKLTF

SEQ ID NO: 153156 - protein, 14 aa, Homo sapiens
  CDR3 for beta chain variable domain of TCR clone 76578 (TRBV27, TRBJ2-1)
CASSATGGYNEQFF

SEQ ID NO: 153157 - protein, 13 aa, Homo sapiens
  CDR3 for alpha chain variable domain of TCR clone 76579 (TRAV21, TRAJ27)
CAARPGNAGKSTF

SEQ ID NO: 153158 - protein, 16 aa, Homo sapiens
  CDR3 for beta chain variable domain of TCR clone 76579 (TRBV20-1, TRBJ1-2)
RSASMGQGVANYGYTF

SEQ ID NO: 153159 - protein, 14 aa, Homo sapiens
  CDR3 for alpha chain variable domain of TCR clone 76580 (TRAV2, TRAJ37)
CAVDFTSNTGTLIF

SEQ ID NO: 153160 - protein, 13 aa, Homo sapiens
  CDR3 for beta chain variable domain of TCR clone 76580 (TRBV20-1, TRBJ1-1)
CSAPLGGGTEAFF

SEQ ID NO: 153161 - protein, 10 aa, Homo sapiens
  CDR3 for alpha chain variable domain of TCR clone 76581 (TRAV26-1, TRAJ22)
FIVSLNFFWF

SEQ ID NO: 153162 - protein, 15 aa, Homo sapiens
  CDR3 for beta chain variable domain of TCR clone 76581 (TRBV4-2, TRBJ1-2)
CASSQRTGGRDGYTF

SEQ ID NO: 153163 - protein, 18 aa, Homo sapiens
  CDR3 for alpha chain variable domain of TCR clone 76582 (TRAV9-2, TRAJ52)
CALSRHNAGGTSYGKLTF

SEQ ID NO: 153164 - protein, 13 aa, Homo sapiens
  CDR3 for beta chain variable domain of TCR clone 76582 (TRBV7-9, TRBJ1-2)
CASSLKQDYGYTF

SEQ ID NO: 153165 - protein, 10 aa, Homo sapiens
  CDR3 for alpha chain variable domain of TCR clone 76583 (TRAV12-1, TRAJ37)
ARGNTGKLIF

SEQ ID NO: 153166 - protein, 15 aa, Homo sapiens
  CDR3 for beta chain variable domain of TCR clone 76583 (TRBV7-8, TRBJ2-3)
CASSLEQGGTDTQYF

SEQ ID NO: 153167 - protein, 12 aa, Homo sapiens
  CDR3 for alpha chain variable domain of TCR clone 76584 (TRAV1-2, TRAJ29)
CAVPSGNTPLVF

SEQ ID NO: 153168 - protein, 14 aa, Homo sapiens
  CDR3 for beta chain variable domain of TCR clone 76584 (TRBV25-1, TRBJ1-1)
CASTHLGGNTEAFF

SEQ ID NO: 153169 - protein, 13 aa, Homo sapiens
  CDR3 for alpha chain variable domain of TCR clone 76585 (TRAV2, TRAJ40)
CAVVTSGTYKYIF

SEQ ID NO: 153170 - protein, 13 aa, Homo sapiens
  CDR3 for beta chain variable domain of TCR clone 76585 (TRBV11-2, TRBJ2-5)
CASSRGPSETQYF

SEQ ID NO: 153171 - protein, 15 aa, Homo sapiens
  CDR3 for alpha chain variable domain of TCR clone 76586 (TRAV12-3, TRAJ6)
CAMSATSGGSYIPTF

SEQ ID NO: 153172 - protein, 17 aa, Homo sapiens
  CDR3 for beta chain variable domain of TCR clone 76586 (TRBV7-8, TRBJ2-6)
CASSAGTGGAGANVLTF

SEQ ID NO: 153173 - protein, 12 aa, Homo sapiens
  CDR3 for alpha chain variable domain of TCR clone 76587 (TRAV30, TRAJ43)
CGTEERGNDMRF

SEQ ID NO: 153174 - protein, 14 aa, Homo sapiens
  CDR3 for beta chain variable domain of TCR clone 76587 (TRBV12-5, TRBJ2-5)
CASGSRTHQETQYF

SEQ ID NO: 153175 - protein, 12 aa, Homo sapiens
  CDR3 for alpha chain variable domain of TCR clone 76588 (TRAV1-1, TRAJ30)
FAVRGRDDKIIF

SEQ ID NO: 153176 - protein, 13 aa, Homo sapiens
  CDR3 for beta chain variable domain of TCR clone 76588 (TRBV11-3, TRBJ2-7)
CASSLDKLYEQYF

SEQ ID NO: 153177 - protein, 13 aa, Homo sapiens
  CDR3 for alpha chain variable domain of TCR clone 76589 (TRAV27, TRAJ45)
CRSSGGGADGLTF

SEQ ID NO: 153178 - protein, 11 aa, Homo sapiens
  CDR3 for beta chain variable domain of TCR clone 76589 (TRBV19, TRBJ1-1)
YASSIGSEAFF

SEQ ID NO: 153179 - protein, 12 aa, Homo sapiens
  CDR3 for alpha chain variable domain of TCR clone 76590 (TRAV8-4, TRAJ37)
CAVRSNTGRLIF

SEQ ID NO: 153180 - protein, 16 aa, Homo sapiens
  CDR3 for beta chain variable domain of TCR clone 76590 (TRBV7-2, TRBJ2-3)
CASSLVGDASTDTQYF

SEQ ID NO: 153181 - protein, 15 aa, Homo sapiens
  CDR3 for alpha chain variable domain of TCR clone 76591 (TRAV26-1, TRAJ48)
CIARWPWFGNEKLTF

SEQ ID NO: 153182 - protein, 12 aa, Homo sapiens
  CDR3 for beta chain variable domain of TCR clone 76591 (TRBV19, TRBJ2-5)
CASSISEETQYF

SEQ ID NO: 153183 - protein, 12 aa, Homo sapiens
  CDR3 for alpha chain variable domain of TCR clone 76592 (TRAV38-1, TRAJ20)
CAFICNDYKLSF

SEQ ID NO: 153184 - protein, 14 aa, Homo sapiens
  CDR3 for beta chain variable domain of TCR clone 76592 (TRBV19, TRBJ2-1)
CASSMGSGATEQFF

SEQ ID NO: 153185 - protein, 12 aa, Homo sapiens
  CDR3 for alpha chain variable domain of TCR clone 76593 (TRAV2, TRAJ33)
CAVPDSNYQLIW

SEQ ID NO: 153186 - protein, 15 aa, Homo sapiens
  CDR3 for beta chain variable domain of TCR clone 76593 (TRBV15, TRBJ1-5)
CATSRDPVSNQTQHF

SEQ ID NO: 153187 - protein, 10 aa, Homo sapiens
  CDR3 for alpha chain variable domain of TCR clone 76594 (TRAV1-2, TRAJ34)
CAVSTDKLIF

SEQ ID NO: 153188 - protein, 18 aa, Homo sapiens
  CDR3 for beta chain variable domain of TCR clone 76594 (TRBV7-9, TRBJ2-7)
CASSLTTSGSRTWYEQYF

SEQ ID NO: 153189 - protein, 15 aa, Homo sapiens
  CDR3 for alpha chain variable domain of TCR clone 76595 (TRAV35, TRAJ50)
SAGQLRKTSYDKVIF

SEQ ID NO: 153190 - protein, 12 aa, Homo sapiens
  CDR3 for beta chain variable domain of TCR clone 76595 (TRBV5-1, TRBJ2-5)
CASSLGLETQYF

SEQ ID NO: 153191 - protein, 14 aa, Homo sapiens
  CDR3 for alpha chain variable domain of TCR clone 76596 (TRAV25, TRAJ23)
CAGQGDNQGGKIIF

SEQ ID NO: 153192 - protein, 12 aa, Homo sapiens
  CDR3 for beta chain variable domain of TCR clone 76596 (TRBV7-9, TRBJ1-1)
CASSLVRGEAFF

SEQ ID NO: 153193 - protein, 15 aa, Homo sapiens
  CDR3 for alpha chain variable domain of TCR clone 76597 (TRAV17, TRAJ56)
CATDAKTGANSKLTF

SEQ ID NO: 153194 - protein, 14 aa, Homo sapiens
  CDR3 for beta chain variable domain of TCR clone 76597 (TRBV19, TRBJ1-5)
CASSLGTGGQPQHF

SEQ ID NO: 153195 - protein, 15 aa, Homo sapiens
  CDR3 for alpha chain variable domain of TCR clone 76598 (TRAV38-1, TRAJ37)
CAFIHGSGNTCKLIF

SEQ ID NO: 153196 - protein, 12 aa, Homo sapiens
  CDR3 for beta chain variable domain of TCR clone 76598 (TRBV7-9, TRBJ2-7)
CASSFGSYEQYF

SEQ ID NO: 153197 - protein, 12 aa, Homo sapiens
  CDR3 for alpha chain variable domain of TCR clone 76599 (TRAV2, TRAJ31)
YAVEDNNARLMF

SEQ ID NO: 153198 - protein, 16 aa, Homo sapiens
  CDR3 for beta chain variable domain of TCR clone 76599 (TRBV10-3, TRBJ2-1)
CAISGVGDGGGGEQSF

SEQ ID NO: 153199 - protein, 14 aa, Homo sapiens
  CDR3 for alpha chain variable domain of TCR clone 76600 (TRAV26-1, TRAJ48)
CIVRVGFGNEKLTF

SEQ ID NO: 153200 - protein, 14 aa, Homo sapiens
  CDR3 for beta chain variable domain of TCR clone 76600 (TRBV4-1, TRBJ2-2)
CASSQAVNTGELFF

SEQ ID NO: 153201 - protein, 14 aa, Homo sapiens
  CDR3 for alpha chain variable domain of TCR clone 76601 (TRAV1-2, TRAJ8)
CAVREDTGFQKLGF

SEQ ID NO: 153202 - protein, 16 aa, Homo sapiens
  CDR3 for beta chain variable domain of TCR clone 76601 (TRBV12-5, TRBJ2-5)
CASGPRTSGNQETQYF

SEQ ID NO: 153203 - protein, 15 aa, Homo sapiens
  CDR3 for alpha chain variable domain of TCR clone 76602 (TRAV13-2, TRAJ10)
CAEIDFTGGGNKLTF

SEQ ID NO: 153204 - protein, 14 aa, Homo sapiens
  CDR3 for beta chain variable domain of TCR clone 76602 (TRBV7-9, TRBJ2-1)
CASSPRDSLYEQFF

SEQ ID NO: 153205 - protein, 12 aa, Homo sapiens
  CDR3 for alpha chain variable domain of TCR clone 76603 (TRAV1-1, TRAJ20)
CAVREGDYKLSF

SEQ ID NO: 153206 - protein, 18 aa, Homo sapiens
  CDR3 for beta chain variable domain of TCR clone 76603 (TRBV20-1, TRBJ2-3)
CSASGLAGGPGTTDTQYF

SEQ ID NO: 153207 - protein, 18 aa, Homo sapiens
  CDR3 for alpha chain variable domain of TCR clone 76604 (TRAV13-1, TRAJ52)
CAAKNPNVGGTSYGKLTF

SEQ ID NO: 153208 - protein, 15 aa, Homo sapiens
  CDR3 for beta chain variable domain of TCR clone 76604 (TRBV6-1, TRBJ2-3)
CASSERGGITDTQYF

SEQ ID NO: 153209 - protein, 22 aa, Homo sapiens
  CDR3 for alpha chain variable domain of TCR clone 76605 (TRAV3, TRAJ38)
CAVRDCLNAGNNHIQNPDPAVY

SEQ ID NO: 153210 - protein, 14 aa, Homo sapiens
  CDR3 for beta chain variable domain of TCR clone 76605 (TRBV19, TRBJ2-1)
CASPTFVLSGEQFF

SEQ ID NO: 153211 - protein, 14 aa, Homo sapiens
  CDR3 for alpha chain variable domain of TCR clone 76606 (TRAV12-2, TRAJ40)
CAVKIPSGTYKYIF

SEQ ID NO: 153212 - protein, 13 aa, Homo sapiens
  CDR3 for beta chain variable domain of TCR clone 76606 (TRBV2, TRBJ1-4)
CASSERAGEKLFF

SEQ ID NO: 153213 - protein, 13 aa, Homo sapiens
  CDR3 for alpha chain variable domain of TCR clone 76607 (TRAV4, TRAJ22)
CLGGSGSARQLTF

SEQ ID NO: 153214 - protein, 15 aa, Homo sapiens
  CDR3 for beta chain variable domain of TCR clone 76607 (TRBV7-9, TRBJ1-6)
CASSSPGRGNSPIHF

SEQ ID NO: 153215 - protein, 13 aa, Homo sapiens
  CDR3 for alpha chain variable domain of TCR clone 76608 (TRAV12-2, TRAJ42)
CAVKRGSQGNLIF

SEQ ID NO: 153216 - protein, 14 aa, Homo sapiens
  CDR3 for beta chain variable domain of TCR clone 76608 (TRBV12-4, TRBJ1-1)
CASRQTGLNTEAFF

SEQ ID NO: 153217 - protein, 20 aa, Homo sapiens
  CDR3 for alpha chain variable domain of TCR clone 76609 (TRAV8-3, TRAJ44)
LSTSVLWVRLYTGTASKLTF

SEQ ID NO: 153218 - protein, 15 aa, Homo sapiens
  CDR3 for beta chain variable domain of TCR clone 76609 (TRBV27, TRBJ2-1)
CASSNGGGSSNEQFF

SEQ ID NO: 153219 - protein, 11 aa, Homo sapiens
  CDR3 for alpha chain variable domain of TCR clone 76610 (TRAV29/DV5, TRAJ30)
CAVREVDKIIF

SEQ ID NO: 153220 - protein, 17 aa, Homo sapiens
  CDR3 for beta chain variable domain of TCR clone 76610 (TRBV11-2, TRBJ2-1)
CASSLYPPGVEYNEQFF

SEQ ID NO: 153221 - protein, 12 aa, Homo sapiens
  CDR3 for alpha chain variable domain of TCR clone 76611 (TRAV13-1, TRAJ27)
CAAHTNAGKSTF

SEQ ID NO: 153222 - protein, 14 aa, Homo sapiens
  CDR3 for beta chain variable domain of TCR clone 76611 (TRBV19, TRBJ2-2)
CASRGQGIAGELFF

SEQ ID NO: 153223 - protein, 15 aa, Homo sapiens
  CDR3 for alpha chain variable domain of TCR clone 76612 (TRAV25, TRAJ52)
CAGTSGGTSYGKLTF

SEQ ID NO: 153224 - protein, 16 aa, Homo sapiens
  CDR3 for beta chain variable domain of TCR clone 76612 (TRBV15, TRBJ1-2)
CATSRDPRTGGGGYTF

SEQ ID NO: 153225 - protein, 18 aa, Homo sapiens
  CDR3 for alpha chain variable domain of TCR clone 76613 (TRAV12-3, TRAJ52)
CAMSVGGAGGTSYGKLTF

SEQ ID NO: 153226 - protein, 18 aa, Homo sapiens
  CDR3 for beta chain variable domain of TCR clone 76613 (TRBV20-1, TRBJ2-6)
CSAETTPTHGSGANVLTF

SEQ ID NO: 153227 - protein, 16 aa, Homo sapiens
  CDR3 for alpha chain variable domain of TCR clone 76614 (TRAV3, TRAJ37)
CAVRGKGSGNTGKLIF

SEQ ID NO: 153228 - protein, 17 aa, Homo sapiens
  CDR3 for beta chain variable domain of TCR clone 76614 (TRBV7-9, TRBJ2-6)
CASSFGAGYSGANVLTF

SEQ ID NO: 153229 - protein, 13 aa, Homo sapiens
  CDR3 for alpha chain variable domain of TCR clone 76615 (TRAV30, TRAJ24)
CGTVTDSWGKLQV

SEQ ID NO: 153230 - protein, 16 aa, Homo sapiens
  CDR3 for beta chain variable domain of TCR clone 76615 (TRBV7-3, TRBJ2-2)
CASSLKRGTLSGELFF

SEQ ID NO: 153231 - protein, 11 aa, Homo sapiens
  CDR3 for alpha chain variable domain of TCR clone 76616 (TRAV1-2, TRAJ31)
CAVNNNARLMF

SEQ ID NO: 153232 - protein, 15 aa, Homo sapiens
  CDR3 for beta chain variable domain of TCR clone 76616 (TRBV28, TRBJ2-1)
CASSIISGGRSEQFF

SEQ ID NO: 153233 - protein, 16 aa, Homo sapiens
  CDR3 for alpha chain variable domain of TCR clone 76617 (TRAV4, TRAJ22)
CLVGDLYSGSARQLTF

SEQ ID NO: 153234 - protein, 15 aa, Homo sapiens
  CDR3 for beta chain variable domain of TCR clone 76617 (TRBV10-3, TRBJ2-3)
CAISLTSGGTDTQYF

SEQ ID NO: 153235 - protein, 13 aa, Homo sapiens
  CDR3 for alpha chain variable domain of TCR clone 76618 (TRAV8-4, TRAJ30)
CAVSVNRDDKIIF

SEQ ID NO: 153236 - protein, 15 aa, Homo sapiens
  CDR3 for beta chain variable domain of TCR clone 76618 (TRBV11-2, TRBJ1-6)
CASTLRGTGNSPLHF

SEQ ID NO: 153237 - protein, 14 aa, Homo sapiens
  CDR3 for alpha chain variable domain of TCR clone 76619 (TRAV1-2, TRAJ16)
CAVNRFSDGQKLLF

SEQ ID NO: 153238 - protein, 16 aa, Homo sapiens
  CDR3 for beta chain variable domain of TCR clone 76619 (TRBV20-1, TRBJ1-4)
CSAPGQGLLTNEKMFF

SEQ ID NO: 153239 - protein, 13 aa, Homo sapiens
  CDR3 for alpha chain variable domain of TCR clone 76620 (TRAV12-3, TRAJ35)
CAMAIGFGNLLHC

SEQ ID NO: 153240 - protein, 15 aa, Homo sapiens
  CDR3 for beta chain variable domain of TCR clone 76620 (TRBV20-1, TRBJ2-1)
CSARGSGTYYNEQFF

SEQ ID NO: 153241 - protein, 12 aa, Homo sapiens
  CDR3 for alpha chain variable domain of TCR clone 76621 (TRAV13-1, TRAJ21)
CAAKEGFNKFYF

SEQ ID NO: 153242 - protein, 16 aa, Homo sapiens
  CDR3 for beta chain variable domain of TCR clone 76621 (TRBV27, TRBJ2-2)
CASSFRGLVRTGELFF

SEQ ID NO: 153243 - protein, 11 aa, Homo sapiens
  CDR3 for alpha chain variable domain of TCR clone 76622 (TRAV1-2, TRAJ31)
CAVNNNARLMF

SEQ ID NO: 153244 - protein, 14 aa, Homo sapiens
  CDR3 for beta chain variable domain of TCR clone 76622 (TRBV12-5, TRBJ2-5)
CASGSRTHQETQYF

SEQ ID NO: 153245 - protein, 11 aa, Homo sapiens
  CDR3 for alpha chain variable domain of TCR clone 76623 (TRAV13-1, TRAJ52)
PGGTSYGKLTF

SEQ ID NO: 153246 - protein, 16 aa, Homo sapiens
  CDR3 for beta chain variable domain of TCR clone 76623 (TRBV28, TRBJ2-7)
CASSPWVAKGDLSQYF

SEQ ID NO: 153247 - protein, 14 aa, Homo sapiens
  CDR3 for alpha chain variable domain of TCR clone 76624 (TRAV8-3, TRAJ4)
CAVGAAGGYNKLIF

SEQ ID NO: 153248 - protein, 15 aa, Homo sapiens
  CDR3 for beta chain variable domain of TCR clone 76624 (TRBV6-5, TRBJ2-1)
CASSYDAGSGNEQFF

SEQ ID NO: 153249 - protein, 12 aa, Homo sapiens
  CDR3 for alpha chain variable domain of TCR clone 76625 (TRAV38-1, TRAJ20)
CAFIWNDYKLSF

SEQ ID NO: 153250 - protein, 14 aa, Homo sapiens
  CDR3 for beta chain variable domain of TCR clone 76625 (TRBV19, TRBJ2-1)
CASGMGSGATEQFF

SEQ ID NO: 153251 - protein, 15 aa, Homo sapiens
  CDR3 for alpha chain variable domain of TCR clone 76626 (TRAV12-2, TRAJ52)
CAVNAGGTSYGKLTF

SEQ ID NO: 153252 - protein, 16 aa, Homo sapiens
  CDR3 for beta chain variable domain of TCR clone 76626 (TRBV28, TRBJ2-6)
CASSNRRGSGANVLTF

SEQ ID NO: 153253 - protein, 15 aa, Homo sapiens
  CDR3 for alpha chain variable domain of TCR clone 76627 (TRAV25, TRAJ53)
CPTSNSGGSNYKLTF

SEQ ID NO: 153254 - protein, 15 aa, Homo sapiens
  CDR3 for beta chain variable domain of TCR clone 76627 (TRBV28, TRBJ1-3)
CASWGGHLSGNTIYF

SEQ ID NO: 153255 - protein, 11 aa, Homo sapiens
  CDR3 for alpha chain variable domain of TCR clone 76628 (TRAV17, TRAJ9)
CGFTGGFKTIF

SEQ ID NO: 153256 - protein, 14 aa, Homo sapiens
  CDR3 for beta chain variable domain of TCR clone 76628 (TRBV7-2, TRBJ1-1)
CASSFLIGTTEAFF

SEQ ID NO: 153257 - protein, 10 aa, Homo sapiens
  CDR3 for alpha chain variable domain of TCR clone 76629 (TRAV30, TRAJ48)
CGIGNEKLTV

SEQ ID NO: 153258 - protein, 14 aa, Homo sapiens
  CDR3 for beta chain variable domain of TCR clone 76629 (TRBV7-6, TRBJ2-3)
CASSVAGGTDTQYF

SEQ ID NO: 153259 - protein, 14 aa, Homo sapiens
  CDR3 for alpha chain variable domain of TCR clone 76630 (TRAV8-4, TRAJ9)
CAVWINTGGFKTIF

SEQ ID NO: 153260 - protein, 15 aa, Homo sapiens
  CDR3 for beta chain variable domain of TCR clone 76630 (TRBV10-2, TRBJ2-6)
CASSEQGTGANVLTF

SEQ ID NO: 153261 - protein, 12 aa, Homo sapiens
  CDR3 for alpha chain variable domain of TCR clone 76631 (TRAV3, TRAJ31)
CAVRDGNARIMF

SEQ ID NO: 153262 - protein, 18 aa, Homo sapiens
  CDR3 for beta chain variable domain of TCR clone 76631 (TRBV7-2, TRBJ2-3)
CASSLKREGSGITDTQYF

SEQ ID NO: 153263 - protein, 10 aa, Homo sapiens
  CDR3 for alpha chain variable domain of TCR clone 76632 (TRAV12-1, TRAJ23)
CVVSGGKIIF

SEQ ID NO: 153264 - protein, 15 aa, Homo sapiens
  CDR3 for beta chain variable domain of TCR clone 76632 (TRBV6-5, TRBJ2-1)
CASSSTSSFYNEQFF

SEQ ID NO: 153265 - protein, 16 aa, Homo sapiens
  CDR3 for alpha chain variable domain of TCR clone 76633 (TRAV35, TRAJ28)
CAGQKYSGAGSYQLTF

SEQ ID NO: 153266 - protein, 13 aa, Homo sapiens
  CDR3 for beta chain variable domain of TCR clone 76633 (TRBV19, TRBJ1-2)
CASSQGQVCGYTF

SEQ ID NO: 153267 - protein, 16 aa, Homo sapiens
  CDR3 for alpha chain variable domain of TCR clone 76634 (TRAV30, TRAJ24)
CGTEIVDADSWGKFQF

SEQ ID NO: 153268 - protein, 19 aa, Homo sapiens
  CDR3 for beta chain variable domain of TCR clone 76634 (TRBV7-3, TRBJ2-2)
CASSLRAGGSGPNTGELFF

SEQ ID NO: 153269 - protein, 13 aa, Homo sapiens
  CDR3 for alpha chain variable domain of TCR clone 76635 (TRAV1-2, TRAJ12)
CAVSMDSSYNLIF

SEQ ID NO: 153270 - protein, 15 aa, Homo sapiens
  CDR3 for beta chain variable domain of TCR clone 76635 (TRBV27, TRBJ2-5)
CASSLIPSGGETQYF

SEQ ID NO: 153271 - protein, 12 aa, Homo sapiens
  CDR3 for alpha chain variable domain of TCR clone 76636 (TRAV12-3, TRAJ34)
CAMGYNTEKLIF

SEQ ID NO: 153272 - protein, 14 aa, Homo sapiens
  CDR3 for beta chain variable domain of TCR clone 76636 (TRBV4-1, TRBJ2-2)
CASSQAVNTGELFF

SEQ ID NO: 153273 - protein, 12 aa, Homo sapiens
  CDR3 for alpha chain variable domain of TCR clone 76637 (TRAV23/DV6, TRAJ30)
CAASKGDDKIIF

SEQ ID NO: 153274 - protein, 14 aa, Homo sapiens
  CDR3 for beta chain variable domain of TCR clone 76637 (TRBV7-8, TRBJ2-3)
CASSLEAGTDTQYF

SEQ ID NO: 153275 - protein, 13 aa, Homo sapiens
  CDR3 for alpha chain variable domain of TCR clone 76638 (TRAV27, TRAJ42)
CAGARGSQGNLLF

SEQ ID NO: 153276 - protein, 15 aa, Homo sapiens
  CDR3 for beta chain variable domain of TCR clone 76638 (TRBV10-3, TRBJ2-2)
CAIRTDREDTGELFF

SEQ ID NO: 153277 - protein, 19 aa, Homo sapiens
  CDR3 for alpha chain variable domain of TCR clone 76639 (TRAV3, TRAJ6)
CAVRDGNPSRSGGSYIPTF

SEQ ID NO: 153278 - protein, 15 aa, Homo sapiens
  CDR3 for beta chain variable domain of TCR clone 76639 (TRBV18, TRBJ2-7)
CASSPTFMDSYEQYF

SEQ ID NO: 153279 - protein, 11 aa, Homo sapiens
  CDR3 for alpha chain variable domain of TCR clone 76640 (TRAV21, TRAJ34)
CAVTNTDKLIF

SEQ ID NO: 153280 - protein, 17 aa, Homo sapiens
  CDR3 for beta chain variable domain of TCR clone 76640 (TRBV20-1, TRBJ2-1)
CSARRPSGGPPTMSSSS

SEQ ID NO: 153281 - protein, 14 aa, Homo sapiens
  CDR3 for alpha chain variable domain of TCR clone 76641 (TRAV16, TRAJ33)
CALSAMDSNYQLIW

SEQ ID NO: 153282 - protein, 16 aa, Homo sapiens
  CDR3 for beta chain variable domain of TCR clone 76641 (TRBV7-3, TRBJ2-2)
CASSLKRGTLSGELFF

SEQ ID NO: 153283 - protein, 15 aa, Homo sapiens
  CDR3 for alpha chain variable domain of TCR clone 76642 (TRAV27, TRAJ38)
CAARRNAGNNRKLIW

SEQ ID NO: 153284 - protein, 16 aa, Homo sapiens
  CDR3 for beta chain variable domain of TCR clone 76642 (TRBV28, TRBJ1-4)
CASSPPYRGRSEKLFF

SEQ ID NO: 153285 - protein, 14 aa, Homo sapiens
  CDR3 for alpha chain variable domain of TCR clone 76643 (TRAV12-2, TRAJ13)
CAVKKTGGYQKVTF

SEQ ID NO: 153286 - protein, 12 aa, Homo sapiens
  CDR3 for beta chain variable domain of TCR clone 76643 (TRBV7-8, TRBJ2-1)
CASSLGHNEQFF

SEQ ID NO: 153287 - protein, 11 aa, Homo sapiens
  CDR3 for alpha chain variable domain of TCR clone 76644 (TRAV2, TRAJ13)
CASGGYQKVTF

SEQ ID NO: 153288 - protein, 15 aa, Homo sapiens
  CDR3 for beta chain variable domain of TCR clone 76644 (TRBV7-9, TRBJ1-6)
CASSSPGRGNLPLHF

SEQ ID NO: 153289 - protein, 18 aa, Homo sapiens
  CDR3 for alpha chain variable domain of TCR clone 76645 (TRAV9-2, TRAJ52)
CALSRHNAGGTSYGKLTF

SEQ ID NO: 153290 - protein, 13 aa, Homo sapiens
  CDR3 for beta chain variable domain of TCR clone 76645 (TRBV10-3, TRBJ2-7)
CASKLAVNYEQYF

SEQ ID NO: 153291 - protein, 17 aa, Homo sapiens
  CDR3 for alpha chain variable domain of TCR clone 76646 (TRAV3, TRAJ12)
CAVRDGGRMDSSYKLIF

SEQ ID NO: 153292 - protein, 12 aa, Homo sapiens
  CDR3 for beta chain variable domain of TCR clone 76646 (TRBV11-2, TRBJ2-1)
CASSPGNNEQFF

SEQ ID NO: 153293 - protein, 14 aa, Homo sapiens
  CDR3 for alpha chain variable domain of TCR clone 76647 (TRAV1-1, TRAJ27)
CAFSETPMQANQPF

SEQ ID NO: 153294 - protein, 17 aa, Homo sapiens
  CDR3 for beta chain variable domain of TCR clone 76647 (TRBV20-1, TRBJ2-3)
CSARDPKGVSATDTQYF

SEQ ID NO: 153295 - protein, 14 aa, Homo sapiens
  CDR3 for alpha chain variable domain of TCR clone 76648 (TRAV12-2, TRAJ40)
CAAKIPSGTHKYIF

SEQ ID NO: 153296 - protein, 14 aa, Homo sapiens
  CDR3 for beta chain variable domain of TCR clone 76648 (TRBV20-1, TRBJ1-1)
CSAQTRIGGTEAFF

SEQ ID NO: 153297 - protein, 14 aa, Homo sapiens
  CDR3 for alpha chain variable domain of TCR clone 76649 (TRAV1-2, TRAJ8)
CAVREDTGFQKLVF

SEQ ID NO: 153298 - protein, 13 aa, Homo sapiens
  CDR3 for beta chain variable domain of TCR clone 76649 (TRBV12-4, TRBJ2-2)
CASSITGSGELFF

SEQ ID NO: 153299 - protein, 15 aa, Homo sapiens
  CDR3 for alpha chain variable domain of TCR clone 76650 (TRAV17, TRAJ56)
CATDANTGANSKLTF

SEQ ID NO: 153300 - protein, 14 aa, Homo sapiens
  CDR3 for beta chain variable domain of TCR clone 76650 (TRBV23-1, TRBJ2-5)
CASSFLRSQETQYF

SEQ ID NO: 153301 - protein, 17 aa, Homo sapiens
  CDR3 for alpha chain variable domain of TCR clone 76651 (TRAV26-1, TRAJ53)
CIVRDDDSGGSNYKLTF

SEQ ID NO: 153302 - protein, 15 aa, Homo sapiens
  CDR3 for beta chain variable domain of TCR clone 76651 (TRBV20-1, TRBJ2-7)
CSARVPAAYSYEQYF

SEQ ID NO: 153303 - protein, 11 aa, Homo sapiens
  CDR3 for alpha chain variable domain of TCR clone 76652 (TRAV12-3, TRAJ43)
CAMSVSNDMRF

SEQ ID NO: 153304 - protein, 15 aa, Homo sapiens
  CDR3 for beta chain variable domain of TCR clone 76652 (TRBV11-2, TRBJ2-2)
CASSSDRVNAGELFF

SEQ ID NO: 153305 - protein, 13 aa, Homo sapiens
  CDR3 for alpha chain variable domain of TCR clone 76653 (TRAV12-1, TRAJ6)
CVVFPGGSYIPKF

SEQ ID NO: 153306 - protein, 14 aa, Homo sapiens
  CDR3 for beta chain variable domain of TCR clone 76653 (TRBV20-1, TRBJ1-3)
CSASPTGAGNTIYF

SEQ ID NO: 153307 - protein, 13 aa, Homo sapiens
  CDR3 for alpha chain variable domain of TCR clone 76654 (TRAV23/DV6, TRAJ34)
CAAIEKNTDKLIF

SEQ ID NO: 153308 - protein, 13 aa, Homo sapiens
  CDR3 for beta chain variable domain of TCR clone 76654 (TRBV29-1, TRBJ2-7)
CSVGPSGGYEQYF

SEQ ID NO: 153309 - protein, 14 aa, Homo sapiens
  CDR3 for alpha chain variable domain of TCR clone 76655 (TRAV13-1, TRAJ44)
CAAKATGTASKLTF

SEQ ID NO: 153310 - protein, 15 aa, Homo sapiens
  CDR3 for beta chain variable domain of TCR clone 76655 (TRBV4-3, TRBJ1-1)
CDSSQELGRGTEAFF

SEQ ID NO: 153311 - protein, 15 aa, Homo sapiens
  CDR3 for alpha chain variable domain of TCR clone 76656 (TRAV12-3, TRAJ6)
CAMSATTGGSYIPTF

SEQ ID NO: 153312 - protein, 15 aa, Homo sapiens
  CDR3 for beta chain variable domain of TCR clone 76656 (TRBV7-9, TRBJ1-6)
CASSSPGRGNSPLHF

SEQ ID NO: 153313 - protein, 16 aa, Homo sapiens
  CDR3 for alpha chain variable domain of TCR clone 76657 (TRAV3, TRAJ23)
CAVKIWIYNQGGKLIF

SEQ ID NO: 153314 - protein, 17 aa, Homo sapiens
  CDR3 for beta chain variable domain of TCR clone 76657 (TRBV10-3, TRBJ2-6)
CAISESTAPSGANVLTF

SEQ ID NO: 153315 - protein, 14 aa, Homo sapiens
  CDR3 for alpha chain variable domain of TCR clone 76658 (TRAV21, TRAJ35)
CAVMPIGFGNVLHC

SEQ ID NO: 153316 - protein, 12 aa, Homo sapiens
  CDR3 for beta chain variable domain of TCR clone 76658 (TRBV7-9, TRBJ2-7)
CASSINREEQYF

SEQ ID NO: 153317 - protein, 14 aa, Homo sapiens
  CDR3 for alpha chain variable domain of TCR clone 76659 (TRAV1-2, TRAJ8)
CAVREDTGFQQLVF

SEQ ID NO: 153318 - protein, 14 aa, Homo sapiens
  CDR3 for beta chain variable domain of TCR clone 76659 (TRBV11-2, TRBJ2-3)
CASSRLARTDTQYF

SEQ ID NO: 153319 - protein, 15 aa, Homo sapiens
  CDR3 for alpha chain variable domain of TCR clone 76660 (TRAV12-3, TRAJ6)
CAMSATTGGSYIPTF

SEQ ID NO: 153320 - protein, 16 aa, Homo sapiens
  CDR3 for beta chain variable domain of TCR clone 76660 (TRBV20-1, TRBJ1-2)
CSASMGQGVANYGYTY

SEQ ID NO: 153321 - protein, 13 aa, Homo sapiens
  CDR3 for alpha chain variable domain of TCR clone 76661 (TRAV8-3, TRAJ28)
CAVGATLGLGVTN

SEQ ID NO: 153322 - protein, 14 aa, Homo sapiens
  CDR3 for beta chain variable domain of TCR clone 76661 (TRBV7-2, TRBJ2-1)
CASSLGVGYNEQFF

SEQ ID NO: 153323 - protein, 13 aa, Homo sapiens
  CDR3 for alpha chain variable domain of TCR clone 76662 (TRAV35, TRAJ42)
CAGFPGGQGNLIF

SEQ ID NO: 153324 - protein, 13 aa, Homo sapiens
  CDR3 for beta chain variable domain of TCR clone 76662 (TRBV29-1, TRBJ2-1)
CSVEGGRVNEQFF

SEQ ID NO: 153325 - protein, 13 aa, Homo sapiens
  CDR3 for alpha chain variable domain of TCR clone 76663 (TRAV13-2, TRAJ13)
GAERPGGYQKVTF

SEQ ID NO: 153326 - protein, 15 aa, Homo sapiens
  CDR3 for beta chain variable domain of TCR clone 76663 (TRBV11-3, TRBJ2-7)
CASSPGPASSYEQYF

SEQ ID NO: 153327 - protein, 11 aa, Homo sapiens
  CDR3 for alpha chain variable domain of TCR clone 76664 (TRAV2, TRAJ33)
CAVDSNYQLIW

SEQ ID NO: 153328 - protein, 13 aa, Homo sapiens
  CDR3 for beta chain variable domain of TCR clone 76664 (TRBV28, TRBJ1-5)
CASRMTGDQPQHF

SEQ ID NO: 153329 - protein, 12 aa, Homo sapiens
  CDR3 for alpha chain variable domain of TCR clone 76665 (TRAV12-3, TRAJ17)
CAMTLTGSKLTF

SEQ ID NO: 153330 - protein, 15 aa, Homo sapiens
  CDR3 for beta chain variable domain of TCR clone 76665 (TRBV20-1, TRBJ2-7)
CSARDRISGMDEQYF

SEQ ID NO: 153331 - protein, 13 aa, Homo sapiens
  CDR3 for alpha chain variable domain of TCR clone 76666 (TRAV27, TRAJ41)
CAGEGNSGYALNF

SEQ ID NO: 153332 - protein, 17 aa, Homo sapiens
  CDR3 for beta chain variable domain of TCR clone 76666 (TRBV7-8, TRBJ2-6)
CASSAGTGGAGANVLTF

SEQ ID NO: 153333 - protein, 17 aa, Homo sapiens
  CDR3 for alpha chain variable domain of TCR clone 76667 (TRAV3, TRAJ6)
CAVRDGPRAGGSYMPTF

SEQ ID NO: 153334 - protein, 15 aa, Homo sapiens
  CDR3 for beta chain variable domain of TCR clone 76667 (TRBV5-8, TRBJ2-2)
CASSSDRGATGELFF

SEQ ID NO: 153335 - protein, 14 aa, Homo sapiens
  CDR3 for alpha chain variable domain of TCR clone 76668 (TRAV22, TRAJ26)
CAVVGDNYGQNFVF

SEQ ID NO: 153336 - protein, 14 aa, Homo sapiens
  CDR3 for beta chain variable domain of TCR clone 76668 (TRBV11-2, TRBJ1-3)
CASSLAVPGNTIYF

SEQ ID NO: 153337 - protein, 13 aa, Homo sapiens
  CDR3 for alpha chain variable domain of TCR clone 76669 (TRAV8-6, TRAJ33)
CAVSEGSNYQLIW

SEQ ID NO: 153338 - protein, 18 aa, Homo sapiens
  CDR3 for beta chain variable domain of TCR clone 76669 (TRBV11-2, TRBJ2-3)
CASSLGGASRGAPNTQYF

SEQ ID NO: 153339 - protein, 16 aa, Homo sapiens
  CDR3 for alpha chain variable domain of TCR clone 76670 (TRAV8-3, TRAJ8)
CAVPRDGNTGFQKLVF

SEQ ID NO: 153340 - protein, 14 aa, Homo sapiens
  CDR3 for beta chain variable domain of TCR clone 76670 (TRBV7-2, TRBJ2-7)
CASSPKTSFYEQYF

SEQ ID NO: 153341 - protein, 11 aa, Homo sapiens
  CDR3 for alpha chain variable domain of TCR clone 76671 (TRAV27, TRAJ20)
CAGAGDYKLSF

SEQ ID NO: 153342 - protein, 14 aa, Homo sapiens
  CDR3 for beta chain variable domain of TCR clone 76671 (TRBV11-2, TRBJ2-5)
CASSHRTVQETQYF

SEQ ID NO: 153343 - protein, 14 aa, Homo sapiens
  CDR3 for alpha chain variable domain of TCR clone 76672 (TRAV17, TRAJ58)
CATGGETSGSRLTF

SEQ ID NO: 153344 - protein, 15 aa, Homo sapiens
  CDR3 for beta chain variable domain of TCR clone 76672 (TRBV6-3, TRBJ2-7)
CASSSPGTVFYEQYF

SEQ ID NO: 153345 - protein, 12 aa, Homo sapiens
  CDR3 for alpha chain variable domain of TCR clone 76673 (TRAV16, TRAJ10)
CSRTGGGNKLTF

SEQ ID NO: 153346 - protein, 13 aa, Homo sapiens
  CDR3 for beta chain variable domain of TCR clone 76673 (TRBV27, TRBJ1-1)
CASSLSIGAEAFF

SEQ ID NO: 153347 - protein, 14 aa, Homo sapiens
  CDR3 for alpha chain variable domain of TCR clone 76674 (TRAV12-3, TRAJ10)
SHLPLTGGGNKLTF

SEQ ID NO: 153348 - protein, 15 aa, Homo sapiens
  CDR3 for beta chain variable domain of TCR clone 76674 (TRBV4-1, TRBJ1-4)
CGSSDTGGTNEKLFF

SEQ ID NO: 153349 - protein, 13 aa, Homo sapiens
  CDR3 for alpha chain variable domain of TCR clone 76675 (TRAV21, TRAJ20)
CAVGLRVDYKLSF

SEQ ID NO: 153350 - protein, 13 aa, Homo sapiens
  CDR3 for beta chain variable domain of TCR clone 76675 (TRBV6-1, TRBJ1-1)
CASSRQVNTEAFF

SEQ ID NO: 153351 - protein, 14 aa, Homo sapiens
  CDR3 for alpha chain variable domain of TCR clone 76676 (TRAV16, TRAJ15)
CALSFNQAGTALIF

SEQ ID NO: 153352 - protein, 14 aa, Homo sapiens
  CDR3 for beta chain variable domain of TCR clone 76676 (TRBV7-2, TRBJ2-7)
CASSPKTSFYEQYF

SEQ ID NO: 153353 - protein, 15 aa, Homo sapiens
  CDR3 for alpha chain variable domain of TCR clone 76677 (TRAV34, TRAJ38)
CGADFTPVNNRKLIW

SEQ ID NO: 153354 - protein, 16 aa, Homo sapiens
  CDR3 for beta chain variable domain of TCR clone 76677 (TRBV12-5, TRBJ2-5)
CASGPRTSGNQETQYF

SEQ ID NO: 153355 - protein, 17 aa, Homo sapiens
  CDR3 for alpha chain variable domain of TCR clone 76678 (TRAV26-1, TRAJ58)
CIVRVGAEETRGSRLTF

SEQ ID NO: 153356 - protein, 13 aa, Homo sapiens
  CDR3 for beta chain variable domain of TCR clone 76678 (TRBV12-5, TRBJ1-2)
CASGVRTGNGYTF

SEQ ID NO: 153357 - protein, 14 aa, Homo sapiens
  CDR3 for alpha chain variable domain of TCR clone 76679 (TRAV12-2, TRAJ17)
CAVLFKAAGNKLTF

SEQ ID NO: 153358 - protein, 17 aa, Homo sapiens
  CDR3 for beta chain variable domain of TCR clone 76679 (TRBV28, TRBJ2-5)
CASSTPEGDALQETQYF

SEQ ID NO: 153359 - protein, 13 aa, Homo sapiens
  CDR3 for alpha chain variable domain of TCR clone 76680 (TRAV17, TRAJ5)
CALRGTGRRALTF

SEQ ID NO: 153360 - protein, 12 aa, Homo sapiens
  CDR3 for beta chain variable domain of TCR clone 76680 (TRBV7-8, TRBJ2-7)
CASSLGDREQHF

SEQ ID NO: 153361 - protein, 18 aa, Homo sapiens
  CDR3 for alpha chain variable domain of TCR clone 76681 (TRAV1-2, TRAJ18)
CAVRDMGDRGSTLGRLYS

SEQ ID NO: 153362 - protein, 16 aa, Homo sapiens
  CDR3 for beta chain variable domain of TCR clone 76681 (TRBV29-1, TRBJ1-2)
CSVEANRDIANYGYTF

SEQ ID NO: 153363 - protein, 12 aa, Homo sapiens
  CDR3 for alpha chain variable domain of TCR clone 76682 (TRAV13-1, TRAJ21)
CAAKEGFNKFYF

SEQ ID NO: 153364 - protein, 17 aa, Homo sapiens
  CDR3 for beta chain variable domain of TCR clone 76682 (TRBV19, TRBJ2-7)
CASSISFYDGYPYEQYF

SEQ ID NO: 153365 - protein, 13 aa, Homo sapiens
  CDR3 for alpha chain variable domain of TCR clone 76683 (TRAV8-6, TRAJ8)
CAVSNTGFQKLVF

SEQ ID NO: 153366 - protein, 15 aa, Homo sapiens
  CDR3 for beta chain variable domain of TCR clone 76683 (TRBV28, TRBJ2-5)
CASSSGRTIQETQYS

SEQ ID NO: 153367 - protein, 12 aa, Homo sapiens
  CDR3 for alpha chain variable domain of TCR clone 76684 (TRAV35, TRAJ31)
CAAASNNARLMF

SEQ ID NO: 153368 - protein, 14 aa, Homo sapiens
  CDR3 for beta chain variable domain of TCR clone 76684 (TRBV2, TRBJ2-2)
CASSLFGGSGELFF

SEQ ID NO: 153369 - protein, 11 aa, Homo sapiens
  CDR3 for alpha chain variable domain of TCR clone 76685 (TRAV12-3, TRAJ43)
CAMSVSNDMRF

SEQ ID NO: 153370 - protein, 19 aa, Homo sapiens
  CDR3 for beta chain variable domain of TCR clone 76685 (TRBV25-1, TRBJ2-2)
CAILVYRVDRGRKTGELFF

SEQ ID NO: 153371 - protein, 13 aa, Homo sapiens
  CDR3 for alpha chain variable domain of TCR clone 76686 (TRAV21, TRAJ37)
CAVSSGNTGKLIF

SEQ ID NO: 153372 - protein, 15 aa, Homo sapiens
  CDR3 for beta chain variable domain of TCR clone 76686 (TRBV7-9, TRBJ1-6)
CASSSPGRGNSPLHF

SEQ ID NO: 153373 - protein, 15 aa, Homo sapiens
  CDR3 for alpha chain variable domain of TCR clone 76687 (TRAV34, TRAJ38)
CGADFTPGNNRKLIW

SEQ ID NO: 153374 - protein, 13 aa, Homo sapiens
  CDR3 for beta chain variable domain of TCR clone 76687 (TRBV7-3, TRBJ1-1)
CASSQDWGAEAFF

SEQ ID NO: 153375 - protein, 17 aa, Homo sapiens
  CDR3 for alpha chain variable domain of TCR clone 76688 (TRAV12-3, TRAJ18)
CAMIRADRGSTLGGLYF

SEQ ID NO: 153376 - protein, 14 aa, Homo sapiens
  CDR3 for beta chain variable domain of TCR clone 76688 (TRBV5-7, TRBJ1-6)
CASTPWPADSPLHF

SEQ ID NO: 153377 - protein, 15 aa, Homo sapiens
  CDR3 for alpha chain variable domain of TCR clone 76689 (TRAV21, TRAJ45)
CAVSYSGGGADGLTF

SEQ ID NO: 153378 - protein, 13 aa, Homo sapiens
  CDR3 for beta chain variable domain of TCR clone 76689 (TRBV20-1, TRBJ2-5)
CSAATGLQETQYF

SEQ ID NO: 153379 - protein, 15 aa, Homo sapiens
  CDR3 for alpha chain variable domain of TCR clone 76690 (TRAV14/DV4, TRAJ10)
CAMRELTGGGNKLTF

SEQ ID NO: 153380 - protein, 16 aa, Homo sapiens
  CDR3 for beta chain variable domain of TCR clone 76690 (TRBV12-5, TRBJ2-5)
CASGPRTSGNQGTQYF

SEQ ID NO: 153381 - protein, 16 aa, Homo sapiens
  CDR3 for alpha chain variable domain of TCR clone 76691 (TRAV23/DV6, TRAJ22)
CAASSRGSRVCKATDL

SEQ ID NO: 153382 - protein, 15 aa, Homo sapiens
  CDR3 for beta chain variable domain of TCR clone 76691 (TRBV10-3, TRBJ2-3)
CAIDTSGRRTDTQYF

SEQ ID NO: 153383 - protein, 11 aa, Homo sapiens
  CDR3 for alpha chain variable domain of TCR clone 76692 (TRAV17, TRAJ31)
CATSNNASLMF

SEQ ID NO: 153384 - protein, 14 aa, Homo sapiens
  CDR3 for beta chain variable domain of TCR clone 76692 (TRBV18, TRBJ2-7)
CASSPRGGAYEQYF

SEQ ID NO: 153385 - protein, 16 aa, Homo sapiens
  CDR3 for alpha chain variable domain of TCR clone 76693 (TRAV14/DV4, TRAJ20)
CAMREGRSRDDYKLSF

SEQ ID NO: 153386 - protein, 12 aa, Homo sapiens
  CDR3 for beta chain variable domain of TCR clone 76693 (TRBV11-2, TRBJ2-2)
CASSLGGGELFF

SEQ ID NO: 153387 - protein, 14 aa, Homo sapiens
  CDR3 for alpha chain variable domain of TCR clone 76694 (TRAV1-2, TRAJ16)
CAVNRFSDGQKLLF

SEQ ID NO: 153388 - protein, 14 aa, Homo sapiens
  CDR3 for beta chain variable domain of TCR clone 76694 (TRBV2, TRBJ1-5)
CASSGTGFNQPQHF

SEQ ID NO: 153389 - protein, 15 aa, Homo sapiens
  CDR3 for alpha chain variable domain of TCR clone 76695 (TRAV23/DV6, TRAJ18)
CAARYRGLTLGRLYF

SEQ ID NO: 153390 - protein, 13 aa, Homo sapiens
  CDR3 for beta chain variable domain of TCR clone 76695 (TRBV7-2, TRBJ2-7)
CASSSPSGSEQYF

SEQ ID NO: 153391 - protein, 11 aa, Homo sapiens
  CDR3 for alpha chain variable domain of TCR clone 76696 (TRAV17, TRAJ9)
CGFTGGFKTIF

SEQ ID NO: 153392 - protein, 16 aa, Homo sapiens
  CDR3 for beta chain variable domain of TCR clone 76696 (TRBV20-1, TRBJ1-4)
CSARPYGGELNEKLFF

SEQ ID NO: 153393 - protein, 16 aa, Homo sapiens
  CDR3 for alpha chain variable domain of TCR clone 76697 (TRAV12-3, TRAJ53)
CAMSPGSGGSNDKLTF

SEQ ID NO: 153394 - protein, 17 aa, Homo sapiens
  CDR3 for beta chain variable domain of TCR clone 76697 (TRBV28, TRBJ2-5)
CASSTPEGDALQETQYF

SEQ ID NO: 153395 - protein, 12 aa, Homo sapiens
  CDR3 for alpha chain variable domain of TCR clone 76698 (TRAV3, TRAJ31)
CAVRDGNARLMI

SEQ ID NO: 153396 - protein, 18 aa, Homo sapiens
  CDR3 for beta chain variable domain of TCR clone 76698 (TRBV7-2, TRBJ2-3)
CASSLKREGSGITDTQYF

SEQ ID NO: 153397 - protein, 13 aa, Homo sapiens
  CDR3 for alpha chain variable domain of TCR clone 76699 (TRAV21, TRAJ20)
CAVGLRVDYKLSF

SEQ ID NO: 153398 - protein, 14 aa, Homo sapiens
  CDR3 for beta chain variable domain of TCR clone 76699 (TRBV7-9, TRBJ2-1)
CASSPRDSLYEQFF

SEQ ID NO: 153399 - protein, 14 aa, Homo sapiens
  CDR3 for alpha chain variable domain of TCR clone 76700 (TRAV17, TRAJ39)
CATDPGRAGNMLTF

SEQ ID NO: 153400 - protein, 15 aa, Homo sapiens
  CDR3 for beta chain variable domain of TCR clone 76700 (TRBV13, TRBJ1-5)
CASSFGQGGVQPQHF

SEQ ID NO: 153401 - protein, 14 aa, Homo sapiens
  CDR3 for alpha chain variable domain of TCR clone 76701 (TRAV21, TRAJ35)
CAVMPIGFGNVLHF

SEQ ID NO: 153402 - protein, 12 aa, Homo sapiens
  CDR3 for beta chain variable domain of TCR clone 76701 (TRBV7-9, TRBJ2-7)
CASSIKRGEQYF

SEQ ID NO: 153403 - protein, 14 aa, Homo sapiens
  CDR3 for alpha chain variable domain of TCR clone 76702 (TRAV12-3, TRAJ10)
SHLPLTGGGNKLTF

SEQ ID NO: 153404 - protein, 17 aa, Homo sapiens
  CDR3 for beta chain variable domain of TCR clone 76702 (TRBV28, TRBJ1-5)
CASSLSWLVSSNQPLHF

SEQ ID NO: 153405 - protein, 12 aa, Homo sapiens
  CDR3 for alpha chain variable domain of TCR clone 76703 (TRAV29/DV5, TRAJ49)
CAATDTGNQVYF

SEQ ID NO: 153406 - protein, 19 aa, Homo sapiens
  CDR3 for beta chain variable domain of TCR clone 76703 (TRBV25-1, TRBJ2-2)
CAILVYRVDRGRKTGELFF

SEQ ID NO: 153407 - protein, 16 aa, Homo sapiens
  CDR3 for alpha chain variable domain of TCR clone 76704 (TRAV30, TRAJ24)
CGTEIVDAGSWGKFQF

SEQ ID NO: 153408 - protein, 16 aa, Homo sapiens
  CDR3 for beta chain variable domain of TCR clone 76704 (TRBV20-1, TRBJ2-4)
CSATSLAELAKNIQYF

SEQ ID NO: 153409 - protein, 14 aa, Homo sapiens
  CDR3 for alpha chain variable domain of TCR clone 76705 (TRAV12-2, TRAJ13)
CAVKKTGGYQKVTF

SEQ ID NO: 153410 - protein, 12 aa, Homo sapiens
  CDR3 for beta chain variable domain of TCR clone 76705 (TRBV6-3, TRBJ2-7)
YASSLTPYEQYF

SEQ ID NO: 153411 - protein, 12 aa, Homo sapiens
  CDR3 for alpha chain variable domain of TCR clone 76706 (TRAV21, TRAJ33)
CAKMDSNYQLIW

SEQ ID NO: 153412 - protein, 14 aa, Homo sapiens
  CDR3 for beta chain variable domain of TCR clone 76706 (TRBV2, TRBJ2-7)
CACSLTSGGYEQYF

SEQ ID NO: 153413 - protein, 13 aa, Homo sapiens
  CDR3 for alpha chain variable domain of TCR clone 76707 (TRAV12-1, TRAJ40)
CVVPTSGTCKYVF

SEQ ID NO: 153414 - protein, 18 aa, Homo sapiens
  CDR3 for beta chain variable domain of TCR clone 76707 (TRBV7-6, TRBJ2-1)
CASSPRTSGMGSYNEQFF

SEQ ID NO: 153415 - protein, 14 aa, Homo sapiens
  CDR3 for alpha chain variable domain of TCR clone 76708 (TRAV2, TRAJ9)
CAVEDRSGGFKTIF

SEQ ID NO: 153416 - protein, 15 aa, Homo sapiens
  CDR3 for beta chain variable domain of TCR clone 76708 (TRBV27, TRBJ2-5)
CASSLYPRGGETQYF

SEQ ID NO: 153417 - protein, 14 aa, Homo sapiens
  CDR3 for alpha chain variable domain of TCR clone 76709 (TRAV12-1, TRAJ9)
CVVTGYTGGFKTNF

SEQ ID NO: 153418 - protein, 13 aa, Homo sapiens
  CDR3 for beta chain variable domain of TCR clone 76709 (TRBV20-1, TRBJ1-1)
CSARAGGNTEAFF

SEQ ID NO: 153419 - protein, 15 aa, Homo sapiens
  CDR3 for alpha chain variable domain of TCR clone 76710 (TRAV3, TRAJ22)
CAVRDRGGSARQLTF

SEQ ID NO: 153420 - protein, 15 aa, Homo sapiens
  CDR3 for beta chain variable domain of TCR clone 76710 (TRBV7-3, TRBJ2-2)
CASSETEQGTGELFF

SEQ ID NO: 153421 - protein, 12 aa, Homo sapiens
  CDR3 for alpha chain variable domain of TCR clone 76711 (TRAV20, TRAJ20)
CAVRVNDYKLSF

SEQ ID NO: 153422 - protein, 14 aa, Homo sapiens
  CDR3 for beta chain variable domain of TCR clone 76711 (TRBV20-1, TRBJ2-1)
CSAQIGGSANEQFF

SEQ ID NO: 153423 - protein, 11 aa, Homo sapiens
  CDR3 for alpha chain variable domain of TCR clone 76712 (TRAV3, TRAJ17)
PRGAAGNKLTF

SEQ ID NO: 153424 - protein, 15 aa, Homo sapiens
  CDR3 for beta chain variable domain of TCR clone 76712 (TRBV7-2, TRBJ2-1)
CASSSGLAGGNEQFF

SEQ ID NO: 153425 - protein, 16 aa, Homo sapiens
  CDR3 for alpha chain variable domain of TCR clone 76713 (TRAV30, TRAJ24)
CGTEIVDADSWGKFQF

SEQ ID NO: 153426 - protein, 14 aa, Homo sapiens
  CDR3 for beta chain variable domain of TCR clone 76713 (TRBV7-8, TRBJ2-3)
CASSLGAGTDTQYF

SEQ ID NO: 153427 - protein, 17 aa, Homo sapiens
  CDR3 for alpha chain variable domain of TCR clone 76714 (TRAV8-6, TRAJ58)
CAVSSWVGETSGSRLTF

SEQ ID NO: 153428 - protein, 16 aa, Homo sapiens
  CDR3 for beta chain variable domain of TCR clone 76714 (TRBV7-3, TRBJ2-2)
CASSLKRGTLSGELFF

SEQ ID NO: 153429 - protein, 13 aa, Homo sapiens
  CDR3 for alpha chain variable domain of TCR clone 76715 (TRAV13-2, TRAJ11)
CAENYSIYSTLTF

SEQ ID NO: 153430 - protein, 13 aa, Homo sapiens
  CDR3 for beta chain variable domain of TCR clone 76715 (TRBV12-4, TRBJ1-4)
CASAMGHNEKLFF

SEQ ID NO: 153431 - protein, 14 aa, Homo sapiens
  CDR3 for alpha chain variable domain of TCR clone 76716 (TRAV1-1, TRAJ27)
CAVIYNTNAGKSTF

SEQ ID NO: 153432 - protein, 13 aa, Homo sapiens
  CDR3 for beta chain variable domain of TCR clone 76716 (TRBV12-5, TRBJ1-2)
CASGVRTGNGYAF

SEQ ID NO: 153433 - protein, 14 aa, Homo sapiens
  CDR3 for alpha chain variable domain of TCR clone 76717 (TRAV26-1, TRAJ44)
CISPLPGPASKLTF

SEQ ID NO: 153434 - protein, 16 aa, Homo sapiens
  CDR3 for beta chain variable domain of TCR clone 76717 (TRBV19, TRBJ2-1)
CASSKAGPSSYNEQFF

SEQ ID NO: 153435 - protein, 13 aa, Homo sapiens
  CDR3 for alpha chain variable domain of TCR clone 76718 (TRAV17, TRAJ54)
CATVIQGAQKLVF

SEQ ID NO: 153436 - protein, 15 aa, Homo sapiens
  CDR3 for beta chain variable domain of TCR clone 76718 (TRBV13, TRBJ2-1)
CASSLLSGLNNKQFF

SEQ ID NO: 153437 - protein, 14 aa, Homo sapiens
  CDR3 for alpha chain variable domain of TCR clone 76719 (TRAV13-1, TRAJ44)
CAAKATGTASKLTF

SEQ ID NO: 153438 - protein, 17 aa, Homo sapiens
  CDR3 for beta chain variable domain of TCR clone 76719 (TRBV7-3, TRBJ2-3)
CASSLMKRMRGVDTQYF

SEQ ID NO: 153439 - protein, 11 aa, Homo sapiens
  CDR3 for alpha chain variable domain of TCR clone 76720 (TRAV21, TRAJ48)
CAVDGNEKLTF

SEQ ID NO: 153440 - protein, 16 aa, Homo sapiens
  CDR3 for beta chain variable domain of TCR clone 76720 (TRBV12-4, TRBJ1-5)
CASNSGPRGSNQPQHF

SEQ ID NO: 153441 - protein, 15 aa, Homo sapiens
  CDR3 for alpha chain variable domain of TCR clone 76721 (TRAV27, TRAJ38)
CAARRNAGNNRKLIW

SEQ ID NO: 153442 - protein, 11 aa, Homo sapiens
  CDR3 for beta chain variable domain of TCR clone 76721 (TRBV12-4, TRBJ2-3)
CASTATDTQYF

SEQ ID NO: 153443 - protein, 14 aa, Homo sapiens
  CDR3 for alpha chain variable domain of TCR clone 76722 (TRAV1-2, TRAJ16)
CAVNRFSDGQKLLF

SEQ ID NO: 153444 - protein, 14 aa, Homo sapiens
  CDR3 for beta chain variable domain of TCR clone 76722 (TRBV29-1, TRBJ2-5)
CSFWTPYAGETQYF

SEQ ID NO: 153445 - protein, 14 aa, Homo sapiens
  CDR3 for alpha chain variable domain of TCR clone 76723 (TRAV41, TRAJ16)
CAVNRFSDGQKLLF

SEQ ID NO: 153446 - protein, 13 aa, Homo sapiens
  CDR3 for beta chain variable domain of TCR clone 76723 (TRBV7-9, TRBJ1-2)
CASSLKQNYGYTF

SEQ ID NO: 153447 - protein, 13 aa, Homo sapiens
  CDR3 for alpha chain variable domain of TCR clone 76724 (TRAV17, TRAJ26)
CATVDNYGQNFVF

SEQ ID NO: 153448 - protein, 16 aa, Homo sapiens
  CDR3 for beta chain variable domain of TCR clone 76724 (TRBV2, TRBJ2-1)
CASSVGGSLSDNEQFF

SEQ ID NO: 153449 - protein, 12 aa, Homo sapiens
  CDR3 for alpha chain variable domain of TCR clone 76725 (TRAV12-2, TRAJ10)
WGVTGGGNKLTF

SEQ ID NO: 153450 - protein, 14 aa, Homo sapiens
  CDR3 for beta chain variable domain of TCR clone 76725 (TRBV11-3, TRBJ1-6)
CASSFSGGDSPLHF

SEQ ID NO: 153451 - protein, 13 aa, Homo sapiens
  CDR3 for alpha chain variable domain of TCR clone 76726 (TRAV8-4, TRAJ3)
CAVSDSGASKLIF

SEQ ID NO: 153452 - protein, 16 aa, Homo sapiens
  CDR3 for beta chain variable domain of TCR clone 76726 (TRBV7-9, TRBJ2-7)
CASSNHGGQEKYEQYF

SEQ ID NO: 153453 - protein, 15 aa, Homo sapiens
  CDR3 for alpha chain variable domain of TCR clone 76727 (TRAV2, TRAJ15)
CAVEDRGQAGTALIF

SEQ ID NO: 153454 - protein, 12 aa, Homo sapiens
  CDR3 for beta chain variable domain of TCR clone 76727 (TRBV11-2, TRBJ2-2)
CASSLGGGELFF

SEQ ID NO: 153455 - protein, 15 aa, Homo sapiens
  CDR3 for alpha chain variable domain of TCR clone 76728 (TRAV25, TRAJ53)
CAATGGGGSNYKLIF

SEQ ID NO: 153456 - protein, 19 aa, Homo sapiens
  CDR3 for beta chain variable domain of TCR clone 76728 (TRBV7-2, TRBJ2-3)
CASSFLSRNWGGGTDTQYF

SEQ ID NO: 153457 - protein, 17 aa, Homo sapiens
  CDR3 for alpha chain variable domain of TCR clone 76729 (TRAV13-1, TRAJ52)
CAAGRNVGGTSYGKLTF

SEQ ID NO: 153458 - protein, 15 aa, Homo sapiens
  CDR3 for beta chain variable domain of TCR clone 76729 (TRBV6-3, TRBJ2-7)
CASSSPGTVFYEQYF

SEQ ID NO: 153459 - protein, 16 aa, Homo sapiens
  CDR3 for alpha chain variable domain of TCR clone 76730 (TRAV19, TRAJ17)
CAPWGQIKAAGNKLTF

SEQ ID NO: 153460 - protein, 16 aa, Homo sapiens
  CDR3 for beta chain variable domain of TCR clone 76730 (TRBV7-3, TRBJ2-1)
CASSLSSGRGAKEQFF

SEQ ID NO: 153461 - protein, 14 aa, Homo sapiens
  CDR3 for alpha chain variable domain of TCR clone 76731 (TRAV8-6, TRAJ57)
CAAYTQGGSEELVF

SEQ ID NO: 153462 - protein, 14 aa, Homo sapiens
  CDR3 for beta chain variable domain of TCR clone 76731 (TRBV7-6, TRBJ1-6)
CASSPNRGDSPLHF

SEQ ID NO: 153463 - protein, 13 aa, Homo sapiens
  CDR3 for alpha chain variable domain of TCR clone 76732 (TRAV16, TRAJ28)
CALTGAGSYQLTL

SEQ ID NO: 153464 - protein, 16 aa, Homo sapiens
  CDR3 for beta chain variable domain of TCR clone 76732 (TRBV15, TRBJ2-7)
CATSRDGGIPSYEQYF

SEQ ID NO: 153465 - protein, 13 aa, Homo sapiens
  CDR3 for alpha chain variable domain of TCR clone 76733 (TRAV2, TRAJ29)
CAAVNSGNTPLVF

SEQ ID NO: 153466 - protein, 16 aa, Homo sapiens
  CDR3 for beta chain variable domain of TCR clone 76733 (TRBV7-9, TRBJ1-2)
CASSPGGGAINYGYTF

SEQ ID NO: 153467 - protein, 14 aa, Homo sapiens
  CDR3 for alpha chain variable domain of TCR clone 76734 (TRAV12-3, TRAJ6)
CAMSATGGSYIPTF

SEQ ID NO: 153468 - protein, 16 aa, Homo sapiens
  CDR3 for beta chain variable domain of TCR clone 76734 (TRBV4-2, TRBJ2-1)
CASSPRAGQGANEQLF

SEQ ID NO: 153469 - protein, 14 aa, Homo sapiens
  CDR3 for alpha chain variable domain of TCR clone 76735 (TRAV26-1, TRAJ34)
CIVRVAYNTDKLIF

SEQ ID NO: 153470 - protein, 15 aa, Homo sapiens
  CDR3 for beta chain variable domain of TCR clone 76735 (TRBV20-1, TRBJ2-7)
CSARVPAAYFYEQCF

SEQ ID NO: 153471 - protein, 22 aa, Homo sapiens
  CDR3 for alpha chain variable domain of TCR clone 76736 (TRAV2, TRAJ38)
CAVEDFPNAGNNHIQNPDPAVY

SEQ ID NO: 153472 - protein, 14 aa, Homo sapiens
  CDR3 for beta chain variable domain of TCR clone 76736 (TRBV29-1, TRBJ1-4)
CSVSGRQGGEKLFL

SEQ ID NO: 153473 - protein, 13 aa, Homo sapiens
  CDR3 for alpha chain variable domain of TCR clone 76737 (TRAV29/DV5, TRAJ31)
CAASRNNNARLMF

SEQ ID NO: 153474 - protein, 17 aa, Homo sapiens
  CDR3 for beta chain variable domain of TCR clone 76737 (TRBV20-1, TRBJ2-1)
CSASSSGLAGSYNEQFF

SEQ ID NO: 153475 - protein, 14 aa, Homo sapiens
  CDR3 for alpha chain variable domain of TCR clone 76738 (TRAV1-2, TRAJ16)
CAVNRFSDGQKLLF

SEQ ID NO: 153476 - protein, 15 aa, Homo sapiens
  CDR3 for beta chain variable domain of TCR clone 76738 (TRBV7-9, TRBJ1-6)
CASSSAGRGNSPLHF

SEQ ID NO: 153477 - protein, 16 aa, Homo sapiens
  CDR3 for alpha chain variable domain of TCR clone 76739 (TRAV30, TRAJ24)
CGTEIVGADSWGKFQF

SEQ ID NO: 153478 - protein, 17 aa, Homo sapiens
  CDR3 for beta chain variable domain of TCR clone 76739 (TRBV13, TRBJ2-3)
CASSLSRVAGGRNTQYF

SEQ ID NO: 153479 - protein, 13 aa, Homo sapiens
  CDR3 for alpha chain variable domain of TCR clone 76740 (TRAV2, TRAJ29)
CAAQNSGNTPLVF

SEQ ID NO: 153480 - protein, 14 aa, Homo sapiens
  CDR3 for beta chain variable domain of TCR clone 76740 (TRBV7-9, TRBJ2-4)
CASSLAMGGNIQHF

SEQ ID NO: 153481 - protein, 17 aa, Homo sapiens
  CDR3 for alpha chain variable domain of TCR clone 76741 (TRAV25, TRAJ52)
CAGPLDAGGTSYGKLTF

SEQ ID NO: 153482 - protein, 14 aa, Homo sapiens
  CDR3 for beta chain variable domain of TCR clone 76741 (TRBV29-1, TRBJ1-1)
CSVDLQGASTEAFF

SEQ ID NO: 153483 - protein, 12 aa, Homo sapiens
  CDR3 for alpha chain variable domain of TCR clone 76742 (TRAV17, TRAJ30)
CVPERRDDKIIF

SEQ ID NO: 153484 - protein, 14 aa, Homo sapiens
  CDR3 for beta chain variable domain of TCR clone 76742 (TRBV7-7, TRBJ2-2)
CASSRDRSTGDLFF

SEQ ID NO: 153485 - protein, 18 aa, Homo sapiens
  CDR3 for alpha chain variable domain of TCR clone 76743 (TRAV12-3, TRAJ52)
CAMSVGGAGDTSYGKLTF

SEQ ID NO: 153486 - protein, 15 aa, Homo sapiens
  CDR3 for beta chain variable domain of TCR clone 76743 (TRBV27, TRBJ1-6)
CASSFDRGLGSPLHF

SEQ ID NO: 153487 - protein, 16 aa, Homo sapiens
  CDR3 for alpha chain variable domain of TCR clone 76744 (TRAV27, TRAJ48)
TAAQPGDTGLYLPLTF

SEQ ID NO: 153488 - protein, 14 aa, Homo sapiens
  CDR3 for beta chain variable domain of TCR clone 76744 (TRBV11-2, TRBJ2-3)
CASSRLARTDTQYF

SEQ ID NO: 153489 - protein, 12 aa, Homo sapiens
  CDR3 for alpha chain variable domain of TCR clone 76745 (TRAV35, TRAJ30)
CAGLNRDDKIIF

SEQ ID NO: 153490 - protein, 15 aa, Homo sapiens
  CDR3 for beta chain variable domain of TCR clone 76745 (TRBV9, TRBJ1-6)
CASSVAGTGDSPLYF

SEQ ID NO: 153491 - protein, 16 aa, Homo sapiens
  CDR3 for alpha chain variable domain of TCR clone 76746 (TRAV20, TRAJ53)
CAVQAESGGSNYKLTF

SEQ ID NO: 153492 - protein, 15 aa, Homo sapiens
  CDR3 for beta chain variable domain of TCR clone 76746 (TRBV25-1, TRBJ1-4)
CASSPGDSTNEKLFF

SEQ ID NO: 153493 - protein, 12 aa, Homo sapiens
  CDR3 for alpha chain variable domain of TCR clone 76747 (TRAV8-3, TRAJ26)
CAGDNYGQNFVF

SEQ ID NO: 153494 - protein, 14 aa, Homo sapiens
  CDR3 for beta chain variable domain of TCR clone 76747 (TRBV19, TRBJ1-1)
CASSIEVSGRSAFF

SEQ ID NO: 153495 - protein, 11 aa, Homo sapiens
  CDR3 for alpha chain variable domain of TCR clone 76748 (TRAV12-2, TRAJ54)
CAVEGAQKLGF

SEQ ID NO: 153496 - protein, 17 aa, Homo sapiens
  CDR3 for beta chain variable domain of TCR clone 76748 (TRBV18, TRBJ1-3)
CASSPYPTGPSGNTIYF

SEQ ID NO: 153497 - protein, 13 aa, Homo sapiens
  CDR3 for alpha chain variable domain of TCR clone 76749 (TRAV20, TRAJ37)
CSGCSSNTGKLIF

SEQ ID NO: 153498 - protein, 14 aa, Homo sapiens
  CDR3 for beta chain variable domain of TCR clone 76749 (TRBV20-1, TRBJ2-5)
CSARDGRAGETQYF

SEQ ID NO: 153499 - protein, 17 aa, Homo sapiens
  CDR3 for alpha chain variable domain of TCR clone 76750 (TRAV3, TRAJ6)
CAVRDGPRAGGSYIPTF

SEQ ID NO: 153500 - protein, 16 aa, Homo sapiens
  CDR3 for beta chain variable domain of TCR clone 76750 (TRBV5-1, TRBJ1-1)
CASSSGGNSLNTEAFF

SEQ ID NO: 153501 - protein, 17 aa, Homo sapiens
  CDR3 for alpha chain variable domain of TCR clone 76751 (TRAV8-3, TRAJ8)
CAVGPNEHRLSETCILN

SEQ ID NO: 153502 - protein, 13 aa, Homo sapiens
  CDR3 for beta chain variable domain of TCR clone 76751 (TRBV10-2, TRBJ2-3)
CASSESGDHTQYF

SEQ ID NO: 153503 - protein, 14 aa, Homo sapiens
  CDR3 for alpha chain variable domain of TCR clone 76752 (TRAV3, TRAJ34)
CAVRAPGSTDKLIF

SEQ ID NO: 153504 - protein, 17 aa, Homo sapiens
  CDR3 for beta chain variable domain of TCR clone 76752 (TRBV20-1, TRBJ2-7)
CSAAPGLARGISYEQYF

SEQ ID NO: 153505 - protein, 12 aa, Homo sapiens
  CDR3 for alpha chain variable domain of TCR clone 76753 (TRAV12-2, TRAJ10)
WGVTGGGNKLTF

SEQ ID NO: 153506 - protein, 11 aa, Homo sapiens
  CDR3 for beta chain variable domain of TCR clone 76753 (TRBV11-2, TRBJ2-2)
CASSLPGELFF

SEQ ID NO: 153507 - protein, 16 aa, Homo sapiens
  CDR3 for alpha chain variable domain of TCR clone 76754 (TRAV12-2, TRAJ18)
CAVTTDRGSTLGRLYF

SEQ ID NO: 153508 - protein, 14 aa, Homo sapiens
  CDR3 for beta chain variable domain of TCR clone 76754 (TRBV4-2, TRBJ1-5)
CASSQDSINQPQHL

SEQ ID NO: 153509 - protein, 14 aa, Homo sapiens
  CDR3 for alpha chain variable domain of TCR clone 76755 (TRAV29/DV5, TRAJ36)
CAARRKTGANNLFF

SEQ ID NO: 153510 - protein, 11 aa, Homo sapiens
  CDR3 for beta chain variable domain of TCR clone 76755 (TRBV7-9, TRBJ2-3)
CASSGPDTQYF

SEQ ID NO: 153511 - protein, 13 aa, Homo sapiens
  CDR3 for alpha chain variable domain of TCR clone 76756 (TRAV12-1, TRAJ6)
CVVFPGGSYIPTF

SEQ ID NO: 153512 - protein, 15 aa, Homo sapiens
  CDR3 for beta chain variable domain of TCR clone 76756 (TRBV11-2, TRBJ2-1)
CASSLGTSGLNEQFF

SEQ ID NO: 153513 - protein, 15 aa, Homo sapiens
  CDR3 for alpha chain variable domain of TCR clone 76757 (TRAV3, TRAJ3)
CAVRDRRSSASKLIF

SEQ ID NO: 153514 - protein, 13 aa, Homo sapiens
  CDR3 for beta chain variable domain of TCR clone 76757 (TRBV9, TRBJ2-5)
CASSPAGLGTQYF

SEQ ID NO: 153515 - protein, 14 aa, Homo sapiens
  CDR3 for alpha chain variable domain of TCR clone 76758 (TRAV17, TRAJ49)
CATDARDTGNQFYF

SEQ ID NO: 153516 - protein, 15 aa, Homo sapiens
  CDR3 for beta chain variable domain of TCR clone 76758 (TRBV5-8, TRBJ1-1)
CASSFSGTSLKGAFF

SEQ ID NO: 153517 - protein, 14 aa, Homo sapiens
  CDR3 for alpha chain variable domain of TCR clone 76759 (TRAV2, TRAJ37)
CAVDFTSNTGKLIF

SEQ ID NO: 153518 - protein, 15 aa, Homo sapiens
  CDR3 for beta chain variable domain of TCR clone 76759 (TRBV20-1, TRBJ1-1)
CSASRGVTGNTEACF

SEQ ID NO: 153519 - protein, 17 aa, Homo sapiens
  CDR3 for alpha chain variable domain of TCR clone 76760 (TRAV13-1, TRAJ52)
CAASSGAGGTSYGKLTF

SEQ ID NO: 153520 - protein, 14 aa, Homo sapiens
  CDR3 for beta chain variable domain of TCR clone 76760 (TRBV11-2, TRBJ2-7)
CASSLGAGAYEQYF

SEQ ID NO: 153521 - protein, 19 aa, Homo sapiens
  CDR3 for alpha chain variable domain of TCR clone 76761 (TRAV3, TRAJ6)
CAVRDRNPSRSGGSYIPTF

SEQ ID NO: 153522 - protein, 15 aa, Homo sapiens
  CDR3 for beta chain variable domain of TCR clone 76761 (TRBV18, TRBJ2-7)
CASSPTFMDSYEHYF

SEQ ID NO: 153523 - protein, 14 aa, Homo sapiens
  CDR3 for alpha chain variable domain of TCR clone 76762 (TRAV20, TRAJ42)
CAVQAGGSQGNLIF

SEQ ID NO: 153524 - protein, 14 aa, Homo sapiens
  CDR3 for beta chain variable domain of TCR clone 76762 (TRBV28, TRBJ1-2)
CASRIHGANYGYTF

SEQ ID NO: 153525 - protein, 15 aa, Homo sapiens
  CDR3 for alpha chain variable domain of TCR clone 76763 (TRAV26-1, TRAJ29)
CIVRVEGSENTPLVF

SEQ ID NO: 153526 - protein, 15 aa, Homo sapiens
  CDR3 for beta chain variable domain of TCR clone 76763 (TRBV7-9, TRBJ1-5)
CASSQGHQPNQPQHF

SEQ ID NO: 153527 - protein, 15 aa, Homo sapiens
  CDR3 for alpha chain variable domain of TCR clone 76764 (TRAV3, TRAJ17)
CAVRDTGAAGNKLPF

SEQ ID NO: 153528 - protein, 14 aa, Homo sapiens
  CDR3 for beta chain variable domain of TCR clone 76764 (TRBV6-3, TRBJ1-1)
CASSNLLPGAEAFF

SEQ ID NO: 153529 - protein, 14 aa, Homo sapiens
  CDR3 for alpha chain variable domain of TCR clone 76765 (TRAV12-3, TRAJ42)
CAMNYGGSQGNLIF

SEQ ID NO: 153530 - protein, 13 aa, Homo sapiens
  CDR3 for beta chain variable domain of TCR clone 76765 (TRBV19, TRBJ1-1)
CASSITGESEAFF

SEQ ID NO: 153531 - protein, 14 aa, Homo sapiens
  CDR3 for alpha chain variable domain of TCR clone 76766 (TRAV1-2, TRAJ8)
CAVREDTGFPKLVF

SEQ ID NO: 153532 - protein, 15 aa, Homo sapiens
  CDR3 for beta chain variable domain of TCR clone 76766 (TRBV12-4, TRBJ2-5)
CASSPPTGLQETQYF

SEQ ID NO: 153533 - protein, 12 aa, Homo sapiens
  CDR3 for alpha chain variable domain of TCR clone 76767 (TRAV22, TRAJ20)
CAVGSYDYKLSF

SEQ ID NO: 153534 - protein, 12 aa, Homo sapiens
  CDR3 for beta chain variable domain of TCR clone 76767 (TRBV7-9, TRBJ2-7)
CASSLGAYEQYF

SEQ ID NO: 153535 - protein, 13 aa, Homo sapiens
  CDR3 for alpha chain variable domain of TCR clone 76768 (TRAV2, TRAJ40)
CAVVTSGTYKYIF

SEQ ID NO: 153536 - protein, 16 aa, Homo sapiens
  CDR3 for beta chain variable domain of TCR clone 76768 (TRBV2, TRBJ1-4)
CASNLLQGATNEKLFF

SEQ ID NO: 153537 - protein, 16 aa, Homo sapiens
  CDR3 for alpha chain variable domain of TCR clone 76769 (TRAV38-1, TRAJ37)
CAFKGDGSSNPGKLIF

SEQ ID NO: 153538 - protein, 13 aa, Homo sapiens
  CDR3 for beta chain variable domain of TCR clone 76769 (TRBV12-4, TRBJ2-5)
CASSLFRRETQYF

SEQ ID NO: 153539 - protein, 13 aa, Homo sapiens
  CDR3 for alpha chain variable domain of TCR clone 76770 (TRAV8-3, TRAJ37)
CAVPSSNTGELIF

SEQ ID NO: 153540 - protein, 12 aa, Homo sapiens
  CDR3 for beta chain variable domain of TCR clone 76770 (TRBV11-2, TRBJ2-1)
CASSPGNNEQFF

SEQ ID NO: 153541 - protein, 19 aa, Homo sapiens
  CDR3 for alpha chain variable domain of TCR clone 76771 (TRAV26-1, TRAJ52)
CIVRAHRNAGGTSYGKLTF

SEQ ID NO: 153542 - protein, 20 aa, Homo sapiens
  CDR3 for beta chain variable domain of TCR clone 76771 (TRBV7-8, TRBJ2-2)
CASSHLFPGPTIHITGELFF

SEQ ID NO: 153543 - protein, 14 aa, Homo sapiens
  CDR3 for alpha chain variable domain of TCR clone 76772 (TRAV9-2, TRAJ39)
CALYIYSAGNMLIF

SEQ ID NO: 153544 - protein, 18 aa, Homo sapiens
  CDR3 for beta chain variable domain of TCR clone 76772 (TRBV20-1, TRBJ2-6)
CSAETTPTHGSGANVLTF

SEQ ID NO: 153545 - protein, 13 aa, Homo sapiens
  CDR3 for alpha chain variable domain of TCR clone 76773 (TRAV27, TRAJ56)
CAGKPGANSKLTF

SEQ ID NO: 153546 - protein, 18 aa, Homo sapiens
  CDR3 for beta chain variable domain of TCR clone 76773 (TRBV11-2, TRBJ2-3)
CASSLRGASRGAPNTQYF

SEQ ID NO: 153547 - protein, 14 aa, Homo sapiens
  CDR3 for alpha chain variable domain of TCR clone 76774 (TRAV12-1, TRAJ12)
CVVTRMDSSYKLIF

SEQ ID NO: 153548 - protein, 14 aa, Homo sapiens
  CDR3 for beta chain variable domain of TCR clone 76774 (TRBV6-1, TRBJ1-3)
CASVQGGGGNTIYF

SEQ ID NO: 153549 - protein, 14 aa, Homo sapiens
  CDR3 for alpha chain variable domain of TCR clone 76775 (TRAV13-2, TRAJ9)
CAENSFTGGFKTIF

SEQ ID NO: 153550 - protein, 13 aa, Homo sapiens
  CDR3 for beta chain variable domain of TCR clone 76775 (TRBV19, TRBJ2-7)
CASSIDRTYEQYL

SEQ ID NO: 153551 - protein, 11 aa, Homo sapiens
  CDR3 for alpha chain variable domain of TCR clone 76776 (TRAV3, TRAJ21)
CAVGNSNKFYF

SEQ ID NO: 153552 - protein, 17 aa, Homo sapiens
  CDR3 for beta chain variable domain of TCR clone 76776 (TRBV24-1, TRBJ2-1)
CATSDVSTSGTYNEQFF

SEQ ID NO: 153553 - protein, 12 aa, Homo sapiens
  CDR3 for alpha chain variable domain of TCR clone 76777 (TRAV21, TRAJ33)
CAKMDSNYQLIW

SEQ ID NO: 153554 - protein, 18 aa, Homo sapiens
  CDR3 for beta chain variable domain of TCR clone 76777 (TRBV15, TRBJ2-3)
RATSRDGARSWDTDTQYF

SEQ ID NO: 153555 - protein, 11 aa, Homo sapiens
  CDR3 for alpha chain variable domain of TCR clone 76778 (TRAV35, TRAJ30)
CAGERDDKIIF

SEQ ID NO: 153556 - protein, 14 aa, Homo sapiens
  CDR3 for beta chain variable domain of TCR clone 76778 (TRBV15, TRBJ2-5)
CATSGDRGQVTQYF

SEQ ID NO: 153557 - protein, 15 aa, Homo sapiens
  CDR3 for alpha chain variable domain of TCR clone 76779 (TRAV20, TRAJ28)
CAVQYSWAGSYQLTF

SEQ ID NO: 153558 - protein, 12 aa, Homo sapiens
  CDR3 for beta chain variable domain of TCR clone 76779 (TRBV12-4, TRBJ1-3)
CASRASGNTMYF

SEQ ID NO: 153559 - protein, 14 aa, Homo sapiens
  CDR3 for alpha chain variable domain of TCR clone 76780 (TRAV36/DV7, TRAJ44)
CCGANTGTASKLTF

SEQ ID NO: 153560 - protein, 13 aa, Homo sapiens
  CDR3 for beta chain variable domain of TCR clone 76780 (TRBV18, TRBJ2-2)
CASSPTRGGELFF

SEQ ID NO: 153561 - protein, 18 aa, Homo sapiens
  CDR3 for alpha chain variable domain of TCR clone 76781 (TRAV17, TRAJ57)
CFLLLCYGPQGGSEKLVF

SEQ ID NO: 153562 - protein, 20 aa, Homo sapiens
  CDR3 for beta chain variable domain of TCR clone 76781 (TRBV28, TRBJ2-1)
CASTPIGRSPGLAGGNEQFF

SEQ ID NO: 153563 - protein, 15 aa, Homo sapiens
  CDR3 for alpha chain variable domain of TCR clone 76782 (TRAV12-2, TRAJ20)
CAVKGGFGAGTTVTV

SEQ ID NO: 153564 - protein, 16 aa, Homo sapiens
  CDR3 for beta chain variable domain of TCR clone 76782 (TRBV2, TRBJ1-2)
CASSEGQANSGYGYTF

SEQ ID NO: 153565 - protein, 12 aa, Homo sapiens
  CDR3 for alpha chain variable domain of TCR clone 76783 (TRAV12-3, TRAJ17)
CAMTLTGNNLTF

SEQ ID NO: 153566 - protein, 20 aa, Homo sapiens
  CDR3 for beta chain variable domain of TCR clone 76783 (TRBV19, TRBJ2-1)
CASSISRTVTSTRLNNEQFF

SEQ ID NO: 153567 - protein, 15 aa, Homo sapiens
  CDR3 for alpha chain variable domain of TCR clone 76784 (TRAV21, TRAJ53)
CATLNSGGSNYKLTF

SEQ ID NO: 153568 - protein, 14 aa, Homo sapiens
  CDR3 for beta chain variable domain of TCR clone 76784 (TRBV20-1, TRBJ2-1)
CSAQVGGSANEQFF

SEQ ID NO: 153569 - protein, 16 aa, Homo sapiens
  CDR3 for alpha chain variable domain of TCR clone 76785 (TRAV26-1, TRAJ53)
CIVRVAMGGSNYKLTF

SEQ ID NO: 153570 - protein, 16 aa, Homo sapiens
  CDR3 for beta chain variable domain of TCR clone 76785 (TRBV28, TRBJ2-7)
CASSLFFETGGHEQYF

SEQ ID NO: 153571 - protein, 14 aa, Homo sapiens
  CDR3 for alpha chain variable domain of TCR clone 76786 (TRAV26-2, TRAJ11)
CIPRLNSGYSTLTF

SEQ ID NO: 153572 - protein, 15 aa, Homo sapiens
  CDR3 for beta chain variable domain of TCR clone 76786 (TRBV20-1, TRBJ2-7)
CSARVPAAYFYEQYF

SEQ ID NO: 153573 - protein, 14 aa, Homo sapiens
  CDR3 for alpha chain variable domain of TCR clone 76787 (TRAV2, TRAJ9)
CAVEDRSGGFKTIF

SEQ ID NO: 153574 - protein, 18 aa, Homo sapiens
  CDR3 for beta chain variable domain of TCR clone 76787 (TRBV11-2, TRBJ2-3)
CASSVGGASRGAPNTQYF

SEQ ID NO: 153575 - protein, 13 aa, Homo sapiens
  CDR3 for alpha chain variable domain of TCR clone 76788 (TRAV2, TRAJ15)
CAVASQAGTALIF

SEQ ID NO: 153576 - protein, 14 aa, Homo sapiens
  CDR3 for beta chain variable domain of TCR clone 76788 (TRBV7-2, TRBJ2-7)
CASSLYPGRYEQYF

SEQ ID NO: 153577 - protein, 13 aa, Homo sapiens
  CDR3 for alpha chain variable domain of TCR clone 76789 (TRAV8-4, TRAJ30)
CAVSVNRDDKIIF

SEQ ID NO: 153578 - protein, 14 aa, Homo sapiens
  CDR3 for beta chain variable domain of TCR clone 76789 (TRBV6-1, TRBJ1-3)
CASVQGGGGNTIYF

SEQ ID NO: 153579 - protein, 14 aa, Homo sapiens
  CDR3 for alpha chain variable domain of TCR clone 76790 (TRAV8-4, TRAJ17)
CAVSDQAAGNKLTF

SEQ ID NO: 153580 - protein, 15 aa, Homo sapiens
  CDR3 for beta chain variable domain of TCR clone 76790 (TRBV7-2, TRBJ1-2)
CASSLAPDRGLGYAF

SEQ ID NO: 153581 - protein, 12 aa, Homo sapiens
  CDR3 for alpha chain variable domain of TCR clone 76791 (TRAV16, TRAJ10)
CSRTGGGNELTF

SEQ ID NO: 153582 - protein, 12 aa, Homo sapiens
  CDR3 for beta chain variable domain of TCR clone 76791 (TRBV11-3, TRBJ1-1)
CASSHRQGEAFF

SEQ ID NO: 153583 - protein, 17 aa, Homo sapiens
  CDR3 for alpha chain variable domain of TCR clone 76792 (TRAV3, TRAJ42)
CAVRDRDYGGSQGNLIF

SEQ ID NO: 153584 - protein, 15 aa, Homo sapiens
  CDR3 for beta chain variable domain of TCR clone 76792 (TRBV6-6, TRBJ2-7)
CASSYSCGGSYEQYF

SEQ ID NO: 153585 - protein, 11 aa, Homo sapiens
  CDR3 for alpha chain variable domain of TCR clone 76793 (TRAV17, TRAJ9)
CATTGGFKTIF

SEQ ID NO: 153586 - protein, 14 aa, Homo sapiens
  CDR3 for beta chain variable domain of TCR clone 76793 (TRBV7-9, TRBJ2-2)
CVSSGLADTGELFF

SEQ ID NO: 153587 - protein, 13 aa, Homo sapiens
  CDR3 for alpha chain variable domain of TCR clone 76794 (TRAV3, TRAJ15)
CAVRDQAGTALIF

SEQ ID NO: 153588 - protein, 15 aa, Homo sapiens
  CDR3 for beta chain variable domain of TCR clone 76794 (TRBV11-1, TRBJ2-7)
CASSLNYGAYYEQYF

SEQ ID NO: 153589 - protein, 14 aa, Homo sapiens
  CDR3 for alpha chain variable domain of TCR clone 76795 (TRAV1-2, TRAJ16)
CAVNRFSDGQKLLF

SEQ ID NO: 153590 - protein, 16 aa, Homo sapiens
  CDR3 for beta chain variable domain of TCR clone 76795 (TRBV20-1, TRBJ1-2)
CSASMGQGAANYGYTF

SEQ ID NO: 153591 - protein, 15 aa, Homo sapiens
  CDR3 for alpha chain variable domain of TCR clone 76796 (TRAV3, TRAJ22)
CAVRDRGGSARQLTF

SEQ ID NO: 153592 - protein, 16 aa, Homo sapiens
  CDR3 for beta chain variable domain of TCR clone 76796 (TRBV5-4, TRBJ2-3)
CASQQPGADGADTQYF

SEQ ID NO: 153593 - protein, 15 aa, Homo sapiens
  CDR3 for alpha chain variable domain of TCR clone 76797 (TRAV3, TRAJ3)
CAVRDRDGSASKIIF

SEQ ID NO: 153594 - protein, 18 aa, Homo sapiens
  CDR3 for beta chain variable domain of TCR clone 76797 (TRBV25-1, TRBJ1-2)
CASSGLQNGQGLIFGYTF

SEQ ID NO: 153595 - protein, 16 aa, Homo sapiens
  CDR3 for alpha chain variable domain of TCR clone 76798 (TRAV20, TRAJ28)
CAVRDPSGAGSYQLTF

SEQ ID NO: 153596 - protein, 16 aa, Homo sapiens
  CDR3 for beta chain variable domain of TCR clone 76798 (TRBV6-1, TRBJ2-5)
CASSETLDRGAETQYF

SEQ ID NO: 153597 - protein, 18 aa, Homo sapiens
  CDR3 for alpha chain variable domain of TCR clone 76799 (TRAV12-3, TRAJ52)
CAMSVGGAGGTSYGKLTF

SEQ ID NO: 153598 - protein, 15 aa, Homo sapiens
  CDR3 for beta chain variable domain of TCR clone 76799 (TRBV7-6, TRBJ1-5)
CASSQSSGINQPQHF

SEQ ID NO: 153599 - protein, 10 aa, Homo sapiens
  CDR3 for alpha chain variable domain of TCR clone 76800 (TRAV1-2, TRAJ23)
CAAWAGKLIF

SEQ ID NO: 153600 - protein, 13 aa, Homo sapiens
  CDR3 for beta chain variable domain of TCR clone 76800 (TRBV7-9, TRBJ1-2)
CASSLKQNYGYTF

SEQ ID NO: 153601 - protein, 15 aa, Homo sapiens
  CDR3 for alpha chain variable domain of TCR clone 76801 (TRAV21, TRAJ40)
CAVRPQTSGTYKYIF

SEQ ID NO: 153602 - protein, 14 aa, Homo sapiens
  CDR3 for beta chain variable domain of TCR clone 76801 (TRBV19, TRBJ2-1)
CASSMGSGRRSSSS

SEQ ID NO: 153603 - protein, 14 aa, Homo sapiens
  CDR3 for alpha chain variable domain of TCR clone 76802 (TRAV26-1, TRAJ26)
CIVRATFLGHNFVF

SEQ ID NO: 153604 - protein, 16 aa, Homo sapiens
  CDR3 for beta chain variable domain of TCR clone 76802 (TRBV12-4, TRBJ2-7)
CASRSTGTGPSYEQYF

SEQ ID NO: 153605 - protein, 16 aa, Homo sapiens
  CDR3 for alpha chain variable domain of TCR clone 76803 (TRAV36/DV7, TRAJ33)
WRPGNKVQDSNYQLIW

SEQ ID NO: 153606 - protein, 16 aa, Homo sapiens
  CDR3 for beta chain variable domain of TCR clone 76803 (TRBV19, TRBJ2-5)
VSDRLPIFFLGETQYF

SEQ ID NO: 153607 - protein, 14 aa, Homo sapiens
  CDR3 for alpha chain variable domain of TCR clone 76804 (TRAV3, TRAJ21)
CAVRDAYNFNKFHF

SEQ ID NO: 153608 - protein, 17 aa, Homo sapiens
  CDR3 for beta chain variable domain of TCR clone 76804 (TRBV20-1, TRBJ1-6)
CSARGGYTFSYNSPLHF

SEQ ID NO: 153609 - protein, 13 aa, Homo sapiens
  CDR3 for alpha chain variable domain of TCR clone 76805 (TRAV25, TRAJ47)
CAGHREYGNKLVF

SEQ ID NO: 153610 - protein, 17 aa, Homo sapiens
  CDR3 for beta chain variable domain of TCR clone 76805 (TRBV7-8, TRBJ2-5)
CASSLASGGRFQKTQYF

SEQ ID NO: 153611 - protein, 13 aa, Homo sapiens
  CDR3 for alpha chain variable domain of TCR clone 76806 (TRAV8-4, TRAJ30)
CAVSVNRDDKIIF

SEQ ID NO: 153612 - protein, 15 aa, Homo sapiens
  CDR3 for beta chain variable domain of TCR clone 76806 (TRBV12-4, TRBJ2-5)
CASSPPTGLQETQYF

SEQ ID NO: 153613 - protein, 14 aa, Homo sapiens
  CDR3 for alpha chain variable domain of TCR clone 76807 (TRAV38-1, TRAJ29)
CAFITPSGNTPLVF

SEQ ID NO: 153614 - protein, 13 aa, Homo sapiens
  CDR3 for beta chain variable domain of TCR clone 76807 (TRBV27, TRBJ2-7)
CASSLTTGYEQYF

SEQ ID NO: 153615 - protein, 11 aa, Homo sapiens
  CDR3 for alpha chain variable domain of TCR clone 76808 (TRAV2, TRAJ13)
CASGGYQKVTF

SEQ ID NO: 153616 - protein, 14 aa, Homo sapiens
  CDR3 for beta chain variable domain of TCR clone 76808 (TRBV6-3, TRBJ2-1)
CASSYSPGYNEQFF

SEQ ID NO: 153617 - protein, 12 aa, Homo sapiens
  CDR3 for alpha chain variable domain of TCR clone 76809 (TRAV4, TRAJ26)
CLVGDYGQNFVF

SEQ ID NO: 153618 - protein, 16 aa, Homo sapiens
  CDR3 for beta chain variable domain of TCR clone 76809 (TRBV7-2, TRBJ1-2)
CASSSNQDRRGHVYTF

SEQ ID NO: 153619 - protein, 13 aa, Homo sapiens
  CDR3 for alpha chain variable domain of TCR clone 76810 (TRAV38-1, TRAJ42)
CARWGGSQGNLIF

SEQ ID NO: 153620 - protein, 17 aa, Homo sapiens
  CDR3 for beta chain variable domain of TCR clone 76810 (TRBV20-1, TRBJ2-1)
CSARDPLAGVWTMSSSS

SEQ ID NO: 153621 - protein, 14 aa, Homo sapiens
  CDR3 for alpha chain variable domain of TCR clone 76811 (TRAV12-2, TRAJ5)
CAVNRSTGRRALTF

SEQ ID NO: 153622 - protein, 14 aa, Homo sapiens
  CDR3 for beta chain variable domain of TCR clone 76811 (TRBV7-9, TRBJ2-7)
CASSLSQGSYEQYF

SEQ ID NO: 153623 - protein, 12 aa, Homo sapiens
  CDR3 for alpha chain variable domain of TCR clone 76812 (TRAV17, TRAJ57)
CATDRGSEKLVF

SEQ ID NO: 153624 - protein, 13 aa, Homo sapiens
  CDR3 for beta chain variable domain of TCR clone 76812 (TRBV7-9, TRBJ2-7)
CASSFAGAYEQYF

SEQ ID NO: 153625 - protein, 14 aa, Homo sapiens
  CDR3 for alpha chain variable domain of TCR clone 76813 (TRAV12-1, TRAJ3)
CDAARYSSASKIIF

SEQ ID NO: 153626 - protein, 15 aa, Homo sapiens
  CDR3 for beta chain variable domain of TCR clone 76813 (TRBV7-2, TRBJ2-6)
CASSREGSGANVLTF

SEQ ID NO: 153627 - protein, 14 aa, Homo sapiens
  CDR3 for alpha chain variable domain of TCR clone 76814 (TRAV3, TRAJ20)
CAVPPAPNDYKLSF

SEQ ID NO: 153628 - protein, 15 aa, Homo sapiens
  CDR3 for beta chain variable domain of TCR clone 76814 (TRBV6-4, TRBJ2-7)
CASSDQGPPNYEQYF

SEQ ID NO: 153629 - protein, 16 aa, Homo sapiens
  CDR3 for alpha chain variable domain of TCR clone 76815 (TRAV3, TRAJ37)
CAVRVGGSGNTGKLIF

SEQ ID NO: 153630 - protein, 15 aa, Homo sapiens
  CDR3 for beta chain variable domain of TCR clone 76815 (TRBV9, TRBJ1-6)
CASSVAGTGDSPLHF

SEQ ID NO: 153631 - protein, 14 aa, Homo sapiens
  CDR3 for alpha chain variable domain of TCR clone 76816 (TRAV1-2, TRAJ16)
CAVNRFSDGQKLLF

SEQ ID NO: 153632 - protein, 11 aa, Homo sapiens
  CDR3 for beta chain variable domain of TCR clone 76816 (TRBV29-1, TRBJ2-5)
RSEDRTGTQYF

SEQ ID NO: 153633 - protein, 14 aa, Homo sapiens
  CDR3 for alpha chain variable domain of TCR clone 76817 (TRAV1-2, TRAJ16)
CAVNRFSDGQKLLF

SEQ ID NO: 153634 - protein, 16 aa, Homo sapiens
  CDR3 for beta chain variable domain of TCR clone 76817 (TRBV12-4, TRBJ2-5)
CASSFCVRGRQETQYF

SEQ ID NO: 153635 - protein, 15 aa, Homo sapiens
  CDR3 for alpha chain variable domain of TCR clone 76818 (TRAV8-6, TRAJ23)
CAVRLIYNQGGKLIF

SEQ ID NO: 153636 - protein, 13 aa, Homo sapiens
  CDR3 for beta chain variable domain of TCR clone 76818 (TRBV11-2, TRBJ2-2)
CAGSLQNTGELFF

SEQ ID NO: 153637 - protein, 14 aa, Homo sapiens
  CDR3 for alpha chain variable domain of TCR clone 76819 (TRAV1-2, TRAJ16)
CAVSRFSDGQKLLF

SEQ ID NO: 153638 - protein, 16 aa, Homo sapiens
  CDR3 for beta chain variable domain of TCR clone 76819 (TRBV12-4, TRBJ1-5)
CASSRPVGGSNQPQHF

SEQ ID NO: 153639 - protein, 14 aa, Homo sapiens
  CDR3 for alpha chain variable domain of TCR clone 76820 (TRAV8-3, TRAJ10)
CAVGNAGGGNKLTF

SEQ ID NO: 153640 - protein, 12 aa, Homo sapiens
  CDR3 for beta chain variable domain of TCR clone 76820 (TRBV19, TRBJ2-7)
CASTSVGSEQYF

SEQ ID NO: 153641 - protein, 18 aa, Homo sapiens
  CDR3 for alpha chain variable domain of TCR clone 76821 (TRAV13-1, TRAJ52)
CAAKNPNAGGTSYGKLTF

SEQ ID NO: 153642 - protein, 18 aa, Homo sapiens
  CDR3 for beta chain variable domain of TCR clone 76821 (TRBV20-1, TRBJ2-6)
CSARTLAGGPSGANVLTF

SEQ ID NO: 153643 - protein, 14 aa, Homo sapiens
  CDR3 for alpha chain variable domain of TCR clone 76822 (TRAV1-2, TRAJ16)
CAVNRFSDGQKLLF

SEQ ID NO: 153644 - protein, 16 aa, Homo sapiens
  CDR3 for beta chain variable domain of TCR clone 76822 (TRBV12-4, TRBJ2-5)
CASSWRPSGDLETQYF

SEQ ID NO: 153645 - protein, 15 aa, Homo sapiens
  CDR3 for alpha chain variable domain of TCR clone 76823 (TRAV8-3, TRAJ45)
CASSYSGGGADGLTF

SEQ ID NO: 153646 - protein, 15 aa, Homo sapiens
  CDR3 for beta chain variable domain of TCR clone 76823 (TRBV18, TRBJ1-1)
CANSPRQGENTEAFF

SEQ ID NO: 153647 - protein, 14 aa, Homo sapiens
  CDR3 for alpha chain variable domain of TCR clone 76824 (TRAV1-2, TRAJ16)
CAVNRFSDGQKLPF

SEQ ID NO: 153648 - protein, 16 aa, Homo sapiens
  CDR3 for beta chain variable domain of TCR clone 76824 (TRBV12-4, TRBJ2-5)
CASSFFVRGRQETQYF

SEQ ID NO: 153649 - protein, 12 aa, Homo sapiens
  CDR3 for alpha chain variable domain of TCR clone 76825 (TRAV12-3, TRAJ52)
IGGGTSYGKLTF

SEQ ID NO: 153650 - protein, 13 aa, Homo sapiens
  CDR3 for beta chain variable domain of TCR clone 76825 (TRBV12-4, TRBJ1-1)
CASSPGTGFEAFF

SEQ ID NO: 153651 - protein, 14 aa, Homo sapiens
  CDR3 for alpha chain variable domain of TCR clone 76826 (TRAV17, TRAJ16)
CATADFSDGQKLLF

SEQ ID NO: 153652 - protein, 12 aa, Homo sapiens
  CDR3 for beta chain variable domain of TCR clone 76826 (TRBV24-1, TRBJ1-1)
CAILYPDTEAFF

SEQ ID NO: 153653 - protein, 17 aa, Homo sapiens
  CDR3 for alpha chain variable domain of TCR clone 76827 (TRAV3, TRAJ6)
CAVRDGPRAGGSYIPTF

SEQ ID NO: 153654 - protein, 15 aa, Homo sapiens
  CDR3 for beta chain variable domain of TCR clone 76827 (TRBV27, TRBJ1-5)
CAGSLGTGFDQPQHF

SEQ ID NO: 153655 - protein, 15 aa, Homo sapiens
  CDR3 for alpha chain variable domain of TCR clone 76828 (TRAV8-4, TRAJ37)
CALTYGSSNTGKLIF

SEQ ID NO: 153656 - protein, 13 aa, Homo sapiens
  CDR3 for beta chain variable domain of TCR clone 76828 (TRBV12-4, TRBJ2-5)
CASSLGGSRTQYF

SEQ ID NO: 153657 - protein, 13 aa, Homo sapiens
  CDR3 for alpha chain variable domain of TCR clone 76829 (TRAV8-3, TRAJ48)
CAAVPFGNEKLTF

SEQ ID NO: 153658 - protein, 19 aa, Homo sapiens
  CDR3 for beta chain variable domain of TCR clone 76829 (TRBV25-1, TRBJ2-2)
CAILVYRVDRGRKTGELFF

SEQ ID NO: 153659 - protein, 15 aa, Homo sapiens
  CDR3 for alpha chain variable domain of TCR clone 76830 (TRAV27, TRAJ38)
CAARRNAGNNRKLIW

SEQ ID NO: 153660 - protein, 13 aa, Homo sapiens
  CDR3 for beta chain variable domain of TCR clone 76830 (TRBV7-3, TRBJ2-1)
CASSLGSYNEQFF

SEQ ID NO: 153661 - protein, 14 aa, Homo sapiens
  CDR3 for alpha chain variable domain of TCR clone 76831 (TRAV23/DV6, TRAJ58)
CAAAKETSGSRLTF

SEQ ID NO: 153662 - protein, 16 aa, Homo sapiens
  CDR3 for beta chain variable domain of TCR clone 76831 (TRBV10-3, TRBJ2-1)
CAISGVGDGGGGEQFF

SEQ ID NO: 153663 - protein, 17 aa, Homo sapiens
  CDR3 for alpha chain variable domain of TCR clone 76832 (TRAV3, TRAJ42)
CAVRDRDYGGSQGNLIF

SEQ ID NO: 153664 - protein, 15 aa, Homo sapiens
  CDR3 for beta chain variable domain of TCR clone 76832 (TRBV7-9, TRBJ1-4)
CASSRTGGFNEKLFF

SEQ ID NO: 153665 - protein, 11 aa, Homo sapiens
  CDR3 for alpha chain variable domain of TCR clone 76833 (TRAV13-1, TRAJ10)
RVTGGGDKLTF

SEQ ID NO: 153666 - protein, 13 aa, Homo sapiens
  CDR3 for beta chain variable domain of TCR clone 76833 (TRBV20-1, TRBJ1-1)
CSARGGGNTEAFF

SEQ ID NO: 153667 - protein, 19 aa, Homo sapiens
  CDR3 for alpha chain variable domain of TCR clone 76834 (TRAV26-1, TRAJ52)
CIVRAHRNAGGTSYGKLTF

SEQ ID NO: 153668 - protein, 15 aa, Homo sapiens
  CDR3 for beta chain variable domain of TCR clone 76834 (TRBV12-4, TRBJ2-5)
CASSPPTGLQETKYF

SEQ ID NO: 153669 - protein, 11 aa, Homo sapiens
  CDR3 for alpha chain variable domain of TCR clone 76835 (TRAV35, TRAJ30)
CAPGGDDKIIF

SEQ ID NO: 153670 - protein, 14 aa, Homo sapiens
  CDR3 for beta chain variable domain of TCR clone 76835 (TRBV7-6, TRBJ2-1)
CASSLEGGADEQFF

SEQ ID NO: 153671 - protein, 16 aa, Homo sapiens
  CDR3 for alpha chain variable domain of TCR clone 76836 (TRAV8-3, TRAJ10)
CAVGPILTGGGNKLPF

SEQ ID NO: 153672 - protein, 16 aa, Homo sapiens
  CDR3 for beta chain variable domain of TCR clone 76836 (TRBV7-2, TRBJ2-5)
CASSSKWLSGQETQYF

SEQ ID NO: 153673 - protein, 17 aa, Homo sapiens
  CDR3 for alpha chain variable domain of TCR clone 76837 (TRAV36/DV7, TRAJ52)
CAVAQRAGGTSYGKLTF

SEQ ID NO: 153674 - protein, 13 aa, Homo sapiens
  CDR3 for beta chain variable domain of TCR clone 76837 (TRBV12-4, TRBJ2-7)
CASSPTETYEQYF

SEQ ID NO: 153675 - protein, 15 aa, Homo sapiens
  CDR3 for alpha chain variable domain of TCR clone 76838 (TRAV26-2, TRAJ26)
CILRDSDNYGQNFVF

SEQ ID NO: 153676 - protein, 14 aa, Homo sapiens
  CDR3 for beta chain variable domain of TCR clone 76838 (TRBV29-1, TRBJ2-5)
CSFWTPYAGETQYF

SEQ ID NO: 153677 - protein, 13 aa, Homo sapiens
  CDR3 for alpha chain variable domain of TCR clone 76839 (TRAV3, TRAJ21)
CAVREPDFIKFYF

SEQ ID NO: 153678 - protein, 13 aa, Homo sapiens
  CDR3 for beta chain variable domain of TCR clone 76839 (TRBV9, TRBJ2-1)
CASSPSGGNEQFF

SEQ ID NO: 153679 - protein, 14 aa, Homo sapiens
  CDR3 for alpha chain variable domain of TCR clone 76840 (TRAV13-2, TRAJ10)
CAETFTGGGNKLIF

SEQ ID NO: 153680 - protein, 16 aa, Homo sapiens
  CDR3 for beta chain variable domain of TCR clone 76840 (TRBV18, TRBJ2-7)
CASSPRSQGISYEQYF

SEQ ID NO: 153681 - protein, 14 aa, Homo sapiens
  CDR3 for alpha chain variable domain of TCR clone 76841 (TRAV38-1, TRAJ45)
CASHSGGGADGLTF

SEQ ID NO: 153682 - protein, 11 aa, Homo sapiens
  CDR3 for beta chain variable domain of TCR clone 76841 (TRBV11-2, TRBJ2-2)
CASSLPGELFF

SEQ ID NO: 153683 - protein, 11 aa, Homo sapiens
  CDR3 for alpha chain variable domain of TCR clone 76842 (TRAV17, TRAJ43)
CATPRSNDMRF

SEQ ID NO: 153684 - protein, 15 aa, Homo sapiens
  CDR3 for beta chain variable domain of TCR clone 76842 (TRBV11-2, TRBJ2-1)
CASRLGTSGLNEQFF

SEQ ID NO: 153685 - protein, 10 aa, Homo sapiens
  CDR3 for alpha chain variable domain of TCR clone 76843 (TRAV1-2, TRAJ31)
CAFFDARLMF

SEQ ID NO: 153686 - protein, 14 aa, Homo sapiens
  CDR3 for beta chain variable domain of TCR clone 76843 (TRBV12-4, TRBJ1-3)
CASTLTGAENTIYF

SEQ ID NO: 153687 - protein, 16 aa, Homo sapiens
  CDR3 for alpha chain variable domain of TCR clone 76844 (TRAV26-1, TRAJ46)
CIVRVGKEKQRRQADF

SEQ ID NO: 153688 - protein, 13 aa, Homo sapiens
  CDR3 for beta chain variable domain of TCR clone 76844 (TRBV12-5, TRBJ2-3)
CASGDRQSDTQYF

SEQ ID NO: 153689 - protein, 16 aa, Homo sapiens
  CDR3 for alpha chain variable domain of TCR clone 76845 (TRAV13-1, TRAJ48)
CAASIFGNFGNEKLTF

SEQ ID NO: 153690 - protein, 16 aa, Homo sapiens
  CDR3 for beta chain variable domain of TCR clone 76845 (TRBV18, TRBJ1-5)
CASSPYRVEGNQPRHF

SEQ ID NO: 153691 - protein, 11 aa, Homo sapiens
  CDR3 for alpha chain variable domain of TCR clone 76846 (TRAV27, TRAJ45)
CAGAQEAVLTD

SEQ ID NO: 153692 - protein, 17 aa, Homo sapiens
  CDR3 for beta chain variable domain of TCR clone 76846 (TRBV11-2, TRBJ2-1)
CASSLYPPGVEYNEQFF

SEQ ID NO: 153693 - protein, 14 aa, Homo sapiens
  CDR3 for alpha chain variable domain of TCR clone 76847 (TRAV29/DV5, TRAJ45)
CAASFRGGADGLTF

SEQ ID NO: 153694 - protein, 13 aa, Homo sapiens
  CDR3 for beta chain variable domain of TCR clone 76847 (TRBV7-9, TRBJ1-2)
CASSLKQNHGYTF

SEQ ID NO: 153695 - protein, 11 aa, Homo sapiens
  CDR3 for alpha chain variable domain of TCR clone 76848 (TRAV3, TRAJ21)
CAVGNFNKFYF

SEQ ID NO: 153696 - protein, 17 aa, Homo sapiens
  CDR3 for beta chain variable domain of TCR clone 76848 (TRBV24-1, TRBJ2-1)
CATSDVSTSGTYNEHFF

SEQ ID NO: 153697 - protein, 13 aa, Homo sapiens
  CDR3 for alpha chain variable domain of TCR clone 76849 (TRAV1-1, TRAJ7)
CAVSPLWEQQTRF

SEQ ID NO: 153698 - protein, 15 aa, Homo sapiens
  CDR3 for beta chain variable domain of TCR clone 76849 (TRBV11-3, TRBJ2-3)
CASLKDGREGDTQYF

SEQ ID NO: 153699 - protein, 12 aa, Homo sapiens
  CDR3 for alpha chain variable domain of TCR clone 76850 (TRAV26-1, TRAJ40)
CSTTSGTYKYIF

SEQ ID NO: 153700 - protein, 17 aa, Homo sapiens
  CDR3 for beta chain variable domain of TCR clone 76850 (TRBV11-2, TRBJ2-1)
CASSLYPPGVEYNEQFF

SEQ ID NO: 153701 - protein, 16 aa, Homo sapiens
  CDR3 for alpha chain variable domain of TCR clone 76851 (TRAV38-1, TRAJ32)
CAFMKGGGGGTNKPIF

SEQ ID NO: 153702 - protein, 13 aa, Homo sapiens
  CDR3 for beta chain variable domain of TCR clone 76851 (TRBV20-1, TRBJ2-5)
CSAREAFQETQYF

SEQ ID NO: 153703 - protein, 13 aa, Homo sapiens
  CDR3 for alpha chain variable domain of TCR clone 76852 (TRAV17, TRAJ9)
CATDYTEGFKTIF

SEQ ID NO: 153704 - protein, 16 aa, Homo sapiens
  CDR3 for beta chain variable domain of TCR clone 76852 (TRBV7-7, TRBJ2-1)
CASSLASGTSYNEQFF

SEQ ID NO: 153705 - protein, 14 aa, Homo sapiens
  CDR3 for alpha chain variable domain of TCR clone 76853 (TRAV13-1, TRAJ35)
CAASKGGFGNVLHC

SEQ ID NO: 153706 - protein, 13 aa, Homo sapiens
  CDR3 for beta chain variable domain of TCR clone 76853 (TRBV11-2, TRBJ2-1)
CASSSEAYNEQFF

SEQ ID NO: 153707 - protein, 15 aa, Homo sapiens
  CDR3 for alpha chain variable domain of TCR clone 76854 (TRAV8-2, TRAJ44)
DAAEYFDGTASKLNF

SEQ ID NO: 153708 - protein, 14 aa, Homo sapiens
  CDR3 for beta chain variable domain of TCR clone 76854 (TRBV7-8, TRBJ2-3)
CASSLDRGTDTQYF

SEQ ID NO: 153709 - protein, 13 aa, Homo sapiens
  CDR3 for alpha chain variable domain of TCR clone 76855 (TRAV8-6, TRAJ49)
CAVITTTGNQFYF

SEQ ID NO: 153710 - protein, 14 aa, Homo sapiens
  CDR3 for beta chain variable domain of TCR clone 76855 (TRBV5-1, TRBJ2-7)
CASSRGESLYEQYF

SEQ ID NO: 153711 - protein, 13 aa, Homo sapiens
  CDR3 for alpha chain variable domain of TCR clone 76856 (TRAV3, TRAJ21)
CAVREPDFNKFYF

SEQ ID NO: 153712 - protein, 14 aa, Homo sapiens
  CDR3 for beta chain variable domain of TCR clone 76856 (TRBV19, TRBJ2-1)
CASPTFVLSGEQFL

SEQ ID NO: 153713 - protein, 11 aa, Homo sapiens
  CDR3 for alpha chain variable domain of TCR clone 76857 (TRAV21, TRAJ34)
CAHYSTDKLIF

SEQ ID NO: 153714 - protein, 13 aa, Homo sapiens
  CDR3 for beta chain variable domain of TCR clone 76857 (TRBV7-6, TRBJ1-2)
CASSLVADYGYTF

SEQ ID NO: 153715 - protein, 14 aa, Homo sapiens
  CDR3 for alpha chain variable domain of TCR clone 76858 (TRAV1-2, TRAJ16)
CAVNRFSDGQKLLF

SEQ ID NO: 153716 - protein, 14 aa, Homo sapiens
  CDR3 for beta chain variable domain of TCR clone 76858 (TRBV7-9, TRBJ2-3)
CASGLEDGTDTQYF

SEQ ID NO: 153717 - protein, 18 aa, Homo sapiens
  CDR3 for alpha chain variable domain of TCR clone 76859 (TRAV26-2, TRAJ54)
CILRDVEVGIQGAQKLVF

SEQ ID NO: 153718 - protein, 13 aa, Homo sapiens
  CDR3 for beta chain variable domain of TCR clone 76859 (TRBV11-2, TRBJ2-5)
CASSFEPQGTQYF

SEQ ID NO: 153719 - protein, 13 aa, Homo sapiens
  CDR3 for alpha chain variable domain of TCR clone 76860 (TRAV17, TRAJ5)
CALRGTGRRALTF

SEQ ID NO: 153720 - protein, 17 aa, Homo sapiens
  CDR3 for beta chain variable domain of TCR clone 76860 (TRBV7-8, TRBJ2-6)
CASSAGTGGAGANVLTF

SEQ ID NO: 153721 - protein, 13 aa, Homo sapiens
  CDR3 for alpha chain variable domain of TCR clone 76861 (TRAV12-1, TRAJ21)
CVVTLYNFNKFYF

SEQ ID NO: 153722 - protein, 20 aa, Homo sapiens
  CDR3 for beta chain variable domain of TCR clone 76861 (TRBV7-8, TRBJ2-1)
CASSLAHRLAGVRSYNEQFL

SEQ ID NO: 153723 - protein, 15 aa, Homo sapiens
  CDR3 for alpha chain variable domain of TCR clone 76862 (TRAV17, TRAJ57)
CTTGPSQGGSEKLVF

SEQ ID NO: 153724 - protein, 15 aa, Homo sapiens
  CDR3 for beta chain variable domain of TCR clone 76862 (TRBV6-3, TRBJ2-7)
CASSSPGTVFYEQYF

SEQ ID NO: 153725 - protein, 14 aa, Homo sapiens
  CDR3 for alpha chain variable domain of TCR clone 76863 (TRAV21, TRAJ15)
CAVSLNQAGTALVF

SEQ ID NO: 153726 - protein, 11 aa, Homo sapiens
  CDR3 for beta chain variable domain of TCR clone 76863 (TRBV20-1, TRBJ2-7)
CSARTSYEQYF

SEQ ID NO: 153727 - protein, 13 aa, Homo sapiens
  CDR3 for alpha chain variable domain of TCR clone 76864 (TRAV3, TRAJ41)
CAVSSNSGYALNF

SEQ ID NO: 153728 - protein, 14 aa, Homo sapiens
  CDR3 for beta chain variable domain of TCR clone 76864 (TRBV5-4, TRBJ1-1)
CASSLDSRRDEAFF

SEQ ID NO: 153729 - protein, 14 aa, Homo sapiens
  CDR3 for alpha chain variable domain of TCR clone 76865 (TRAV1-2, TRAJ16)
CAVNRFSDGQKLLF

SEQ ID NO: 153730 - protein, 11 aa, Homo sapiens
  CDR3 for beta chain variable domain of TCR clone 76865 (TRBV12-4, TRBJ2-3)
CASTATDTRYF

SEQ ID NO: 153731 - protein, 14 aa, Homo sapiens
  CDR3 for alpha chain variable domain of TCR clone 76866 (TRAV16, TRAJ26)
CALSSANYGQNFVF

SEQ ID NO: 153732 - protein, 15 aa, Homo sapiens
  CDR3 for beta chain variable domain of TCR clone 76866 (TRBV12-4, TRBJ2-5)
CASSPPTGLQETQYF

SEQ ID NO: 153733 - protein, 12 aa, Homo sapiens
  CDR3 for alpha chain variable domain of TCR clone 76867 (TRAV12-3, TRAJ17)
CAMTLTGNKLTF

SEQ ID NO: 153734 - protein, 18 aa, Homo sapiens
  CDR3 for beta chain variable domain of TCR clone 76867 (TRBV19, TRBJ1-5)
CASSKGQVSIHSNQPQHF

SEQ ID NO: 153735 - protein, 13 aa, Homo sapiens
  CDR3 for alpha chain variable domain of TCR clone 76868 (TRAV12-2, TRAJ37)
CAGGSGNTGKLIF

SEQ ID NO: 153736 - protein, 14 aa, Homo sapiens
  CDR3 for beta chain variable domain of TCR clone 76868 (TRBV20-1, TRBJ2-3)
CRAYSGGRTDTQYF

SEQ ID NO: 153737 - protein, 11 aa, Homo sapiens
  CDR3 for alpha chain variable domain of TCR clone 76869 (TRAV12-1, TRAJ30)
CVVNSQDKIIF

SEQ ID NO: 153738 - protein, 12 aa, Homo sapiens
  CDR3 for beta chain variable domain of TCR clone 76869 (TRBV27, TRBJ2-2)
CASKLLTGELFF

SEQ ID NO: 153739 - protein, 14 aa, Homo sapiens
  CDR3 for alpha chain variable domain of TCR clone 76870 (TRAV12-3, TRAJ10)
SHLPLTGGGNKLTF

SEQ ID NO: 153740 - protein, 13 aa, Homo sapiens
  CDR3 for beta chain variable domain of TCR clone 76870 (TRBV7-9, TRBJ2-3)
CASGPGSTDTQYF

SEQ ID NO: 153741 - protein, 15 aa, Homo sapiens
  CDR3 for alpha chain variable domain of TCR clone 76871 (TRAV27, TRAJ38)
CAARRNPGNNRKLIW

SEQ ID NO: 153742 - protein, 13 aa, Homo sapiens
  CDR3 for beta chain variable domain of TCR clone 76871 (TRBV12-5, TRBJ2-3)
CASGDRQSDTQYF

SEQ ID NO: 153743 - protein, 17 aa, Homo sapiens
  CDR3 for alpha chain variable domain of TCR clone 76872 (TRAV13-1, TRAJ52)
CAASSGAGGTSDGKLTF

SEQ ID NO: 153744 - protein, 15 aa, Homo sapiens
  CDR3 for beta chain variable domain of TCR clone 76872 (TRBV2, TRBJ2-1)
CASSELAGSYNEQFF

SEQ ID NO: 153745 - protein, 12 aa, Homo sapiens
  CDR3 for alpha chain variable domain of TCR clone 76873 (TRAV21, TRAJ31)
CAVWGNNARLMF

SEQ ID NO: 153746 - protein, 14 aa, Homo sapiens
  CDR3 for beta chain variable domain of TCR clone 76873 (TRBV4-1, TRBJ2-2)
CASSQAVNTGELFF

SEQ ID NO: 153747 - protein, 15 aa, Homo sapiens
  CDR3 for alpha chain variable domain of TCR clone 76874 (TRAV2, TRAJ9)
CAVAALNTGCFKTIF

SEQ ID NO: 153748 - protein, 14 aa, Homo sapiens
  CDR3 for beta chain variable domain of TCR clone 76874 (TRBV7-8, TRBJ2-5)
CASSATGGQETQYF

SEQ ID NO: 153749 - protein, 15 aa, Homo sapiens
  CDR3 for alpha chain variable domain of TCR clone 76875 (TRAV38-1, TRAJ37)
CAFIFGSGNTGKLIF

SEQ ID NO: 153750 - protein, 15 aa, Homo sapiens
  CDR3 for beta chain variable domain of TCR clone 76875 (TRBV4-3, TRBJ2-7)
CASSQGGRGIYEQHF

SEQ ID NO: 153751 - protein, 14 aa, Homo sapiens
  CDR3 for alpha chain variable domain of TCR clone 76876 (TRAV8-1, TRAJ5)
CAVRTDTGGRALTF

SEQ ID NO: 153752 - protein, 12 aa, Homo sapiens
  CDR3 for beta chain variable domain of TCR clone 76876 (TRBV11-2, TRBJ2-1)
CASSPGNNEQFF

SEQ ID NO: 153753 - protein, 13 aa, Homo sapiens
  CDR3 for alpha chain variable domain of TCR clone 76877 (TRAV8-1, TRAJ30)
CAVIMDRDDKIIF

SEQ ID NO: 153754 - protein, 14 aa, Homo sapiens
  CDR3 for beta chain variable domain of TCR clone 76877 (TRBV7-2, TRBJ1-6)
CASSLQGANSPLHF

SEQ ID NO: 153755 - protein, 11 aa, Homo sapiens
  CDR3 for alpha chain variable domain of TCR clone 76878 (TRAV2, TRAJ13)
CASGGYQKVTF

SEQ ID NO: 153756 - protein, 20 aa, Homo sapiens
  CDR3 for beta chain variable domain of TCR clone 76878 (TRBV7-8, TRBJ2-2)
CASSHSFPGPTIHITGELFF

SEQ ID NO: 153757 - protein, 14 aa, Homo sapiens
  CDR3 for alpha chain variable domain of TCR clone 76879 (TRAV26-1, TRAJ39)
CIIRGSRAGNMLTF

SEQ ID NO: 153758 - protein, 15 aa, Homo sapiens
  CDR3 for beta chain variable domain of TCR clone 76879 (TRBV7-9, TRBJ1-5)
CASSQGHQPNQPQHF

SEQ ID NO: 153759 - protein, 14 aa, Homo sapiens
  CDR3 for alpha chain variable domain of TCR clone 76880 (TRAV17, TRAJ11)
CATEGESGYSALTF

SEQ ID NO: 153760 - protein, 14 aa, Homo sapiens
  CDR3 for beta chain variable domain of TCR clone 76880 (TRBV5-8, TRBJ2-3)
CASSLGQGTDTQYF

SEQ ID NO: 153761 - protein, 14 aa, Homo sapiens
  CDR3 for alpha chain variable domain of TCR clone 76881 (TRAV12-2, TRAJ40)
CAVKIPSGTYKYFF

SEQ ID NO: 153762 - protein, 14 aa, Homo sapiens
  CDR3 for beta chain variable domain of TCR clone 76881 (TRBV20-1, TRBJ1-1)
CSAQTRIGGTEAFF

SEQ ID NO: 153763 - protein, 13 aa, Homo sapiens
  CDR3 for alpha chain variable domain of TCR clone 76882 (TRAV6, TRAJ20)
CALAVSNDYKLRF

SEQ ID NO: 153764 - protein, 16 aa, Homo sapiens
  CDR3 for beta chain variable domain of TCR clone 76882 (TRBV7-9, TRBJ2-1)
CASSDVAGGSYNEQFF

SEQ ID NO: 153765 - protein, 13 aa, Homo sapiens
  CDR3 for alpha chain variable domain of TCR clone 76883 (TRAV12-1, TRAJ33)
CGDAPDSNYQLIR

SEQ ID NO: 153766 - protein, 15 aa, Homo sapiens
  CDR3 for beta chain variable domain of TCR clone 76883 (TRBV27, TRBJ2-1)
CASSNGGGSSNEQFF

SEQ ID NO: 153767 - protein, 14 aa, Homo sapiens
  CDR3 for alpha chain variable domain of TCR clone 76884 (TRAV8-3, TRAJ27)
CAGGRNTNAGKSTF

SEQ ID NO: 153768 - protein, 16 aa, Homo sapiens
  CDR3 for beta chain variable domain of TCR clone 76884 (TRBV12-5, TRBJ2-5)
CASGPRTSGDQETQYF

SEQ ID NO: 153769 - protein, 14 aa, Homo sapiens
  CDR3 for alpha chain variable domain of TCR clone 76885 (TRAV1-2, TRAJ8)
CAVREDTGFQKLVF

SEQ ID NO: 153770 - protein, 14 aa, Homo sapiens
  CDR3 for beta chain variable domain of TCR clone 76885 (TRBV7-6, TRBJ2-7)
CASSFRQGADEQYF

SEQ ID NO: 153771 - protein, 19 aa, Homo sapiens
  CDR3 for alpha chain variable domain of TCR clone 76886 (TRAV2, TRAJ20)
ILQVREADAAVYRDCKLSF

SEQ ID NO: 153772 - protein, 14 aa, Homo sapiens
  CDR3 for beta chain variable domain of TCR clone 76886 (TRBV25-1, TRBJ1-1)
CASTHLGGNTEAFF

SEQ ID NO: 153773 - protein, 17 aa, Homo sapiens
  CDR3 for alpha chain variable domain of TCR clone 76887 (TRAV3, TRAJ38)
CAVRDCLNSGNNRKLIW

SEQ ID NO: 153774 - protein, 14 aa, Homo sapiens
  CDR3 for beta chain variable domain of TCR clone 76887 (TRBV5-5, TRBJ1-5)
CASSGQGVDQPQHF

SEQ ID NO: 153775 - protein, 15 aa, Homo sapiens
  CDR3 for alpha chain variable domain of TCR clone 76888 (TRAV38-1, TRAJ37)
CAFIFGSGNTGKLIF

SEQ ID NO: 153776 - protein, 14 aa, Homo sapiens
  CDR3 for beta chain variable domain of TCR clone 76888 (TRBV19, TRBJ2-1)
CASPTFVLSGEQFF

SEQ ID NO: 153777 - protein, 14 aa, Homo sapiens
  CDR3 for alpha chain variable domain of TCR clone 76889 (TRAV17, TRAJ57)
CATDPRGGSEKLVF

SEQ ID NO: 153778 - protein, 13 aa, Homo sapiens
  CDR3 for beta chain variable domain of TCR clone 76889 (TRBV29-1, TRBJ2-1)
CSVEGGRVNEQFF

SEQ ID NO: 153779 - protein, 17 aa, Homo sapiens
  CDR3 for alpha chain variable domain of TCR clone 76890 (TRAV4, TRAJ13)
CLVCVQGSSGGYQKVTF

SEQ ID NO: 153780 - protein, 18 aa, Homo sapiens
  CDR3 for beta chain variable domain of TCR clone 76890 (TRBV15, TRBJ2-3)
CATSRDGARSWDTDTQYF

SEQ ID NO: 153781 - protein, 14 aa, Homo sapiens
  CDR3 for alpha chain variable domain of TCR clone 76891 (TRAV8-2, TRAJ4)
CVVSPSGGYNNLIF

SEQ ID NO: 153782 - protein, 15 aa, Homo sapiens
  CDR3 for beta chain variable domain of TCR clone 76891 (TRBV2, TRBJ2-1)
CASSELAGSYNEQFF

SEQ ID NO: 153783 - protein, 10 aa, Homo sapiens
  CDR3 for alpha chain variable domain of TCR clone 76892 (TRAV30, TRAJ34)
CGTNPDKPIF

SEQ ID NO: 153784 - protein, 12 aa, Homo sapiens
  CDR3 for beta chain variable domain of TCR clone 76892 (TRBV19, TRBJ1-1)
CASSLSDTEAFF

SEQ ID NO: 153785 - protein, 16 aa, Homo sapiens
  CDR3 for alpha chain variable domain of TCR clone 76893 (TRAV3, TRAJ37)
CAVRGKGSGNTGKLIF

SEQ ID NO: 153786 - protein, 16 aa, Homo sapiens
  CDR3 for beta chain variable domain of TCR clone 76893 (TRBV4-2, TRBJ2-3)
CASSQELAGDTDTQYF

SEQ ID NO: 153787 - protein, 11 aa, Homo sapiens
  CDR3 for alpha chain variable domain of TCR clone 76894 (TRAV2, TRAJ33)
CAVDSNYQLIW

SEQ ID NO: 153788 - protein, 14 aa, Homo sapiens
  CDR3 for beta chain variable domain of TCR clone 76894 (TRBV11-2, TRBJ2-3)
CASSRLARTGTQYF

SEQ ID NO: 153789 - protein, 16 aa, Homo sapiens
  CDR3 for alpha chain variable domain of TCR clone 76895 (TRAV27, TRAJ52)
CAGAPAGGTSYGNLTF

SEQ ID NO: 153790 - protein, 12 aa, Homo sapiens
  CDR3 for beta chain variable domain of TCR clone 76895 (TRBV27, TRBJ2-1)
CASRGFYNEQFF

SEQ ID NO: 153791 - protein, 17 aa, Homo sapiens
  CDR3 for alpha chain variable domain of TCR clone 76896 (TRAV35, TRAJ52)
CAGQLAAGGTSYGKLTF

SEQ ID NO: 153792 - protein, 12 aa, Homo sapiens
  CDR3 for beta chain variable domain of TCR clone 76896 (TRBV20-1, TRBJ2-7)
CSAGRRQSEQYL

SEQ ID NO: 153793 - protein, 12 aa, Homo sapiens
  CDR3 for alpha chain variable domain of TCR clone 76897 (TRAV12-3, TRAJ17)
CAMTLTGNKLTF

SEQ ID NO: 153794 - protein, 13 aa, Homo sapiens
  CDR3 for beta chain variable domain of TCR clone 76897 (TRBV18, TRBJ1-1)
CASSPNGDTEAFF

SEQ ID NO: 153795 - protein, 13 aa, Homo sapiens
  CDR3 for alpha chain variable domain of TCR clone 76898 (TRAV12-3, TRAJ7)
CAMTPYGNNRLAF

SEQ ID NO: 153796 - protein, 16 aa, Homo sapiens
  CDR3 for beta chain variable domain of TCR clone 76898 (TRBV20-1, TRBJ1-4)
CSARPCGGELNEKLFF

SEQ ID NO: 153797 - protein, 17 aa, Homo sapiens
  CDR3 for alpha chain variable domain of TCR clone 76899 (TRAV8-6, TRAJ58)
CAVSSWVGETNGSRLTF

SEQ ID NO: 153798 - protein, 14 aa, Homo sapiens
  CDR3 for beta chain variable domain of TCR clone 76899 (TRBV4-2, TRBJ2-1)
CASGLDRAYNEQFF

SEQ ID NO: 153799 - protein, 14 aa, Homo sapiens
  CDR3 for alpha chain variable domain of TCR clone 76900 (TRAV2, TRAJ37)
CAVDFTSNTGQLIF

SEQ ID NO: 153800 - protein, 14 aa, Homo sapiens
  CDR3 for beta chain variable domain of TCR clone 76900 (TRBV5-1, TRBJ2-5)
CASSFGGSQETQYF

SEQ ID NO: 153801 - protein, 13 aa, Homo sapiens
  CDR3 for alpha chain variable domain of TCR clone 76901 (TRAV38-1, TRAJ42)
CARWGGSHGNLIF

SEQ ID NO: 153802 - protein, 10 aa, Homo sapiens
  CDR3 for beta chain variable domain of TCR clone 76901 (TRBV2, TRBJ2-5)
CASSAATQYF

SEQ ID NO: 153803 - protein, 12 aa, Homo sapiens
  CDR3 for alpha chain variable domain of TCR clone 76902 (TRAV12-2, TRAJ10)
WGVTGGGNKLTS

SEQ ID NO: 153804 - protein, 13 aa, Homo sapiens
  CDR3 for beta chain variable domain of TCR clone 76902 (TRBV12-4, TRBJ1-2)
CASSLRQGKGYTF

SEQ ID NO: 153805 - protein, 14 aa, Homo sapiens
  CDR3 for alpha chain variable domain of TCR clone 76903 (TRAV12-2, TRAJ5)
CAVNRSTGRRALTF

SEQ ID NO: 153806 - protein, 12 aa, Homo sapiens
  CDR3 for beta chain variable domain of TCR clone 76903 (TRBV19, TRBJ1-5)
CASSTAQQPQHF

SEQ ID NO: 153807 - protein, 14 aa, Homo sapiens
  CDR3 for alpha chain variable domain of TCR clone 76904 (TRAV20, TRAJ21)
CAAGGIYNSNKFYF

SEQ ID NO: 153808 - protein, 12 aa, Homo sapiens
  CDR3 for beta chain variable domain of TCR clone 76904 (TRBV12-4, TRBJ2-1)
CASSLVRVEQFF

SEQ ID NO: 153809 - protein, 14 aa, Homo sapiens
  CDR3 for alpha chain variable domain of TCR clone 76905 (TRAV8-3, TRAJ4)
CAVGAAGGYNKLIF

SEQ ID NO: 153810 - protein, 15 aa, Homo sapiens
  CDR3 for beta chain variable domain of TCR clone 76905 (TRBV6-5, TRBJ2-1)
CASSYDAGAVNEQFF

SEQ ID NO: 153811 - protein, 13 aa, Homo sapiens
  CDR3 for alpha chain variable domain of TCR clone 76906 (TRAV12-3, TRAJ13)
CAMSSGGYQKVTF

SEQ ID NO: 153812 - protein, 17 aa, Homo sapiens
  CDR3 for beta chain variable domain of TCR clone 76906 (TRBV4-1, TRBJ1-4)
CASSQEGPRGVEKKLFF

SEQ ID NO: 153813 - protein, 14 aa, Homo sapiens
  CDR3 for alpha chain variable domain of TCR clone 76907 (TRAV27, TRAJ44)
CAASFTGPASKLTF

SEQ ID NO: 153814 - protein, 13 aa, Homo sapiens
  CDR3 for beta chain variable domain of TCR clone 76907 (TRBV27, TRBJ2-3)
CATSRGGLYTQYF

SEQ ID NO: 153815 - protein, 12 aa, Homo sapiens
  CDR3 for alpha chain variable domain of TCR clone 76908 (TRAV1-2, TRAJ29)
CAVPSGKTPLVF

SEQ ID NO: 153816 - protein, 12 aa, Homo sapiens
  CDR3 for beta chain variable domain of TCR clone 76908 (TRBV7-9, TRBJ2-7)
CASSFGSYEQYF

SEQ ID NO: 153817 - protein, 16 aa, Homo sapiens
  CDR3 for alpha chain variable domain of TCR clone 76909 (TRAV16, TRAJ4)
CITVLPFSGGYNKLIF

SEQ ID NO: 153818 - protein, 14 aa, Homo sapiens
  CDR3 for beta chain variable domain of TCR clone 76909 (TRBV2, TRBJ2-3)
CASSEGQNTDTQYF

SEQ ID NO: 153819 - protein, 14 aa, Homo sapiens
  CDR3 for alpha chain variable domain of TCR clone 76910 (TRAV12-2, TRAJ11)
CAVEGGSGYSTLTF

SEQ ID NO: 153820 - protein, 14 aa, Homo sapiens
  CDR3 for beta chain variable domain of TCR clone 76910 (TRBV7-8, TRBJ2-3)
CASSLEAGTDTQYF

SEQ ID NO: 153821 - protein, 14 aa, Homo sapiens
  CDR3 for alpha chain variable domain of TCR clone 76911 (TRAV1-2, TRAJ8)
CAVREDTGFQKLVF

SEQ ID NO: 153822 - protein, 15 aa, Homo sapiens
  CDR3 for beta chain variable domain of TCR clone 76911 (TRBV11-2, TRBJ1-6)
CASSLDPWAVSPLHF

SEQ ID NO: 153823 - protein, 14 aa, Homo sapiens
  CDR3 for alpha chain variable domain of TCR clone 76912 (TRAV20, TRAJ20)
CAVRRGYNYYKLSF

SEQ ID NO: 153824 - protein, 13 aa, Homo sapiens
  CDR3 for beta chain variable domain of TCR clone 76912 (TRBV19, TRBJ2-5)
CASSETAPETQYF

SEQ ID NO: 153825 - protein, 14 aa, Homo sapiens
  CDR3 for alpha chain variable domain of TCR clone 76913 (TRAV1-2, TRAJ16)
CAVNRFSDGQKLLS

SEQ ID NO: 153826 - protein, 18 aa, Homo sapiens
  CDR3 for beta chain variable domain of TCR clone 76913 (TRBV19, TRBJ1-5)
CASSKGQVSIHSNQPQHF

SEQ ID NO: 153827 - protein, 11 aa, Homo sapiens
  CDR3 for alpha chain variable domain of TCR clone 76914 (TRAV12-3, TRAJ26)
CAMSHGQNFVF

SEQ ID NO: 153828 - protein, 14 aa, Homo sapiens
  CDR3 for beta chain variable domain of TCR clone 76914 (TRBV7-9, TRBJ1-4)
CAITEGEANEKLFF

SEQ ID NO: 153829 - protein, 11 aa, Homo sapiens
  CDR3 for alpha chain variable domain of TCR clone 76915 (TRAV1-2, TRAJ31)
CAVNNNARLMF

SEQ ID NO: 153830 - protein, 15 aa, Homo sapiens
  CDR3 for beta chain variable domain of TCR clone 76915 (TRBV28, TRBJ2-1)
CASSIIAGGRSEQCF

SEQ ID NO: 153831 - protein, 12 aa, Homo sapiens
  CDR3 for alpha chain variable domain of TCR clone 76916 (TRAV16, TRAJ10)
CSRTGGGNKLIF

SEQ ID NO: 153832 - protein, 13 aa, Homo sapiens
  CDR3 for beta chain variable domain of TCR clone 76916 (TRBV7-3, TRBJ1-1)
CASSQDWGAEAFF

SEQ ID NO: 153833 - protein, 13 aa, Homo sapiens
  CDR3 for alpha chain variable domain of TCR clone 76917 (TRAV27, TRAJ6)
CAGGTRGSYIPTF

SEQ ID NO: 153834 - protein, 14 aa, Homo sapiens
  CDR3 for beta chain variable domain of TCR clone 76917 (TRBV7-9, TRBJ1-1)
CASTPLQSYTEAFF

SEQ ID NO: 153835 - protein, 13 aa, Homo sapiens
  CDR3 for alpha chain variable domain of TCR clone 76918 (TRAV21, TRAJ27)
CAARAGNAGKSTF

SEQ ID NO: 153836 - protein, 14 aa, Homo sapiens
  CDR3 for beta chain variable domain of TCR clone 76918 (TRBV7-6, TRBJ2-3)
CASSLGTVTDTQYF

SEQ ID NO: 153837 - protein, 13 aa, Homo sapiens
  CDR3 for alpha chain variable domain of TCR clone 76919 (TRAV12-2, TRAJ15)
CAIFNQAGTALIF

SEQ ID NO: 153838 - protein, 15 aa, Homo sapiens
  CDR3 for beta chain variable domain of TCR clone 76919 (TRBV7-8, TRBJ1-5)
CASSRGGGADQPQHF

SEQ ID NO: 153839 - protein, 15 aa, Homo sapiens
  CDR3 for alpha chain variable domain of TCR clone 76920 (TRAV25, TRAJ53)
CAATGGGGSNYKLTF

SEQ ID NO: 153840 - protein, 14 aa, Homo sapiens
  CDR3 for beta chain variable domain of TCR clone 76920 (TRBV11-2, TRBJ2-3)
CASSRLARTDTQYF

SEQ ID NO: 153841 - protein, 15 aa, Homo sapiens
  CDR3 for alpha chain variable domain of TCR clone 76921 (TRAV8-3, TRAJ45)
CASSYSGGGADGLTF

SEQ ID NO: 153842 - protein, 13 aa, Homo sapiens
  CDR3 for beta chain variable domain of TCR clone 76921 (TRBV7-8, TRBJ2-7)
CASSLTGGRERYF

SEQ ID NO: 153843 - protein, 14 aa, Homo sapiens
  CDR3 for alpha chain variable domain of TCR clone 76922 (TRAV13-1, TRAJ30)
CAASPQNRDDKIIF

SEQ ID NO: 153844 - protein, 20 aa, Homo sapiens
  CDR3 for beta chain variable domain of TCR clone 76922 (TRBV10-3, TRBJ2-1)
CAISVSTSGLAGWISNEQFF

SEQ ID NO: 153845 - protein, 13 aa, Homo sapiens
  CDR3 for alpha chain variable domain of TCR clone 76923 (TRAV26-1, TRAJ48)
CIVRVVGAEKLTF

SEQ ID NO: 153846 - protein, 19 aa, Homo sapiens
  CDR3 for beta chain variable domain of TCR clone 76923 (TRBV11-3, TRBJ2-2)
CASSTRPGAKTTNTGELFF

SEQ ID NO: 153847 - protein, 13 aa, Homo sapiens
  CDR3 for alpha chain variable domain of TCR clone 76924 (TRAV12-2, TRAJ10)
CAVPTGGGNKLTF

SEQ ID NO: 153848 - protein, 18 aa, Homo sapiens
  CDR3 for beta chain variable domain of TCR clone 76924 (TRBV11-2, TRBJ2-3)
CASSLGGASRGAPNTQYF

SEQ ID NO: 153849 - protein, 14 aa, Homo sapiens
  CDR3 for alpha chain variable domain of TCR clone 76925 (TRAV23/DV6, TRAJ24)
CAASLSDSWGKWQF

SEQ ID NO: 153850 - protein, 16 aa, Homo sapiens
  CDR3 for beta chain variable domain of TCR clone 76925 (TRBV7-9, TRBJ2-6)
CASSLKGPLRANVLTF

SEQ ID NO: 153851 - protein, 15 aa, Homo sapiens
  CDR3 for alpha chain variable domain of TCR clone 76926 (TRAV2, TRAJ9)
CAVAALNTGGFKTIF

SEQ ID NO: 153852 - protein, 13 aa, Homo sapiens
  CDR3 for beta chain variable domain of TCR clone 76926 (TRBV10-2, TRBJ2-3)
CASSESGDHTQYF

SEQ ID NO: 153853 - protein, 12 aa, Homo sapiens
  CDR3 for alpha chain variable domain of TCR clone 76927 (TRAV27, TRAJ35)
CAGADFGNVLHC

SEQ ID NO: 153854 - protein, 14 aa, Homo sapiens
  CDR3 for beta chain variable domain of TCR clone 76927 (TRBV19, TRBJ2-1)
CASPTFVLSGEQFF

SEQ ID NO: 153855 - protein, 15 aa, Homo sapiens
  CDR3 for alpha chain variable domain of TCR clone 76928 (TRAV3, TRAJ9)
CAVRARNTGGFKTIF

SEQ ID NO: 153856 - protein, 14 aa, Homo sapiens
  CDR3 for beta chain variable domain of TCR clone 76928 (TRBV6-5, TRBJ1-2)
CASSYDGTGGGYTF

SEQ ID NO: 153857 - protein, 14 aa, Homo sapiens
  CDR3 for alpha chain variable domain of TCR clone 76929 (TRAV1-2, TRAJ16)
CAVNRFSDGQKLLF

SEQ ID NO: 153858 - protein, 14 aa, Homo sapiens
  CDR3 for beta chain variable domain of TCR clone 76929 (TRBV19, TRBJ2-1)
CASTTFVLSGEQFF

SEQ ID NO: 153859 - protein, 13 aa, Homo sapiens
  CDR3 for alpha chain variable domain of TCR clone 76930 (TRAV3, TRAJ27)
CAVRPLGAGKSTF

SEQ ID NO: 153860 - protein, 13 aa, Homo sapiens
  CDR3 for beta chain variable domain of TCR clone 76930 (TRBV7-9, TRBJ2-3)
CASSPGSTDTQFF

SEQ ID NO: 153861 - protein, 10 aa, Homo sapiens
  CDR3 for alpha chain variable domain of TCR clone 76931 (TRAV12-3, TRAJ49)
CAMNDDQFYF

SEQ ID NO: 153862 - protein, 13 aa, Homo sapiens
  CDR3 for beta chain variable domain of TCR clone 76931 (TRBV12-4, TRBJ1-1)
CASSPGTGFETFF

SEQ ID NO: 153863 - protein, 12 aa, Homo sapiens
  CDR3 for alpha chain variable domain of TCR clone 76932 (TRAV27, TRAJ35)
CAGADFGNVLHC

SEQ ID NO: 153864 - protein, 15 aa, Homo sapiens
  CDR3 for beta chain variable domain of TCR clone 76932 (TRBV10-2, TRBJ2-6)
CASSEQGTGANVLTF

SEQ ID NO: 153865 - protein, 12 aa, Homo sapiens
  CDR3 for alpha chain variable domain of TCR clone 76933 (TRAV8-3, TRAJ26)
CAGDNYGQNFVF

SEQ ID NO: 153866 - protein, 12 aa, Homo sapiens
  CDR3 for beta chain variable domain of TCR clone 76933 (TRBV14, TRBJ2-5)
CASSHLKETQYF

SEQ ID NO: 153867 - protein, 13 aa, Homo sapiens
  CDR3 for alpha chain variable domain of TCR clone 76934 (TRAV21, TRAJ20)
CAVGLRVDYKLSF

SEQ ID NO: 153868 - protein, 11 aa, Homo sapiens
  CDR3 for beta chain variable domain of TCR clone 76934 (TRBV29-1, TRBJ2-5)
CGEDRTGTQYF

SEQ ID NO: 153869 - protein, 16 aa, Homo sapiens
  CDR3 for alpha chain variable domain of TCR clone 76935 (TRAV30, TRAJ24)
CGTEIVDADSWGKFQF

SEQ ID NO: 153870 - protein, 14 aa, Homo sapiens
  CDR3 for beta chain variable domain of TCR clone 76935 (TRBV7-9, TRBJ2-4)
CAGSLAMGGNIQYF

SEQ ID NO: 153871 - protein, 16 aa, Homo sapiens
  CDR3 for alpha chain variable domain of TCR clone 76936 (TRAV30, TRAJ24)
CGTEIVDADSWGKFQF

SEQ ID NO: 153872 - protein, 15 aa, Homo sapiens
  CDR3 for beta chain variable domain of TCR clone 76936 (TRBV5-1, TRBJ2-1)
CASSPPRALYNEQFF

SEQ ID NO: 153873 - protein, 11 aa, Homo sapiens
  CDR3 for alpha chain variable domain of TCR clone 76937 (TRAV2, TRAJ20)
CAVSDDYKLSL

SEQ ID NO: 153874 - protein, 20 aa, Homo sapiens
  CDR3 for beta chain variable domain of TCR clone 76937 (TRBV19, TRBJ2-1)
CASSISRTVTSTRLNNEQFF

SEQ ID NO: 153875 - protein, 15 aa, Homo sapiens
  CDR3 for alpha chain variable domain of TCR clone 76938 (TRAV2, TRAJ9)
CAVEDRGTGGFKTIF

SEQ ID NO: 153876 - protein, 18 aa, Homo sapiens
  CDR3 for beta chain variable domain of TCR clone 76938 (TRBV6-6, TRBJ1-3)
CASSYSKWDSISGDTIYF

SEQ ID NO: 153877 - protein, 16 aa, Homo sapiens
  CDR3 for alpha chain variable domain of TCR clone 76939 (TRAV26-1, TRAJ23)
CTVRVANSNQGGKLIF

SEQ ID NO: 153878 - protein, 16 aa, Homo sapiens
  CDR3 for beta chain variable domain of TCR clone 76939 (TRBV10-3, TRBJ2-1)
CAISGVGDGGGGEQFF

SEQ ID NO: 153879 - protein, 10 aa, Homo sapiens
  CDR3 for alpha chain variable domain of TCR clone 76940 (TRAV13-1, TRAJ21)
CAASLNKFYF

SEQ ID NO: 153880 - protein, 13 aa, Homo sapiens
  CDR3 for beta chain variable domain of TCR clone 76940 (TRBV7-9, TRBJ2-7)
CASSFYGSHEQYF

SEQ ID NO: 153881 - protein, 14 aa, Homo sapiens
  CDR3 for alpha chain variable domain of TCR clone 76941 (TRAV12-2, TRAJ13)
CAVKKTGGYQKVTF

SEQ ID NO: 153882 - protein, 16 aa, Homo sapiens
  CDR3 for beta chain variable domain of TCR clone 76941 (TRBV7-9, TRBJ1-2)
CASSLGFSSGEDGYTF

SEQ ID NO: 153883 - protein, 12 aa, Homo sapiens
  CDR3 for alpha chain variable domain of TCR clone 76942 (TRAV27, TRAJ34)
CAGAKKTDKLIF

SEQ ID NO: 153884 - protein, 13 aa, Homo sapiens
  CDR3 for beta chain variable domain of TCR clone 76942 (TRBV4-1, TRBJ2-1)
CASSQEVQYEQFF

SEQ ID NO: 153885 - protein, 15 aa, Homo sapiens
  CDR3 for alpha chain variable domain of TCR clone 76943 (TRAV38-1, TRAJ37)
FAFIFGSGNTGKLIF

SEQ ID NO: 153886 - protein, 12 aa, Homo sapiens
  CDR3 for beta chain variable domain of TCR clone 76943 (TRBV7-9, TRBJ2-7)
CASSLEGYEQYF

SEQ ID NO: 153887 - protein, 16 aa, Homo sapiens
  CDR3 for alpha chain variable domain of TCR clone 76944 (TRAV1-2, TRAJ35)
CAVRGLTIGFGNVLHC

SEQ ID NO: 153888 - protein, 13 aa, Homo sapiens
  CDR3 for beta chain variable domain of TCR clone 76944 (TRBV6-6, TRBJ2-1)
CASSLHQGDEQFF

SEQ ID NO: 153889 - protein, 16 aa, Homo sapiens
  CDR3 for alpha chain variable domain of TCR clone 76945 (TRAV30, TRAJ24)
CGTEIVDADSWGKFQF

SEQ ID NO: 153890 - protein, 13 aa, Homo sapiens
  CDR3 for beta chain variable domain of TCR clone 76945 (TRBV14, TRBJ1-2)
CASSEDRRYGYTF

SEQ ID NO: 153891 - protein, 11 aa, Homo sapiens
  CDR3 for alpha chain variable domain of TCR clone 76946 (TRAV1-2, TRAJ31)
CAVNNNARLMF

SEQ ID NO: 153892 - protein, 15 aa, Homo sapiens
  CDR3 for beta chain variable domain of TCR clone 76946 (TRBV28, TRBJ1-3)
CASSMGWASGNTIYF

SEQ ID NO: 153893 - protein, 17 aa, Homo sapiens
  CDR3 for alpha chain variable domain of TCR clone 76947 (TRAV38-1, TRAJ28)
CAFMKPTSGSGSYQLTF

SEQ ID NO: 153894 - protein, 15 aa, Homo sapiens
  CDR3 for beta chain variable domain of TCR clone 76947 (TRBV5-1, TRBJ2-4)
CASSLGGGGSYIQYF

SEQ ID NO: 153895 - protein, 19 aa, Homo sapiens
  CDR3 for alpha chain variable domain of TCR clone 76948 (TRAV29/DV5, TRAJ49)
CSVLLCSKLTVDTGNQFYF

SEQ ID NO: 153896 - protein, 13 aa, Homo sapiens
  CDR3 for beta chain variable domain of TCR clone 76948 (TRBV7-9, TRBJ1-2)
CASSLKQNYGYTF

SEQ ID NO: 153897 - protein, 17 aa, Homo sapiens
  CDR3 for alpha chain variable domain of TCR clone 76949 (TRAV3, TRAJ6)
CAVRDGPRAGGSYIPTS

SEQ ID NO: 153898 - protein, 14 aa, Homo sapiens
  CDR3 for beta chain variable domain of TCR clone 76949 (TRBV7-2, TRBJ2-7)
CASSPKTSLYEQYF

SEQ ID NO: 153899 - protein, 10 aa, Homo sapiens
  CDR3 for alpha chain variable domain of TCR clone 76950 (TRAV1-2, TRAJ31)
CAFFDARLMF

SEQ ID NO: 153900 - protein, 17 aa, Homo sapiens
  CDR3 for beta chain variable domain of TCR clone 76950 (TRBV10-3, TRBJ2-7)
CAISAGLAKPTSSTSGR

SEQ ID NO: 153901 - protein, 15 aa, Homo sapiens
  CDR3 for alpha chain variable domain of TCR clone 76951 (TRAV8-6, TRAJ10)
CAGSDQAGGGNKLTF

SEQ ID NO: 153902 - protein, 15 aa, Homo sapiens
  CDR3 for beta chain variable domain of TCR clone 76951 (TRBV3-1, TRBJ2-5)
CASSANLGGPETQYF

SEQ ID NO: 153903 - protein, 13 aa, Homo sapiens
  CDR3 for alpha chain variable domain of TCR clone 76952 (TRAV21, TRAJ27)
CAARPGDAGKSTF

SEQ ID NO: 153904 - protein, 13 aa, Homo sapiens
  CDR3 for beta chain variable domain of TCR clone 76952 (TRBV18, TRBJ2-7)
CASQSGGGYEQYF

SEQ ID NO: 153905 - protein, 17 aa, Homo sapiens
  CDR3 for alpha chain variable domain of TCR clone 76953 (TRAV12-3, TRAJ6)
RTMSARGGAGGSYIPTF

SEQ ID NO: 153906 - protein, 16 aa, Homo sapiens
  CDR3 for beta chain variable domain of TCR clone 76953 (TRBV9, TRBJ1-2)
CASSVEEKVSPYGYTF

SEQ ID NO: 153907 - protein, 14 aa, Homo sapiens
  CDR3 for alpha chain variable domain of TCR clone 76954 (TRAV21, TRAJ37)
CAVKGSSNIGKLIF

SEQ ID NO: 153908 - protein, 14 aa, Homo sapiens
  CDR3 for beta chain variable domain of TCR clone 76954 (TRBV7-2, TRBJ2-1)
CASSRGGARNEQFF

SEQ ID NO: 153909 - protein, 12 aa, Homo sapiens
  CDR3 for alpha chain variable domain of TCR clone 76955 (TRAV8-3, TRAJ43)
CAVGAGNNEMRF

SEQ ID NO: 153910 - protein, 14 aa, Homo sapiens
  CDR3 for beta chain variable domain of TCR clone 76955 (TRBV4-2, TRBJ1-5)
CASSRDRGNQPQHF

SEQ ID NO: 153911 - protein, 15 aa, Homo sapiens
  CDR3 for alpha chain variable domain of TCR clone 76956 (TRAV12-2, TRAJ53)
CAVNGGGGSNYKLTF

SEQ ID NO: 153912 - protein, 15 aa, Homo sapiens
  CDR3 for beta chain variable domain of TCR clone 76956 (TRBV11-2, TRBJ2-1)
CASSSPSTRYNEQFF

SEQ ID NO: 153913 - protein, 15 aa, Homo sapiens
  CDR3 for alpha chain variable domain of TCR clone 76957 (TRAV3, TRAJ22)
CAVRDRGGSARQLTF

SEQ ID NO: 153914 - protein, 18 aa, Homo sapiens
  CDR3 for beta chain variable domain of TCR clone 76957 (TRBV28, TRBJ2-1)
CASSSTSGRANAYNEQFF

SEQ ID NO: 153915 - protein, 13 aa, Homo sapiens
  CDR3 for alpha chain variable domain of TCR clone 76958 (TRAV16, TRAJ29)
CALSRRGNTPLVF

SEQ ID NO: 153916 - protein, 15 aa, Homo sapiens
  CDR3 for beta chain variable domain of TCR clone 76958 (TRBV4-1, TRBJ2-3)
CASSRGQGTPDTQYF

SEQ ID NO: 153917 - protein, 14 aa, Homo sapiens
  CDR3 for alpha chain variable domain of TCR clone 76959 (TRAV2, TRAJ39)
CAVEGDNAGNMLTL

SEQ ID NO: 153918 - protein, 14 aa, Homo sapiens
  CDR3 for beta chain variable domain of TCR clone 76959 (TRBV28, TRBJ2-7)
CASSLRARGNEQYF

SEQ ID NO: 153919 - protein, 14 aa, Homo sapiens
  CDR3 for alpha chain variable domain of TCR clone 76960 (TRAV13-1, TRAJ45)
CAAIGGGGSDGLTF

SEQ ID NO: 153920 - protein, 16 aa, Homo sapiens
  CDR3 for beta chain variable domain of TCR clone 76960 (TRBV7-2, TRBJ1-1)
CASSLGAGWTNTEAFF

SEQ ID NO: 153921 - protein, 12 aa, Homo sapiens
  CDR3 for alpha chain variable domain of TCR clone 76961 (TRAV30, TRAJ43)
CGTEERGNDMRF

SEQ ID NO: 153922 - protein, 13 aa, Homo sapiens
  CDR3 for beta chain variable domain of TCR clone 76961 (TRBV27, TRBJ2-7)
CASSFAQGYEQYF

SEQ ID NO: 153923 - protein, 13 aa, Homo sapiens
  CDR3 for alpha chain variable domain of TCR clone 76962 (TRAV8-3, TRAJ36)
CAVGATGANNLFF

SEQ ID NO: 153924 - protein, 15 aa, Homo sapiens
  CDR3 for beta chain variable domain of TCR clone 76962 (TRBV6-3, TRBJ2-7)
CASSSPGTVFYEQYF

SEQ ID NO: 153925 - protein, 13 aa, Homo sapiens
  CDR3 for alpha chain variable domain of TCR clone 76963 (TRAV13-1, TRAJ21)
CAASIYNFNKFYF

SEQ ID NO: 153926 - protein, 12 aa, Homo sapiens
  CDR3 for beta chain variable domain of TCR clone 76963 (TRBV2, TRBJ2-7)
CASKRGSYEQYF

SEQ ID NO: 153927 - protein, 13 aa, Homo sapiens
  CDR3 for alpha chain variable domain of TCR clone 76964 (TRAV1-1, TRAJ9)
CAAKNTGGFKTIF

SEQ ID NO: 153928 - protein, 13 aa, Homo sapiens
  CDR3 for beta chain variable domain of TCR clone 76964 (TRBV7-9, TRBJ1-2)
CASSLKQNYGYAF

SEQ ID NO: 153929 - protein, 16 aa, Homo sapiens
  CDR3 for alpha chain variable domain of TCR clone 76965 (TRAV8-4, TRAJ18)
CAVTANGGSTLGGLYF

SEQ ID NO: 153930 - protein, 14 aa, Homo sapiens
  CDR3 for beta chain variable domain of TCR clone 76965 (TRBV12-4, TRBJ1-2)
CASSSAGHIYGYTF

SEQ ID NO: 153931 - protein, 16 aa, Homo sapiens
  CDR3 for alpha chain variable domain of TCR clone 76966 (TRAV3, TRAJ37)
CAVRGKGSGNTGTLIF

SEQ ID NO: 153932 - protein, 13 aa, Homo sapiens
  CDR3 for beta chain variable domain of TCR clone 76966 (TRBV19, TRBJ1-2)
CASSVPGQDGYTF

SEQ ID NO: 153933 - protein, 14 aa, Homo sapiens
  CDR3 for alpha chain variable domain of TCR clone 76967 (TRAV35, TRAJ50)
CAGHRKTSYDKVIF

SEQ ID NO: 153934 - protein, 15 aa, Homo sapiens
  CDR3 for beta chain variable domain of TCR clone 76967 (TRBV6-3, TRBJ2-7)
CASSSPWTVFYEQYF

SEQ ID NO: 153935 - protein, 16 aa, Homo sapiens
  CDR3 for alpha chain variable domain of TCR clone 76968 (TRAV8-2, TRAJ45)
CVVSEGTGGGADGLTF

SEQ ID NO: 153936 - protein, 12 aa, Homo sapiens
  CDR3 for beta chain variable domain of TCR clone 76968 (TRBV12-5, TRBJ2-5)
CASGQGVETQYF

SEQ ID NO: 153937 - protein, 11 aa, Homo sapiens
  CDR3 for alpha chain variable domain of TCR clone 76969 (TRAV29/DV5, TRAJ31)
CAASVNARLMF

SEQ ID NO: 153938 - protein, 13 aa, Homo sapiens
  CDR3 for beta chain variable domain of TCR clone 76969 (TRBV19, TRBJ1-2)
CASSVPGQDGYTF

SEQ ID NO: 153939 - protein, 13 aa, Homo sapiens
  CDR3 for alpha chain variable domain of TCR clone 76970 (TRAV2, TRAJ29)
CAAGYSGNTPLVF

SEQ ID NO: 153940 - protein, 16 aa, Homo sapiens
  CDR3 for beta chain variable domain of TCR clone 76970 (TRBV7-9, TRBJ1-2)
CASSPGGGAINYGYTF

SEQ ID NO: 153941 - protein, 13 aa, Homo sapiens
  CDR3 for alpha chain variable domain of TCR clone 76971 (TRAV30, TRAJ6)
RGFIEGGSYIPTF

SEQ ID NO: 153942 - protein, 13 aa, Homo sapiens
  CDR3 for beta chain variable domain of TCR clone 76971 (TRBV5-4, TRBJ2-5)
CASSPVSQETQYF

SEQ ID NO: 153943 - protein, 14 aa, Homo sapiens
  CDR3 for alpha chain variable domain of TCR clone 76972 (TRAV1-2, TRAJ8)
CAVREDTGFQKLVF

SEQ ID NO: 153944 - protein, 13 aa, Homo sapiens
  CDR3 for beta chain variable domain of TCR clone 76972 (TRBV12-4, TRBJ1-5)
CASSPDRAQHQHF

SEQ ID NO: 153945 - protein, 14 aa, Homo sapiens
  CDR3 for alpha chain variable domain of TCR clone 76973 (TRAV2, TRAJ9)
CAVEDRSGGLKTIF

SEQ ID NO: 153946 - protein, 18 aa, Homo sapiens
  CDR3 for beta chain variable domain of TCR clone 76973 (TRBV11-2, TRBJ2-3)
CASSLGGASRGAPNTQYF

SEQ ID NO: 153947 - protein, 15 aa, Homo sapiens
  CDR3 for alpha chain variable domain of TCR clone 76974 (TRAV12-1, TRAJ44)
CVVFVNTGTASKLTF

SEQ ID NO: 153948 - protein, 16 aa, Homo sapiens
  CDR3 for beta chain variable domain of TCR clone 76974 (TRBV28, TRBJ2-7)
CASSSGTSGRGYEQYF

SEQ ID NO: 153949 - protein, 14 aa, Homo sapiens
  CDR3 for alpha chain variable domain of TCR clone 76975 (TRAV20, TRAJ22)
CAVALGGSARQLTF

SEQ ID NO: 153950 - protein, 15 aa, Homo sapiens
  CDR3 for beta chain variable domain of TCR clone 76975 (TRBV7-2, TRBJ1-1)
CASSFAGDTDTEAFF

SEQ ID NO: 153951 - protein, 14 aa, Homo sapiens
  CDR3 for alpha chain variable domain of TCR clone 76976 (TRAV13-1, TRAJ44)
CAAKATGTASKLTF

SEQ ID NO: 153952 - protein, 17 aa, Homo sapiens
  CDR3 for beta chain variable domain of TCR clone 76976 (TRBV19, TRBJ2-3)
CASSLMKRMRGADTQYF

SEQ ID NO: 153953 - protein, 17 aa, Homo sapiens
  CDR3 for alpha chain variable domain of TCR clone 76977 (TRAV8-6, TRAJ58)
CAVSSWVGETSGSRLTF

SEQ ID NO: 153954 - protein, 14 aa, Homo sapiens
  CDR3 for beta chain variable domain of TCR clone 76977 (TRBV19, TRBJ2-1)
CASPTFVLSDEQFF

SEQ ID NO: 153955 - protein, 14 aa, Homo sapiens
  CDR3 for alpha chain variable domain of TCR clone 76978 (TRAV12-1, TRAJ17)
CVVNYKAAGNKLTF

SEQ ID NO: 153956 - protein, 17 aa, Homo sapiens
  CDR3 for beta chain variable domain of TCR clone 76978 (TRBV20-1, TRBJ2-1)
CSASTSGLAGSYNEQFF

SEQ ID NO: 153957 - protein, 15 aa, Homo sapiens
  CDR3 for alpha chain variable domain of TCR clone 76979 (TRAV3, TRAJ5)
CAVRDRKTGRRALTF

SEQ ID NO: 153958 - protein, 15 aa, Homo sapiens
  CDR3 for beta chain variable domain of TCR clone 76979 (TRBV7-8, TRBJ2-1)
CARSLADSLYNEQFF

SEQ ID NO: 153959 - protein, 13 aa, Homo sapiens
  CDR3 for alpha chain variable domain of TCR clone 76980 (TRAV13-1, TRAJ39)
CAASIWAGNMLTF

SEQ ID NO: 153960 - protein, 14 aa, Homo sapiens
  CDR3 for beta chain variable domain of TCR clone 76980 (TRBV25-1, TRBJ1-1)
CASTHLGGNTEAFF

SEQ ID NO: 153961 - protein, 13 aa, Homo sapiens
  CDR3 for alpha chain variable domain of TCR clone 76981 (TRAV2, TRAJ20)
CAVEDPSEYKLGF

SEQ ID NO: 153962 - protein, 16 aa, Homo sapiens
  CDR3 for beta chain variable domain of TCR clone 76981 (TRBV25-1, TRBJ2-7)
CASSELTGGGIYEQYF

SEQ ID NO: 153963 - protein, 12 aa, Homo sapiens
  CDR3 for alpha chain variable domain of TCR clone 76982 (TRAV27, TRAJ35)
CAGADFGSVLHC

SEQ ID NO: 153964 - protein, 16 aa, Homo sapiens
  CDR3 for beta chain variable domain of TCR clone 76982 (TRBV6-1, TRBJ2-1)
CASISRQGSSYNEQFF

SEQ ID NO: 153965 - protein, 16 aa, Homo sapiens
  CDR3 for alpha chain variable domain of TCR clone 76983 (TRAV3, TRAJ18)
CAVRDGSGSTLGRLYF

SEQ ID NO: 153966 - protein, 17 aa, Homo sapiens
  CDR3 for beta chain variable domain of TCR clone 76983 (TRBV5-1, TRBJ2-3)
CASSKIGLADRTDTQYF

SEQ ID NO: 153967 - protein, 14 aa, Homo sapiens
  CDR3 for alpha chain variable domain of TCR clone 76984 (TRAV12-2, TRAJ13)
CAVKKTGGYQKVTF

SEQ ID NO: 153968 - protein, 17 aa, Homo sapiens
  CDR3 for beta chain variable domain of TCR clone 76984 (TRBV3-1, TRBJ2-2)
CASSQFRDKVDTGELFF

SEQ ID NO: 153969 - protein, 16 aa, Homo sapiens
  CDR3 for alpha chain variable domain of TCR clone 76985 (TRAV12-2, TRAJ56)
CAVRRVDTGANCKLTF

SEQ ID NO: 153970 - protein, 11 aa, Homo sapiens
  CDR3 for beta chain variable domain of TCR clone 76985 (TRBV3-1, TRBJ2-7)
CASSQVREQYF

SEQ ID NO: 153971 - protein, 13 aa, Homo sapiens
  CDR3 for alpha chain variable domain of TCR clone 76986 (TRAV2, TRAJ40)
CAVATSGTYKYIF

SEQ ID NO: 153972 - protein, 14 aa, Homo sapiens
  CDR3 for beta chain variable domain of TCR clone 76986 (TRBV12-4, TRBJ2-5)
CASSYSGYFETQYF

SEQ ID NO: 153973 - protein, 15 aa, Homo sapiens
  CDR3 for alpha chain variable domain of TCR clone 76987 (TRAV8-3, TRAJ45)
CASSYSGGGADGLTF

SEQ ID NO: 153974 - protein, 13 aa, Homo sapiens
  CDR3 for beta chain variable domain of TCR clone 76987 (TRBV15, TRBJ1-6)
CATSGGLNSPLHF

SEQ ID NO: 153975 - protein, 14 aa, Homo sapiens
  CDR3 for alpha chain variable domain of TCR clone 76988 (TRAV3, TRAJ8)
CDVSLNTGFQKLVF

SEQ ID NO: 153976 - protein, 14 aa, Homo sapiens
  CDR3 for beta chain variable domain of TCR clone 76988 (TRBV6-6, TRBJ1-5)
CASVDSGFNQPQHF

SEQ ID NO: 153977 - protein, 14 aa, Homo sapiens
  CDR3 for alpha chain variable domain of TCR clone 76989 (TRAV13-1, TRAJ44)
CAAKATGTASKLTF

SEQ ID NO: 153978 - protein, 17 aa, Homo sapiens
  CDR3 for beta chain variable domain of TCR clone 76989 (TRBV7-3, TRBJ2-3)
RASSSMKRMRGADTQYF

SEQ ID NO: 153979 - protein, 13 aa, Homo sapiens
  CDR3 for alpha chain variable domain of TCR clone 76990 (TRAV12-2, TRAJ40)
CAVKRTGTYKYIF

SEQ ID NO: 153980 - protein, 14 aa, Homo sapiens
  CDR3 for beta chain variable domain of TCR clone 76990 (TRBV12-5, TRBJ2-5)
CASGSRTHQETQYF

SEQ ID NO: 153981 - protein, 12 aa, Homo sapiens
  CDR3 for alpha chain variable domain of TCR clone 76991 (TRAV23/DV6, TRAJ17)
CAAKAAGNKLTF

SEQ ID NO: 153982 - protein, 16 aa, Homo sapiens
  CDR3 for beta chain variable domain of TCR clone 76991 (TRBV7-3, TRBJ2-2)
CASSLKRGTLSGELFF

SEQ ID NO: 153983 - protein, 13 aa, Homo sapiens
  CDR3 for alpha chain variable domain of TCR clone 76992 (TRAV1-2, TRAJ9)
CAASNTGGFKTIF

SEQ ID NO: 153984 - protein, 14 aa, Homo sapiens
  CDR3 for beta chain variable domain of TCR clone 76992 (TRBV13, TRBJ2-3)
CASSSGSPTDTQYF

SEQ ID NO: 153985 - protein, 12 aa, Homo sapiens
  CDR3 for alpha chain variable domain of TCR clone 76993 (TRAV8-3, TRAJ20)
CAVDFNDYKLSF

SEQ ID NO: 153986 - protein, 14 aa, Homo sapiens
  CDR3 for beta chain variable domain of TCR clone 76993 (TRBV25-1, TRBJ1-1)
CASTHLGGNTEAFF

SEQ ID NO: 153987 - protein, 11 aa, Homo sapiens
  CDR3 for alpha chain variable domain of TCR clone 76994 (TRAV2, TRAJ33)
CAVESNYQLIW

SEQ ID NO: 153988 - protein, 15 aa, Homo sapiens
  CDR3 for beta chain variable domain of TCR clone 76994 (TRBV19, TRBJ1-1)
CASTSEQIQNTEAFF

SEQ ID NO: 153989 - protein, 12 aa, Homo sapiens
  CDR3 for alpha chain variable domain of TCR clone 76995 (TRAV2, TRAJ9)
CAVGAGGFKTIF

SEQ ID NO: 153990 - protein, 14 aa, Homo sapiens
  CDR3 for beta chain variable domain of TCR clone 76995 (TRBV11-2, TRBJ2-3)
CASSRLARTDTQYF

SEQ ID NO: 153991 - protein, 17 aa, Homo sapiens
  CDR3 for alpha chain variable domain of TCR clone 76996 (TRAV17, TRAJ28)
CATDPRRGGAGSYRLTF

SEQ ID NO: 153992 - protein, 16 aa, Homo sapiens
  CDR3 for beta chain variable domain of TCR clone 76996 (TRBV25-1, TRBJ1-1)
CASSGDRDRGRIEAFF

SEQ ID NO: 153993 - protein, 13 aa, Homo sapiens
  CDR3 for alpha chain variable domain of TCR clone 76997 (TRAV29/DV5, TRAJ44)
CAASTGTASKLPF

SEQ ID NO: 153994 - protein, 13 aa, Homo sapiens
  CDR3 for beta chain variable domain of TCR clone 76997 (TRBV19, TRBJ2-7)
CASRKAGGSEQYF

SEQ ID NO: 153995 - protein, 15 aa, Homo sapiens
  CDR3 for alpha chain variable domain of TCR clone 76998 (TRAV12-1, TRAJ10)
CVVNKLTGGGNKLTF

SEQ ID NO: 153996 - protein, 17 aa, Homo sapiens
  CDR3 for beta chain variable domain of TCR clone 76998 (TRBV5-1, TRBJ1-6)
CASSPSLQGSDNSPLHV

SEQ ID NO: 153997 - protein, 17 aa, Homo sapiens
  CDR3 for alpha chain variable domain of TCR clone 76999 (TRAV23/DV6, TRAJ57)
CAASSTLSQGGSEKLVF

SEQ ID NO: 153998 - protein, 14 aa, Homo sapiens
  CDR3 for beta chain variable domain of TCR clone 76999 (TRBV25-1, TRBJ1-1)
CASTHLGGNNEAFF

SEQ ID NO: 153999 - protein, 15 aa, Homo sapiens
  CDR3 for alpha chain variable domain of TCR clone 77000 (TRAV17, TRAJ45)
CATAELGGGADGFTF

SEQ ID NO: 154000 - protein, 14 aa, Homo sapiens
  CDR3 for beta chain variable domain of TCR clone 77000 (TRBV3-1, TRBJ2-5)
CASSQAVRQETQYF

SEQ ID NO: 154001 - protein, 15 aa, Homo sapiens
  CDR3 for alpha chain variable domain of TCR clone 77001 (TRAV13-1, TRAJ43)
CAATPELGGNNDMRF

SEQ ID NO: 154002 - protein, 15 aa, Homo sapiens
  CDR3 for beta chain variable domain of TCR clone 77001 (TRBV10-2, TRBJ2-6)
CASSEQGTGANVPTF

SEQ ID NO: 154003 - protein, 18 aa, Homo sapiens
  CDR3 for alpha chain variable domain of TCR clone 77002 (TRAV26-2, TRAJ45)
CILRLWGYSGGGADGLTF

SEQ ID NO: 154004 - protein, 17 aa, Homo sapiens
  CDR3 for beta chain variable domain of TCR clone 77002 (TRBV28, TRBJ2-3)
CASSPTPAGGRVDTQYS

SEQ ID NO: 154005 - protein, 13 aa, Homo sapiens
  CDR3 for alpha chain variable domain of TCR clone 77003 (TRAV3, TRAJ15)
CAVRDQAGTALIF

SEQ ID NO: 154006 - protein, 16 aa, Homo sapiens
  CDR3 for beta chain variable domain of TCR clone 77003 (TRBV12-4, TRBJ1-5)
CASSRPVGGSNQPQHF

SEQ ID NO: 154007 - protein, 13 aa, Homo sapiens
  CDR3 for alpha chain variable domain of TCR clone 77004 (TRAV23/DV6, TRAJ22)
CAPYSGSARQLTF

SEQ ID NO: 154008 - protein, 12 aa, Homo sapiens
  CDR3 for beta chain variable domain of TCR clone 77004 (TRBV11-2, TRBJ2-2)
CASSLGGGELFF

SEQ ID NO: 154009 - protein, 12 aa, Homo sapiens
  CDR3 for alpha chain variable domain of TCR clone 77005 (TRAV12-1, TRAJ6)
CVVSERSYIPTF

SEQ ID NO: 154010 - protein, 21 aa, Homo sapiens
  CDR3 for beta chain variable domain of TCR clone 77005 (TRBV7-3, TRBJ2-1)
GGTQPCISGPAAYGLAGAQFF

SEQ ID NO: 154011 - protein, 14 aa, Homo sapiens
  CDR3 for alpha chain variable domain of TCR clone 77006 (TRAV27, TRAJ49)
CAGRPEGTGNQVYF

SEQ ID NO: 154012 - protein, 16 aa, Homo sapiens
  CDR3 for beta chain variable domain of TCR clone 77006 (TRBV12-5, TRBJ2-5)
CASGPRTSGNQETQYF

SEQ ID NO: 154013 - protein, 11 aa, Homo sapiens
  CDR3 for alpha chain variable domain of TCR clone 77007 (TRAV12-1, TRAJ30)
CVVNGQDKIIF

SEQ ID NO: 154014 - protein, 15 aa, Homo sapiens
  CDR3 for beta chain variable domain of TCR clone 77007 (TRBV27, TRBJ2-2)
CTSVPANSSPGSYFF

SEQ ID NO: 154015 - protein, 12 aa, Homo sapiens
  CDR3 for alpha chain variable domain of TCR clone 77008 (TRAV13-1, TRAJ21)
CAAKEGFNKFYF

SEQ ID NO: 154016 - protein, 19 aa, Homo sapiens
  CDR3 for beta chain variable domain of TCR clone 77008 (TRBV2, TRBJ2-7)
CASSDDETSGRANNYEQYF

SEQ ID NO: 154017 - protein, 14 aa, Homo sapiens
  CDR3 for alpha chain variable domain of TCR clone 77009 (TRAV26-1, TRAJ45)
CIEVTGGGADGLTF

SEQ ID NO: 154018 - protein, 12 aa, Homo sapiens
  CDR3 for beta chain variable domain of TCR clone 77009 (TRBV12-4, TRBJ2-7)
CASRLGGYEQYF

SEQ ID NO: 154019 - protein, 12 aa, Homo sapiens
  CDR3 for alpha chain variable domain of TCR clone 77010 (TRAV27, TRAJ17)
CAMTLTGNKLTF

SEQ ID NO: 154020 - protein, 13 aa, Homo sapiens
  CDR3 for beta chain variable domain of TCR clone 77010 (TRBV19, TRBJ1-2)
CASSQGQVYGYTF

SEQ ID NO: 154021 - protein, 15 aa, Homo sapiens
  CDR3 for alpha chain variable domain of TCR clone 77011 (TRAV12-1, TRAJ44)
CVADLPTGTASKLTF

SEQ ID NO: 154022 - protein, 14 aa, Homo sapiens
  CDR3 for beta chain variable domain of TCR clone 77011 (TRBV25-1, TRBJ1-1)
CASTHLGGNTEAFF

SEQ ID NO: 154023 - protein, 15 aa, Homo sapiens
  CDR3 for alpha chain variable domain of TCR clone 77012 (TRAV2, TRAJ15)
CAVEDRGQAGTALIF

SEQ ID NO: 154024 - protein, 14 aa, Homo sapiens
  CDR3 for beta chain variable domain of TCR clone 77012 (TRBV5-1, TRBJ2-7)
CASSRGESLYEQYF

SEQ ID NO: 154025 - protein, 14 aa, Homo sapiens
  CDR3 for alpha chain variable domain of TCR clone 77013 (TRAV17, TRAJ6)
CATDASGGSYIPTF

SEQ ID NO: 154026 - protein, 19 aa, Homo sapiens
  CDR3 for beta chain variable domain of TCR clone 77013 (TRBV4-3, TRBJ2-7)
CASRQEFIGWQVTPYEQYF

SEQ ID NO: 154027 - protein, 13 aa, Homo sapiens
  CDR3 for alpha chain variable domain of TCR clone 77014 (TRAV22, TRAJ29)
CAVGGSGNTPLVV

SEQ ID NO: 154028 - protein, 13 aa, Homo sapiens
  CDR3 for beta chain variable domain of TCR clone 77014 (TRBV4-2, TRBJ1-1)
CASSQAGNTEAFF

SEQ ID NO: 154029 - protein, 14 aa, Homo sapiens
  CDR3 for alpha chain variable domain of TCR clone 77015 (TRAV20, TRAJ22)
CAVQVSGSARQLTF

SEQ ID NO: 154030 - protein, 15 aa, Homo sapiens
  CDR3 for beta chain variable domain of TCR clone 77015 (TRBV27, TRBJ2-1)
CASSNGGGSSNEQFF

SEQ ID NO: 154031 - protein, 14 aa, Homo sapiens
  CDR3 for alpha chain variable domain of TCR clone 77016 (TRAV12-2, TRAJ40)
CAVKIPSGTYKYIF

SEQ ID NO: 154032 - protein, 12 aa, Homo sapiens
  CDR3 for beta chain variable domain of TCR clone 77016 (TRBV11-2, TRBJ2-1)
CASGPGNNEQFF

SEQ ID NO: 154033 - protein, 14 aa, Homo sapiens
  CDR3 for alpha chain variable domain of TCR clone 77017 (TRAV24, TRAJ16)
CAFPPFSDGQKLLF

SEQ ID NO: 154034 - protein, 11 aa, Homo sapiens
  CDR3 for beta chain variable domain of TCR clone 77017 (TRBV19, TRBJ1-1)
CQYQRGGEAFF

SEQ ID NO: 154035 - protein, 10 aa, Homo sapiens
  CDR3 for alpha chain variable domain of TCR clone 77018 (TRAV23/DV6, TRAJ43)
CAAAVAALEQ

SEQ ID NO: 154036 - protein, 13 aa, Homo sapiens
  CDR3 for beta chain variable domain of TCR clone 77018 (TRBV12-4, TRBJ1-2)
CASSVRQGKGYTF

SEQ ID NO: 154037 - protein, 17 aa, Homo sapiens
  CDR3 for alpha chain variable domain of TCR clone 77019 (TRAV13-1, TRAJ52)
CEASSGAGGTSYGKLTF

SEQ ID NO: 154038 - protein, 15 aa, Homo sapiens
  CDR3 for beta chain variable domain of TCR clone 77019 (TRBV2, TRBJ2-1)
CASSELAGSYNEQFF

SEQ ID NO: 154039 - protein, 19 aa, Homo sapiens
  CDR3 for alpha chain variable domain of TCR clone 77020 (TRAV1-2, TRAJ26)
CLLPPCCERPDNYGQNFVF

SEQ ID NO: 154040 - protein, 15 aa, Homo sapiens
  CDR3 for beta chain variable domain of TCR clone 77020 (TRBV9, TRBJ1-6)
CASSVAGTGDSPLHF

SEQ ID NO: 154041 - protein, 11 aa, Homo sapiens
  CDR3 for alpha chain variable domain of TCR clone 77021 (TRAV2, TRAJ33)
CAVESNYQLIW

SEQ ID NO: 154042 - protein, 15 aa, Homo sapiens
  CDR3 for beta chain variable domain of TCR clone 77021 (TRBV19, TRBJ1-1)
CASTSGQIQNTEVFF

SEQ ID NO: 154043 - protein, 14 aa, Homo sapiens
  CDR3 for alpha chain variable domain of TCR clone 77022 (TRAV12-3, TRAJ13)
CAVKKTGGYQKVTF

SEQ ID NO: 154044 - protein, 11 aa, Homo sapiens
  CDR3 for beta chain variable domain of TCR clone 77022 (TRBV12-4, TRBJ2-2)
CTSSSAGELFF

SEQ ID NO: 154045 - protein, 13 aa, Homo sapiens
  CDR3 for alpha chain variable domain of TCR clone 77023 (TRAV12-2, TRAJ20)
CALYPSNDYKLSF

SEQ ID NO: 154046 - protein, 15 aa, Homo sapiens
  CDR3 for beta chain variable domain of TCR clone 77023 (TRBV27, TRBJ2-5)
CASSLYPRGGETQYF

SEQ ID NO: 154047 - protein, 11 aa, Homo sapiens
  CDR3 for alpha chain variable domain of TCR clone 77024 (TRAV2, TRAJ13)
CASGGYQKVTF

SEQ ID NO: 154048 - protein, 13 aa, Homo sapiens
  CDR3 for beta chain variable domain of TCR clone 77024 (TRBV4-1, TRBJ2-1)
CASSQEVQYEQFF

SEQ ID NO: 154049 - protein, 14 aa, Homo sapiens
  CDR3 for alpha chain variable domain of TCR clone 77025 (TRAV12-1, TRAJ30)
CVVNIGGRDGKIIF

SEQ ID NO: 154050 - protein, 13 aa, Homo sapiens
  CDR3 for beta chain variable domain of TCR clone 77025 (TRBV12-5, TRBJ2-1)
CASSLGRGNEQFF

SEQ ID NO: 154051 - protein, 16 aa, Homo sapiens
  CDR3 for alpha chain variable domain of TCR clone 77026 (TRAV16, TRAJ4)
CALSRMFSGGYNKLIF

SEQ ID NO: 154052 - protein, 14 aa, Homo sapiens
  CDR3 for beta chain variable domain of TCR clone 77026 (TRBV11-2, TRBJ2-7)
CASSLGAGAYEQYF

SEQ ID NO: 154053 - protein, 13 aa, Homo sapiens
  CDR3 for alpha chain variable domain of TCR clone 77027 (TRAV8-6, TRAJ34)
CAVSDKGTDKLIF

SEQ ID NO: 154054 - protein, 14 aa, Homo sapiens
  CDR3 for beta chain variable domain of TCR clone 77027 (TRBV12-4, TRBJ1-1)
CASTWTGHDTEAFF

SEQ ID NO: 154055 - protein, 13 aa, Homo sapiens
  CDR3 for alpha chain variable domain of TCR clone 77028 (TRAV3, TRAJ30)
CAVRDRGDDKIIF

SEQ ID NO: 154056 - protein, 14 aa, Homo sapiens
  CDR3 for beta chain variable domain of TCR clone 77028 (TRBV5-1, TRBJ1-1)
CASSRTTGDTEAFL

SEQ ID NO: 154057 - protein, 15 aa, Homo sapiens
  CDR3 for alpha chain variable domain of TCR clone 77029 (TRAV12-3, TRAJ6)
CAMSATTGGSYIPTF

SEQ ID NO: 154058 - protein, 16 aa, Homo sapiens
  CDR3 for beta chain variable domain of TCR clone 77029 (TRBV20-1, TRBJ1-2)
CSDSMGQGVANYGYTF

SEQ ID NO: 154059 - protein, 13 aa, Homo sapiens
  CDR3 for alpha chain variable domain of TCR clone 77030 (TRAV8-3, TRAJ48)
CAVVPFGNEKLTF

SEQ ID NO: 154060 - protein, 15 aa, Homo sapiens
  CDR3 for beta chain variable domain of TCR clone 77030 (TRBV6-5, TRBJ2-1)
CASSYDAGAGNEQFF

SEQ ID NO: 154061 - protein, 15 aa, Homo sapiens
  CDR3 for alpha chain variable domain of TCR clone 77031 (TRAV21, TRAJ40)
RAVRPQTSGTYKYIF

SEQ ID NO: 154062 - protein, 13 aa, Homo sapiens
  CDR3 for beta chain variable domain of TCR clone 77031 (TRBV7-2, TRBJ2-2)
CASSSVRARELFF

SEQ ID NO: 154063 - protein, 16 aa, Homo sapiens
  CDR3 for alpha chain variable domain of TCR clone 77032 (TRAV30, TRAJ24)
CGKEIVDADSWGKFQF

SEQ ID NO: 154064 - protein, 15 aa, Homo sapiens
  CDR3 for beta chain variable domain of TCR clone 77032 (TRBV7-9, TRBJ1-4)
CASSARTGGNEKLFF

SEQ ID NO: 154065 - protein, 16 aa, Homo sapiens
  CDR3 for alpha chain variable domain of TCR clone 77033 (TRAV17, TRAJ28)
CATASVSGAGSYQLTF

SEQ ID NO: 154066 - protein, 11 aa, Homo sapiens
  CDR3 for beta chain variable domain of TCR clone 77033 (TRBV7-9, TRBJ2-5)
CVSSLGETQYF

SEQ ID NO: 154067 - protein, 16 aa, Homo sapiens
  CDR3 for alpha chain variable domain of TCR clone 77034 (TRAV12-1, TRAJ48)
CVVNMVSNFGNEKLTF

SEQ ID NO: 154068 - protein, 18 aa, Homo sapiens
  CDR3 for beta chain variable domain of TCR clone 77034 (TRBV11-2, TRBJ2-6)
CASSLNPFLGTGANGLTF

SEQ ID NO: 154069 - protein, 16 aa, Homo sapiens
  CDR3 for alpha chain variable domain of TCR clone 77035 (TRAV3, TRAJ3)
CAVRDREKSSASKIIF

SEQ ID NO: 154070 - protein, 16 aa, Homo sapiens
  CDR3 for beta chain variable domain of TCR clone 77035 (TRBV20-1, TRBJ2-4)
CSATSLAELAKNIQYF

SEQ ID NO: 154071 - protein, 14 aa, Homo sapiens
  CDR3 for alpha chain variable domain of TCR clone 77036 (TRAV1-2, TRAJ16)
CAVNRFSDGQRLLF

SEQ ID NO: 154072 - protein, 13 aa, Homo sapiens
  CDR3 for beta chain variable domain of TCR clone 77036 (TRBV19, TRBJ1-2)
CASSVPGQDGYTF

SEQ ID NO: 154073 - protein, 18 aa, Homo sapiens
  CDR3 for alpha chain variable domain of TCR clone 77037 (TRAV13-1, TRAJ52)
CAAKNPNAGGTSYGKLTF

SEQ ID NO: 154074 - protein, 14 aa, Homo sapiens
  CDR3 for beta chain variable domain of TCR clone 77037 (TRBV7-2, TRBJ2-7)
CASTSQGAAYEQYF

SEQ ID NO: 154075 - protein, 11 aa, Homo sapiens
  CDR3 for alpha chain variable domain of TCR clone 77038 (TRAV3, TRAJ21)
CAVGNFNKFYF

SEQ ID NO: 154076 - protein, 15 aa, Homo sapiens
  CDR3 for beta chain variable domain of TCR clone 77038 (TRBV5-5, TRBJ1-2)
CASSLVGTDVYGYTF

SEQ ID NO: 154077 - protein, 15 aa, Homo sapiens
  CDR3 for alpha chain variable domain of TCR clone 77039 (TRAV8-4, TRAJ36)
CAVRKSWTGANNLFF

SEQ ID NO: 154078 - protein, 15 aa, Homo sapiens
  CDR3 for beta chain variable domain of TCR clone 77039 (TRBV15, TRBJ1-1)
CATSLQGGRNTEAFF

SEQ ID NO: 154079 - protein, 11 aa, Homo sapiens
  CDR3 for alpha chain variable domain of TCR clone 77040 (TRAV3, TRAJ13)
CAVTSYQKVTF

SEQ ID NO: 154080 - protein, 15 aa, Homo sapiens
  CDR3 for beta chain variable domain of TCR clone 77040 (TRBV7-9, TRBJ1-4)
CASSRTGGFNEKLFF

SEQ ID NO: 154081 - protein, 11 aa, Homo sapiens
  CDR3 for alpha chain variable domain of TCR clone 77041 (TRAV1-1, TRAJ23)
CAVRQGGKLIF

SEQ ID NO: 154082 - protein, 13 aa, Homo sapiens
  CDR3 for beta chain variable domain of TCR clone 77041 (TRBV7-8, TRBJ2-2)
PGRLSISPGELFF

SEQ ID NO: 154083 - protein, 18 aa, Homo sapiens
  CDR3 for alpha chain variable domain of TCR clone 77042 (TRAV21, TRAJ52)
CAVRPSPAGGTSYGKLTF

SEQ ID NO: 154084 - protein, 15 aa, Homo sapiens
  CDR3 for beta chain variable domain of TCR clone 77042 (TRBV13, TRBJ1-2)
CASSLGRQPGYGYTF

SEQ ID NO: 154085 - protein, 12 aa, Homo sapiens
  CDR3 for alpha chain variable domain of TCR clone 77043 (TRAV8-3, TRAJ26)
CAGDNYGQNFVF

SEQ ID NO: 154086 - protein, 13 aa, Homo sapiens
  CDR3 for beta chain variable domain of TCR clone 77043 (TRBV20-1, TRBJ1-1)
RSAPLGGGTEAFF

SEQ ID NO: 154087 - protein, 13 aa, Homo sapiens
  CDR3 for alpha chain variable domain of TCR clone 77044 (TRAV20, TRAJ48)
CAVHLFGNEKLTF

SEQ ID NO: 154088 - protein, 15 aa, Homo sapiens
  CDR3 for beta chain variable domain of TCR clone 77044 (TRBV6-5, TRBJ2-6)
CASSQWEAGANGLTF

SEQ ID NO: 154089 - protein, 15 aa, Homo sapiens
  CDR3 for alpha chain variable domain of TCR clone 77045 (TRAV12-1, TRAJ44)
CVVDTPQGTASKLTF

SEQ ID NO: 154090 - protein, 13 aa, Homo sapiens
  CDR3 for beta chain variable domain of TCR clone 77045 (TRBV27, TRBJ2-1)
CARSSGSYNEQFF

SEQ ID NO: 154091 - protein, 11 aa, Homo sapiens
  CDR3 for alpha chain variable domain of TCR clone 77046 (TRAV21, TRAJ3)
CLYSSASKIIF

SEQ ID NO: 154092 - protein, 16 aa, Homo sapiens
  CDR3 for beta chain variable domain of TCR clone 77046 (TRBV19, TRBJ2-1)
CASSKAGPSFYNEQFF

SEQ ID NO: 154093 - protein, 16 aa, Homo sapiens
  CDR3 for alpha chain variable domain of TCR clone 77047 (TRAV30, TRAJ24)
CGTEIVDAYSWGKFQF

SEQ ID NO: 154094 - protein, 13 aa, Homo sapiens
  CDR3 for beta chain variable domain of TCR clone 77047 (TRBV11-2, TRBJ2-5)
CASSSTGEETQYF

SEQ ID NO: 154095 - protein, 13 aa, Homo sapiens
  CDR3 for alpha chain variable domain of TCR clone 77048 (TRAV21, TRAJ20)
CAVGLRVDYKLSF

SEQ ID NO: 154096 - protein, 14 aa, Homo sapiens
  CDR3 for beta chain variable domain of TCR clone 77048 (TRBV18, TRBJ2-7)
CASSPRGGAYEQYF

SEQ ID NO: 154097 - protein, 15 aa, Homo sapiens
  CDR3 for alpha chain variable domain of TCR clone 77049 (TRAV8-3, TRAJ45)
CASSYSGGGADGLPF

SEQ ID NO: 154098 - protein, 12 aa, Homo sapiens
  CDR3 for beta chain variable domain of TCR clone 77049 (TRBV12-4, TRBJ2-7)
CASSLGGYEQYF

SEQ ID NO: 154099 - protein, 13 aa, Homo sapiens
  CDR3 for alpha chain variable domain of TCR clone 77050 (TRAV29/DV5, TRAJ44)
CAASTGTASKLTF

SEQ ID NO: 154100 - protein, 13 aa, Homo sapiens
  CDR3 for beta chain variable domain of TCR clone 77050 (TRBV19, TRBJ2-7)
CASRKAGGSEQHF

SEQ ID NO: 154101 - protein, 14 aa, Homo sapiens
  CDR3 for alpha chain variable domain of TCR clone 77051 (TRAV12-3, TRAJ5)
CAMITYTGRRALTF

SEQ ID NO: 154102 - protein, 13 aa, Homo sapiens
  CDR3 for beta chain variable domain of TCR clone 77051 (TRBV28, TRBJ2-3)
CASSTGGGDTQYF

SEQ ID NO: 154103 - protein, 17 aa, Homo sapiens
  CDR3 for alpha chain variable domain of TCR clone 77052 (TRAV16, TRAJ58)
CITVLSNGETSGSRLTF

SEQ ID NO: 154104 - protein, 17 aa, Homo sapiens
  CDR3 for beta chain variable domain of TCR clone 77052 (TRBV18, TRBJ2-1)
CASSEGLSGGADNEQFF

SEQ ID NO: 154105 - protein, 13 aa, Homo sapiens
  CDR3 for alpha chain variable domain of TCR clone 77053 (TRAV12-3, TRAJ33)
CAMSVNSNYQLIW

SEQ ID NO: 154106 - protein, 12 aa, Homo sapiens
  CDR3 for beta chain variable domain of TCR clone 77053 (TRBV2, TRBJ2-1)
CAYGPPGNEQFF

SEQ ID NO: 154107 - protein, 13 aa, Homo sapiens
  CDR3 for alpha chain variable domain of TCR clone 77054 (TRAV12-1, TRAJ33)
CGDAPDSNYQLIW

SEQ ID NO: 154108 - protein, 14 aa, Homo sapiens
  CDR3 for beta chain variable domain of TCR clone 77054 (TRBV7-3, TRBJ2-1)
CASSLAGGTNEQFF

SEQ ID NO: 154109 - protein, 14 aa, Homo sapiens
  CDR3 for alpha chain variable domain of TCR clone 77055 (TRAV12-2, TRAJ13)
CAVKKTGGYQKVTF

SEQ ID NO: 154110 - protein, 15 aa, Homo sapiens
  CDR3 for beta chain variable domain of TCR clone 77055 (TRBV2, TRBJ2-4)
CASSAQGAAKNIQYF

SEQ ID NO: 154111 - protein, 12 aa, Homo sapiens
  CDR3 for alpha chain variable domain of TCR clone 77056 (TRAV12-3, TRAJ40)
CAVSSGTYKYIF

SEQ ID NO: 154112 - protein, 15 aa, Homo sapiens
  CDR3 for beta chain variable domain of TCR clone 77056 (TRBV7-9, TRBJ2-7)
RASSPGGGLTYEQYF

SEQ ID NO: 154113 - protein, 13 aa, Homo sapiens
  CDR3 for alpha chain variable domain of TCR clone 77057 (TRAV17, TRAJ5)
CAPMDTGRRALTF

SEQ ID NO: 154114 - protein, 13 aa, Homo sapiens
  CDR3 for beta chain variable domain of TCR clone 77057 (TRBV7-9, TRBJ1-2)
CASSLKQNYGYAF

SEQ ID NO: 154115 - protein, 13 aa, Homo sapiens
  CDR3 for alpha chain variable domain of TCR clone 77058 (TRAV21, TRAJ36)
CAVIKTGENNLFF

SEQ ID NO: 154116 - protein, 13 aa, Homo sapiens
  CDR3 for beta chain variable domain of TCR clone 77058 (TRBV29-1, TRBJ2-3)
CSATRGGRDTQYF

SEQ ID NO: 154117 - protein, 12 aa, Homo sapiens
  CDR3 for alpha chain variable domain of TCR clone 77059 (TRAV20, TRAJ56)
CSVTGANSKLTF

SEQ ID NO: 154118 - protein, 14 aa, Homo sapiens
  CDR3 for beta chain variable domain of TCR clone 77059 (TRBV20-1, TRBJ2-5)
CSALVPGYQETQYF

SEQ ID NO: 154119 - protein, 13 aa, Homo sapiens
  CDR3 for alpha chain variable domain of TCR clone 77060 (TRAV21, TRAJ24)
GLMTTDSWGKLQL

SEQ ID NO: 154120 - protein, 12 aa, Homo sapiens
  CDR3 for beta chain variable domain of TCR clone 77060 (TRBV11-2, TRBJ2-7)
CASSPPADEQYF

SEQ ID NO: 154121 - protein, 10 aa, Homo sapiens
  CDR3 for alpha chain variable domain of TCR clone 77061 (TRAV26-2, TRAJ45)
CILRVDKYSG

SEQ ID NO: 154122 - protein, 16 aa, Homo sapiens
  CDR3 for beta chain variable domain of TCR clone 77061 (TRBV2, TRBJ1-4)
CASNLLQGATNEKLFF

SEQ ID NO: 154123 - protein, 12 aa, Homo sapiens
  CDR3 for alpha chain variable domain of TCR clone 77062 (TRAV26-1, TRAJ13)
FIVSRGYQKVTF

SEQ ID NO: 154124 - protein, 16 aa, Homo sapiens
  CDR3 for beta chain variable domain of TCR clone 77062 (TRBV27, TRBJ2-1)
CASSLSKGFGLDEQFF

SEQ ID NO: 154125 - protein, 14 aa, Homo sapiens
  CDR3 for alpha chain variable domain of TCR clone 77063 (TRAV3, TRAJ17)
CAVRDEAAGNKLTF

SEQ ID NO: 154126 - protein, 15 aa, Homo sapiens
  CDR3 for beta chain variable domain of TCR clone 77063 (TRBV3-1, TRBJ2-7)
CASSQVRQGAYEQYF

SEQ ID NO: 154127 - protein, 12 aa, Homo sapiens
  CDR3 for alpha chain variable domain of TCR clone 77064 (TRAV13-1, TRAJ47)
CAASEGGNKLVF

SEQ ID NO: 154128 - protein, 20 aa, Homo sapiens
  CDR3 for beta chain variable domain of TCR clone 77064 (TRBV6-4, TRBJ2-7)
CASSDSSVSGQVPTSYEQYF

SEQ ID NO: 154129 - protein, 13 aa, Homo sapiens
  CDR3 for alpha chain variable domain of TCR clone 77065 (TRAV26-1, TRAJ36)
CIVVGAGANNLFF

SEQ ID NO: 154130 - protein, 13 aa, Homo sapiens
  CDR3 for beta chain variable domain of TCR clone 77065 (TRBV6-5, TRBJ2-6)
CASSTSGPLRLDF

SEQ ID NO: 154131 - protein, 15 aa, Homo sapiens
  CDR3 for alpha chain variable domain of TCR clone 77066 (TRAV27, TRAJ45)
CAPVDSGGGADGLTF

SEQ ID NO: 154132 - protein, 11 aa, Homo sapiens
  CDR3 for beta chain variable domain of TCR clone 77066 (TRBV23-1, TRBJ1-5)
CASSQSRGQGW

SEQ ID NO: 154133 - protein, 16 aa, Homo sapiens
  CDR3 for alpha chain variable domain of TCR clone 77067 (TRAV16, TRAJ42)
CARKMNYGGGQGNLIF

SEQ ID NO: 154134 - protein, 14 aa, Homo sapiens
  CDR3 for beta chain variable domain of TCR clone 77067 (TRBV14, TRBJ2-3)
CQQPDDRDTDTQYF

SEQ ID NO: 154135 - protein, 11 aa, Homo sapiens
  CDR3 for alpha chain variable domain of TCR clone 77068 (TRAV12-1, TRAJ34)
CVVNKGRELIF

SEQ ID NO: 154136 - protein, 15 aa, Homo sapiens
  CDR3 for beta chain variable domain of TCR clone 77068 (TRBV7-2, TRBJ1-2)
CASSLVSGGDYGYAF

SEQ ID NO: 154137 - protein, 19 aa, Homo sapiens
  CDR3 for alpha chain variable domain of TCR clone 77069 (TRAV3, TRAJ6)
CAVRDRNHSRSGGSYIPTF

SEQ ID NO: 154138 - protein, 15 aa, Homo sapiens
  CDR3 for beta chain variable domain of TCR clone 77069 (TRBV18, TRBJ2-7)
CASSPTFMDSYEQYF

SEQ ID NO: 154139 - protein, 18 aa, Homo sapiens
  CDR3 for alpha chain variable domain of TCR clone 77070 (TRAV13-1, TRAJ52)
CAAKNPNAGGTSYGKLTF

SEQ ID NO: 154140 - protein, 15 aa, Homo sapiens
  CDR3 for beta chain variable domain of TCR clone 77070 (TRBV28, TRBJ2-7)
CASKKPSGRAYEQYF

SEQ ID NO: 154141 - protein, 14 aa, Homo sapiens
  CDR3 for alpha chain variable domain of TCR clone 77071 (TRAV12-1, TRAJ30)
SATYLTNRDDKIIF

SEQ ID NO: 154142 - protein, 15 aa, Homo sapiens
  CDR3 for beta chain variable domain of TCR clone 77071 (TRBV5-1, TRBJ1-5)
CASSLGTVSNQPQHF

SEQ ID NO: 154143 - protein, 14 aa, Homo sapiens
  CDR3 for alpha chain variable domain of TCR clone 77072 (TRAV25, TRAJ23)
CAGQGDNKGGKLIF

SEQ ID NO: 154144 - protein, 12 aa, Homo sapiens
  CDR3 for beta chain variable domain of TCR clone 77072 (TRBV7-9, TRBJ1-1)
CASSLVRGEAFF

SEQ ID NO: 154145 - protein, 15 aa, Homo sapiens
  CDR3 for alpha chain variable domain of TCR clone 77073 (TRAV26-1, TRAJ42)
CIVRVKGGSQGNLIF

SEQ ID NO: 154146 - protein, 14 aa, Homo sapiens
  CDR3 for beta chain variable domain of TCR clone 77073 (TRBV7-2, TRBJ2-7)
CASSPKTSFYEQYF

SEQ ID NO: 154147 - protein, 16 aa, Homo sapiens
  CDR3 for alpha chain variable domain of TCR clone 77074 (TRAV26-1, TRAJ38)
CIVRAYNAGNNRKLIW

SEQ ID NO: 154148 - protein, 13 aa, Homo sapiens
  CDR3 for beta chain variable domain of TCR clone 77074 (TRBV4-2, TRBJ2-7)
CASSRDPHEEQYF

SEQ ID NO: 154149 - protein, 17 aa, Homo sapiens
  CDR3 for alpha chain variable domain of TCR clone 77075 (TRAV3, TRAJ42)
CAVRDRDYGGSQGNLIF

SEQ ID NO: 154150 - protein, 12 aa, Homo sapiens
  CDR3 for beta chain variable domain of TCR clone 77075 (TRBV11-3, TRBJ2-1)
CASSPGNNEQFF

SEQ ID NO: 154151 - protein, 17 aa, Homo sapiens
  CDR3 for alpha chain variable domain of TCR clone 77076 (TRAV13-1, TRAJ52)
CAASSGAGGTSYGKLTC

SEQ ID NO: 154152 - protein, 15 aa, Homo sapiens
  CDR3 for beta chain variable domain of TCR clone 77076 (TRBV2, TRBJ2-1)
CASSELAGSYNEQFF

SEQ ID NO: 154153 - protein, 13 aa, Homo sapiens
  CDR3 for alpha chain variable domain of TCR clone 77077 (TRAV12-3, TRAJ33)
RAMSVDSNYQLIW

SEQ ID NO: 154154 - protein, 12 aa, Homo sapiens
  CDR3 for beta chain variable domain of TCR clone 77077 (TRBV12-4, TRBJ1-2)
CASSFIWLHLRF

SEQ ID NO: 154155 - protein, 13 aa, Homo sapiens
  CDR3 for alpha chain variable domain of TCR clone 77078 (TRAV12-3, TRAJ13)
CAMGTGGYQKVTF

SEQ ID NO: 154156 - protein, 14 aa, Homo sapiens
  CDR3 for beta chain variable domain of TCR clone 77078 (TRBV11-2, TRBJ2-5)
CASRPLAGRETQYF

SEQ ID NO: 154157 - protein, 12 aa, Homo sapiens
  CDR3 for alpha chain variable domain of TCR clone 77079 (TRAV12-3, TRAJ41)
CAMSYSGYALNF

SEQ ID NO: 154158 - protein, 13 aa, Homo sapiens
  CDR3 for beta chain variable domain of TCR clone 77079 (TRBV7-3, TRBJ2-1)
CASSLDSYNEQFL

SEQ ID NO: 154159 - protein, 15 aa, Homo sapiens
  CDR3 for alpha chain variable domain of TCR clone 77080 (TRAV12-1, TRAJ45)
CVVLSGGGGADGLTF

SEQ ID NO: 154160 - protein, 16 aa, Homo sapiens
  CDR3 for beta chain variable domain of TCR clone 77080 (TRBV6-5, TRBJ2-1)
CASSETLAGHYNELFF

SEQ ID NO: 154161 - protein, 12 aa, Homo sapiens
  CDR3 for alpha chain variable domain of TCR clone 77081 (TRAV12-3, TRAJ17)
CAMTHTGNRLTF

SEQ ID NO: 154162 - protein, 15 aa, Homo sapiens
  CDR3 for beta chain variable domain of TCR clone 77081 (TRBV20-1, TRBJ2-7)
CSARDRVSGMDEQYF

SEQ ID NO: 154163 - protein, 14 aa, Homo sapiens
  CDR3 for alpha chain variable domain of TCR clone 77082 (TRAV12-2, TRAJ17)
CAVLFKAAGNKLTP

SEQ ID NO: 154164 - protein, 17 aa, Homo sapiens
  CDR3 for beta chain variable domain of TCR clone 77082 (TRBV20-1, TRBJ2-2)
CSASGSGQGGLTGELFF

SEQ ID NO: 154165 - protein, 15 aa, Homo sapiens
  CDR3 for alpha chain variable domain of TCR clone 77083 (TRAV26-1, TRAJ40)
CIVRAVPPGTYKYIF

SEQ ID NO: 154166 - protein, 14 aa, Homo sapiens
  CDR3 for beta chain variable domain of TCR clone 77083 (TRBV19, TRBJ2-1)
CASKDPGLANEQFF

SEQ ID NO: 154167 - protein, 16 aa, Homo sapiens
  CDR3 for alpha chain variable domain of TCR clone 77084 (TRAV35, TRAJ42)
GRMERYYGGSQGNPIF

SEQ ID NO: 154168 - protein, 15 aa, Homo sapiens
  CDR3 for beta chain variable domain of TCR clone 77084 (TRBV6-1, TRBJ2-7)
CASSDWDKPNYEQYF

SEQ ID NO: 154169 - protein, 13 aa, Homo sapiens
  CDR3 for alpha chain variable domain of TCR clone 77085 (TRAV1-2, TRAJ31)
CAVRGYNNARLMF

SEQ ID NO: 154170 - protein, 15 aa, Homo sapiens
  CDR3 for beta chain variable domain of TCR clone 77085 (TRBV4-1, TRBJ1-4)
CASSDTGGTNEKLFF

SEQ ID NO: 154171 - protein, 14 aa, Homo sapiens
  CDR3 for alpha chain variable domain of TCR clone 77086 (TRAV1-2, TRAJ8)
CAVREDTGFQKLVF

SEQ ID NO: 154172 - protein, 14 aa, Homo sapiens
  CDR3 for beta chain variable domain of TCR clone 77086 (TRBV7-9, TRBJ2-1)
CASSPIEGLATKFF

SEQ ID NO: 154173 - protein, 13 aa, Homo sapiens
  CDR3 for alpha chain variable domain of TCR clone 77087 (TRAV13-1, TRAJ5)
CAAEHTGRRALTF

SEQ ID NO: 154174 - protein, 13 aa, Homo sapiens
  CDR3 for beta chain variable domain of TCR clone 77087 (TRBV2, TRBJ1-4)
CASSERAGEKLFF

SEQ ID NO: 154175 - protein, 15 aa, Homo sapiens
  CDR3 for alpha chain variable domain of TCR clone 77088 (TRAV26-2, TRAJ13)
CILRDLSGGYRKVTF

SEQ ID NO: 154176 - protein, 11 aa, Homo sapiens
  CDR3 for beta chain variable domain of TCR clone 77088 (TRBV7-9, TRBJ2-3)
CASSYTDTQYF

SEQ ID NO: 154177 - protein, 15 aa, Homo sapiens
  CDR3 for alpha chain variable domain of TCR clone 77089 (TRAV3, TRAJ5)
CAVRDLDTGRRALTF

SEQ ID NO: 154178 - protein, 14 aa, Homo sapiens
  CDR3 for beta chain variable domain of TCR clone 77089 (TRBV7-2, TRBJ1-1)
CASSFLTGTTEAFF

SEQ ID NO: 154179 - protein, 12 aa, Homo sapiens
  CDR3 for alpha chain variable domain of TCR clone 77090 (TRAV1-1, TRAJ8)
CAGGTGFQKLLF

SEQ ID NO: 154180 - protein, 16 aa, Homo sapiens
  CDR3 for beta chain variable domain of TCR clone 77090 (TRBV12-5, TRBJ2-5)
CASGPRTSGNQETQYF

SEQ ID NO: 154181 - protein, 15 aa, Homo sapiens
  CDR3 for alpha chain variable domain of TCR clone 77091 (TRAV16, TRAJ12)
CSRWPLRDSSYKLIF

SEQ ID NO: 154182 - protein, 14 aa, Homo sapiens
  CDR3 for beta chain variable domain of TCR clone 77091 (TRBV25-1, TRBJ1-2)
CASSEATGPYGYTF

SEQ ID NO: 154183 - protein, 15 aa, Homo sapiens
  CDR3 for alpha chain variable domain of TCR clone 77092 (TRAV4, TRAJ39)
CLVGPNNNEGNMLTF

SEQ ID NO: 154184 - protein, 16 aa, Homo sapiens
  CDR3 for beta chain variable domain of TCR clone 77092 (TRBV13, TRBJ2-2)
CASSPRTGEHTGELFF

SEQ ID NO: 154185 - protein, 15 aa, Homo sapiens
  CDR3 for alpha chain variable domain of TCR clone 77093 (TRAV8-3, TRAJ11)
CAVGLLNSGYSTLTF

SEQ ID NO: 154186 - protein, 16 aa, Homo sapiens
  CDR3 for beta chain variable domain of TCR clone 77093 (TRBV5-4, TRBJ2-3)
CASQQPGAGGADTQYF

SEQ ID NO: 154187 - protein, 12 aa, Homo sapiens
  CDR3 for alpha chain variable domain of TCR clone 77094 (TRAV2, TRAJ26)
CAGSPGRLWSEF

SEQ ID NO: 154188 - protein, 16 aa, Homo sapiens
  CDR3 for beta chain variable domain of TCR clone 77094 (TRBV13, TRBJ2-2)
CASSPRTGEHTGEMFF

SEQ ID NO: 154189 - protein, 16 aa, Homo sapiens
  CDR3 for alpha chain variable domain of TCR clone 77095 (TRAV38-1, TRAJ32)
CAFMPFLGGATNKLIF

SEQ ID NO: 154190 - protein, 13 aa, Homo sapiens
  CDR3 for beta chain variable domain of TCR clone 77095 (TRBV7-9, TRBJ2-7)
CASSVAGAYEQYF

SEQ ID NO: 154191 - protein, 12 aa, Homo sapiens
  CDR3 for alpha chain variable domain of TCR clone 77096 (TRAV3, TRAJ26)
CAVRDYGQNFVF

SEQ ID NO: 154192 - protein, 16 aa, Homo sapiens
  CDR3 for beta chain variable domain of TCR clone 77096 (TRBV11-2, TRBJ1-2)
CASSPSGREANYGYTV

SEQ ID NO: 154193 - protein, 11 aa, Homo sapiens
  CDR3 for alpha chain variable domain of TCR clone 77097 (TRAV26-1, TRAJ37)
CIVRVGRKLIF

SEQ ID NO: 154194 - protein, 13 aa, Homo sapiens
  CDR3 for beta chain variable domain of TCR clone 77097 (TRBV12-5, TRBJ2-3)
CASGDRQSDTQYF

SEQ ID NO: 154195 - protein, 14 aa, Homo sapiens
  CDR3 for alpha chain variable domain of TCR clone 77098 (TRAV12-2, TRAJ52)
CRCASGTSHGKLTF

SEQ ID NO: 154196 - protein, 13 aa, Homo sapiens
  CDR3 for beta chain variable domain of TCR clone 77098 (TRBV11-2, TRBJ2-1)
CASSLRLTHEQFF

SEQ ID NO: 154197 - protein, 17 aa, Homo sapiens
  CDR3 for alpha chain variable domain of TCR clone 77099 (TRAV1-2, TRAJ26)
LPLCCERPDNYGQNFVF

SEQ ID NO: 154198 - protein, 15 aa, Homo sapiens
  CDR3 for beta chain variable domain of TCR clone 77099 (TRBV9, TRBJ1-6)
CASSVAGTGDSPLHF

SEQ ID NO: 154199 - protein, 14 aa, Homo sapiens
  CDR3 for alpha chain variable domain of TCR clone 77100 (TRAV26-1, TRAJ45)
CIVRVVGGAHGLTF

SEQ ID NO: 154200 - protein, 16 aa, Homo sapiens
  CDR3 for beta chain variable domain of TCR clone 77100 (TRBV7-9, TRBJ1-1)
CASSLTQVRSNTEAFF

SEQ ID NO: 154201 - protein, 17 aa, Homo sapiens
  CDR3 for alpha chain variable domain of TCR clone 77101 (TRAV8-3, TRAJ50)
RAVGAVDTETSYDKVIF

SEQ ID NO: 154202 - protein, 13 aa, Homo sapiens
  CDR3 for beta chain variable domain of TCR clone 77101 (TRBV7-9, TRBJ2-2)
CASSSAGTGELFF

SEQ ID NO: 154203 - protein, 12 aa, Homo sapiens
  CDR3 for alpha chain variable domain of TCR clone 77102 (TRAV12-3, TRAJ17)
CAMTITGNKLTL

SEQ ID NO: 154204 - protein, 15 aa, Homo sapiens
  CDR3 for beta chain variable domain of TCR clone 77102 (TRBV20-1, TRBJ2-7)
CSARDRVSGMDEQYF

SEQ ID NO: 154205 - protein, 11 aa, Homo sapiens
  CDR3 for alpha chain variable domain of TCR clone 77103 (TRAV35, TRAJ30)
CAGPGDDKIIF

SEQ ID NO: 154206 - protein, 16 aa, Homo sapiens
  CDR3 for beta chain variable domain of TCR clone 77103 (TRBV7-6, TRBJ1-6)
CASSQAGAVHPSTLGM

SEQ ID NO: 154207 - protein, 13 aa, Homo sapiens
  CDR3 for alpha chain variable domain of TCR clone 77104 (TRAV12-2, TRAJ30)
CAVNLNRDDKIVL

SEQ ID NO: 154208 - protein, 19 aa, Homo sapiens
  CDR3 for beta chain variable domain of TCR clone 77104 (TRBV5-8, TRBJ2-3)
CASSFLGTSGSHRTDTQYF

SEQ ID NO: 154209 - protein, 14 aa, Homo sapiens
  CDR3 for alpha chain variable domain of TCR clone 77105 (TRAV1-2, TRAJ16)
CAVNRFSDGQKLLF

SEQ ID NO: 154210 - protein, 15 aa, Homo sapiens
  CDR3 for beta chain variable domain of TCR clone 77105 (TRBV4-2, TRBJ1-1)
CASSQQGAGGTEAFF

SEQ ID NO: 154211 - protein, 14 aa, Homo sapiens
  CDR3 for alpha chain variable domain of TCR clone 77106 (TRAV25, TRAJ32)
CAENYGGATNKLIF

SEQ ID NO: 154212 - protein, 15 aa, Homo sapiens
  CDR3 for beta chain variable domain of TCR clone 77106 (TRBV12-4, TRBJ2-5)
CASTLNSGRGETQYF

SEQ ID NO: 154213 - protein, 13 aa, Homo sapiens
  CDR3 for alpha chain variable domain of TCR clone 77107 (TRAV9-2, TRAJ53)
CALSGGSNYKLTF

SEQ ID NO: 154214 - protein, 11 aa, Homo sapiens
  CDR3 for beta chain variable domain of TCR clone 77107 (TRBV7-9, TRBJ2-3)
CASSGPDTQYF

SEQ ID NO: 154215 - protein, 13 aa, Homo sapiens
  CDR3 for alpha chain variable domain of TCR clone 77108 (TRAV4, TRAJ16)
CLVGSSDGQKLLF

SEQ ID NO: 154216 - protein, 15 aa, Homo sapiens
  CDR3 for beta chain variable domain of TCR clone 77108 (TRBV11-3, TRBJ2-1)
CASSSEGTVADEQFF

SEQ ID NO: 154217 - protein, 14 aa, Homo sapiens
  CDR3 for alpha chain variable domain of TCR clone 77109 (TRAV3, TRAJ7)
CAAREEEREQQTRF

SEQ ID NO: 154218 - protein, 12 aa, Homo sapiens
  CDR3 for beta chain variable domain of TCR clone 77109 (TRBV7-8, TRBJ2-7)
CASSLGDREQYF

SEQ ID NO: 154219 - protein, 13 aa, Homo sapiens
  CDR3 for alpha chain variable domain of TCR clone 77110 (TRAV26-1, TRAJ34)
CIVRGNNTDKLIF

SEQ ID NO: 154220 - protein, 15 aa, Homo sapiens
  CDR3 for beta chain variable domain of TCR clone 77110 (TRBV4-1, TRBJ2-7)
CASSQEWGPSYEQYF

SEQ ID NO: 154221 - protein, 16 aa, Homo sapiens
  CDR3 for alpha chain variable domain of TCR clone 77111 (TRAV3, TRAJ37)
CAVRGKGPGNTGKLIF

SEQ ID NO: 154222 - protein, 15 aa, Homo sapiens
  CDR3 for beta chain variable domain of TCR clone 77111 (TRBV7-9, TRBJ1-6)
CASSSPGRGNSPLHF

SEQ ID NO: 154223 - protein, 16 aa, Homo sapiens
  CDR3 for alpha chain variable domain of TCR clone 77112 (TRAV30, TRAJ24)
CGTEIVDADSWGKFQF

SEQ ID NO: 154224 - protein, 15 aa, Homo sapiens
  CDR3 for beta chain variable domain of TCR clone 77112 (TRBV2, TRBJ2-7)
CASTLLGSGATEQYF

SEQ ID NO: 154225 - protein, 13 aa, Homo sapiens
  CDR3 for alpha chain variable domain of TCR clone 77113 (TRAV13-2, TRAJ53)
CAVNMGSNYKLTF

SEQ ID NO: 154226 - protein, 13 aa, Homo sapiens
  CDR3 for beta chain variable domain of TCR clone 77113 (TRBV4-1, TRBJ2-2)
CASSQENTGELFF

SEQ ID NO: 154227 - protein, 14 aa, Homo sapiens
  CDR3 for alpha chain variable domain of TCR clone 77114 (TRAV12-2, TRAJ40)
CAVKIPSGTYKYIF

SEQ ID NO: 154228 - protein, 13 aa, Homo sapiens
  CDR3 for beta chain variable domain of TCR clone 77114 (TRBV19, TRBJ2-7)
CASRKAGGSEQYF

SEQ ID NO: 154229 - protein, 15 aa, Homo sapiens
  CDR3 for alpha chain variable domain of TCR clone 77115 (TRAV8-4, TRAJ47)
CAVSDPEEYGNKLVF

SEQ ID NO: 154230 - protein, 15 aa, Homo sapiens
  CDR3 for beta chain variable domain of TCR clone 77115 (TRBV11-2, TRBJ2-1)
CASSVGPDSYNEQFF

SEQ ID NO: 154231 - protein, 14 aa, Homo sapiens
  CDR3 for alpha chain variable domain of TCR clone 77116 (TRAV8-1, TRAJ5)
CAVRKDTGRRALTF

SEQ ID NO: 154232 - protein, 14 aa, Homo sapiens
  CDR3 for beta chain variable domain of TCR clone 77116 (TRBV7-8, TRBJ2-3)
CASSFPDGQDTQYF

SEQ ID NO: 154233 - protein, 14 aa, Homo sapiens
  CDR3 for alpha chain variable domain of TCR clone 77117 (TRAV1-2, TRAJ16)
CAVNRFSDGQKLLF

SEQ ID NO: 154234 - protein, 13 aa, Homo sapiens
  CDR3 for beta chain variable domain of TCR clone 77117 (TRBV4-1, TRBJ2-1)
CASSQAGGDDQFF

SEQ ID NO: 154235 - protein, 14 aa, Homo sapiens
  CDR3 for alpha chain variable domain of TCR clone 77118 (TRAV1-2, TRAJ16)
CAVNRFSDGQKLLF

SEQ ID NO: 154236 - protein, 16 aa, Homo sapiens
  CDR3 for beta chain variable domain of TCR clone 77118 (TRBV19, TRBJ2-1)
CASSKAGPSSYNGQFF

SEQ ID NO: 154237 - protein, 15 aa, Homo sapiens
  CDR3 for alpha chain variable domain of TCR clone 77119 (TRAV3, TRAJ22)
CAVRDRGSSARQLTF

SEQ ID NO: 154238 - protein, 15 aa, Homo sapiens
  CDR3 for beta chain variable domain of TCR clone 77119 (TRBV7-3, TRBJ2-1)
CASSPTGGGEVEQFF

SEQ ID NO: 154239 - protein, 14 aa, Homo sapiens
  CDR3 for alpha chain variable domain of TCR clone 77120 (TRAV4, TRAJ17)
CLVGDMAAGNKITF

SEQ ID NO: 154240 - protein, 14 aa, Homo sapiens
  CDR3 for beta chain variable domain of TCR clone 77120 (TRBV4-1, TRBJ2-7)
CASSPVAGGDEQYF

SEQ ID NO: 154241 - protein, 15 aa, Homo sapiens
  CDR3 for alpha chain variable domain of TCR clone 77121 (TRAV3, TRAJ3)
CAVRDMSRSASKIIF

SEQ ID NO: 154242 - protein, 17 aa, Homo sapiens
  CDR3 for beta chain variable domain of TCR clone 77121 (TRBV24-1, TRBJ2-1)
CATSDVSTSGTYNEQFF

SEQ ID NO: 154243 - protein, 12 aa, Homo sapiens
  CDR3 for alpha chain variable domain of TCR clone 77122 (TRAV25, TRAJ11)
CAGASGYSTLTF

SEQ ID NO: 154244 - protein, 15 aa, Homo sapiens
  CDR3 for beta chain variable domain of TCR clone 77122 (TRBV7-3, TRBJ2-2)
CASSETGQGTGELFF

SEQ ID NO: 154245 - protein, 14 aa, Homo sapiens
  CDR3 for alpha chain variable domain of TCR clone 77123 (TRAV12-1, TRAJ17)
CVVNYKAAGNKLTF

SEQ ID NO: 154246 - protein, 16 aa, Homo sapiens
  CDR3 for beta chain variable domain of TCR clone 77123 (TRBV12-4, TRBJ1-5)
CASSRPVGGSNQHQHF

SEQ ID NO: 154247 - protein, 13 aa, Homo sapiens
  CDR3 for alpha chain variable domain of TCR clone 77124 (TRAV27, TRAJ49)
CAPRPYTGNQFYF

SEQ ID NO: 154248 - protein, 16 aa, Homo sapiens
  CDR3 for beta chain variable domain of TCR clone 77124 (TRBV4-1, TRBJ1-2)
CASSQDAGQVLCGYTF

SEQ ID NO: 154249 - protein, 13 aa, Homo sapiens
  CDR3 for alpha chain variable domain of TCR clone 77125 (TRAV2, TRAJ24)
CAVTTDSWGELQF

SEQ ID NO: 154250 - protein, 14 aa, Homo sapiens
  CDR3 for beta chain variable domain of TCR clone 77125 (TRBV13, TRBJ2-5)
CASSLGRGQETQYF

SEQ ID NO: 154251 - protein, 14 aa, Homo sapiens
  CDR3 for alpha chain variable domain of TCR clone 77126 (TRAV26-1, TRAJ38)
CIADNAGNNRKLIW

SEQ ID NO: 154252 - protein, 17 aa, Homo sapiens
  CDR3 for beta chain variable domain of TCR clone 77126 (TRBV7-9, TRBJ2-3)
CASSPTVAGDRTDTQYF

SEQ ID NO: 154253 - protein, 12 aa, Homo sapiens
  CDR3 for alpha chain variable domain of TCR clone 77127 (TRAV21, TRAJ11)
CAATSGYSTLTF

SEQ ID NO: 154254 - protein, 14 aa, Homo sapiens
  CDR3 for beta chain variable domain of TCR clone 77127 (TRBV20-1, TRBJ2-7)
CSAQELAGVGEQYF

SEQ ID NO: 154255 - protein, 14 aa, Homo sapiens
  CDR3 for alpha chain variable domain of TCR clone 77128 (TRAV2, TRAJ9)
CAVEDRSGGVKTIF

SEQ ID NO: 154256 - protein, 11 aa, Homo sapiens
  CDR3 for beta chain variable domain of TCR clone 77128 (TRBV7-9, TRBJ2-5)
CASSLGETQYF

SEQ ID NO: 154257 - protein, 16 aa, Homo sapiens
  CDR3 for alpha chain variable domain of TCR clone 77129 (TRAV30, TRAJ24)
CGTEIVDADSWGKFQF

SEQ ID NO: 154258 - protein, 15 aa, Homo sapiens
  CDR3 for beta chain variable domain of TCR clone 77129 (TRBV27, TRBJ2-1)
CASSGGGPSYNEQFF

SEQ ID NO: 154259 - protein, 14 aa, Homo sapiens
  CDR3 for alpha chain variable domain of TCR clone 77130 (TRAV13-2, TRAJ17)
CAENSRAAGNKLTF

SEQ ID NO: 154260 - protein, 11 aa, Homo sapiens
  CDR3 for beta chain variable domain of TCR clone 77130 (TRBV6-3, TRBJ2-3)
CATGQADTQYF

SEQ ID NO: 154261 - protein, 18 aa, Homo sapiens
  CDR3 for alpha chain variable domain of TCR clone 77131 (TRAV21, TRAJ52)
CAVRPSPACGTSYGKLTF

SEQ ID NO: 154262 - protein, 13 aa, Homo sapiens
  CDR3 for beta chain variable domain of TCR clone 77131 (TRBV7-3, TRBJ1-1)
CASSQDWGAEAFF

SEQ ID NO: 154263 - protein, 15 aa, Homo sapiens
  CDR3 for alpha chain variable domain of TCR clone 77132 (TRAV21, TRAJ53)
CATLNSGGSNHKLTF

SEQ ID NO: 154264 - protein, 16 aa, Homo sapiens
  CDR3 for beta chain variable domain of TCR clone 77132 (TRBV9, TRBJ2-1)
CASSVGGGGNYNEQFF

SEQ ID NO: 154265 - protein, 12 aa, Homo sapiens
  CDR3 for alpha chain variable domain of TCR clone 77133 (TRAV12-2, TRAJ45)
CAVTGGADGLAF

SEQ ID NO: 154266 - protein, 14 aa, Homo sapiens
  CDR3 for beta chain variable domain of TCR clone 77133 (TRBV5-5, TRBJ2-7)
CASSLGQGTYEQYF

SEQ ID NO: 154267 - protein, 14 aa, Homo sapiens
  CDR3 for alpha chain variable domain of TCR clone 77134 (TRAV12-3, TRAJ10)
SHLPLTGGGDKLTF

SEQ ID NO: 154268 - protein, 15 aa, Homo sapiens
  CDR3 for beta chain variable domain of TCR clone 77134 (TRBV10-3, TRBJ1-1)
CAISDRGGMNTEAFF

SEQ ID NO: 154269 - protein, 14 aa, Homo sapiens
  CDR3 for alpha chain variable domain of TCR clone 77135 (TRAV12-1, TRAJ36)
CVVNYWGKQPLLWD

SEQ ID NO: 154270 - protein, 15 aa, Homo sapiens
  CDR3 for beta chain variable domain of TCR clone 77135 (TRBV7-9, TRBJ1-4)
CASSRTGGFNEKLFF

SEQ ID NO: 154271 - protein, 16 aa, Homo sapiens
  CDR3 for alpha chain variable domain of TCR clone 77136 (TRAV21, TRAJ58)
CAVRGDRETSGSRLPF

SEQ ID NO: 154272 - protein, 12 aa, Homo sapiens
  CDR3 for beta chain variable domain of TCR clone 77136 (TRBV19, TRBJ2-3)
CASAGGADTQYF

SEQ ID NO: 154273 - protein, 17 aa, Homo sapiens
  CDR3 for alpha chain variable domain of TCR clone 77137 (TRAV13-1, TRAJ28)
CAASPPYSGAGSYQLTF

SEQ ID NO: 154274 - protein, 15 aa, Homo sapiens
  CDR3 for beta chain variable domain of TCR clone 77137 (TRBV20-1, TRBJ2-7)
CSAESGTSGAYEQYF

SEQ ID NO: 154275 - protein, 13 aa, Homo sapiens
  CDR3 for alpha chain variable domain of TCR clone 77138 (TRAV8-6, TRAJ49)
CAVITNTGNQFYF

SEQ ID NO: 154276 - protein, 15 aa, Homo sapiens
  CDR3 for beta chain variable domain of TCR clone 77138 (TRBV28, TRBJ2-1)
CASSLGTRLYNEQFF

SEQ ID NO: 154277 - protein, 13 aa, Homo sapiens
  CDR3 for alpha chain variable domain of TCR clone 77139 (TRAV36/DV7, TRAJ32)
CAGYGGATNKLIF

SEQ ID NO: 154278 - protein, 16 aa, Homo sapiens
  CDR3 for beta chain variable domain of TCR clone 77139 (TRBV19, TRBJ2-1)
CASSKAGPSSYNEQFF

SEQ ID NO: 154279 - protein, 13 aa, Homo sapiens
  CDR3 for alpha chain variable domain of TCR clone 77140 (TRAV12-3, TRAJ44)
CARTTSTASKLTF

SEQ ID NO: 154280 - protein, 15 aa, Homo sapiens
  CDR3 for beta chain variable domain of TCR clone 77140 (TRBV29-1, TRBJ1-2)
CSGLDVRGANYGYTF

SEQ ID NO: 154281 - protein, 16 aa, Homo sapiens
  CDR3 for alpha chain variable domain of TCR clone 77141 (TRAV13-1, TRAJ45)
CAARGSRKGGADGLTF

SEQ ID NO: 154282 - protein, 14 aa, Homo sapiens
  CDR3 for beta chain variable domain of TCR clone 77141 (TRBV19, TRBJ2-1)
CASPTFVLSGEQFF

SEQ ID NO: 154283 - protein, 14 aa, Homo sapiens
  CDR3 for alpha chain variable domain of TCR clone 77142 (TRAV12-2, TRAJ40)
CAVKVPSGAYKYIF

SEQ ID NO: 154284 - protein, 14 aa, Homo sapiens
  CDR3 for beta chain variable domain of TCR clone 77142 (TRBV20-1, TRBJ1-1)
CSAQTRIGGTEASF

SEQ ID NO: 154285 - protein, 14 aa, Homo sapiens
  CDR3 for alpha chain variable domain of TCR clone 77143 (TRAV2, TRAJ9)
CAVEDRSGGFKTIF

SEQ ID NO: 154286 - protein, 16 aa, Homo sapiens
  CDR3 for beta chain variable domain of TCR clone 77143 (TRBV20-1, TRBJ2-1)
CSAPGLAGSYSDEQFF

SEQ ID NO: 154287 - protein, 14 aa, Homo sapiens
  CDR3 for alpha chain variable domain of TCR clone 77144 (TRAV12-2, TRAJ4)
CAEDLSGGYNKLIF

SEQ ID NO: 154288 - protein, 13 aa, Homo sapiens
  CDR3 for beta chain variable domain of TCR clone 77144 (TRBV7-9, TRBJ1-2)
CASGLKQNYGYTF

SEQ ID NO: 154289 - protein, 13 aa, Homo sapiens
  CDR3 for alpha chain variable domain of TCR clone 77145 (TRAV21, TRAJ10)
CAVPTGGGNKLTF

SEQ ID NO: 154290 - protein, 22 aa, Homo sapiens
  CDR3 for beta chain variable domain of TCR clone 77145 (TRBV19, TRBJ2-1)
CASSARDRVTGTSGRIYNEQFF

SEQ ID NO: 154291 - protein, 12 aa, Homo sapiens
  CDR3 for alpha chain variable domain of TCR clone 77146 (TRAV12-1, TRAJ34)
CVVAGATDKLIF

SEQ ID NO: 154292 - protein, 16 aa, Homo sapiens
  CDR3 for beta chain variable domain of TCR clone 77146 (TRBV7-3, TRBJ2-1)
CASSKPLAGGYNEQFF

SEQ ID NO: 154293 - protein, 16 aa, Homo sapiens
  CDR3 for alpha chain variable domain of TCR clone 77147 (TRAV38-1, TRAJ32)
CAFMKGGGGATNKLIF

SEQ ID NO: 154294 - protein, 13 aa, Homo sapiens
  CDR3 for beta chain variable domain of TCR clone 77147 (TRBV20-1, TRBJ2-5)
RSAREAFQETQYL

SEQ ID NO: 154295 - protein, 16 aa, Homo sapiens
  CDR3 for alpha chain variable domain of TCR clone 77148 (TRAV3, TRAJ37)
CAVRGKGSGNTGKLIF

SEQ ID NO: 154296 - protein, 15 aa, Homo sapiens
  CDR3 for beta chain variable domain of TCR clone 77148 (TRBV7-2, TRBJ2-7)
CASSWGQGAIYEQYF

SEQ ID NO: 154297 - protein, 19 aa, Homo sapiens
  CDR3 for alpha chain variable domain of TCR clone 77149 (TRAV29/DV5, TRAJ42)
CSVLLCSKTDGGSQGNLIF

SEQ ID NO: 154298 - protein, 15 aa, Homo sapiens
  CDR3 for beta chain variable domain of TCR clone 77149 (TRBV5-1, TRBJ2-2)
CASSSQGGNTGELFF

SEQ ID NO: 154299 - protein, 11 aa, Homo sapiens
  CDR3 for alpha chain variable domain of TCR clone 77150 (TRAV12-1, TRAJ21)
CVVYNFNKFYF

SEQ ID NO: 154300 - protein, 14 aa, Homo sapiens
  CDR3 for beta chain variable domain of TCR clone 77150 (TRBV19, TRBJ2-7)
CASSTGQGAIEQYF

SEQ ID NO: 154301 - protein, 14 aa, Homo sapiens
  CDR3 for alpha chain variable domain of TCR clone 77151 (TRAV21, TRAJ35)
CAVMPIGFGNVLHC

SEQ ID NO: 154302 - protein, 12 aa, Homo sapiens
  CDR3 for beta chain variable domain of TCR clone 77151 (TRBV7-9, TRBJ2-7)
CGSSIKREEQYF

SEQ ID NO: 154303 - protein, 18 aa, Homo sapiens
  CDR3 for alpha chain variable domain of TCR clone 77152 (TRAV20, TRAJ4)
CAVQPYYMFSGGYNKLIF

SEQ ID NO: 154304 - protein, 16 aa, Homo sapiens
  CDR3 for beta chain variable domain of TCR clone 77152 (TRBV28, TRBJ1-4)
CASSPPYRGRSEKLFF

SEQ ID NO: 154305 - protein, 11 aa, Homo sapiens
  CDR3 for alpha chain variable domain of TCR clone 77153 (TRAV17, TRAJ9)
CATTGGFKTIF

SEQ ID NO: 154306 - protein, 17 aa, Homo sapiens
  CDR3 for beta chain variable domain of TCR clone 77153 (TRBV24-1, TRBJ2-4)
CATSDAEARGVRNIQYF

SEQ ID NO: 154307 - protein, 17 aa, Homo sapiens
  CDR3 for alpha chain variable domain of TCR clone 77154 (TRAV3, TRAJ12)
CAVRDGGRMDSSYKLIF

SEQ ID NO: 154308 - protein, 16 aa, Homo sapiens
  CDR3 for beta chain variable domain of TCR clone 77154 (TRBV12-4, TRBJ2-5)
CASSFFVRGRQETQYF

SEQ ID NO: 154309 - protein, 15 aa, Homo sapiens
  CDR3 for alpha chain variable domain of TCR clone 77155 (TRAV12-3, TRAJ6)
CAMSATIGGSYIPTF

SEQ ID NO: 154310 - protein, 14 aa, Homo sapiens
  CDR3 for beta chain variable domain of TCR clone 77155 (TRBV13, TRBJ2-5)
CASSLERVGETQYF

SEQ ID NO: 154311 - protein, 17 aa, Homo sapiens
  CDR3 for alpha chain variable domain of TCR clone 77156 (TRAV16, TRAJ42)
CALSPKLYGGSQGNPIF

SEQ ID NO: 154312 - protein, 13 aa, Homo sapiens
  CDR3 for beta chain variable domain of TCR clone 77156 (TRBV19, TRBJ1-5)
CASSTRRDQPQHF

SEQ ID NO: 154313 - protein, 12 aa, Homo sapiens
  CDR3 for alpha chain variable domain of TCR clone 77157 (TRAV12-1, TRAJ34)
CVVAGATDQLIF

SEQ ID NO: 154314 - protein, 12 aa, Homo sapiens
  CDR3 for beta chain variable domain of TCR clone 77157 (TRBV7-9, TRBJ1-1)
CASSLVRGEAFF

SEQ ID NO: 154315 - protein, 14 aa, Homo sapiens
  CDR3 for alpha chain variable domain of TCR clone 77158 (TRAV2, TRAJ37)
CAVDFTSNTGKLIF

SEQ ID NO: 154316 - protein, 15 aa, Homo sapiens
  CDR3 for beta chain variable domain of TCR clone 77158 (TRBV28, TRBJ2-1)
CASRVGLDEYNKQFF

SEQ ID NO: 154317 - protein, 15 aa, Homo sapiens
  CDR3 for alpha chain variable domain of TCR clone 77159 (TRAV3, TRAJ5)
CAVRDLDTGRRALTF

SEQ ID NO: 154318 - protein, 13 aa, Homo sapiens
  CDR3 for beta chain variable domain of TCR clone 77159 (TRBV12-4, TRBJ2-7)
CASSPIETYEQYF

SEQ ID NO: 154319 - protein, 19 aa, Homo sapiens
  CDR3 for alpha chain variable domain of TCR clone 77160 (TRAV38-1, TRAJ53)
CAFMKHGLESGGSNYKLTF

SEQ ID NO: 154320 - protein, 14 aa, Homo sapiens
  CDR3 for beta chain variable domain of TCR clone 77160 (TRBV4-2, TRBJ2-1)
CASGLDRAYNEQFF

SEQ ID NO: 154321 - protein, 11 aa, Homo sapiens
  CDR3 for alpha chain variable domain of TCR clone 77161 (TRAV2, TRAJ33)
CAVESNYQLIW

SEQ ID NO: 154322 - protein, 18 aa, Homo sapiens
  CDR3 for beta chain variable domain of TCR clone 77161 (TRBV12-4, TRBJ2-2)
CASSLVAGTRGRTGELFF

SEQ ID NO: 154323 - protein, 13 aa, Homo sapiens
  CDR3 for alpha chain variable domain of TCR clone 77162 (TRAV36/DV7, TRAJ33)
CAVDMDSNYQLIL

SEQ ID NO: 154324 - protein, 16 aa, Homo sapiens
  CDR3 for beta chain variable domain of TCR clone 77162 (TRBV15, TRBJ2-3)
CATRLSGGRAPDTQYF

SEQ ID NO: 154325 - protein, 16 aa, Homo sapiens
  CDR3 for alpha chain variable domain of TCR clone 77163 (TRAV30, TRAJ24)
CGTEIVDADSWGKFQF

SEQ ID NO: 154326 - protein, 15 aa, Homo sapiens
  CDR3 for beta chain variable domain of TCR clone 77163 (TRBV20-1, TRBJ2-7)
CGARDRVSGMDEQYF

SEQ ID NO: 154327 - protein, 11 aa, Homo sapiens
  CDR3 for alpha chain variable domain of TCR clone 77164 (TRAV1-2, TRAJ40)
CAVPGTYKYIF

SEQ ID NO: 154328 - protein, 16 aa, Homo sapiens
  CDR3 for beta chain variable domain of TCR clone 77164 (TRBV29-1, TRBJ2-7)
CSVEVVGTSWSYEQYF

SEQ ID NO: 154329 - protein, 10 aa, Homo sapiens
  CDR3 for alpha chain variable domain of TCR clone 77165 (TRAV30, TRAJ34)
SGTNPDKLIF

SEQ ID NO: 154330 - protein, 12 aa, Homo sapiens
  CDR3 for beta chain variable domain of TCR clone 77165 (TRBV19, TRBJ1-1)
CASSLSDTEAFF

SEQ ID NO: 154331 - protein, 14 aa, Homo sapiens
  CDR3 for alpha chain variable domain of TCR clone 77166 (TRAV12-1, TRAJ17)
CVVNYKAAGNKLTC

SEQ ID NO: 154332 - protein, 17 aa, Homo sapiens
  CDR3 for beta chain variable domain of TCR clone 77166 (TRBV20-1, TRBJ2-1)
CSASSSGLAGSYNEQFF

SEQ ID NO: 154333 - protein, 11 aa, Homo sapiens
  CDR3 for alpha chain variable domain of TCR clone 77167 (TRAV23/DV6, TRAJ48)
CTPRWGEKLTF

SEQ ID NO: 154334 - protein, 13 aa, Homo sapiens
  CDR3 for beta chain variable domain of TCR clone 77167 (TRBV12-4, TRBJ2-5)
CASSPGTEETQYF

SEQ ID NO: 154335 - protein, 17 aa, Homo sapiens
  CDR3 for alpha chain variable domain of TCR clone 77168 (TRAV1-1, TRAJ32)
CAVRVDELWWCYKQAHL

SEQ ID NO: 154336 - protein, 16 aa, Homo sapiens
  CDR3 for beta chain variable domain of TCR clone 77168 (TRBV13, TRBJ2-3)
CQQPLQGSGGGNTQYF

SEQ ID NO: 154337 - protein, 14 aa, Homo sapiens
  CDR3 for alpha chain variable domain of TCR clone 77169 (TRAV38-1, TRAJ45)
CAYYSGGGADGLTF

SEQ ID NO: 154338 - protein, 15 aa, Homo sapiens
  CDR3 for beta chain variable domain of TCR clone 77169 (TRBV11-2, TRBJ2-1)
CASSKSRGLIYEQFF

SEQ ID NO: 154339 - protein, 13 aa, Homo sapiens
  CDR3 for alpha chain variable domain of TCR clone 77170 (TRAV2, TRAJ24)
CAVTTASWGKLQF

SEQ ID NO: 154340 - protein, 14 aa, Homo sapiens
  CDR3 for beta chain variable domain of TCR clone 77170 (TRBV13, TRBJ2-5)
CASSLGRGQETQYF

SEQ ID NO: 154341 - protein, 17 aa, Homo sapiens
  CDR3 for alpha chain variable domain of TCR clone 77171 (TRAV26-2, TRAJ28)
CILRPLLIVAGSYQLTF

SEQ ID NO: 154342 - protein, 14 aa, Homo sapiens
  CDR3 for beta chain variable domain of TCR clone 77171 (TRBV7-6, TRBJ2-3)
CASSLGTVTDTQYF

SEQ ID NO: 154343 - protein, 13 aa, Homo sapiens
  CDR3 for alpha chain variable domain of TCR clone 77172 (TRAV8-3, TRAJ36)
CAVGATGANNLFF

SEQ ID NO: 154344 - protein, 15 aa, Homo sapiens
  CDR3 for beta chain variable domain of TCR clone 77172 (TRBV7-2, TRBJ1-2)
CASSPGAGWNYGYTF

SEQ ID NO: 154345 - protein, 14 aa, Homo sapiens
  CDR3 for alpha chain variable domain of TCR clone 77173 (TRAV13-1, TRAJ13)
CAASRVGGYQKVTF

SEQ ID NO: 154346 - protein, 17 aa, Homo sapiens
  CDR3 for beta chain variable domain of TCR clone 77173 (TRBV15, TRBJ1-5)
CATSRAPPGTRNQPQHF

SEQ ID NO: 154347 - protein, 16 aa, Homo sapiens
  CDR3 for alpha chain variable domain of TCR clone 77174 (TRAV30, TRAJ24)
CGTEIVDADSWGKFQF

SEQ ID NO: 154348 - protein, 15 aa, Homo sapiens
  CDR3 for beta chain variable domain of TCR clone 77174 (TRBV9, TRBJ1-6)
CASIVAGTGDSPLHF

SEQ ID NO: 154349 - protein, 14 aa, Homo sapiens
  CDR3 for alpha chain variable domain of TCR clone 77175 (TRAV35, TRAJ22)
CAGLRPGSARQLTF

SEQ ID NO: 154350 - protein, 15 aa, Homo sapiens
  CDR3 for beta chain variable domain of TCR clone 77175 (TRBV12-4, TRBJ2-5)
CASSRPTGLQETQYF

SEQ ID NO: 154351 - protein, 13 aa, Homo sapiens
  CDR3 for alpha chain variable domain of TCR clone 77176 (TRAV20, TRAJ37)
CAGCSSNTGKLIF

SEQ ID NO: 154352 - protein, 11 aa, Homo sapiens
  CDR3 for beta chain variable domain of TCR clone 77176 (TRBV12-4, TRBJ2-3)
CAITATDTQYF

SEQ ID NO: 154353 - protein, 15 aa, Homo sapiens
  CDR3 for alpha chain variable domain of TCR clone 77177 (TRAV20, TRAJ4)
CAVQVFSGGYNKLIF

SEQ ID NO: 154354 - protein, 15 aa, Homo sapiens
  CDR3 for beta chain variable domain of TCR clone 77177 (TRBV19, TRBJ1-1)
CASTSGQIQNTEAFF

SEQ ID NO: 154355 - protein, 11 aa, Homo sapiens
  CDR3 for alpha chain variable domain of TCR clone 77178 (TRAV2, TRAJ33)
CAVDSNYQLIW

SEQ ID NO: 154356 - protein, 13 aa, Homo sapiens
  CDR3 for beta chain variable domain of TCR clone 77178 (TRBV12-4, TRBJ2-2)
CASSITGSGELFF

SEQ ID NO: 154357 - protein, 11 aa, Homo sapiens
  CDR3 for alpha chain variable domain of TCR clone 77179 (TRAV17, TRAJ31)
CATDRTARLMF

SEQ ID NO: 154358 - protein, 14 aa, Homo sapiens
  CDR3 for beta chain variable domain of TCR clone 77179 (TRBV4-3, TRBJ2-3)
CDSSQERGTDTQYF

SEQ ID NO: 154359 - protein, 16 aa, Homo sapiens
  CDR3 for alpha chain variable domain of TCR clone 77180 (TRAV3, TRAJ37)
CAVRPHGSGNTGKLIF

SEQ ID NO: 154360 - protein, 14 aa, Homo sapiens
  CDR3 for beta chain variable domain of TCR clone 77180 (TRBV28, TRBJ2-3)
CASSLTDLLDTQYF

SEQ ID NO: 154361 - protein, 14 aa, Homo sapiens
  CDR3 for alpha chain variable domain of TCR clone 77181 (TRAV16, TRAJ42)
CALLAGGSQGNLIF

SEQ ID NO: 154362 - protein, 16 aa, Homo sapiens
  CDR3 for beta chain variable domain of TCR clone 77181 (TRBV7-3, TRBJ2-2)
CASSLKRGTLSGELFF

SEQ ID NO: 154363 - protein, 11 aa, Homo sapiens
  CDR3 for alpha chain variable domain of TCR clone 77182 (TRAV2, TRAJ33)
CAVESNYQLIW

SEQ ID NO: 154364 - protein, 14 aa, Homo sapiens
  CDR3 for beta chain variable domain of TCR clone 77182 (TRBV18, TRBJ2-5)
CASSPGVSQETQYF

SEQ ID NO: 154365 - protein, 14 aa, Homo sapiens
  CDR3 for alpha chain variable domain of TCR clone 77183 (TRAV1-2, TRAJ15)
CAVRDRQAGTALIF

SEQ ID NO: 154366 - protein, 13 aa, Homo sapiens
  CDR3 for beta chain variable domain of TCR clone 77183 (TRBV20-1, TRBJ1-1)
CSARGGGNTEAFF

SEQ ID NO: 154367 - protein, 14 aa, Homo sapiens
  CDR3 for alpha chain variable domain of TCR clone 77184 (TRAV35, TRAJ22)
RAGLRPGSARQLTF

SEQ ID NO: 154368 - protein, 13 aa, Homo sapiens
  CDR3 for beta chain variable domain of TCR clone 77184 (TRBV20-1, TRBJ2-7)
CSATHTSGYEQYF

SEQ ID NO: 154369 - protein, 14 aa, Homo sapiens
  CDR3 for alpha chain variable domain of TCR clone 77185 (TRAV1-2, TRAJ8)
CAVREATGFQKLVF

SEQ ID NO: 154370 - protein, 15 aa, Homo sapiens
  CDR3 for beta chain variable domain of TCR clone 77185 (TRBV20-1, TRBJ2-7)
CSARDRVSGMDEQYF

SEQ ID NO: 154371 - protein, 14 aa, Homo sapiens
  CDR3 for alpha chain variable domain of TCR clone 77186 (TRAV26-1, TRAJ44)
CISPLPGTACKLTF

SEQ ID NO: 154372 - protein, 16 aa, Homo sapiens
  CDR3 for beta chain variable domain of TCR clone 77186 (TRBV19, TRBJ2-1)
CASSKAGPSSYNEQFF

SEQ ID NO: 154373 - protein, 15 aa, Homo sapiens
  CDR3 for alpha chain variable domain of TCR clone 77187 (TRAV17, TRAJ57)
CATGPSQGGSEKLVF

SEQ ID NO: 154374 - protein, 14 aa, Homo sapiens
  CDR3 for beta chain variable domain of TCR clone 77187 (TRBV12-5, TRBJ2-5)
CASSSRTHQETQYF

SEQ ID NO: 154375 - protein, 14 aa, Homo sapiens
  CDR3 for alpha chain variable domain of TCR clone 77188 (TRAV1-2, TRAJ8)
CAVREDTGSQKLVF

SEQ ID NO: 154376 - protein, 11 aa, Homo sapiens
  CDR3 for beta chain variable domain of TCR clone 77188 (TRBV11-3, TRBJ2-7)
CASSRTYEQYF

SEQ ID NO: 154377 - protein, 13 aa, Homo sapiens
  CDR3 for alpha chain variable domain of TCR clone 77189 (TRAV12-1, TRAJ16)
CVVNGPDGQKLLF

SEQ ID NO: 154378 - protein, 14 aa, Homo sapiens
  CDR3 for beta chain variable domain of TCR clone 77189 (TRBV7-2, TRBJ2-7)
CASRSQGAAYEQYF

SEQ ID NO: 154379 - protein, 14 aa, Homo sapiens
  CDR3 for alpha chain variable domain of TCR clone 77190 (TRAV16, TRAJ15)
CALSFNQAGTALIF

SEQ ID NO: 154380 - protein, 13 aa, Homo sapiens
  CDR3 for beta chain variable domain of TCR clone 77190 (TRBV7-3, TRBJ1-1)
CASSQDWGAEAFF

SEQ ID NO: 154381 - protein, 14 aa, Homo sapiens
  CDR3 for alpha chain variable domain of TCR clone 77191 (TRAV1-2, TRAJ16)
CAVNRFSDGQKLLF

SEQ ID NO: 154382 - protein, 16 aa, Homo sapiens
  CDR3 for beta chain variable domain of TCR clone 77191 (TRBV24-1, TRBJ2-3)
CAASDPGTGATDTQYF

SEQ ID NO: 154383 - protein, 10 aa, Homo sapiens
  CDR3 for alpha chain variable domain of TCR clone 77192 (TRAV16, TRAJ22)
SAMYLRQLTF

SEQ ID NO: 154384 - protein, 15 aa, Homo sapiens
  CDR3 for beta chain variable domain of TCR clone 77192 (TRBV7-9, TRBJ1-6)
CASSSSGRGNSPLHF

SEQ ID NO: 154385 - protein, 12 aa, Homo sapiens
  CDR3 for alpha chain variable domain of TCR clone 77193 (TRAV2, TRAJ9)
CAVGAGGFKTIF

SEQ ID NO: 154386 - protein, 14 aa, Homo sapiens
  CDR3 for beta chain variable domain of TCR clone 77193 (TRBV4-2, TRBJ2-1)
CASGLDRAYNEQFF

SEQ ID NO: 154387 - protein, 11 aa, Homo sapiens
  CDR3 for alpha chain variable domain of TCR clone 77194 (TRAV12-2, TRAJ39)
CAVKDMLTFGG

SEQ ID NO: 154388 - protein, 16 aa, Homo sapiens
  CDR3 for beta chain variable domain of TCR clone 77194 (TRBV5-3, TRBJ2-2)
CARSFGTGTNTGELFF

SEQ ID NO: 154389 - protein, 13 aa, Homo sapiens
  CDR3 for alpha chain variable domain of TCR clone 77195 (TRAV17, TRAJ26)
CATVDNYGQNFVF

SEQ ID NO: 154390 - protein, 14 aa, Homo sapiens
  CDR3 for beta chain variable domain of TCR clone 77195 (TRBV7-2, TRBJ1-1)
CASSFLTGTTGAFF

SEQ ID NO: 154391 - protein, 16 aa, Homo sapiens
  CDR3 for alpha chain variable domain of TCR clone 77196 (TRAV3, TRAJ37)
CAVRPHGSGNTGKLIF

SEQ ID NO: 154392 - protein, 16 aa, Homo sapiens
  CDR3 for beta chain variable domain of TCR clone 77196 (TRBV13, TRBJ2-2)
CASSPRTGEHTGELFF

SEQ ID NO: 154393 - protein, 17 aa, Homo sapiens
  CDR3 for alpha chain variable domain of TCR clone 77197 (TRAV3, TRAJ42)
RAVRDRDYGGSQGNLIF

SEQ ID NO: 154394 - protein, 14 aa, Homo sapiens
  CDR3 for beta chain variable domain of TCR clone 77197 (TRBV7-3, TRBJ2-2)
CASSLNSNTGELFF

SEQ ID NO: 154395 - protein, 17 aa, Homo sapiens
  CDR3 for alpha chain variable domain of TCR clone 77198 (TRAV26-2, TRAJ42)
CILRDVGYGGSQGNLIF

SEQ ID NO: 154396 - protein, 16 aa, Homo sapiens
  CDR3 for beta chain variable domain of TCR clone 77198 (TRBV12-4, TRBJ2-7)
WASSLIGGTGTYEQYF

SEQ ID NO: 154397 - protein, 13 aa, Homo sapiens
  CDR3 for alpha chain variable domain of TCR clone 77199 (TRAV27, TRAJ53)
CAGQGGSNYKLTF

SEQ ID NO: 154398 - protein, 14 aa, Homo sapiens
  CDR3 for beta chain variable domain of TCR clone 77199 (TRBV10-2, TRBJ1-3)
CASTRTDTGNTIYF

SEQ ID NO: 154399 - protein, 14 aa, Homo sapiens
  CDR3 for alpha chain variable domain of TCR clone 77200 (TRAV8-4, TRAJ20)
CAVTNVLTTTSSAF

SEQ ID NO: 154400 - protein, 16 aa, Homo sapiens
  CDR3 for beta chain variable domain of TCR clone 77200 (TRBV6-1, TRBJ1-2)
CASSGAWQGRSHGYTF

SEQ ID NO: 154401 - protein, 16 aa, Homo sapiens
  CDR3 for alpha chain variable domain of TCR clone 77201 (TRAV8-6, TRAJ37)
CAASGLGSSNTGKLIF

SEQ ID NO: 154402 - protein, 15 aa, Homo sapiens
  CDR3 for beta chain variable domain of TCR clone 77201 (TRBV20-1, TRBJ1-5)
CSARSGPSMNQPQHF

SEQ ID NO: 154403 - protein, 15 aa, Homo sapiens
  CDR3 for alpha chain variable domain of TCR clone 77202 (TRAV3, TRAJ22)
CAVRDRGGSARRLTL

SEQ ID NO: 154404 - protein, 16 aa, Homo sapiens
  CDR3 for beta chain variable domain of TCR clone 77202 (TRBV5-4, TRBJ2-3)
CASQQPGAGGADTQYF

SEQ ID NO: 154405 - protein, 11 aa, Homo sapiens
  CDR3 for alpha chain variable domain of TCR clone 77203 (TRAV2, TRAJ21)
CAVFNFNKFYF

SEQ ID NO: 154406 - protein, 14 aa, Homo sapiens
  CDR3 for beta chain variable domain of TCR clone 77203 (TRBV15, TRBJ2-3)
CATRSGTSTETQYF

SEQ ID NO: 154407 - protein, 18 aa, Homo sapiens
  CDR3 for alpha chain variable domain of TCR clone 77204 (TRAV21, TRAJ52)
CAVRPSPAGGTSYGNLTF

SEQ ID NO: 154408 - protein, 14 aa, Homo sapiens
  CDR3 for beta chain variable domain of TCR clone 77204 (TRBV4-1, TRBJ2-2)
CASSQAVNTGELFF

SEQ ID NO: 154409 - protein, 15 aa, Homo sapiens
  CDR3 for alpha chain variable domain of TCR clone 77205 (TRAV26-1, TRAJ40)
CIDRYATSGTNKYIF

SEQ ID NO: 154410 - protein, 11 aa, Homo sapiens
  CDR3 for beta chain variable domain of TCR clone 77205 (TRBV7-9, TRBJ2-1)
CASSSQNEQFF

SEQ ID NO: 154411 - protein, 12 aa, Homo sapiens
  CDR3 for alpha chain variable domain of TCR clone 77206 (TRAV16, TRAJ13)
CITLRGYHKVTF

SEQ ID NO: 154412 - protein, 17 aa, Homo sapiens
  CDR3 for beta chain variable domain of TCR clone 77206 (TRBV28, TRBJ2-5)
CASSRQGGLAGAETQYF

SEQ ID NO: 154413 - protein, 15 aa, Homo sapiens
  CDR3 for alpha chain variable domain of TCR clone 77207 (TRAV35, TRAJ40)
YAGQLWDSGTYKYIF

SEQ ID NO: 154414 - protein, 12 aa, Homo sapiens
  CDR3 for beta chain variable domain of TCR clone 77207 (TRBV7-8, TRBJ2-7)
CASSLAGYEQYF

SEQ ID NO: 154415 - protein, 14 aa, Homo sapiens
  CDR3 for alpha chain variable domain of TCR clone 77208 (TRAV2, TRAJ9)
CAVEDRCGGFKTIF

SEQ ID NO: 154416 - protein, 16 aa, Homo sapiens
  CDR3 for beta chain variable domain of TCR clone 77208 (TRBV7-3, TRBJ2-2)
CASSLKRGTLSGELFF

SEQ ID NO: 154417 - protein, 18 aa, Homo sapiens
  CDR3 for alpha chain variable domain of TCR clone 77209 (TRAV21, TRAJ52)
CAVRPSPSGGTSYGELTF

SEQ ID NO: 154418 - protein, 17 aa, Homo sapiens
  CDR3 for beta chain variable domain of TCR clone 77209 (TRBV13, TRBJ2-3)
CASSLSRVAGGRNTQYF

SEQ ID NO: 154419 - protein, 16 aa, Homo sapiens
  CDR3 for alpha chain variable domain of TCR clone 77210 (TRAV3, TRAJ37)
CAVRGKGSGNTGKLIF

SEQ ID NO: 154420 - protein, 16 aa, Homo sapiens
  CDR3 for beta chain variable domain of TCR clone 77210 (TRBV2, TRBJ2-3)
CASSTSVEGVTDTQYF

SEQ ID NO: 154421 - protein, 14 aa, Homo sapiens
  CDR3 for alpha chain variable domain of TCR clone 77211 (TRAV17, TRAJ22)
CATSPSGSARQLTF

SEQ ID NO: 154422 - protein, 12 aa, Homo sapiens
  CDR3 for beta chain variable domain of TCR clone 77211 (TRBV11-2, TRBJ2-2)
CASSLGGGELFF

SEQ ID NO: 154423 - protein, 18 aa, Homo sapiens
  CDR3 for alpha chain variable domain of TCR clone 77212 (TRAV13-1, TRAJ52)
CAAKNPNAGGTSYGKLTF

SEQ ID NO: 154424 - protein, 13 aa, Homo sapiens
  CDR3 for beta chain variable domain of TCR clone 77212 (TRBV19, TRBJ2-7)
CASSIDRTYEQYF

SEQ ID NO: 154425 - protein, 15 aa, Homo sapiens
  CDR3 for alpha chain variable domain of TCR clone 77213 (TRAV26-1, TRAJ15)
CIVKAANQAGTALIF

SEQ ID NO: 154426 - protein, 15 aa, Homo sapiens
  CDR3 for beta chain variable domain of TCR clone 77213 (TRBV20-1, TRBJ1-1)
CSARSAATSNTEAFF

SEQ ID NO: 154427 - protein, 14 aa, Homo sapiens
  CDR3 for alpha chain variable domain of TCR clone 77214 (TRAV12-2, TRAJ13)
CAVKKTGGYQQVTF

SEQ ID NO: 154428 - protein, 12 aa, Homo sapiens
  CDR3 for beta chain variable domain of TCR clone 77214 (TRBV11-2, TRBJ2-2)
CASSLGGGELFF

SEQ ID NO: 154429 - protein, 13 aa, Homo sapiens
  CDR3 for alpha chain variable domain of TCR clone 77215 (TRAV3, TRAJ31)
CAVREGNNARLMF

SEQ ID NO: 154430 - protein, 14 aa, Homo sapiens
  CDR3 for beta chain variable domain of TCR clone 77215 (TRBV25-1, TRBJ1-1)
CASTHLGGNTEAFF

SEQ ID NO: 154431 - protein, 13 aa, Homo sapiens
  CDR3 for alpha chain variable domain of TCR clone 77216 (TRAV13-1, TRAJ9)
CAASGTGGFKTIF

SEQ ID NO: 154432 - protein, 13 aa, Homo sapiens
  CDR3 for beta chain variable domain of TCR clone 77216 (TRBV12-4, TRBJ2-7)
CARSLERVREQYF

SEQ ID NO: 154433 - protein, 11 aa, Homo sapiens
  CDR3 for alpha chain variable domain of TCR clone 77217 (TRAV12-3, TRAJ43)
CAMSVSNDVLF

SEQ ID NO: 154434 - protein, 13 aa, Homo sapiens
  CDR3 for beta chain variable domain of TCR clone 77217 (TRBV20-1, TRBJ1-1)
CSAPLGGGTEAFF

SEQ ID NO: 154435 - protein, 14 aa, Homo sapiens
  CDR3 for alpha chain variable domain of TCR clone 77218 (TRAV35, TRAJ41)
CAGRASVRRNALNF

SEQ ID NO: 154436 - protein, 14 aa, Homo sapiens
  CDR3 for beta chain variable domain of TCR clone 77218 (TRBV20-1, TRBJ1-2)
CSASEQGAVYGYTF

SEQ ID NO: 154437 - protein, 16 aa, Homo sapiens
  CDR3 for alpha chain variable domain of TCR clone 77219 (TRAV12-2, TRAJ40)
CAVIRGGTSGTYKYIF

SEQ ID NO: 154438 - protein, 17 aa, Homo sapiens
  CDR3 for beta chain variable domain of TCR clone 77219 (TRBV11-2, TRBJ2-1)
CASSLYPPGVEYNEQFF

SEQ ID NO: 154439 - protein, 14 aa, Homo sapiens
  CDR3 for alpha chain variable domain of TCR clone 77220 (TRAV2, TRAJ9)
CAVEDRGGGFKTIF

SEQ ID NO: 154440 - protein, 17 aa, Homo sapiens
  CDR3 for beta chain variable domain of TCR clone 77220 (TRBV4-1, TRBJ2-7)
CASSRDPLGVRGGEQYF

SEQ ID NO: 154441 - protein, 13 aa, Homo sapiens
  CDR3 for alpha chain variable domain of TCR clone 77221 (TRAV29/DV5, TRAJ31)
CAASRNNNARLLF

SEQ ID NO: 154442 - protein, 15 aa, Homo sapiens
  CDR3 for beta chain variable domain of TCR clone 77221 (TRBV2, TRBJ2-1)
CASSELAGSYNEQFF

SEQ ID NO: 154443 - protein, 12 aa, Homo sapiens
  CDR3 for alpha chain variable domain of TCR clone 77222 (TRAV20, TRAJ34)
CAVKDNTDKPIF

SEQ ID NO: 154444 - protein, 14 aa, Homo sapiens
  CDR3 for beta chain variable domain of TCR clone 77222 (TRBV7-9, TRBJ2-7)
CASSRPGGPYEQYF

SEQ ID NO: 154445 - protein, 15 aa, Homo sapiens
  CDR3 for alpha chain variable domain of TCR clone 77223 (TRAV12-2, TRAJ53)
CAVNGGGGGNYKLTF

SEQ ID NO: 154446 - protein, 17 aa, Homo sapiens
  CDR3 for beta chain variable domain of TCR clone 77223 (TRBV7-3, TRBJ2-3)
CASSLMKGMRGADTQYF

SEQ ID NO: 154447 - protein, 14 aa, Homo sapiens
  CDR3 for alpha chain variable domain of TCR clone 77224 (TRAV3, TRAJ9)
CAVRGNTGGFKTIF

SEQ ID NO: 154448 - protein, 14 aa, Homo sapiens
  CDR3 for beta chain variable domain of TCR clone 77224 (TRBV15, TRBJ2-1)
CATGGVEDYNEQFF

SEQ ID NO: 154449 - protein, 15 aa, Homo sapiens
  CDR3 for alpha chain variable domain of TCR clone 77225 (TRAV21, TRAJ32)
RAAAPYGGATNKLIF

SEQ ID NO: 154450 - protein, 17 aa, Homo sapiens
  CDR3 for beta chain variable domain of TCR clone 77225 (TRBV18, TRBJ2-3)
CASSPFGDGGFTDTQYF

SEQ ID NO: 154451 - protein, 14 aa, Homo sapiens
  CDR3 for alpha chain variable domain of TCR clone 77226 (TRAV23/DV6, TRAJ22)
CEASVSGSARQLTF

SEQ ID NO: 154452 - protein, 16 aa, Homo sapiens
  CDR3 for beta chain variable domain of TCR clone 77226 (TRBV19, TRBJ2-2)
CASSFPGQGLAGELFF

SEQ ID NO: 154453 - protein, 14 aa, Homo sapiens
  CDR3 for alpha chain variable domain of TCR clone 77227 (TRAV12-2, TRAJ13)
CAVKKAGGYQKVTF

SEQ ID NO: 154454 - protein, 17 aa, Homo sapiens
  CDR3 for beta chain variable domain of TCR clone 77227 (TRBV13, TRBJ2-3)
CASSLSRVAGGRNTQYF

SEQ ID NO: 154455 - protein, 16 aa, Homo sapiens
  CDR3 for alpha chain variable domain of TCR clone 77228 (TRAV3, TRAJ10)
CAVRDMRAGGGNKLTF

SEQ ID NO: 154456 - protein, 15 aa, Homo sapiens
  CDR3 for beta chain variable domain of TCR clone 77228 (TRBV7-9, TRBJ2-7)
CASSLALAEAYEQYF

SEQ ID NO: 154457 - protein, 14 aa, Homo sapiens
  CDR3 for alpha chain variable domain of TCR clone 77229 (TRAV2, TRAJ9)
CAVDPNTGGFKTIF

SEQ ID NO: 154458 - protein, 13 aa, Homo sapiens
  CDR3 for beta chain variable domain of TCR clone 77229 (TRBV20-1, TRBJ2-1)
CSASTGTSDEQFF

SEQ ID NO: 154459 - protein, 13 aa, Homo sapiens
  CDR3 for alpha chain variable domain of TCR clone 77230 (TRAV17, TRAJ9)
CATDYTGGFKTIF

SEQ ID NO: 154460 - protein, 16 aa, Homo sapiens
  CDR3 for beta chain variable domain of TCR clone 77230 (TRBV7-7, TRBJ2-1)
CASSLASGTSYNEQFC

SEQ ID NO: 154461 - protein, 18 aa, Homo sapiens
  CDR3 for alpha chain variable domain of TCR clone 77231 (TRAV26-2, TRAJ54)
CILRDVEVGIQGAQKLVF

SEQ ID NO: 154462 - protein, 16 aa, Homo sapiens
  CDR3 for beta chain variable domain of TCR clone 77231 (TRBV19, TRBJ2-4)
CATGGLAGGTKNIQYF

SEQ ID NO: 154463 - protein, 14 aa, Homo sapiens
  CDR3 for alpha chain variable domain of TCR clone 77232 (TRAV23/DV6, TRAJ21)
CAAYKSGPRDKFYF

SEQ ID NO: 154464 - protein, 15 aa, Homo sapiens
  CDR3 for beta chain variable domain of TCR clone 77232 (TRBV5-4, TRBJ2-2)
CAGSLTSRGTGELFF

SEQ ID NO: 154465 - protein, 16 aa, Homo sapiens
  CDR3 for alpha chain variable domain of TCR clone 77233 (TRAV16, TRAJ57)
CAPYFITQGGSEKLVF

SEQ ID NO: 154466 - protein, 17 aa, Homo sapiens
  CDR3 for beta chain variable domain of TCR clone 77233 (TRBV24-1, TRBJ2-4)
CATSDAEARGVRNIQYF

SEQ ID NO: 154467 - protein, 16 aa, Homo sapiens
  CDR3 for alpha chain variable domain of TCR clone 77234 (TRAV12-2, TRAJ32)
CAVNMNYGGATNKLIL

SEQ ID NO: 154468 - protein, 16 aa, Homo sapiens
  CDR3 for beta chain variable domain of TCR clone 77234 (TRBV7-8, TRBJ2-3)
CASSTEGQRETDTQYF

SEQ ID NO: 154469 - protein, 19 aa, Homo sapiens
  CDR3 for alpha chain variable domain of TCR clone 77235 (TRAV2, TRAJ20)
ILQVREADAAVYRDCKLSF

SEQ ID NO: 154470 - protein, 16 aa, Homo sapiens
  CDR3 for beta chain variable domain of TCR clone 77235 (TRBV19, TRBJ2-1)
FASSKAGPSSYNEQFF

SEQ ID NO: 154471 - protein, 12 aa, Homo sapiens
  CDR3 for alpha chain variable domain of TCR clone 77236 (TRAV23/DV6, TRAJ18)
CAASSSHRGSTL

SEQ ID NO: 154472 - protein, 13 aa, Homo sapiens
  CDR3 for beta chain variable domain of TCR clone 77236 (TRBV7-9, TRBJ1-4)
CATQIGPNEKLFF

SEQ ID NO: 154473 - protein, 15 aa, Homo sapiens
  CDR3 for alpha chain variable domain of TCR clone 77237 (TRAV3, TRAJ4)
CAVRDGTGGYNKLFF

SEQ ID NO: 154474 - protein, 16 aa, Homo sapiens
  CDR3 for beta chain variable domain of TCR clone 77237 (TRBV27, TRBJ2-2)
CASSSSGVSNTGELFF

SEQ ID NO: 154475 - protein, 11 aa, Homo sapiens
  CDR3 for alpha chain variable domain of TCR clone 77238 (TRAV3, TRAJ21)
CAVGNFNKFYF

SEQ ID NO: 154476 - protein, 13 aa, Homo sapiens
  CDR3 for beta chain variable domain of TCR clone 77238 (TRBV2, TRBJ2-7)
CASSVGGSGEQYF

SEQ ID NO: 154477 - protein, 13 aa, Homo sapiens
  CDR3 for alpha chain variable domain of TCR clone 77239 (TRAV8-3, TRAJ28)
CAVGAVGSYQLTF

SEQ ID NO: 154478 - protein, 17 aa, Homo sapiens
  CDR3 for beta chain variable domain of TCR clone 77239 (TRBV11-2, TRBJ2-1)
CASGLYPPGVEYNEQFF

SEQ ID NO: 154479 - protein, 12 aa, Homo sapiens
  CDR3 for alpha chain variable domain of TCR clone 77240 (TRAV17, TRAJ12)
CATLRSSYKLIF

SEQ ID NO: 154480 - protein, 16 aa, Homo sapiens
  CDR3 for beta chain variable domain of TCR clone 77240 (TRBV28, TRBJ2-7)
CASTLFFETGGPEQYF

SEQ ID NO: 154481 - protein, 12 aa, Homo sapiens
  CDR3 for alpha chain variable domain of TCR clone 77241 (TRAV38-1, TRAJ32)
CAPLGSTNKLIF

SEQ ID NO: 154482 - protein, 14 aa, Homo sapiens
  CDR3 for beta chain variable domain of TCR clone 77241 (TRBV29-1, TRBJ2-5)
CSVETSGSGETQYF

SEQ ID NO: 154483 - protein, 16 aa, Homo sapiens
  CDR3 for alpha chain variable domain of TCR clone 77242 (TRAV14/DV4, TRAJ53)
CAMREGGGGSNYKLTF

SEQ ID NO: 154484 - protein, 14 aa, Homo sapiens
  CDR3 for beta chain variable domain of TCR clone 77242 (TRBV6-6, TRBJ2-7)
CASSDSGAGYEQYF

SEQ ID NO: 154485 - protein, 14 aa, Homo sapiens
  CDR3 for alpha chain variable domain of TCR clone 77243 (TRAV4, TRAJ26)
CLVGPHNYGQNFVF

SEQ ID NO: 154486 - protein, 17 aa, Homo sapiens
  CDR3 for beta chain variable domain of TCR clone 77243 (TRBV24-1, TRBJ2-1)
RATSDVSTSGTYNEQFF

SEQ ID NO: 154487 - protein, 16 aa, Homo sapiens
  CDR3 for alpha chain variable domain of TCR clone 77244 (TRAV12-2, TRAJ10)
CAVNRVLTGGGNKLTF

SEQ ID NO: 154488 - protein, 12 aa, Homo sapiens
  CDR3 for beta chain variable domain of TCR clone 77244 (TRBV6-5, TRBJ2-7)
CASYIYGYEQYF

SEQ ID NO: 154489 - protein, 14 aa, Homo sapiens
  CDR3 for alpha chain variable domain of TCR clone 77245 (TRAV25, TRAJ35)
CARRMEGFGNVLHC

SEQ ID NO: 154490 - protein, 16 aa, Homo sapiens
  CDR3 for beta chain variable domain of TCR clone 77245 (TRBV11-3, TRBJ2-5)
CASSSVVAGSTETQYF

SEQ ID NO: 154491 - protein, 11 aa, Homo sapiens
  CDR3 for alpha chain variable domain of TCR clone 77246 (TRAV12-2, TRAJ49)
CAVNTGNQLYF

SEQ ID NO: 154492 - protein, 12 aa, Homo sapiens
  CDR3 for beta chain variable domain of TCR clone 77246 (TRBV2, TRBJ2-3)
CASSGRFDTQYF

SEQ ID NO: 154493 - protein, 13 aa, Homo sapiens
  CDR3 for alpha chain variable domain of TCR clone 77247 (TRAV12-1, TRAJ29)
CVVNGPGNTSLVF

SEQ ID NO: 154494 - protein, 13 aa, Homo sapiens
  CDR3 for beta chain variable domain of TCR clone 77247 (TRBV7-2, TRBJ2-5)
CASSRGGLETQYF

SEQ ID NO: 154495 - protein, 18 aa, Homo sapiens
  CDR3 for alpha chain variable domain of TCR clone 77248 (TRAV13-1, TRAJ52)
CAASKRSAGGTSYGTLTF

SEQ ID NO: 154496 - protein, 13 aa, Homo sapiens
  CDR3 for beta chain variable domain of TCR clone 77248 (TRBV12-4, TRBJ1-2)
CASSLRQGKGYTF

SEQ ID NO: 154497 - protein, 11 aa, Homo sapiens
  CDR3 for alpha chain variable domain of TCR clone 77249 (TRAV2, TRAJ13)
YASGGYQKVTF

SEQ ID NO: 154498 - protein, 12 aa, Homo sapiens
  CDR3 for beta chain variable domain of TCR clone 77249 (TRBV14, TRBJ2-7)
CASSSLKGEQYF

SEQ ID NO: 154499 - protein, 10 aa, Homo sapiens
  CDR3 for alpha chain variable domain of TCR clone 77250 (TRAV1-2, TRAJ20)
CACNDYKLSF

SEQ ID NO: 154500 - protein, 16 aa, Homo sapiens
  CDR3 for beta chain variable domain of TCR clone 77250 (TRBV20-1, TRBJ2-1)
CSARDLTQGMNNEQFF

SEQ ID NO: 154501 - protein, 12 aa, Homo sapiens
  CDR3 for alpha chain variable domain of TCR clone 77251 (TRAV17, TRAJ12)
CATLRSSYKLIF

SEQ ID NO: 154502 - protein, 16 aa, Homo sapiens
  CDR3 for beta chain variable domain of TCR clone 77251 (TRBV28, TRBJ2-7)
CASSLFFETGCPEQYF

SEQ ID NO: 154503 - protein, 14 aa, Homo sapiens
  CDR3 for alpha chain variable domain of TCR clone 77252 (TRAV16, TRAJ42)
CALLAGGSQGNLIF

SEQ ID NO: 154504 - protein, 13 aa, Homo sapiens
  CDR3 for beta chain variable domain of TCR clone 77252 (TRBV7-9, TRBJ1-2)
CASSLKQNYGYTL

SEQ ID NO: 154505 - protein, 15 aa, Homo sapiens
  CDR3 for alpha chain variable domain of TCR clone 77253 (TRAV26-2, TRAJ28)
CILVESGAGSYLLTF

SEQ ID NO: 154506 - protein, 15 aa, Homo sapiens
  CDR3 for beta chain variable domain of TCR clone 77253 (TRBV2, TRBJ2-7)
CASSEGLARSYEQYF

SEQ ID NO: 154507 - protein, 14 aa, Homo sapiens
  CDR3 for alpha chain variable domain of TCR clone 77254 (TRAV1-2, TRAJ8)
CAGRENTGFQKLVF

SEQ ID NO: 154508 - protein, 15 aa, Homo sapiens
  CDR3 for beta chain variable domain of TCR clone 77254 (TRBV6-3, TRBJ2-7)
CASSSPGTVFYEQYF

SEQ ID NO: 154509 - protein, 14 aa, Homo sapiens
  CDR3 for alpha chain variable domain of TCR clone 77255 (TRAV25, TRAJ6)
CAGRESGGSYIPTF

SEQ ID NO: 154510 - protein, 13 aa, Homo sapiens
  CDR3 for beta chain variable domain of TCR clone 77255 (TRBV12-4, TRBJ2-7)
CASSLPGVYEQYF

SEQ ID NO: 154511 - protein, 17 aa, Homo sapiens
  CDR3 for alpha chain variable domain of TCR clone 77256 (TRAV3, TRAJ38)
CAVRDCLNAGNNRKPIW

SEQ ID NO: 154512 - protein, 14 aa, Homo sapiens
  CDR3 for beta chain variable domain of TCR clone 77256 (TRBV5-5, TRBJ1-5)
CASSGQGVDQPQHF

SEQ ID NO: 154513 - protein, 13 aa, Homo sapiens
  CDR3 for alpha chain variable domain of TCR clone 77257 (TRAV2, TRAJ47)
CAVDREYGNKLVF

SEQ ID NO: 154514 - protein, 13 aa, Homo sapiens
  CDR3 for beta chain variable domain of TCR clone 77257 (TRBV7-3, TRBJ1-1)
CASSQDWGAEAFF

SEQ ID NO: 154515 - protein, 11 aa, Homo sapiens
  CDR3 for alpha chain variable domain of TCR clone 77258 (TRAV2, TRAJ13)
CASGGYQKVTF

SEQ ID NO: 154516 - protein, 16 aa, Homo sapiens
  CDR3 for beta chain variable domain of TCR clone 77258 (TRBV6-1, TRBJ2-5)
CAGSETLDRGTETQYF

SEQ ID NO: 154517 - protein, 14 aa, Homo sapiens
  CDR3 for alpha chain variable domain of TCR clone 77259 (TRAV38-2/DV8, TRAJ30)
CAYMDGRGGDKIIF

SEQ ID NO: 154518 - protein, 15 aa, Homo sapiens
  CDR3 for beta chain variable domain of TCR clone 77259 (TRBV7-9, TRBJ2-2)
CASRPADRDTGELFF

SEQ ID NO: 154519 - protein, 18 aa, Homo sapiens
  CDR3 for alpha chain variable domain of TCR clone 77260 (TRAV13-1, TRAJ52)
CAASKRSAGDTSYGKLTF

SEQ ID NO: 154520 - protein, 13 aa, Homo sapiens
  CDR3 for beta chain variable domain of TCR clone 77260 (TRBV12-4, TRBJ1-2)
CASSLRQGKGYTF

SEQ ID NO: 154521 - protein, 16 aa, Homo sapiens
  CDR3 for alpha chain variable domain of TCR clone 77261 (TRAV12-2, TRAJ18)
CAVTTDRGSTLGRLYF

SEQ ID NO: 154522 - protein, 11 aa, Homo sapiens
  CDR3 for beta chain variable domain of TCR clone 77261 (TRBV19, TRBJ1-1)
CASSIGSEAFF

SEQ ID NO: 154523 - protein, 13 aa, Homo sapiens
  CDR3 for alpha chain variable domain of TCR clone 77262 (TRAV9-2, TRAJ49)
CALIQIGGNQFYF

SEQ ID NO: 154524 - protein, 17 aa, Homo sapiens
  CDR3 for beta chain variable domain of TCR clone 77262 (TRBV11-2, TRBJ2-1)
CASSLYPPGVEYNEQFF

SEQ ID NO: 154525 - protein, 12 aa, Homo sapiens
  CDR3 for alpha chain variable domain of TCR clone 77263 (TRAV1-1, TRAJ8)
CAGGTGFQRLVF

SEQ ID NO: 154526 - protein, 14 aa, Homo sapiens
  CDR3 for beta chain variable domain of TCR clone 77263 (TRBV12-5, TRBJ2-5)
CASGSRTHQETQYF

SEQ ID NO: 154527 - protein, 13 aa, Homo sapiens
  CDR3 for alpha chain variable domain of TCR clone 77264 (TRAV12-3, TRAJ7)
CAMSASGNNRLAF

SEQ ID NO: 154528 - protein, 14 aa, Homo sapiens
  CDR3 for beta chain variable domain of TCR clone 77264 (TRBV13, TRBJ2-5)
CASSLGPRGETHYF

SEQ ID NO: 154529 - protein, 13 aa, Homo sapiens
  CDR3 for alpha chain variable domain of TCR clone 77265 (TRAV13-1, TRAJ39)
CAASIWAGDMLTF

SEQ ID NO: 154530 - protein, 15 aa, Homo sapiens
  CDR3 for beta chain variable domain of TCR clone 77265 (TRBV7-9, TRBJ1-1)
CASSLLELGGTEAFF

SEQ ID NO: 154531 - protein, 14 aa, Homo sapiens
  CDR3 for alpha chain variable domain of TCR clone 77266 (TRAV38-1, TRAJ40)
CALRPTSGTYKYIF

SEQ ID NO: 154532 - protein, 14 aa, Homo sapiens
  CDR3 for beta chain variable domain of TCR clone 77266 (TRBV12-4, TRBJ1-1)
CASSPIRRTGEAFF

SEQ ID NO: 154533 - protein, 14 aa, Homo sapiens
  CDR3 for alpha chain variable domain of TCR clone 77267 (TRAV13-1, TRAJ9)
CAASALTGGFKTIF

SEQ ID NO: 154534 - protein, 16 aa, Homo sapiens
  CDR3 for beta chain variable domain of TCR clone 77267 (TRBV12-4, TRBJ2-3)
CASSFGTGGTSDTQYF

SEQ ID NO: 154535 - protein, 15 aa, Homo sapiens
  CDR3 for alpha chain variable domain of TCR clone 77268 (TRAV26-2, TRAJ28)
CILVESGAGSYQLTF

SEQ ID NO: 154536 - protein, 11 aa, Homo sapiens
  CDR3 for beta chain variable domain of TCR clone 77268 (TRBV25-1, TRBJ2-7)
CASGTSYEQYF

SEQ ID NO: 154537 - protein, 14 aa, Homo sapiens
  CDR3 for alpha chain variable domain of TCR clone 77269 (TRAV26-1, TRAJ45)
CIEVTGGGADGLTF

SEQ ID NO: 154538 - protein, 15 aa, Homo sapiens
  CDR3 for beta chain variable domain of TCR clone 77269 (TRBV12-4, TRBJ2-5)
CASSPPTGLQETQYF

SEQ ID NO: 154539 - protein, 14 aa, Homo sapiens
  CDR3 for alpha chain variable domain of TCR clone 77270 (TRAV8-3, TRAJ9)
CAVVYNTGCFKTIF

SEQ ID NO: 154540 - protein, 14 aa, Homo sapiens
  CDR3 for beta chain variable domain of TCR clone 77270 (TRBV7-3, TRBJ2-2)
CASSSGGYTGELFF

SEQ ID NO: 154541 - protein, 14 aa, Homo sapiens
  CDR3 for alpha chain variable domain of TCR clone 77271 (TRAV13-1, TRAJ10)
CAAKEPGGGNKPTF

SEQ ID NO: 154542 - protein, 14 aa, Homo sapiens
  CDR3 for beta chain variable domain of TCR clone 77271 (TRBV6-6, TRBJ2-7)
CASSDSGAGYEQYF

SEQ ID NO: 154543 - protein, 14 aa, Homo sapiens
  CDR3 for alpha chain variable domain of TCR clone 77272 (TRAV12-2, TRAJ15)
CAPHTGQAGAALIF

SEQ ID NO: 154544 - protein, 17 aa, Homo sapiens
  CDR3 for beta chain variable domain of TCR clone 77272 (TRBV5-5, TRBJ1-2)
CASSLGSLDGQSEGYTF

SEQ ID NO: 154545 - protein, 12 aa, Homo sapiens
  CDR3 for alpha chain variable domain of TCR clone 77273 (TRAV2, TRAJ31)
CVVEDNNARLMF

SEQ ID NO: 154546 - protein, 16 aa, Homo sapiens
  CDR3 for beta chain variable domain of TCR clone 77273 (TRBV10-3, TRBJ2-1)
CAISGVGDGGGGEQFF

SEQ ID NO: 154547 - protein, 12 aa, Homo sapiens
  CDR3 for alpha chain variable domain of TCR clone 77274 (TRAV36/DV7, TRAJ54)
CAVFRGAQKLVF

SEQ ID NO: 154548 - protein, 14 aa, Homo sapiens
  CDR3 for beta chain variable domain of TCR clone 77274 (TRBV7-3, TRBJ1-1)
CASSLKGGNTEAFF

SEQ ID NO: 154549 - protein, 13 aa, Homo sapiens
  CDR3 for alpha chain variable domain of TCR clone 77275 (TRAV3, TRAJ43)
CAVKARNNNDMRF

SEQ ID NO: 154550 - protein, 16 aa, Homo sapiens
  CDR3 for beta chain variable domain of TCR clone 77275 (TRBV7-9, TRBJ2-3)
CASSSSVAGGTDTQYF

SEQ ID NO: 154551 - protein, 13 aa, Homo sapiens
  CDR3 for alpha chain variable domain of TCR clone 77276 (TRAV21, TRAJ27)
CAARPGNAGKSTF

SEQ ID NO: 154552 - protein, 14 aa, Homo sapiens
  CDR3 for beta chain variable domain of TCR clone 77276 (TRBV11-2, TRBJ2-7)
CASRLGAGAYEQYF

SEQ ID NO: 154553 - protein, 13 aa, Homo sapiens
  CDR3 for alpha chain variable domain of TCR clone 77277 (TRAV13-1, TRAJ12)
CAASPDSSYKLIF

SEQ ID NO: 154554 - protein, 16 aa, Homo sapiens
  CDR3 for beta chain variable domain of TCR clone 77277 (TRBV15, TRBJ2-1)
CATSRERLAGAYEHFF

SEQ ID NO: 154555 - protein, 20 aa, Homo sapiens
  CDR3 for alpha chain variable domain of TCR clone 77278 (TRAV12-2, TRAJ52)
SPVIQPPARAGGTSYGKLTF

SEQ ID NO: 154556 - protein, 13 aa, Homo sapiens
  CDR3 for beta chain variable domain of TCR clone 77278 (TRBV7-9, TRBJ1-2)
CASSLKQNYGYTF

SEQ ID NO: 154557 - protein, 14 aa, Homo sapiens
  CDR3 for alpha chain variable domain of TCR clone 77279 (TRAV23/DV6, TRAJ4)
CAANLSGGYNTLIF

SEQ ID NO: 154558 - protein, 11 aa, Homo sapiens
  CDR3 for beta chain variable domain of TCR clone 77279 (TRBV7-9, TRBJ2-3)
CASSPTDTQYF

SEQ ID NO: 154559 - protein, 14 aa, Homo sapiens
  CDR3 for alpha chain variable domain of TCR clone 77280 (TRAV12-3, TRAJ10)
GHLPLTGGGNKLTF

SEQ ID NO: 154560 - protein, 16 aa, Homo sapiens
  CDR3 for beta chain variable domain of TCR clone 77280 (TRBV4-1, TRBJ1-4)
CASSQDLRRGGEKLFF

SEQ ID NO: 154561 - protein, 14 aa, Homo sapiens
  CDR3 for alpha chain variable domain of TCR clone 77281 (TRAV12-3, TRAJ10)
SHLPLTGGGSKLTF

SEQ ID NO: 154562 - protein, 15 aa, Homo sapiens
  CDR3 for beta chain variable domain of TCR clone 77281 (TRBV7-9, TRBJ1-6)
CASSSPGRGNSPLHF

SEQ ID NO: 154563 - protein, 18 aa, Homo sapiens
  CDR3 for alpha chain variable domain of TCR clone 77282 (TRAV21, TRAJ52)
CAVRPSPAGGTSYGKLTF

SEQ ID NO: 154564 - protein, 13 aa, Homo sapiens
  CDR3 for beta chain variable domain of TCR clone 77282 (TRBV20-1, TRBJ2-3)
CSASRQAADTQYF

SEQ ID NO: 154565 - protein, 20 aa, Homo sapiens
  CDR3 for alpha chain variable domain of TCR clone 77283 (TRAV12-3, TRAJ41)
SLFIRDSQPSDSATPEAHNF

SEQ ID NO: 154566 - protein, 15 aa, Homo sapiens
  CDR3 for beta chain variable domain of TCR clone 77283 (TRBV5-1, TRBJ2-7)
CASSLDLTSSYEQYF

SEQ ID NO: 154567 - protein, 10 aa, Homo sapiens
  CDR3 for alpha chain variable domain of TCR clone 77284 (TRAV13-1, TRAJ43)
CAASRNDMRF

SEQ ID NO: 154568 - protein, 13 aa, Homo sapiens
  CDR3 for beta chain variable domain of TCR clone 77284 (TRBV20-1, TRBJ1-5)
CSARTGVNQPQHF

SEQ ID NO: 154569 - protein, 13 aa, Homo sapiens
  CDR3 for alpha chain variable domain of TCR clone 77285 (TRAV12-3, TRAJ9)
CAMRNTGGFKTIF

SEQ ID NO: 154570 - protein, 16 aa, Homo sapiens
  CDR3 for beta chain variable domain of TCR clone 77285 (TRBV19, TRBJ2-1)
CASSIDGSFAYNEKFF

SEQ ID NO: 154571 - protein, 13 aa, Homo sapiens
  CDR3 for alpha chain variable domain of TCR clone 77286 (TRAV20, TRAJ15)
CATINQAGTALIF

SEQ ID NO: 154572 - protein, 13 aa, Homo sapiens
  CDR3 for beta chain variable domain of TCR clone 77286 (TRBV12-4, TRBJ2-1)
RASRQPSNNEQFF

SEQ ID NO: 154573 - protein, 15 aa, Homo sapiens
  CDR3 for alpha chain variable domain of TCR clone 77287 (TRAV2, TRAJ9)
CAVEDRATGGLKTIF

SEQ ID NO: 154574 - protein, 16 aa, Homo sapiens
  CDR3 for beta chain variable domain of TCR clone 77287 (TRBV24-1, TRBJ2-3)
CATSDPGTGATDTQYF

SEQ ID NO: 154575 - protein, 16 aa, Homo sapiens
  CDR3 for alpha chain variable domain of TCR clone 77288 (TRAV1-2, TRAJ10)
CAVRGVLTGGGNKLTF

SEQ ID NO: 154576 - protein, 11 aa, Homo sapiens
  CDR3 for beta chain variable domain of TCR clone 77288 (TRBV7-9, TRBJ2-3)
CASSPTDTQYF

SEQ ID NO: 154577 - protein, 15 aa, Homo sapiens
  CDR3 for alpha chain variable domain of TCR clone 77289 (TRAV8-4, TRAJ40)
CAVGSVTSGTYKYIF

SEQ ID NO: 154578 - protein, 13 aa, Homo sapiens
  CDR3 for beta chain variable domain of TCR clone 77289 (TRBV2, TRBJ2-1)
CATSRGTDNEQFF

SEQ ID NO: 154579 - protein, 15 aa, Homo sapiens
  CDR3 for alpha chain variable domain of TCR clone 77290 (TRAV16, TRAJ17)
CALSGNKAAGNKLTF

SEQ ID NO: 154580 - protein, 15 aa, Homo sapiens
  CDR3 for beta chain variable domain of TCR clone 77290 (TRBV7-3, TRBJ2-1)
CASSPTGGGEVEQFF

SEQ ID NO: 154581 - protein, 15 aa, Homo sapiens
  CDR3 for alpha chain variable domain of TCR clone 77291 (TRAV12-2, TRAJ53)
CAVNGGGGSNYKLTL

SEQ ID NO: 154582 - protein, 17 aa, Homo sapiens
  CDR3 for beta chain variable domain of TCR clone 77291 (TRBV7-3, TRBJ2-3)
RASSLMKRMRGADTQYF

SEQ ID NO: 154583 - protein, 23 aa, Homo sapiens
  CDR3 for alpha chain variable domain of TCR clone 77292 (TRAV12-2, TRAJ36)
SLLIRDSQPSDSATLERANNLFF

SEQ ID NO: 154584 - protein, 15 aa, Homo sapiens
  CDR3 for beta chain variable domain of TCR clone 77292 (TRBV6-3, TRBJ2-7)
CASSSPGTVFYEQYF

SEQ ID NO: 154585 - protein, 14 aa, Homo sapiens
  CDR3 for alpha chain variable domain of TCR clone 77293 (TRAV1-2, TRAJ16)
CAVNRFSDGQKLLF

SEQ ID NO: 154586 - protein, 16 aa, Homo sapiens
  CDR3 for beta chain variable domain of TCR clone 77293 (TRBV7-7, TRBJ2-3)
CASSPGTSGSTDTQYF

SEQ ID NO: 154587 - protein, 14 aa, Homo sapiens
  CDR3 for alpha chain variable domain of TCR clone 77294 (TRAV1-2, TRAJ16)
CAVNRFSDGQKLLF

SEQ ID NO: 154588 - protein, 11 aa, Homo sapiens
  CDR3 for beta chain variable domain of TCR clone 77294 (TRBV12-4, TRBJ2-3)
CASAATDTQYF

SEQ ID NO: 154589 - protein, 14 aa, Homo sapiens
  CDR3 for alpha chain variable domain of TCR clone 77295 (TRAV21, TRAJ8)
CAPRAGTGFQKLVF

SEQ ID NO: 154590 - protein, 15 aa, Homo sapiens
  CDR3 for beta chain variable domain of TCR clone 77295 (TRBV5-1, TRBJ2-3)
CASSVTSGSTDTQYF

SEQ ID NO: 154591 - protein, 14 aa, Homo sapiens
  CDR3 for alpha chain variable domain of TCR clone 77296 (TRAV12-1, TRAJ30)
CVVNIGGRDDKIIF

SEQ ID NO: 154592 - protein, 14 aa, Homo sapiens
  CDR3 for beta chain variable domain of TCR clone 77296 (TRBV7-2, TRBJ2-7)
CASSPKTSFYEQYF

SEQ ID NO: 154593 - protein, 13 aa, Homo sapiens
  CDR3 for alpha chain variable domain of TCR clone 77297 (TRAV3, TRAJ15)
CAVRDQAGTALIF

SEQ ID NO: 154594 - protein, 15 aa, Homo sapiens
  CDR3 for beta chain variable domain of TCR clone 77297 (TRBV11-1, TRBJ2-7)
RASSLNYGASYEQYF

SEQ ID NO: 154595 - protein, 13 aa, Homo sapiens
  CDR3 for alpha chain variable domain of TCR clone 77298 (TRAV13-1, TRAJ21)
CAASIYNFNKFYF

SEQ ID NO: 154596 - protein, 18 aa, Homo sapiens
  CDR3 for beta chain variable domain of TCR clone 77298 (TRBV18, TRBJ1-3)
CASSPRGGAGPSGNTIYF

SEQ ID NO: 154597 - protein, 14 aa, Homo sapiens
  CDR3 for alpha chain variable domain of TCR clone 77299 (TRAV1-2, TRAJ8)
CAVREDTGFQKLVF

SEQ ID NO: 154598 - protein, 16 aa, Homo sapiens
  CDR3 for beta chain variable domain of TCR clone 77299 (TRBV6-1, TRBJ2-1)
CASILRQGSSYNEQFF

SEQ ID NO: 154599 - protein, 11 aa, Homo sapiens
  CDR3 for alpha chain variable domain of TCR clone 77300 (TRAV13-1, TRAJ52)
PGGTSYGKLTF

SEQ ID NO: 154600 - protein, 16 aa, Homo sapiens
  CDR3 for beta chain variable domain of TCR clone 77300 (TRBV28, TRBJ2-7)
CASSPWVATGDLSQYS

SEQ ID NO: 154601 - protein, 15 aa, Homo sapiens
  CDR3 for alpha chain variable domain of TCR clone 77301 (TRAV2, TRAJ15)
CAVEDRGQAGTALIF

SEQ ID NO: 154602 - protein, 14 aa, Homo sapiens
  CDR3 for beta chain variable domain of TCR clone 77301 (TRBV7-2, TRBJ1-1)
CASSFLTGTTEAFF

SEQ ID NO: 154603 - protein, 12 aa, Homo sapiens
  CDR3 for alpha chain variable domain of TCR clone 77302 (TRAV8-1, TRAJ6)
CASSGGSYIPTF

SEQ ID NO: 154604 - protein, 12 aa, Homo sapiens
  CDR3 for beta chain variable domain of TCR clone 77302 (TRBV19, TRBJ1-1)
CTSMNRYTEAFF

SEQ ID NO: 154605 - protein, 16 aa, Homo sapiens
  CDR3 for alpha chain variable domain of TCR clone 77303 (TRAV12-3, TRAJ53)
CAMSPRSGGSNYKLTF

SEQ ID NO: 154606 - protein, 12 aa, Homo sapiens
  CDR3 for beta chain variable domain of TCR clone 77303 (TRBV7-8, TRBJ2-7)
CASSLGDREQYF

SEQ ID NO: 154607 - protein, 16 aa, Homo sapiens
  CDR3 for alpha chain variable domain of TCR clone 77304 (TRAV26-2, TRAJ57)
CILRDVGSGGSEKLVF

SEQ ID NO: 154608 - protein, 13 aa, Homo sapiens
  CDR3 for beta chain variable domain of TCR clone 77304 (TRBV18, TRBJ2-3)
RASSPGVTDTQYF

SEQ ID NO: 154609 - protein, 11 aa, Homo sapiens
  CDR3 for alpha chain variable domain of TCR clone 77305 (TRAV1-2, TRAJ20)
CAVADDYKLSF

SEQ ID NO: 154610 - protein, 15 aa, Homo sapiens
  CDR3 for beta chain variable domain of TCR clone 77305 (TRBV20-1, TRBJ2-7)
CSARDPVKGEGEQYF

SEQ ID NO: 154611 - protein, 16 aa, Homo sapiens
  CDR3 for alpha chain variable domain of TCR clone 77306 (TRAV26-1, TRAJ36)
CIVRVPDQTGANNLLF

SEQ ID NO: 154612 - protein, 12 aa, Homo sapiens
  CDR3 for beta chain variable domain of TCR clone 77306 (TRBV29-1, TRBJ2-3)
CSVTGGADTQYF

SEQ ID NO: 154613 - protein, 16 aa, Homo sapiens
  CDR3 for alpha chain variable domain of TCR clone 77307 (TRAV21, TRAJ17)
CAVRPGEEAAGNKLTF

SEQ ID NO: 154614 - protein, 16 aa, Homo sapiens
  CDR3 for beta chain variable domain of TCR clone 77307 (TRBV2, TRBJ2-7)
CASSEPWTGPPYEQYF

SEQ ID NO: 154615 - protein, 14 aa, Homo sapiens
  CDR3 for alpha chain variable domain of TCR clone 77308 (TRAV12-3, TRAJ9)
CAMSPNTGGFKTIF

SEQ ID NO: 154616 - protein, 16 aa, Homo sapiens
  CDR3 for beta chain variable domain of TCR clone 77308 (TRBV7-9, TRBJ2-1)
CASSLALAGSYNEQFF

SEQ ID NO: 154617 - protein, 19 aa, Homo sapiens
  CDR3 for alpha chain variable domain of TCR clone 77309 (TRAV13-1, TRAJ52)
CAASPYQNAGGTSYGKLTF

SEQ ID NO: 154618 - protein, 13 aa, Homo sapiens
  CDR3 for beta chain variable domain of TCR clone 77309 (TRBV15, TRBJ2-7)
FATSTTGHYEQYF

SEQ ID NO: 154619 - protein, 14 aa, Homo sapiens
  CDR3 for alpha chain variable domain of TCR clone 77310 (TRAV13-1, TRAJ40)
CGASMTSGTYKYIF

SEQ ID NO: 154620 - protein, 15 aa, Homo sapiens
  CDR3 for beta chain variable domain of TCR clone 77310 (TRBV7-3, TRBJ2-1)
CASSPTGGGEVEQFF

SEQ ID NO: 154621 - protein, 18 aa, Homo sapiens
  CDR3 for alpha chain variable domain of TCR clone 77311 (TRAV13-1, TRAJ52)
CAAKNPNAGGTSYGKLTF

SEQ ID NO: 154622 - protein, 13 aa, Homo sapiens
  CDR3 for beta chain variable domain of TCR clone 77311 (TRBV20-1, TRBJ2-5)
CSAREGGKETQYF

SEQ ID NO: 154623 - protein, 11 aa, Homo sapiens
  CDR3 for alpha chain variable domain of TCR clone 77312 (TRAV2, TRAJ33)
CAVESNYQLIW

SEQ ID NO: 154624 - protein, 15 aa, Homo sapiens
  CDR3 for beta chain variable domain of TCR clone 77312 (TRBV19, TRBJ1-1)
CASTSGQIQNNEAFF

SEQ ID NO: 154625 - protein, 22 aa, Homo sapiens
  CDR3 for alpha chain variable domain of TCR clone 77313 (TRAV40, )
CLLGDGIPDIQNHDPAVYQLRD

SEQ ID NO: 154626 - protein, 16 aa, Homo sapiens
  CDR3 for beta chain variable domain of TCR clone 77313 (TRBV20-1, TRBJ1-5)
CSAELPGQQTNQPQHF

SEQ ID NO: 154627 - protein, 11 aa, Homo sapiens
  CDR3 for alpha chain variable domain of TCR clone 77314 (TRAV2, TRAJ13)
CASGGYQKVTF

SEQ ID NO: 154628 - protein, 12 aa, Homo sapiens
  CDR3 for beta chain variable domain of TCR clone 77314 (TRBV19, TRBJ1-4)
CASKDWPGGLLF

SEQ ID NO: 154629 - protein, 14 aa, Homo sapiens
  CDR3 for alpha chain variable domain of TCR clone 77315 (TRAV12-2, TRAJ44)
CAVNPAGTARKLTF

SEQ ID NO: 154630 - protein, 13 aa, Homo sapiens
  CDR3 for beta chain variable domain of TCR clone 77315 (TRBV20-1, TRBJ1-6)
CSAPLGVGSPLHF

SEQ ID NO: 154631 - protein, 12 aa, Homo sapiens
  CDR3 for alpha chain variable domain of TCR clone 77316 (TRAV12-1, TRAJ34)
CVVILNTDKLIF

SEQ ID NO: 154632 - protein, 16 aa, Homo sapiens
  CDR3 for beta chain variable domain of TCR clone 77316 (TRBV4-3, TRBJ2-5)
CASSQDSIQLQETQYF

SEQ ID NO: 154633 - protein, 14 aa, Homo sapiens
  CDR3 for alpha chain variable domain of TCR clone 77317 (TRAV26-1, TRAJ21)
CIVRPPYNFNKFYF

SEQ ID NO: 154634 - protein, 14 aa, Homo sapiens
  CDR3 for beta chain variable domain of TCR clone 77317 (TRBV20-1, TRBJ1-1)
CSAQTRIGGTEAFF

SEQ ID NO: 154635 - protein, 12 aa, Homo sapiens
  CDR3 for alpha chain variable domain of TCR clone 77318 (TRAV2, TRAJ33)
CAVWGSNYLLIW

SEQ ID NO: 154636 - protein, 16 aa, Homo sapiens
  CDR3 for beta chain variable domain of TCR clone 77318 (TRBV20-1, TRBJ1-4)
CSAPGQGLLTNEKLFF

SEQ ID NO: 154637 - protein, 21 aa, Homo sapiens
  CDR3 for alpha chain variable domain of TCR clone 77319 (TRAV13-1, TRAJ5)
CLLLCSNPSLSRDTGRRALTF

SEQ ID NO: 154638 - protein, 17 aa, Homo sapiens
  CDR3 for beta chain variable domain of TCR clone 77319 (TRBV24-1, TRBJ2-1)
CATSDVSTSGTYNEQFF

SEQ ID NO: 154639 - protein, 11 aa, Homo sapiens
  CDR3 for alpha chain variable domain of TCR clone 77320 (TRAV2, TRAJ13)
CASGGYQKVTF

SEQ ID NO: 154640 - protein, 15 aa, Homo sapiens
  CDR3 for beta chain variable domain of TCR clone 77320 (TRBV20-1, TRBJ2-7)
CSARVPAAYFYGQYF

SEQ ID NO: 154641 - protein, 14 aa, Homo sapiens
  CDR3 for alpha chain variable domain of TCR clone 77321 (TRAV29/DV5, TRAJ47)
CAASEPEYGNKLVF

SEQ ID NO: 154642 - protein, 14 aa, Homo sapiens
  CDR3 for beta chain variable domain of TCR clone 77321 (TRBV4-1, TRBJ2-2)
CASSQAVNTGELFF

SEQ ID NO: 154643 - protein, 17 aa, Homo sapiens
  CDR3 for alpha chain variable domain of TCR clone 77322 (TRAV3, TRAJ6)
CAVRDGPRAGGRYKPTF

SEQ ID NO: 154644 - protein, 14 aa, Homo sapiens
  CDR3 for beta chain variable domain of TCR clone 77322 (TRBV7-2, TRBJ2-7)
CASSPKTSFYEQYF

SEQ ID NO: 154645 - protein, 12 aa, Homo sapiens
  CDR3 for alpha chain variable domain of TCR clone 77323 (TRAV1-2, TRAJ33)
CAALDSNYQLIW

SEQ ID NO: 154646 - protein, 15 aa, Homo sapiens
  CDR3 for beta chain variable domain of TCR clone 77323 (TRBV20-1, TRBJ2-7)
CSARDRVSGMDEQYF

SEQ ID NO: 154647 - protein, 16 aa, Homo sapiens
  CDR3 for alpha chain variable domain of TCR clone 77324 (TRAV3, TRAJ37)
CAVRVRGSGNTGKLIF

SEQ ID NO: 154648 - protein, 14 aa, Homo sapiens
  CDR3 for beta chain variable domain of TCR clone 77324 (TRBV19, TRBJ1-4)
CASSMGRHNEKLFF

SEQ ID NO: 154649 - protein, 14 aa, Homo sapiens
  CDR3 for alpha chain variable domain of TCR clone 77325 (TRAV9-2, TRAJ39)
CALYIYNAGNMLTF

SEQ ID NO: 154650 - protein, 15 aa, Homo sapiens
  CDR3 for beta chain variable domain of TCR clone 77325 (TRBV18, TRBJ2-1)
CASSPPSASYNEQFF

SEQ ID NO: 154651 - protein, 12 aa, Homo sapiens
  CDR3 for alpha chain variable domain of TCR clone 77326 (TRAV23/DV6, TRAJ17)
CARGSCRQQANF

SEQ ID NO: 154652 - protein, 14 aa, Homo sapiens
  CDR3 for beta chain variable domain of TCR clone 77326 (TRBV7-2, TRBJ1-2)
RASSQTGSTYGYTF

SEQ ID NO: 154653 - protein, 15 aa, Homo sapiens
  CDR3 for alpha chain variable domain of TCR clone 77327 (TRAV3, TRAJ22)
CAVRDRGGSARQLTF

SEQ ID NO: 154654 - protein, 14 aa, Homo sapiens
  CDR3 for beta chain variable domain of TCR clone 77327 (TRBV6-6, TRBJ2-7)
CASSDNGAGYEQYF

SEQ ID NO: 154655 - protein, 14 aa, Homo sapiens
  CDR3 for alpha chain variable domain of TCR clone 77328 (TRAV38-1, TRAJ57)
CAFMNTGGSEKLVF

SEQ ID NO: 154656 - protein, 12 aa, Homo sapiens
  CDR3 for beta chain variable domain of TCR clone 77328 (TRBV20-1, TRBJ1-5)
CSTGQGNQPQHF

SEQ ID NO: 154657 - protein, 12 aa, Homo sapiens
  CDR3 for alpha chain variable domain of TCR clone 77329 (TRAV36/DV7, TRAJ54)
CAVVRGAQKLVF

SEQ ID NO: 154658 - protein, 13 aa, Homo sapiens
  CDR3 for beta chain variable domain of TCR clone 77329 (TRBV7-9, TRBJ2-1)
CASSLDVGNEQFF

SEQ ID NO: 154659 - protein, 14 aa, Homo sapiens
  CDR3 for alpha chain variable domain of TCR clone 77330 (TRAV12-2, TRAJ17)
CAVLFKAAGNKLTF

SEQ ID NO: 154660 - protein, 13 aa, Homo sapiens
  CDR3 for beta chain variable domain of TCR clone 77330 (TRBV19, TRBJ1-2)
CASSQGQAYGYTF

SEQ ID NO: 154661 - protein, 18 aa, Homo sapiens
  CDR3 for alpha chain variable domain of TCR clone 77331 (TRAV36/DV7, TRAJ13)
CAVVLGSGENGGYQKVTF

SEQ ID NO: 154662 - protein, 15 aa, Homo sapiens
  CDR3 for beta chain variable domain of TCR clone 77331 (TRBV19, TRBJ2-1)
CASSTGTSSYNEQFF

SEQ ID NO: 154663 - protein, 15 aa, Homo sapiens
  CDR3 for alpha chain variable domain of TCR clone 77332 (TRAV12-2, TRAJ53)
CAVNGGGGSNYKLTF

SEQ ID NO: 154664 - protein, 12 aa, Homo sapiens
  CDR3 for beta chain variable domain of TCR clone 77332 (TRBV7-6, TRBJ2-5)
CASSLSQETQYV

SEQ ID NO: 154665 - protein, 11 aa, Homo sapiens
  CDR3 for alpha chain variable domain of TCR clone 77333 (TRAV12-1, TRAJ26)
CVVAYGQNFVF

SEQ ID NO: 154666 - protein, 13 aa, Homo sapiens
  CDR3 for beta chain variable domain of TCR clone 77333 (TRBV7-2, TRBJ2-4)
CASSREHANMQYF

SEQ ID NO: 154667 - protein, 14 aa, Homo sapiens
  CDR3 for alpha chain variable domain of TCR clone 77334 (TRAV8-2, TRAJ37)
CVVSISGNTGKIIF

SEQ ID NO: 154668 - protein, 11 aa, Homo sapiens
  CDR3 for beta chain variable domain of TCR clone 77334 (TRBV18, TRBJ2-5)
CASSPRETQYF

SEQ ID NO: 154669 - protein, 15 aa, Homo sapiens
  CDR3 for alpha chain variable domain of TCR clone 77335 (TRAV38-1, TRAJ57)
CAFMDSQGGSEKLVF

SEQ ID NO: 154670 - protein, 16 aa, Homo sapiens
  CDR3 for beta chain variable domain of TCR clone 77335 (TRBV10-3, TRBJ2-1)
CAIRGGCRGDYNEQFF

SEQ ID NO: 154671 - protein, 13 aa, Homo sapiens
  CDR3 for alpha chain variable domain of TCR clone 77336 (TRAV21, TRAJ27)
CAARPGNAGKSTF

SEQ ID NO: 154672 - protein, 14 aa, Homo sapiens
  CDR3 for beta chain variable domain of TCR clone 77336 (TRBV7-6, TRBJ2-3)
CTSSLGTVSDTQYF

SEQ ID NO: 154673 - protein, 15 aa, Homo sapiens
  CDR3 for alpha chain variable domain of TCR clone 77337 (TRAV3, TRAJ3)
CAVRDMSSSASKIIF

SEQ ID NO: 154674 - protein, 14 aa, Homo sapiens
  CDR3 for beta chain variable domain of TCR clone 77337 (TRBV19, TRBJ2-1)
CAIPTFVLSGEQFF

SEQ ID NO: 154675 - protein, 16 aa, Homo sapiens
  CDR3 for alpha chain variable domain of TCR clone 77338 (TRAV12-1, TRAJ22)
CVVNSISSGSARQLTF

SEQ ID NO: 154676 - protein, 13 aa, Homo sapiens
  CDR3 for beta chain variable domain of TCR clone 77338 (TRBV27, TRBJ1-4)
CASSLMGDEKLFF

SEQ ID NO: 154677 - protein, 12 aa, Homo sapiens
  CDR3 for alpha chain variable domain of TCR clone 77339 (TRAV8-1, TRAJ26)
CAVNNYGQNFVF

SEQ ID NO: 154678 - protein, 18 aa, Homo sapiens
  CDR3 for beta chain variable domain of TCR clone 77339 (TRBV11-2, TRBJ2-3)
CASSLGGASRGAPNTQYF

SEQ ID NO: 154679 - protein, 16 aa, Homo sapiens
  CDR3 for alpha chain variable domain of TCR clone 77340 (TRAV21, TRAJ37)
CAVRTAGSSNTGKLIF

SEQ ID NO: 154680 - protein, 15 aa, Homo sapiens
  CDR3 for beta chain variable domain of TCR clone 77340 (TRBV5-4, TRBJ2-2)
CASSFMRESAGELFF

SEQ ID NO: 154681 - protein, 12 aa, Homo sapiens
  CDR3 for alpha chain variable domain of TCR clone 77341 (TRAV3, TRAJ27)
CAVRDKAGKSTF

SEQ ID NO: 154682 - protein, 14 aa, Homo sapiens
  CDR3 for beta chain variable domain of TCR clone 77341 (TRBV5-1, TRBJ1-2)
CASSVDSSNYGYTF

SEQ ID NO: 154683 - protein, 15 aa, Homo sapiens
  CDR3 for alpha chain variable domain of TCR clone 77342 (TRAV12-3, TRAJ48)
CAMNAKNFGNEKLTF

SEQ ID NO: 154684 - protein, 15 aa, Homo sapiens
  CDR3 for beta chain variable domain of TCR clone 77342 (TRBV4-1, TRBJ1-4)
CASSDTGGTNEKLFF

SEQ ID NO: 154685 - protein, 16 aa, Homo sapiens
  CDR3 for alpha chain variable domain of TCR clone 77343 (TRAV8-3, TRAJ44)
CAVGASNTGTASKLTF

SEQ ID NO: 154686 - protein, 15 aa, Homo sapiens
  CDR3 for beta chain variable domain of TCR clone 77343 (TRBV27, TRBJ1-5)
CASTFSRGSNQPQHF

SEQ ID NO: 154687 - protein, 12 aa, Homo sapiens
  CDR3 for alpha chain variable domain of TCR clone 77344 (TRAV2, TRAJ33)
CAVPDSNYQLIW

SEQ ID NO: 154688 - protein, 14 aa, Homo sapiens
  CDR3 for beta chain variable domain of TCR clone 77344 (TRBV6-1, TRBJ1-3)
CASVQGGGGNTIYF

SEQ ID NO: 154689 - protein, 12 aa, Homo sapiens
  CDR3 for alpha chain variable domain of TCR clone 77345 (TRAV8-3, TRAJ26)
CAGDNYGQNFVF

SEQ ID NO: 154690 - protein, 15 aa, Homo sapiens
  CDR3 for beta chain variable domain of TCR clone 77345 (TRBV11-3, TRBJ2-1)
CASSLGTSGLNEQFF

SEQ ID NO: 154691 - protein, 15 aa, Homo sapiens
  CDR3 for alpha chain variable domain of TCR clone 77346 (TRAV20, TRAJ43)
CAVQAGKSSNNDMRF

SEQ ID NO: 154692 - protein, 14 aa, Homo sapiens
  CDR3 for beta chain variable domain of TCR clone 77346 (TRBV27, TRBJ2-1)
CASRHLRGGKEQSF

SEQ ID NO: 154693 - protein, 12 aa, Homo sapiens
  CDR3 for alpha chain variable domain of TCR clone 77347 (TRAV3, TRAJ43)
CAVRDPNNDMRF

SEQ ID NO: 154694 - protein, 13 aa, Homo sapiens
  CDR3 for beta chain variable domain of TCR clone 77347 (TRBV7-9, TRBJ1-2)
CASSLRQNYGYTF

SEQ ID NO: 154695 - protein, 16 aa, Homo sapiens
  CDR3 for alpha chain variable domain of TCR clone 77348 (TRAV1-2, TRAJ10)
CAVRGVLTGGANKLTF

SEQ ID NO: 154696 - protein, 12 aa, Homo sapiens
  CDR3 for beta chain variable domain of TCR clone 77348 (TRBV7-8, TRBJ2-7)
CASSLGDREQYF

SEQ ID NO: 154697 - protein, 17 aa, Homo sapiens
  CDR3 for alpha chain variable domain of TCR clone 77349 (TRAV8-6, TRAJ42)
CAVSDRVHGGSQGNLIF

SEQ ID NO: 154698 - protein, 15 aa, Homo sapiens
  CDR3 for beta chain variable domain of TCR clone 77349 (TRBV7-3, TRBJ2-2)
CASSETGQGTGELFF

SEQ ID NO: 154699 - protein, 16 aa, Homo sapiens
  CDR3 for alpha chain variable domain of TCR clone 77350 (TRAV26-1, TRAJ37)
CIVRGDGSGNTGKLIV

SEQ ID NO: 154700 - protein, 17 aa, Homo sapiens
  CDR3 for beta chain variable domain of TCR clone 77350 (TRBV4-1, TRBJ2-7)
CASSRDPLGVRGGEQYF

SEQ ID NO: 154701 - protein, 15 aa, Homo sapiens
  CDR3 for alpha chain variable domain of TCR clone 77351 (TRAV8-3, TRAJ45)
CASSYSGGGADGLTF

SEQ ID NO: 154702 - protein, 18 aa, Homo sapiens
  CDR3 for beta chain variable domain of TCR clone 77351 (TRBV18, TRBJ1-3)
RASSPRGGAGPSGNTIYF

SEQ ID NO: 154703 - protein, 11 aa, Homo sapiens
  CDR3 for alpha chain variable domain of TCR clone 77352 (TRAV12-2, TRAJ26)
CAVNNGQNFVF

SEQ ID NO: 154704 - protein, 11 aa, Homo sapiens
  CDR3 for beta chain variable domain of TCR clone 77352 (TRBV12-4, TRBJ2-5)
CASSFQVAQYF

SEQ ID NO: 154705 - protein, 12 aa, Homo sapiens
  CDR3 for alpha chain variable domain of TCR clone 77353 (TRAV13-2, TRAJ23)
CAERHRGGKLIF

SEQ ID NO: 154706 - protein, 12 aa, Homo sapiens
  CDR3 for beta chain variable domain of TCR clone 77353 (TRBV29-1, TRBJ2-3)
CSVTGGADTRYF

SEQ ID NO: 154707 - protein, 15 aa, Homo sapiens
  CDR3 for alpha chain variable domain of TCR clone 77354 (TRAV26-1, TRAJ28)
CIVRVAGAGGYQLTF

SEQ ID NO: 154708 - protein, 19 aa, Homo sapiens
  CDR3 for beta chain variable domain of TCR clone 77354 (TRBV7-3, TRBJ2-7)
CASSLTGVAGGWPSYEQYF

SEQ ID NO: 154709 - protein, 16 aa, Homo sapiens
  CDR3 for alpha chain variable domain of TCR clone 77355 (TRAV3, TRAJ37)
CAVRPHGSGSTGKLIF

SEQ ID NO: 154710 - protein, 11 aa, Homo sapiens
  CDR3 for beta chain variable domain of TCR clone 77355 (TRBV10-3, TRBJ2-7)
CAISEGLEQYF

SEQ ID NO: 154711 - protein, 13 aa, Homo sapiens
  CDR3 for alpha chain variable domain of TCR clone 77356 (TRAV29/DV5, TRAJ54)
CAASIQGAQKLVF

SEQ ID NO: 154712 - protein, 19 aa, Homo sapiens
  CDR3 for beta chain variable domain of TCR clone 77356 (TRBV28, TRBJ2-7)
CASSYSGTSRLGWVYEQYF

SEQ ID NO: 154713 - protein, 15 aa, Homo sapiens
  CDR3 for alpha chain variable domain of TCR clone 77357 (TRAV26-1, TRAJ29)
CIVRVEGSGNTPLVF

SEQ ID NO: 154714 - protein, 15 aa, Homo sapiens
  CDR3 for beta chain variable domain of TCR clone 77357 (TRBV19, TRBJ1-5)
CASSIVWADNQPQHF

SEQ ID NO: 154715 - protein, 15 aa, Homo sapiens
  CDR3 for alpha chain variable domain of TCR clone 77358 (TRAV26-1, TRAJ44)
CIVRIGTGTASKLTF

SEQ ID NO: 154716 - protein, 15 aa, Homo sapiens
  CDR3 for beta chain variable domain of TCR clone 77358 (TRBV5-1, TRBJ1-1)
CASSSTTGTNTEAFF

SEQ ID NO: 154717 - protein, 13 aa, Homo sapiens
  CDR3 for alpha chain variable domain of TCR clone 77359 (TRAV8-6, TRAJ13)
CAVRDGGYQKVTF

SEQ ID NO: 154718 - protein, 15 aa, Homo sapiens
  CDR3 for beta chain variable domain of TCR clone 77359 (TRBV7-9, TRBJ2-2)
CASRPEGTSTRELFF

SEQ ID NO: 154719 - protein, 15 aa, Homo sapiens
  CDR3 for alpha chain variable domain of TCR clone 77360 (TRAV12-1, TRAJ9)
CVVSFGDTGGLKTIF

SEQ ID NO: 154720 - protein, 13 aa, Homo sapiens
  CDR3 for beta chain variable domain of TCR clone 77360 (TRBV2, TRBJ1-4)
CASSERAGEKLFF

SEQ ID NO: 154721 - protein, 13 aa, Homo sapiens
  CDR3 for alpha chain variable domain of TCR clone 77361 (TRAV27, TRAJ39)
CAGDTPAGNMLTF

SEQ ID NO: 154722 - protein, 13 aa, Homo sapiens
  CDR3 for beta chain variable domain of TCR clone 77361 (TRBV4-1, TRBJ2-4)
CASGQVGIDIQYF

SEQ ID NO: 154723 - protein, 12 aa, Homo sapiens
  CDR3 for alpha chain variable domain of TCR clone 77362 (TRAV13-1, TRAJ9)
CASPTGGFKTIF

SEQ ID NO: 154724 - protein, 13 aa, Homo sapiens
  CDR3 for beta chain variable domain of TCR clone 77362 (TRBV12-4, TRBJ1-2)
CASSSGSKDGYTF

SEQ ID NO: 154725 - protein, 14 aa, Homo sapiens
  CDR3 for alpha chain variable domain of TCR clone 77363 (TRAV12-2, TRAJ6)
CASKWGGGSYIPTF

SEQ ID NO: 154726 - protein, 15 aa, Homo sapiens
  CDR3 for beta chain variable domain of TCR clone 77363 (TRBV20-1, TRBJ2-7)
CSARDRVSGMDEQYF

SEQ ID NO: 154727 - protein, 14 aa, Homo sapiens
  CDR3 for alpha chain variable domain of TCR clone 77364 (TRAV1-2, TRAJ16)
CAVNRFSDGQKLLF

SEQ ID NO: 154728 - protein, 15 aa, Homo sapiens
  CDR3 for beta chain variable domain of TCR clone 77364 (TRBV2, TRBJ2-4)
CASRTQGAAKNIQYF

SEQ ID NO: 154729 - protein, 14 aa, Homo sapiens
  CDR3 for alpha chain variable domain of TCR clone 77365 (TRAV12-3, TRAJ58)
CAMGTETSGSRLTF

SEQ ID NO: 154730 - protein, 15 aa, Homo sapiens
  CDR3 for beta chain variable domain of TCR clone 77365 (TRBV4-1, TRBJ1-4)
CASSDTGGTNEKLFF

SEQ ID NO: 154731 - protein, 13 aa, Homo sapiens
  CDR3 for alpha chain variable domain of TCR clone 77366 (TRAV17, TRAJ26)
CATVDNYGQNFVF

SEQ ID NO: 154732 - protein, 13 aa, Homo sapiens
  CDR3 for beta chain variable domain of TCR clone 77366 (TRBV19, TRBJ1-2)
CASSVPGQDGYTF

SEQ ID NO: 154733 - protein, 14 aa, Homo sapiens
  CDR3 for alpha chain variable domain of TCR clone 77367 (TRAV12-2, TRAJ15)
CAPHTGQAGTALIL

SEQ ID NO: 154734 - protein, 17 aa, Homo sapiens
  CDR3 for beta chain variable domain of TCR clone 77367 (TRBV5-5, TRBJ1-2)
CASSLGSLEGQSEGYTF

SEQ ID NO: 154735 - protein, 13 aa, Homo sapiens
  CDR3 for alpha chain variable domain of TCR clone 77368 (TRAV2, TRAJ13)
CAVESGGYQKVTF

SEQ ID NO: 154736 - protein, 13 aa, Homo sapiens
  CDR3 for beta chain variable domain of TCR clone 77368 (TRBV7-2, TRBJ1-1)
CASNLKGEKVAFF

SEQ ID NO: 154737 - protein, 11 aa, Homo sapiens
  CDR3 for alpha chain variable domain of TCR clone 77369 (TRAV12-3, TRAJ43)
CAMSVSNDMRF

SEQ ID NO: 154738 - protein, 12 aa, Homo sapiens
  CDR3 for beta chain variable domain of TCR clone 77369 (TRBV12-4, TRBJ2-7)
CASSSSPYEQYF

SEQ ID NO: 154739 - protein, 15 aa, Homo sapiens
  CDR3 for alpha chain variable domain of TCR clone 77370 (TRAV3, TRAJ4)
CAQNMFSGGYNKLIF

SEQ ID NO: 154740 - protein, 17 aa, Homo sapiens
  CDR3 for beta chain variable domain of TCR clone 77370 (TRBV11-2, TRBJ2-1)
CASSLYPPGVEYNEQFF

SEQ ID NO: 154741 - protein, 12 aa, Homo sapiens
  CDR3 for alpha chain variable domain of TCR clone 77371 (TRAV16, TRAJ10)
CSRTGGGNKLTF

SEQ ID NO: 154742 - protein, 19 aa, Homo sapiens
  CDR3 for beta chain variable domain of TCR clone 77371 (TRBV25-1, TRBJ2-2)
CAILVYRVDRGRETGELFF

SEQ ID NO: 154743 - protein, 13 aa, Homo sapiens
  CDR3 for alpha chain variable domain of TCR clone 77372 (TRAV2, TRAJ40)
CAVVTSGTYKYIF

SEQ ID NO: 154744 - protein, 15 aa, Homo sapiens
  CDR3 for beta chain variable domain of TCR clone 77372 (TRBV7-6, TRBJ2-1)
CASSSLAGEGNEQFF

SEQ ID NO: 154745 - protein, 14 aa, Homo sapiens
  CDR3 for alpha chain variable domain of TCR clone 77373 (TRAV12-2, TRAJ40)
CAVKIPPGTYKYIF

SEQ ID NO: 154746 - protein, 14 aa, Homo sapiens
  CDR3 for beta chain variable domain of TCR clone 77373 (TRBV11-2, TRBJ1-5)
CASSLDRGRQPQHF

SEQ ID NO: 154747 - protein, 13 aa, Homo sapiens
  CDR3 for alpha chain variable domain of TCR clone 77374 (TRAV8-4, TRAJ36)
CAASVAGANNLFF

SEQ ID NO: 154748 - protein, 15 aa, Homo sapiens
  CDR3 for beta chain variable domain of TCR clone 77374 (TRBV7-2, TRBJ2-5)
CASSLEGRGVETQYF

SEQ ID NO: 154749 - protein, 14 aa, Homo sapiens
  CDR3 for alpha chain variable domain of TCR clone 77375 (TRAV17, TRAJ16)
CATADFSDGQKLLF

SEQ ID NO: 154750 - protein, 17 aa, Homo sapiens
  CDR3 for beta chain variable domain of TCR clone 77375 (TRBV11-2, TRBJ2-1)
CASSLYPPGVEYNEQFF

SEQ ID NO: 154751 - protein, 11 aa, Homo sapiens
  CDR3 for alpha chain variable domain of TCR clone 77376 (TRAV12-3, TRAJ27)
CAMANAGKSTF

SEQ ID NO: 154752 - protein, 14 aa, Homo sapiens
  CDR3 for beta chain variable domain of TCR clone 77376 (TRBV20-1, TRBJ1-1)
CSAQTRIGGTEAFF

SEQ ID NO: 154753 - protein, 14 aa, Homo sapiens
  CDR3 for alpha chain variable domain of TCR clone 77377 (TRAV23/DV6, TRAJ40)
CAARKNSGTYKYIF

SEQ ID NO: 154754 - protein, 14 aa, Homo sapiens
  CDR3 for beta chain variable domain of TCR clone 77377 (TRBV10-3, TRBJ2-5)
CAISERDCQETQYF

SEQ ID NO: 154755 - protein, 15 aa, Homo sapiens
  CDR3 for alpha chain variable domain of TCR clone 77378 (TRAV3, TRAJ27)
CAVRAGGHQCRQINL

SEQ ID NO: 154756 - protein, 11 aa, Homo sapiens
  CDR3 for beta chain variable domain of TCR clone 77378 (TRBV11-2, TRBJ2-2)
CASSLPGELFF

SEQ ID NO: 154757 - protein, 13 aa, Homo sapiens
  CDR3 for alpha chain variable domain of TCR clone 77379 (TRAV21, TRAJ27)
CAARPGNAGKSTF

SEQ ID NO: 154758 - protein, 15 aa, Homo sapiens
  CDR3 for beta chain variable domain of TCR clone 77379 (TRBV20-1, TRBJ2-7)
CGAGDRVSGMDEQYF

SEQ ID NO: 154759 - protein, 12 aa, Homo sapiens
  CDR3 for alpha chain variable domain of TCR clone 77380 (TRAV8-3, TRAJ41)
CAVGALGYALNF

SEQ ID NO: 154760 - protein, 16 aa, Homo sapiens
  CDR3 for beta chain variable domain of TCR clone 77380 (TRBV7-6, TRBJ2-3)
CASSDSRGEGTNTQYF

SEQ ID NO: 154761 - protein, 16 aa, Homo sapiens
  CDR3 for alpha chain variable domain of TCR clone 77381 (TRAV12-1, TRAJ22)
CVVNTISSGSARQLTF

SEQ ID NO: 154762 - protein, 13 aa, Homo sapiens
  CDR3 for beta chain variable domain of TCR clone 77381 (TRBV19, TRBJ2-1)
CASNGGVLSEQFF

SEQ ID NO: 154763 - protein, 15 aa, Homo sapiens
  CDR3 for alpha chain variable domain of TCR clone 77382 (TRAV13-1, TRAJ17)
CAASIERAAGDKLTF

SEQ ID NO: 154764 - protein, 12 aa, Homo sapiens
  CDR3 for beta chain variable domain of TCR clone 77382 (TRBV5-7, TRBJ1-1)
CASSLGRGKAFF

SEQ ID NO: 154765 - protein, 11 aa, Homo sapiens
  CDR3 for alpha chain variable domain of TCR clone 77383 (TRAV35, TRAJ30)
CAGPGDDKIVF

SEQ ID NO: 154766 - protein, 12 aa, Homo sapiens
  CDR3 for beta chain variable domain of TCR clone 77383 (TRBV27, TRBJ2-1)
CASRGFYNEQFF

SEQ ID NO: 154767 - protein, 15 aa, Homo sapiens
  CDR3 for alpha chain variable domain of TCR clone 77384 (TRAV12-1, TRAJ45)
CVVLSGGGGADGLTF

SEQ ID NO: 154768 - protein, 15 aa, Homo sapiens
  CDR3 for beta chain variable domain of TCR clone 77384 (TRBV7-3, TRBJ2-1)
CASTHGTGIYNEQFF

SEQ ID NO: 154769 - protein, 16 aa, Homo sapiens
  CDR3 for alpha chain variable domain of TCR clone 77385 (TRAV30, TRAJ24)
CGTEIVDADSWGKFQF

SEQ ID NO: 154770 - protein, 13 aa, Homo sapiens
  CDR3 for beta chain variable domain of TCR clone 77385 (TRBV7-3, TRBJ2-1)
CASSLDSYNEQFF

SEQ ID NO: 154771 - protein, 21 aa, Homo sapiens
  CDR3 for alpha chain variable domain of TCR clone 77386 (TRAV8-3, TRAJ10)
CAVGHTHGRRKQTHLWDRHSA

SEQ ID NO: 154772 - protein, 10 aa, Homo sapiens
  CDR3 for beta chain variable domain of TCR clone 77386 (TRBV20-1, TRBJ2-5)
CRARFETQYF

SEQ ID NO: 154773 - protein, 10 aa, Homo sapiens
  CDR3 for alpha chain variable domain of TCR clone 77387 (TRAV9-2, TRAJ49)
CALTGNQVYF

SEQ ID NO: 154774 - protein, 16 aa, Homo sapiens
  CDR3 for beta chain variable domain of TCR clone 77387 (TRBV19, TRBJ2-3)
CASSPGAASRTDTQYF

SEQ ID NO: 154775 - protein, 14 aa, Homo sapiens
  CDR3 for alpha chain variable domain of TCR clone 77388 (TRAV29/DV5, TRAJ20)
CAATIRSNDYKLSF

SEQ ID NO: 154776 - protein, 15 aa, Homo sapiens
  CDR3 for beta chain variable domain of TCR clone 77388 (TRBV20-1, TRBJ2-1)
CSASSAGSSYNEQFL

SEQ ID NO: 154777 - protein, 15 aa, Homo sapiens
  CDR3 for alpha chain variable domain of TCR clone 77389 (TRAV12-3, TRAJ6)
CAMSATSGGSYIPTF

SEQ ID NO: 154778 - protein, 16 aa, Homo sapiens
  CDR3 for beta chain variable domain of TCR clone 77389 (TRBV7-9, TRBJ2-1)
CASSLGTGWDYNEQFF

SEQ ID NO: 154779 - protein, 12 aa, Homo sapiens
  CDR3 for alpha chain variable domain of TCR clone 77390 (TRAV2, TRAJ10)
CASTGGGNKLTF

SEQ ID NO: 154780 - protein, 14 aa, Homo sapiens
  CDR3 for beta chain variable domain of TCR clone 77390 (TRBV7-2, TRBJ2-5)
CASSLSEGGETQYF

SEQ ID NO: 154781 - protein, 13 aa, Homo sapiens
  CDR3 for alpha chain variable domain of TCR clone 77391 (TRAV2, TRAJ16)
CAVEFGGGQKLPF

SEQ ID NO: 154782 - protein, 14 aa, Homo sapiens
  CDR3 for beta chain variable domain of TCR clone 77391 (TRBV6-3, TRBJ2-5)
CASSYSLREKTQYF

SEQ ID NO: 154783 - protein, 12 aa, Homo sapiens
  CDR3 for alpha chain variable domain of TCR clone 77392 (TRAV16, TRAJ56)
CAPTGANSKLTF

SEQ ID NO: 154784 - protein, 17 aa, Homo sapiens
  CDR3 for beta chain variable domain of TCR clone 77392 (TRBV27, TRBJ2-6)
CASSLTGFASRANVLTF

SEQ ID NO: 154785 - protein, 11 aa, Homo sapiens
  CDR3 for alpha chain variable domain of TCR clone 77393 (TRAV12-3, TRAJ43)
CAMSVSNDMRF

SEQ ID NO: 154786 - protein, 13 aa, Homo sapiens
  CDR3 for beta chain variable domain of TCR clone 77393 (TRBV12-4, TRBJ2-3)
CASSSPLGGTQYF

SEQ ID NO: 154787 - protein, 14 aa, Homo sapiens
  CDR3 for alpha chain variable domain of TCR clone 77394 (TRAV12-2, TRAJ13)
CAVKKTGGYQKVTF

SEQ ID NO: 154788 - protein, 15 aa, Homo sapiens
  CDR3 for beta chain variable domain of TCR clone 77394 (TRBV19, TRBJ1-6)
CASSTQGAVGSTLHF

SEQ ID NO: 154789 - protein, 13 aa, Homo sapiens
  CDR3 for alpha chain variable domain of TCR clone 77395 (TRAV38-2/DV8, TRAJ53)
CASGGGSNYKLKF

SEQ ID NO: 154790 - protein, 16 aa, Homo sapiens
  CDR3 for beta chain variable domain of TCR clone 77395 (TRBV28, TRBJ1-5)
CASRFRGAVQNQPQHF

SEQ ID NO: 154791 - protein, 17 aa, Homo sapiens
  CDR3 for alpha chain variable domain of TCR clone 77396 (TRAV3, TRAJ6)
CAVRDDPRAGGSYIPTF

SEQ ID NO: 154792 - protein, 15 aa, Homo sapiens
  CDR3 for beta chain variable domain of TCR clone 77396 (TRBV20-1, TRBJ1-1)
CSASWDRFLNTEAFF

SEQ ID NO: 154793 - protein, 15 aa, Homo sapiens
  CDR3 for alpha chain variable domain of TCR clone 77397 (TRAV3, TRAJ5)
CAVRDLDTGRRALTF

SEQ ID NO: 154794 - protein, 14 aa, Homo sapiens
  CDR3 for beta chain variable domain of TCR clone 77397 (TRBV4-1, TRBJ2-2)
CASSQAVNTGELFF

SEQ ID NO: 154795 - protein, 18 aa, Homo sapiens
  CDR3 for alpha chain variable domain of TCR clone 77398 (TRAV1-1, TRAJ12)
CLLLLRCGRGDSSYKLIF

SEQ ID NO: 154796 - protein, 15 aa, Homo sapiens
  CDR3 for beta chain variable domain of TCR clone 77398 (TRBV18, TRBJ2-5)
CASTDRGPRQETQYF

SEQ ID NO: 154797 - protein, 13 aa, Homo sapiens
  CDR3 for alpha chain variable domain of TCR clone 77399 (TRAV21, TRAJ57)
CAVTQAGSEKLVF

SEQ ID NO: 154798 - protein, 16 aa, Homo sapiens
  CDR3 for beta chain variable domain of TCR clone 77399 (TRBV29-1, TRBJ2-7)
CSVEDAEDGTAYEQYF

SEQ ID NO: 154799 - protein, 17 aa, Homo sapiens
  CDR3 for alpha chain variable domain of TCR clone 77400 (TRAV21, TRAJ52)
CAVGVNAGGTSYGKLTF

SEQ ID NO: 154800 - protein, 13 aa, Homo sapiens
  CDR3 for beta chain variable domain of TCR clone 77400 (TRBV5-1, TRBJ1-2)
CASSFQGNYGDTF

SEQ ID NO: 154801 - protein, 15 aa, Homo sapiens
  CDR3 for alpha chain variable domain of TCR clone 77401 (TRAV8-3, TRAJ27)
CAVCPSKTNAGKSTF

SEQ ID NO: 154802 - protein, 12 aa, Homo sapiens
  CDR3 for beta chain variable domain of TCR clone 77401 (TRBV11-2, TRBJ2-2)
CASSLGGGELFF

SEQ ID NO: 154803 - protein, 17 aa, Homo sapiens
  CDR3 for alpha chain variable domain of TCR clone 77402 (TRAV3, TRAJ12)
CAVRDGVRMDSSYKLIF

SEQ ID NO: 154804 - protein, 14 aa, Homo sapiens
  CDR3 for beta chain variable domain of TCR clone 77402 (TRBV7-9, TRBJ1-2)
CASSRQGANYGYTF

SEQ ID NO: 154805 - protein, 12 aa, Homo sapiens
  CDR3 for alpha chain variable domain of TCR clone 77403 (TRAV13-1, TRAJ11)
CAGPSGYSTLTF

SEQ ID NO: 154806 - protein, 13 aa, Homo sapiens
  CDR3 for beta chain variable domain of TCR clone 77403 (TRBV12-4, TRBJ2-1)
RASSLSPSNEQFF

SEQ ID NO: 154807 - protein, 14 aa, Homo sapiens
  CDR3 for alpha chain variable domain of TCR clone 77404 (TRAV16, TRAJ32)
CTLKSGGATNRLIF

SEQ ID NO: 154808 - protein, 13 aa, Homo sapiens
  CDR3 for beta chain variable domain of TCR clone 77404 (TRBV15, TRBJ1-6)
CATSGGLNSPLHF

SEQ ID NO: 154809 - protein, 14 aa, Homo sapiens
  CDR3 for alpha chain variable domain of TCR clone 77405 (TRAV8-6, TRAJ29)
CAVSRASGNTPLVF

SEQ ID NO: 154810 - protein, 13 aa, Homo sapiens
  CDR3 for beta chain variable domain of TCR clone 77405 (TRBV19, TRBJ1-5)
CASSEGGNQPQHF

SEQ ID NO: 154811 - protein, 15 aa, Homo sapiens
  CDR3 for alpha chain variable domain of TCR clone 77406 (TRAV12-3, TRAJ49)
RAMAVTPNTGNQFYF

SEQ ID NO: 154812 - protein, 18 aa, Homo sapiens
  CDR3 for beta chain variable domain of TCR clone 77406 (TRBV4-1, TRBJ1-5)
CASSQDPRGQGLNQPQHF

SEQ ID NO: 154813 - protein, 14 aa, Homo sapiens
  CDR3 for alpha chain variable domain of TCR clone 77407 (TRAV1-2, TRAJ16)
CAVNRFSDVQKLLF

SEQ ID NO: 154814 - protein, 14 aa, Homo sapiens
  CDR3 for beta chain variable domain of TCR clone 77407 (TRBV14, TRBJ2-1)
CASSQVQGRGEQFF

SEQ ID NO: 154815 - protein, 15 aa, Homo sapiens
  CDR3 for alpha chain variable domain of TCR clone 77408 (TRAV4, TRAJ42)
CLVGGYGGSQGNLIF

SEQ ID NO: 154816 - protein, 15 aa, Homo sapiens
  CDR3 for beta chain variable domain of TCR clone 77408 (TRBV27, TRBJ1-1)
CQQYPDRRVGTEAFF

SEQ ID NO: 154817 - protein, 12 aa, Homo sapiens
  CDR3 for alpha chain variable domain of TCR clone 77409 (TRAV13-1, TRAJ27)
CAAHTNAGKSTF

SEQ ID NO: 154818 - protein, 14 aa, Homo sapiens
  CDR3 for beta chain variable domain of TCR clone 77409 (TRBV19, TRBJ2-2)
CASSGRGIAGELFF

SEQ ID NO: 154819 - protein, 16 aa, Homo sapiens
  CDR3 for alpha chain variable domain of TCR clone 77410 (TRAV38-1, TRAJ37)
CAFKGDGSSNKGKLIF

SEQ ID NO: 154820 - protein, 13 aa, Homo sapiens
  CDR3 for beta chain variable domain of TCR clone 77410 (TRBV12-4, TRBJ2-5)
CASSLFRRETQYF

SEQ ID NO: 154821 - protein, 17 aa, Homo sapiens
  CDR3 for alpha chain variable domain of TCR clone 77411 (TRAV3, TRAJ12)
CAVRAGGRMDSSYKLIF

SEQ ID NO: 154822 - protein, 14 aa, Homo sapiens
  CDR3 for beta chain variable domain of TCR clone 77411 (TRBV7-9, TRBJ1-2)
CASSRQGANYGYTF

SEQ ID NO: 154823 - protein, 15 aa, Homo sapiens
  CDR3 for alpha chain variable domain of TCR clone 77412 (TRAV29/DV5, TRAJ57)
CAASLLRCGSEKLVF

SEQ ID NO: 154824 - protein, 15 aa, Homo sapiens
  CDR3 for beta chain variable domain of TCR clone 77412 (TRBV5-1, TRBJ1-3)
CASSLEGGSGNTIYF

SEQ ID NO: 154825 - protein, 14 aa, Homo sapiens
  CDR3 for alpha chain variable domain of TCR clone 77413 (TRAV10, TRAJ36)
CVVKYEGGANNLFF

SEQ ID NO: 154826 - protein, 12 aa, Homo sapiens
  CDR3 for beta chain variable domain of TCR clone 77413 (TRBV6-3, TRBJ2-7)
CASSLTPYEQYF

SEQ ID NO: 154827 - protein, 13 aa, Homo sapiens
  CDR3 for alpha chain variable domain of TCR clone 77414 (TRAV8-3, TRAJ6)
CAVGSGGSYIPTF

SEQ ID NO: 154828 - protein, 14 aa, Homo sapiens
  CDR3 for beta chain variable domain of TCR clone 77414 (TRBV11-2, TRBJ1-1)
CASNTQRGRTEAFF

SEQ ID NO: 154829 - protein, 15 aa, Homo sapiens
  CDR3 for alpha chain variable domain of TCR clone 77415 (TRAV25, TRAJ53)
CPTSKSGGSNYKLTF

SEQ ID NO: 154830 - protein, 14 aa, Homo sapiens
  CDR3 for beta chain variable domain of TCR clone 77415 (TRBV11-2, TRBJ2-3)
CASSRLARTDTQYF

SEQ ID NO: 154831 - protein, 11 aa, Homo sapiens
  CDR3 for alpha chain variable domain of TCR clone 77416 (TRAV2, TRAJ23)
CAVETRGRLIF

SEQ ID NO: 154832 - protein, 14 aa, Homo sapiens
  CDR3 for beta chain variable domain of TCR clone 77416 (TRBV2, TRBJ2-3)
CASSEGQNTDTQYF

SEQ ID NO: 154833 - protein, 14 aa, Homo sapiens
  CDR3 for alpha chain variable domain of TCR clone 77417 (TRAV1-2, TRAJ8)
CAVREDTGFQKLVF

SEQ ID NO: 154834 - protein, 12 aa, Homo sapiens
  CDR3 for beta chain variable domain of TCR clone 77417 (TRBV2, TRBJ2-1)
CASSESSGPCIF

SEQ ID NO: 154835 - protein, 13 aa, Homo sapiens
  CDR3 for alpha chain variable domain of TCR clone 77418 (TRAV8-3, TRAJ48)
CAVVPFGNGKLTF

SEQ ID NO: 154836 - protein, 14 aa, Homo sapiens
  CDR3 for beta chain variable domain of TCR clone 77418 (TRBV18, TRBJ2-7)
CASSPRGGAYEQYF

SEQ ID NO: 154837 - protein, 17 aa, Homo sapiens
  CDR3 for alpha chain variable domain of TCR clone 77419 (TRAV8-6, TRAJ58)
CAVSSWVGETSGSRLTF

SEQ ID NO: 154838 - protein, 14 aa, Homo sapiens
  CDR3 for beta chain variable domain of TCR clone 77419 (TRBV4-1, TRBJ2-2)
CASSQAVNTGELFF

SEQ ID NO: 154839 - protein, 15 aa, Homo sapiens
  CDR3 for alpha chain variable domain of TCR clone 77420 (TRAV25, TRAJ52)
CAGTSGGTSYGKLTF

SEQ ID NO: 154840 - protein, 16 aa, Homo sapiens
  CDR3 for beta chain variable domain of TCR clone 77420 (TRBV15, TRBJ1-2)
CATSRGPRTGGGDYTF

SEQ ID NO: 154841 - protein, 14 aa, Homo sapiens
  CDR3 for alpha chain variable domain of TCR clone 77421 (TRAV8-2, TRAJ4)
CVVSPSGGYNKLTF

SEQ ID NO: 154842 - protein, 15 aa, Homo sapiens
  CDR3 for beta chain variable domain of TCR clone 77421 (TRBV4-1, TRBJ1-4)
CASSDTGGTNEKLFF

SEQ ID NO: 154843 - protein, 16 aa, Homo sapiens
  CDR3 for alpha chain variable domain of TCR clone 77422 (TRAV3, TRAJ5)
CAARNLMDTGRRALTF

SEQ ID NO: 154844 - protein, 16 aa, Homo sapiens
  CDR3 for beta chain variable domain of TCR clone 77422 (TRBV4-2, TRBJ2-7)
CASSQEGLANSYEQYF

SEQ ID NO: 154845 - protein, 15 aa, Homo sapiens
  CDR3 for alpha chain variable domain of TCR clone 77423 (TRAV8-6, TRAJ6)
CAVSGESGGSYIPTF

SEQ ID NO: 154846 - protein, 14 aa, Homo sapiens
  CDR3 for beta chain variable domain of TCR clone 77423 (TRBV7-9, TRBJ2-1)
CASSSMVGFGKQFF

SEQ ID NO: 154847 - protein, 11 aa, Homo sapiens
  CDR3 for alpha chain variable domain of TCR clone 77424 (TRAV1-2, TRAJ20)
CTVSNDYKLSF

SEQ ID NO: 154848 - protein, 16 aa, Homo sapiens
  CDR3 for beta chain variable domain of TCR clone 77424 (TRBV12-5, TRBJ2-5)
CASGPRTSGNQETQYF

SEQ ID NO: 154849 - protein, 16 aa, Homo sapiens
  CDR3 for alpha chain variable domain of TCR clone 77425 (TRAV8-6, TRAJ27)
CAVSASLTPMQANQPL

SEQ ID NO: 154850 - protein, 15 aa, Homo sapiens
  CDR3 for beta chain variable domain of TCR clone 77425 (TRBV5-1, TRBJ1-1)
CASSWTGRGNTEAFF

SEQ ID NO: 154851 - protein, 15 aa, Homo sapiens
  CDR3 for alpha chain variable domain of TCR clone 77426 (TRAV21, TRAJ45)
CAVSYSGGGADGLTF

SEQ ID NO: 154852 - protein, 13 aa, Homo sapiens
  CDR3 for beta chain variable domain of TCR clone 77426 (TRBV20-1, TRBJ2-5)
CSAATELQEIQYF

SEQ ID NO: 154853 - protein, 15 aa, Homo sapiens
  CDR3 for alpha chain variable domain of TCR clone 77427 (TRAV8-3, TRAJ23)
CAVGDRYNQGGKLIF

SEQ ID NO: 154854 - protein, 15 aa, Homo sapiens
  CDR3 for beta chain variable domain of TCR clone 77427 (TRBV7-8, TRBJ2-3)
CASSLQLDWVDTQYF

SEQ ID NO: 154855 - protein, 18 aa, Homo sapiens
  CDR3 for alpha chain variable domain of TCR clone 77428 (TRAV12-3, TRAJ52)
CAMSVGGAGGTSYGKLTF

SEQ ID NO: 154856 - protein, 14 aa, Homo sapiens
  CDR3 for beta chain variable domain of TCR clone 77428 (TRBV4-1, TRBJ2-2)
CASSQAVNTGELFF

SEQ ID NO: 154857 - protein, 14 aa, Homo sapiens
  CDR3 for alpha chain variable domain of TCR clone 77429 (TRAV2, TRAJ37)
CAVDFTSNTVKLIF

SEQ ID NO: 154858 - protein, 13 aa, Homo sapiens
  CDR3 for beta chain variable domain of TCR clone 77429 (TRBV20-1, TRBJ1-1)
CSAPLGGGTEAFF

SEQ ID NO: 154859 - protein, 16 aa, Homo sapiens
  CDR3 for alpha chain variable domain of TCR clone 77430 (TRAV30, TRAJ24)
CGTEIVDADSWGKFQF

SEQ ID NO: 154860 - protein, 18 aa, Homo sapiens
  CDR3 for beta chain variable domain of TCR clone 77430 (TRBV11-2, TRBJ2-3)
CSSSLGGASRGAPNTQYF

SEQ ID NO: 154861 - protein, 13 aa, Homo sapiens
  CDR3 for alpha chain variable domain of TCR clone 77431 (TRAV8-4, TRAJ49)
CAVITNTGNQFYF

SEQ ID NO: 154862 - protein, 14 aa, Homo sapiens
  CDR3 for beta chain variable domain of TCR clone 77431 (TRBV19, TRBJ2-1)
CASKDPGLANEQFF

SEQ ID NO: 154863 - protein, 17 aa, Homo sapiens
  CDR3 for alpha chain variable domain of TCR clone 77432 (TRAV3, TRAJ6)
CAVRDGPRAGGSYIPTF

SEQ ID NO: 154864 - protein, 15 aa, Homo sapiens
  CDR3 for beta chain variable domain of TCR clone 77432 (TRBV20-1, TRBJ1-1)
CSASWNRFLNTEAFF

SEQ ID NO: 154865 - protein, 15 aa, Homo sapiens
  CDR3 for alpha chain variable domain of TCR clone 77433 (TRAV3, TRAJ15)
CAVRPANQAGTALLF

SEQ ID NO: 154866 - protein, 14 aa, Homo sapiens
  CDR3 for beta chain variable domain of TCR clone 77433 (TRBV4-1, TRBJ2-2)
CASSQAVNTGELFF

SEQ ID NO: 154867 - protein, 18 aa, Homo sapiens
  CDR3 for alpha chain variable domain of TCR clone 77434 (TRAV3, TRAJ17)
CAVRARRGGRSCRQQANF

SEQ ID NO: 154868 - protein, 15 aa, Homo sapiens
  CDR3 for beta chain variable domain of TCR clone 77434 (TRBV10-2, TRBJ2-6)
CASSEQGTGANVLTF

SEQ ID NO: 154869 - protein, 13 aa, Homo sapiens
  CDR3 for alpha chain variable domain of TCR clone 77435 (TRAV12-1, TRAJ26)
CVVRRNYGQNFVF

SEQ ID NO: 154870 - protein, 15 aa, Homo sapiens
  CDR3 for beta chain variable domain of TCR clone 77435 (TRBV11-3, TRBJ2-3)
CASLKDGREGDTQYF

SEQ ID NO: 154871 - protein, 14 aa, Homo sapiens
  CDR3 for alpha chain variable domain of TCR clone 77436 (TRAV1-2, TRAJ8)
CAVREDTGFQKIVF

SEQ ID NO: 154872 - protein, 14 aa, Homo sapiens
  CDR3 for beta chain variable domain of TCR clone 77436 (TRBV7-3, TRBJ2-1)
CASSLAGGTNEQFF

SEQ ID NO: 154873 - protein, 19 aa, Homo sapiens
  CDR3 for alpha chain variable domain of TCR clone 77437 (TRAV21, TRAJ15)
AASQPGDSATNQAGTALIF

SEQ ID NO: 154874 - protein, 16 aa, Homo sapiens
  CDR3 for beta chain variable domain of TCR clone 77437 (TRBV4-1, TRBJ2-7)
CASSRGDILNSYEQYF

SEQ ID NO: 154875 - protein, 10 aa, Homo sapiens
  CDR3 for alpha chain variable domain of TCR clone 77438 (TRAV23/DV6, TRAJ57)
CAASSTLSQG

SEQ ID NO: 154876 - protein, 14 aa, Homo sapiens
  CDR3 for beta chain variable domain of TCR clone 77438 (TRBV20-1, TRBJ2-7)
CSAKRGRSTYEQYF

SEQ ID NO: 154877 - protein, 13 aa, Homo sapiens
  CDR3 for alpha chain variable domain of TCR clone 77439 (TRAV20, TRAJ40)
CAVPFSGTYKHIF

SEQ ID NO: 154878 - protein, 13 aa, Homo sapiens
  CDR3 for beta chain variable domain of TCR clone 77439 (TRBV15, TRBJ2-5)
CATSQIGEETQYF

SEQ ID NO: 154879 - protein, 14 aa, Homo sapiens
  CDR3 for alpha chain variable domain of TCR clone 77440 (TRAV12-3, TRAJ35)
CAMSLIGFGNVLHC

SEQ ID NO: 154880 - protein, 16 aa, Homo sapiens
  CDR3 for beta chain variable domain of TCR clone 77440 (TRBV27, TRBJ2-2)
CASSFRGLVRTGELFF

SEQ ID NO: 154881 - protein, 14 aa, Homo sapiens
  CDR3 for alpha chain variable domain of TCR clone 77441 (TRAV12-3, TRAJ43)
CAMSLGGAGTRLTV

SEQ ID NO: 154882 - protein, 13 aa, Homo sapiens
  CDR3 for beta chain variable domain of TCR clone 77441 (TRBV19, TRBJ1-3)
CASRLSLGNTIYF

SEQ ID NO: 154883 - protein, 12 aa, Homo sapiens
  CDR3 for alpha chain variable domain of TCR clone 77442 (TRAV13-1, TRAJ49)
CAASPMGNQFYF

SEQ ID NO: 154884 - protein, 13 aa, Homo sapiens
  CDR3 for beta chain variable domain of TCR clone 77442 (TRBV20-1, TRBJ2-2)
CSASAACTGELFF

SEQ ID NO: 154885 - protein, 12 aa, Homo sapiens
  CDR3 for alpha chain variable domain of TCR clone 77443 (TRAV41, TRAJ58)
CAVETSGSRLTF

SEQ ID NO: 154886 - protein, 15 aa, Homo sapiens
  CDR3 for beta chain variable domain of TCR clone 77443 (TRBV29-1, TRBJ2-6)
CSVGGRGSGANVLTF

SEQ ID NO: 154887 - protein, 10 aa, Homo sapiens
  CDR3 for alpha chain variable domain of TCR clone 77444 (TRAV5, TRAJ34)
CAEDTDKLIF

SEQ ID NO: 154888 - protein, 12 aa, Homo sapiens
  CDR3 for beta chain variable domain of TCR clone 77444 (TRBV11-2, TRBJ2-2)
CASILGGGELFF

SEQ ID NO: 154889 - protein, 12 aa, Homo sapiens
  CDR3 for alpha chain variable domain of TCR clone 77445 (TRAV21, TRAJ11)
CAATSGYSTLTF

SEQ ID NO: 154890 - protein, 17 aa, Homo sapiens
  CDR3 for beta chain variable domain of TCR clone 77445 (TRBV4-2, TRBJ1-1)
CASTQFGGGSGNTEAFS

SEQ ID NO: 154891 - protein, 17 aa, Homo sapiens
  CDR3 for alpha chain variable domain of TCR clone 77446 (TRAV3, TRAJ6)
CAVRDGPRAGGSYIPTF

SEQ ID NO: 154892 - protein, 15 aa, Homo sapiens
  CDR3 for beta chain variable domain of TCR clone 77446 (TRBV2, TRBJ2-1)
CASSEEREGDNEQFF

SEQ ID NO: 154893 - protein, 10 aa, Homo sapiens
  CDR3 for alpha chain variable domain of TCR clone 77447 (TRAV1-2, TRAJ31)
CVSEDARLMF

SEQ ID NO: 154894 - protein, 14 aa, Homo sapiens
  CDR3 for beta chain variable domain of TCR clone 77447 (TRBV19, TRBJ2-1)
CASPTFVLSGEQFF

SEQ ID NO: 154895 - protein, 12 aa, Homo sapiens
  CDR3 for alpha chain variable domain of TCR clone 77448 (TRAV12-2, TRAJ31)
CAVDTPDARLMF

SEQ ID NO: 154896 - protein, 17 aa, Homo sapiens
  CDR3 for beta chain variable domain of TCR clone 77448 (TRBV20-1, TRBJ1-6)
CSARGGYTFSYNSPLHF

SEQ ID NO: 154897 - protein, 14 aa, Homo sapiens
  CDR3 for alpha chain variable domain of TCR clone 77449 (TRAV17, TRAJ37)
CATDGSSSTGKLIF

SEQ ID NO: 154898 - protein, 13 aa, Homo sapiens
  CDR3 for beta chain variable domain of TCR clone 77449 (TRBV11-2, TRBJ2-1)
CASSLDLVNEQFF

SEQ ID NO: 154899 - protein, 20 aa, Homo sapiens
  CDR3 for alpha chain variable domain of TCR clone 77450 (TRAV16, TRAJ32)
CSRGRLSHVLGGGATNKLIF

SEQ ID NO: 154900 - protein, 15 aa, Homo sapiens
  CDR3 for beta chain variable domain of TCR clone 77450 (TRBV7-9, TRBJ1-2)
CASSLDREPNYGYTF

SEQ ID NO: 154901 - protein, 11 aa, Homo sapiens
  CDR3 for alpha chain variable domain of TCR clone 77451 (TRAV12-3, TRAJ27)
CAMANAGKSTF

SEQ ID NO: 154902 - protein, 14 aa, Homo sapiens
  CDR3 for beta chain variable domain of TCR clone 77451 (TRBV4-1, TRBJ2-2)
CASSQAVNTGELVF

SEQ ID NO: 154903 - protein, 14 aa, Homo sapiens
  CDR3 for alpha chain variable domain of TCR clone 77452 (TRAV16, TRAJ15)
CALSGPQAGTALIF

SEQ ID NO: 154904 - protein, 12 aa, Homo sapiens
  CDR3 for beta chain variable domain of TCR clone 77452 (TRBV18, TRBJ2-5)
CASSPSKGTQYF

SEQ ID NO: 154905 - protein, 13 aa, Homo sapiens
  CDR3 for alpha chain variable domain of TCR clone 77453 (TRAV3, TRAJ20)
CAVRDIGDYKLSF

SEQ ID NO: 154906 - protein, 12 aa, Homo sapiens
  CDR3 for beta chain variable domain of TCR clone 77453 (TRBV3-1, TRBJ1-2)
CASTAGLYGYTF

SEQ ID NO: 154907 - protein, 17 aa, Homo sapiens
  CDR3 for alpha chain variable domain of TCR clone 77454 (TRAV12-2, TRAJ52)
CAVNPYAGGTSYGQLTF

SEQ ID NO: 154908 - protein, 16 aa, Homo sapiens
  CDR3 for beta chain variable domain of TCR clone 77454 (TRBV5-5, TRBJ2-2)
CASSGRREGATGELFF

SEQ ID NO: 154909 - protein, 15 aa, Homo sapiens
  CDR3 for alpha chain variable domain of TCR clone 77455 (TRAV3, TRAJ22)
CAVRDRGGSARQMTF

SEQ ID NO: 154910 - protein, 14 aa, Homo sapiens
  CDR3 for beta chain variable domain of TCR clone 77455 (TRBV19, TRBJ2-1)
CASSRLASINEQFF

SEQ ID NO: 154911 - protein, 14 aa, Homo sapiens
  CDR3 for alpha chain variable domain of TCR clone 77456 (TRAV16, TRAJ26)
CALSSANYGQNFVF

SEQ ID NO: 154912 - protein, 12 aa, Homo sapiens
  CDR3 for beta chain variable domain of TCR clone 77456 (TRBV6-5, TRBJ2-2)
CASRTGTGEPFF

SEQ ID NO: 154913 - protein, 11 aa, Homo sapiens
  CDR3 for alpha chain variable domain of TCR clone 77457 (TRAV3, TRAJ21)
CAVGNFNKFYF

SEQ ID NO: 154914 - protein, 15 aa, Homo sapiens
  CDR3 for beta chain variable domain of TCR clone 77457 (TRBV28, TRBJ2-5)
CASSPGQGSIETQYF

SEQ ID NO: 154915 - protein, 16 aa, Homo sapiens
  CDR3 for alpha chain variable domain of TCR clone 77458 (TRAV12-3, TRAJ53)
CAMSPGSGGSNYKLTF

SEQ ID NO: 154916 - protein, 16 aa, Homo sapiens
  CDR3 for beta chain variable domain of TCR clone 77458 (TRBV11-2, TRBJ1-1)
CASSLRQGGEHSKAFF

SEQ ID NO: 154917 - protein, 15 aa, Homo sapiens
  CDR3 for alpha chain variable domain of TCR clone 77459 (TRAV3, TRAJ5)
CAVRDLDTGRRALTF

SEQ ID NO: 154918 - protein, 17 aa, Homo sapiens
  CDR3 for beta chain variable domain of TCR clone 77459 (TRBV7-8, TRBJ2-6)
CASSAGTGGAGANVLTF

SEQ ID NO: 154919 - protein, 16 aa, Homo sapiens
  CDR3 for alpha chain variable domain of TCR clone 77460 (TRAV17, TRAJ22)
CATGPISSGSARKLTF

SEQ ID NO: 154920 - protein, 13 aa, Homo sapiens
  CDR3 for beta chain variable domain of TCR clone 77460 (TRBV11-2, TRBJ2-1)
CASSLGLAGGRFF

SEQ ID NO: 154921 - protein, 17 aa, Homo sapiens
  CDR3 for alpha chain variable domain of TCR clone 77461 (TRAV16, TRAJ42)
CALSPKLYGGSQGNLIF

SEQ ID NO: 154922 - protein, 15 aa, Homo sapiens
  CDR3 for beta chain variable domain of TCR clone 77461 (TRBV19, TRBJ1-2)
CASSVGQVLNYGYTF

SEQ ID NO: 154923 - protein, 15 aa, Homo sapiens
  CDR3 for alpha chain variable domain of TCR clone 77462 (TRAV2, TRAJ27)
CAVDSITPMQANQPL

SEQ ID NO: 154924 - protein, 15 aa, Homo sapiens
  CDR3 for beta chain variable domain of TCR clone 77462 (TRBV3-1, TRBJ2-1)
CASSTGDTNYNEQFF

SEQ ID NO: 154925 - protein, 15 aa, Homo sapiens
  CDR3 for alpha chain variable domain of TCR clone 77463 (TRAV21, TRAJ53)
CATLNSGGSNYKLTF

SEQ ID NO: 154926 - protein, 13 aa, Homo sapiens
  CDR3 for beta chain variable domain of TCR clone 77463 (TRBV4-1, TRBJ2-2)
CASGQENTGELFF

SEQ ID NO: 154927 - protein, 12 aa, Homo sapiens
  CDR3 for alpha chain variable domain of TCR clone 77464 (TRAV3, TRAJ20)
CAVRDGDYKLSF

SEQ ID NO: 154928 - protein, 13 aa, Homo sapiens
  CDR3 for beta chain variable domain of TCR clone 77464 (TRBV6-1, TRBJ2-7)
CASSADTSYERYF

SEQ ID NO: 154929 - protein, 16 aa, Homo sapiens
  CDR3 for alpha chain variable domain of TCR clone 77465 (TRAV12-3, TRAJ53)
CAMSLGSGGSNYKLTL

SEQ ID NO: 154930 - protein, 11 aa, Homo sapiens
  CDR3 for beta chain variable domain of TCR clone 77465 (TRBV29-1, TRBJ2-5)
CSEDRTGTQYF

SEQ ID NO: 154931 - protein, 13 aa, Homo sapiens
  CDR3 for alpha chain variable domain of TCR clone 77466 (TRAV17, TRAJ9)
CATDYTGGFKTIF

SEQ ID NO: 154932 - protein, 13 aa, Homo sapiens
  CDR3 for beta chain variable domain of TCR clone 77466 (TRBV7-9, TRBJ2-5)
CASLPSGRETQYF

SEQ ID NO: 154933 - protein, 14 aa, Homo sapiens
  CDR3 for alpha chain variable domain of TCR clone 77467 (TRAV26-1, TRAJ38)
CIADNGGNNRKLIW

SEQ ID NO: 154934 - protein, 13 aa, Homo sapiens
  CDR3 for beta chain variable domain of TCR clone 77467 (TRBV20-1, TRBJ1-1)
CSARGGGNTEAFF

SEQ ID NO: 154935 - protein, 15 aa, Homo sapiens
  CDR3 for alpha chain variable domain of TCR clone 77468 (TRAV35, TRAJ52)
CAGPRGGTSYGKLTF

SEQ ID NO: 154936 - protein, 14 aa, Homo sapiens
  CDR3 for beta chain variable domain of TCR clone 77468 (TRBV20-1, TRBJ2-7)
YSAWTALSSYEQYF

SEQ ID NO: 154937 - protein, 14 aa, Homo sapiens
  CDR3 for alpha chain variable domain of TCR clone 77469 (TRAV27, TRAJ36)
CAGPPKRGANNLFF

SEQ ID NO: 154938 - protein, 15 aa, Homo sapiens
  CDR3 for beta chain variable domain of TCR clone 77469 (TRBV18, TRBJ2-7)
YASSPASTPNYEQYF

SEQ ID NO: 154939 - protein, 18 aa, Homo sapiens
  CDR3 for alpha chain variable domain of TCR clone 77470 (TRAV1-2, TRAJ18)
CAVRDMGDRGSTLGGLYF

SEQ ID NO: 154940 - protein, 16 aa, Homo sapiens
  CDR3 for beta chain variable domain of TCR clone 77470 (TRBV29-1, TRBJ1-2)
CSVEANRDIANYGYTF

SEQ ID NO: 154941 - protein, 13 aa, Homo sapiens
  CDR3 for alpha chain variable domain of TCR clone 77471 (TRAV27, TRAJ29)
CAGAHSGNTPLVF

SEQ ID NO: 154942 - protein, 14 aa, Homo sapiens
  CDR3 for beta chain variable domain of TCR clone 77471 (TRBV7-9, TRBJ2-7)
CASSIGRGAGEQYF

SEQ ID NO: 154943 - protein, 15 aa, Homo sapiens
  CDR3 for alpha chain variable domain of TCR clone 77472 (TRAV21, TRAJ53)
CATLNSGGSNYKLTF

SEQ ID NO: 154944 - protein, 15 aa, Homo sapiens
  CDR3 for beta chain variable domain of TCR clone 77472 (TRBV19, TRBJ1-1)
CASTSGQIQNTEAFF

SEQ ID NO: 154945 - protein, 15 aa, Homo sapiens
  CDR3 for alpha chain variable domain of TCR clone 77473 (TRAV12-3, TRAJ27)
CAMRAYNTNAGKSTF

SEQ ID NO: 154946 - protein, 14 aa, Homo sapiens
  CDR3 for beta chain variable domain of TCR clone 77473 (TRBV7-8, TRBJ2-3)
CASSLEAGTDTQYF

SEQ ID NO: 154947 - protein, 15 aa, Homo sapiens
  CDR3 for alpha chain variable domain of TCR clone 77474 (TRAV27, TRAJ38)
CAARRNAGNNRKLIW

SEQ ID NO: 154948 - protein, 12 aa, Homo sapiens
  CDR3 for beta chain variable domain of TCR clone 77474 (TRBV19, TRBJ1-2)
CASSPDVYGYTF

SEQ ID NO: 154949 - protein, 13 aa, Homo sapiens
  CDR3 for alpha chain variable domain of TCR clone 77475 (TRAV2, TRAJ15)
CAVASQAGTALIF

SEQ ID NO: 154950 - protein, 15 aa, Homo sapiens
  CDR3 for beta chain variable domain of TCR clone 77475 (TRBV27, TRBJ2-1)
CASSNGGGPSNEQFF

SEQ ID NO: 154951 - protein, 11 aa, Homo sapiens
  CDR3 for alpha chain variable domain of TCR clone 77476 (TRAV2, TRAJ13)
CASGGYQKVTF

SEQ ID NO: 154952 - protein, 16 aa, Homo sapiens
  CDR3 for beta chain variable domain of TCR clone 77476 (TRBV6-1, TRBJ2-5)
CDSSETLDRGAETQYF

SEQ ID NO: 154953 - protein, 11 aa, Homo sapiens
  CDR3 for alpha chain variable domain of TCR clone 77477 (TRAV23/DV6, TRAJ58)
CAARLLRGETS

SEQ ID NO: 154954 - protein, 13 aa, Homo sapiens
  CDR3 for beta chain variable domain of TCR clone 77477 (TRBV15, TRBJ2-7)
CATSTTGHYEQYF

SEQ ID NO: 154955 - protein, 15 aa, Homo sapiens
  CDR3 for alpha chain variable domain of TCR clone 77478 (TRAV25, TRAJ52)
CAGRPGGTSYGKLTY

SEQ ID NO: 154956 - protein, 17 aa, Homo sapiens
  CDR3 for beta chain variable domain of TCR clone 77478 (TRBV7-8, TRBJ2-6)
CASSAGTGGAGANVLTF

SEQ ID NO: 154957 - protein, 13 aa, Homo sapiens
  CDR3 for alpha chain variable domain of TCR clone 77479 (TRAV13-1, TRAJ32)
QVTDGGATNKLIF

SEQ ID NO: 154958 - protein, 15 aa, Homo sapiens
  CDR3 for beta chain variable domain of TCR clone 77479 (TRBV20-1, TRBJ2-7)
CSARDRVSGMDEQYF

SEQ ID NO: 154959 - protein, 12 aa, Homo sapiens
  CDR3 for alpha chain variable domain of TCR clone 77480 (TRAV8-3, TRAJ26)
CAGDNYGQNFVF

SEQ ID NO: 154960 - protein, 15 aa, Homo sapiens
  CDR3 for beta chain variable domain of TCR clone 77480 (TRBV7-2, TRBJ2-1)
CASSSGIAGGNEQFF

SEQ ID NO: 154961 - protein, 15 aa, Homo sapiens
  CDR3 for alpha chain variable domain of TCR clone 77481 (TRAV21, TRAJ45)
CAVSSSGGGADGLTF

SEQ ID NO: 154962 - protein, 13 aa, Homo sapiens
  CDR3 for beta chain variable domain of TCR clone 77481 (TRBV20-1, TRBJ2-5)
CSAATELQETQYF

SEQ ID NO: 154963 - protein, 11 aa, Homo sapiens
  CDR3 for alpha chain variable domain of TCR clone 77482 (TRAV1-1, TRAJ23)
CAVHQGGKLIF

SEQ ID NO: 154964 - protein, 14 aa, Homo sapiens
  CDR3 for beta chain variable domain of TCR clone 77482 (TRBV19, TRBJ2-1)
CASPTFVLSGEQFF

SEQ ID NO: 154965 - protein, 18 aa, Homo sapiens
  CDR3 for alpha chain variable domain of TCR clone 77483 (TRAV26-2, TRAJ45)
CILRLWGYSGGGADGLTF

SEQ ID NO: 154966 - protein, 17 aa, Homo sapiens
  CDR3 for beta chain variable domain of TCR clone 77483 (TRBV28, TRBJ2-3)
CASSPTPAGGRVDTLYF

SEQ ID NO: 154967 - protein, 14 aa, Homo sapiens
  CDR3 for alpha chain variable domain of TCR clone 77484 (TRAV8-3, TRAJ39)
CAVGANNAGNMLTF

SEQ ID NO: 154968 - protein, 12 aa, Homo sapiens
  CDR3 for beta chain variable domain of TCR clone 77484 (TRBV11-3, TRBJ1-1)
RASSHRQGEAFF

SEQ ID NO: 154969 - protein, 11 aa, Homo sapiens
  CDR3 for alpha chain variable domain of TCR clone 77485 (TRAV12-2, TRAJ39)
CAVNNMLTFGG

SEQ ID NO: 154970 - protein, 16 aa, Homo sapiens
  CDR3 for beta chain variable domain of TCR clone 77485 (TRBV5-3, TRBJ2-2)
CARSFGKGTNTGELFF

SEQ ID NO: 154971 - protein, 14 aa, Homo sapiens
  CDR3 for alpha chain variable domain of TCR clone 77486 (TRAV17, TRAJ35)
CSTDRPGFGNVLHC

SEQ ID NO: 154972 - protein, 15 aa, Homo sapiens
  CDR3 for beta chain variable domain of TCR clone 77486 (TRBV28, TRBJ2-5)
CASSSGRVIQETQYF

SEQ ID NO: 154973 - protein, 23 aa, Homo sapiens
  CDR3 for alpha chain variable domain of TCR clone 77487 (TRAV20, TRAJ32)
CAVDGMVVLQTSSSLELAICLLS

SEQ ID NO: 154974 - protein, 16 aa, Homo sapiens
  CDR3 for beta chain variable domain of TCR clone 77487 (TRBV19, TRBJ2-2)
CASRSPGTGATGELFF

SEQ ID NO: 154975 - protein, 15 aa, Homo sapiens
  CDR3 for alpha chain variable domain of TCR clone 77488 (TRAV3, TRAJ3)
CAVRDRRGSASKIIF

SEQ ID NO: 154976 - protein, 13 aa, Homo sapiens
  CDR3 for beta chain variable domain of TCR clone 77488 (TRBV9, TRBJ2-5)
CASSPAGLGTQYF

SEQ ID NO: 154977 - protein, 14 aa, Homo sapiens
  CDR3 for alpha chain variable domain of TCR clone 77489 (TRAV1-2, TRAJ8)
CAVREDTGFQKLVF

SEQ ID NO: 154978 - protein, 14 aa, Homo sapiens
  CDR3 for beta chain variable domain of TCR clone 77489 (TRBV7-3, TRBJ1-1)
CASSLGTGYTEAFF

SEQ ID NO: 154979 - protein, 14 aa, Homo sapiens
  CDR3 for alpha chain variable domain of TCR clone 77490 (TRAV29/DV5, TRAJ36)
CAARRKTGANNLFF

SEQ ID NO: 154980 - protein, 15 aa, Homo sapiens
  CDR3 for beta chain variable domain of TCR clone 77490 (TRBV7-9, TRBJ2-7)
CASSSSGLAVYEQYF

SEQ ID NO: 154981 - protein, 14 aa, Homo sapiens
  CDR3 for alpha chain variable domain of TCR clone 77491 (TRAV1-2, TRAJ16)
CAVNRFSDGQKLLF

SEQ ID NO: 154982 - protein, 16 aa, Homo sapiens
  CDR3 for beta chain variable domain of TCR clone 77491 (TRBV12-5, TRBJ2-5)
CASGPQTSGNQETQYF

SEQ ID NO: 154983 - protein, 14 aa, Homo sapiens
  CDR3 for alpha chain variable domain of TCR clone 77492 (TRAV1-2, TRAJ8)
CAVREDTGFQKLVF

SEQ ID NO: 154984 - protein, 15 aa, Homo sapiens
  CDR3 for beta chain variable domain of TCR clone 77492 (TRBV5-7, TRBJ1-5)
CASSYGKLWDQPQHF

SEQ ID NO: 154985 - protein, 18 aa, Homo sapiens
  CDR3 for alpha chain variable domain of TCR clone 77493 (TRAV29/DV5, TRAJ52)
CAAGFRGAGGTSYGKLTF

SEQ ID NO: 154986 - protein, 14 aa, Homo sapiens
  CDR3 for beta chain variable domain of TCR clone 77493 (TRBV11-2, TRBJ1-2)
CASSLYRGNYGYTF

SEQ ID NO: 154987 - protein, 11 aa, Homo sapiens
  CDR3 for alpha chain variable domain of TCR clone 77494 (TRAV1-2, TRAJ20)
WAVANDYKLSF

SEQ ID NO: 154988 - protein, 18 aa, Homo sapiens
  CDR3 for beta chain variable domain of TCR clone 77494 (TRBV20-1, TRBJ2-6)
CSAETTPTHGSGANVLTF

SEQ ID NO: 154989 - protein, 16 aa, Homo sapiens
  CDR3 for alpha chain variable domain of TCR clone 77495 (TRAV3, TRAJ21)
CAVRDIERGNFNKFYF

SEQ ID NO: 154990 - protein, 13 aa, Homo sapiens
  CDR3 for beta chain variable domain of TCR clone 77495 (TRBV27, TRBJ2-7)
CASSLTTGYKQYF

SEQ ID NO: 154991 - protein, 13 aa, Homo sapiens
  CDR3 for alpha chain variable domain of TCR clone 77496 (TRAV38-1, TRAJ42)
CARWGGSQGHLIF

SEQ ID NO: 154992 - protein, 17 aa, Homo sapiens
  CDR3 for beta chain variable domain of TCR clone 77496 (TRBV20-1, TRBJ2-1)
CSARDPLAGVWDNEQFF

SEQ ID NO: 154993 - protein, 15 aa, Homo sapiens
  CDR3 for alpha chain variable domain of TCR clone 77497 (TRAV8-3, TRAJ37)
CAVGARASNTGKIIF

SEQ ID NO: 154994 - protein, 15 aa, Homo sapiens
  CDR3 for beta chain variable domain of TCR clone 77497 (TRBV5-4, TRBJ2-3)
CASSLAGRVTDTQYF

SEQ ID NO: 154995 - protein, 13 aa, Homo sapiens
  CDR3 for alpha chain variable domain of TCR clone 77498 (TRAV12-1, TRAJ29)
CVVDGPGNTPLVF

SEQ ID NO: 154996 - protein, 13 aa, Homo sapiens
  CDR3 for beta chain variable domain of TCR clone 77498 (TRBV7-2, TRBJ2-5)
CASSRGGLETQYF

SEQ ID NO: 154997 - protein, 10 aa, Homo sapiens
  CDR3 for alpha chain variable domain of TCR clone 77499 (TRAV17, TRAJ52)
SATSYGKLTF

SEQ ID NO: 154998 - protein, 13 aa, Homo sapiens
  CDR3 for beta chain variable domain of TCR clone 77499 (TRBV29-1, TRBJ2-5)
RSVGGTSAETQYF

SEQ ID NO: 154999 - protein, 14 aa, Homo sapiens
  CDR3 for alpha chain variable domain of TCR clone 77500 (TRAV21, TRAJ9)
CCGGGGTGGFKTIF

SEQ ID NO: 155000 - protein, 13 aa, Homo sapiens
  CDR3 for beta chain variable domain of TCR clone 77500 (TRBV12-4, TRBJ1-2)
CASSYGLTVISTF

SEQ ID NO: 155001 - protein, 12 aa, Homo sapiens
  CDR3 for alpha chain variable domain of TCR clone 77501 (TRAV8-4, TRAJ37)
CALRSNTGKLIF

SEQ ID NO: 155002 - protein, 16 aa, Homo sapiens
  CDR3 for beta chain variable domain of TCR clone 77501 (TRBV7-2, TRBJ2-3)
CASSLVGDASTDTQYF

SEQ ID NO: 155003 - protein, 15 aa, Homo sapiens
  CDR3 for alpha chain variable domain of TCR clone 77502 (TRAV2, TRAJ9)
CAVEDRGTGGFKTIF

SEQ ID NO: 155004 - protein, 16 aa, Homo sapiens
  CDR3 for beta chain variable domain of TCR clone 77502 (TRBV19, TRBJ2-1)
CASSKAGPSSYNEQFF

SEQ ID NO: 155005 - protein, 15 aa, Homo sapiens
  CDR3 for alpha chain variable domain of TCR clone 77503 (TRAV20, TRAJ50)
CSVRQMKTSYDKVIF

SEQ ID NO: 155006 - protein, 17 aa, Homo sapiens
  CDR3 for beta chain variable domain of TCR clone 77503 (TRBV28, TRBJ2-7)
CASSPLHRASGVYEQYF

SEQ ID NO: 155007 - protein, 13 aa, Homo sapiens
  CDR3 for alpha chain variable domain of TCR clone 77504 (TRAV25, TRAJ17)
CAGLRAAGNKLTF

SEQ ID NO: 155008 - protein, 20 aa, Homo sapiens
  CDR3 for beta chain variable domain of TCR clone 77504 (TRBV7-8, TRBJ2-2)
CASSHLFPGPTVHITGELFF

SEQ ID NO: 155009 - protein, 11 aa, Homo sapiens
  CDR3 for alpha chain variable domain of TCR clone 77505 (TRAV21, TRAJ11)
CAVNGYSTLTF

SEQ ID NO: 155010 - protein, 11 aa, Homo sapiens
  CDR3 for beta chain variable domain of TCR clone 77505 (TRBV19, TRBJ1-1)
SASSIGSEAFF

SEQ ID NO: 155011 - protein, 13 aa, Homo sapiens
  CDR3 for alpha chain variable domain of TCR clone 77506 (TRAV2, TRAJ29)
CAVHSSGNTPLVF

SEQ ID NO: 155012 - protein, 14 aa, Homo sapiens
  CDR3 for beta chain variable domain of TCR clone 77506 (TRBV7-9, TRBJ1-1)
CASSLGGLKTEAFF

SEQ ID NO: 155013 - protein, 14 aa, Homo sapiens
  CDR3 for alpha chain variable domain of TCR clone 77507 (TRAV1-1, TRAJ23)
CAVSIYNQGGKLIF

SEQ ID NO: 155014 - protein, 15 aa, Homo sapiens
  CDR3 for beta chain variable domain of TCR clone 77507 (TRBV7-9, TRBJ2-7)
CASSLALAEAYEQYF

SEQ ID NO: 155015 - protein, 14 aa, Homo sapiens
  CDR3 for alpha chain variable domain of TCR clone 77508 (TRAV1-1, TRAJ27)
CAVIYNTNAGKSTF

SEQ ID NO: 155016 - protein, 15 aa, Homo sapiens
  CDR3 for beta chain variable domain of TCR clone 77508 (TRBV7-2, TRBJ2-1)
CASSSVLAGGNEQFF

SEQ ID NO: 155017 - protein, 13 aa, Homo sapiens
  CDR3 for alpha chain variable domain of TCR clone 77509 (TRAV26-2, TRAJ43)
CILRAVNNNDMRF

SEQ ID NO: 155018 - protein, 15 aa, Homo sapiens
  CDR3 for beta chain variable domain of TCR clone 77509 (TRBV18, TRBJ2-3)
CASSPLAGETDTQYF

SEQ ID NO: 155019 - protein, 12 aa, Homo sapiens
  CDR3 for alpha chain variable domain of TCR clone 77510 (TRAV16, TRAJ13)
CITLRGYQKVTF

SEQ ID NO: 155020 - protein, 16 aa, Homo sapiens
  CDR3 for beta chain variable domain of TCR clone 77510 (TRBV12-4, TRBJ1-5)
CASRQPVEGSNQPQHF

SEQ ID NO: 155021 - protein, 11 aa, Homo sapiens
  CDR3 for alpha chain variable domain of TCR clone 77511 (TRAV3, TRAJ21)
CAVGNFNKFYF

SEQ ID NO: 155022 - protein, 16 aa, Homo sapiens
  CDR3 for beta chain variable domain of TCR clone 77511 (TRBV4-1, TRBJ1-5)
CASSQGGHTTNQPQHF

SEQ ID NO: 155023 - protein, 14 aa, Homo sapiens
  CDR3 for alpha chain variable domain of TCR clone 77512 (TRAV12-2, TRAJ5)
CAVNMSTGRRALTF

SEQ ID NO: 155024 - protein, 12 aa, Homo sapiens
  CDR3 for beta chain variable domain of TCR clone 77512 (TRBV19, TRBJ1-5)
CASSIAQQPQHF

SEQ ID NO: 155025 - protein, 17 aa, Homo sapiens
  CDR3 for alpha chain variable domain of TCR clone 77513 (TRAV23/DV6, TRAJ18)
CAASMNHRGSTLGRLYF

SEQ ID NO: 155026 - protein, 17 aa, Homo sapiens
  CDR3 for beta chain variable domain of TCR clone 77513 (TRBV11-2, TRBJ2-1)
CASSLYPPGVEYNEQFF

SEQ ID NO: 155027 - protein, 12 aa, Homo sapiens
  CDR3 for alpha chain variable domain of TCR clone 77514 (TRAV13-2, TRAJ23)
CAERHRGVKLIF

SEQ ID NO: 155028 - protein, 16 aa, Homo sapiens
  CDR3 for beta chain variable domain of TCR clone 77514 (TRBV20-1, TRBJ1-4)
CSAPGQGLLTNEKLFF

SEQ ID NO: 155029 - protein, 14 aa, Homo sapiens
  CDR3 for alpha chain variable domain of TCR clone 77515 (TRAV16, TRAJ57)
CALPTQGGSEKLVL

SEQ ID NO: 155030 - protein, 15 aa, Homo sapiens
  CDR3 for beta chain variable domain of TCR clone 77515 (TRBV28, TRBJ1-3)
CASWGGHLSGNTIYF

SEQ ID NO: 155031 - protein, 14 aa, Homo sapiens
  CDR3 for alpha chain variable domain of TCR clone 77516 (TRAV12-3, TRAJ10)
SHLPLTGGGNKLTF

SEQ ID NO: 155032 - protein, 16 aa, Homo sapiens
  CDR3 for beta chain variable domain of TCR clone 77516 (TRBV10-3, TRBJ2-1)
CATSGVGDGGGGEQFF

SEQ ID NO: 155033 - protein, 14 aa, Homo sapiens
  CDR3 for alpha chain variable domain of TCR clone 77517 (TRAV27, TRAJ15)
CAGFDNQAGTALLF

SEQ ID NO: 155034 - protein, 11 aa, Homo sapiens
  CDR3 for beta chain variable domain of TCR clone 77517 (TRBV29-1, TRBJ1-1)
CSVEVGTRTFF

SEQ ID NO: 155035 - protein, 13 aa, Homo sapiens
  CDR3 for alpha chain variable domain of TCR clone 77518 (TRAV1-2, TRAJ9)
CAALNTGGFKTIF

SEQ ID NO: 155036 - protein, 11 aa, Homo sapiens
  CDR3 for beta chain variable domain of TCR clone 77518 (TRBV12-4, TRBJ2-3)
CASTATDTQYF

SEQ ID NO: 155037 - protein, 11 aa, Homo sapiens
  CDR3 for alpha chain variable domain of TCR clone 77519 (TRAV12-3, TRAJ26)
CAMSHGQNFVF

SEQ ID NO: 155038 - protein, 13 aa, Homo sapiens
  CDR3 for beta chain variable domain of TCR clone 77519 (TRBV11-2, TRBJ2-5)
CASSRGPSETQYF

SEQ ID NO: 155039 - protein, 14 aa, Homo sapiens
  CDR3 for alpha chain variable domain of TCR clone 77520 (TRAV12-2, TRAJ44)
CAVNKAGTASKLTF

SEQ ID NO: 155040 - protein, 14 aa, Homo sapiens
  CDR3 for beta chain variable domain of TCR clone 77520 (TRBV11-2, TRBJ2-3)
CASSRLARTDTQYF

SEQ ID NO: 155041 - protein, 14 aa, Homo sapiens
  CDR3 for alpha chain variable domain of TCR clone 77521 (TRAV26-1, TRAJ38)
CIADNAGNNRKLLW

SEQ ID NO: 155042 - protein, 15 aa, Homo sapiens
  CDR3 for beta chain variable domain of TCR clone 77521 (TRBV7-6, TRBJ1-4)
CASSLGAGAGEKLFF

SEQ ID NO: 155043 - protein, 17 aa, Homo sapiens
  CDR3 for alpha chain variable domain of TCR clone 77522 (TRAV3, TRAJ6)
CAVRDGPRAGGSYIPTF

SEQ ID NO: 155044 - protein, 16 aa, Homo sapiens
  CDR3 for beta chain variable domain of TCR clone 77522 (TRBV20-1, TRBJ2-1)
CSARDLKQGMNNEQFF

SEQ ID NO: 155045 - protein, 17 aa, Homo sapiens
  CDR3 for alpha chain variable domain of TCR clone 77523 (TRAV8-6, TRAJ58)
CAVSSWVGKTSGSRLTF

SEQ ID NO: 155046 - protein, 17 aa, Homo sapiens
  CDR3 for beta chain variable domain of TCR clone 77523 (TRBV11-2, TRBJ2-1)
CASSLYPPGVEYNEQFF

SEQ ID NO: 155047 - protein, 16 aa, Homo sapiens
  CDR3 for alpha chain variable domain of TCR clone 77524 (TRAV13-1, TRAJ48)
CAASIFGNFGNEKLTF

SEQ ID NO: 155048 - protein, 14 aa, Homo sapiens
  CDR3 for beta chain variable domain of TCR clone 77524 (TRBV7-3, TRBJ1-1)
CASSLKGGNTEAVF

SEQ ID NO: 155049 - protein, 15 aa, Homo sapiens
  CDR3 for alpha chain variable domain of TCR clone 77525 (TRAV8-3, TRAJ7)
CAVGSISYGNNRLAF

SEQ ID NO: 155050 - protein, 15 aa, Homo sapiens
  CDR3 for beta chain variable domain of TCR clone 77525 (TRBV7-2, TRBJ2-2)
CASRRPGQNTGELFF

SEQ ID NO: 155051 - protein, 12 aa, Homo sapiens
  CDR3 for alpha chain variable domain of TCR clone 77526 (TRAV36/DV7, TRAJ54)
CAVVRGAQKLVF

SEQ ID NO: 155052 - protein, 13 aa, Homo sapiens
  CDR3 for beta chain variable domain of TCR clone 77526 (TRBV20-1, TRBJ1-1)
CSARGGENTEAFF

SEQ ID NO: 155053 - protein, 14 aa, Homo sapiens
  CDR3 for alpha chain variable domain of TCR clone 77527 (TRAV2, TRAJ9)
CAVEDRSGGFKTIF

SEQ ID NO: 155054 - protein, 14 aa, Homo sapiens
  CDR3 for beta chain variable domain of TCR clone 77527 (TRBV19, TRBJ2-1)
CASPTFVLSGEQSF

SEQ ID NO: 155055 - protein, 15 aa, Homo sapiens
  CDR3 for alpha chain variable domain of TCR clone 77528 (TRAV8-3, TRAJ23)
CAVGDRYNQGGKLIF

SEQ ID NO: 155056 - protein, 22 aa, Homo sapiens
  CDR3 for beta chain variable domain of TCR clone 77528 (TRBV29-1, TRBJ2-5)
TGSNMSPEDSSIYLCSAGTQYF

SEQ ID NO: 155057 - protein, 15 aa, Homo sapiens
  CDR3 for alpha chain variable domain of TCR clone 77529 (TRAV12-3, TRAJ27)
CAMRAYNTNASKSTF

SEQ ID NO: 155058 - protein, 13 aa, Homo sapiens
  CDR3 for beta chain variable domain of TCR clone 77529 (TRBV11-2, TRBJ2-5)
CASSRGPSETQYF

SEQ ID NO: 155059 - protein, 14 aa, Homo sapiens
  CDR3 for alpha chain variable domain of TCR clone 77530 (TRAV23/DV6, TRAJ40)
CAASLTSGTYKYIF

SEQ ID NO: 155060 - protein, 15 aa, Homo sapiens
  CDR3 for beta chain variable domain of TCR clone 77530 (TRBV2, TRBJ2-7)
CASSEGLARSYEQYF

SEQ ID NO: 155061 - protein, 14 aa, Homo sapiens
  CDR3 for alpha chain variable domain of TCR clone 77531 (TRAV13-1, TRAJ44)
CAAKATGTASKLTF

SEQ ID NO: 155062 - protein, 12 aa, Homo sapiens
  CDR3 for beta chain variable domain of TCR clone 77531 (TRBV11-2, TRBJ2-1)
CASSPGNNEQFF

SEQ ID NO: 155063 - protein, 11 aa, Homo sapiens
  CDR3 for alpha chain variable domain of TCR clone 77532 (TRAV21, TRAJ9)
RAVPGGFKTIF

SEQ ID NO: 155064 - protein, 17 aa, Homo sapiens
  CDR3 for beta chain variable domain of TCR clone 77532 (TRBV7-9, TRBJ2-5)
CATSGGARDPVLRARHA

SEQ ID NO: 155065 - protein, 12 aa, Homo sapiens
  CDR3 for alpha chain variable domain of TCR clone 77533 (TRAV1-2, TRAJ33)
CAALDSNYQLIW

SEQ ID NO: 155066 - protein, 14 aa, Homo sapiens
  CDR3 for beta chain variable domain of TCR clone 77533 (TRBV11-2, TRBJ2-5)
CASSRTGGIETQYF

SEQ ID NO: 155067 - protein, 12 aa, Homo sapiens
  CDR3 for alpha chain variable domain of TCR clone 77534 (TRAV3, TRAJ27)
CAVRDGAGKSTF

SEQ ID NO: 155068 - protein, 13 aa, Homo sapiens
  CDR3 for beta chain variable domain of TCR clone 77534 (TRBV10-3, TRBJ1-2)
CAITADLNYGYTF

SEQ ID NO: 155069 - protein, 13 aa, Homo sapiens
  CDR3 for alpha chain variable domain of TCR clone 77535 (TRAV1-2, TRAJ33)
CAVSGDSNYQLIW

SEQ ID NO: 155070 - protein, 16 aa, Homo sapiens
  CDR3 for beta chain variable domain of TCR clone 77535 (TRBV4-2, TRBJ2-7)
CASSQDGVERGYEQYF

SEQ ID NO: 155071 - protein, 15 aa, Homo sapiens
  CDR3 for alpha chain variable domain of TCR clone 77536 (TRAV12-3, TRAJ27)
CAMRAYNTNAGKSTF

SEQ ID NO: 155072 - protein, 14 aa, Homo sapiens
  CDR3 for beta chain variable domain of TCR clone 77536 (TRBV19, TRBJ2-1)
CASPTFVLSGEQFF

SEQ ID NO: 155073 - protein, 16 aa, Homo sapiens
  CDR3 for alpha chain variable domain of TCR clone 77537 (TRAV4, TRAJ22)
CLMGDLYSGSARQLTF

SEQ ID NO: 155074 - protein, 16 aa, Homo sapiens
  CDR3 for beta chain variable domain of TCR clone 77537 (TRBV7-9, TRBJ2-1)
CASSDVAGGSYNEQFF

SEQ ID NO: 155075 - protein, 14 aa, Homo sapiens
  CDR3 for alpha chain variable domain of TCR clone 77538 (TRAV13-1, TRAJ44)
CAAKATGTASKLTF

SEQ ID NO: 155076 - protein, 14 aa, Homo sapiens
  CDR3 for beta chain variable domain of TCR clone 77538 (TRBV12-4, TRBJ1-1)
CASSLGTGGTEAFF

SEQ ID NO: 155077 - protein, 12 aa, Homo sapiens
  CDR3 for alpha chain variable domain of TCR clone 77539 (TRAV12-3, TRAJ17)
CAMTLTGNKLTF

SEQ ID NO: 155078 - protein, 15 aa, Homo sapiens
  CDR3 for beta chain variable domain of TCR clone 77539 (TRBV7-2, TRBJ2-1)
CASSFRESSYNEQFF

SEQ ID NO: 155079 - protein, 16 aa, Homo sapiens
  CDR3 for alpha chain variable domain of TCR clone 77540 (TRAV38-1, TRAJ37)
WAFKGDGSSNTGKLIF

SEQ ID NO: 155080 - protein, 13 aa, Homo sapiens
  CDR3 for beta chain variable domain of TCR clone 77540 (TRBV12-4, TRBJ2-5)
CASSLFRRETQYF

SEQ ID NO: 155081 - protein, 16 aa, Homo sapiens
  CDR3 for alpha chain variable domain of TCR clone 77541 (TRAV30, TRAJ24)
CGTEIEDADSWGKFQF

SEQ ID NO: 155082 - protein, 13 aa, Homo sapiens
  CDR3 for beta chain variable domain of TCR clone 77541 (TRBV6-1, TRBJ2-2)
CANSGHNTGELFF

SEQ ID NO: 155083 - protein, 14 aa, Homo sapiens
  CDR3 for alpha chain variable domain of TCR clone 77542 (TRAV16, TRAJ15)
CALSFNQAGTALIF

SEQ ID NO: 155084 - protein, 17 aa, Homo sapiens
  CDR3 for beta chain variable domain of TCR clone 77542 (TRBV19, TRBJ2-6)
CASSTGQVFSGANVLTF

SEQ ID NO: 155085 - protein, 10 aa, Homo sapiens
  CDR3 for alpha chain variable domain of TCR clone 77543 (TRAV1-2, TRAJ31)
CAFFDARLMS

SEQ ID NO: 155086 - protein, 13 aa, Homo sapiens
  CDR3 for beta chain variable domain of TCR clone 77543 (TRBV7-9, TRBJ1-2)
CASSLKQNYGYTF

SEQ ID NO: 155087 - protein, 14 aa, Homo sapiens
  CDR3 for alpha chain variable domain of TCR clone 77544 (TRAV8-4, TRAJ54)
CAVSEALGAQKLVF

SEQ ID NO: 155088 - protein, 13 aa, Homo sapiens
  CDR3 for beta chain variable domain of TCR clone 77544 (TRBV27, TRBJ2-7)
CASSFVSSYEQYF

SEQ ID NO: 155089 - protein, 11 aa, Homo sapiens
  CDR3 for alpha chain variable domain of TCR clone 77545 (TRAV12-1, TRAJ37)
CVVNTPVKLIF

SEQ ID NO: 155090 - protein, 13 aa, Homo sapiens
  CDR3 for beta chain variable domain of TCR clone 77545 (TRBV12-4, TRBJ1-5)
CASSPDRAQPQHF

SEQ ID NO: 155091 - protein, 15 aa, Homo sapiens
  CDR3 for alpha chain variable domain of TCR clone 77546 (TRAV8-6, TRAJ11)
CAVNFMNSGYSTLTF

SEQ ID NO: 155092 - protein, 15 aa, Homo sapiens
  CDR3 for beta chain variable domain of TCR clone 77546 (TRBV9, TRBJ1-6)
CASSVAGTGDSPLHF

SEQ ID NO: 155093 - protein, 12 aa, Homo sapiens
  CDR3 for alpha chain variable domain of TCR clone 77547 (TRAV12-2, TRAJ10)
WGVTGGGNKLTF

SEQ ID NO: 155094 - protein, 14 aa, Homo sapiens
  CDR3 for beta chain variable domain of TCR clone 77547 (TRBV25-1, TRBJ1-1)
CASTHLGGNTEAFF

SEQ ID NO: 155095 - protein, 16 aa, Homo sapiens
  CDR3 for alpha chain variable domain of TCR clone 77548 (TRAV8-1, TRAJ42)
CAVTSRYGGSQGNLMF

SEQ ID NO: 155096 - protein, 12 aa, Homo sapiens
  CDR3 for beta chain variable domain of TCR clone 77548 (TRBV6-3, TRBJ2-7)
CASSLGRRGLYF

SEQ ID NO: 155097 - protein, 17 aa, Homo sapiens
  CDR3 for alpha chain variable domain of TCR clone 77549 (TRAV3, TRAJ6)
CAVRDGPRAGGSYIPTF

SEQ ID NO: 155098 - protein, 12 aa, Homo sapiens
  CDR3 for beta chain variable domain of TCR clone 77549 (TRBV14, TRBJ2-7)
CASSRLKGEQYF

SEQ ID NO: 155099 - protein, 12 aa, Homo sapiens
  CDR3 for alpha chain variable domain of TCR clone 77550 (TRAV21, TRAJ11)
CAATSGYSTLTF

SEQ ID NO: 155100 - protein, 13 aa, Homo sapiens
  CDR3 for beta chain variable domain of TCR clone 77550 (TRBV12-4, TRBJ1-2)
CASSLRQGKGYTF

SEQ ID NO: 155101 - protein, 13 aa, Homo sapiens
  CDR3 for alpha chain variable domain of TCR clone 77551 (TRAV26-1, TRAJ34)
CIVRPWITDKLIF

SEQ ID NO: 155102 - protein, 14 aa, Homo sapiens
  CDR3 for beta chain variable domain of TCR clone 77551 (TRBV12-4, TRBJ1-4)
CDSSRQGANEKLFF

SEQ ID NO: 155103 - protein, 13 aa, Homo sapiens
  CDR3 for alpha chain variable domain of TCR clone 77552 (TRAV9-2, TRAJ53)
CALSGGSNYKLTF

SEQ ID NO: 155104 - protein, 17 aa, Homo sapiens
  CDR3 for beta chain variable domain of TCR clone 77552 (TRBV11-2, TRBJ2-1)
CASSLYPPGVEYTEQFL

SEQ ID NO: 155105 - protein, 11 aa, Homo sapiens
  CDR3 for alpha chain variable domain of TCR clone 77553 (TRAV1-2, TRAJ31)
CAVNNNARLMF

SEQ ID NO: 155106 - protein, 15 aa, Homo sapiens
  CDR3 for beta chain variable domain of TCR clone 77553 (TRBV19, TRBJ1-5)
CASSIVWADNQPQHF

SEQ ID NO: 155107 - protein, 12 aa, Homo sapiens
  CDR3 for alpha chain variable domain of TCR clone 77554 (TRAV13-2, TRAJ23)
CAERHRGGELIF

SEQ ID NO: 155108 - protein, 14 aa, Homo sapiens
  CDR3 for beta chain variable domain of TCR clone 77554 (TRBV11-2, TRBJ1-2)
CASSLGTANYGYTF

SEQ ID NO: 155109 - protein, 12 aa, Homo sapiens
  CDR3 for alpha chain variable domain of TCR clone 77555 (TRAV12-3, TRAJ20)
CAMVRGDYKLSF

SEQ ID NO: 155110 - protein, 15 aa, Homo sapiens
  CDR3 for beta chain variable domain of TCR clone 77555 (TRBV7-9, TRBJ1-5)
CASSQGHQPNQPQHF

SEQ ID NO: 155111 - protein, 14 aa, Homo sapiens
  CDR3 for alpha chain variable domain of TCR clone 77556 (TRAV2, TRAJ37)
CAVDFTSNTGKLIF

SEQ ID NO: 155112 - protein, 19 aa, Homo sapiens
  CDR3 for beta chain variable domain of TCR clone 77556 (TRBV19, TRBJ2-5)
CASSIGQVTDFFLGETQYF

SEQ ID NO: 155113 - protein, 13 aa, Homo sapiens
  CDR3 for alpha chain variable domain of TCR clone 77557 (TRAV26-2, TRAJ5)
CILDDTGRRALTF

SEQ ID NO: 155114 - protein, 15 aa, Homo sapiens
  CDR3 for beta chain variable domain of TCR clone 77557 (TRBV5-1, TRBJ2-7)
CASSLMTSGSNEQYF

SEQ ID NO: 155115 - protein, 23 aa, Homo sapiens
  CDR3 for alpha chain variable domain of TCR clone 77558 (TRAV26-1, TRAJ38)
CIADNAGNNHIQNPDPAVYHLSD

SEQ ID NO: 155116 - protein, 13 aa, Homo sapiens
  CDR3 for beta chain variable domain of TCR clone 77558 (TRBV20-1, TRBJ1-1)
CSARGGGNTEAFF

SEQ ID NO: 155117 - protein, 12 aa, Homo sapiens
  CDR3 for alpha chain variable domain of TCR clone 77559 (TRAV24, TRAJ22)
CAPGGSARQLTF

SEQ ID NO: 155118 - protein, 14 aa, Homo sapiens
  CDR3 for beta chain variable domain of TCR clone 77559 (TRBV20-1, TRBJ1-1)
CSAQTRIGGTEAFF

SEQ ID NO: 155119 - protein, 18 aa, Homo sapiens
  CDR3 for alpha chain variable domain of TCR clone 77560 (TRAV21, TRAJ52)
CAVRPSPAGGTSYGKLTF

SEQ ID NO: 155120 - protein, 17 aa, Homo sapiens
  CDR3 for beta chain variable domain of TCR clone 77560 (TRBV5-1, TRBJ2-5)
CASSLLGLAANQETQYF

SEQ ID NO: 155121 - protein, 17 aa, Homo sapiens
  CDR3 for alpha chain variable domain of TCR clone 77561 (TRAV3, TRAJ42)
CAVRDRDYGGSQGNLIF

SEQ ID NO: 155122 - protein, 14 aa, Homo sapiens
  CDR3 for beta chain variable domain of TCR clone 77561 (TRBV7-2, TRBJ2-5)
CVSSPRGSSETQYF

SEQ ID NO: 155123 - protein, 14 aa, Homo sapiens
  CDR3 for alpha chain variable domain of TCR clone 77562 (TRAV12-2, TRAJ40)
CAVKIPSGTYKYIF

SEQ ID NO: 155124 - protein, 16 aa, Homo sapiens
  CDR3 for beta chain variable domain of TCR clone 77562 (TRBV20-1, TRBJ1-1)
CSAQTRIGALKLSLDE

SEQ ID NO: 155125 - protein, 12 aa, Homo sapiens
  CDR3 for alpha chain variable domain of TCR clone 77563 (TRAV12-3, TRAJ20)
CAMVRGDYKLSF

SEQ ID NO: 155126 - protein, 14 aa, Homo sapiens
  CDR3 for beta chain variable domain of TCR clone 77563 (TRBV5-5, TRBJ1-5)
CASSGQGVDQPQRF

SEQ ID NO: 155127 - protein, 15 aa, Homo sapiens
  CDR3 for alpha chain variable domain of TCR clone 77564 (TRAV41, TRAJ45)
CAASYSGGGADGLTF

SEQ ID NO: 155128 - protein, 11 aa, Homo sapiens
  CDR3 for beta chain variable domain of TCR clone 77564 (TRBV11-2, TRBJ2-2)
CASSLPGELFF

SEQ ID NO: 155129 - protein, 14 aa, Homo sapiens
  CDR3 for alpha chain variable domain of TCR clone 77565 (TRAV12-3, TRAJ41)
CAMSAGNSGYALNF

SEQ ID NO: 155130 - protein, 14 aa, Homo sapiens
  CDR3 for beta chain variable domain of TCR clone 77565 (TRBV11-2, TRBJ2-3)
CASSRLARTDTQYF

SEQ ID NO: 155131 - protein, 11 aa, Homo sapiens
  CDR3 for alpha chain variable domain of TCR clone 77566 (TRAV21, TRAJ34)
CAVTNTDKPIF

SEQ ID NO: 155132 - protein, 14 aa, Homo sapiens
  CDR3 for beta chain variable domain of TCR clone 77566 (TRBV12-4, TRBJ2-1)
CASSLGQGASEQFF

SEQ ID NO: 155133 - protein, 15 aa, Homo sapiens
  CDR3 for alpha chain variable domain of TCR clone 77567 (TRAV3, TRAJ45)
CAVRTPWGGADGLTF

SEQ ID NO: 155134 - protein, 16 aa, Homo sapiens
  CDR3 for beta chain variable domain of TCR clone 77567 (TRBV6-1, TRBJ2-2)
CASSFGHGANTGELFF

SEQ ID NO: 155135 - protein, 17 aa, Homo sapiens
  CDR3 for alpha chain variable domain of TCR clone 77568 (TRAV3, TRAJ42)
CAVRDRDYGGSQGNLIF

SEQ ID NO: 155136 - protein, 15 aa, Homo sapiens
  CDR3 for beta chain variable domain of TCR clone 77568 (TRBV6-6, TRBJ2-7)
CASSHSYGGSYEQYF

SEQ ID NO: 155137 - protein, 15 aa, Homo sapiens
  CDR3 for alpha chain variable domain of TCR clone 77569 (TRAV4, TRAJ26)
CLVGDMNNYGQNFVV

SEQ ID NO: 155138 - protein, 16 aa, Homo sapiens
  CDR3 for beta chain variable domain of TCR clone 77569 (TRBV28, TRBJ1-4)
CASSSRTGAANEKLFF

SEQ ID NO: 155139 - protein, 12 aa, Homo sapiens
  CDR3 for alpha chain variable domain of TCR clone 77570 (TRAV12-3, TRAJ29)
CAAREGNTPLVF

SEQ ID NO: 155140 - protein, 15 aa, Homo sapiens
  CDR3 for beta chain variable domain of TCR clone 77570 (TRBV9, TRBJ1-6)
CASSVAGTGDSPLHF

SEQ ID NO: 155141 - protein, 15 aa, Homo sapiens
  CDR3 for alpha chain variable domain of TCR clone 77571 (TRAV8-2, TRAJ8)
CVVTGFPTGFQKLVF

SEQ ID NO: 155142 - protein, 16 aa, Homo sapiens
  CDR3 for beta chain variable domain of TCR clone 77571 (TRBV20-1, TRBJ2-4)
CSARAILAGQGDIQYF

SEQ ID NO: 155143 - protein, 12 aa, Homo sapiens
  CDR3 for alpha chain variable domain of TCR clone 77572 (TRAV12-3, TRAJ17)
CAMTLTGNKLTF

SEQ ID NO: 155144 - protein, 18 aa, Homo sapiens
  CDR3 for beta chain variable domain of TCR clone 77572 (TRBV4-3, TRBJ1-6)
CASSHETPASSYNSPLHF

SEQ ID NO: 155145 - protein, 13 aa, Homo sapiens
  CDR3 for alpha chain variable domain of TCR clone 77573 (TRAV13-1, TRAJ12)
CAASPDSSYKLIF

SEQ ID NO: 155146 - protein, 14 aa, Homo sapiens
  CDR3 for beta chain variable domain of TCR clone 77573 (TRBV19, TRBJ2-1)
CASPTFVLSGEQFF

SEQ ID NO: 155147 - protein, 14 aa, Homo sapiens
  CDR3 for alpha chain variable domain of TCR clone 77574 (TRAV12-2, TRAJ40)
CAVKIPSGTYKYIF

SEQ ID NO: 155148 - protein, 17 aa, Homo sapiens
  CDR3 for beta chain variable domain of TCR clone 77574 (TRBV7-3, TRBJ2-3)
CASSLMKRMRGADTQYF

SEQ ID NO: 155149 - protein, 17 aa, Homo sapiens
  CDR3 for alpha chain variable domain of TCR clone 77575 (TRAV3, TRAJ42)
CAVRDRDYGGSQGNHIF

SEQ ID NO: 155150 - protein, 14 aa, Homo sapiens
  CDR3 for beta chain variable domain of TCR clone 77575 (TRBV25-1, TRBJ1-1)
CASTHLGGNTEAFF

SEQ ID NO: 155151 - protein, 13 aa, Homo sapiens
  CDR3 for alpha chain variable domain of TCR clone 77576 (TRAV8-3, TRAJ30)
CCGDMNRDDKIIF

SEQ ID NO: 155152 - protein, 17 aa, Homo sapiens
  CDR3 for beta chain variable domain of TCR clone 77576 (TRBV19, TRBJ2-2)
CASSRNPGGFGTGELFF

SEQ ID NO: 155153 - protein, 10 aa, Homo sapiens
  CDR3 for alpha chain variable domain of TCR clone 77577 (TRAV36/DV7, TRAJ56)
CARPAVELTF

SEQ ID NO: 155154 - protein, 13 aa, Homo sapiens
  CDR3 for beta chain variable domain of TCR clone 77577 (TRBV7-9, TRBJ2-7)
CASSFWSSYEQYF

SEQ ID NO: 155155 - protein, 14 aa, Homo sapiens
  CDR3 for alpha chain variable domain of TCR clone 77578 (TRAV12-2, TRAJ40)
CAVKIPSGTYKYIF

SEQ ID NO: 155156 - protein, 13 aa, Homo sapiens
  CDR3 for beta chain variable domain of TCR clone 77578 (TRBV19, TRBJ2-2)
CASSQRSTGELFF

SEQ ID NO: 155157 - protein, 17 aa, Homo sapiens
  CDR3 for alpha chain variable domain of TCR clone 77579 (TRAV16, TRAJ58)
CITVLSNGETSGSRLTF

SEQ ID NO: 155158 - protein, 17 aa, Homo sapiens
  CDR3 for beta chain variable domain of TCR clone 77579 (TRBV18, TRBJ2-1)
CASSNGLSGGADNEQFF

SEQ ID NO: 155159 - protein, 14 aa, Homo sapiens
  CDR3 for alpha chain variable domain of TCR clone 77580 (TRAV12-1, TRAJ13)
CVVIDSGGYPKVTF

SEQ ID NO: 155160 - protein, 12 aa, Homo sapiens
  CDR3 for beta chain variable domain of TCR clone 77580 (TRBV29-1, TRBJ2-3)
CSVTGGADTQYF

SEQ ID NO: 155161 - protein, 11 aa, Homo sapiens
  CDR3 for alpha chain variable domain of TCR clone 77581 (TRAV12-2, TRAJ43)
CAAYNNNDMRF

SEQ ID NO: 155162 - protein, 14 aa, Homo sapiens
  CDR3 for beta chain variable domain of TCR clone 77581 (TRBV20-1, TRBJ2-1)
CSAHPGLPYNEQFF

SEQ ID NO: 155163 - protein, 14 aa, Homo sapiens
  CDR3 for alpha chain variable domain of TCR clone 77582 (TRAV12-2, TRAJ17)
CAVLFKAAGNKLTF

SEQ ID NO: 155164 - protein, 14 aa, Homo sapiens
  CDR3 for beta chain variable domain of TCR clone 77582 (TRBV11-2, TRBJ1-2)
CASSLGTANYGYTF

SEQ ID NO: 155165 - protein, 12 aa, Homo sapiens
  CDR3 for alpha chain variable domain of TCR clone 77583 (TRAV26-2, TRAJ21)
CILKGNLNKFYF

SEQ ID NO: 155166 - protein, 14 aa, Homo sapiens
  CDR3 for beta chain variable domain of TCR clone 77583 (TRBV7-9, TRBJ1-1)
CASTPLQSYTEAFF

SEQ ID NO: 155167 - protein, 13 aa, Homo sapiens
  CDR3 for alpha chain variable domain of TCR clone 77584 (TRAV12-1, TRAJ34)
CGEPLRNTDKLIF

SEQ ID NO: 155168 - protein, 20 aa, Homo sapiens
  CDR3 for beta chain variable domain of TCR clone 77584 (TRBV19, TRBJ2-1)
CASSISRTVTSTRLNNEQFS

SEQ ID NO: 155169 - protein, 14 aa, Homo sapiens
  CDR3 for alpha chain variable domain of TCR clone 77585 (TRAV9-2, TRAJ39)
CALYIYNAGNMLTF

SEQ ID NO: 155170 - protein, 15 aa, Homo sapiens
  CDR3 for beta chain variable domain of TCR clone 77585 (TRBV11-2, TRBJ2-1)
CASSLGTSGLNEQFF

SEQ ID NO: 155171 - protein, 14 aa, Homo sapiens
  CDR3 for alpha chain variable domain of TCR clone 77586 (TRAV2, TRAJ37)
CAVDFTSNTGKLIF

SEQ ID NO: 155172 - protein, 15 aa, Homo sapiens
  CDR3 for beta chain variable domain of TCR clone 77586 (TRBV20-1, TRBJ1-1)
CSASRGVTGNTEVFF

SEQ ID NO: 155173 - protein, 14 aa, Homo sapiens
  CDR3 for alpha chain variable domain of TCR clone 77587 (TRAV8-1, TRAJ23)
CAVGTYNQGGKPIF

SEQ ID NO: 155174 - protein, 16 aa, Homo sapiens
  CDR3 for beta chain variable domain of TCR clone 77587 (TRBV18, TRBJ1-5)
CASSPSTGNSNQPQHF

SEQ ID NO: 155175 - protein, 14 aa, Homo sapiens
  CDR3 for alpha chain variable domain of TCR clone 77588 (TRAV1-2, TRAJ16)
CAVNRFSDGQKLLF

SEQ ID NO: 155176 - protein, 15 aa, Homo sapiens
  CDR3 for beta chain variable domain of TCR clone 77588 (TRBV7-8, TRBJ2-3)
CASSPRTGSTDTQYF

SEQ ID NO: 155177 - protein, 17 aa, Homo sapiens
  CDR3 for alpha chain variable domain of TCR clone 77589 (TRAV21, TRAJ24)
CAGIRLRSTDSWGKLQL

SEQ ID NO: 155178 - protein, 15 aa, Homo sapiens
  CDR3 for beta chain variable domain of TCR clone 77589 (TRBV7-2, TRBJ2-3)
CASSPRGLSTDTQYF

SEQ ID NO: 155179 - protein, 18 aa, Homo sapiens
  CDR3 for alpha chain variable domain of TCR clone 77590 (TRAV21, TRAJ52)
CAVRPSPAGGTSYGKLTF

SEQ ID NO: 155180 - protein, 14 aa, Homo sapiens
  CDR3 for beta chain variable domain of TCR clone 77590 (TRBV4-1, TRBJ2-2)
CASRRGRASGELFF

SEQ ID NO: 155181 - protein, 14 aa, Homo sapiens
  CDR3 for alpha chain variable domain of TCR clone 77591 (TRAV2, TRAJ22)
CAVGRGGSARQLTF

SEQ ID NO: 155182 - protein, 15 aa, Homo sapiens
  CDR3 for beta chain variable domain of TCR clone 77591 (TRBV14, TRBJ1-1)
CASSQDGMGRREAFF

SEQ ID NO: 155183 - protein, 20 aa, Homo sapiens
  CDR3 for alpha chain variable domain of TCR clone 77592 (TRAV27, TRAJ10)
ASTSVPSRGILTGGGNKLTF

SEQ ID NO: 155184 - protein, 12 aa, Homo sapiens
  CDR3 for beta chain variable domain of TCR clone 77592 (TRBV5-1, TRBJ1-2)
CASSQDTYGYTF

SEQ ID NO: 155185 - protein, 15 aa, Homo sapiens
  CDR3 for alpha chain variable domain of TCR clone 77593 (TRAV2, TRAJ9)
CAVEDRGTGGFKTIF

SEQ ID NO: 155186 - protein, 16 aa, Homo sapiens
  CDR3 for beta chain variable domain of TCR clone 77593 (TRBV24-1, TRBJ2-3)
CATSDPGIGATDTQYF

SEQ ID NO: 155187 - protein, 12 aa, Homo sapiens
  CDR3 for alpha chain variable domain of TCR clone 77594 (TRAV1-1, TRAJ8)
CAGGTGFQKLVL

SEQ ID NO: 155188 - protein, 13 aa, Homo sapiens
  CDR3 for beta chain variable domain of TCR clone 77594 (TRBV7-3, TRBJ1-1)
CASSQDWGAEAFF

SEQ ID NO: 155189 - protein, 12 aa, Homo sapiens
  CDR3 for alpha chain variable domain of TCR clone 77595 (TRAV21, TRAJ11)
CAATSGYSTLTF

SEQ ID NO: 155190 - protein, 14 aa, Homo sapiens
  CDR3 for beta chain variable domain of TCR clone 77595 (TRBV20-1, TRBJ2-7)
CRAPELAGVGEQYF

SEQ ID NO: 155191 - protein, 14 aa, Homo sapiens
  CDR3 for alpha chain variable domain of TCR clone 77596 (TRAV2, TRAJ9)
CAVEDRSGGSKTIF

SEQ ID NO: 155192 - protein, 15 aa, Homo sapiens
  CDR3 for beta chain variable domain of TCR clone 77596 (TRBV28, TRBJ1-3)
CASSMGWASGNTIYF

SEQ ID NO: 155193 - protein, 13 aa, Homo sapiens
  CDR3 for alpha chain variable domain of TCR clone 77597 (TRAV36/DV7, TRAJ40)
CAVDISGTYKYIF

SEQ ID NO: 155194 - protein, 12 aa, Homo sapiens
  CDR3 for beta chain variable domain of TCR clone 77597 (TRBV7-9, TRBJ1-5)
CASSSDQAPQHF

SEQ ID NO: 155195 - protein, 14 aa, Homo sapiens
  CDR3 for alpha chain variable domain of TCR clone 77598 (TRAV2, TRAJ9)
CAVEDRSGGFETIF

SEQ ID NO: 155196 - protein, 11 aa, Homo sapiens
  CDR3 for beta chain variable domain of TCR clone 77598 (TRBV7-9, TRBJ2-5)
CASSLGETQYF

SEQ ID NO: 155197 - protein, 14 aa, Homo sapiens
  CDR3 for alpha chain variable domain of TCR clone 77599 (TRAV17, TRAJ31)
CATVLRNNNARLMF

SEQ ID NO: 155198 - protein, 12 aa, Homo sapiens
  CDR3 for beta chain variable domain of TCR clone 77599 (TRBV14, TRBJ2-7)
CASSSLKGEQYF

SEQ ID NO: 155199 - protein, 16 aa, Homo sapiens
  CDR3 for alpha chain variable domain of TCR clone 77600 (TRAV30, TRAJ24)
CGTEIVDADSWGKFPF

SEQ ID NO: 155200 - protein, 15 aa, Homo sapiens
  CDR3 for beta chain variable domain of TCR clone 77600 (TRBV7-9, TRBJ1-4)
CASSARTGGNEKLFF

SEQ ID NO: 155201 - protein, 14 aa, Homo sapiens
  CDR3 for alpha chain variable domain of TCR clone 77601 (TRAV38-1, TRAJ45)
CASHSGGGADGLTF

SEQ ID NO: 155202 - protein, 13 aa, Homo sapiens
  CDR3 for beta chain variable domain of TCR clone 77601 (TRBV10-3, TRBJ1-2)
CAISEGDSYGYTF

SEQ ID NO: 155203 - protein, 20 aa, Homo sapiens
  CDR3 for alpha chain variable domain of TCR clone 77602 (TRAV26-1, TRAJ38)
CIADNAGNNHIQNPDPAVYQ

SEQ ID NO: 155204 - protein, 14 aa, Homo sapiens
  CDR3 for beta chain variable domain of TCR clone 77602 (TRBV25-1, TRBJ1-1)
CASIHLGGNTEAFF

SEQ ID NO: 155205 - protein, 22 aa, Homo sapiens
  CDR3 for alpha chain variable domain of TCR clone 77603 (TRAV8-3, TRAJ32)
CAVEVVLQTSPSLELALCLLSS

SEQ ID NO: 155206 - protein, 15 aa, Homo sapiens
  CDR3 for beta chain variable domain of TCR clone 77603 (TRBV7-2, TRBJ2-1)
CASSSRTSREDEQFF

SEQ ID NO: 155207 - protein, 15 aa, Homo sapiens
  CDR3 for alpha chain variable domain of TCR clone 77604 (TRAV12-2, TRAJ50)
CAVNGLETSYDKVIF

SEQ ID NO: 155208 - protein, 14 aa, Homo sapiens
  CDR3 for beta chain variable domain of TCR clone 77604 (TRBV7-6, TRBJ2-3)
CASSLGTVTDTQYF

SEQ ID NO: 155209 - protein, 14 aa, Homo sapiens
  CDR3 for alpha chain variable domain of TCR clone 77605 (TRAV13-1, TRAJ35)
CAASKGGFGNVLHC

SEQ ID NO: 155210 - protein, 13 aa, Homo sapiens
  CDR3 for beta chain variable domain of TCR clone 77605 (TRBV7-3, TRBJ1-1)
CASSQEWGAEAFF

SEQ ID NO: 155211 - protein, 15 aa, Homo sapiens
  CDR3 for alpha chain variable domain of TCR clone 77606 (TRAV21, TRAJ57)
CAVIITQGGSEKLVF

SEQ ID NO: 155212 - protein, 14 aa, Homo sapiens
  CDR3 for beta chain variable domain of TCR clone 77606 (TRBV5-1, TRBJ2-2)
CASSLIGIPGELFF

SEQ ID NO: 155213 - protein, 11 aa, Homo sapiens
  CDR3 for alpha chain variable domain of TCR clone 77607 (TRAV29/DV5, TRAJ47)
CAATYGNKLVF

SEQ ID NO: 155214 - protein, 17 aa, Homo sapiens
  CDR3 for beta chain variable domain of TCR clone 77607 (TRBV7-9, TRBJ2-1)
CASSLVAIYPSYNEQFF

SEQ ID NO: 155215 - protein, 14 aa, Homo sapiens
  CDR3 for alpha chain variable domain of TCR clone 77608 (TRAV1-2, TRAJ16)
CAVNRFSDGQKLLF

SEQ ID NO: 155216 - protein, 14 aa, Homo sapiens
  CDR3 for beta chain variable domain of TCR clone 77608 (TRBV7-2, TRBJ2-7)
CASGPKTSFYEQYF

SEQ ID NO: 155217 - protein, 12 aa, Homo sapiens
  CDR3 for alpha chain variable domain of TCR clone 77609 (TRAV29/DV5, TRAJ34)
CAASGNTDKLIF

SEQ ID NO: 155218 - protein, 13 aa, Homo sapiens
  CDR3 for beta chain variable domain of TCR clone 77609 (TRBV20-1, TRBJ1-1)
CSARVGGNTEAFF

SEQ ID NO: 155219 - protein, 11 aa, Homo sapiens
  CDR3 for alpha chain variable domain of TCR clone 77610 (TRAV23/DV6, TRAJ43)
CAASWNNDMRF

SEQ ID NO: 155220 - protein, 15 aa, Homo sapiens
  CDR3 for beta chain variable domain of TCR clone 77610 (TRBV2, TRBJ2-1)
CASSELAGSYNEQFF

SEQ ID NO: 155221 - protein, 14 aa, Homo sapiens
  CDR3 for alpha chain variable domain of TCR clone 77611 (TRAV1-2, TRAJ16)
CAVNRFSDGQKLLF

SEQ ID NO: 155222 - protein, 13 aa, Homo sapiens
  CDR3 for beta chain variable domain of TCR clone 77611 (TRBV7-6, TRBJ2-7)
CASSLDHTHEQYF

SEQ ID NO: 155223 - protein, 12 aa, Homo sapiens
  CDR3 for alpha chain variable domain of TCR clone 77612 (TRAV13-1, TRAJ21)
CAAKEGFNKFYF

SEQ ID NO: 155224 - protein, 14 aa, Homo sapiens
  CDR3 for beta chain variable domain of TCR clone 77612 (TRBV5-1, TRBJ1-6)
CASARDRNNSPLHF

SEQ ID NO: 155225 - protein, 13 aa, Homo sapiens
  CDR3 for alpha chain variable domain of TCR clone 77613 (TRAV1-1, TRAJ31)
FASYLNNNARLMF

SEQ ID NO: 155226 - protein, 13 aa, Homo sapiens
  CDR3 for beta chain variable domain of TCR clone 77613 (TRBV15, TRBJ1-6)
CATSGGLNSPLHF

SEQ ID NO: 155227 - protein, 15 aa, Homo sapiens
  CDR3 for alpha chain variable domain of TCR clone 77614 (TRAV2, TRAJ15)
CAVEDRGQAGTALIF

SEQ ID NO: 155228 - protein, 13 aa, Homo sapiens
  CDR3 for beta chain variable domain of TCR clone 77614 (TRBV10-2, TRBJ2-7)
CASGASGGYEQYC

SEQ ID NO: 155229 - protein, 13 aa, Homo sapiens
  CDR3 for alpha chain variable domain of TCR clone 77615 (TRAV35, TRAJ44)
CAGLSGTASNLTF

SEQ ID NO: 155230 - protein, 17 aa, Homo sapiens
  CDR3 for beta chain variable domain of TCR clone 77615 (TRBV7-8, TRBJ1-2)
CASSLRPLQGHLYGYTF

SEQ ID NO: 155231 - protein, 11 aa, Homo sapiens
  CDR3 for alpha chain variable domain of TCR clone 77616 (TRAV17, TRAJ9)
CATTGGFKTIF

SEQ ID NO: 155232 - protein, 13 aa, Homo sapiens
  CDR3 for beta chain variable domain of TCR clone 77616 (TRBV7-9, TRBJ2-3)
CASSPGSTDTQYF

SEQ ID NO: 155233 - protein, 12 aa, Homo sapiens
  CDR3 for alpha chain variable domain of TCR clone 77617 (TRAV12-3, TRAJ17)
CAMTLTGNKLTF

SEQ ID NO: 155234 - protein, 15 aa, Homo sapiens
  CDR3 for beta chain variable domain of TCR clone 77617 (TRBV20-1, TRBJ2-5)
CSAGLAGVSQETQYF

SEQ ID NO: 155235 - protein, 14 aa, Homo sapiens
  CDR3 for alpha chain variable domain of TCR clone 77618 (TRAV12-2, TRAJ13)
CAVNPSGGSQKVTF

SEQ ID NO: 155236 - protein, 13 aa, Homo sapiens
  CDR3 for beta chain variable domain of TCR clone 77618 (TRBV20-1, TRBJ1-6)
CSAKLGGTSPLHF

SEQ ID NO: 155237 - protein, 14 aa, Homo sapiens
  CDR3 for alpha chain variable domain of TCR clone 77619 (TRAV12-2, TRAJ53)
CAVKGGGTNYKLTF

SEQ ID NO: 155238 - protein, 14 aa, Homo sapiens
  CDR3 for beta chain variable domain of TCR clone 77619 (TRBV7-7, TRBJ2-2)
CATRQDSDTGELFF

SEQ ID NO: 155239 - protein, 13 aa, Homo sapiens
  CDR3 for alpha chain variable domain of TCR clone 77620 (TRAV21, TRAJ27)
CAALNTNAGKSTF

SEQ ID NO: 155240 - protein, 13 aa, Homo sapiens
  CDR3 for beta chain variable domain of TCR clone 77620 (TRBV4-2, TRBJ1-1)
CASSQAGNTEAFF

SEQ ID NO: 155241 - protein, 15 aa, Homo sapiens
  CDR3 for alpha chain variable domain of TCR clone 77621 (TRAV20, TRAJ6)
CAVRLQSGGSYIPTF

SEQ ID NO: 155242 - protein, 14 aa, Homo sapiens
  CDR3 for beta chain variable domain of TCR clone 77621 (TRBV12-4, TRBJ2-7)
CASSASGGWYEQCF

SEQ ID NO: 155243 - protein, 12 aa, Homo sapiens
  CDR3 for alpha chain variable domain of TCR clone 77622 (TRAV12-3, TRAJ17)
CAMTLTGIKLTF

SEQ ID NO: 155244 - protein, 14 aa, Homo sapiens
  CDR3 for beta chain variable domain of TCR clone 77622 (TRBV27, TRBJ2-2)
CASRPGVNTGELFF

SEQ ID NO: 155245 - protein, 13 aa, Homo sapiens
  CDR3 for alpha chain variable domain of TCR clone 77623 (TRAV3, TRAJ21)
CAVREPDFNKFYF

SEQ ID NO: 155246 - protein, 13 aa, Homo sapiens
  CDR3 for beta chain variable domain of TCR clone 77623 (TRBV10-3, TRBJ2-7)
CASKLAVNYEQYF

SEQ ID NO: 155247 - protein, 15 aa, Homo sapiens
  CDR3 for alpha chain variable domain of TCR clone 77624 (TRAV17, TRAJ56)
CSTEPFTGANSKLTF

SEQ ID NO: 155248 - protein, 14 aa, Homo sapiens
  CDR3 for beta chain variable domain of TCR clone 77624 (TRBV19, TRBJ2-1)
CASPTFVLSGEQFF

SEQ ID NO: 155249 - protein, 10 aa, Homo sapiens
  CDR3 for alpha chain variable domain of TCR clone 77625 (TRAV23/DV6, TRAJ57)
CAASSTLSQG

SEQ ID NO: 155250 - protein, 14 aa, Homo sapiens
  CDR3 for beta chain variable domain of TCR clone 77625 (TRBV19, TRBJ2-1)
CASSKDRGQDEQLF

SEQ ID NO: 155251 - protein, 22 aa, Homo sapiens
  CDR3 for alpha chain variable domain of TCR clone 77626 (TRAV8-3, TRAJ32)
CAVEVVLQTSPSLELALCLLSS

SEQ ID NO: 155252 - protein, 12 aa, Homo sapiens
  CDR3 for beta chain variable domain of TCR clone 77626 (TRBV7-8, TRBJ2-7)
CASSLGDREQYF

SEQ ID NO: 155253 - protein, 14 aa, Homo sapiens
  CDR3 for alpha chain variable domain of TCR clone 77627 (TRAV1-2, TRAJ8)
CAVREDTGFQKLVF

SEQ ID NO: 155254 - protein, 15 aa, Homo sapiens
  CDR3 for beta chain variable domain of TCR clone 77627 (TRBV6-3, TRBJ2-7)
CASSSPRTVFYEQYS

SEQ ID NO: 155255 - protein, 14 aa, Homo sapiens
  CDR3 for alpha chain variable domain of TCR clone 77628 (TRAV26-1, TRAJ34)
CIVRVAYNTDKLIF

SEQ ID NO: 155256 - protein, 15 aa, Homo sapiens
  CDR3 for beta chain variable domain of TCR clone 77628 (TRBV20-1, TRBJ2-7)
CSARVPAAYFYELYF

SEQ ID NO: 155257 - protein, 16 aa, Homo sapiens
  CDR3 for alpha chain variable domain of TCR clone 77629 (TRAV30, TRAJ24)
CGTEIVDADSWGKFQF

SEQ ID NO: 155258 - protein, 13 aa, Homo sapiens
  CDR3 for beta chain variable domain of TCR clone 77629 (TRBV7-2, TRBJ2-1)
CASNRDRWNEQFF

SEQ ID NO: 155259 - protein, 16 aa, Homo sapiens
  CDR3 for alpha chain variable domain of TCR clone 77630 (TRAV3, TRAJ10)
CAVRDMRAGGGNKLTF

SEQ ID NO: 155260 - protein, 14 aa, Homo sapiens
  CDR3 for beta chain variable domain of TCR clone 77630 (TRBV25-1, TRBJ1-1)
CASAHLVGNTEAFF

SEQ ID NO: 155261 - protein, 14 aa, Homo sapiens
  CDR3 for alpha chain variable domain of TCR clone 77631 (TRAV17, TRAJ31)
CATVLRHNNARLMF

SEQ ID NO: 155262 - protein, 14 aa, Homo sapiens
  CDR3 for beta chain variable domain of TCR clone 77631 (TRBV12-4, TRBJ2-5)
CASSLWQKQETQYF

SEQ ID NO: 155263 - protein, 15 aa, Homo sapiens
  CDR3 for alpha chain variable domain of TCR clone 77632 (TRAV26-1, TRAJ48)
CIVRVGDFGNEKLTF

SEQ ID NO: 155264 - protein, 16 aa, Homo sapiens
  CDR3 for beta chain variable domain of TCR clone 77632 (TRBV4-1, TRBJ2-3)
RASSQRAGGLTDTQYF

SEQ ID NO: 155265 - protein, 14 aa, Homo sapiens
  CDR3 for alpha chain variable domain of TCR clone 77633 (TRAV2, TRAJ42)
CAGVGGGSQGNLIF

SEQ ID NO: 155266 - protein, 15 aa, Homo sapiens
  CDR3 for beta chain variable domain of TCR clone 77633 (TRBV11-3, TRBJ2-3)
CASSFRAAFPDTQYF

SEQ ID NO: 155267 - protein, 13 aa, Homo sapiens
  CDR3 for alpha chain variable domain of TCR clone 77634 (TRAV21, TRAJ57)
CAVTQGRSEKLVF

SEQ ID NO: 155268 - protein, 15 aa, Homo sapiens
  CDR3 for beta chain variable domain of TCR clone 77634 (TRBV5-1, TRBJ1-1)
CASSSTTGTNTEAFF

SEQ ID NO: 155269 - protein, 13 aa, Homo sapiens
  CDR3 for alpha chain variable domain of TCR clone 77635 (TRAV26-1, TRAJ36)
CIVVGTGATNLFF

SEQ ID NO: 155270 - protein, 13 aa, Homo sapiens
  CDR3 for beta chain variable domain of TCR clone 77635 (TRBV6-5, TRBJ2-6)
CASSTSGPLRLDF

SEQ ID NO: 155271 - protein, 18 aa, Homo sapiens
  CDR3 for alpha chain variable domain of TCR clone 77636 (TRAV21, TRAJ52)
CAVRPSPASGTSYGKLTF

SEQ ID NO: 155272 - protein, 13 aa, Homo sapiens
  CDR3 for beta chain variable domain of TCR clone 77636 (TRBV29-1, TRBJ2-2)
CSVYREDTGELFF

SEQ ID NO: 155273 - protein, 17 aa, Homo sapiens
  CDR3 for alpha chain variable domain of TCR clone 77637 (TRAV3, TRAJ6)
CAVRDGPRAGGSYIPTF

SEQ ID NO: 155274 - protein, 13 aa, Homo sapiens
  CDR3 for beta chain variable domain of TCR clone 77637 (TRBV11-2, TRBJ2-1)
CASSLRLTHEQFF

SEQ ID NO: 155275 - protein, 11 aa, Homo sapiens
  CDR3 for alpha chain variable domain of TCR clone 77638 (TRAV13-1, TRAJ39)
CASHAGNMHTF

SEQ ID NO: 155276 - protein, 14 aa, Homo sapiens
  CDR3 for beta chain variable domain of TCR clone 77638 (TRBV11-2, TRBJ1-5)
CASSLDRGRQPQHF

SEQ ID NO: 155277 - protein, 14 aa, Homo sapiens
  CDR3 for alpha chain variable domain of TCR clone 77639 (TRAV14/DV4, TRAJ15)
CAMRRDQAGTALIF

SEQ ID NO: 155278 - protein, 14 aa, Homo sapiens
  CDR3 for beta chain variable domain of TCR clone 77639 (TRBV18, TRBJ2-5)
CASSPGVSQETQYF

SEQ ID NO: 155279 - protein, 13 aa, Homo sapiens
  CDR3 for alpha chain variable domain of TCR clone 77640 (TRAV30, TRAJ24)
CGTVTDSWGKLQF

SEQ ID NO: 155280 - protein, 15 aa, Homo sapiens
  CDR3 for beta chain variable domain of TCR clone 77640 (TRBV4-1, TRBJ2-1)
CTSSQDPGNYNEQFF

SEQ ID NO: 155281 - protein, 14 aa, Homo sapiens
  CDR3 for alpha chain variable domain of TCR clone 77641 (TRAV12-1, TRAJ43)
CVVNGRSNSNDTRF

SEQ ID NO: 155282 - protein, 13 aa, Homo sapiens
  CDR3 for beta chain variable domain of TCR clone 77641 (TRBV27, TRBJ1-1)
CASSLSIGAEAFF

SEQ ID NO: 155283 - protein, 13 aa, Homo sapiens
  CDR3 for alpha chain variable domain of TCR clone 77642 (TRAV12-3, TRAJ43)
CAMIRPNNNDMRF

SEQ ID NO: 155284 - protein, 12 aa, Homo sapiens
  CDR3 for beta chain variable domain of TCR clone 77642 (TRBV11-2, TRBJ2-5)
CASSLGQENQYF

SEQ ID NO: 155285 - protein, 13 aa, Homo sapiens
  CDR3 for alpha chain variable domain of TCR clone 77643 (TRAV21, TRAJ27)
CAARPGNAGKSTF

SEQ ID NO: 155286 - protein, 13 aa, Homo sapiens
  CDR3 for beta chain variable domain of TCR clone 77643 (TRBV7-7, TRBJ2-5)
CASSRSGQETQYF

SEQ ID NO: 155287 - protein, 13 aa, Homo sapiens
  CDR3 for alpha chain variable domain of TCR clone 77644 (TRAV12-3, TRAJ9)
CAMGNTGGFKTIF

SEQ ID NO: 155288 - protein, 15 aa, Homo sapiens
  CDR3 for beta chain variable domain of TCR clone 77644 (TRBV20-1, TRBJ2-7)
CSARDRVSGMDEQYF

SEQ ID NO: 155289 - protein, 13 aa, Homo sapiens
  CDR3 for alpha chain variable domain of TCR clone 77645 (TRAV8-3, TRAJ28)
CAVGAVGSYQLTF

SEQ ID NO: 155290 - protein, 14 aa, Homo sapiens
  CDR3 for beta chain variable domain of TCR clone 77645 (TRBV7-2, TRBJ2-7)
FASRSQGAAYEQYF

SEQ ID NO: 155291 - protein, 13 aa, Homo sapiens
  CDR3 for alpha chain variable domain of TCR clone 77646 (TRAV27, TRAJ45)
CRSSVGGADGLTF

SEQ ID NO: 155292 - protein, 15 aa, Homo sapiens
  CDR3 for beta chain variable domain of TCR clone 77646 (TRBV20-1, TRBJ2-7)
CSARDRVSGMDEQYF

SEQ ID NO: 155293 - protein, 18 aa, Homo sapiens
  CDR3 for alpha chain variable domain of TCR clone 77647 (TRAV35, TRAJ28)
CAGHNYPLSGAGSYQITF

SEQ ID NO: 155294 - protein, 12 aa, Homo sapiens
  CDR3 for beta chain variable domain of TCR clone 77647 (TRBV7-9, TRBJ1-1)
CASSLEGTEAFF

SEQ ID NO: 155295 - protein, 16 aa, Homo sapiens
  CDR3 for alpha chain variable domain of TCR clone 77648 (TRAV30, TRAJ24)
CGTEIVDADSWGKFQF

SEQ ID NO: 155296 - protein, 17 aa, Homo sapiens
  CDR3 for beta chain variable domain of TCR clone 77648 (TRBV28, TRBJ2-1)
CASSSARQALTYNEQFF

SEQ ID NO: 155297 - protein, 14 aa, Homo sapiens
  CDR3 for alpha chain variable domain of TCR clone 77649 (TRAV16, TRAJ54)
CALSGLQGAQKLVF

SEQ ID NO: 155298 - protein, 15 aa, Homo sapiens
  CDR3 for beta chain variable domain of TCR clone 77649 (TRBV3-1, TRBJ2-7)
CASSQVEGAQYEQYF

SEQ ID NO: 155299 - protein, 16 aa, Homo sapiens
  CDR3 for alpha chain variable domain of TCR clone 77650 (TRAV30, TRAJ24)
CGTAIVDADSWGKFQF

SEQ ID NO: 155300 - protein, 12 aa, Homo sapiens
  CDR3 for beta chain variable domain of TCR clone 77650 (TRBV11-2, TRBJ2-2)
CASSLPTGELFF

SEQ ID NO: 155301 - protein, 13 aa, Homo sapiens
  CDR3 for alpha chain variable domain of TCR clone 77651 (TRAV12-3, TRAJ9)
CAMSADGGFKTIF

SEQ ID NO: 155302 - protein, 16 aa, Homo sapiens
  CDR3 for beta chain variable domain of TCR clone 77651 (TRBV19, TRBJ2-1)
CASSKAGPSSYNEQFF

SEQ ID NO: 155303 - protein, 14 aa, Homo sapiens
  CDR3 for alpha chain variable domain of TCR clone 77652 (TRAV8-4, TRAJ4)
CAVSPSGGYNKRIF

SEQ ID NO: 155304 - protein, 15 aa, Homo sapiens
  CDR3 for beta chain variable domain of TCR clone 77652 (TRBV7-8, TRBJ2-3)
CASSLSADSGGAQYF

SEQ ID NO: 155305 - protein, 14 aa, Homo sapiens
  CDR3 for alpha chain variable domain of TCR clone 77653 (TRAV9-2, TRAJ39)
CALYIYNAGNMLTF

SEQ ID NO: 155306 - protein, 13 aa, Homo sapiens
  CDR3 for beta chain variable domain of TCR clone 77653 (TRBV29-1, TRBJ2-5)
CSAGLAGEETQYF

SEQ ID NO: 155307 - protein, 11 aa, Homo sapiens
  CDR3 for alpha chain variable domain of TCR clone 77654 (TRAV1-1, TRAJ23)
CAVRQVGKLIF

SEQ ID NO: 155308 - protein, 20 aa, Homo sapiens
  CDR3 for beta chain variable domain of TCR clone 77654 (TRBV7-8, TRBJ2-2)
CASSHLFPGPTVHITGELFF

SEQ ID NO: 155309 - protein, 14 aa, Homo sapiens
  CDR3 for alpha chain variable domain of TCR clone 77655 (TRAV1-2, TRAJ16)
CAVNRFSDGQKLLF

SEQ ID NO: 155310 - protein, 16 aa, Homo sapiens
  CDR3 for beta chain variable domain of TCR clone 77655 (TRBV5-1, TRBJ2-2)
CASSLWDTTNTGELFF

SEQ ID NO: 155311 - protein, 13 aa, Homo sapiens
  CDR3 for alpha chain variable domain of TCR clone 77656 (TRAV17, TRAJ9)
CATDGTGGFKTIF

SEQ ID NO: 155312 - protein, 12 aa, Homo sapiens
  CDR3 for beta chain variable domain of TCR clone 77656 (TRBV29-1, TRBJ2-3)
CSVTGGADTQYF

SEQ ID NO: 155313 - protein, 17 aa, Homo sapiens
  CDR3 for alpha chain variable domain of TCR clone 77657 (TRAV3, TRAJ12)
CDVRDGGRMDSSYKLIF

SEQ ID NO: 155314 - protein, 12 aa, Homo sapiens
  CDR3 for beta chain variable domain of TCR clone 77657 (TRBV11-2, TRBJ2-2)
CASSLGGGELFF

SEQ ID NO: 155315 - protein, 14 aa, Homo sapiens
  CDR3 for alpha chain variable domain of TCR clone 77658 (TRAV29/DV5, TRAJ45)
CAASFRGGADGLTF

SEQ ID NO: 155316 - protein, 15 aa, Homo sapiens
  CDR3 for beta chain variable domain of TCR clone 77658 (TRBV7-9, TRBJ1-1)
CASSLLEQGGTEAFF

SEQ ID NO: 155317 - protein, 15 aa, Homo sapiens
  CDR3 for alpha chain variable domain of TCR clone 77659 (TRAV26-1, TRAJ29)
CIVRVEGSGSTPLVF

SEQ ID NO: 155318 - protein, 18 aa, Homo sapiens
  CDR3 for beta chain variable domain of TCR clone 77659 (TRBV5-5, TRBJ1-5)
CASSLRQVKGSSNQPQHF

SEQ ID NO: 155319 - protein, 14 aa, Homo sapiens
  CDR3 for alpha chain variable domain of TCR clone 77660 (TRAV1-2, TRAJ16)
CAVNRFSDGQKLLF

SEQ ID NO: 155320 - protein, 13 aa, Homo sapiens
  CDR3 for beta chain variable domain of TCR clone 77660 (TRBV12-4, TRBJ2-5)
CASRLAVQETQYF

SEQ ID NO: 155321 - protein, 15 aa, Homo sapiens
  CDR3 for alpha chain variable domain of TCR clone 77661 (TRAV8-3, TRAJ6)
CAVGPLGGGSYIPTF

SEQ ID NO: 155322 - protein, 14 aa, Homo sapiens
  CDR3 for beta chain variable domain of TCR clone 77661 (TRBV19, TRBJ2-2)
CASSTGQGAGELFF

SEQ ID NO: 155323 - protein, 11 aa, Homo sapiens
  CDR3 for alpha chain variable domain of TCR clone 77662 (TRAV12-2, TRAJ33)
CAVTSNYQLIW

SEQ ID NO: 155324 - protein, 14 aa, Homo sapiens
  CDR3 for beta chain variable domain of TCR clone 77662 (TRBV12-4, TRBJ2-2)
CASNRGANTGELFF

SEQ ID NO: 155325 - protein, 11 aa, Homo sapiens
  CDR3 for alpha chain variable domain of TCR clone 77663 (TRAV2, TRAJ23)
CAVESRGKLIF

SEQ ID NO: 155326 - protein, 14 aa, Homo sapiens
  CDR3 for beta chain variable domain of TCR clone 77663 (TRBV2, TRBJ2-3)
CASSEGQNTDTQYF

SEQ ID NO: 155327 - protein, 18 aa, Homo sapiens
  CDR3 for alpha chain variable domain of TCR clone 77664 (TRAV13-1, TRAJ52)
CAAKNPNAGGTSYGKLTF

SEQ ID NO: 155328 - protein, 17 aa, Homo sapiens
  CDR3 for beta chain variable domain of TCR clone 77664 (TRBV20-1, TRBJ2-2)
CSASGSGQGGLTGELFF

SEQ ID NO: 155329 - protein, 14 aa, Homo sapiens
  CDR3 for alpha chain variable domain of TCR clone 77665 (TRAV12-2, TRAJ13)
CAVKKTGGYQKVTF

SEQ ID NO: 155330 - protein, 17 aa, Homo sapiens
  CDR3 for beta chain variable domain of TCR clone 77665 (TRBV13, TRBJ2-3)
CANSLSRVAGGRNTQYF

SEQ ID NO: 155331 - protein, 12 aa, Homo sapiens
  CDR3 for alpha chain variable domain of TCR clone 77666 (TRAV3, TRAJ20)
CAVRDPDYKLSF

SEQ ID NO: 155332 - protein, 15 aa, Homo sapiens
  CDR3 for beta chain variable domain of TCR clone 77666 (TRBV12-4, TRBJ2-5)
CASSPPTGLQETQYF

SEQ ID NO: 155333 - protein, 12 aa, Homo sapiens
  CDR3 for alpha chain variable domain of TCR clone 77667 (TRAV8-3, TRAJ8)
DPMNTGFQKLVF

SEQ ID NO: 155334 - protein, 13 aa, Homo sapiens
  CDR3 for beta chain variable domain of TCR clone 77667 (TRBV10-2, TRBJ2-3)
CASSESGDHTQYF

SEQ ID NO: 155335 - protein, 13 aa, Homo sapiens
  CDR3 for alpha chain variable domain of TCR clone 77668 (TRAV29/DV5, TRAJ40)
CASSEAGTYKYIF

SEQ ID NO: 155336 - protein, 18 aa, Homo sapiens
  CDR3 for beta chain variable domain of TCR clone 77668 (TRBV14, TRBJ2-1)
CASSQEYGGAYLRGEQFF

SEQ ID NO: 155337 - protein, 15 aa, Homo sapiens
  CDR3 for alpha chain variable domain of TCR clone 77669 (TRAV29/DV5, TRAJ29)
CAASERSSGNTPLVF

SEQ ID NO: 155338 - protein, 17 aa, Homo sapiens
  CDR3 for beta chain variable domain of TCR clone 77669 (TRBV4-1, TRBJ1-4)
CSSSQEGPRGVEEKLFF

SEQ ID NO: 155339 - protein, 11 aa, Homo sapiens
  CDR3 for alpha chain variable domain of TCR clone 77670 (TRAV2, TRAJ21)
CAVFNFNKFYF

SEQ ID NO: 155340 - protein, 17 aa, Homo sapiens
  CDR3 for beta chain variable domain of TCR clone 77670 (TRBV20-1, TRBJ2-1)
CSASSSGLAGSYNEQFF

SEQ ID NO: 155341 - protein, 12 aa, Homo sapiens
  CDR3 for alpha chain variable domain of TCR clone 77671 (TRAV25, TRAJ11)
CAGASGYSTLTF

SEQ ID NO: 155342 - protein, 14 aa, Homo sapiens
  CDR3 for beta chain variable domain of TCR clone 77671 (TRBV6-1, TRBJ1-3)
CASVQGGGGNTIYF

SEQ ID NO: 155343 - protein, 14 aa, Homo sapiens
  CDR3 for alpha chain variable domain of TCR clone 77672 (TRAV1-2, TRAJ16)
CAVNRFSDGQKLLF

SEQ ID NO: 155344 - protein, 16 aa, Homo sapiens
  CDR3 for beta chain variable domain of TCR clone 77672 (TRBV20-1, TRBJ1-4)
CSAPVQGLLTNEKLFF

SEQ ID NO: 155345 - protein, 10 aa, Homo sapiens
  CDR3 for alpha chain variable domain of TCR clone 77673 (TRAV26-2, TRAJ49)
RLNTGNQFYF

SEQ ID NO: 155346 - protein, 17 aa, Homo sapiens
  CDR3 for beta chain variable domain of TCR clone 77673 (TRBV13, TRBJ2-3)
CASSLSRVAGGRNTQYF

SEQ ID NO: 155347 - protein, 13 aa, Homo sapiens
  CDR3 for alpha chain variable domain of TCR clone 77674 (TRAV6, TRAJ11)
CAPNEGGYSTLTF

SEQ ID NO: 155348 - protein, 12 aa, Homo sapiens
  CDR3 for beta chain variable domain of TCR clone 77674 (TRBV28, TRBJ2-7)
CASSFSSYEQYF

SEQ ID NO: 155349 - protein, 18 aa, Homo sapiens
  CDR3 for alpha chain variable domain of TCR clone 77675 (TRAV26-2, TRAJ45)
CILRVDKYSGGGADELTF

SEQ ID NO: 155350 - protein, 11 aa, Homo sapiens
  CDR3 for beta chain variable domain of TCR clone 77675 (TRBV29-1, TRBJ2-5)
CSEDRTGTQYF

SEQ ID NO: 155351 - protein, 15 aa, Homo sapiens
  CDR3 for alpha chain variable domain of TCR clone 77676 (TRAV2, TRAJ15)
CAAGGPNQAGTALIF

SEQ ID NO: 155352 - protein, 13 aa, Homo sapiens
  CDR3 for beta chain variable domain of TCR clone 77676 (TRBV2, TRBJ1-5)
YATAGPGNQPQHF

SEQ ID NO: 155353 - protein, 15 aa, Homo sapiens
  CDR3 for alpha chain variable domain of TCR clone 77677 (TRAV3, TRAJ22)
CAVRDRGGSGRQLTF

SEQ ID NO: 155354 - protein, 16 aa, Homo sapiens
  CDR3 for beta chain variable domain of TCR clone 77677 (TRBV5-4, TRBJ2-3)
CASQQPGAGGADTQYF

SEQ ID NO: 155355 - protein, 13 aa, Homo sapiens
  CDR3 for alpha chain variable domain of TCR clone 77678 (TRAV20, TRAJ21)
CAVEGYNFNKFYF

SEQ ID NO: 155356 - protein, 14 aa, Homo sapiens
  CDR3 for beta chain variable domain of TCR clone 77678 (TRBV19, TRBJ2-1)
CASPTFVLSGEQFF

SEQ ID NO: 155357 - protein, 14 aa, Homo sapiens
  CDR3 for alpha chain variable domain of TCR clone 77679 (TRAV8-3, TRAJ4)
CAVGAAGGYNKLIF

SEQ ID NO: 155358 - protein, 18 aa, Homo sapiens
  CDR3 for beta chain variable domain of TCR clone 77679 (TRBV7-2, TRBJ2-7)
CASSLDPGVDRASSTSGR

SEQ ID NO: 155359 - protein, 17 aa, Homo sapiens
  CDR3 for alpha chain variable domain of TCR clone 77680 (TRAV4, TRAJ42)
CLVGVLNYGGSQGNLIF

SEQ ID NO: 155360 - protein, 11 aa, Homo sapiens
  CDR3 for beta chain variable domain of TCR clone 77680 (TRBV29-1, TRBJ2-5)
CSEDRTGTQYF

SEQ ID NO: 155361 - protein, 11 aa, Homo sapiens
  CDR3 for alpha chain variable domain of TCR clone 77681 (TRAV1-1, TRAJ23)
CAVRQGGKLIF

SEQ ID NO: 155362 - protein, 14 aa, Homo sapiens
  CDR3 for beta chain variable domain of TCR clone 77681 (TRBV2, TRBJ2-7)
CASSLTSGGYEQYF

SEQ ID NO: 155363 - protein, 12 aa, Homo sapiens
  CDR3 for alpha chain variable domain of TCR clone 77682 (TRAV12-3, TRAJ29)
CAAAKGNTPLVF

SEQ ID NO: 155364 - protein, 14 aa, Homo sapiens
  CDR3 for beta chain variable domain of TCR clone 77682 (TRBV19, TRBJ2-1)
CASPTFVLSGEQFF

SEQ ID NO: 155365 - protein, 14 aa, Homo sapiens
  CDR3 for alpha chain variable domain of TCR clone 77683 (TRAV8-2, TRAJ4)
CVVSASGGYNKLIF

SEQ ID NO: 155366 - protein, 15 aa, Homo sapiens
  CDR3 for beta chain variable domain of TCR clone 77683 (TRBV4-1, TRBJ1-4)
CASSDTGGTNEKLFF

SEQ ID NO: 155367 - protein, 11 aa, Homo sapiens
  CDR3 for alpha chain variable domain of TCR clone 77684 (TRAV1-1, TRAJ23)
CAVRQGGKLIF

SEQ ID NO: 155368 - protein, 12 aa, Homo sapiens
  CDR3 for beta chain variable domain of TCR clone 77684 (TRBV19, TRBJ1-5)
CASSIAQQHQHF

SEQ ID NO: 155369 - protein, 12 aa, Homo sapiens
  CDR3 for alpha chain variable domain of TCR clone 77685 (TRAV12-3, TRAJ4)
CAMTGAGTRLAV

SEQ ID NO: 155370 - protein, 14 aa, Homo sapiens
  CDR3 for beta chain variable domain of TCR clone 77685 (TRBV10-3, TRBJ1-1)
CAISGTDRGVEAFF

SEQ ID NO: 155371 - protein, 16 aa, Homo sapiens
  CDR3 for alpha chain variable domain of TCR clone 77686 (TRAV38-2/DV8, TRAJ47)
CAYRSAIIEYGNKLVF

SEQ ID NO: 155372 - protein, 14 aa, Homo sapiens
  CDR3 for beta chain variable domain of TCR clone 77686 (TRBV19, TRBJ2-7)
CASSIFAGTYEQYF

SEQ ID NO: 155373 - protein, 12 aa, Homo sapiens
  CDR3 for alpha chain variable domain of TCR clone 77687 (TRAV12-3, TRAJ17)
CAMTLTGDKLTF

SEQ ID NO: 155374 - protein, 15 aa, Homo sapiens
  CDR3 for beta chain variable domain of TCR clone 77687 (TRBV6-6, TRBJ2-5)
CASSPGGGLEETQYF

SEQ ID NO: 155375 - protein, 14 aa, Homo sapiens
  CDR3 for alpha chain variable domain of TCR clone 77688 (TRAV12-2, TRAJ13)
CAVKKTGGYQKVTF

SEQ ID NO: 155376 - protein, 13 aa, Homo sapiens
  CDR3 for beta chain variable domain of TCR clone 77688 (TRBV4-2, TRBJ1-2)
CASSLSASGGYTF

SEQ ID NO: 155377 - protein, 16 aa, Homo sapiens
  CDR3 for alpha chain variable domain of TCR clone 77689 (TRAV12-3, TRAJ56)
CAMSPGHTGANSKLTF

SEQ ID NO: 155378 - protein, 15 aa, Homo sapiens
  CDR3 for beta chain variable domain of TCR clone 77689 (TRBV11-3, TRBJ2-3)
CASLKDGREGDTQYF

SEQ ID NO: 155379 - protein, 13 aa, Homo sapiens
  CDR3 for alpha chain variable domain of TCR clone 77690 (TRAV27, TRAJ6)
CAGGTGGSYIPTF

SEQ ID NO: 155380 - protein, 13 aa, Homo sapiens
  CDR3 for beta chain variable domain of TCR clone 77690 (TRBV4-1, TRBJ2-2)
CASSQENTGELFF

SEQ ID NO: 155381 - protein, 14 aa, Homo sapiens
  CDR3 for alpha chain variable domain of TCR clone 77691 (TRAV12-2, TRAJ36)
CAGKISTGANNLFF

SEQ ID NO: 155382 - protein, 14 aa, Homo sapiens
  CDR3 for beta chain variable domain of TCR clone 77691 (TRBV25-1, TRBJ1-2)
CASSDTTGVVGYTF

SEQ ID NO: 155383 - protein, 11 aa, Homo sapiens
  CDR3 for alpha chain variable domain of TCR clone 77692 (TRAV2, TRAJ33)
CVVDSNYQLIW

SEQ ID NO: 155384 - protein, 14 aa, Homo sapiens
  CDR3 for beta chain variable domain of TCR clone 77692 (TRBV11-2, TRBJ2-3)
CASSRLARTDTQYF

SEQ ID NO: 155385 - protein, 12 aa, Homo sapiens
  CDR3 for alpha chain variable domain of TCR clone 77693 (TRAV35, TRAJ49)
CAGWNTGNQFYF

SEQ ID NO: 155386 - protein, 16 aa, Homo sapiens
  CDR3 for beta chain variable domain of TCR clone 77693 (TRBV5-1, TRBJ2-2)
CDSSLWDTTNTGELFF

SEQ ID NO: 155387 - protein, 12 aa, Homo sapiens
  CDR3 for alpha chain variable domain of TCR clone 77694 (TRAV27, TRAJ13)
CAGVRGYQKVTF

SEQ ID NO: 155388 - protein, 15 aa, Homo sapiens
  CDR3 for beta chain variable domain of TCR clone 77694 (TRBV27, TRBJ2-1)
CASSNGGGSSNEQFF

SEQ ID NO: 155389 - protein, 16 aa, Homo sapiens
  CDR3 for alpha chain variable domain of TCR clone 77695 (TRAV27, TRAJ53)
CAAPEGSGGSNYKLPF

SEQ ID NO: 155390 - protein, 15 aa, Homo sapiens
  CDR3 for beta chain variable domain of TCR clone 77695 (TRBV20-1, TRBJ1-1)
CSASRGVTGNTEAFF

SEQ ID NO: 155391 - protein, 14 aa, Homo sapiens
  CDR3 for alpha chain variable domain of TCR clone 77696 (TRAV12-2, TRAJ44)
CAVNPAGTASKLTF

SEQ ID NO: 155392 - protein, 14 aa, Homo sapiens
  CDR3 for beta chain variable domain of TCR clone 77696 (TRBV7-2, TRBJ2-7)
CASSPKTSFYEQYF

SEQ ID NO: 155393 - protein, 12 aa, Homo sapiens
  CDR3 for alpha chain variable domain of TCR clone 77697 (TRAV16, TRAJ10)
CSRTGGGNKLTF

SEQ ID NO: 155394 - protein, 14 aa, Homo sapiens
  CDR3 for beta chain variable domain of TCR clone 77697 (TRBV18, TRBJ2-5)
CASSPGVSQETQYF

SEQ ID NO: 155395 - protein, 12 aa, Homo sapiens
  CDR3 for alpha chain variable domain of TCR clone 77698 (TRAV13-2, TRAJ23)
CAERHRGGKLIF

SEQ ID NO: 155396 - protein, 13 aa, Homo sapiens
  CDR3 for beta chain variable domain of TCR clone 77698 (TRBV19, TRBJ1-2)
CASSIVGARGYTF

SEQ ID NO: 155397 - protein, 16 aa, Homo sapiens
  CDR3 for alpha chain variable domain of TCR clone 77699 (TRAV3, TRAJ37)
CAVRGKGSGNTGKLIF

SEQ ID NO: 155398 - protein, 14 aa, Homo sapiens
  CDR3 for beta chain variable domain of TCR clone 77699 (TRBV20-1, TRBJ1-1)
CSEQTRIGGTEAFF

SEQ ID NO: 155399 - protein, 14 aa, Homo sapiens
  CDR3 for alpha chain variable domain of TCR clone 77700 (TRAV1-2, TRAJ16)
CAVNRFSDGQKLLF

SEQ ID NO: 155400 - protein, 18 aa, Homo sapiens
  CDR3 for beta chain variable domain of TCR clone 77700 (TRBV5-1, TRBJ1-6)
CASSRSGQGTARGSPLHF

SEQ ID NO: 155401 - protein, 16 aa, Homo sapiens
  CDR3 for alpha chain variable domain of TCR clone 77701 (TRAV16, TRAJ4)
CALSRMFSGGYNKLIF

SEQ ID NO: 155402 - protein, 15 aa, Homo sapiens
  CDR3 for beta chain variable domain of TCR clone 77701 (TRBV24-1, TRBJ2-3)
CHSDPGTGATDTQYF

SEQ ID NO: 155403 - protein, 12 aa, Homo sapiens
  CDR3 for alpha chain variable domain of TCR clone 77702 (TRAV2, TRAJ40)
CCGTSGTYKYIF

SEQ ID NO: 155404 - protein, 14 aa, Homo sapiens
  CDR3 for beta chain variable domain of TCR clone 77702 (TRBV11-3, TRBJ2-3)
CSLKDGREGDTQYF

SEQ ID NO: 155405 - protein, 13 aa, Homo sapiens
  CDR3 for alpha chain variable domain of TCR clone 77703 (TRAV27, TRAJ41)
CAGEGNSEYALNF

SEQ ID NO: 155406 - protein, 14 aa, Homo sapiens
  CDR3 for beta chain variable domain of TCR clone 77703 (TRBV7-2, TRBJ1-1)
CASSFLTGTTEAFF

SEQ ID NO: 155407 - protein, 15 aa, Homo sapiens
  CDR3 for alpha chain variable domain of TCR clone 77704 (TRAV1-2, TRAJ3)
CAVRGGYSSASKIIF

SEQ ID NO: 155408 - protein, 15 aa, Homo sapiens
  CDR3 for beta chain variable domain of TCR clone 77704 (TRBV18, TRBJ1-1)
CASSPRQGENTEAFF

SEQ ID NO: 155409 - protein, 14 aa, Homo sapiens
  CDR3 for alpha chain variable domain of TCR clone 77705 (TRAV12-3, TRAJ10)
SHLPLTGGGNKLTF

SEQ ID NO: 155410 - protein, 16 aa, Homo sapiens
  CDR3 for beta chain variable domain of TCR clone 77705 (TRBV19, TRBJ2-1)
CASGKAGPSSYNEQFF

SEQ ID NO: 155411 - protein, 11 aa, Homo sapiens
  CDR3 for alpha chain variable domain of TCR clone 77706 (TRAV8-3, TRAJ49)
CAVNTGNQCYF

SEQ ID NO: 155412 - protein, 12 aa, Homo sapiens
  CDR3 for beta chain variable domain of TCR clone 77706 (TRBV11-2, TRBJ2-7)
CASSPPADEQYF

SEQ ID NO: 155413 - protein, 14 aa, Homo sapiens
  CDR3 for alpha chain variable domain of TCR clone 77707 (TRAV14/DV4, TRAJ50)
CAMREFPTDDKVIF

SEQ ID NO: 155414 - protein, 15 aa, Homo sapiens
  CDR3 for beta chain variable domain of TCR clone 77707 (TRBV6-4, TRBJ2-7)
CASSDQGPPNYEQYF

SEQ ID NO: 155415 - protein, 14 aa, Homo sapiens
  CDR3 for alpha chain variable domain of TCR clone 77708 (TRAV16, TRAJ39)
CALSKNNAVNMLTF

SEQ ID NO: 155416 - protein, 19 aa, Homo sapiens
  CDR3 for beta chain variable domain of TCR clone 77708 (TRBV6-6, TRBJ2-1)
AAPSQTSVYFCASSYEQFF

SEQ ID NO: 155417 - protein, 15 aa, Homo sapiens
  CDR3 for alpha chain variable domain of TCR clone 77709 (TRAV17, TRAJ57)
CATGPSQGGSERLVF

SEQ ID NO: 155418 - protein, 14 aa, Homo sapiens
  CDR3 for beta chain variable domain of TCR clone 77709 (TRBV12-5, TRBJ2-5)
CASGSRTHQETQYF

SEQ ID NO: 155419 - protein, 15 aa, Homo sapiens
  CDR3 for alpha chain variable domain of TCR clone 77710 (TRAV17, TRAJ22)
CATVAPSGSARQLPF

SEQ ID NO: 155420 - protein, 14 aa, Homo sapiens
  CDR3 for beta chain variable domain of TCR clone 77710 (TRBV4-1, TRBJ2-2)
CASSQAVNTGELFF

SEQ ID NO: 155421 - protein, 14 aa, Homo sapiens
  CDR3 for alpha chain variable domain of TCR clone 77711 (TRAV12-2, TRAJ17)
CAVLFKAAGNKLTF

SEQ ID NO: 155422 - protein, 15 aa, Homo sapiens
  CDR3 for beta chain variable domain of TCR clone 77711 (TRBV15, TRBJ1-2)
CATSRVRASGSGYTF

SEQ ID NO: 155423 - protein, 15 aa, Homo sapiens
  CDR3 for alpha chain variable domain of TCR clone 77712 (TRAV8-3, TRAJ27)
CAVGPSKTNAGKSIF

SEQ ID NO: 155424 - protein, 15 aa, Homo sapiens
  CDR3 for beta chain variable domain of TCR clone 77712 (TRBV7-2, TRBJ2-1)
CASSSGLAGGNEQFF

SEQ ID NO: 155425 - protein, 15 aa, Homo sapiens
  CDR3 for alpha chain variable domain of TCR clone 77713 (TRAV38-1, TRAJ37)
CAFIFGSGNTGKLIF

SEQ ID NO: 155426 - protein, 16 aa, Homo sapiens
  CDR3 for beta chain variable domain of TCR clone 77713 (TRBV27, TRBJ2-2)
CASSFRGLVRTGELFF

SEQ ID NO: 155427 - protein, 13 aa, Homo sapiens
  CDR3 for alpha chain variable domain of TCR clone 77714 (TRAV12-2, TRAJ20)
CAGNRFDDYKLSF

SEQ ID NO: 155428 - protein, 12 aa, Homo sapiens
  CDR3 for beta chain variable domain of TCR clone 77714 (TRBV19, TRBJ2-1)
CASSQISNEQFF

SEQ ID NO: 155429 - protein, 12 aa, Homo sapiens
  CDR3 for alpha chain variable domain of TCR clone 77715 (TRAV17, TRAJ49)
CATVTTGNQFYF

SEQ ID NO: 155430 - protein, 17 aa, Homo sapiens
  CDR3 for beta chain variable domain of TCR clone 77715 (TRBV11-2, TRBJ2-1)
CASSLYPPGVEYNEQFF

SEQ ID NO: 155431 - protein, 14 aa, Homo sapiens
  CDR3 for alpha chain variable domain of TCR clone 77716 (TRAV12-2, TRAJ13)
CAVKKTGGYQKVNF

SEQ ID NO: 155432 - protein, 12 aa, Homo sapiens
  CDR3 for beta chain variable domain of TCR clone 77716 (TRBV12-4, TRBJ1-2)
CASSFIWLHLRF

SEQ ID NO: 155433 - protein, 12 aa, Homo sapiens
  CDR3 for alpha chain variable domain of TCR clone 77717 (TRAV20, TRAJ54)
CAVQEGARKLVF

SEQ ID NO: 155434 - protein, 17 aa, Homo sapiens
  CDR3 for beta chain variable domain of TCR clone 77717 (TRBV13, TRBJ2-3)
CASSLSRVAGGRNTQYF

SEQ ID NO: 155435 - protein, 13 aa, Homo sapiens
  CDR3 for alpha chain variable domain of TCR clone 77718 (TRAV35, TRAJ42)
CAGVPGSQGNLIF

SEQ ID NO: 155436 - protein, 14 aa, Homo sapiens
  CDR3 for beta chain variable domain of TCR clone 77718 (TRBV4-1, TRBJ2-2)
CASSQAVNTGELFF

SEQ ID NO: 155437 - protein, 11 aa, Homo sapiens
  CDR3 for alpha chain variable domain of TCR clone 77719 (TRAV8-6, TRAJ34)
CAVWNTDKLIF

SEQ ID NO: 155438 - protein, 17 aa, Homo sapiens
  CDR3 for beta chain variable domain of TCR clone 77719 (TRBV13, TRBJ2-3)
CASSLSRVAGGRNTQYF

SEQ ID NO: 155439 - protein, 12 aa, Homo sapiens
  CDR3 for alpha chain variable domain of TCR clone 77720 (TRAV21, TRAJ11)
CAATSGYSTLTF

SEQ ID NO: 155440 - protein, 14 aa, Homo sapiens
  CDR3 for beta chain variable domain of TCR clone 77720 (TRBV20-1, TRBJ2-7)
CSAPELAGFGEQYF

SEQ ID NO: 155441 - protein, 12 aa, Homo sapiens
  CDR3 for alpha chain variable domain of TCR clone 77721 (TRAV3, TRAJ43)
CAVRDPNNDMRF

SEQ ID NO: 155442 - protein, 18 aa, Homo sapiens
  CDR3 for beta chain variable domain of TCR clone 77721 (TRBV7-9, TRBJ2-7)
CASSLTTSGSRTWYEQYF

SEQ ID NO: 155443 - protein, 14 aa, Homo sapiens
  CDR3 for alpha chain variable domain of TCR clone 77722 (TRAV38-1, TRAJ40)
CALRPTSGTYKYIF

SEQ ID NO: 155444 - protein, 14 aa, Homo sapiens
  CDR3 for beta chain variable domain of TCR clone 77722 (TRBV25-1, TRBJ1-1)
CASSHLGGNTEAFF

SEQ ID NO: 155445 - protein, 15 aa, Homo sapiens
  CDR3 for alpha chain variable domain of TCR clone 77723 (TRAV8-3, TRAJ27)
CAVRPSKTNAGKSTF

SEQ ID NO: 155446 - protein, 15 aa, Homo sapiens
  CDR3 for beta chain variable domain of TCR clone 77723 (TRBV7-2, TRBJ2-1)
CASSSGLAGGNEQFF

SEQ ID NO: 155447 - protein, 18 aa, Homo sapiens
  CDR3 for alpha chain variable domain of TCR clone 77724 (TRAV13-1, TRAJ52)
YAAKNPNAGGTSYGKLTF

SEQ ID NO: 155448 - protein, 15 aa, Homo sapiens
  CDR3 for beta chain variable domain of TCR clone 77724 (TRBV6-1, TRBJ2-3)
CASSERGGITDTQYF

SEQ ID NO: 155449 - protein, 16 aa, Homo sapiens
  CDR3 for alpha chain variable domain of TCR clone 77725 (TRAV12-3, TRAJ53)
CAMSPGSGGSNYKLTF

SEQ ID NO: 155450 - protein, 13 aa, Homo sapiens
  CDR3 for beta chain variable domain of TCR clone 77725 (TRBV12-4, TRBJ1-5)
CASSPDRAQPQHF

SEQ ID NO: 155451 - protein, 15 aa, Homo sapiens
  CDR3 for alpha chain variable domain of TCR clone 77726 (TRAV25, TRAJ52)
CAGHPGGTSYGKLTF

SEQ ID NO: 155452 - protein, 17 aa, Homo sapiens
  CDR3 for beta chain variable domain of TCR clone 77726 (TRBV7-8, TRBJ2-6)
CASSAGTGGAGANVLTF

SEQ ID NO: 155453 - protein, 22 aa, Homo sapiens
  CDR3 for alpha chain variable domain of TCR clone 77727 (TRAV4, )
CLVGPHNYDIQNPDPALYQLRD

SEQ ID NO: 155454 - protein, 17 aa, Homo sapiens
  CDR3 for beta chain variable domain of TCR clone 77727 (TRBV24-1, TRBJ2-1)
CATSDVSTSGTYNEQFF

SEQ ID NO: 155455 - protein, 17 aa, Homo sapiens
  CDR3 for alpha chain variable domain of TCR clone 77728 (TRAV23/DV6, TRAJ57)
CAASSTLSQGGSEKLVF

SEQ ID NO: 155456 - protein, 14 aa, Homo sapiens
  CDR3 for beta chain variable domain of TCR clone 77728 (TRBV7-2, TRBJ2-7)
CASSLYPGRYEQYF

SEQ ID NO: 155457 - protein, 14 aa, Homo sapiens
  CDR3 for alpha chain variable domain of TCR clone 77729 (TRAV1-2, TRAJ8)
CAVREDTGFQKLVF

SEQ ID NO: 155458 - protein, 16 aa, Homo sapiens
  CDR3 for beta chain variable domain of TCR clone 77729 (TRBV10-3, TRBJ2-3)
CAISVSRLALTDTQYF

SEQ ID NO: 155459 - protein, 11 aa, Homo sapiens
  CDR3 for alpha chain variable domain of TCR clone 77730 (TRAV2, TRAJ13)
CASGGYQKVTF

SEQ ID NO: 155460 - protein, 16 aa, Homo sapiens
  CDR3 for beta chain variable domain of TCR clone 77730 (TRBV27, TRBJ2-2)
CASSLSGFWVTGEPFF

SEQ ID NO: 155461 - protein, 10 aa, Homo sapiens
  CDR3 for alpha chain variable domain of TCR clone 77731 (TRAV12-1, TRAJ37)
ARGNTGKLIF

SEQ ID NO: 155462 - protein, 15 aa, Homo sapiens
  CDR3 for beta chain variable domain of TCR clone 77731 (TRBV7-2, TRBJ2-3)
GASSLEQGGTDTQYF

SEQ ID NO: 155463 - protein, 18 aa, Homo sapiens
  CDR3 for alpha chain variable domain of TCR clone 77732 (TRAV1-2, TRAJ18)
CAARDMGDRGSTLGRLYF

SEQ ID NO: 155464 - protein, 16 aa, Homo sapiens
  CDR3 for beta chain variable domain of TCR clone 77732 (TRBV29-1, TRBJ1-2)
CSVEANRDIANYGYTF

SEQ ID NO: 155465 - protein, 12 aa, Homo sapiens
  CDR3 for alpha chain variable domain of TCR clone 77733 (TRAV8-3, TRAJ26)
CAGDNYGQNFVF

SEQ ID NO: 155466 - protein, 15 aa, Homo sapiens
  CDR3 for beta chain variable domain of TCR clone 77733 (TRBV9, TRBJ2-1)
CASSLSGSSYNEQFF

SEQ ID NO: 155467 - protein, 14 aa, Homo sapiens
  CDR3 for alpha chain variable domain of TCR clone 77734 (TRAV3, TRAJ22)
CAVRDSGSARQLTF

SEQ ID NO: 155468 - protein, 13 aa, Homo sapiens
  CDR3 for beta chain variable domain of TCR clone 77734 (TRBV11-2, TRBJ2-5)
CASGHGAKETQYF

SEQ ID NO: 155469 - protein, 15 aa, Homo sapiens
  CDR3 for alpha chain variable domain of TCR clone 77735 (TRAV14/DV4, TRAJ26)
CAMREGQNYCQNFVF

SEQ ID NO: 155470 - protein, 13 aa, Homo sapiens
  CDR3 for beta chain variable domain of TCR clone 77735 (TRBV24-1, TRBJ2-2)
CATSDWSTGELFF

SEQ ID NO: 155471 - protein, 14 aa, Homo sapiens
  CDR3 for alpha chain variable domain of TCR clone 77736 (TRAV5, TRAJ23)
CAVPYYNQGGKLIF

SEQ ID NO: 155472 - protein, 14 aa, Homo sapiens
  CDR3 for beta chain variable domain of TCR clone 77736 (TRBV7-6, TRBJ2-3)
CASSLGTVTDTQYF

SEQ ID NO: 155473 - protein, 14 aa, Homo sapiens
  CDR3 for alpha chain variable domain of TCR clone 77737 (TRAV12-2, TRAJ17)
CAALFKAAGNKLTF

SEQ ID NO: 155474 - protein, 16 aa, Homo sapiens
  CDR3 for beta chain variable domain of TCR clone 77737 (TRBV20-1, TRBJ2-2)
CSASASGIPGAGEPFF

SEQ ID NO: 155475 - protein, 14 aa, Homo sapiens
  CDR3 for alpha chain variable domain of TCR clone 77738 (TRAV1-1, TRAJ27)
CAVIYNTNAGKSTF

SEQ ID NO: 155476 - protein, 15 aa, Homo sapiens
  CDR3 for beta chain variable domain of TCR clone 77738 (TRBV7-9, TRBJ1-6)
CASSSPGRGNSPLHF

SEQ ID NO: 155477 - protein, 10 aa, Homo sapiens
  CDR3 for alpha chain variable domain of TCR clone 77739 (TRAV12-2, TRAJ52)
RSTSYGKLTF

SEQ ID NO: 155478 - protein, 11 aa, Homo sapiens
  CDR3 for beta chain variable domain of TCR clone 77739 (TRBV11-2, TRBJ2-2)
CVSSLPGELFF

SEQ ID NO: 155479 - protein, 15 aa, Homo sapiens
  CDR3 for alpha chain variable domain of TCR clone 77740 (TRAV3, TRAJ20)
CAVRDIKLSDYKLSF

SEQ ID NO: 155480 - protein, 14 aa, Homo sapiens
  CDR3 for beta chain variable domain of TCR clone 77740 (TRBV19, TRBJ2-1)
CASSEPGGHGEQFF

SEQ ID NO: 155481 - protein, 11 aa, Homo sapiens
  CDR3 for alpha chain variable domain of TCR clone 77741 (TRAV12-1, TRAJ30)
CVVNGQYKIIF

SEQ ID NO: 155482 - protein, 12 aa, Homo sapiens
  CDR3 for beta chain variable domain of TCR clone 77741 (TRBV27, TRBJ2-2)
CASKLFTGELFF

SEQ ID NO: 155483 - protein, 14 aa, Homo sapiens
  CDR3 for alpha chain variable domain of TCR clone 77742 (TRAV17, TRAJ32)
CATDPGGATNKLIF

SEQ ID NO: 155484 - protein, 14 aa, Homo sapiens
  CDR3 for beta chain variable domain of TCR clone 77742 (TRBV19, TRBJ2-1)
CASPTFVLSGEQFF

SEQ ID NO: 155485 - protein, 14 aa, Homo sapiens
  CDR3 for alpha chain variable domain of TCR clone 77743 (TRAV12-2, TRAJ13)
CVVKKTGGYQKVTF

SEQ ID NO: 155486 - protein, 13 aa, Homo sapiens
  CDR3 for beta chain variable domain of TCR clone 77743 (TRBV10-3, TRBJ2-7)
CASKLAVNYEQYF

SEQ ID NO: 155487 - protein, 12 aa, Homo sapiens
  CDR3 for alpha chain variable domain of TCR clone 77744 (TRAV10, TRAJ34)
CVVSGKHRQAHL

SEQ ID NO: 155488 - protein, 14 aa, Homo sapiens
  CDR3 for beta chain variable domain of TCR clone 77744 (TRBV19, TRBJ2-1)
CASPTFVLSGGQFF

SEQ ID NO: 155489 - protein, 13 aa, Homo sapiens
  CDR3 for alpha chain variable domain of TCR clone 77745 (TRAV12-3, TRAJ7)
CAMTPYGNNRLAF

SEQ ID NO: 155490 - protein, 13 aa, Homo sapiens
  CDR3 for beta chain variable domain of TCR clone 77745 (TRBV10-3, TRBJ1-2)
CAINADLNYGYIF

SEQ ID NO: 155491 - protein, 10 aa, Homo sapiens
  CDR3 for alpha chain variable domain of TCR clone 77746 (TRAV12-2, TRAJ20)
CAVNLYKLSF

SEQ ID NO: 155492 - protein, 14 aa, Homo sapiens
  CDR3 for beta chain variable domain of TCR clone 77746 (TRBV10-3, TRBJ2-2)
CAISEVSHSGELFF

SEQ ID NO: 155493 - protein, 15 aa, Homo sapiens
  CDR3 for alpha chain variable domain of TCR clone 77747 (TRAV26-1, TRAJ44)
CIVRANTGTASKLTS

SEQ ID NO: 155494 - protein, 16 aa, Homo sapiens
  CDR3 for beta chain variable domain of TCR clone 77747 (TRBV7-7, TRBJ2-1)
CASSLASGTSYNEQFF

SEQ ID NO: 155495 - protein, 11 aa, Homo sapiens
  CDR3 for alpha chain variable domain of TCR clone 77748 (TRAV4, TRAJ31)
CLVGLNARLMF

SEQ ID NO: 155496 - protein, 16 aa, Homo sapiens
  CDR3 for beta chain variable domain of TCR clone 77748 (TRBV15, TRBJ2-6)
CATSVNGGFLANVLTF

SEQ ID NO: 155497 - protein, 13 aa, Homo sapiens
  CDR3 for alpha chain variable domain of TCR clone 77749 (TRAV27, TRAJ45)
CRSSGGGADGFTF

SEQ ID NO: 155498 - protein, 17 aa, Homo sapiens
  CDR3 for beta chain variable domain of TCR clone 77749 (TRBV11-2, TRBJ2-1)
CASSLYPPGVEYNEQFF

SEQ ID NO: 155499 - protein, 15 aa, Homo sapiens
  CDR3 for alpha chain variable domain of TCR clone 77750 (TRAV1-2, TRAJ30)
CAVRPHGNRDDKIIF

SEQ ID NO: 155500 - protein, 13 aa, Homo sapiens
  CDR3 for beta chain variable domain of TCR clone 77750 (TRBV4-1, TRBJ1-1)
CASSRKMNTEAFF

SEQ ID NO: 155501 - protein, 12 aa, Homo sapiens
  CDR3 for alpha chain variable domain of TCR clone 77751 (TRAV12-3, TRAJ17)
CAMTLTGNKLTF

SEQ ID NO: 155502 - protein, 19 aa, Homo sapiens
  CDR3 for beta chain variable domain of TCR clone 77751 (TRBV25-1, TRBJ2-2)
CAILVYRVDRGRKTGELIF

SEQ ID NO: 155503 - protein, 12 aa, Homo sapiens
  CDR3 for alpha chain variable domain of TCR clone 77752 (TRAV13-1, TRAJ48)
CAANLGNEKLTF

SEQ ID NO: 155504 - protein, 13 aa, Homo sapiens
  CDR3 for beta chain variable domain of TCR clone 77752 (TRBV7-3, TRBJ1-1)
CASSQDWGAEAFF

SEQ ID NO: 155505 - protein, 17 aa, Homo sapiens
  CDR3 for alpha chain variable domain of TCR clone 77753 (TRAV3, TRAJ6)
CAVRDGPRAGGSTIPTF

SEQ ID NO: 155506 - protein, 14 aa, Homo sapiens
  CDR3 for beta chain variable domain of TCR clone 77753 (TRBV7-2, TRBJ2-7)
CASSPKTSFYEQYF

SEQ ID NO: 155507 - protein, 12 aa, Homo sapiens
  CDR3 for alpha chain variable domain of TCR clone 77754 (TRAV13-2, TRAJ23)
CAERHRGGKLIF

SEQ ID NO: 155508 - protein, 15 aa, Homo sapiens
  CDR3 for beta chain variable domain of TCR clone 77754 (TRBV19, TRBJ1-6)
CASSTQGAVGSPLHF

SEQ ID NO: 155509 - protein, 12 aa, Homo sapiens
  CDR3 for alpha chain variable domain of TCR clone 77755 (TRAV12-1, TRAJ40)
CVFYSGTYKYNF

SEQ ID NO: 155510 - protein, 18 aa, Homo sapiens
  CDR3 for beta chain variable domain of TCR clone 77755 (TRBV12-4, TRBJ2-2)
CASSLVAGTRGRTGELFF

SEQ ID NO: 155511 - protein, 13 aa, Homo sapiens
  CDR3 for alpha chain variable domain of TCR clone 77756 (TRAV23/DV6, TRAJ32)
CAASKMGGATNKL

SEQ ID NO: 155512 - protein, 15 aa, Homo sapiens
  CDR3 for beta chain variable domain of TCR clone 77756 (TRBV4-3, TRBJ1-2)
CASSRGQGRNYGYTF

SEQ ID NO: 155513 - protein, 15 aa, Homo sapiens
  CDR3 for alpha chain variable domain of TCR clone 77757 (TRAV4, TRAJ39)
CLVGPNNNAGNMLTF

SEQ ID NO: 155514 - protein, 18 aa, Homo sapiens
  CDR3 for beta chain variable domain of TCR clone 77757 (TRBV7-6, TRBJ2-1)
CASSPRTSGMSSYNEQFF

SEQ ID NO: 155515 - protein, 10 aa, Homo sapiens
  CDR3 for alpha chain variable domain of TCR clone 77758 (TRAV5, TRAJ34)
CAEDTDKLIF

SEQ ID NO: 155516 - protein, 11 aa, Homo sapiens
  CDR3 for beta chain variable domain of TCR clone 77758 (TRBV10-3, TRBJ2-7)
CAIREVDEQYF

SEQ ID NO: 155517 - protein, 12 aa, Homo sapiens
  CDR3 for alpha chain variable domain of TCR clone 77759 (TRAV21, TRAJ39)
CAAYNAGNMLTF

SEQ ID NO: 155518 - protein, 13 aa, Homo sapiens
  CDR3 for beta chain variable domain of TCR clone 77759 (TRBV6-1, TRBJ1-1)
CASSRQGNTEAFF

SEQ ID NO: 155519 - protein, 13 aa, Homo sapiens
  CDR3 for alpha chain variable domain of TCR clone 77760 (TRAV2, TRAJ40)
CAVVTSGTYKYIF

SEQ ID NO: 155520 - protein, 10 aa, Homo sapiens
  CDR3 for beta chain variable domain of TCR clone 77760 (TRBV7-3, TRBJ2-2)
CASSETGQGT

SEQ ID NO: 155521 - protein, 13 aa, Homo sapiens
  CDR3 for alpha chain variable domain of TCR clone 77761 (TRAV13-1, TRAJ21)
CAASINNFNKFYF

SEQ ID NO: 155522 - protein, 13 aa, Homo sapiens
  CDR3 for beta chain variable domain of TCR clone 77761 (TRBV27, TRBJ1-4)
CASSLMGDEKLFF

SEQ ID NO: 155523 - protein, 14 aa, Homo sapiens
  CDR3 for alpha chain variable domain of TCR clone 77762 (TRAV35, TRAJ33)
CAGASQDSNYQLIW

SEQ ID NO: 155524 - protein, 15 aa, Homo sapiens
  CDR3 for beta chain variable domain of TCR clone 77762 (TRBV20-1, TRBJ2-7)
CSAESGTSGAYEQYF

SEQ ID NO: 155525 - protein, 14 aa, Homo sapiens
  CDR3 for alpha chain variable domain of TCR clone 77763 (TRAV1-1, TRAJ23)
CAVSIYNQGGRLIF

SEQ ID NO: 155526 - protein, 15 aa, Homo sapiens
  CDR3 for beta chain variable domain of TCR clone 77763 (TRBV5-8, TRBJ2-2)
CASSLDRGATGELFF

SEQ ID NO: 155527 - protein, 12 aa, Homo sapiens
  CDR3 for alpha chain variable domain of TCR clone 77764 (TRAV13-1, TRAJ49)
CAASSMGNQFYF

SEQ ID NO: 155528 - protein, 17 aa, Homo sapiens
  CDR3 for beta chain variable domain of TCR clone 77764 (TRBV11-2, TRBJ2-1)
CASSLYPPGVEYNEQFF

SEQ ID NO: 155529 - protein, 12 aa, Homo sapiens
  CDR3 for alpha chain variable domain of TCR clone 77765 (TRAV10, TRAJ31)
CVVRAHRARLMF

SEQ ID NO: 155530 - protein, 17 aa, Homo sapiens
  CDR3 for beta chain variable domain of TCR clone 77765 (TRBV14, TRBJ2-1)
RASSQDRRDSIYNEQFF

SEQ ID NO: 155531 - protein, 15 aa, Homo sapiens
  CDR3 for alpha chain variable domain of TCR clone 77766 (TRAV35, TRAJ52)
CAGPRGGTSYGKLTF

SEQ ID NO: 155532 - protein, 17 aa, Homo sapiens
  CDR3 for beta chain variable domain of TCR clone 77766 (TRBV11-2, TRBJ2-1)
CASSLYPPGVEYNEQFF

SEQ ID NO: 155533 - protein, 15 aa, Homo sapiens
  CDR3 for alpha chain variable domain of TCR clone 77767 (TRAV21, TRAJ53)
CATLNSGGSNYKLTF

SEQ ID NO: 155534 - protein, 18 aa, Homo sapiens
  CDR3 for beta chain variable domain of TCR clone 77767 (TRBV6-6, TRBJ1-3)
CASSYSKWDSISGNTIYF

SEQ ID NO: 155535 - protein, 14 aa, Homo sapiens
  CDR3 for alpha chain variable domain of TCR clone 77768 (TRAV2, TRAJ22)
CTVEVKRAARQLTF

SEQ ID NO: 155536 - protein, 14 aa, Homo sapiens
  CDR3 for beta chain variable domain of TCR clone 77768 (TRBV19, TRBJ2-2)
CASTPGYSGGELFF

SEQ ID NO: 155537 - protein, 14 aa, Homo sapiens
  CDR3 for alpha chain variable domain of TCR clone 77769 (TRAV26-1, TRAJ38)
CIADNAGNNRKLIW

SEQ ID NO: 155538 - protein, 17 aa, Homo sapiens
  CDR3 for beta chain variable domain of TCR clone 77769 (TRBV7-8, TRBJ2-6)
CASSAGTGGAGANVLTF

SEQ ID NO: 155539 - protein, 15 aa, Homo sapiens
  CDR3 for alpha chain variable domain of TCR clone 77770 (TRAV21, TRAJ53)
CATLNSGGSNYKLTF

SEQ ID NO: 155540 - protein, 16 aa, Homo sapiens
  CDR3 for beta chain variable domain of TCR clone 77770 (TRBV9, TRBJ2-1)
YASSVGGGGNYNEQFF

SEQ ID NO: 155541 - protein, 13 aa, Homo sapiens
  CDR3 for alpha chain variable domain of TCR clone 77771 (TRAV29/DV5, TRAJ31)
CAASRNNNARLMF

SEQ ID NO: 155542 - protein, 17 aa, Homo sapiens
  CDR3 for beta chain variable domain of TCR clone 77771 (TRBV7-3, TRBJ2-3)
CASSLMKRMRGADTQYF

SEQ ID NO: 155543 - protein, 13 aa, Homo sapiens
  CDR3 for alpha chain variable domain of TCR clone 77772 (TRAV17, TRAJ9)
CATDYTGGFKTIF

SEQ ID NO: 155544 - protein, 16 aa, Homo sapiens
  CDR3 for beta chain variable domain of TCR clone 77772 (TRBV7-7, TRBJ2-1)
CASSLASGTSSNEQFF

SEQ ID NO: 155545 - protein, 14 aa, Homo sapiens
  CDR3 for alpha chain variable domain of TCR clone 77773 (TRAV17, TRAJ12)
CAILPMDSSYKLIF

SEQ ID NO: 155546 - protein, 15 aa, Homo sapiens
  CDR3 for beta chain variable domain of TCR clone 77773 (TRBV4-3, TRBJ2-1)
CASSQESAIYNEQFF

SEQ ID NO: 155547 - protein, 14 aa, Homo sapiens
  CDR3 for alpha chain variable domain of TCR clone 77774 (TRAV26-1, TRAJ38)
CIADNAGNNPKLIW

SEQ ID NO: 155548 - protein, 13 aa, Homo sapiens
  CDR3 for beta chain variable domain of TCR clone 77774 (TRBV20-1, TRBJ1-1)
CSARGGGNTEAFF

SEQ ID NO: 155549 - protein, 19 aa, Homo sapiens
  CDR3 for alpha chain variable domain of TCR clone 77775 (TRAV2, TRAJ20)
ILQVREADAAVYRDCKLSF

SEQ ID NO: 155550 - protein, 17 aa, Homo sapiens
  CDR3 for beta chain variable domain of TCR clone 77775 (TRBV20-1, TRBJ2-1)
CSASSSGLAGSYNEQFF

SEQ ID NO: 155551 - protein, 13 aa, Homo sapiens
  CDR3 for alpha chain variable domain of TCR clone 77776 (TRAV21, TRAJ27)
CAARPGNAGKSTF

SEQ ID NO: 155552 - protein, 15 aa, Homo sapiens
  CDR3 for beta chain variable domain of TCR clone 77776 (TRBV24-1, TRBJ2-2)
TSVPPVIGPPGSCFF

SEQ ID NO: 155553 - protein, 13 aa, Homo sapiens
  CDR3 for alpha chain variable domain of TCR clone 77777 (TRAV8-3, TRAJ28)
CAVGAVGSYQLTF

SEQ ID NO: 155554 - protein, 15 aa, Homo sapiens
  CDR3 for beta chain variable domain of TCR clone 77777 (TRBV7-9, TRBJ1-5)
CDSSQGHQPNQPQHF

SEQ ID NO: 155555 - protein, 14 aa, Homo sapiens
  CDR3 for alpha chain variable domain of TCR clone 77778 (TRAV1-1, TRAJ27)
CAVIYNTNAGKSTF

SEQ ID NO: 155556 - protein, 14 aa, Homo sapiens
  CDR3 for beta chain variable domain of TCR clone 77778 (TRBV7-3, TRBJ2-1)
CASSLAGGTNEQFF

SEQ ID NO: 155557 - protein, 13 aa, Homo sapiens
  CDR3 for alpha chain variable domain of TCR clone 77779 (TRAV21, TRAJ11)
CAVPNSGYSTLTF

SEQ ID NO: 155558 - protein, 13 aa, Homo sapiens
  CDR3 for beta chain variable domain of TCR clone 77779 (TRBV7-9, TRBJ1-2)
CASSLKQNYGYTF

SEQ ID NO: 155559 - protein, 14 aa, Homo sapiens
  CDR3 for alpha chain variable domain of TCR clone 77780 (TRAV1-2, TRAJ16)
CAVNRFSDGQKLLF

SEQ ID NO: 155560 - protein, 13 aa, Homo sapiens
  CDR3 for beta chain variable domain of TCR clone 77780 (TRBV7-8, TRBJ2-7)
CASSFAGLYEQYF

SEQ ID NO: 155561 - protein, 15 aa, Homo sapiens
  CDR3 for alpha chain variable domain of TCR clone 77781 (TRAV29/DV5, TRAJ24)
CAASGATDSWGEFQF

SEQ ID NO: 155562 - protein, 12 aa, Homo sapiens
  CDR3 for beta chain variable domain of TCR clone 77781 (TRBV11-2, TRBJ2-2)
CASSLPTGELFF

SEQ ID NO: 155563 - protein, 14 aa, Homo sapiens
  CDR3 for alpha chain variable domain of TCR clone 77782 (TRAV26-1, TRAJ39)
CIVRGSRAGNMLTF

SEQ ID NO: 155564 - protein, 14 aa, Homo sapiens
  CDR3 for beta chain variable domain of TCR clone 77782 (TRBV7-9, TRBJ1-5)
CQQQGHQPNQPQHF

SEQ ID NO: 155565 - protein, 15 aa, Homo sapiens
  CDR3 for alpha chain variable domain of TCR clone 77783 (TRAV20, TRAJ58)
CAVQDLETSGSRLTF

SEQ ID NO: 155566 - protein, 12 aa, Homo sapiens
  CDR3 for beta chain variable domain of TCR clone 77783 (TRBV11-2, TRBJ2-2)
CASSLGGGELFF

SEQ ID NO: 155567 - protein, 14 aa, Homo sapiens
  CDR3 for alpha chain variable domain of TCR clone 77784 (TRAV35, TRAJ22)
CAGLRPGSARQLTF

SEQ ID NO: 155568 - protein, 15 aa, Homo sapiens
  CDR3 for beta chain variable domain of TCR clone 77784 (TRBV12-4, TRBJ2-5)
CASSPPTGLQETQYY

SEQ ID NO: 155569 - protein, 16 aa, Homo sapiens
  CDR3 for alpha chain variable domain of TCR clone 77785 (TRAV30, TRAJ24)
CGTEIVDADSWGKFQF

SEQ ID NO: 155570 - protein, 14 aa, Homo sapiens
  CDR3 for beta chain variable domain of TCR clone 77785 (TRBV18, TRBJ2-7)
CASSPRGGAYEQYL

SEQ ID NO: 155571 - protein, 13 aa, Homo sapiens
  CDR3 for alpha chain variable domain of TCR clone 77786 (TRAV21, TRAJ57)
CAVTQGGSEKLVF

SEQ ID NO: 155572 - protein, 16 aa, Homo sapiens
  CDR3 for beta chain variable domain of TCR clone 77786 (TRBV29-1, TRBJ2-7)
CSVEDAEHGTAYEQYF

SEQ ID NO: 155573 - protein, 12 aa, Homo sapiens
  CDR3 for alpha chain variable domain of TCR clone 77787 (TRAV3, TRAJ20)
CAVRDPDYKLSF

SEQ ID NO: 155574 - protein, 17 aa, Homo sapiens
  CDR3 for beta chain variable domain of TCR clone 77787 (TRBV20-1, TRBJ2-2)
CSASGSGQGGLTGELFF

SEQ ID NO: 155575 - protein, 15 aa, Homo sapiens
  CDR3 for alpha chain variable domain of TCR clone 77788 (TRAV35, TRAJ52)
CAGPRGGTSYGKLIF

SEQ ID NO: 155576 - protein, 14 aa, Homo sapiens
  CDR3 for beta chain variable domain of TCR clone 77788 (TRBV20-1, TRBJ2-7)
CSAWTALSSYEQYF

SEQ ID NO: 155577 - protein, 14 aa, Homo sapiens
  CDR3 for alpha chain variable domain of TCR clone 77789 (TRAV38-1, TRAJ29)
CAFITPSGNTPLVF

SEQ ID NO: 155578 - protein, 14 aa, Homo sapiens
  CDR3 for beta chain variable domain of TCR clone 77789 (TRBV18, TRBJ2-7)
CAISPRGGAYEQYF

SEQ ID NO: 155579 - protein, 14 aa, Homo sapiens
  CDR3 for alpha chain variable domain of TCR clone 77790 (TRAV8-3, TRAJ4)
CAVGASGGYNKLIF

SEQ ID NO: 155580 - protein, 16 aa, Homo sapiens
  CDR3 for beta chain variable domain of TCR clone 77790 (TRBV4-3, TRBJ2-2)
CASSHLQGSGTRELFF

SEQ ID NO: 155581 - protein, 13 aa, Homo sapiens
  CDR3 for alpha chain variable domain of TCR clone 77791 (TRAV23/DV6, TRAJ58)
CAARLISGSRLTF

SEQ ID NO: 155582 - protein, 13 aa, Homo sapiens
  CDR3 for beta chain variable domain of TCR clone 77791 (TRBV2, TRBJ1-6)
CADSGSYNSPLHF

SEQ ID NO: 155583 - protein, 13 aa, Homo sapiens
  CDR3 for alpha chain variable domain of TCR clone 77792 (TRAV8-3, TRAJ15)
CAVRIQAGTALIF

SEQ ID NO: 155584 - protein, 17 aa, Homo sapiens
  CDR3 for beta chain variable domain of TCR clone 77792 (TRBV20-1, TRBJ2-1)
CSARDPLAGVSYNEQFF

SEQ ID NO: 155585 - protein, 14 aa, Homo sapiens
  CDR3 for alpha chain variable domain of TCR clone 77793 (TRAV12-2, TRAJ6)
CASKWGGGSYIPTF

SEQ ID NO: 155586 - protein, 13 aa, Homo sapiens
  CDR3 for beta chain variable domain of TCR clone 77793 (TRBV2, TRBJ1-1)
CASSEGGNTEAFI

SEQ ID NO: 155587 - protein, 14 aa, Homo sapiens
  CDR3 for alpha chain variable domain of TCR clone 77794 (TRAV8-4, TRAJ11)
CAVSLNSGYSTLTF

SEQ ID NO: 155588 - protein, 14 aa, Homo sapiens
  CDR3 for beta chain variable domain of TCR clone 77794 (TRBV19, TRBJ2-1)
CASKDPGLASEQFF

SEQ ID NO: 155589 - protein, 13 aa, Homo sapiens
  CDR3 for alpha chain variable domain of TCR clone 77795 (TRAV12-3, TRAJ47)
CAMKKEYGTKLVF

SEQ ID NO: 155590 - protein, 16 aa, Homo sapiens
  CDR3 for beta chain variable domain of TCR clone 77795 (TRBV3-1, TRBJ2-6)
CASSLTWVSGANVLTF

SEQ ID NO: 155591 - protein, 16 aa, Homo sapiens
  CDR3 for alpha chain variable domain of TCR clone 77796 (TRAV26-1, TRAJ36)
CIVRVSYQTGANNLFF

SEQ ID NO: 155592 - protein, 14 aa, Homo sapiens
  CDR3 for beta chain variable domain of TCR clone 77796 (TRBV7-2, TRBJ2-7)
CASSPKTSFYEQYF

SEQ ID NO: 155593 - protein, 13 aa, Homo sapiens
  CDR3 for alpha chain variable domain of TCR clone 77797 (TRAV21, TRAJ26)
CAVLDNCGQNFVF

SEQ ID NO: 155594 - protein, 16 aa, Homo sapiens
  CDR3 for beta chain variable domain of TCR clone 77797 (TRBV29-1, TRBJ2-2)
CSVETRASGNTGELFF

SEQ ID NO: 155595 - protein, 14 aa, Homo sapiens
  CDR3 for alpha chain variable domain of TCR clone 77798 (TRAV12-2, TRAJ13)
CAVKKTGGYQKVTF

SEQ ID NO: 155596 - protein, 11 aa, Homo sapiens
  CDR3 for beta chain variable domain of TCR clone 77798 (TRBV11-2, TRBJ1-1)
CASSINTEAFF

SEQ ID NO: 155597 - protein, 14 aa, Homo sapiens
  CDR3 for alpha chain variable domain of TCR clone 77799 (TRAV26-1, TRAJ38)
CIADNAGNNRKLIW

SEQ ID NO: 155598 - protein, 13 aa, Homo sapiens
  CDR3 for beta chain variable domain of TCR clone 77799 (TRBV20-1, TRBJ1-1)
CSARGGGNTEAIF

SEQ ID NO: 155599 - protein, 16 aa, Homo sapiens
  CDR3 for alpha chain variable domain of TCR clone 77800 (TRAV12-3, TRAJ53)
CAMGPGSGGSNYKLTF

SEQ ID NO: 155600 - protein, 16 aa, Homo sapiens
  CDR3 for beta chain variable domain of TCR clone 77800 (TRBV4-2, TRBJ1-1)
CASSQAEFGMNTEAFF

SEQ ID NO: 155601 - protein, 13 aa, Homo sapiens
  CDR3 for alpha chain variable domain of TCR clone 77801 (TRAV13-1, TRAJ5)
CAASDTGRRALTF

SEQ ID NO: 155602 - protein, 12 aa, Homo sapiens
  CDR3 for beta chain variable domain of TCR clone 77801 (TRBV28, TRBJ2-3)
CASSLYRNTQYF

SEQ ID NO: 155603 - protein, 15 aa, Homo sapiens
  CDR3 for alpha chain variable domain of TCR clone 77802 (TRAV12-3, TRAJ5)
CAVSGLGTGRRALTF

SEQ ID NO: 155604 - protein, 16 aa, Homo sapiens
  CDR3 for beta chain variable domain of TCR clone 77802 (TRBV20-1, TRBJ2-3)
CSARLHSAGAIDTQYF

SEQ ID NO: 155605 - protein, 12 aa, Homo sapiens
  CDR3 for alpha chain variable domain of TCR clone 77803 (TRAV17, TRAJ20)
CATDGDDYKLSF

SEQ ID NO: 155606 - protein, 15 aa, Homo sapiens
  CDR3 for beta chain variable domain of TCR clone 77803 (TRBV27, TRBJ2-7)
CASSTAGTGSYEQYF

SEQ ID NO: 155607 - protein, 13 aa, Homo sapiens
  CDR3 for alpha chain variable domain of TCR clone 77804 (TRAV27, TRAJ45)
CRSSGGGADGLTF

SEQ ID NO: 155608 - protein, 17 aa, Homo sapiens
  CDR3 for beta chain variable domain of TCR clone 77804 (TRBV11-2, TRBJ2-1)
CASSLYPPGVEYNEQFC

SEQ ID NO: 155609 - protein, 13 aa, Homo sapiens
  CDR3 for alpha chain variable domain of TCR clone 77805 (TRAV21, TRAJ27)
CAARPGNAGKSTF

SEQ ID NO: 155610 - protein, 14 aa, Homo sapiens
  CDR3 for beta chain variable domain of TCR clone 77805 (TRBV7-6, TRBJ2-3)
WASSLGTVTDTQYF

SEQ ID NO: 155611 - protein, 10 aa, Homo sapiens
  CDR3 for alpha chain variable domain of TCR clone 77806 (TRAV12-3, TRAJ49)
CAMNDDQFYF

SEQ ID NO: 155612 - protein, 15 aa, Homo sapiens
  CDR3 for beta chain variable domain of TCR clone 77806 (TRBV7-2, TRBJ1-2)
CASSPRAGRNYGYTF

SEQ ID NO: 155613 - protein, 13 aa, Homo sapiens
  CDR3 for alpha chain variable domain of TCR clone 77807 (TRAV8-3, TRAJ44)
CAVVPGTASKLTF

SEQ ID NO: 155614 - protein, 14 aa, Homo sapiens
  CDR3 for beta chain variable domain of TCR clone 77807 (TRBV20-1, TRBJ1-3)
CSASPTGAGNTIYF

SEQ ID NO: 155615 - protein, 13 aa, Homo sapiens
  CDR3 for alpha chain variable domain of TCR clone 77808 (TRAV12-3, TRAJ7)
CAMTPYGNNRLAF

SEQ ID NO: 155616 - protein, 15 aa, Homo sapiens
  CDR3 for beta chain variable domain of TCR clone 77808 (TRBV29-1, TRBJ2-7)
CSVEFFDRGPYEQYF

SEQ ID NO: 155617 - protein, 11 aa, Homo sapiens
  CDR3 for alpha chain variable domain of TCR clone 77809 (TRAV2, TRAJ13)
CASGGYQKVTF

SEQ ID NO: 155618 - protein, 16 aa, Homo sapiens
  CDR3 for beta chain variable domain of TCR clone 77809 (TRBV12-5, TRBJ2-5)
CASGPRTSGNQEAQYF

SEQ ID NO: 155619 - protein, 14 aa, Homo sapiens
  CDR3 for alpha chain variable domain of TCR clone 77810 (TRAV12-3, TRAJ9)
CAMSPNTGGFKTIF

SEQ ID NO: 155620 - protein, 12 aa, Homo sapiens
  CDR3 for beta chain variable domain of TCR clone 77810 (TRBV19, TRBJ1-5)
CDSSIAQQPQHF

SEQ ID NO: 155621 - protein, 15 aa, Homo sapiens
  CDR3 for alpha chain variable domain of TCR clone 77811 (TRAV35, TRAJ50)
CAGQLRKTSYDKVIL

SEQ ID NO: 155622 - protein, 12 aa, Homo sapiens
  CDR3 for beta chain variable domain of TCR clone 77811 (TRBV5-1, TRBJ2-5)
CASSLGLETQYF

SEQ ID NO: 155623 - protein, 15 aa, Homo sapiens
  CDR3 for alpha chain variable domain of TCR clone 77812 (TRAV23/DV6, TRAJ38)
CAARSNAGNNRKLLW

SEQ ID NO: 155624 - protein, 16 aa, Homo sapiens
  CDR3 for beta chain variable domain of TCR clone 77812 (TRBV10-2, TRBJ1-5)
CASSRDRDYSNQPQHF

SEQ ID NO: 155625 - protein, 16 aa, Homo sapiens
  CDR3 for alpha chain variable domain of TCR clone 77813 (TRAV3, TRAJ42)
CAVRDIEGGSQGNLIF

SEQ ID NO: 155626 - protein, 18 aa, Homo sapiens
  CDR3 for beta chain variable domain of TCR clone 77813 (TRBV4-1, TRBJ2-3)
CASSHQLAGGRSTDTQYF

SEQ ID NO: 155627 - protein, 14 aa, Homo sapiens
  CDR3 for alpha chain variable domain of TCR clone 77814 (TRAV1-2, TRAJ8)
CAVREDTGFQKLVF

SEQ ID NO: 155628 - protein, 15 aa, Homo sapiens
  CDR3 for beta chain variable domain of TCR clone 77814 (TRBV10-2, TRBJ2-6)
CAGSEQGTGANVLTF

SEQ ID NO: 155629 - protein, 17 aa, Homo sapiens
  CDR3 for alpha chain variable domain of TCR clone 77815 (TRAV26-1, TRAJ47)
CIVPSLLYLEYGNKLVF

SEQ ID NO: 155630 - protein, 14 aa, Homo sapiens
  CDR3 for beta chain variable domain of TCR clone 77815 (TRBV7-3, TRBJ1-5)
RASSFSGCNQPQHF

SEQ ID NO: 155631 - protein, 14 aa, Homo sapiens
  CDR3 for alpha chain variable domain of TCR clone 77816 (TRAV2, TRAJ9)
CAVEDWSGGFKTIF

SEQ ID NO: 155632 - protein, 15 aa, Homo sapiens
  CDR3 for beta chain variable domain of TCR clone 77816 (TRBV19, TRBJ2-1)
CASSHRDRGPNEQFF

SEQ ID NO: 155633 - protein, 14 aa, Homo sapiens
  CDR3 for alpha chain variable domain of TCR clone 77817 (TRAV12-1, TRAJ30)
CVVNIGGRDDKIIF

SEQ ID NO: 155634 - protein, 13 aa, Homo sapiens
  CDR3 for beta chain variable domain of TCR clone 77817 (TRBV12-5, TRBJ2-1)
CASGLGRGNEQLF

SEQ ID NO: 155635 - protein, 15 aa, Homo sapiens
  CDR3 for alpha chain variable domain of TCR clone 77818 (TRAV8-3, TRAJ11)
CAVGLLNSGYSTLTF

SEQ ID NO: 155636 - protein, 16 aa, Homo sapiens
  CDR3 for beta chain variable domain of TCR clone 77818 (TRBV7-9, TRBJ1-2)
CASSLGFSSGKDGYTF

SEQ ID NO: 155637 - protein, 14 aa, Homo sapiens
  CDR3 for alpha chain variable domain of TCR clone 77819 (TRAV10, TRAJ48)
CVVSAGLWKREINL

SEQ ID NO: 155638 - protein, 16 aa, Homo sapiens
  CDR3 for beta chain variable domain of TCR clone 77819 (TRBV12-4, TRBJ2-5)
CASSWRPSGDLETQYF

SEQ ID NO: 155639 - protein, 14 aa, Homo sapiens
  CDR3 for alpha chain variable domain of TCR clone 77820 (TRAV14/DV4, TRAJ9)
CAMRPNTGGFKTIF

SEQ ID NO: 155640 - protein, 17 aa, Homo sapiens
  CDR3 for beta chain variable domain of TCR clone 77820 (TRBV13, TRBJ2-3)
CASSLSRVAGGRNTQYF

SEQ ID NO: 155641 - protein, 12 aa, Homo sapiens
  CDR3 for alpha chain variable domain of TCR clone 77821 (TRAV12-1, TRAJ23)
CVVNIPGGKLIF

SEQ ID NO: 155642 - protein, 15 aa, Homo sapiens
  CDR3 for beta chain variable domain of TCR clone 77821 (TRBV7-2, TRBJ2-7)
CASSLVSSGSYEQFF

SEQ ID NO: 155643 - protein, 10 aa, Homo sapiens
  CDR3 for alpha chain variable domain of TCR clone 77822 (TRAV12-3, TRAJ49)
CAMNDDQFYF

SEQ ID NO: 155644 - protein, 17 aa, Homo sapiens
  CDR3 for beta chain variable domain of TCR clone 77822 (TRBV18, TRBJ2-2)
CASSQRSSGQGPGELFF

SEQ ID NO: 155645 - protein, 10 aa, Homo sapiens
  CDR3 for alpha chain variable domain of TCR clone 77823 (TRAV30, TRAJ48)
CGIGNEKLTF

SEQ ID NO: 155646 - protein, 15 aa, Homo sapiens
  CDR3 for beta chain variable domain of TCR clone 77823 (TRBV11-3, TRBJ2-3)
CASLKDGREGDTQYF

SEQ ID NO: 155647 - protein, 13 aa, Homo sapiens
  CDR3 for alpha chain variable domain of TCR clone 77824 (TRAV17, )
CATDPTPGITMIS

SEQ ID NO: 155648 - protein, 16 aa, Homo sapiens
  CDR3 for beta chain variable domain of TCR clone 77824 (TRBV5-7, TRBJ1-5)
CASSLQQDREYQPQHF

SEQ ID NO: 155649 - protein, 13 aa, Homo sapiens
  CDR3 for alpha chain variable domain of TCR clone 77825 (TRAV12-3, TRAJ13)
CAMTSGGYQKVTF

SEQ ID NO: 155650 - protein, 13 aa, Homo sapiens
  CDR3 for beta chain variable domain of TCR clone 77825 (TRBV7-9, TRBJ1-2)
CASSLKQNYGYAF

SEQ ID NO: 155651 - protein, 18 aa, Homo sapiens
  CDR3 for alpha chain variable domain of TCR clone 77826 (TRAV26-1, TRAJ23)
CIARVGLEVWNQGGKLIF

SEQ ID NO: 155652 - protein, 14 aa, Homo sapiens
  CDR3 for beta chain variable domain of TCR clone 77826 (TRBV7-6, TRBJ2-3)
CASSLGTVTDTQYF

SEQ ID NO: 155653 - protein, 11 aa, Homo sapiens
  CDR3 for alpha chain variable domain of TCR clone 77827 (TRAV3, TRAJ21)
CAVGNFNKFYF

SEQ ID NO: 155654 - protein, 15 aa, Homo sapiens
  CDR3 for beta chain variable domain of TCR clone 77827 (TRBV11-2, TRBJ2-1)
CASSSPSTRYNEQFF

SEQ ID NO: 155655 - protein, 14 aa, Homo sapiens
  CDR3 for alpha chain variable domain of TCR clone 77828 (TRAV34, TRAJ44)
CGADGTGTASKLTF

SEQ ID NO: 155656 - protein, 13 aa, Homo sapiens
  CDR3 for beta chain variable domain of TCR clone 77828 (TRBV10-3, TRBJ2-7)
CASKLAVNYEQYF

SEQ ID NO: 155657 - protein, 16 aa, Homo sapiens
  CDR3 for alpha chain variable domain of TCR clone 77829 (TRAV35, TRAJ37)
CWAFLRGSSNTGKLIF

SEQ ID NO: 155658 - protein, 13 aa, Homo sapiens
  CDR3 for beta chain variable domain of TCR clone 77829 (TRBV2, TRBJ1-2)
CASSVRGNYGYTV

SEQ ID NO: 155659 - protein, 15 aa, Homo sapiens
  CDR3 for alpha chain variable domain of TCR clone 77830 (TRAV1-1, TRAJ5)
CAVRHMDTGRRALTF

SEQ ID NO: 155660 - protein, 13 aa, Homo sapiens
  CDR3 for beta chain variable domain of TCR clone 77830 (TRBV7-9, TRBJ2-7)
CASSFAGAYEQYF

SEQ ID NO: 155661 - protein, 16 aa, Homo sapiens
  CDR3 for alpha chain variable domain of TCR clone 77831 (TRAV30, TRAJ24)
CGTEIVDADSWGKFQF

SEQ ID NO: 155662 - protein, 12 aa, Homo sapiens
  CDR3 for beta chain variable domain of TCR clone 77831 (TRBV6-5, TRBJ2-3)
CASSDTTDTQYF

SEQ ID NO: 155663 - protein, 14 aa, Homo sapiens
  CDR3 for alpha chain variable domain of TCR clone 77832 (TRAV12-3, TRAJ10)
SHLPLTGGGNKLTF

SEQ ID NO: 155664 - protein, 13 aa, Homo sapiens
  CDR3 for beta chain variable domain of TCR clone 77832 (TRBV7-6, TRBJ2-7)
CASSLDHTHEQYF

SEQ ID NO: 155665 - protein, 13 aa, Homo sapiens
  CDR3 for alpha chain variable domain of TCR clone 77833 (TRAV3, TRAJ29)
CAVRDIIDTPLVF

SEQ ID NO: 155666 - protein, 14 aa, Homo sapiens
  CDR3 for beta chain variable domain of TCR clone 77833 (TRBV27, TRBJ2-1)
CASSATGGHNEQFF

SEQ ID NO: 155667 - protein, 11 aa, Homo sapiens
  CDR3 for alpha chain variable domain of TCR clone 77834 (TRAV3, TRAJ32)
CAVREGIMVVL

SEQ ID NO: 155668 - protein, 13 aa, Homo sapiens
  CDR3 for beta chain variable domain of TCR clone 77834 (TRBV2, TRBJ1-1)
CAGSEGGNTEAFF

SEQ ID NO: 155669 - protein, 14 aa, Homo sapiens
  CDR3 for alpha chain variable domain of TCR clone 77835 (TRAV13-1, TRAJ44)
CAAKATGTASKLTF

SEQ ID NO: 155670 - protein, 16 aa, Homo sapiens
  CDR3 for beta chain variable domain of TCR clone 77835 (TRBV19, TRBJ2-2)
CASRSPGTGATGELFF

SEQ ID NO: 155671 - protein, 15 aa, Homo sapiens
  CDR3 for alpha chain variable domain of TCR clone 77836 (TRAV8-1, TRAJ6)
CAVNTPPGGSYIPTF

SEQ ID NO: 155672 - protein, 14 aa, Homo sapiens
  CDR3 for beta chain variable domain of TCR clone 77836 (TRBV12-4, TRBJ2-1)
CASSLGQGASEQFF

SEQ ID NO: 155673 - protein, 15 aa, Homo sapiens
  CDR3 for alpha chain variable domain of TCR clone 77837 (TRAV21, TRAJ56)
CAVTKYTGADSKLTF

SEQ ID NO: 155674 - protein, 14 aa, Homo sapiens
  CDR3 for beta chain variable domain of TCR clone 77837 (TRBV20-1, TRBJ2-3)
CSARVRGSTDTQYF

SEQ ID NO: 155675 - protein, 14 aa, Homo sapiens
  CDR3 for alpha chain variable domain of TCR clone 77838 (TRAV2, TRAJ9)
CAVDPNTGGFKTIF

SEQ ID NO: 155676 - protein, 13 aa, Homo sapiens
  CDR3 for beta chain variable domain of TCR clone 77838 (TRBV20-1, TRBJ2-1)
CSASTGASNEQFF

SEQ ID NO: 155677 - protein, 15 aa, Homo sapiens
  CDR3 for alpha chain variable domain of TCR clone 77839 (TRAV25, TRAJ53)
CAATGGGGSNYELTF

SEQ ID NO: 155678 - protein, 19 aa, Homo sapiens
  CDR3 for beta chain variable domain of TCR clone 77839 (TRBV7-2, TRBJ2-3)
CASSFLSRNWGGGTDTQYF

SEQ ID NO: 155679 - protein, 14 aa, Homo sapiens
  CDR3 for alpha chain variable domain of TCR clone 77840 (TRAV1-2, TRAJ16)
CAVNRFSDGQKLLF

SEQ ID NO: 155680 - protein, 15 aa, Homo sapiens
  CDR3 for beta chain variable domain of TCR clone 77840 (TRBV19, TRBJ2-1)
CASSSPGVPLDEQFF

SEQ ID NO: 155681 - protein, 13 aa, Homo sapiens
  CDR3 for alpha chain variable domain of TCR clone 77841 (TRAV13-1, TRAJ39)
CSASIWAGNMLTF

SEQ ID NO: 155682 - protein, 15 aa, Homo sapiens
  CDR3 for beta chain variable domain of TCR clone 77841 (TRBV7-9, TRBJ1-1)
CASSLLEQGGTEAFF

SEQ ID NO: 155683 - protein, 12 aa, Homo sapiens
  CDR3 for alpha chain variable domain of TCR clone 77842 (TRAV8-6, TRAJ57)
CAVQGGSEKLVF

SEQ ID NO: 155684 - protein, 11 aa, Homo sapiens
  CDR3 for beta chain variable domain of TCR clone 77842 (TRBV19, TRBJ1-1)
CASSIGSEAFS

SEQ ID NO: 155685 - protein, 13 aa, Homo sapiens
  CDR3 for alpha chain variable domain of TCR clone 77843 (TRAV12-3, TRAJ33)
CAMSVNSNYQLIW

SEQ ID NO: 155686 - protein, 14 aa, Homo sapiens
  CDR3 for beta chain variable domain of TCR clone 77843 (TRBV27, TRBJ2-5)
CASSSLKGWETQYL

SEQ ID NO: 155687 - protein, 13 aa, Homo sapiens
  CDR3 for alpha chain variable domain of TCR clone 77844 (TRAV27, TRAJ49)
CAPRQYTGNQFYF

SEQ ID NO: 155688 - protein, 16 aa, Homo sapiens
  CDR3 for beta chain variable domain of TCR clone 77844 (TRBV4-1, TRBJ1-2)
CASSQDAGQVLYGYTF

SEQ ID NO: 155689 - protein, 14 aa, Homo sapiens
  CDR3 for alpha chain variable domain of TCR clone 77845 (TRAV1-2, TRAJ16)
CAVNRFSDGQKLIF

SEQ ID NO: 155690 - protein, 16 aa, Homo sapiens
  CDR3 for beta chain variable domain of TCR clone 77845 (TRBV20-1, TRBJ1-4)
CSAPGQGLLTNEKLFF

SEQ ID NO: 155691 - protein, 12 aa, Homo sapiens
  CDR3 for alpha chain variable domain of TCR clone 77846 (TRAV38-1, TRAJ32)
CAPLGATNKLIF

SEQ ID NO: 155692 - protein, 14 aa, Homo sapiens
  CDR3 for beta chain variable domain of TCR clone 77846 (TRBV29-1, TRBJ2-5)
CSIETSGSGETQYF

SEQ ID NO: 155693 - protein, 16 aa, Homo sapiens
  CDR3 for alpha chain variable domain of TCR clone 77847 (TRAV12-3, TRAJ53)
CAMSPGSGGSDYKLTF

SEQ ID NO: 155694 - protein, 14 aa, Homo sapiens
  CDR3 for beta chain variable domain of TCR clone 77847 (TRBV4-2, TRBJ2-1)
CASGLDRAYNEQFF

SEQ ID NO: 155695 - protein, 13 aa, Homo sapiens
  CDR3 for alpha chain variable domain of TCR clone 77848 (TRAV2, TRAJ40)
CAVVTSGTYKYIF

SEQ ID NO: 155696 - protein, 16 aa, Homo sapiens
  CDR3 for beta chain variable domain of TCR clone 77848 (TRBV7-3, TRBJ2-1)
CASSLGGYRSYNEQFF

SEQ ID NO: 155697 - protein, 13 aa, Homo sapiens
  CDR3 for alpha chain variable domain of TCR clone 77849 (TRAV17, TRAJ26)
CATVDNYGQNFVF

SEQ ID NO: 155698 - protein, 12 aa, Homo sapiens
  CDR3 for beta chain variable domain of TCR clone 77849 (TRBV7-9, TRBJ2-7)
CASSIKREEQYF

SEQ ID NO: 155699 - protein, 17 aa, Homo sapiens
  CDR3 for alpha chain variable domain of TCR clone 77850 (TRAV8-4, TRAJ53)
CAASWKSSGGSNYKLTF

SEQ ID NO: 155700 - protein, 19 aa, Homo sapiens
  CDR3 for beta chain variable domain of TCR clone 77850 (TRBV7-9, TRBJ2-1)
CASSHNRGALLRSYSEQFF

SEQ ID NO: 155701 - protein, 12 aa, Homo sapiens
  CDR3 for alpha chain variable domain of TCR clone 77851 (TRAV1-2, TRAJ26)
CAVRYYGQNFVF

SEQ ID NO: 155702 - protein, 15 aa, Homo sapiens
  CDR3 for beta chain variable domain of TCR clone 77851 (TRBV19, TRBJ2-7)
CASSPAGSGEALRYF

SEQ ID NO: 155703 - protein, 14 aa, Homo sapiens
  CDR3 for alpha chain variable domain of TCR clone 77852 (TRAV2, TRAJ37)
RAVDFTSNTGKLIF

SEQ ID NO: 155704 - protein, 14 aa, Homo sapiens
  CDR3 for beta chain variable domain of TCR clone 77852 (TRBV5-1, TRBJ2-5)
CASSFGGSQETQYF

SEQ ID NO: 155705 - protein, 13 aa, Homo sapiens
  CDR3 for alpha chain variable domain of TCR clone 77853 (TRAV20, TRAJ31)
CAVQAWNNARLMF

SEQ ID NO: 155706 - protein, 13 aa, Homo sapiens
  CDR3 for beta chain variable domain of TCR clone 77853 (TRBV7-9, TRBJ1-2)
CASSLKQNYGYTF

SEQ ID NO: 155707 - protein, 14 aa, Homo sapiens
  CDR3 for alpha chain variable domain of TCR clone 77854 (TRAV8-4, TRAJ9)
CAVSDRTGGFKTIF

SEQ ID NO: 155708 - protein, 15 aa, Homo sapiens
  CDR3 for beta chain variable domain of TCR clone 77854 (TRBV7-3, TRBJ2-1)
CASSPTGGGEVEQFF

SEQ ID NO: 155709 - protein, 12 aa, Homo sapiens
  CDR3 for alpha chain variable domain of TCR clone 77855 (TRAV8-3, TRAJ20)
CAVGANDYKLSF

SEQ ID NO: 155710 - protein, 16 aa, Homo sapiens
  CDR3 for beta chain variable domain of TCR clone 77855 (TRBV19, TRBJ2-2)
CASRSPGTGASGELFF

SEQ ID NO: 155711 - protein, 11 aa, Homo sapiens
  CDR3 for alpha chain variable domain of TCR clone 77856 (TRAV2, TRAJ13)
CASGGYQKVTF

SEQ ID NO: 155712 - protein, 15 aa, Homo sapiens
  CDR3 for beta chain variable domain of TCR clone 77856 (TRBV6-1, TRBJ2-2)
CASSRLRGVTGELFF

SEQ ID NO: 155713 - protein, 11 aa, Homo sapiens
  CDR3 for alpha chain variable domain of TCR clone 77857 (TRAV2, TRAJ13)
CASGGYQKVTF

SEQ ID NO: 155714 - protein, 16 aa, Homo sapiens
  CDR3 for beta chain variable domain of TCR clone 77857 (TRBV29-1, TRBJ2-7)
CSVEDAEDGTAYEQYF

SEQ ID NO: 155715 - protein, 11 aa, Homo sapiens
  CDR3 for alpha chain variable domain of TCR clone 77858 (TRAV2, TRAJ33)
CAVDSNYQLIW

SEQ ID NO: 155716 - protein, 13 aa, Homo sapiens
  CDR3 for beta chain variable domain of TCR clone 77858 (TRBV7-2, TRBJ2-7)
CASSSPSGGEQYF

SEQ ID NO: 155717 - protein, 15 aa, Homo sapiens
  CDR3 for alpha chain variable domain of TCR clone 77859 (TRAV4, TRAJ39)
CLVGPNNNAGNMLTV

SEQ ID NO: 155718 - protein, 13 aa, Homo sapiens
  CDR3 for beta chain variable domain of TCR clone 77859 (TRBV11-2, TRBJ2-5)
CASSSTGEETQYF

SEQ ID NO: 155719 - protein, 16 aa, Homo sapiens
  CDR3 for alpha chain variable domain of TCR clone 77860 (TRAV12-1, TRAJ42)
CVVTHYYGGSQGNLIF

SEQ ID NO: 155720 - protein, 15 aa, Homo sapiens
  CDR3 for beta chain variable domain of TCR clone 77860 (TRBV4-3, TRBJ2-7)
CASSQGGRGIYEQYF

SEQ ID NO: 155721 - protein, 17 aa, Homo sapiens
  CDR3 for alpha chain variable domain of TCR clone 77861 (TRAV3, TRAJ6)
CAVRDGPRAGGSYIPTS

SEQ ID NO: 155722 - protein, 14 aa, Homo sapiens
  CDR3 for beta chain variable domain of TCR clone 77861 (TRBV7-2, TRBJ2-7)
CASSHKTSFYEQYF

SEQ ID NO: 155723 - protein, 15 aa, Homo sapiens
  CDR3 for alpha chain variable domain of TCR clone 77862 (TRAV3, TRAJ47)
CAVRDIGEYGNKLVV

SEQ ID NO: 155724 - protein, 14 aa, Homo sapiens
  CDR3 for beta chain variable domain of TCR clone 77862 (TRBV13, TRBJ2-5)
CASSLERVGETQYF

SEQ ID NO: 155725 - protein, 16 aa, Homo sapiens
  CDR3 for alpha chain variable domain of TCR clone 77863 (TRAV30, TRAJ24)
CGTEIVDADSWGKFQF

SEQ ID NO: 155726 - protein, 11 aa, Homo sapiens
  CDR3 for beta chain variable domain of TCR clone 77863 (TRBV11-2, TRBJ2-2)
CQQPWRRELFF

SEQ ID NO: 155727 - protein, 15 aa, Homo sapiens
  CDR3 for alpha chain variable domain of TCR clone 77864 (TRAV8-2, TRAJ40)
CVVLGTTSGTYKYIF

SEQ ID NO: 155728 - protein, 14 aa, Homo sapiens
  CDR3 for beta chain variable domain of TCR clone 77864 (TRBV12-5, TRBJ2-5)
CASGSRTHQETQYF

SEQ ID NO: 155729 - protein, 13 aa, Homo sapiens
  CDR3 for alpha chain variable domain of TCR clone 77865 (TRAV20, TRAJ49)
CAVQARTGNQFYF

SEQ ID NO: 155730 - protein, 12 aa, Homo sapiens
  CDR3 for beta chain variable domain of TCR clone 77865 (TRBV11-2, TRBJ2-1)
CASSPGNNEQFF

SEQ ID NO: 155731 - protein, 15 aa, Homo sapiens
  CDR3 for alpha chain variable domain of TCR clone 77866 (TRAV13-1, TRAJ32)
CAASNGWWCYKQAHL

SEQ ID NO: 155732 - protein, 17 aa, Homo sapiens
  CDR3 for beta chain variable domain of TCR clone 77866 (TRBV15, TRBJ1-2)
CATSGWEIDVVNYGYTF

SEQ ID NO: 155733 - protein, 11 aa, Homo sapiens
  CDR3 for alpha chain variable domain of TCR clone 77867 (TRAV1-2, TRAJ31)
CAVNNNARLMF

SEQ ID NO: 155734 - protein, 15 aa, Homo sapiens
  CDR3 for beta chain variable domain of TCR clone 77867 (TRBV28, TRBJ2-1)
CASSIIAGCRSEQFF

SEQ ID NO: 155735 - protein, 17 aa, Homo sapiens
  CDR3 for alpha chain variable domain of TCR clone 77868 (TRAV8-6, TRAJ22)
CAVSLYPSSDSARQLTF

SEQ ID NO: 155736 - protein, 16 aa, Homo sapiens
  CDR3 for beta chain variable domain of TCR clone 77868 (TRBV19, TRBJ2-7)
CASSPAGSGSLNEQYF

SEQ ID NO: 155737 - protein, 15 aa, Homo sapiens
  CDR3 for alpha chain variable domain of TCR clone 77869 (TRAV12-1, TRAJ44)
CVVFVTTGTASKLTF

SEQ ID NO: 155738 - protein, 17 aa, Homo sapiens
  CDR3 for beta chain variable domain of TCR clone 77869 (TRBV7-8, TRBJ2-6)
CASSAGTGGAGANVLTF

SEQ ID NO: 155739 - protein, 15 aa, Homo sapiens
  CDR3 for alpha chain variable domain of TCR clone 77870 (TRAV21, TRAJ53)
CATLNSGGSNFKLTF

SEQ ID NO: 155740 - protein, 16 aa, Homo sapiens
  CDR3 for beta chain variable domain of TCR clone 77870 (TRBV9, TRBJ2-1)
CASSVGGGGNYNEQFF

SEQ ID NO: 155741 - protein, 14 aa, Homo sapiens
  CDR3 for alpha chain variable domain of TCR clone 77871 (TRAV12-3, TRAJ15)
CAMIPPQAGTALIF

SEQ ID NO: 155742 - protein, 14 aa, Homo sapiens
  CDR3 for beta chain variable domain of TCR clone 77871 (TRBV20-1, TRBJ2-2)
CSARKRLATGEPFF

SEQ ID NO: 155743 - protein, 15 aa, Homo sapiens
  CDR3 for alpha chain variable domain of TCR clone 77872 (TRAV26-1, TRAJ29)
CIVRVEGSGNTPLVF

SEQ ID NO: 155744 - protein, 13 aa, Homo sapiens
  CDR3 for beta chain variable domain of TCR clone 77872 (TRBV10-1, TRBJ2-1)
CASSAGPDNEQFF

SEQ ID NO: 155745 - protein, 14 aa, Homo sapiens
  CDR3 for alpha chain variable domain of TCR clone 77873 (TRAV35, TRAJ33)
CAGSSQDSNYQLIW

SEQ ID NO: 155746 - protein, 15 aa, Homo sapiens
  CDR3 for beta chain variable domain of TCR clone 77873 (TRBV20-1, TRBJ2-7)
CSAESGPSGAYEQYF

SEQ ID NO: 155747 - protein, 14 aa, Homo sapiens
  CDR3 for alpha chain variable domain of TCR clone 77874 (TRAV12-1, TRAJ12)
CVVTSGDSSYKLIF

SEQ ID NO: 155748 - protein, 14 aa, Homo sapiens
  CDR3 for beta chain variable domain of TCR clone 77874 (TRBV12-5, TRBJ2-5)
CASGSRTHQETQYF

SEQ ID NO: 155749 - protein, 14 aa, Homo sapiens
  CDR3 for alpha chain variable domain of TCR clone 77875 (TRAV12-1, TRAJ54)
YVVNIYQGAQKLVF

SEQ ID NO: 155750 - protein, 16 aa, Homo sapiens
  CDR3 for beta chain variable domain of TCR clone 77875 (TRBV7-2, TRBJ2-3)
CASSLVALYSTDTQYF

SEQ ID NO: 155751 - protein, 14 aa, Homo sapiens
  CDR3 for alpha chain variable domain of TCR clone 77876 (TRAV1-2, TRAJ16)
CVVNRFSDGQKLLF

SEQ ID NO: 155752 - protein, 15 aa, Homo sapiens
  CDR3 for beta chain variable domain of TCR clone 77876 (TRBV9, TRBJ1-6)
CASGVAGTGDSPLHF

SEQ ID NO: 155753 - protein, 13 aa, Homo sapiens
  CDR3 for alpha chain variable domain of TCR clone 77877 (TRAV12-1, TRAJ34)
CVVTGYNTDNLIF

SEQ ID NO: 155754 - protein, 13 aa, Homo sapiens
  CDR3 for beta chain variable domain of TCR clone 77877 (TRBV28, TRBJ2-7)
CASKAGGVYEQYF

SEQ ID NO: 155755 - protein, 14 aa, Homo sapiens
  CDR3 for alpha chain variable domain of TCR clone 77878 (TRAV17, TRAJ45)
CATASGGGADGLTF

SEQ ID NO: 155756 - protein, 15 aa, Homo sapiens
  CDR3 for beta chain variable domain of TCR clone 77878 (TRBV6-3, TRBJ2-7)
CASSSPGTVFYEQYF

SEQ ID NO: 155757 - protein, 14 aa, Homo sapiens
  CDR3 for alpha chain variable domain of TCR clone 77879 (TRAV12-3, TRAJ10)
SHLPLTGGENKLTF

SEQ ID NO: 155758 - protein, 12 aa, Homo sapiens
  CDR3 for beta chain variable domain of TCR clone 77879 (TRBV7-8, TRBJ2-7)
CASSLGDREQYF

SEQ ID NO: 155759 - protein, 13 aa, Homo sapiens
  CDR3 for alpha chain variable domain of TCR clone 77880 (TRAV8-3, TRAJ36)
CAVGATGANNLFF

SEQ ID NO: 155760 - protein, 15 aa, Homo sapiens
  CDR3 for beta chain variable domain of TCR clone 77880 (TRBV7-2, TRBJ1-2)
CASSPRAGGNYGYTF

SEQ ID NO: 155761 - protein, 16 aa, Homo sapiens
  CDR3 for alpha chain variable domain of TCR clone 77881 (TRAV30, TRAJ24)
CGTEIVDADSWGKFQF

SEQ ID NO: 155762 - protein, 15 aa, Homo sapiens
  CDR3 for beta chain variable domain of TCR clone 77881 (TRBV7-9, TRBJ1-4)
CASSARTGGNEKLFF

SEQ ID NO: 155763 - protein, 13 aa, Homo sapiens
  CDR3 for alpha chain variable domain of TCR clone 77882 (TRAV12-3, TRAJ56)
CAMSFGANSELTF

SEQ ID NO: 155764 - protein, 15 aa, Homo sapiens
  CDR3 for beta chain variable domain of TCR clone 77882 (TRBV6-3, TRBJ2-7)
CASSSPGTVFYEQYF

SEQ ID NO: 155765 - protein, 13 aa, Homo sapiens
  CDR3 for alpha chain variable domain of TCR clone 77883 (TRAV8-3, TRAJ48)
CAVVPFGNENLTF

SEQ ID NO: 155766 - protein, 15 aa, Homo sapiens
  CDR3 for beta chain variable domain of TCR clone 77883 (TRBV11-2, TRBJ2-1)
CASSSPSTRYNEQFF

SEQ ID NO: 155767 - protein, 13 aa, Homo sapiens
  CDR3 for alpha chain variable domain of TCR clone 77884 (TRAV27, TRAJ42)
CARARGSQGNLIF

SEQ ID NO: 155768 - protein, 15 aa, Homo sapiens
  CDR3 for beta chain variable domain of TCR clone 77884 (TRBV10-3, TRBJ2-2)
CAIRTDREDTGELFF

SEQ ID NO: 155769 - protein, 15 aa, Homo sapiens
  CDR3 for alpha chain variable domain of TCR clone 77885 (TRAV4, TRAJ39)
CLVGPHNNAGNMLTF

SEQ ID NO: 155770 - protein, 14 aa, Homo sapiens
  CDR3 for beta chain variable domain of TCR clone 77885 (TRBV11-2, TRBJ2-5)
CASSRTGGIETQYF

SEQ ID NO: 155771 - protein, 14 aa, Homo sapiens
  CDR3 for alpha chain variable domain of TCR clone 77886 (TRAV1-2, TRAJ16)
RAVNRFSDGQKLLF

SEQ ID NO: 155772 - protein, 16 aa, Homo sapiens
  CDR3 for beta chain variable domain of TCR clone 77886 (TRBV11-2, TRBJ1-2)
CASSLDTGGADYGYTF

SEQ ID NO: 155773 - protein, 15 aa, Homo sapiens
  CDR3 for alpha chain variable domain of TCR clone 77887 (TRAV8-4, TRAJ3)
CAVTGENLVQQCFQG

SEQ ID NO: 155774 - protein, 16 aa, Homo sapiens
  CDR3 for beta chain variable domain of TCR clone 77887 (TRBV4-2, TRBJ1-1)
CASSQAGFGMNTEAFF

SEQ ID NO: 155775 - protein, 14 aa, Homo sapiens
  CDR3 for alpha chain variable domain of TCR clone 77888 (TRAV2, TRAJ22)
CAVGRGGSARQLTF

SEQ ID NO: 155776 - protein, 15 aa, Homo sapiens
  CDR3 for beta chain variable domain of TCR clone 77888 (TRBV24-1, TRBJ2-5)
CATSETTGAVGAQYF

SEQ ID NO: 155777 - protein, 12 aa, Homo sapiens
  CDR3 for alpha chain variable domain of TCR clone 77889 (TRAV12-3, TRAJ17)
CAMTLTGNKLTF

SEQ ID NO: 155778 - protein, 10 aa, Homo sapiens
  CDR3 for beta chain variable domain of TCR clone 77889 (TRBV20-1, TRBJ2-7)
IGSLGWKQYF

SEQ ID NO: 155779 - protein, 15 aa, Homo sapiens
  CDR3 for alpha chain variable domain of TCR clone 77890 (TRAV27, TRAJ38)
CAGRFNAGNNRKLIW

SEQ ID NO: 155780 - protein, 13 aa, Homo sapiens
  CDR3 for beta chain variable domain of TCR clone 77890 (TRBV11-3, TRBJ2-3)
CASSHDTKDTQYF

SEQ ID NO: 155781 - protein, 17 aa, Homo sapiens
  CDR3 for alpha chain variable domain of TCR clone 77891 (TRAV3, TRAJ6)
CAVRDGPRAGGSYIPTF

SEQ ID NO: 155782 - protein, 14 aa, Homo sapiens
  CDR3 for beta chain variable domain of TCR clone 77891 (TRBV2, TRBJ2-3)
CASSEGQNTDTQYF

SEQ ID NO: 155783 - protein, 12 aa, Homo sapiens
  CDR3 for alpha chain variable domain of TCR clone 77892 (TRAV13-1, TRAJ15)
CAASQPGTALIF

SEQ ID NO: 155784 - protein, 14 aa, Homo sapiens
  CDR3 for beta chain variable domain of TCR clone 77892 (TRBV19, TRBJ2-2)
CASSTLHRSGELFF

SEQ ID NO: 155785 - protein, 13 aa, Homo sapiens
  CDR3 for alpha chain variable domain of TCR clone 77893 (TRAV12-3, TRAJ7)
CAMTPYGNNRLAF

SEQ ID NO: 155786 - protein, 16 aa, Homo sapiens
  CDR3 for beta chain variable domain of TCR clone 77893 (TRBV7-9, TRBJ1-2)
CASSLGFSSGEDGYTF

SEQ ID NO: 155787 - protein, 13 aa, Homo sapiens
  CDR3 for alpha chain variable domain of TCR clone 77894 (TRAV13-1, TRAJ6)
CAARRGGSYIPTF

SEQ ID NO: 155788 - protein, 16 aa, Homo sapiens
  CDR3 for beta chain variable domain of TCR clone 77894 (TRBV7-9, TRBJ2-2)
CASSLATGIGTGELFF

SEQ ID NO: 155789 - protein, 14 aa, Homo sapiens
  CDR3 for alpha chain variable domain of TCR clone 77895 (TRAV13-1, TRAJ20)
CAARPGSNDYKLSF

SEQ ID NO: 155790 - protein, 15 aa, Homo sapiens
  CDR3 for beta chain variable domain of TCR clone 77895 (TRBV15, TRBJ1-4)
CATSRDMGSYEKLFF

SEQ ID NO: 155791 - protein, 13 aa, Homo sapiens
  CDR3 for alpha chain variable domain of TCR clone 77896 (TRAV13-2, TRAJ40)
CAEFTSGNYKYIF

SEQ ID NO: 155792 - protein, 14 aa, Homo sapiens
  CDR3 for beta chain variable domain of TCR clone 77896 (TRBV10-2, TRBJ1-5)
CASSSTGRNQPQHF

SEQ ID NO: 155793 - protein, 14 aa, Homo sapiens
  CDR3 for alpha chain variable domain of TCR clone 77897 (TRAV38-1, TRAJ40)
CALRPTSGAYKYIF

SEQ ID NO: 155794 - protein, 15 aa, Homo sapiens
  CDR3 for beta chain variable domain of TCR clone 77897 (TRBV20-1, TRBJ2-7)
CSARDRVSGMDEQYF

SEQ ID NO: 155795 - protein, 14 aa, Homo sapiens
  CDR3 for alpha chain variable domain of TCR clone 77898 (TRAV2, TRAJ37)
CAVDFTSNTGKLIF

SEQ ID NO: 155796 - protein, 16 aa, Homo sapiens
  CDR3 for beta chain variable domain of TCR clone 77898 (TRBV7-9, TRBJ1-2)
CASSLGFSSGEDGYTF

SEQ ID NO: 155797 - protein, 12 aa, Homo sapiens
  CDR3 for alpha chain variable domain of TCR clone 77899 (TRAV12-3, TRAJ17)
CAMTPTGNKLTF

SEQ ID NO: 155798 - protein, 15 aa, Homo sapiens
  CDR3 for beta chain variable domain of TCR clone 77899 (TRBV20-1, TRBJ2-7)
CSARDRVSGMDEQHF

SEQ ID NO: 155799 - protein, 16 aa, Homo sapiens
  CDR3 for alpha chain variable domain of TCR clone 77900 (TRAV3, TRAJ21)
CAVRDIERGNFNKFYF

SEQ ID NO: 155800 - protein, 13 aa, Homo sapiens
  CDR3 for beta chain variable domain of TCR clone 77900 (TRBV19, TRBJ1-2)
CASSVLGQDGYTF

SEQ ID NO: 155801 - protein, 16 aa, Homo sapiens
  CDR3 for alpha chain variable domain of TCR clone 77901 (TRAV26-1, TRAJ36)
CIVRVSYQTGANNLFF

SEQ ID NO: 155802 - protein, 15 aa, Homo sapiens
  CDR3 for beta chain variable domain of TCR clone 77901 (TRBV20-1, TRBJ2-7)
CSARDRVSGMDEQYF

SEQ ID NO: 155803 - protein, 14 aa, Homo sapiens
  CDR3 for alpha chain variable domain of TCR clone 77902 (TRAV29/DV5, TRAJ42)
CATHYGGSQGNLIF

SEQ ID NO: 155804 - protein, 13 aa, Homo sapiens
  CDR3 for beta chain variable domain of TCR clone 77902 (TRBV19, TRBJ1-1)
CASSPQMNTEAFF

SEQ ID NO: 155805 - protein, 12 aa, Homo sapiens
  CDR3 for alpha chain variable domain of TCR clone 77903 (TRAV22, TRAJ36)
CAVGTGANNLFF

SEQ ID NO: 155806 - protein, 12 aa, Homo sapiens
  CDR3 for beta chain variable domain of TCR clone 77903 (TRBV11-2, TRBJ2-2)
CASSLGGGELFF

SEQ ID NO: 155807 - protein, 12 aa, Homo sapiens
  CDR3 for alpha chain variable domain of TCR clone 77904 (TRAV13-2, TRAJ8)
CAPWLGFQKLVF

SEQ ID NO: 155808 - protein, 14 aa, Homo sapiens
  CDR3 for beta chain variable domain of TCR clone 77904 (TRBV7-6, TRBJ2-7)
CAGSFRQGADEQYF

SEQ ID NO: 155809 - protein, 12 aa, Homo sapiens
  CDR3 for alpha chain variable domain of TCR clone 77905 (TRAV13-1, TRAJ21)
CAAKEGFNEFYF

SEQ ID NO: 155810 - protein, 15 aa, Homo sapiens
  CDR3 for beta chain variable domain of TCR clone 77905 (TRBV25-1, TRBJ1-4)
CASSPGDSTNEKLFF

SEQ ID NO: 155811 - protein, 16 aa, Homo sapiens
  CDR3 for alpha chain variable domain of TCR clone 77906 (TRAV20, TRAJ16)
CAVQDKRFSDGQKLLF

SEQ ID NO: 155812 - protein, 13 aa, Homo sapiens
  CDR3 for beta chain variable domain of TCR clone 77906 (TRBV7-9, TRBJ1-2)
CASSLKQNYGYTF

SEQ ID NO: 155813 - protein, 16 aa, Homo sapiens
  CDR3 for alpha chain variable domain of TCR clone 77907 (TRAV21, TRAJ52)
CAVNNAGGTSYGKMTF

SEQ ID NO: 155814 - protein, 13 aa, Homo sapiens
  CDR3 for beta chain variable domain of TCR clone 77907 (TRBV7-3, TRBJ2-3)
CASSLRGSQTQYF

SEQ ID NO: 155815 - protein, 12 aa, Homo sapiens
  CDR3 for alpha chain variable domain of TCR clone 77908 (TRAV25, TRAJ11)
CAGASGYSTLTF

SEQ ID NO: 155816 - protein, 15 aa, Homo sapiens
  CDR3 for beta chain variable domain of TCR clone 77908 (TRBV6-3, TRBJ2-7)
CASSSPGTVFYEQYF

SEQ ID NO: 155817 - protein, 17 aa, Homo sapiens
  CDR3 for alpha chain variable domain of TCR clone 77909 (TRAV3, TRAJ42)
CAVRDRDYGGSQGNIIF

SEQ ID NO: 155818 - protein, 20 aa, Homo sapiens
  CDR3 for beta chain variable domain of TCR clone 77909 (TRBV28, TRBJ2-1)
CASTPIGRSPGLAGGNEQFF

SEQ ID NO: 155819 - protein, 12 aa, Homo sapiens
  CDR3 for alpha chain variable domain of TCR clone 77910 (TRAV2, TRAJ31)
CAVEDNNARLMF

SEQ ID NO: 155820 - protein, 14 aa, Homo sapiens
  CDR3 for beta chain variable domain of TCR clone 77910 (TRBV19, TRBJ2-5)
CGSSMTGQQETQYF

SEQ ID NO: 155821 - protein, 15 aa, Homo sapiens
  CDR3 for alpha chain variable domain of TCR clone 77911 (TRAV17, TRAJ16)
CATAIRFSDGQKLLF

SEQ ID NO: 155822 - protein, 12 aa, Homo sapiens
  CDR3 for beta chain variable domain of TCR clone 77911 (TRBV2, TRBJ2-7)
CASSDPDYEQYF

SEQ ID NO: 155823 - protein, 14 aa, Homo sapiens
  CDR3 for alpha chain variable domain of TCR clone 77912 (TRAV12-1, TRAJ17)
CVVNYKAAGNKLTF

SEQ ID NO: 155824 - protein, 15 aa, Homo sapiens
  CDR3 for beta chain variable domain of TCR clone 77912 (TRBV11-3, TRBJ2-3)
CASLKDGREGDTQYF

SEQ ID NO: 155825 - protein, 11 aa, Homo sapiens
  CDR3 for alpha chain variable domain of TCR clone 77913 (TRAV3, TRAJ21)
CAVGNFKKFYF

SEQ ID NO: 155826 - protein, 17 aa, Homo sapiens
  CDR3 for beta chain variable domain of TCR clone 77913 (TRBV24-1, TRBJ2-1)
CATSDVSTSGTYNEQFF

SEQ ID NO: 155827 - protein, 16 aa, Homo sapiens
  CDR3 for alpha chain variable domain of TCR clone 77914 (TRAV21, TRAJ37)
CAVRTPGSSNTGKLIF

SEQ ID NO: 155828 - protein, 13 aa, Homo sapiens
  CDR3 for beta chain variable domain of TCR clone 77914 (TRBV7-9, TRBJ2-5)
CASLPSGRETQYF

SEQ ID NO: 155829 - protein, 18 aa, Homo sapiens
  CDR3 for alpha chain variable domain of TCR clone 77915 (TRAV26-2, TRAJ45)
CILRVDKYSGGGADGLTF

SEQ ID NO: 155830 - protein, 16 aa, Homo sapiens
  CDR3 for beta chain variable domain of TCR clone 77915 (TRBV4-1, TRBJ2-7)
CASSQDPTGYSYEQYF

SEQ ID NO: 155831 - protein, 16 aa, Homo sapiens
  CDR3 for alpha chain variable domain of TCR clone 77916 (TRAV2, TRAJ4)
CAVEDRFSGGYNKLIF

SEQ ID NO: 155832 - protein, 13 aa, Homo sapiens
  CDR3 for beta chain variable domain of TCR clone 77916 (TRBV7-7, TRBJ2-5)
CASSRSGKETQYF

SEQ ID NO: 155833 - protein, 17 aa, Homo sapiens
  CDR3 for alpha chain variable domain of TCR clone 77917 (TRAV26-1, TRAJ22)
CIVRVPSHSGSARQPTF

SEQ ID NO: 155834 - protein, 16 aa, Homo sapiens
  CDR3 for beta chain variable domain of TCR clone 77917 (TRBV28, TRBJ2-1)
CASRRSGRVVGNEQFF

SEQ ID NO: 155835 - protein, 14 aa, Homo sapiens
  CDR3 for alpha chain variable domain of TCR clone 77918 (TRAV9-2, TRAJ39)
CALYIYNAGNMLTF

SEQ ID NO: 155836 - protein, 12 aa, Homo sapiens
  CDR3 for beta chain variable domain of TCR clone 77918 (TRBV18, TRBJ2-5)
CASSPSKETQYF

SEQ ID NO: 155837 - protein, 12 aa, Homo sapiens
  CDR3 for alpha chain variable domain of TCR clone 77919 (TRAV3, TRAJ43)
CAVRDPNNDMRF

SEQ ID NO: 155838 - protein, 12 aa, Homo sapiens
  CDR3 for beta chain variable domain of TCR clone 77919 (TRBV24-1, TRBJ1-1)
RATSDSDRGAFF

SEQ ID NO: 155839 - protein, 13 aa, Homo sapiens
  CDR3 for alpha chain variable domain of TCR clone 77920 (TRAV17, TRAJ5)
CSLRGTGRRALTF

SEQ ID NO: 155840 - protein, 15 aa, Homo sapiens
  CDR3 for beta chain variable domain of TCR clone 77920 (TRBV6-1, TRBJ1-5)
CASSELREGNQPQHF

SEQ ID NO: 155841 - protein, 12 aa, Homo sapiens
  CDR3 for alpha chain variable domain of TCR clone 77921 (TRAV12-3, TRAJ17)
CAMTLTGNKLTF

SEQ ID NO: 155842 - protein, 14 aa, Homo sapiens
  CDR3 for beta chain variable domain of TCR clone 77921 (TRBV19, TRBJ2-1)
CASKDPSSYNEQFF

SEQ ID NO: 155843 - protein, 10 aa, Homo sapiens
  CDR3 for alpha chain variable domain of TCR clone 77922 (TRAV12-1, TRAJ37)
ARGSTGKLIF

SEQ ID NO: 155844 - protein, 15 aa, Homo sapiens
  CDR3 for beta chain variable domain of TCR clone 77922 (TRBV7-2, TRBJ2-3)
CASSLEQGGTDTQYF

SEQ ID NO: 155845 - protein, 16 aa, Homo sapiens
  CDR3 for alpha chain variable domain of TCR clone 77923 (TRAV16, TRAJ4)
CALSRMFSGGYNKLIF

SEQ ID NO: 155846 - protein, 15 aa, Homo sapiens
  CDR3 for beta chain variable domain of TCR clone 77923 (TRBV12-4, TRBJ2-5)
CASNTLAGYQETQYF

SEQ ID NO: 155847 - protein, 11 aa, Homo sapiens
  CDR3 for alpha chain variable domain of TCR clone 77924 (TRAV39, TRAJ49)
CAVAISTQFYF

SEQ ID NO: 155848 - protein, 11 aa, Homo sapiens
  CDR3 for beta chain variable domain of TCR clone 77924 (TRBV7-8, TRBJ2-7)
CASSLSLEQYF

SEQ ID NO: 155849 - protein, 15 aa, Homo sapiens
  CDR3 for alpha chain variable domain of TCR clone 77925 (TRAV12-3, TRAJ6)
CAMSAASGGSYIPTF

SEQ ID NO: 155850 - protein, 16 aa, Homo sapiens
  CDR3 for beta chain variable domain of TCR clone 77925 (TRBV12-5, TRBJ2-5)
CASGPRTSGNQETQYF

SEQ ID NO: 155851 - protein, 14 aa, Homo sapiens
  CDR3 for alpha chain variable domain of TCR clone 77926 (TRAV27, TRAJ23)
CAGLSYSQGGKLIF

SEQ ID NO: 155852 - protein, 15 aa, Homo sapiens
  CDR3 for beta chain variable domain of TCR clone 77926 (TRBV20-1, TRBJ2-7)
CSARDRVSGMDEQYF

SEQ ID NO: 155853 - protein, 22 aa, Homo sapiens
  CDR3 for alpha chain variable domain of TCR clone 77927 (TRAV40, )
CLLGDGIPDIQNPDPAVYQLRD

SEQ ID NO: 155854 - protein, 16 aa, Homo sapiens
  CDR3 for beta chain variable domain of TCR clone 77927 (TRBV20-1, TRBJ1-5)
CSAELPGQQTNQTQHF

SEQ ID NO: 155855 - protein, 16 aa, Homo sapiens
  CDR3 for alpha chain variable domain of TCR clone 77928 (TRAV26-2, TRAJ48)
CILRPPFNFRNEKLTF

SEQ ID NO: 155856 - protein, 15 aa, Homo sapiens
  CDR3 for beta chain variable domain of TCR clone 77928 (TRBV20-1, TRBJ2-3)
CSASVEGTYTDTQYF

SEQ ID NO: 155857 - protein, 15 aa, Homo sapiens
  CDR3 for alpha chain variable domain of TCR clone 77929 (TRAV2, TRAJ22)
CAVPSRGGSARQLTF

SEQ ID NO: 155858 - protein, 11 aa, Homo sapiens
  CDR3 for beta chain variable domain of TCR clone 77929 (TRBV27, TRBJ2-3)
CVSSLGDTQYF

SEQ ID NO: 155859 - protein, 13 aa, Homo sapiens
  CDR3 for alpha chain variable domain of TCR clone 77930 (TRAV1-2, TRAJ11)
CAVRDSGYSTLTF

SEQ ID NO: 155860 - protein, 15 aa, Homo sapiens
  CDR3 for beta chain variable domain of TCR clone 77930 (TRBV2, TRBJ2-5)
CASSSSVAGGETQYF

SEQ ID NO: 155861 - protein, 14 aa, Homo sapiens
  CDR3 for alpha chain variable domain of TCR clone 77931 (TRAV2, TRAJ9)
CAVEDRRGGFKTIF

SEQ ID NO: 155862 - protein, 14 aa, Homo sapiens
  CDR3 for beta chain variable domain of TCR clone 77931 (TRBV18, TRBJ2-7)
CASSPRGGAYEQYF

SEQ ID NO: 155863 - protein, 14 aa, Homo sapiens
  CDR3 for alpha chain variable domain of TCR clone 77932 (TRAV12-2, TRAJ17)
CPVLFKAAGNKLTF

SEQ ID NO: 155864 - protein, 17 aa, Homo sapiens
  CDR3 for beta chain variable domain of TCR clone 77932 (TRBV20-1, TRBJ2-2)
CSASGSGQGGLTGELFF

SEQ ID NO: 155865 - protein, 16 aa, Homo sapiens
  CDR3 for alpha chain variable domain of TCR clone 77933 (TRAV4, TRAJ37)
CLVGWFGSSNTDKLIF

SEQ ID NO: 155866 - protein, 15 aa, Homo sapiens
  CDR3 for beta chain variable domain of TCR clone 77933 (TRBV12-4, TRBJ2-3)
CASSLAERPTDTQYF

SEQ ID NO: 155867 - protein, 13 aa, Homo sapiens
  CDR3 for alpha chain variable domain of TCR clone 77934 (TRAV20, TRAJ48)
CAVQGVGNEKSTF

SEQ ID NO: 155868 - protein, 19 aa, Homo sapiens
  CDR3 for beta chain variable domain of TCR clone 77934 (TRBV2, TRBJ2-2)
CASSQPGLAGGGNTGELFF

SEQ ID NO: 155869 - protein, 16 aa, Homo sapiens
  CDR3 for alpha chain variable domain of TCR clone 77935 (TRAV35, TRAJ37)
CWAFLRGSSNTVKLIF

SEQ ID NO: 155870 - protein, 13 aa, Homo sapiens
  CDR3 for beta chain variable domain of TCR clone 77935 (TRBV2, TRBJ1-2)
CASSVRGNYGYTF

SEQ ID NO: 155871 - protein, 15 aa, Homo sapiens
  CDR3 for alpha chain variable domain of TCR clone 77936 (TRAV26-1, TRAJ3)
CIVRSGYSSASKIIF

SEQ ID NO: 155872 - protein, 14 aa, Homo sapiens
  CDR3 for beta chain variable domain of TCR clone 77936 (TRBV13, TRBJ2-5)
CASYRRLEEETQYF

SEQ ID NO: 155873 - protein, 17 aa, Homo sapiens
  CDR3 for alpha chain variable domain of TCR clone 77937 (TRAV8-6, TRAJ8)
CAVKEGIANTGFQKLVF

SEQ ID NO: 155874 - protein, 12 aa, Homo sapiens
  CDR3 for beta chain variable domain of TCR clone 77937 (TRBV19, TRBJ1-4)
CASKDWPGGLFF

SEQ ID NO: 155875 - protein, 12 aa, Homo sapiens
  CDR3 for alpha chain variable domain of TCR clone 77938 (TRAV27, TRAJ21)
CAGVRQLQQLLL

SEQ ID NO: 155876 - protein, 14 aa, Homo sapiens
  CDR3 for beta chain variable domain of TCR clone 77938 (TRBV7-9, TRBJ1-4)
CASSLEGQSEKLFF

SEQ ID NO: 155877 - protein, 12 aa, Homo sapiens
  CDR3 for alpha chain variable domain of TCR clone 77939 (TRAV26-1, TRAJ17)
CIVRSAGNKLTF

SEQ ID NO: 155878 - protein, 16 aa, Homo sapiens
  CDR3 for beta chain variable domain of TCR clone 77939 (TRBV15, TRBJ1-2)
CATSRGPRTGGGGYTF

SEQ ID NO: 155879 - protein, 13 aa, Homo sapiens
  CDR3 for alpha chain variable domain of TCR clone 77940 (TRAV9-2, TRAJ53)
CALSGGSNYKLTF

SEQ ID NO: 155880 - protein, 17 aa, Homo sapiens
  CDR3 for beta chain variable domain of TCR clone 77940 (TRBV11-2, TRBJ2-1)
CASSLYPPGVEYNEQVF

SEQ ID NO: 155881 - protein, 14 aa, Homo sapiens
  CDR3 for alpha chain variable domain of TCR clone 77941 (TRAV23/DV6, TRAJ4)
CAANLSGGYNKLIF

SEQ ID NO: 155882 - protein, 11 aa, Homo sapiens
  CDR3 for beta chain variable domain of TCR clone 77941 (TRBV7-9, TRBJ2-3)
CASSPTDTQYL

SEQ ID NO: 155883 - protein, 14 aa, Homo sapiens
  CDR3 for alpha chain variable domain of TCR clone 77942 (TRAV36/DV7, TRAJ53)
CAVVDGGSNYKLTF

SEQ ID NO: 155884 - protein, 15 aa, Homo sapiens
  CDR3 for beta chain variable domain of TCR clone 77942 (TRBV28, TRBJ1-3)
CASSMGWASGNTIYF

SEQ ID NO: 155885 - protein, 14 aa, Homo sapiens
  CDR3 for alpha chain variable domain of TCR clone 77943 (TRAV8-2, TRAJ37)
CVVSISGNTGKLIF

SEQ ID NO: 155886 - protein, 17 aa, Homo sapiens
  CDR3 for beta chain variable domain of TCR clone 77943 (TRBV7-9, TRBJ2-3)
CAGSPTVAGDLTDTQYF

SEQ ID NO: 155887 - protein, 20 aa, Homo sapiens
  CDR3 for alpha chain variable domain of TCR clone 77944 (TRAV12-1, TRAJ42)
SSVIQPTTSVKGGSQGNLIF

SEQ ID NO: 155888 - protein, 18 aa, Homo sapiens
  CDR3 for beta chain variable domain of TCR clone 77944 (TRBV11-2, TRBJ2-3)
CASSLGGASRGAPNTQYF

SEQ ID NO: 155889 - protein, 18 aa, Homo sapiens
  CDR3 for alpha chain variable domain of TCR clone 77945 (TRAV12-3, TRAJ52)
CAMSRTNAGGTSYGKLTF

SEQ ID NO: 155890 - protein, 14 aa, Homo sapiens
  CDR3 for beta chain variable domain of TCR clone 77945 (TRBV19, TRBJ1-4)
CASSINRGGEKLFF

SEQ ID NO: 155891 - protein, 14 aa, Homo sapiens
  CDR3 for alpha chain variable domain of TCR clone 77946 (TRAV1-2, TRAJ16)
CAVNRFSDGQELLF

SEQ ID NO: 155892 - protein, 14 aa, Homo sapiens
  CDR3 for beta chain variable domain of TCR clone 77946 (TRBV19, TRBJ2-2)
CASSTLHRSGELFF

SEQ ID NO: 155893 - protein, 12 aa, Homo sapiens
  CDR3 for alpha chain variable domain of TCR clone 77947 (TRAV1-2, TRAJ29)
CAVPSGNTPLVF

SEQ ID NO: 155894 - protein, 12 aa, Homo sapiens
  CDR3 for beta chain variable domain of TCR clone 77947 (TRBV12-4, TRBJ2-7)
CASSLGGYEQYV

SEQ ID NO: 155895 - protein, 15 aa, Homo sapiens
  CDR3 for alpha chain variable domain of TCR clone 77948 (TRAV26-1, TRAJ29)
CIVRVEGSGNTPLVF

SEQ ID NO: 155896 - protein, 14 aa, Homo sapiens
  CDR3 for beta chain variable domain of TCR clone 77948 (TRBV25-1, TRBJ1-1)
CASTHLGGNTEAVF

SEQ ID NO: 155897 - protein, 15 aa, Homo sapiens
  CDR3 for alpha chain variable domain of TCR clone 77949 (TRAV30, TRAJ32)
CGTEILGGATNKLIF

SEQ ID NO: 155898 - protein, 13 aa, Homo sapiens
  CDR3 for beta chain variable domain of TCR clone 77949 (TRBV6-3, TRBJ2-7)
CASSCSGGYEQYF

SEQ ID NO: 155899 - protein, 16 aa, Homo sapiens
  CDR3 for alpha chain variable domain of TCR clone 77950 (TRAV30, TRAJ24)
CGTEIVDADSWGKFKF

SEQ ID NO: 155900 - protein, 13 aa, Homo sapiens
  CDR3 for beta chain variable domain of TCR clone 77950 (TRBV10-3, TRBJ2-7)
CASKLAVNYEQYF

SEQ ID NO: 155901 - protein, 12 aa, Homo sapiens
  CDR3 for alpha chain variable domain of TCR clone 77951 (TRAV4, TRAJ21)
CLVGDNFNKFYF

SEQ ID NO: 155902 - protein, 13 aa, Homo sapiens
  CDR3 for beta chain variable domain of TCR clone 77951 (TRBV7-9, TRBJ1-2)
CASSLKQNYGYTF

SEQ ID NO: 155903 - protein, 14 aa, Homo sapiens
  CDR3 for alpha chain variable domain of TCR clone 77952 (TRAV20, TRAJ56)
CAVQFGGANSRLTF

SEQ ID NO: 155904 - protein, 14 aa, Homo sapiens
  CDR3 for beta chain variable domain of TCR clone 77952 (TRBV20-1, TRBJ2-7)
CSAKRGRSSYEQYF

SEQ ID NO: 155905 - protein, 13 aa, Homo sapiens
  CDR3 for alpha chain variable domain of TCR clone 77953 (TRAV26-2, TRAJ43)
CILRAVNNNDMRF

SEQ ID NO: 155906 - protein, 11 aa, Homo sapiens
  CDR3 for beta chain variable domain of TCR clone 77953 (TRBV19, TRBJ1-1)
CASSIGSEAFF

SEQ ID NO: 155907 - protein, 15 aa, Homo sapiens
  CDR3 for alpha chain variable domain of TCR clone 77954 (TRAV17, TRAJ56)
CATDANTGANSKLTF

SEQ ID NO: 155908 - protein, 13 aa, Homo sapiens
  CDR3 for beta chain variable domain of TCR clone 77954 (TRBV10-3, TRBJ2-7)
CASKLAVNYEQYF

SEQ ID NO: 155909 - protein, 15 aa, Homo sapiens
  CDR3 for alpha chain variable domain of TCR clone 77955 (TRAV12-1, TRAJ6)
CVVNCPLRRKLHTYI

SEQ ID NO: 155910 - protein, 13 aa, Homo sapiens
  CDR3 for beta chain variable domain of TCR clone 77955 (TRBV7-3, TRBJ1-1)
CASSQDWGAEAFF

SEQ ID NO: 155911 - protein, 13 aa, Homo sapiens
  CDR3 for alpha chain variable domain of TCR clone 77956 (TRAV13-1, TRAJ5)
CAARVTGRRALTF

SEQ ID NO: 155912 - protein, 15 aa, Homo sapiens
  CDR3 for beta chain variable domain of TCR clone 77956 (TRBV28, TRBJ2-7)
CASSPGGRGFNEQYF

SEQ ID NO: 155913 - protein, 14 aa, Homo sapiens
  CDR3 for alpha chain variable domain of TCR clone 77957 (TRAV12-1, TRAJ17)
CVVNSKAAGNKLTF

SEQ ID NO: 155914 - protein, 16 aa, Homo sapiens
  CDR3 for beta chain variable domain of TCR clone 77957 (TRBV20-1, TRBJ2-1)
CSASASGYSSYNEQFF

SEQ ID NO: 155915 - protein, 14 aa, Homo sapiens
  CDR3 for alpha chain variable domain of TCR clone 77958 (TRAV20, TRAJ20)
CAVRRGYNDYKLSF

SEQ ID NO: 155916 - protein, 13 aa, Homo sapiens
  CDR3 for beta chain variable domain of TCR clone 77958 (TRBV19, TRBJ2-5)
CASSETAPETQYL

SEQ ID NO: 155917 - protein, 16 aa, Homo sapiens
  CDR3 for alpha chain variable domain of TCR clone 77959 (TRAV12-2, TRAJ32)
CAVNLGQGGATNKLIF

SEQ ID NO: 155918 - protein, 13 aa, Homo sapiens
  CDR3 for beta chain variable domain of TCR clone 77959 (TRBV20-1, TRBJ1-1)
CSAPDRRNTEAFF

SEQ ID NO: 155919 - protein, 15 aa, Homo sapiens
  CDR3 for alpha chain variable domain of TCR clone 77960 (TRAV8-4, TRAJ36)
CAVRKSWTGANSLFF

SEQ ID NO: 155920 - protein, 17 aa, Homo sapiens
  CDR3 for beta chain variable domain of TCR clone 77960 (TRBV3-1, TRBJ2-2)
CASSQDSQGPNTGELFF

SEQ ID NO: 155921 - protein, 14 aa, Homo sapiens
  CDR3 for alpha chain variable domain of TCR clone 77961 (TRAV3, TRAJ22)
CAVRDYGSARQLTL

SEQ ID NO: 155922 - protein, 13 aa, Homo sapiens
  CDR3 for beta chain variable domain of TCR clone 77961 (TRBV11-2, TRBJ2-5)
CASGHGAKETQYF

SEQ ID NO: 155923 - protein, 14 aa, Homo sapiens
  CDR3 for alpha chain variable domain of TCR clone 77962 (TRAV29/DV5, TRAJ32)
CAAASGGATNKLIF

SEQ ID NO: 155924 - protein, 15 aa, Homo sapiens
  CDR3 for beta chain variable domain of TCR clone 77962 (TRBV27, TRBJ2-7)
CASSTAGTGSYEQYF

SEQ ID NO: 155925 - protein, 15 aa, Homo sapiens
  CDR3 for alpha chain variable domain of TCR clone 77963 (TRAV26-1, TRAJ23)
CIVRVLNNQGGKLIF

SEQ ID NO: 155926 - protein, 15 aa, Homo sapiens
  CDR3 for beta chain variable domain of TCR clone 77963 (TRBV7-3, TRBJ2-1)
CASSCGQSNYNEQFF

SEQ ID NO: 155927 - protein, 15 aa, Homo sapiens
  CDR3 for alpha chain variable domain of TCR clone 77964 (TRAV26-1, TRAJ22)
CIVRVSFWFCKATDL

SEQ ID NO: 155928 - protein, 12 aa, Homo sapiens
  CDR3 for beta chain variable domain of TCR clone 77964 (TRBV7-9, TRBJ1-1)
CASSLGDTEAFF

SEQ ID NO: 155929 - protein, 16 aa, Homo sapiens
  CDR3 for alpha chain variable domain of TCR clone 77965 (TRAV30, TRAJ53)
CGITGGSGGSNYKLTF

SEQ ID NO: 155930 - protein, 13 aa, Homo sapiens
  CDR3 for beta chain variable domain of TCR clone 77965 (TRBV11-3, TRBJ2-7)
CASSFGVGYEQYF

SEQ ID NO: 155931 - protein, 14 aa, Homo sapiens
  CDR3 for alpha chain variable domain of TCR clone 77966 (TRAV27, TRAJ22)
CAGVSVLGKRQLTF

SEQ ID NO: 155932 - protein, 17 aa, Homo sapiens
  CDR3 for beta chain variable domain of TCR clone 77966 (TRBV14, TRBJ2-1)
CASSQGRRVTSYNEQFF

SEQ ID NO: 155933 - protein, 12 aa, Homo sapiens
  CDR3 for alpha chain variable domain of TCR clone 77967 (TRAV12-3, TRAJ20)
CAMVRGDYKLSF

SEQ ID NO: 155934 - protein, 13 aa, Homo sapiens
  CDR3 for beta chain variable domain of TCR clone 77967 (TRBV23-1, TRBJ1-4)
CASRGKFSEKLFF

SEQ ID NO: 155935 - protein, 17 aa, Homo sapiens
  CDR3 for alpha chain variable domain of TCR clone 77968 (TRAV3, TRAJ42)
CAVRDRDYGGSQGNLIF

SEQ ID NO: 155936 - protein, 14 aa, Homo sapiens
  CDR3 for beta chain variable domain of TCR clone 77968 (TRBV2, TRBJ2-1)
CASRLIVGHDEQFF

SEQ ID NO: 155937 - protein, 15 aa, Homo sapiens
  CDR3 for alpha chain variable domain of TCR clone 77969 (TRAV21, TRAJ53)
CATLNSGGSNYKLTF

SEQ ID NO: 155938 - protein, 15 aa, Homo sapiens
  CDR3 for beta chain variable domain of TCR clone 77969 (TRBV7-3, TRBJ2-2)
CASSETGQGTGELFF

SEQ ID NO: 155939 - protein, 14 aa, Homo sapiens
  CDR3 for alpha chain variable domain of TCR clone 77970 (TRAV17, TRAJ24)
CATLTTDSWGKFQF

SEQ ID NO: 155940 - protein, 16 aa, Homo sapiens
  CDR3 for beta chain variable domain of TCR clone 77970 (TRBV4-2, TRBJ2-7)
CASSQDGGSLRGERYF

SEQ ID NO: 155941 - protein, 13 aa, Homo sapiens
  CDR3 for alpha chain variable domain of TCR clone 77971 (TRAV3, TRAJ15)
YAVRDQAGTALIF

SEQ ID NO: 155942 - protein, 15 aa, Homo sapiens
  CDR3 for beta chain variable domain of TCR clone 77971 (TRBV11-1, TRBJ2-7)
CASSLNYGASYEQYF

SEQ ID NO: 155943 - protein, 16 aa, Homo sapiens
  CDR3 for alpha chain variable domain of TCR clone 77972 (TRAV3, TRAJ10)
CAVRDMRAGGGNKLTF

SEQ ID NO: 155944 - protein, 14 aa, Homo sapiens
  CDR3 for beta chain variable domain of TCR clone 77972 (TRBV7-3, TRBJ2-1)
RASSLAGGTNEQFF

SEQ ID NO: 155945 - protein, 17 aa, Homo sapiens
  CDR3 for alpha chain variable domain of TCR clone 77973 (TRAV36/DV7, TRAJ52)
CAVAQRAGGTSYGKLTF

SEQ ID NO: 155946 - protein, 16 aa, Homo sapiens
  CDR3 for beta chain variable domain of TCR clone 77973 (TRBV7-3, TRBJ2-2)
CASSLKRGTLSGELFF

SEQ ID NO: 155947 - protein, 11 aa, Homo sapiens
  CDR3 for alpha chain variable domain of TCR clone 77974 (TRAV13-1, TRAJ39)
CASHAGNMLTF

SEQ ID NO: 155948 - protein, 14 aa, Homo sapiens
  CDR3 for beta chain variable domain of TCR clone 77974 (TRBV11-2, TRBJ1-5)
CASSLNRGRQPQHF

SEQ ID NO: 155949 - protein, 12 aa, Homo sapiens
  CDR3 for alpha chain variable domain of TCR clone 77975 (TRAV8-3, TRAJ26)
CAGDNYGQNFVF

SEQ ID NO: 155950 - protein, 16 aa, Homo sapiens
  CDR3 for beta chain variable domain of TCR clone 77975 (TRBV6-1, TRBJ1-3)
CASVQGGVETPYILER

SEQ ID NO: 155951 - protein, 11 aa, Homo sapiens
  CDR3 for alpha chain variable domain of TCR clone 77976 (TRAV1-1, TRAJ23)
CAVRQGGKLIF

SEQ ID NO: 155952 - protein, 20 aa, Homo sapiens
  CDR3 for beta chain variable domain of TCR clone 77976 (TRBV7-8, TRBJ2-2)
CASSHLCPGPTIHITGELFF

SEQ ID NO: 155953 - protein, 12 aa, Homo sapiens
  CDR3 for alpha chain variable domain of TCR clone 77977 (TRAV13-2, TRAJ23)
CAERHRGGKLIF

SEQ ID NO: 155954 - protein, 12 aa, Homo sapiens
  CDR3 for beta chain variable domain of TCR clone 77977 (TRBV28, TRBJ2-3)
CASSLYRDTQYF

SEQ ID NO: 155955 - protein, 16 aa, Homo sapiens
  CDR3 for alpha chain variable domain of TCR clone 77978 (TRAV4, TRAJ5)
CLVGPDHGHGQEGTYF

SEQ ID NO: 155956 - protein, 15 aa, Homo sapiens
  CDR3 for beta chain variable domain of TCR clone 77978 (TRBV27, TRBJ2-5)
CASSLIPSGGETQYF

SEQ ID NO: 155957 - protein, 14 aa, Homo sapiens
  CDR3 for alpha chain variable domain of TCR clone 77979 (TRAV1-2, TRAJ16)
CAVNRFSDGQKLLF

SEQ ID NO: 155958 - protein, 16 aa, Homo sapiens
  CDR3 for beta chain variable domain of TCR clone 77979 (TRBV20-1, TRBJ2-3)
CSGEAGLAGGQDTQYF

SEQ ID NO: 155959 - protein, 14 aa, Homo sapiens
  CDR3 for alpha chain variable domain of TCR clone 77980 (TRAV1-2, TRAJ16)
CSVNRFSDGQKLLF

SEQ ID NO: 155960 - protein, 13 aa, Homo sapiens
  CDR3 for beta chain variable domain of TCR clone 77980 (TRBV29-1, TRBJ1-1)
CSVGDSRNTEAFF

SEQ ID NO: 155961 - protein, 17 aa, Homo sapiens
  CDR3 for alpha chain variable domain of TCR clone 77981 (TRAV3, TRAJ6)
CAVRDGPRAGGSYIPTF

SEQ ID NO: 155962 - protein, 11 aa, Homo sapiens
  CDR3 for beta chain variable domain of TCR clone 77981 (TRBV28, TRBJ2-3)
CASSSDPPQYF

SEQ ID NO: 155963 - protein, 14 aa, Homo sapiens
  CDR3 for alpha chain variable domain of TCR clone 77982 (TRAV14/DV4, TRAJ26)
CAMREGTYGQNFVF

SEQ ID NO: 155964 - protein, 14 aa, Homo sapiens
  CDR3 for beta chain variable domain of TCR clone 77982 (TRBV19, TRBJ2-1)
CASPTFVLSGEQFF

SEQ ID NO: 155965 - protein, 16 aa, Homo sapiens
  CDR3 for alpha chain variable domain of TCR clone 77983 (TRAV30, TRAJ24)
CGTEIVDADSWGKFQF

SEQ ID NO: 155966 - protein, 15 aa, Homo sapiens
  CDR3 for beta chain variable domain of TCR clone 77983 (TRBV20-1, TRBJ2-7)
CSARDRVSRMDEQYF

SEQ ID NO: 155967 - protein, 10 aa, Homo sapiens
  CDR3 for alpha chain variable domain of TCR clone 77984 (TRAV22, TRAJ48)
CAVGYEKLTF

SEQ ID NO: 155968 - protein, 15 aa, Homo sapiens
  CDR3 for beta chain variable domain of TCR clone 77984 (TRBV4-3, TRBJ1-2)
CASSRGQGRNYGYTF

SEQ ID NO: 155969 - protein, 17 aa, Homo sapiens
  CDR3 for alpha chain variable domain of TCR clone 77985 (TRAV3, TRAJ6)
CAVRDGPRAGGSYIPTF

SEQ ID NO: 155970 - protein, 15 aa, Homo sapiens
  CDR3 for beta chain variable domain of TCR clone 77985 (TRBV5-8, TRBJ2-2)
CASSLDRGATGELFF

SEQ ID NO: 155971 - protein, 12 aa, Homo sapiens
  CDR3 for alpha chain variable domain of TCR clone 77986 (TRAV26-1, TRAJ36)
CIVRVRADNLFF

SEQ ID NO: 155972 - protein, 13 aa, Homo sapiens
  CDR3 for beta chain variable domain of TCR clone 77986 (TRBV11-2, TRBJ2-5)
CASSRGPAETQYF

SEQ ID NO: 155973 - protein, 16 aa, Homo sapiens
  CDR3 for alpha chain variable domain of TCR clone 77987 (TRAV27, TRAJ53)
CAAPEGSGGSNYRLTF

SEQ ID NO: 155974 - protein, 14 aa, Homo sapiens
  CDR3 for beta chain variable domain of TCR clone 77987 (TRBV4-3, TRBJ1-5)
CASSQGGQGWPQHF

SEQ ID NO: 155975 - protein, 13 aa, Homo sapiens
  CDR3 for alpha chain variable domain of TCR clone 77988 (TRAV8-3, TRAJ48)
CAVVPFGNEKLTF

SEQ ID NO: 155976 - protein, 14 aa, Homo sapiens
  CDR3 for beta chain variable domain of TCR clone 77988 (TRBV25-1, TRBJ1-1)
CASTHLGGNTEAFF

SEQ ID NO: 155977 - protein, 10 aa, Homo sapiens
  CDR3 for alpha chain variable domain of TCR clone 77989 (TRAV26-1, TRAJ40)
CIAGTYKYNF

SEQ ID NO: 155978 - protein, 15 aa, Homo sapiens
  CDR3 for beta chain variable domain of TCR clone 77989 (TRBV19, TRBJ2-1)
CASSSPGVPLDEQFF

SEQ ID NO: 155979 - protein, 15 aa, Homo sapiens
  CDR3 for alpha chain variable domain of TCR clone 77990 (TRAV21, TRAJ24)
CAARSSTDSWGKLQF

SEQ ID NO: 155980 - protein, 19 aa, Homo sapiens
  CDR3 for beta chain variable domain of TCR clone 77990 (TRBV14, TRBJ2-1)
CASSQDQLWEAPEYNEQFL

SEQ ID NO: 155981 - protein, 14 aa, Homo sapiens
  CDR3 for alpha chain variable domain of TCR clone 77991 (TRAV3, TRAJ22)
CAVIDYGSARQLTF

SEQ ID NO: 155982 - protein, 13 aa, Homo sapiens
  CDR3 for beta chain variable domain of TCR clone 77991 (TRBV11-2, TRBJ2-5)
CASGHGAKETQYF

SEQ ID NO: 155983 - protein, 13 aa, Homo sapiens
  CDR3 for alpha chain variable domain of TCR clone 77992 (TRAV3, TRAJ15)
CAVRDQAGTAMIF

SEQ ID NO: 155984 - protein, 15 aa, Homo sapiens
  CDR3 for beta chain variable domain of TCR clone 77992 (TRBV11-1, TRBJ2-7)
CASSLNYGASYEQYF

SEQ ID NO: 155985 - protein, 11 aa, Homo sapiens
  CDR3 for alpha chain variable domain of TCR clone 77993 (TRAV12-1, TRAJ21)
CAVYNFNKFYF

SEQ ID NO: 155986 - protein, 14 aa, Homo sapiens
  CDR3 for beta chain variable domain of TCR clone 77993 (TRBV19, TRBJ2-7)
CASSMGQGAIEQYF

SEQ ID NO: 155987 - protein, 23 aa, Homo sapiens
  CDR3 for alpha chain variable domain of TCR clone 77994 (TRAV8-4, TRAJ38)
CARLNAGNNHIQNPYPAVYQLRD

SEQ ID NO: 155988 - protein, 14 aa, Homo sapiens
  CDR3 for beta chain variable domain of TCR clone 77994 (TRBV7-8, TRBJ2-3)
CASSLEAGTDTQYF

SEQ ID NO: 155989 - protein, 14 aa, Homo sapiens
  CDR3 for alpha chain variable domain of TCR clone 77995 (TRAV12-1, TRAJ17)
CVVNYKAAGNKLTF

SEQ ID NO: 155990 - protein, 15 aa, Homo sapiens
  CDR3 for beta chain variable domain of TCR clone 77995 (TRBV7-2, TRBJ2-1)
CASTHGTGIYNEQFF

SEQ ID NO: 155991 - protein, 12 aa, Homo sapiens
  CDR3 for alpha chain variable domain of TCR clone 77996 (TRAV21, TRAJ49)
CAVTNTGNQFYF

SEQ ID NO: 155992 - protein, 17 aa, Homo sapiens
  CDR3 for beta chain variable domain of TCR clone 77996 (TRBV13, TRBJ2-3)
CDSSLSRVAGGRNTQYF

SEQ ID NO: 155993 - protein, 12 aa, Homo sapiens
  CDR3 for alpha chain variable domain of TCR clone 77997 (TRAV13-2, TRAJ8)
CAPWLGFQKLVF

SEQ ID NO: 155994 - protein, 17 aa, Homo sapiens
  CDR3 for beta chain variable domain of TCR clone 77997 (TRBV20-1, TRBJ2-2)
CSASGSGQGGLTGELFF

SEQ ID NO: 155995 - protein, 11 aa, Homo sapiens
  CDR3 for alpha chain variable domain of TCR clone 77998 (TRAV3, TRAJ21)
CAVGNFNKFYF

SEQ ID NO: 155996 - protein, 13 aa, Homo sapiens
  CDR3 for beta chain variable domain of TCR clone 77998 (TRBV19, TRBJ1-1)
CASSITGESEAFF

SEQ ID NO: 155997 - protein, 13 aa, Homo sapiens
  CDR3 for alpha chain variable domain of TCR clone 77999 (TRAV29/DV5, TRAJ21)
CAASVYNFNKFYF

SEQ ID NO: 155998 - protein, 16 aa, Homo sapiens
  CDR3 for beta chain variable domain of TCR clone 77999 (TRBV20-1, TRBJ1-4)
CSAPGQGLLTNEKLFF

SEQ ID NO: 155999 - protein, 13 aa, Homo sapiens
  CDR3 for alpha chain variable domain of TCR clone 78000 (TRAV8-3, TRAJ28)
CAVGAVGSYQLTF

SEQ ID NO: 156000 - protein, 15 aa, Homo sapiens
  CDR3 for beta chain variable domain of TCR clone 78000 (TRBV7-6, TRBJ1-2)
CASSSGGRGGYGYTF

SEQ ID NO: 156001 - protein, 15 aa, Homo sapiens
  CDR3 for alpha chain variable domain of TCR clone 78001 (TRAV17, TRAJ23)
CATDAEDNQGGKLIF

SEQ ID NO: 156002 - protein, 12 aa, Homo sapiens
  CDR3 for beta chain variable domain of TCR clone 78001 (TRBV2, TRBJ2-1)
CAKREGYNEQFF

SEQ ID NO: 156003 - protein, 12 aa, Homo sapiens
  CDR3 for alpha chain variable domain of TCR clone 78002 (TRAV13-1, TRAJ34)
CAASKGTDKLIF

SEQ ID NO: 156004 - protein, 11 aa, Homo sapiens
  CDR3 for beta chain variable domain of TCR clone 78002 (TRBV10-3, TRBJ2-7)
CAISEGLEQYF

SEQ ID NO: 156005 - protein, 14 aa, Homo sapiens
  CDR3 for alpha chain variable domain of TCR clone 78003 (TRAV26-1, TRAJ6)
CIVSPVGGSYIPTS

SEQ ID NO: 156006 - protein, 16 aa, Homo sapiens
  CDR3 for beta chain variable domain of TCR clone 78003 (TRBV4-1, TRBJ2-5)
CASSSGLAGVLGTQYF

SEQ ID NO: 156007 - protein, 16 aa, Homo sapiens
  CDR3 for alpha chain variable domain of TCR clone 78004 (TRAV4, TRAJ22)
CLVGDLYFGSARQLTF

SEQ ID NO: 156008 - protein, 16 aa, Homo sapiens
  CDR3 for beta chain variable domain of TCR clone 78004 (TRBV7-9, TRBJ2-3)
CASSPWREVGTDTQYF

SEQ ID NO: 156009 - protein, 14 aa, Homo sapiens
  CDR3 for alpha chain variable domain of TCR clone 78005 (TRAV29/DV5, TRAJ57)
CAARSQGGSEKLVF

SEQ ID NO: 156010 - protein, 15 aa, Homo sapiens
  CDR3 for beta chain variable domain of TCR clone 78005 (TRBV28, TRBJ2-4)
CAAGSRTLLMGIQYF

SEQ ID NO: 156011 - protein, 14 aa, Homo sapiens
  CDR3 for alpha chain variable domain of TCR clone 78006 (TRAV12-1, TRAJ13)
CVVIDSGGYQKVTF

SEQ ID NO: 156012 - protein, 14 aa, Homo sapiens
  CDR3 for beta chain variable domain of TCR clone 78006 (TRBV12-5, TRBJ2-5)
CASGSRTHQETQYF

SEQ ID NO: 156013 - protein, 15 aa, Homo sapiens
  CDR3 for alpha chain variable domain of TCR clone 78007 (TRAV8-6, TRAJ6)
CAVSGESGGSYIPTF

SEQ ID NO: 156014 - protein, 14 aa, Homo sapiens
  CDR3 for beta chain variable domain of TCR clone 78007 (TRBV7-9, TRBJ2-1)
CASSSMVGFGEKFF

SEQ ID NO: 156015 - protein, 15 aa, Homo sapiens
  CDR3 for alpha chain variable domain of TCR clone 78008 (TRAV17, TRAJ22)
CATAPISGSARQLTF

SEQ ID NO: 156016 - protein, 14 aa, Homo sapiens
  CDR3 for beta chain variable domain of TCR clone 78008 (TRBV9, TRBJ2-1)
CASSVDPRGKEQFS

SEQ ID NO: 156017 - protein, 14 aa, Homo sapiens
  CDR3 for alpha chain variable domain of TCR clone 78009 (TRAV21, TRAJ35)
CAVMPIGFGNVLHC

SEQ ID NO: 156018 - protein, 13 aa, Homo sapiens
  CDR3 for beta chain variable domain of TCR clone 78009 (TRBV12-4, TRBJ1-2)
CASSLRQGKGYTF

SEQ ID NO: 156019 - protein, 11 aa, Homo sapiens
  CDR3 for alpha chain variable domain of TCR clone 78010 (TRAV17, TRAJ49)
CATDAGNQFYF

SEQ ID NO: 156020 - protein, 14 aa, Homo sapiens
  CDR3 for beta chain variable domain of TCR clone 78010 (TRBV4-2, TRBJ2-1)
CASGLDRAYNEQFF

SEQ ID NO: 156021 - protein, 12 aa, Homo sapiens
  CDR3 for alpha chain variable domain of TCR clone 78011 (TRAV12-1, TRAJ40)
CVVYSGTYKYIF

SEQ ID NO: 156022 - protein, 18 aa, Homo sapiens
  CDR3 for beta chain variable domain of TCR clone 78011 (TRBV11-2, TRBJ2-3)
CASSLGGASRGGPNTQYF

SEQ ID NO: 156023 - protein, 15 aa, Homo sapiens
  CDR3 for alpha chain variable domain of TCR clone 78012 (TRAV8-2, TRAJ40)
CVVWGTTSGTYKYIF

SEQ ID NO: 156024 - protein, 16 aa, Homo sapiens
  CDR3 for beta chain variable domain of TCR clone 78012 (TRBV7-3, TRBJ2-1)
CASSLEGYRSYNEQFF

SEQ ID NO: 156025 - protein, 16 aa, Homo sapiens
  CDR3 for alpha chain variable domain of TCR clone 78013 (TRAV30, TRAJ24)
CGTEIVDADSWGKFPF

SEQ ID NO: 156026 - protein, 12 aa, Homo sapiens
  CDR3 for beta chain variable domain of TCR clone 78013 (TRBV11-2, TRBJ2-2)
CASSLPTGELFF

SEQ ID NO: 156027 - protein, 14 aa, Homo sapiens
  CDR3 for alpha chain variable domain of TCR clone 78014 (TRAV12-1, TRAJ12)
CVVTRMDSSYKLIF

SEQ ID NO: 156028 - protein, 13 aa, Homo sapiens
  CDR3 for beta chain variable domain of TCR clone 78014 (TRBV20-1, TRBJ1-1)
CNARGGGNTETFF

SEQ ID NO: 156029 - protein, 12 aa, Homo sapiens
  CDR3 for alpha chain variable domain of TCR clone 78015 (TRAV13-2, TRAJ31)
CAESYNNARLMF

SEQ ID NO: 156030 - protein, 13 aa, Homo sapiens
  CDR3 for beta chain variable domain of TCR clone 78015 (TRBV24-1, TRBJ1-3)
CATMADSGNTIHF

SEQ ID NO: 156031 - protein, 12 aa, Homo sapiens
  CDR3 for alpha chain variable domain of TCR clone 78016 (TRAV2, TRAJ32)
CAVVGATNKLIF

SEQ ID NO: 156032 - protein, 15 aa, Homo sapiens
  CDR3 for beta chain variable domain of TCR clone 78016 (TRBV7-2, TRBJ2-1)
CASSSRTSREDEQFF

SEQ ID NO: 156033 - protein, 14 aa, Homo sapiens
  CDR3 for alpha chain variable domain of TCR clone 78017 (TRAV23/DV6, TRAJ24)
CAASLSDSWGKLQF

SEQ ID NO: 156034 - protein, 11 aa, Homo sapiens
  CDR3 for beta chain variable domain of TCR clone 78017 (TRBV12-4, TRBJ2-3)
CASSFTDTQYF

SEQ ID NO: 156035 - protein, 19 aa, Homo sapiens
  CDR3 for alpha chain variable domain of TCR clone 78018 (TRAV25, TRAJ20)
TATQTTDVGILPHDYKLSF

SEQ ID NO: 156036 - protein, 14 aa, Homo sapiens
  CDR3 for beta chain variable domain of TCR clone 78018 (TRBV19, TRBJ2-1)
CASGKSTQYNEQFF

SEQ ID NO: 156037 - protein, 14 aa, Homo sapiens
  CDR3 for alpha chain variable domain of TCR clone 78019 (TRAV21, TRAJ35)
CAVMPIGFGNVLHC

SEQ ID NO: 156038 - protein, 14 aa, Homo sapiens
  CDR3 for beta chain variable domain of TCR clone 78019 (TRBV12-5, TRBJ2-5)
CASGSRTHQETQYF

SEQ ID NO: 156039 - protein, 14 aa, Homo sapiens
  CDR3 for alpha chain variable domain of TCR clone 78020 (TRAV8-3, TRAJ27)
CAGGRNTNAGNSTF

SEQ ID NO: 156040 - protein, 15 aa, Homo sapiens
  CDR3 for beta chain variable domain of TCR clone 78020 (TRBV11-3, TRBJ2-5)
CASSLRGRVQETQYF

SEQ ID NO: 156041 - protein, 16 aa, Homo sapiens
  CDR3 for alpha chain variable domain of TCR clone 78021 (TRAV3, TRAJ37)
CAVRGKGSGNTGKLIF

SEQ ID NO: 156042 - protein, 15 aa, Homo sapiens
  CDR3 for beta chain variable domain of TCR clone 78021 (TRBV10-2, TRBJ2-5)
CASRGSGGPQETQYF

SEQ ID NO: 156043 - protein, 13 aa, Homo sapiens
  CDR3 for alpha chain variable domain of TCR clone 78022 (TRAV12-1, TRAJ26)
CVVRRNYVQNFVF

SEQ ID NO: 156044 - protein, 14 aa, Homo sapiens
  CDR3 for beta chain variable domain of TCR clone 78022 (TRBV4-2, TRBJ2-1)
CASGLDRAYNEQFF

SEQ ID NO: 156045 - protein, 12 aa, Homo sapiens
  CDR3 for alpha chain variable domain of TCR clone 78023 (TRAV12-2, TRAJ10)
WGVTGGGNKLTF

SEQ ID NO: 156046 - protein, 15 aa, Homo sapiens
  CDR3 for beta chain variable domain of TCR clone 78023 (TRBV7-2, TRBJ2-1)
CASSSGLAGGNEQFF

SEQ ID NO: 156047 - protein, 15 aa, Homo sapiens
  CDR3 for alpha chain variable domain of TCR clone 78024 (TRAV16, TRAJ17)
CALSGNKAAGNKLTF

SEQ ID NO: 156048 - protein, 16 aa, Homo sapiens
  CDR3 for beta chain variable domain of TCR clone 78024 (TRBV7-6, TRBJ1-6)
CASSSRPAGEYSPLHF

SEQ ID NO: 156049 - protein, 14 aa, Homo sapiens
  CDR3 for alpha chain variable domain of TCR clone 78025 (TRAV8-4, TRAJ29)
CAVSAVEGNTPLVF

SEQ ID NO: 156050 - protein, 13 aa, Homo sapiens
  CDR3 for beta chain variable domain of TCR clone 78025 (TRBV12-4, TRBJ2-7)
CASSPTETYEQYF

SEQ ID NO: 156051 - protein, 13 aa, Homo sapiens
  CDR3 for alpha chain variable domain of TCR clone 78026 (TRAV3, TRAJ21)
CAVREPDFNKFYF

SEQ ID NO: 156052 - protein, 16 aa, Homo sapiens
  CDR3 for beta chain variable domain of TCR clone 78026 (TRBV19, TRBJ2-1)
CASSMGGGSSYNEQFF

SEQ ID NO: 156053 - protein, 15 aa, Homo sapiens
  CDR3 for alpha chain variable domain of TCR clone 78027 (TRAV12-3, TRAJ6)
CAMSATSGGSYVPTF

SEQ ID NO: 156054 - protein, 11 aa, Homo sapiens
  CDR3 for beta chain variable domain of TCR clone 78027 (TRBV20-1, TRBJ1-5)
CSAQGDQPQHF

SEQ ID NO: 156055 - protein, 18 aa, Homo sapiens
  CDR3 for alpha chain variable domain of TCR clone 78028 (TRAV1-2, TRAJ8)
CLLPLCCERGHRLSETLF

SEQ ID NO: 156056 - protein, 15 aa, Homo sapiens
  CDR3 for beta chain variable domain of TCR clone 78028 (TRBV6-3, TRBJ2-7)
CASSSPGTVFYEQYF

SEQ ID NO: 156057 - protein, 18 aa, Homo sapiens
  CDR3 for alpha chain variable domain of TCR clone 78029 (TRAV9-2, TRAJ52)
CALSRHNAGGTSYGKLTF

SEQ ID NO: 156058 - protein, 13 aa, Homo sapiens
  CDR3 for beta chain variable domain of TCR clone 78029 (TRBV7-9, TRBJ1-2)
CASSLKLNYGYTF

SEQ ID NO: 156059 - protein, 15 aa, Homo sapiens
  CDR3 for alpha chain variable domain of TCR clone 78030 (TRAV13-1, TRAJ52)
SYYNAGGTSYVKLTF

SEQ ID NO: 156060 - protein, 11 aa, Homo sapiens
  CDR3 for beta chain variable domain of TCR clone 78030 (TRBV12-4, TRBJ2-2)
CASSSAGELFF

SEQ ID NO: 156061 - protein, 12 aa, Homo sapiens
  CDR3 for alpha chain variable domain of TCR clone 78031 (TRAV1-2, TRAJ33)
CAALDSNYQLIW

SEQ ID NO: 156062 - protein, 15 aa, Homo sapiens
  CDR3 for beta chain variable domain of TCR clone 78031 (TRBV5-1, TRBJ2-3)
CASSVTSGSTDTQYF

SEQ ID NO: 156063 - protein, 12 aa, Homo sapiens
  CDR3 for alpha chain variable domain of TCR clone 78032 (TRAV35, TRAJ49)
CAGWNTGNQFNF

SEQ ID NO: 156064 - protein, 16 aa, Homo sapiens
  CDR3 for beta chain variable domain of TCR clone 78032 (TRBV5-1, TRBJ2-2)
CASSLWDTTNTGELFF

SEQ ID NO: 156065 - protein, 12 aa, Homo sapiens
  CDR3 for alpha chain variable domain of TCR clone 78033 (TRAV36/DV7, TRAJ37)
CACYGNTGKLIF

SEQ ID NO: 156066 - protein, 13 aa, Homo sapiens
  CDR3 for beta chain variable domain of TCR clone 78033 (TRBV12-4, TRBJ2-7)
CASSPTETYEQYF

SEQ ID NO: 156067 - protein, 13 aa, Homo sapiens
  CDR3 for alpha chain variable domain of TCR clone 78034 (TRAV23/DV6, TRAJ16)
CAASISDGPKLLF

SEQ ID NO: 156068 - protein, 15 aa, Homo sapiens
  CDR3 for beta chain variable domain of TCR clone 78034 (TRBV2, TRBJ2-2)
CASSRETVGTGELFF

SEQ ID NO: 156069 - protein, 16 aa, Homo sapiens
  CDR3 for alpha chain variable domain of TCR clone 78035 (TRAV3, TRAJ10)
CAVRDMRAGGENKLTF

SEQ ID NO: 156070 - protein, 19 aa, Homo sapiens
  CDR3 for beta chain variable domain of TCR clone 78035 (TRBV6-3, TRBJ1-2)
CASSYSKGRTGPPNYGYTF

SEQ ID NO: 156071 - protein, 13 aa, Homo sapiens
  CDR3 for alpha chain variable domain of TCR clone 78036 (TRAV12-2, TRAJ20)
CAVYPSNDYKLSF

SEQ ID NO: 156072 - protein, 15 aa, Homo sapiens
  CDR3 for beta chain variable domain of TCR clone 78036 (TRBV27, TRBJ2-5)
CASSLYPRGGETQDF

SEQ ID NO: 156073 - protein, 14 aa, Homo sapiens
  CDR3 for alpha chain variable domain of TCR clone 78037 (TRAV17, TRAJ16)
CATADFSDGQKLLF

SEQ ID NO: 156074 - protein, 15 aa, Homo sapiens
  CDR3 for beta chain variable domain of TCR clone 78037 (TRBV27, TRBJ2-1)
CASSNGGGSSNEQFF

SEQ ID NO: 156075 - protein, 14 aa, Homo sapiens
  CDR3 for alpha chain variable domain of TCR clone 78038 (TRAV38-1, TRAJ29)
CAFITPSGNTPLVF

SEQ ID NO: 156076 - protein, 12 aa, Homo sapiens
  CDR3 for beta chain variable domain of TCR clone 78038 (TRBV19, TRBJ1-5)
CASSIAQQPQHF

SEQ ID NO: 156077 - protein, 14 aa, Homo sapiens
  CDR3 for alpha chain variable domain of TCR clone 78039 (TRAV3, TRAJ8)
CAVSLNTGFQKLVF

SEQ ID NO: 156078 - protein, 13 aa, Homo sapiens
  CDR3 for beta chain variable domain of TCR clone 78039 (TRBV5-4, TRBJ2-3)
CASSRTGLGTQYF

SEQ ID NO: 156079 - protein, 13 aa, Homo sapiens
  CDR3 for alpha chain variable domain of TCR clone 78040 (TRAV13-1, TRAJ21)
CAASIYNFNKFYF

SEQ ID NO: 156080 - protein, 13 aa, Homo sapiens
  CDR3 for beta chain variable domain of TCR clone 78040 (TRBV27, TRBJ1-4)
CASSLMGDEKLVF

SEQ ID NO: 156081 - protein, 12 aa, Homo sapiens
  CDR3 for alpha chain variable domain of TCR clone 78041 (TRAV12-3, TRAJ17)
CAMTLTGNKLTF

SEQ ID NO: 156082 - protein, 15 aa, Homo sapiens
  CDR3 for beta chain variable domain of TCR clone 78041 (TRBV18, TRBJ1-5)
CASSPSDRSNQPQHF

SEQ ID NO: 156083 - protein, 14 aa, Homo sapiens
  CDR3 for alpha chain variable domain of TCR clone 78042 (TRAV1-2, TRAJ8)
CAVREDTGFQKLVF

SEQ ID NO: 156084 - protein, 15 aa, Homo sapiens
  CDR3 for beta chain variable domain of TCR clone 78042 (TRBV7-3, TRBJ2-2)
CASKANGANTGGLSF

SEQ ID NO: 156085 - protein, 11 aa, Homo sapiens
  CDR3 for alpha chain variable domain of TCR clone 78043 (TRAV20, TRAJ34)
CTRDNTEKLIF

SEQ ID NO: 156086 - protein, 15 aa, Homo sapiens
  CDR3 for beta chain variable domain of TCR clone 78043 (TRBV2, TRBJ2-1)
CASSVTSEGTDEQFF

SEQ ID NO: 156087 - protein, 18 aa, Homo sapiens
  CDR3 for alpha chain variable domain of TCR clone 78044 (TRAV21, TRAJ52)
CAVRPSPAGGTSYGKLTF

SEQ ID NO: 156088 - protein, 16 aa, Homo sapiens
  CDR3 for beta chain variable domain of TCR clone 78044 (TRBV7-2, TRBJ1-2)
CASSSNQDRRGHGYTF

SEQ ID NO: 156089 - protein, 17 aa, Homo sapiens
  CDR3 for alpha chain variable domain of TCR clone 78045 (TRAV12-2, TRAJ42)
CAVNILNYGGSQGNLIF

SEQ ID NO: 156090 - protein, 14 aa, Homo sapiens
  CDR3 for beta chain variable domain of TCR clone 78045 (TRBV28, TRBJ1-2)
CASRIQGANYGYTF

SEQ ID NO: 156091 - protein, 12 aa, Homo sapiens
  CDR3 for alpha chain variable domain of TCR clone 78046 (TRAV13-1, TRAJ21)
CAAKEGFNKFYF

SEQ ID NO: 156092 - protein, 14 aa, Homo sapiens
  CDR3 for beta chain variable domain of TCR clone 78046 (TRBV5-4, TRBJ1-1)
CANSLDSRRDEAFF

SEQ ID NO: 156093 - protein, 14 aa, Homo sapiens
  CDR3 for alpha chain variable domain of TCR clone 78047 (TRAV12-2, TRAJ13)
CAVKKTGGYQEVTF

SEQ ID NO: 156094 - protein, 12 aa, Homo sapiens
  CDR3 for beta chain variable domain of TCR clone 78047 (TRBV12-4, TRBJ1-2)
CASSFIWLHLRF

SEQ ID NO: 156095 - protein, 20 aa, Homo sapiens
  CDR3 for alpha chain variable domain of TCR clone 78048 (TRAV2, TRAJ20)
LILQVREADAAVYRDCKLSF

SEQ ID NO: 156096 - protein, 16 aa, Homo sapiens
  CDR3 for beta chain variable domain of TCR clone 78048 (TRBV24-1, TRBJ2-3)
CATSDPGTGATDTQYF

SEQ ID NO: 156097 - protein, 18 aa, Homo sapiens
  CDR3 for alpha chain variable domain of TCR clone 78049 (TRAV26-1, TRAJ52)
CIVRVAGAGGTSDGKLTF

SEQ ID NO: 156098 - protein, 13 aa, Homo sapiens
  CDR3 for beta chain variable domain of TCR clone 78049 (TRBV7-8, TRBJ1-2)
CASSAQSYYGYTF

SEQ ID NO: 156099 - protein, 13 aa, Homo sapiens
  CDR3 for alpha chain variable domain of TCR clone 78050 (TRAV4, TRAJ22)
CLGGSGSARQLTF

SEQ ID NO: 156100 - protein, 15 aa, Homo sapiens
  CDR3 for beta chain variable domain of TCR clone 78050 (TRBV12-4, TRBJ1-6)
CASSSPGRGNSPLHF

SEQ ID NO: 156101 - protein, 14 aa, Homo sapiens
  CDR3 for alpha chain variable domain of TCR clone 78051 (TRAV17, TRAJ16)
CATADFSDGQNLLF

SEQ ID NO: 156102 - protein, 12 aa, Homo sapiens
  CDR3 for beta chain variable domain of TCR clone 78051 (TRBV24-1, TRBJ1-1)
CATLYPDTEAFF

SEQ ID NO: 156103 - protein, 11 aa, Homo sapiens
  CDR3 for alpha chain variable domain of TCR clone 78052 (TRAV12-3, TRAJ43)
CAMSVSNDMRF

SEQ ID NO: 156104 - protein, 16 aa, Homo sapiens
  CDR3 for beta chain variable domain of TCR clone 78052 (TRBV7-8, TRBJ2-3)
CASSTSVEGVTDTQYF

SEQ ID NO: 156105 - protein, 11 aa, Homo sapiens
  CDR3 for alpha chain variable domain of TCR clone 78053 (TRAV20, TRAJ34)
CTRDNTNKLIF

SEQ ID NO: 156106 - protein, 15 aa, Homo sapiens
  CDR3 for beta chain variable domain of TCR clone 78053 (TRBV2, TRBJ2-1)
CASSVTSEGTDEQFF

SEQ ID NO: 156107 - protein, 14 aa, Homo sapiens
  CDR3 for alpha chain variable domain of TCR clone 78054 (TRAV1-2, TRAJ16)
CAVNRFSDGQKLLF

SEQ ID NO: 156108 - protein, 13 aa, Homo sapiens
  CDR3 for beta chain variable domain of TCR clone 78054 (TRBV29-1, TRBJ2-5)
CSVTIASEETQYF

SEQ ID NO: 156109 - protein, 15 aa, Homo sapiens
  CDR3 for alpha chain variable domain of TCR clone 78055 (TRAV12-2, TRAJ53)
CAVNGGGGSNYKLTF

SEQ ID NO: 156110 - protein, 13 aa, Homo sapiens
  CDR3 for beta chain variable domain of TCR clone 78055 (TRBV3-1, TRBJ1-1)
CASSPGAITEAFF

SEQ ID NO: 156111 - protein, 20 aa, Homo sapiens
  CDR3 for alpha chain variable domain of TCR clone 78056 (TRAV13-1, )
CAASPMDIQNPDPAAYQLRD

SEQ ID NO: 156112 - protein, 13 aa, Homo sapiens
  CDR3 for beta chain variable domain of TCR clone 78056 (TRBV20-1, TRBJ2-2)
CSASAAGTGELFF

SEQ ID NO: 156113 - protein, 15 aa, Homo sapiens
  CDR3 for alpha chain variable domain of TCR clone 78057 (TRAV35, TRAJ23)
CAGQRGYNQGGKLIL

SEQ ID NO: 156114 - protein, 16 aa, Homo sapiens
  CDR3 for beta chain variable domain of TCR clone 78057 (TRBV27, TRBJ2-1)
CASSSRLAGNYNEQFF

SEQ ID NO: 156115 - protein, 19 aa, Homo sapiens
  CDR3 for alpha chain variable domain of TCR clone 78058 (TRAV3, TRAJ6)
CAVRDRNPSRSGGSYIPTF

SEQ ID NO: 156116 - protein, 15 aa, Homo sapiens
  CDR3 for beta chain variable domain of TCR clone 78058 (TRBV18, TRBJ2-7)
CASAPTFMDSYEQYF

SEQ ID NO: 156117 - protein, 15 aa, Homo sapiens
  CDR3 for alpha chain variable domain of TCR clone 78059 (TRAV12-1, TRAJ44)
CVVDTPQGTASKLNF

SEQ ID NO: 156118 - protein, 13 aa, Homo sapiens
  CDR3 for beta chain variable domain of TCR clone 78059 (TRBV27, TRBJ2-1)
CASSSGSYNEQFF

SEQ ID NO: 156119 - protein, 13 aa, Homo sapiens
  CDR3 for alpha chain variable domain of TCR clone 78060 (TRAV27, TRAJ8)
CAGGPTGFQKLVF

SEQ ID NO: 156120 - protein, 15 aa, Homo sapiens
  CDR3 for beta chain variable domain of TCR clone 78060 (TRBV5-1, TRBJ2-1)
RASSPPRAPYNEQFF

SEQ ID NO: 156121 - protein, 12 aa, Homo sapiens
  CDR3 for alpha chain variable domain of TCR clone 78061 (TRAV2, TRAJ9)
CAVGAGGFKTIF

SEQ ID NO: 156122 - protein, 16 aa, Homo sapiens
  CDR3 for beta chain variable domain of TCR clone 78061 (TRBV13, TRBJ2-2)
CASSHRTGEHTGELFF

SEQ ID NO: 156123 - protein, 12 aa, Homo sapiens
  CDR3 for alpha chain variable domain of TCR clone 78062 (TRAV17, TRAJ57)
CATDGGSEKRVF

SEQ ID NO: 156124 - protein, 13 aa, Homo sapiens
  CDR3 for beta chain variable domain of TCR clone 78062 (TRBV7-9, TRBJ2-7)
CASSFAGAYEQYF

SEQ ID NO: 156125 - protein, 15 aa, Homo sapiens
  CDR3 for alpha chain variable domain of TCR clone 78063 (TRAV13-2, TRAJ8)
CAENRGNTGFQKLVF

SEQ ID NO: 156126 - protein, 11 aa, Homo sapiens
  CDR3 for beta chain variable domain of TCR clone 78063 (TRBV12-4, TRBJ2-2)
CASSSAGELFF

SEQ ID NO: 156127 - protein, 14 aa, Homo sapiens
  CDR3 for alpha chain variable domain of TCR clone 78064 (TRAV1-2, TRAJ16)
CAVNRFSDGQKLLF

SEQ ID NO: 156128 - protein, 15 aa, Homo sapiens
  CDR3 for beta chain variable domain of TCR clone 78064 (TRBV7-2, TRBJ2-2)
CASSPTGANTGELFF

SEQ ID NO: 156129 - protein, 14 aa, Homo sapiens
  CDR3 for alpha chain variable domain of TCR clone 78065 (TRAV1-2, TRAJ28)
CVARSGAGSYQLTF

SEQ ID NO: 156130 - protein, 12 aa, Homo sapiens
  CDR3 for beta chain variable domain of TCR clone 78065 (TRBV12-5, TRBJ2-5)
CASGQGVETQYF

SEQ ID NO: 156131 - protein, 14 aa, Homo sapiens
  CDR3 for alpha chain variable domain of TCR clone 78066 (TRAV1-2, TRAJ16)
CAVNRFSDGQKLLL

SEQ ID NO: 156132 - protein, 12 aa, Homo sapiens
  CDR3 for beta chain variable domain of TCR clone 78066 (TRBV6-5, TRBJ2-5)
CASSEGSETQYF

SEQ ID NO: 156133 - protein, 14 aa, Homo sapiens
  CDR3 for alpha chain variable domain of TCR clone 78067 (TRAV21, TRAJ45)
CAVSSGGGADGLTF

SEQ ID NO: 156134 - protein, 11 aa, Homo sapiens
  CDR3 for beta chain variable domain of TCR clone 78067 (TRBV19, TRBJ1-1)
CASSIGSEAFF

SEQ ID NO: 156135 - protein, 18 aa, Homo sapiens
  CDR3 for alpha chain variable domain of TCR clone 78068 (TRAV26-2, TRAJ45)
CILRLWGYSGGGADGLTV

SEQ ID NO: 156136 - protein, 17 aa, Homo sapiens
  CDR3 for beta chain variable domain of TCR clone 78068 (TRBV28, TRBJ2-3)
CASSPTPAGGRVDTQYF

SEQ ID NO: 156137 - protein, 12 aa, Homo sapiens
  CDR3 for alpha chain variable domain of TCR clone 78069 (TRAV13-1, TRAJ45)
CAATRGADGLTF

SEQ ID NO: 156138 - protein, 16 aa, Homo sapiens
  CDR3 for beta chain variable domain of TCR clone 78069 (TRBV20-1, TRBJ1-4)
CSAPGQGLLTNEKLFF

SEQ ID NO: 156139 - protein, 13 aa, Homo sapiens
  CDR3 for alpha chain variable domain of TCR clone 78070 (TRAV3, TRAJ27)
CAVRPLGAGKSPF

SEQ ID NO: 156140 - protein, 13 aa, Homo sapiens
  CDR3 for beta chain variable domain of TCR clone 78070 (TRBV7-9, TRBJ2-3)
CASSPGSTDTQYF

SEQ ID NO: 156141 - protein, 13 aa, Homo sapiens
  CDR3 for alpha chain variable domain of TCR clone 78071 (TRAV1-2, TRAJ9)
CAALNTGGFKTIF

SEQ ID NO: 156142 - protein, 15 aa, Homo sapiens
  CDR3 for beta chain variable domain of TCR clone 78071 (TRBV5-1, TRBJ2-3)
CASSVTSGSTDTQYF

SEQ ID NO: 156143 - protein, 13 aa, Homo sapiens
  CDR3 for alpha chain variable domain of TCR clone 78072 (TRAV12-3, TRAJ53)
CAMRGGSNYKLTF

SEQ ID NO: 156144 - protein, 15 aa, Homo sapiens
  CDR3 for beta chain variable domain of TCR clone 78072 (TRBV2, TRBJ2-1)
CATQARLVMIGEQLF

SEQ ID NO: 156145 - protein, 14 aa, Homo sapiens
  CDR3 for alpha chain variable domain of TCR clone 78073 (TRAV34, TRAJ44)
CGADGTGTASKLTF

SEQ ID NO: 156146 - protein, 14 aa, Homo sapiens
  CDR3 for beta chain variable domain of TCR clone 78073 (TRBV28, TRBJ2-7)
CASKPGPDLYEQYF

SEQ ID NO: 156147 - protein, 14 aa, Homo sapiens
  CDR3 for alpha chain variable domain of TCR clone 78074 (TRAV25, TRAJ6)
CAGRESGGSYIPTF

SEQ ID NO: 156148 - protein, 14 aa, Homo sapiens
  CDR3 for beta chain variable domain of TCR clone 78074 (TRBV19, TRBJ2-1)
CASPTFVLSGEQFF

SEQ ID NO: 156149 - protein, 11 aa, Homo sapiens
  CDR3 for alpha chain variable domain of TCR clone 78075 (TRAV12-3, TRAJ43)
CAMSVSNDMRF

SEQ ID NO: 156150 - protein, 15 aa, Homo sapiens
  CDR3 for beta chain variable domain of TCR clone 78075 (TRBV10-3, TRBJ2-3)
CAISLTSGGTDTQYF

SEQ ID NO: 156151 - protein, 17 aa, Homo sapiens
  CDR3 for alpha chain variable domain of TCR clone 78076 (TRAV3, TRAJ6)
CAVRDGPRAGGSYIPTF

SEQ ID NO: 156152 - protein, 15 aa, Homo sapiens
  CDR3 for beta chain variable domain of TCR clone 78076 (TRBV4-1, TRBJ2-7)
CASSQQGQGFDEQYF

SEQ ID NO: 156153 - protein, 14 aa, Homo sapiens
  CDR3 for alpha chain variable domain of TCR clone 78077 (TRAV4, TRAJ26)
CLVGPHNYGQNFVF

SEQ ID NO: 156154 - protein, 17 aa, Homo sapiens
  CDR3 for beta chain variable domain of TCR clone 78077 (TRBV24-1, TRBJ2-1)
CVTSDVSTSGTYNEQFF

SEQ ID NO: 156155 - protein, 12 aa, Homo sapiens
  CDR3 for alpha chain variable domain of TCR clone 78078 (TRAV12-3, TRAJ17)
LAMTLTGNKLTF

SEQ ID NO: 156156 - protein, 15 aa, Homo sapiens
  CDR3 for beta chain variable domain of TCR clone 78078 (TRBV20-1, TRBJ2-7)
CSARDRVSGMDEQYF

SEQ ID NO: 156157 - protein, 16 aa, Homo sapiens
  CDR3 for alpha chain variable domain of TCR clone 78079 (TRAV23/DV6, TRAJ9)
CAASIGGNTGGFKTIF

SEQ ID NO: 156158 - protein, 14 aa, Homo sapiens
  CDR3 for beta chain variable domain of TCR clone 78079 (TRBV7-6, TRBJ2-3)
CASSLGTVTDTQYF

SEQ ID NO: 156159 - protein, 15 aa, Homo sapiens
  CDR3 for alpha chain variable domain of TCR clone 78080 (TRAV20, TRAJ53)
CAVQASGGSNYKLTF

SEQ ID NO: 156160 - protein, 14 aa, Homo sapiens
  CDR3 for beta chain variable domain of TCR clone 78080 (TRBV19, TRBJ1-5)
CASGTEVYNQPQHF

SEQ ID NO: 156161 - protein, 13 aa, Homo sapiens
  CDR3 for alpha chain variable domain of TCR clone 78081 (TRAV1-2, TRAJ9)
CAALNTGGFKTIF

SEQ ID NO: 156162 - protein, 18 aa, Homo sapiens
  CDR3 for beta chain variable domain of TCR clone 78081 (TRBV6-6, TRBJ1-3)
CASSYSKWDSISGNTIYF

SEQ ID NO: 156163 - protein, 14 aa, Homo sapiens
  CDR3 for alpha chain variable domain of TCR clone 78082 (TRAV9-2, TRAJ39)
CALYIYNAGNMLTF

SEQ ID NO: 156164 - protein, 14 aa, Homo sapiens
  CDR3 for beta chain variable domain of TCR clone 78082 (TRBV7-9, TRBJ2-1)
CASSSMVGFGEQFF

SEQ ID NO: 156165 - protein, 15 aa, Homo sapiens
  CDR3 for alpha chain variable domain of TCR clone 78083 (TRAV8-3, TRAJ27)
CAVGPSKTNAGKSTF

SEQ ID NO: 156166 - protein, 14 aa, Homo sapiens
  CDR3 for beta chain variable domain of TCR clone 78083 (TRBV24-1, TRBJ1-1)
CATSIPRGDTEAFF

SEQ ID NO: 156167 - protein, 13 aa, Homo sapiens
  CDR3 for alpha chain variable domain of TCR clone 78084 (TRAV8-2, TRAJ21)
CVVSSYNFNKFHF

SEQ ID NO: 156168 - protein, 15 aa, Homo sapiens
  CDR3 for beta chain variable domain of TCR clone 78084 (TRBV18, TRBJ1-1)
CASSDRGTGDTEAFF

SEQ ID NO: 156169 - protein, 14 aa, Homo sapiens
  CDR3 for alpha chain variable domain of TCR clone 78085 (TRAV13-1, TRAJ35)
CAASKGGFGNVLHC

SEQ ID NO: 156170 - protein, 11 aa, Homo sapiens
  CDR3 for beta chain variable domain of TCR clone 78085 (TRBV29-1, TRBJ2-5)
CSEDRTGTQYF

SEQ ID NO: 156171 - protein, 14 aa, Homo sapiens
  CDR3 for alpha chain variable domain of TCR clone 78086 (TRAV12-3, TRAJ30)
CAMSLLNRDNKIIF

SEQ ID NO: 156172 - protein, 12 aa, Homo sapiens
  CDR3 for beta chain variable domain of TCR clone 78086 (TRBV11-2, TRBJ2-2)
CASSLGGGELFF

SEQ ID NO: 156173 - protein, 14 aa, Homo sapiens
  CDR3 for alpha chain variable domain of TCR clone 78087 (TRAV13-1, TRAJ3)
CAASKSSIASKIIF

SEQ ID NO: 156174 - protein, 13 aa, Homo sapiens
  CDR3 for beta chain variable domain of TCR clone 78087 (TRBV25-1, TRBJ2-5)
CASSESGRETQYF

SEQ ID NO: 156175 - protein, 14 aa, Homo sapiens
  CDR3 for alpha chain variable domain of TCR clone 78088 (TRAV21, TRAJ21)
CAVGVGDNFNKFYF

SEQ ID NO: 156176 - protein, 17 aa, Homo sapiens
  CDR3 for beta chain variable domain of TCR clone 78088 (TRBV20-1, TRBJ2-2)
CSASGSGQGGLTGELFF

SEQ ID NO: 156177 - protein, 17 aa, Homo sapiens
  CDR3 for alpha chain variable domain of TCR clone 78089 (TRAV3, TRAJ6)
CAVRDGPRAGGSYIPTF

SEQ ID NO: 156178 - protein, 16 aa, Homo sapiens
  CDR3 for beta chain variable domain of TCR clone 78089 (TRBV7-8, TRBJ2-3)
CASSTEGQREADTQYF

SEQ ID NO: 156179 - protein, 13 aa, Homo sapiens
  CDR3 for alpha chain variable domain of TCR clone 78090 (TRAV21, TRAJ27)
CAARPGNAGKSTF

SEQ ID NO: 156180 - protein, 16 aa, Homo sapiens
  CDR3 for beta chain variable domain of TCR clone 78090 (TRBV13, TRBJ2-3)
CQQPLQGSGGRNTQYF

SEQ ID NO: 156181 - protein, 21 aa, Homo sapiens
  CDR3 for alpha chain variable domain of TCR clone 78091 (TRAV1-1, TRAJ6)
CLLLLRCERLERTGGSYIPTF

SEQ ID NO: 156182 - protein, 13 aa, Homo sapiens
  CDR3 for beta chain variable domain of TCR clone 78091 (TRBV10-2, TRBJ2-7)
CSSGASGGYEQYF

SEQ ID NO: 156183 - protein, 15 aa, Homo sapiens
  CDR3 for alpha chain variable domain of TCR clone 78092 (TRAV2, TRAJ9)
CAVEDRGTGGFKTTF

SEQ ID NO: 156184 - protein, 14 aa, Homo sapiens
  CDR3 for beta chain variable domain of TCR clone 78092 (TRBV25-1, TRBJ1-1)
CASTHLGGNTEAFF

SEQ ID NO: 156185 - protein, 16 aa, Homo sapiens
  CDR3 for alpha chain variable domain of TCR clone 78093 (TRAV30, TRAJ24)
CGTEIVDADGWGKFQF

SEQ ID NO: 156186 - protein, 15 aa, Homo sapiens
  CDR3 for beta chain variable domain of TCR clone 78093 (TRBV20-1, TRBJ2-6)
CSARDRGPGANVLTF

SEQ ID NO: 156187 - protein, 14 aa, Homo sapiens
  CDR3 for alpha chain variable domain of TCR clone 78094 (TRAV12-2, TRAJ40)
CAVKIPSGAYNYIF

SEQ ID NO: 156188 - protein, 14 aa, Homo sapiens
  CDR3 for beta chain variable domain of TCR clone 78094 (TRBV20-1, TRBJ1-1)
CSAQTRIGGTEAFF

SEQ ID NO: 156189 - protein, 14 aa, Homo sapiens
  CDR3 for alpha chain variable domain of TCR clone 78095 (TRAV8-6, TRAJ15)
CAVSEDQARTALIF

SEQ ID NO: 156190 - protein, 13 aa, Homo sapiens
  CDR3 for beta chain variable domain of TCR clone 78095 (TRBV20-1, TRBJ1-1)
CSARAGGNTEAFF

SEQ ID NO: 156191 - protein, 14 aa, Homo sapiens
  CDR3 for alpha chain variable domain of TCR clone 78096 (TRAV1-2, TRAJ8)
CAVREDTGFQKLAF

SEQ ID NO: 156192 - protein, 14 aa, Homo sapiens
  CDR3 for beta chain variable domain of TCR clone 78096 (TRBV15, TRBJ2-3)
CATRSGTSTDTQYF

SEQ ID NO: 156193 - protein, 16 aa, Homo sapiens
  CDR3 for alpha chain variable domain of TCR clone 78097 (TRAV1-2, TRAJ10)
CAVRGVLTGGGNKLTF

SEQ ID NO: 156194 - protein, 15 aa, Homo sapiens
  CDR3 for beta chain variable domain of TCR clone 78097 (TRBV11-2, TRBJ2-1)
CASSKNRGLIYEQFF

SEQ ID NO: 156195 - protein, 14 aa, Homo sapiens
  CDR3 for alpha chain variable domain of TCR clone 78098 (TRAV17, TRAJ6)
CATDERRGSYIPTF

SEQ ID NO: 156196 - protein, 13 aa, Homo sapiens
  CDR3 for beta chain variable domain of TCR clone 78098 (TRBV27, TRBJ2-1)
CASSLGRIWGQFF

SEQ ID NO: 156197 - protein, 15 aa, Homo sapiens
  CDR3 for alpha chain variable domain of TCR clone 78099 (TRAV25, TRAJ41)
CAEPWNSNSGYALNF

SEQ ID NO: 156198 - protein, 13 aa, Homo sapiens
  CDR3 for beta chain variable domain of TCR clone 78099 (TRBV15, TRBJ1-1)
CATSRGIQARAFF

SEQ ID NO: 156199 - protein, 15 aa, Homo sapiens
  CDR3 for alpha chain variable domain of TCR clone 78100 (TRAV21, TRAJ52)
CAVSGGGTSYGKLTF

SEQ ID NO: 156200 - protein, 15 aa, Homo sapiens
  CDR3 for beta chain variable domain of TCR clone 78100 (TRBV18, TRBJ1-5)
CASSPSDRSNQPQHF

SEQ ID NO: 156201 - protein, 18 aa, Homo sapiens
  CDR3 for alpha chain variable domain of TCR clone 78101 (TRAV26-1, TRAJ52)
CIVRVAGAGGTSYGKLTF

SEQ ID NO: 156202 - protein, 13 aa, Homo sapiens
  CDR3 for beta chain variable domain of TCR clone 78101 (TRBV7-8, TRBJ1-2)
CASSARSYYGYTF

SEQ ID NO: 156203 - protein, 14 aa, Homo sapiens
  CDR3 for alpha chain variable domain of TCR clone 78102 (TRAV17, TRAJ57)
CATDPQGGSEKLVF

SEQ ID NO: 156204 - protein, 14 aa, Homo sapiens
  CDR3 for beta chain variable domain of TCR clone 78102 (TRBV11-2, TRBJ2-3)
CASGLGGGANTQYF

SEQ ID NO: 156205 - protein, 10 aa, Homo sapiens
  CDR3 for alpha chain variable domain of TCR clone 78103 (TRAV8-4, TRAJ43)
CAVSADDMRF

SEQ ID NO: 156206 - protein, 15 aa, Homo sapiens
  CDR3 for beta chain variable domain of TCR clone 78103 (TRBV5-1, TRBJ2-3)
CASSVASGSTDTQYF

SEQ ID NO: 156207 - protein, 12 aa, Homo sapiens
  CDR3 for alpha chain variable domain of TCR clone 78104 (TRAV21, TRAJ49)
CAVTNTGNQFYF

SEQ ID NO: 156208 - protein, 19 aa, Homo sapiens
  CDR3 for beta chain variable domain of TCR clone 78104 (TRBV5-1, TRBJ2-3)
CASSLWLAGGITTTDTQYF

SEQ ID NO: 156209 - protein, 12 aa, Homo sapiens
  CDR3 for alpha chain variable domain of TCR clone 78105 (TRAV12-1, TRAJ40)
CVVSSGTYKYIF

SEQ ID NO: 156210 - protein, 14 aa, Homo sapiens
  CDR3 for beta chain variable domain of TCR clone 78105 (TRBV20-1, TRBJ2-2)
CSDPDTANTGELFF

SEQ ID NO: 156211 - protein, 13 aa, Homo sapiens
  CDR3 for alpha chain variable domain of TCR clone 78106 (TRAV2, TRAJ15)
CAVASQAGTALIF

SEQ ID NO: 156212 - protein, 16 aa, Homo sapiens
  CDR3 for beta chain variable domain of TCR clone 78106 (TRBV5-1, TRBJ1-1)
CASSSGGNSLNTEAFS

SEQ ID NO: 156213 - protein, 14 aa, Homo sapiens
  CDR3 for alpha chain variable domain of TCR clone 78107 (TRAV27, TRAJ22)
CAGLPSGSARQLTF

SEQ ID NO: 156214 - protein, 16 aa, Homo sapiens
  CDR3 for beta chain variable domain of TCR clone 78107 (TRBV7-3, TRBJ2-2)
CASSVKRGTLSGELFF

SEQ ID NO: 156215 - protein, 13 aa, Homo sapiens
  CDR3 for alpha chain variable domain of TCR clone 78108 (TRAV8-3, TRAJ44)
CAVVPGTAIKLTF

SEQ ID NO: 156216 - protein, 14 aa, Homo sapiens
  CDR3 for beta chain variable domain of TCR clone 78108 (TRBV11-2, TRBJ2-3)
CASSRLARTDTQYF

SEQ ID NO: 156217 - protein, 12 aa, Homo sapiens
  CDR3 for alpha chain variable domain of TCR clone 78109 (TRAV8-3, TRAJ20)
CAVGANDYKLGF

SEQ ID NO: 156218 - protein, 15 aa, Homo sapiens
  CDR3 for beta chain variable domain of TCR clone 78109 (TRBV19, TRBJ2-2)
CQPISRDRGHRGAVF

SEQ ID NO: 156219 - protein, 15 aa, Homo sapiens
  CDR3 for alpha chain variable domain of TCR clone 78110 (TRAV26-1, TRAJ3)
CIVRSGYSSASKIIF

SEQ ID NO: 156220 - protein, 14 aa, Homo sapiens
  CDR3 for beta chain variable domain of TCR clone 78110 (TRBV13, TRBJ2-5)
CASYRRLTEETQYF

SEQ ID NO: 156221 - protein, 14 aa, Homo sapiens
  CDR3 for alpha chain variable domain of TCR clone 78111 (TRAV12-3, TRAJ3)
CNERGNSSASKIIF

SEQ ID NO: 156222 - protein, 17 aa, Homo sapiens
  CDR3 for beta chain variable domain of TCR clone 78111 (TRBV7-3, TRBJ2-3)
CASSLMKRMRGADTQYF

SEQ ID NO: 156223 - protein, 13 aa, Homo sapiens
  CDR3 for alpha chain variable domain of TCR clone 78112 (TRAV20, TRAJ54)
CAVQAGGAQKLVF

SEQ ID NO: 156224 - protein, 14 aa, Homo sapiens
  CDR3 for beta chain variable domain of TCR clone 78112 (TRBV20-1, TRBJ2-7)
YSAKTGTGGYEQYF

SEQ ID NO: 156225 - protein, 16 aa, Homo sapiens
  CDR3 for alpha chain variable domain of TCR clone 78113 (TRAV13-1, TRAJ48)
CAASIFGNFGNEKLTF

SEQ ID NO: 156226 - protein, 13 aa, Homo sapiens
  CDR3 for beta chain variable domain of TCR clone 78113 (TRBV4-2, TRBJ1-1)
CASSQAGNTEAFF

SEQ ID NO: 156227 - protein, 13 aa, Homo sapiens
  CDR3 for alpha chain variable domain of TCR clone 78114 (TRAV35, TRAJ42)
CAGFPGSQGNLIF

SEQ ID NO: 156228 - protein, 14 aa, Homo sapiens
  CDR3 for beta chain variable domain of TCR clone 78114 (TRBV4-1, TRBJ2-2)
CASSRAVNTGELFF

SEQ ID NO: 156229 - protein, 11 aa, Homo sapiens
  CDR3 for alpha chain variable domain of TCR clone 78115 (TRAV12-2, TRAJ23)
CAVDQGGKLIF

SEQ ID NO: 156230 - protein, 15 aa, Homo sapiens
  CDR3 for beta chain variable domain of TCR clone 78115 (TRBV9, TRBJ2-1)
CASSLAGSSYNEQFF

SEQ ID NO: 156231 - protein, 14 aa, Homo sapiens
  CDR3 for alpha chain variable domain of TCR clone 78116 (TRAV20, TRAJ42)
CAVQAGGSQGNLIF

SEQ ID NO: 156232 - protein, 13 aa, Homo sapiens
  CDR3 for beta chain variable domain of TCR clone 78116 (TRBV5-4, TRBJ1-1)
CASSVDLGTEAFF

SEQ ID NO: 156233 - protein, 14 aa, Homo sapiens
  CDR3 for alpha chain variable domain of TCR clone 78117 (TRAV12-2, TRAJ5)
CAVNRSTGRRALTF

SEQ ID NO: 156234 - protein, 16 aa, Homo sapiens
  CDR3 for beta chain variable domain of TCR clone 78117 (TRBV5-1, TRBJ1-1)
CASSSGGNSLNTEAFF

SEQ ID NO: 156235 - protein, 13 aa, Homo sapiens
  CDR3 for alpha chain variable domain of TCR clone 78118 (TRAV35, TRAJ57)
CAGSQGGSEKLVF

SEQ ID NO: 156236 - protein, 14 aa, Homo sapiens
  CDR3 for beta chain variable domain of TCR clone 78118 (TRBV25-1, TRBJ1-1)
CASTHMGGNTEAFF

SEQ ID NO: 156237 - protein, 14 aa, Homo sapiens
  CDR3 for alpha chain variable domain of TCR clone 78119 (TRAV13-1, TRAJ13)
CAASRVVGYQKVTF

SEQ ID NO: 156238 - protein, 17 aa, Homo sapiens
  CDR3 for beta chain variable domain of TCR clone 78119 (TRBV15, TRBJ1-5)
CATSRAPPGTRNQPQHF

SEQ ID NO: 156239 - protein, 14 aa, Homo sapiens
  CDR3 for alpha chain variable domain of TCR clone 78120 (TRAV23/DV6, TRAJ40)
CAASLTSGTYKYIF

SEQ ID NO: 156240 - protein, 15 aa, Homo sapiens
  CDR3 for beta chain variable domain of TCR clone 78120 (TRBV19, TRBJ1-1)
CASTSGQIQNTEAFF

SEQ ID NO: 156241 - protein, 15 aa, Homo sapiens
  CDR3 for alpha chain variable domain of TCR clone 78121 (TRAV21, TRAJ52)
CAVRGGGTSYGKLTF

SEQ ID NO: 156242 - protein, 14 aa, Homo sapiens
  CDR3 for beta chain variable domain of TCR clone 78121 (TRBV7-9, TRBJ2-1)
CASSDNSGYNEQFF

SEQ ID NO: 156243 - protein, 17 aa, Homo sapiens
  CDR3 for alpha chain variable domain of TCR clone 78122 (TRAV4, TRAJ18)
CLVGERSVGSTLGRLYF

SEQ ID NO: 156244 - protein, 14 aa, Homo sapiens
  CDR3 for beta chain variable domain of TCR clone 78122 (TRBV2, TRBJ2-3)
CASSEGQNTDTQYF

SEQ ID NO: 156245 - protein, 14 aa, Homo sapiens
  CDR3 for alpha chain variable domain of TCR clone 78123 (TRAV26-1, TRAJ38)
WIADNAGNNRKLIW

SEQ ID NO: 156246 - protein, 13 aa, Homo sapiens
  CDR3 for beta chain variable domain of TCR clone 78123 (TRBV20-1, TRBJ1-1)
CSARGGGNTEAFF

SEQ ID NO: 156247 - protein, 16 aa, Homo sapiens
  CDR3 for alpha chain variable domain of TCR clone 78124 (TRAV3, TRAJ37)
CAVRPHGPGNTGKLIF

SEQ ID NO: 156248 - protein, 17 aa, Homo sapiens
  CDR3 for beta chain variable domain of TCR clone 78124 (TRBV7-2, TRBJ2-7)
CASSFETSGSTSSTSGR

SEQ ID NO: 156249 - protein, 15 aa, Homo sapiens
  CDR3 for alpha chain variable domain of TCR clone 78125 (TRAV3, TRAJ17)
CAVRDTGAAGNKLTF

SEQ ID NO: 156250 - protein, 14 aa, Homo sapiens
  CDR3 for beta chain variable domain of TCR clone 78125 (TRBV7-2, TRBJ2-7)
CASSPKTSFYEQYF

SEQ ID NO: 156251 - protein, 16 aa, Homo sapiens
  CDR3 for alpha chain variable domain of TCR clone 78126 (TRAV30, TRAJ24)
CGTEIVDADSWGKFQF

SEQ ID NO: 156252 - protein, 13 aa, Homo sapiens
  CDR3 for beta chain variable domain of TCR clone 78126 (TRBV7-7, TRBJ2-5)
CASSRSGQETQYF

SEQ ID NO: 156253 - protein, 13 aa, Homo sapiens
  CDR3 for alpha chain variable domain of TCR clone 78127 (TRAV1-2, TRAJ26)
CAVRPNYGQNFVF

SEQ ID NO: 156254 - protein, 14 aa, Homo sapiens
  CDR3 for beta chain variable domain of TCR clone 78127 (TRBV4-1, TRBJ2-5)
CASSQDLALETHYF

SEQ ID NO: 156255 - protein, 12 aa, Homo sapiens
  CDR3 for alpha chain variable domain of TCR clone 78128 (TRAV12-2, TRAJ16)
CAVNLDGQKLLF

SEQ ID NO: 156256 - protein, 16 aa, Homo sapiens
  CDR3 for beta chain variable domain of TCR clone 78128 (TRBV15, TRBJ2-7)
CATSAWEPGTSYEQYF

SEQ ID NO: 156257 - protein, 14 aa, Homo sapiens
  CDR3 for alpha chain variable domain of TCR clone 78129 (TRAV1-2, TRAJ8)
CAVREDTGFQKLVF

SEQ ID NO: 156258 - protein, 14 aa, Homo sapiens
  CDR3 for beta chain variable domain of TCR clone 78129 (TRBV19, TRBJ2-7)
CASSMGQGAIEQYF

SEQ ID NO: 156259 - protein, 14 aa, Homo sapiens
  CDR3 for alpha chain variable domain of TCR clone 78130 (TRAV12-3, TRAJ6)
CAMSATGGSYIPKF

SEQ ID NO: 156260 - protein, 16 aa, Homo sapiens
  CDR3 for beta chain variable domain of TCR clone 78130 (TRBV4-2, TRBJ2-1)
CASSPRAGQGANEQFF

SEQ ID NO: 156261 - protein, 18 aa, Homo sapiens
  CDR3 for alpha chain variable domain of TCR clone 78131 (TRAV21, TRAJ52)
CAVRPSPAGGTSYGKLTF

SEQ ID NO: 156262 - protein, 15 aa, Homo sapiens
  CDR3 for beta chain variable domain of TCR clone 78131 (TRBV18, TRBJ2-7)
CASSPSSTGNYEQHF

SEQ ID NO: 156263 - protein, 12 aa, Homo sapiens
  CDR3 for alpha chain variable domain of TCR clone 78132 (TRAV17, TRAJ4)
CATDGGYNKLIF

SEQ ID NO: 156264 - protein, 13 aa, Homo sapiens
  CDR3 for beta chain variable domain of TCR clone 78132 (TRBV29-1, TRBJ2-2)
CSTTGVKTGELFF

SEQ ID NO: 156265 - protein, 12 aa, Homo sapiens
  CDR3 for alpha chain variable domain of TCR clone 78133 (TRAV21, TRAJ27)
CAANTNAGKSTF

SEQ ID NO: 156266 - protein, 14 aa, Homo sapiens
  CDR3 for beta chain variable domain of TCR clone 78133 (TRBV19, TRBJ2-2)
CATTGHANTGELFF

SEQ ID NO: 156267 - protein, 12 aa, Homo sapiens
  CDR3 for alpha chain variable domain of TCR clone 78134 (TRAV21, TRAJ33)
CDKMDSNYQLIW

SEQ ID NO: 156268 - protein, 14 aa, Homo sapiens
  CDR3 for beta chain variable domain of TCR clone 78134 (TRBV2, TRBJ2-7)
CASSLTSGGYEQYF

SEQ ID NO: 156269 - protein, 14 aa, Homo sapiens
  CDR3 for alpha chain variable domain of TCR clone 78135 (TRAV17, TRAJ17)
CATDHRAAGNKLTF

SEQ ID NO: 156270 - protein, 16 aa, Homo sapiens
  CDR3 for beta chain variable domain of TCR clone 78135 (TRBV24-1, TRBJ2-3)
CATSDPGTGATDTQYF

SEQ ID NO: 156271 - protein, 13 aa, Homo sapiens
  CDR3 for alpha chain variable domain of TCR clone 78136 (TRAV13-1, TRAJ11)
CAAVLAGYSTLTF

SEQ ID NO: 156272 - protein, 17 aa, Homo sapiens
  CDR3 for beta chain variable domain of TCR clone 78136 (TRBV25-1, TRBJ2-7)
CASSEARVVFSSYEQYF

SEQ ID NO: 156273 - protein, 14 aa, Homo sapiens
  CDR3 for alpha chain variable domain of TCR clone 78137 (TRAV13-1, TRAJ45)
CAAIGGGGADGLTF

SEQ ID NO: 156274 - protein, 16 aa, Homo sapiens
  CDR3 for beta chain variable domain of TCR clone 78137 (TRBV7-2, TRBJ1-1)
CASSLGVGWTNTEAFF

SEQ ID NO: 156275 - protein, 14 aa, Homo sapiens
  CDR3 for alpha chain variable domain of TCR clone 78138 (TRAV2, TRAJ9)
CAVEDRSGGFKTIF

SEQ ID NO: 156276 - protein, 18 aa, Homo sapiens
  CDR3 for beta chain variable domain of TCR clone 78138 (TRBV11-2, TRBJ2-3)
CASSLGGASRGAPSTQYF

SEQ ID NO: 156277 - protein, 14 aa, Homo sapiens
  CDR3 for alpha chain variable domain of TCR clone 78139 (TRAV8-2, TRAJ4)
CVVSPSGGYNKLIF

SEQ ID NO: 156278 - protein, 15 aa, Homo sapiens
  CDR3 for beta chain variable domain of TCR clone 78139 (TRBV4-1, TRBJ1-4)
CASSDTGGTNEQLFF

SEQ ID NO: 156279 - protein, 14 aa, Homo sapiens
  CDR3 for alpha chain variable domain of TCR clone 78140 (TRAV12-3, TRAJ10)
SHLPLTGGGNKLIF

SEQ ID NO: 156280 - protein, 14 aa, Homo sapiens
  CDR3 for beta chain variable domain of TCR clone 78140 (TRBV19, TRBJ2-1)
CANPTFVLSGEQFF

SEQ ID NO: 156281 - protein, 11 aa, Homo sapiens
  CDR3 for alpha chain variable domain of TCR clone 78141 (TRAV2, TRAJ20)
AAVYRDCKLSF

SEQ ID NO: 156282 - protein, 12 aa, Homo sapiens
  CDR3 for beta chain variable domain of TCR clone 78141 (TRBV11-2, TRBJ2-1)
CASSPGNNEQFF

SEQ ID NO: 156283 - protein, 11 aa, Homo sapiens
  CDR3 for alpha chain variable domain of TCR clone 78142 (TRAV4, TRAJ10)
CLVGDNARLTF

SEQ ID NO: 156284 - protein, 16 aa, Homo sapiens
  CDR3 for beta chain variable domain of TCR clone 78142 (TRBV7-2, TRBJ2-5)
CASSSKWLSGQETQYF

SEQ ID NO: 156285 - protein, 13 aa, Homo sapiens
  CDR3 for alpha chain variable domain of TCR clone 78143 (TRAV2, TRAJ15)
CAVASQAGTDLIF

SEQ ID NO: 156286 - protein, 16 aa, Homo sapiens
  CDR3 for beta chain variable domain of TCR clone 78143 (TRBV20-1, TRBJ1-4)
CSAPGQGLLTNEKLFF

SEQ ID NO: 156287 - protein, 15 aa, Homo sapiens
  CDR3 for alpha chain variable domain of TCR clone 78144 (TRAV26-1, TRAJ29)
CIVRVEGSGNKPLVF

SEQ ID NO: 156288 - protein, 14 aa, Homo sapiens
  CDR3 for beta chain variable domain of TCR clone 78144 (TRBV25-1, TRBJ1-1)
CASTHLGGNTEAFF

SEQ ID NO: 156289 - protein, 19 aa, Homo sapiens
  CDR3 for alpha chain variable domain of TCR clone 78145 (TRAV2, TRAJ20)
ILQVREADAAFYRDCKLSF

SEQ ID NO: 156290 - protein, 13 aa, Homo sapiens
  CDR3 for beta chain variable domain of TCR clone 78145 (TRBV15, TRBJ1-6)
CATSGGLNSPLHF

SEQ ID NO: 156291 - protein, 17 aa, Homo sapiens
  CDR3 for alpha chain variable domain of TCR clone 78146 (TRAV3, TRAJ38)
CAVRDCLNAGNNRKRIW

SEQ ID NO: 156292 - protein, 13 aa, Homo sapiens
  CDR3 for beta chain variable domain of TCR clone 78146 (TRBV23-1, TRBJ1-4)
CASRGKFNEKLFF

SEQ ID NO: 156293 - protein, 19 aa, Homo sapiens
  CDR3 for alpha chain variable domain of TCR clone 78147 (TRAV1-2, TRAJ26)
CLLPLCCERPDNYGQNFVF

SEQ ID NO: 156294 - protein, 15 aa, Homo sapiens
  CDR3 for beta chain variable domain of TCR clone 78147 (TRBV9, TRBJ1-6)
CASSVDGTGDSPLHF

SEQ ID NO: 156295 - protein, 16 aa, Homo sapiens
  CDR3 for alpha chain variable domain of TCR clone 78148 (TRAV12-2, TRAJ13)
CAVKKTGGTRKLPLEL

SEQ ID NO: 156296 - protein, 15 aa, Homo sapiens
  CDR3 for beta chain variable domain of TCR clone 78148 (TRBV27, TRBJ2-1)
CASSNGGGSSNEQFF

SEQ ID NO: 156297 - protein, 13 aa, Homo sapiens
  CDR3 for alpha chain variable domain of TCR clone 78149 (TRAV13-2, TRAJ40)
CAEFTSGTYKYIF

SEQ ID NO: 156298 - protein, 13 aa, Homo sapiens
  CDR3 for beta chain variable domain of TCR clone 78149 (TRBV7-9, TRBJ1-2)
CASSLKQNYGYTF

SEQ ID NO: 156299 - protein, 11 aa, Homo sapiens
  CDR3 for alpha chain variable domain of TCR clone 78150 (TRAV21, TRAJ34)
CAHYNTDKLIF

SEQ ID NO: 156300 - protein, 14 aa, Homo sapiens
  CDR3 for beta chain variable domain of TCR clone 78150 (TRBV18, TRBJ1-5)
CASSPGNSNQPQHF

SEQ ID NO: 156301 - protein, 14 aa, Homo sapiens
  CDR3 for alpha chain variable domain of TCR clone 78151 (TRAV12-2, TRAJ45)
CAVNIGGGADRLTF

SEQ ID NO: 156302 - protein, 13 aa, Homo sapiens
  CDR3 for beta chain variable domain of TCR clone 78151 (TRBV19, TRBJ2-2)
CASSIWSTGELFF

SEQ ID NO: 156303 - protein, 15 aa, Homo sapiens
  CDR3 for alpha chain variable domain of TCR clone 78152 (TRAV12-3, TRAJ6)
CAMSAASGGSYIPTF

SEQ ID NO: 156304 - protein, 13 aa, Homo sapiens
  CDR3 for beta chain variable domain of TCR clone 78152 (TRBV20-1, TRBJ1-2)
CSASTERIYDYTF

SEQ ID NO: 156305 - protein, 15 aa, Homo sapiens
  CDR3 for alpha chain variable domain of TCR clone 78153 (TRAV17, TRAJ57)
CATGPSQGGSEKLVF

SEQ ID NO: 156306 - protein, 14 aa, Homo sapiens
  CDR3 for beta chain variable domain of TCR clone 78153 (TRBV20-1, TRBJ2-7)
CSAKRGRSSYEQYF

SEQ ID NO: 156307 - protein, 13 aa, Homo sapiens
  CDR3 for alpha chain variable domain of TCR clone 78154 (TRAV13-1, TRAJ5)
CAAEHTGRRALTF

SEQ ID NO: 156308 - protein, 13 aa, Homo sapiens
  CDR3 for beta chain variable domain of TCR clone 78154 (TRBV7-8, TRBJ2-7)
CASSLTGGREQYF

SEQ ID NO: 156309 - protein, 11 aa, Homo sapiens
  CDR3 for alpha chain variable domain of TCR clone 78155 (TRAV2, TRAJ33)
CAVDSNNQLIW

SEQ ID NO: 156310 - protein, 14 aa, Homo sapiens
  CDR3 for beta chain variable domain of TCR clone 78155 (TRBV11-2, TRBJ2-3)
CASSRLARTDTQYF

SEQ ID NO: 156311 - protein, 14 aa, Homo sapiens
  CDR3 for alpha chain variable domain of TCR clone 78156 (TRAV20, TRAJ20)
CAGRRGYNDYKLSF

SEQ ID NO: 156312 - protein, 13 aa, Homo sapiens
  CDR3 for beta chain variable domain of TCR clone 78156 (TRBV19, TRBJ2-5)
CASSETAPETQYF

SEQ ID NO: 156313 - protein, 17 aa, Homo sapiens
  CDR3 for alpha chain variable domain of TCR clone 78157 (TRAV13-1, TRAJ53)
CAASWKSSGGSNYKLTF

SEQ ID NO: 156314 - protein, 19 aa, Homo sapiens
  CDR3 for beta chain variable domain of TCR clone 78157 (TRBV7-9, TRBJ2-1)
WASSHNRGALLRSYNEQFF

SEQ ID NO: 156315 - protein, 18 aa, Homo sapiens
  CDR3 for alpha chain variable domain of TCR clone 78158 (TRAV21, TRAJ52)
CAVRPSPAVGTSYGKLTF

SEQ ID NO: 156316 - protein, 13 aa, Homo sapiens
  CDR3 for beta chain variable domain of TCR clone 78158 (TRBV20-1, TRBJ1-1)
CSARVGGNTEAFF

SEQ ID NO: 156317 - protein, 14 aa, Homo sapiens
  CDR3 for alpha chain variable domain of TCR clone 78159 (TRAV8-2, TRAJ11)
CVVSEKSGYSTLTF

SEQ ID NO: 156318 - protein, 16 aa, Homo sapiens
  CDR3 for beta chain variable domain of TCR clone 78159 (TRBV28, TRBJ2-1)
CASSAPEYPRDNEQFF

SEQ ID NO: 156319 - protein, 12 aa, Homo sapiens
  CDR3 for alpha chain variable domain of TCR clone 78160 (TRAV13-2, TRAJ23)
CAERHRGGKLIF

SEQ ID NO: 156320 - protein, 13 aa, Homo sapiens
  CDR3 for beta chain variable domain of TCR clone 78160 (TRBV20-1, TRBJ2-2)
CSTLSGGAGELFF

SEQ ID NO: 156321 - protein, 13 aa, Homo sapiens
  CDR3 for alpha chain variable domain of TCR clone 78161 (TRAV12-3, TRAJ13)
CAMSSGGYQEVTF

SEQ ID NO: 156322 - protein, 14 aa, Homo sapiens
  CDR3 for beta chain variable domain of TCR clone 78161 (TRBV2, TRBJ2-1)
CASRTGSSYNEQFF

SEQ ID NO: 156323 - protein, 16 aa, Homo sapiens
  CDR3 for alpha chain variable domain of TCR clone 78162 (TRAV1-2, TRAJ10)
CAVRGVLTGGGNKLTF

SEQ ID NO: 156324 - protein, 12 aa, Homo sapiens
  CDR3 for beta chain variable domain of TCR clone 78162 (TRBV19, TRBJ1-5)
CASSIAQQPQHF

SEQ ID NO: 156325 - protein, 14 aa, Homo sapiens
  CDR3 for alpha chain variable domain of TCR clone 78163 (TRAV12-3, TRAJ56)
CAMSVTGANSKLTF

SEQ ID NO: 156326 - protein, 17 aa, Homo sapiens
  CDR3 for beta chain variable domain of TCR clone 78163 (TRBV20-1, TRBJ2-3)
CSASLLGLGGSADTQYF

SEQ ID NO: 156327 - protein, 11 aa, Homo sapiens
  CDR3 for alpha chain variable domain of TCR clone 78164 (TRAV2, TRAJ33)
CAVESNYQLVW

SEQ ID NO: 156328 - protein, 12 aa, Homo sapiens
  CDR3 for beta chain variable domain of TCR clone 78164 (TRBV11-2, TRBJ2-2)
CASSLGGGELFF

SEQ ID NO: 156329 - protein, 14 aa, Homo sapiens
  CDR3 for alpha chain variable domain of TCR clone 78165 (TRAV16, TRAJ8)
FALLLNTGFQKLVF

SEQ ID NO: 156330 - protein, 15 aa, Homo sapiens
  CDR3 for beta chain variable domain of TCR clone 78165 (TRBV7-7, TRBJ2-2)
CATSKLAKNTGELFF

SEQ ID NO: 156331 - protein, 14 aa, Homo sapiens
  CDR3 for alpha chain variable domain of TCR clone 78166 (TRAV3, TRAJ22)
CAVRDYGSARQLTF

SEQ ID NO: 156332 - protein, 13 aa, Homo sapiens
  CDR3 for beta chain variable domain of TCR clone 78166 (TRBV11-2, TRBJ2-5)
RASGHGAKETQYF

SEQ ID NO: 156333 - protein, 11 aa, Homo sapiens
  CDR3 for alpha chain variable domain of TCR clone 78167 (TRAV13-1, TRAJ6)
CATLGGYIPTF

SEQ ID NO: 156334 - protein, 13 aa, Homo sapiens
  CDR3 for beta chain variable domain of TCR clone 78167 (TRBV6-6, TRBJ2-1)
CASSLHQGDEQFF

SEQ ID NO: 156335 - protein, 14 aa, Homo sapiens
  CDR3 for alpha chain variable domain of TCR clone 78168 (TRAV12-1, TRAJ17)
CVVNYKAAGNKLTF

SEQ ID NO: 156336 - protein, 12 aa, Homo sapiens
  CDR3 for beta chain variable domain of TCR clone 78168 (TRBV12-4, TRBJ2-7)
CASSLGGYEQYF

SEQ ID NO: 156337 - protein, 12 aa, Homo sapiens
  CDR3 for alpha chain variable domain of TCR clone 78169 (TRAV12-1, TRAJ40)
CVVYSGTYKYIF

SEQ ID NO: 156338 - protein, 14 aa, Homo sapiens
  CDR3 for beta chain variable domain of TCR clone 78169 (TRBV19, TRBJ2-3)
CASSAPRGTDTQYF

SEQ ID NO: 156339 - protein, 14 aa, Homo sapiens
  CDR3 for alpha chain variable domain of TCR clone 78170 (TRAV8-4, TRAJ9)
CAVRINTGGFKTIF

SEQ ID NO: 156340 - protein, 15 aa, Homo sapiens
  CDR3 for beta chain variable domain of TCR clone 78170 (TRBV20-1, TRBJ2-7)
CSVRDRVSGMDEQYF

SEQ ID NO: 156341 - protein, 17 aa, Homo sapiens
  CDR3 for alpha chain variable domain of TCR clone 78171 (TRAV23/DV6, TRAJ57)
CAAISTLSQGGSEKLVF

SEQ ID NO: 156342 - protein, 14 aa, Homo sapiens
  CDR3 for beta chain variable domain of TCR clone 78171 (TRBV25-1, TRBJ1-1)
CASTHLGGNTEAFF

SEQ ID NO: 156343 - protein, 12 aa, Homo sapiens
  CDR3 for alpha chain variable domain of TCR clone 78172 (TRAV10, TRAJ43)
CVVVRVGNDMRF

SEQ ID NO: 156344 - protein, 12 aa, Homo sapiens
  CDR3 for beta chain variable domain of TCR clone 78172 (TRBV7-3, TRBJ2-1)
CASSFINNEQFF

SEQ ID NO: 156345 - protein, 14 aa, Homo sapiens
  CDR3 for alpha chain variable domain of TCR clone 78173 (TRAV3, TRAJ21)
CAVESQANFNKFYF

SEQ ID NO: 156346 - protein, 18 aa, Homo sapiens
  CDR3 for beta chain variable domain of TCR clone 78173 (TRBV7-9, TRBJ2-1)
CASSLAVSGTSRRNEQFF

SEQ ID NO: 156347 - protein, 14 aa, Homo sapiens
  CDR3 for alpha chain variable domain of TCR clone 78174 (TRAV26-1, TRAJ38)
CIADNAGNNRRLIW

SEQ ID NO: 156348 - protein, 17 aa, Homo sapiens
  CDR3 for beta chain variable domain of TCR clone 78174 (TRBV7-9, TRBJ2-3)
CASSPTVAGDLTDTQYF

SEQ ID NO: 156349 - protein, 12 aa, Homo sapiens
  CDR3 for alpha chain variable domain of TCR clone 78175 (TRAV17, TRAJ12)
CATLRSSYKLIF

SEQ ID NO: 156350 - protein, 14 aa, Homo sapiens
  CDR3 for beta chain variable domain of TCR clone 78175 (TRBV19, TRBJ2-1)
CASGKSTQYNEQFF

SEQ ID NO: 156351 - protein, 13 aa, Homo sapiens
  CDR3 for alpha chain variable domain of TCR clone 78176 (TRAV23/DV6, TRAJ10)
ASVLPGGGNKLTF

SEQ ID NO: 156352 - protein, 13 aa, Homo sapiens
  CDR3 for beta chain variable domain of TCR clone 78176 (TRBV11-1, TRBJ1-2)
CASVGSWGYGYTF

SEQ ID NO: 156353 - protein, 11 aa, Homo sapiens
  CDR3 for alpha chain variable domain of TCR clone 78177 (TRAV12-2, TRAJ33)
CAVTSNYQLIL

SEQ ID NO: 156354 - protein, 14 aa, Homo sapiens
  CDR3 for beta chain variable domain of TCR clone 78177 (TRBV12-4, TRBJ2-2)
CASNQGANTGELFF

SEQ ID NO: 156355 - protein, 15 aa, Homo sapiens
  CDR3 for alpha chain variable domain of TCR clone 78178 (TRAV35, TRAJ50)
CAGQLRKTSYDKVIF

SEQ ID NO: 156356 - protein, 12 aa, Homo sapiens
  CDR3 for beta chain variable domain of TCR clone 78178 (TRBV5-1, TRBJ2-5)
CACSLGLETQYF

SEQ ID NO: 156357 - protein, 16 aa, Homo sapiens
  CDR3 for alpha chain variable domain of TCR clone 78179 (TRAV3, TRAJ10)
CAVRDMRAGGGNKLTF

SEQ ID NO: 156358 - protein, 15 aa, Homo sapiens
  CDR3 for beta chain variable domain of TCR clone 78179 (TRBV11-2, TRBJ1-6)
CASTGFGTAVSPLLF

SEQ ID NO: 156359 - protein, 13 aa, Homo sapiens
  CDR3 for alpha chain variable domain of TCR clone 78180 (TRAV8-3, TRAJ48)
CAVGPFGNEKLTF

SEQ ID NO: 156360 - protein, 12 aa, Homo sapiens
  CDR3 for beta chain variable domain of TCR clone 78180 (TRBV11-2, TRBJ2-2)
CASSLGGGELFF

SEQ ID NO: 156361 - protein, 12 aa, Homo sapiens
  CDR3 for alpha chain variable domain of TCR clone 78181 (TRAV30, TRAJ43)
CGTEERGNDMRF

SEQ ID NO: 156362 - protein, 14 aa, Homo sapiens
  CDR3 for beta chain variable domain of TCR clone 78181 (TRBV7-2, TRBJ1-1)
CASSFLTGTTEAFF

SEQ ID NO: 156363 - protein, 17 aa, Homo sapiens
  CDR3 for alpha chain variable domain of TCR clone 78182 (TRAV3, TRAJ6)
CAVGDGPRAGGSYIPTF

SEQ ID NO: 156364 - protein, 16 aa, Homo sapiens
  CDR3 for beta chain variable domain of TCR clone 78182 (TRBV4-1, TRBJ2-7)
CASSLTAGQATYEQYF

SEQ ID NO: 156365 - protein, 13 aa, Homo sapiens
  CDR3 for alpha chain variable domain of TCR clone 78183 (TRAV13-1, TRAJ20)
CAARVSNDYNLSF

SEQ ID NO: 156366 - protein, 12 aa, Homo sapiens
  CDR3 for beta chain variable domain of TCR clone 78183 (TRBV20-1, TRBJ2-1)
CSARLGTDEQFF

SEQ ID NO: 156367 - protein, 12 aa, Homo sapiens
  CDR3 for alpha chain variable domain of TCR clone 78184 (TRAV16, TRAJ27)
CALNTNAGKSTF

SEQ ID NO: 156368 - protein, 19 aa, Homo sapiens
  CDR3 for beta chain variable domain of TCR clone 78184 (TRBV7-2, TRBJ2-3)
CASSFLSRNWGGGTDTQYF

SEQ ID NO: 156369 - protein, 11 aa, Homo sapiens
  CDR3 for alpha chain variable domain of TCR clone 78185 (TRAV21, TRAJ39)
LLVNAGNMLTF

SEQ ID NO: 156370 - protein, 13 aa, Homo sapiens
  CDR3 for beta chain variable domain of TCR clone 78185 (TRBV19, TRBJ1-2)
CASSVPGQDGYTF

SEQ ID NO: 156371 - protein, 14 aa, Homo sapiens
  CDR3 for alpha chain variable domain of TCR clone 78186 (TRAV8-2, TRAJ4)
CVVSPSGGYNKLNF

SEQ ID NO: 156372 - protein, 15 aa, Homo sapiens
  CDR3 for beta chain variable domain of TCR clone 78186 (TRBV4-1, TRBJ1-4)
CASSDTGGTNEKLFF

SEQ ID NO: 156373 - protein, 14 aa, Homo sapiens
  CDR3 for alpha chain variable domain of TCR clone 78187 (TRAV8-4, TRAJ5)
CAVSTDTGRRALTF

SEQ ID NO: 156374 - protein, 14 aa, Homo sapiens
  CDR3 for beta chain variable domain of TCR clone 78187 (TRBV19, TRBJ2-7)
CASTVQGRPYEQYF

SEQ ID NO: 156375 - protein, 14 aa, Homo sapiens
  CDR3 for alpha chain variable domain of TCR clone 78188 (TRAV20, TRAJ42)
CAVQAGGSQGNLIF

SEQ ID NO: 156376 - protein, 14 aa, Homo sapiens
  CDR3 for beta chain variable domain of TCR clone 78188 (TRBV28, TRBJ1-2)
CASRIQGANYVYTF

SEQ ID NO: 156377 - protein, 14 aa, Homo sapiens
  CDR3 for alpha chain variable domain of TCR clone 78189 (TRAV35, TRAJ33)
CAGLSQDSNYQLIW

SEQ ID NO: 156378 - protein, 15 aa, Homo sapiens
  CDR3 for beta chain variable domain of TCR clone 78189 (TRBV20-1, TRBJ2-7)
CSAESGTSGAYEQYF

SEQ ID NO: 156379 - protein, 16 aa, Homo sapiens
  CDR3 for alpha chain variable domain of TCR clone 78190 (TRAV3, TRAJ37)
CAVRGKGSGNTGKLIF

SEQ ID NO: 156380 - protein, 15 aa, Homo sapiens
  CDR3 for beta chain variable domain of TCR clone 78190 (TRBV6-6, TRBJ2-7)
CASSYSYGGSYEQYF

SEQ ID NO: 156381 - protein, 10 aa, Homo sapiens
  CDR3 for alpha chain variable domain of TCR clone 78191 (TRAV9-2, TRAJ49)
CAPTGNQFYF

SEQ ID NO: 156382 - protein, 16 aa, Homo sapiens
  CDR3 for beta chain variable domain of TCR clone 78191 (TRBV19, TRBJ2-3)
CASSPGAASRTDTQYF

SEQ ID NO: 156383 - protein, 13 aa, Homo sapiens
  CDR3 for alpha chain variable domain of TCR clone 78192 (TRAV27, TRAJ45)
CRSSGGGADGLTF

SEQ ID NO: 156384 - protein, 17 aa, Homo sapiens
  CDR3 for beta chain variable domain of TCR clone 78192 (TRBV11-2, TRBJ2-1)
CASSLYPPGVEYNEQFY

SEQ ID NO: 156385 - protein, 11 aa, Homo sapiens
  CDR3 for alpha chain variable domain of TCR clone 78193 (TRAV21, TRAJ34)
CAVTNTDKLIF

SEQ ID NO: 156386 - protein, 13 aa, Homo sapiens
  CDR3 for beta chain variable domain of TCR clone 78193 (TRBV15, TRBJ1-6)
CATSGGLNSPLHF

SEQ ID NO: 156387 - protein, 14 aa, Homo sapiens
  CDR3 for alpha chain variable domain of TCR clone 78194 (TRAV1-2, TRAJ16)
CAVNRFSDGQKLLF

SEQ ID NO: 156388 - protein, 15 aa, Homo sapiens
  CDR3 for beta chain variable domain of TCR clone 78194 (TRBV19, TRBJ1-5)
CASSIVWADDQPQHF

SEQ ID NO: 156389 - protein, 17 aa, Homo sapiens
  CDR3 for alpha chain variable domain of TCR clone 78195 (TRAV26-2, TRAJ42)
CILREVGYGGSQGNLIF

SEQ ID NO: 156390 - protein, 16 aa, Homo sapiens
  CDR3 for beta chain variable domain of TCR clone 78195 (TRBV12-4, TRBJ2-7)
CASSLIGGTGTYEQYF

SEQ ID NO: 156391 - protein, 12 aa, Homo sapiens
  CDR3 for alpha chain variable domain of TCR clone 78196 (TRAV27, TRAJ9)
CAGESGGFETIF

SEQ ID NO: 156392 - protein, 18 aa, Homo sapiens
  CDR3 for beta chain variable domain of TCR clone 78196 (TRBV10-2, TRBJ2-2)
CISAPAVHRQADAGELFF

SEQ ID NO: 156393 - protein, 13 aa, Homo sapiens
  CDR3 for alpha chain variable domain of TCR clone 78197 (TRAV12-3, TRAJ53)
CAMRGGGNYKLTF

SEQ ID NO: 156394 - protein, 15 aa, Homo sapiens
  CDR3 for beta chain variable domain of TCR clone 78197 (TRBV2, TRBJ2-1)
CATQARLVMIGEQFF

SEQ ID NO: 156395 - protein, 15 aa, Homo sapiens
  CDR3 for alpha chain variable domain of TCR clone 78198 (TRAV13-1, TRAJ57)
CAASNTQGGSERLVF

SEQ ID NO: 156396 - protein, 16 aa, Homo sapiens
  CDR3 for beta chain variable domain of TCR clone 78198 (TRBV19, TRBJ2-1)
CASSKAGPSSYNEQFF

SEQ ID NO: 156397 - protein, 12 aa, Homo sapiens
  CDR3 for alpha chain variable domain of TCR clone 78199 (TRAV29/DV5, TRAJ49)
CAASAIDNQFYF

SEQ ID NO: 156398 - protein, 17 aa, Homo sapiens
  CDR3 for beta chain variable domain of TCR clone 78199 (TRBV5-1, TRBJ2-2)
CASSRTSGRFSTGELFF

SEQ ID NO: 156399 - protein, 14 aa, Homo sapiens
  CDR3 for alpha chain variable domain of TCR clone 78200 (TRAV1-2, TRAJ16)
CAVTLFSDGQKLLF

SEQ ID NO: 156400 - protein, 15 aa, Homo sapiens
  CDR3 for beta chain variable domain of TCR clone 78200 (TRBV6-3, TRBJ2-7)
CASSSPGTVFYEQYF

SEQ ID NO: 156401 - protein, 11 aa, Homo sapiens
  CDR3 for alpha chain variable domain of TCR clone 78201 (TRAV12-3, TRAJ41)
CAMNAREALNF

SEQ ID NO: 156402 - protein, 16 aa, Homo sapiens
  CDR3 for beta chain variable domain of TCR clone 78201 (TRBV7-8, TRBJ2-3)
CASSTEGQRETDTQHF

SEQ ID NO: 156403 - protein, 13 aa, Homo sapiens
  CDR3 for alpha chain variable domain of TCR clone 78202 (TRAV12-1, TRAJ13)
CVVTSGGYQRVTF

SEQ ID NO: 156404 - protein, 14 aa, Homo sapiens
  CDR3 for beta chain variable domain of TCR clone 78202 (TRBV27, TRBJ2-7)
CASSLAGLSYEQYF

SEQ ID NO: 156405 - protein, 12 aa, Homo sapiens
  CDR3 for alpha chain variable domain of TCR clone 78203 (TRAV12-3, TRAJ17)
CAMTLTGNKLTF

SEQ ID NO: 156406 - protein, 13 aa, Homo sapiens
  CDR3 for beta chain variable domain of TCR clone 78203 (TRBV7-7, TRBJ2-3)
CASSLSRADTQYF

SEQ ID NO: 156407 - protein, 14 aa, Homo sapiens
  CDR3 for alpha chain variable domain of TCR clone 78204 (TRAV12-2, TRAJ33)
CAVKRARSNYQLIW

SEQ ID NO: 156408 - protein, 12 aa, Homo sapiens
  CDR3 for beta chain variable domain of TCR clone 78204 (TRBV24-1, TRBJ2-3)
CAASDSTDTQYF

SEQ ID NO: 156409 - protein, 14 aa, Homo sapiens
  CDR3 for alpha chain variable domain of TCR clone 78205 (TRAV17, TRAJ22)
CATSPSGFARQLTF

SEQ ID NO: 156410 - protein, 15 aa, Homo sapiens
  CDR3 for beta chain variable domain of TCR clone 78205 (TRBV4-1, TRBJ2-5)
CASSQWDLYQETQYF

SEQ ID NO: 156411 - protein, 14 aa, Homo sapiens
  CDR3 for alpha chain variable domain of TCR clone 78206 (TRAV16, TRAJ33)
CALSAMDSNYQLIW

SEQ ID NO: 156412 - protein, 17 aa, Homo sapiens
  CDR3 for beta chain variable domain of TCR clone 78206 (TRBV25-1, TRBJ2-7)
CASSDARLVFSSYEQYF

SEQ ID NO: 156413 - protein, 15 aa, Homo sapiens
  CDR3 for alpha chain variable domain of TCR clone 78207 (TRAV34, TRAJ38)
CGADFTPGNNRKLIW

SEQ ID NO: 156414 - protein, 16 aa, Homo sapiens
  CDR3 for beta chain variable domain of TCR clone 78207 (TRBV12-5, TRBJ2-5)
CASGPRTSGNQATQYF

SEQ ID NO: 156415 - protein, 23 aa, Homo sapiens
  CDR3 for alpha chain variable domain of TCR clone 78208 (TRAV26-1, TRAJ38)
CIADNAGNNHIQNPDPAVYQLRD

SEQ ID NO: 156416 - protein, 13 aa, Homo sapiens
  CDR3 for beta chain variable domain of TCR clone 78208 (TRBV12-4, TRBJ2-5)
CASRLAVQETQYF

SEQ ID NO: 156417 - protein, 14 aa, Homo sapiens
  CDR3 for alpha chain variable domain of TCR clone 78209 (TRAV12-3, TRAJ10)
SHLPLTGGGNKLTF

SEQ ID NO: 156418 - protein, 15 aa, Homo sapiens
  CDR3 for beta chain variable domain of TCR clone 78209 (TRBV7-9, TRBJ1-6)
CASSSPGRGNSPLLF

SEQ ID NO: 156419 - protein, 12 aa, Homo sapiens
  CDR3 for alpha chain variable domain of TCR clone 78210 (TRAV12-1, TRAJ40)
CVVYSGTYKYIF

SEQ ID NO: 156420 - protein, 16 aa, Homo sapiens
  CDR3 for beta chain variable domain of TCR clone 78210 (TRBV3-1, TRBJ2-5)
CASSPGQFNGFGTQYF

SEQ ID NO: 156421 - protein, 15 aa, Homo sapiens
  CDR3 for alpha chain variable domain of TCR clone 78211 (TRAV2, TRAJ24)
CAVVRLKNSWGKLQF

SEQ ID NO: 156422 - protein, 17 aa, Homo sapiens
  CDR3 for beta chain variable domain of TCR clone 78211 (TRBV13, TRBJ2-3)
CASSPSRVAGGRNTQYF

SEQ ID NO: 156423 - protein, 11 aa, Homo sapiens
  CDR3 for alpha chain variable domain of TCR clone 78212 (TRAV3, TRAJ21)
CAVGNFNNFYF

SEQ ID NO: 156424 - protein, 16 aa, Homo sapiens
  CDR3 for beta chain variable domain of TCR clone 78212 (TRBV19, TRBJ2-1)
CASSKAGPSAYNEQFF

SEQ ID NO: 156425 - protein, 13 aa, Homo sapiens
  CDR3 for alpha chain variable domain of TCR clone 78213 (TRAV17, TRAJ36)
CATDQTGANNLFF

SEQ ID NO: 156426 - protein, 14 aa, Homo sapiens
  CDR3 for beta chain variable domain of TCR clone 78213 (TRBV6-1, TRBJ1-3)
CASVQGGGGNTIYF

SEQ ID NO: 156427 - protein, 12 aa, Homo sapiens
  CDR3 for alpha chain variable domain of TCR clone 78214 (TRAV13-1, TRAJ21)
CAAKEGFNKFYF

SEQ ID NO: 156428 - protein, 17 aa, Homo sapiens
  CDR3 for beta chain variable domain of TCR clone 78214 (TRBV20-1, TRBJ2-1)
CIASSSGLAGSYNEQFF

SEQ ID NO: 156429 - protein, 16 aa, Homo sapiens
  CDR3 for alpha chain variable domain of TCR clone 78215 (TRAV3, TRAJ21)
CAVRDIERGNFNKFYF

SEQ ID NO: 156430 - protein, 15 aa, Homo sapiens
  CDR3 for beta chain variable domain of TCR clone 78215 (TRBV11-3, TRBJ2-7)
CASSPGPASSYEQYF

SEQ ID NO: 156431 - protein, 13 aa, Homo sapiens
  CDR3 for alpha chain variable domain of TCR clone 78216 (TRAV27, TRAJ41)
CAGEGNSGYALNF

SEQ ID NO: 156432 - protein, 16 aa, Homo sapiens
  CDR3 for beta chain variable domain of TCR clone 78216 (TRBV4-2, TRBJ2-3)
CASSQELAGDTDTQYF

SEQ ID NO: 156433 - protein, 12 aa, Homo sapiens
  CDR3 for alpha chain variable domain of TCR clone 78217 (TRAV25, TRAJ47)
CAGQGYGNKLVF

SEQ ID NO: 156434 - protein, 14 aa, Homo sapiens
  CDR3 for beta chain variable domain of TCR clone 78217 (TRBV7-2, TRBJ2-3)
CASSQTGSSYTQYF

SEQ ID NO: 156435 - protein, 18 aa, Homo sapiens
  CDR3 for alpha chain variable domain of TCR clone 78218 (TRAV12-3, TRAJ52)
CAMSVGGAGGTSYGKLTF

SEQ ID NO: 156436 - protein, 16 aa, Homo sapiens
  CDR3 for beta chain variable domain of TCR clone 78218 (TRBV28, TRBJ1-1)
CASSLSGTGWNTEAFF

SEQ ID NO: 156437 - protein, 12 aa, Homo sapiens
  CDR3 for alpha chain variable domain of TCR clone 78219 (TRAV12-2, TRAJ21)
CSVRYNFNKFYF

SEQ ID NO: 156438 - protein, 14 aa, Homo sapiens
  CDR3 for beta chain variable domain of TCR clone 78219 (TRBV28, TRBJ2-1)
CASSYYTAYNEQFF

SEQ ID NO: 156439 - protein, 13 aa, Homo sapiens
  CDR3 for alpha chain variable domain of TCR clone 78220 (TRAV2, TRAJ40)
CAVVTSGTYKYIF

SEQ ID NO: 156440 - protein, 16 aa, Homo sapiens
  CDR3 for beta chain variable domain of TCR clone 78220 (TRBV4-3, TRBJ2-2)
CASSHLQGSGTGELFF

SEQ ID NO: 156441 - protein, 14 aa, Homo sapiens
  CDR3 for alpha chain variable domain of TCR clone 78221 (TRAV26-1, TRAJ38)
CIADNAGNNRKLTW

SEQ ID NO: 156442 - protein, 17 aa, Homo sapiens
  CDR3 for beta chain variable domain of TCR clone 78221 (TRBV7-9, TRBJ2-3)
CASSPTVAGDLTDTQYF

SEQ ID NO: 156443 - protein, 13 aa, Homo sapiens
  CDR3 for alpha chain variable domain of TCR clone 78222 (TRAV3, TRAJ15)
CAVRDQAGTALVF

SEQ ID NO: 156444 - protein, 15 aa, Homo sapiens
  CDR3 for beta chain variable domain of TCR clone 78222 (TRBV11-1, TRBJ2-7)
CASSLNYGASYEQYF

SEQ ID NO: 156445 - protein, 16 aa, Homo sapiens
  CDR3 for alpha chain variable domain of TCR clone 78223 (TRAV30, TRAJ24)
CGTEIVDADSWGKFQF

SEQ ID NO: 156446 - protein, 15 aa, Homo sapiens
  CDR3 for beta chain variable domain of TCR clone 78223 (TRBV7-3, TRBJ1-6)
CASSLGRGAGSPLHF

SEQ ID NO: 156447 - protein, 14 aa, Homo sapiens
  CDR3 for alpha chain variable domain of TCR clone 78224 (TRAV17, TRAJ16)
CATADFSDVQKLLF

SEQ ID NO: 156448 - protein, 12 aa, Homo sapiens
  CDR3 for beta chain variable domain of TCR clone 78224 (TRBV24-1, TRBJ1-1)
CATLYPDTEAFF

SEQ ID NO: 156449 - protein, 13 aa, Homo sapiens
  CDR3 for alpha chain variable domain of TCR clone 78225 (TRAV3, TRAJ36)
CDVRDTGANNLFF

SEQ ID NO: 156450 - protein, 15 aa, Homo sapiens
  CDR3 for beta chain variable domain of TCR clone 78225 (TRBV24-1, TRBJ2-1)
CATSGSGGFYNEQFF

SEQ ID NO: 156451 - protein, 14 aa, Homo sapiens
  CDR3 for alpha chain variable domain of TCR clone 78226 (TRAV17, TRAJ16)
CATADFSDGPKLLF

SEQ ID NO: 156452 - protein, 15 aa, Homo sapiens
  CDR3 for beta chain variable domain of TCR clone 78226 (TRBV18, TRBJ2-1)
CASSPPSASYNEQFF

SEQ ID NO: 156453 - protein, 16 aa, Homo sapiens
  CDR3 for alpha chain variable domain of TCR clone 78227 (TRAV16, TRAJ42)
CARRMNYGGSQGNLIF

SEQ ID NO: 156454 - protein, 13 aa, Homo sapiens
  CDR3 for beta chain variable domain of TCR clone 78227 (TRBV20-1, TRBJ2-7)
CSASPPSSYEQYF

SEQ ID NO: 156455 - protein, 12 aa, Homo sapiens
  CDR3 for alpha chain variable domain of TCR clone 78228 (TRAV8-4, TRAJ37)
CAVRSNTGKLIF

SEQ ID NO: 156456 - protein, 16 aa, Homo sapiens
  CDR3 for beta chain variable domain of TCR clone 78228 (TRBV7-2, TRBJ2-3)
CASSLVVDASTDTQYF

SEQ ID NO: 156457 - protein, 11 aa, Homo sapiens
  CDR3 for alpha chain variable domain of TCR clone 78229 (TRAV17, TRAJ9)
CATTRGFKTIF

SEQ ID NO: 156458 - protein, 15 aa, Homo sapiens
  CDR3 for beta chain variable domain of TCR clone 78229 (TRBV9, TRBJ1-6)
CASSVAGTGDSPLHF

SEQ ID NO: 156459 - protein, 12 aa, Homo sapiens
  CDR3 for alpha chain variable domain of TCR clone 78230 (TRAV12-1, TRAJ40)
CVFYSGTYKYIF

SEQ ID NO: 156460 - protein, 12 aa, Homo sapiens
  CDR3 for beta chain variable domain of TCR clone 78230 (TRBV7-3, TRBJ2-1)
CASSLINNEQFF

SEQ ID NO: 156461 - protein, 12 aa, Homo sapiens
  CDR3 for alpha chain variable domain of TCR clone 78231 (TRAV13-1, TRAJ42)
SVLRGSQGNLIF

SEQ ID NO: 156462 - protein, 13 aa, Homo sapiens
  CDR3 for beta chain variable domain of TCR clone 78231 (TRBV12-4, TRBJ1-5)
CASSPDRAQPQHF

SEQ ID NO: 156463 - protein, 14 aa, Homo sapiens
  CDR3 for alpha chain variable domain of TCR clone 78232 (TRAV1-2, TRAJ6)
RAVSLSGGSYIPTF

SEQ ID NO: 156464 - protein, 15 aa, Homo sapiens
  CDR3 for beta chain variable domain of TCR clone 78232 (TRBV28, TRBJ2-7)
CASSPGGRGFYEQYF

SEQ ID NO: 156465 - protein, 14 aa, Homo sapiens
  CDR3 for alpha chain variable domain of TCR clone 78233 (TRAV8-2, TRAJ23)
CVVSDDNQGGKLIF

SEQ ID NO: 156466 - protein, 17 aa, Homo sapiens
  CDR3 for beta chain variable domain of TCR clone 78233 (TRBV7-8, TRBJ2-6)
CASSAGTGGAGANVLTF

SEQ ID NO: 156467 - protein, 12 aa, Homo sapiens
  CDR3 for alpha chain variable domain of TCR clone 78234 (TRAV21, TRAJ20)
CAVRGNDYNLSF

SEQ ID NO: 156468 - protein, 14 aa, Homo sapiens
  CDR3 for beta chain variable domain of TCR clone 78234 (TRBV7-8, TRBJ2-7)
CASSQTQGADEQYF

SEQ ID NO: 156469 - protein, 14 aa, Homo sapiens
  CDR3 for alpha chain variable domain of TCR clone 78235 (TRAV12-2, TRAJ40)
CAVKIPSGTYKYIF

SEQ ID NO: 156470 - protein, 13 aa, Homo sapiens
  CDR3 for beta chain variable domain of TCR clone 78235 (TRBV27, TRBJ2-1)
CASSSGSYNEQFF

SEQ ID NO: 156471 - protein, 13 aa, Homo sapiens
  CDR3 for alpha chain variable domain of TCR clone 78236 (TRAV16, TRAJ37)
CTLRGSNTGKLIF

SEQ ID NO: 156472 - protein, 10 aa, Homo sapiens
  CDR3 for beta chain variable domain of TCR clone 78236 (TRBV5-6, TRBJ2-7)
CASSGNEQYF

SEQ ID NO: 156473 - protein, 13 aa, Homo sapiens
  CDR3 for alpha chain variable domain of TCR clone 78237 (TRAV13-2, TRAJ13)
CAERPGGYQQVTF

SEQ ID NO: 156474 - protein, 15 aa, Homo sapiens
  CDR3 for beta chain variable domain of TCR clone 78237 (TRBV11-3, TRBJ2-7)
CASSPGPASSYEQYF

SEQ ID NO: 156475 - protein, 13 aa, Homo sapiens
  CDR3 for alpha chain variable domain of TCR clone 78238 (TRAV1-1, TRAJ9)
CAAKNTGGYKTIF

SEQ ID NO: 156476 - protein, 14 aa, Homo sapiens
  CDR3 for beta chain variable domain of TCR clone 78238 (TRBV20-1, TRBJ2-1)
CSAQIGGSANEQFF

SEQ ID NO: 156477 - protein, 15 aa, Homo sapiens
  CDR3 for alpha chain variable domain of TCR clone 78239 (TRAV27, TRAJ38)
CAGRFNAGNNRKLIW

SEQ ID NO: 156478 - protein, 13 aa, Homo sapiens
  CDR3 for beta chain variable domain of TCR clone 78239 (TRBV27, TRBJ1-1)
CASSLSIGAEAFF

SEQ ID NO: 156479 - protein, 13 aa, Homo sapiens
  CDR3 for alpha chain variable domain of TCR clone 78240 (TRAV8-6, TRAJ49)
SAVITNTGNQFYF

SEQ ID NO: 156480 - protein, 13 aa, Homo sapiens
  CDR3 for beta chain variable domain of TCR clone 78240 (TRBV20-1, TRBJ1-1)
CSARGGGNTEAFF

SEQ ID NO: 156481 - protein, 12 aa, Homo sapiens
  CDR3 for alpha chain variable domain of TCR clone 78241 (TRAV3, TRAJ7)
CADLLWEQQARF

SEQ ID NO: 156482 - protein, 12 aa, Homo sapiens
  CDR3 for beta chain variable domain of TCR clone 78241 (TRBV7-3, TRBJ2-5)
CQQLPGGETQYF

SEQ ID NO: 156483 - protein, 12 aa, Homo sapiens
  CDR3 for alpha chain variable domain of TCR clone 78242 (TRAV21, TRAJ13)
PGPSGGYQQVTF

SEQ ID NO: 156484 - protein, 15 aa, Homo sapiens
  CDR3 for beta chain variable domain of TCR clone 78242 (TRBV7-9, TRBJ1-6)
CASSSPGRGNSPLHF

SEQ ID NO: 156485 - protein, 16 aa, Homo sapiens
  CDR3 for alpha chain variable domain of TCR clone 78243 (TRAV12-2, TRAJ43)
CAGDDMRFGAGTRLTV

SEQ ID NO: 156486 - protein, 15 aa, Homo sapiens
  CDR3 for beta chain variable domain of TCR clone 78243 (TRBV7-2, TRBJ2-1)
CASTHGTGIYNEQFF

SEQ ID NO: 156487 - protein, 14 aa, Homo sapiens
  CDR3 for alpha chain variable domain of TCR clone 78244 (TRAV1-2, TRAJ16)
CAVNRFSDGQKLLF

SEQ ID NO: 156488 - protein, 15 aa, Homo sapiens
  CDR3 for beta chain variable domain of TCR clone 78244 (TRBV5-1, TRBJ1-3)
CASSPDSSSGNTIYF

SEQ ID NO: 156489 - protein, 11 aa, Homo sapiens
  CDR3 for alpha chain variable domain of TCR clone 78245 (TRAV3, TRAJ21)
CAVGDFNKFYF

SEQ ID NO: 156490 - protein, 18 aa, Homo sapiens
  CDR3 for beta chain variable domain of TCR clone 78245 (TRBV12-4, TRBJ2-2)
CASSLVAGTRGRTGELFF

SEQ ID NO: 156491 - protein, 14 aa, Homo sapiens
  CDR3 for alpha chain variable domain of TCR clone 78246 (TRAV1-2, TRAJ8)
CAVREDTGFQKLVF

SEQ ID NO: 156492 - protein, 17 aa, Homo sapiens
  CDR3 for beta chain variable domain of TCR clone 78246 (TRBV27, TRBJ2-1)
CASSPMKGQGSYNEQFF

SEQ ID NO: 156493 - protein, 15 aa, Homo sapiens
  CDR3 for alpha chain variable domain of TCR clone 78247 (TRAV17, TRAJ28)
CATVDSGAGSYQLTF

SEQ ID NO: 156494 - protein, 13 aa, Homo sapiens
  CDR3 for beta chain variable domain of TCR clone 78247 (TRBV5-4, TRBJ2-5)
CASRRQEGETQYF

SEQ ID NO: 156495 - protein, 20 aa, Homo sapiens
  CDR3 for alpha chain variable domain of TCR clone 78248 (TRAV2, TRAJ20)
LILQVREADAAVYRDCKLSF

SEQ ID NO: 156496 - protein, 13 aa, Homo sapiens
  CDR3 for beta chain variable domain of TCR clone 78248 (TRBV15, TRBJ1-6)
CATSGGLNSPLHF

SEQ ID NO: 156497 - protein, 14 aa, Homo sapiens
  CDR3 for alpha chain variable domain of TCR clone 78249 (TRAV23/DV6, TRAJ4)
CAAPSSGGYNKLIF

SEQ ID NO: 156498 - protein, 16 aa, Homo sapiens
  CDR3 for beta chain variable domain of TCR clone 78249 (TRBV19, TRBJ1-1)
CASRCGGPVTGTEAFF

SEQ ID NO: 156499 - protein, 13 aa, Homo sapiens
  CDR3 for alpha chain variable domain of TCR clone 78250 (TRAV26-2, TRAJ43)
CILRAVNNNDMRF

SEQ ID NO: 156500 - protein, 15 aa, Homo sapiens
  CDR3 for beta chain variable domain of TCR clone 78250 (TRBV7-2, TRBJ2-1)
CASTHGTGIDNEQFF

SEQ ID NO: 156501 - protein, 12 aa, Homo sapiens
  CDR3 for alpha chain variable domain of TCR clone 78251 (TRAV13-1, TRAJ27)
CAAHTNAGKSTF

SEQ ID NO: 156502 - protein, 20 aa, Homo sapiens
  CDR3 for beta chain variable domain of TCR clone 78251 (TRBV19, TRBJ2-1)
CASSISRTVTSTRLNNEQFF

SEQ ID NO: 156503 - protein, 14 aa, Homo sapiens
  CDR3 for alpha chain variable domain of TCR clone 78252 (TRAV4, )
CLVDIQNPDPAVYQ

SEQ ID NO: 156504 - protein, 15 aa, Homo sapiens
  CDR3 for beta chain variable domain of TCR clone 78252 (TRBV20-1, TRBJ1-5)
CSARVGRVVSQPQHF

SEQ ID NO: 156505 - protein, 15 aa, Homo sapiens
  CDR3 for alpha chain variable domain of TCR clone 78253 (TRAV26-2, TRAJ45)
CILRDRVEQEEVLTD

SEQ ID NO: 156506 - protein, 15 aa, Homo sapiens
  CDR3 for beta chain variable domain of TCR clone 78253 (TRBV7-6, TRBJ2-5)
CASSKPTGPQETQYF

SEQ ID NO: 156507 - protein, 13 aa, Homo sapiens
  CDR3 for alpha chain variable domain of TCR clone 78254 (TRAV26-1, TRAJ48)
CIVRVVGDEKLTF

SEQ ID NO: 156508 - protein, 19 aa, Homo sapiens
  CDR3 for beta chain variable domain of TCR clone 78254 (TRBV11-3, TRBJ2-2)
CASSTRPGARTTNTGELFF

SEQ ID NO: 156509 - protein, 14 aa, Homo sapiens
  CDR3 for alpha chain variable domain of TCR clone 78255 (TRAV8-3, TRAJ42)
CAVGAWGSQGNLIF

SEQ ID NO: 156510 - protein, 15 aa, Homo sapiens
  CDR3 for beta chain variable domain of TCR clone 78255 (TRBV6-3, TRBJ2-7)
CASSSPGTVFYEQYF

SEQ ID NO: 156511 - protein, 14 aa, Homo sapiens
  CDR3 for alpha chain variable domain of TCR clone 78256 (TRAV13-1, TRAJ40)
CAARMTSGTYKYIF

SEQ ID NO: 156512 - protein, 13 aa, Homo sapiens
  CDR3 for beta chain variable domain of TCR clone 78256 (TRBV4-1, TRBJ2-5)
CASSQEVQETQYF

SEQ ID NO: 156513 - protein, 13 aa, Homo sapiens
  CDR3 for alpha chain variable domain of TCR clone 78257 (TRAV3, TRAJ21)
CAVREPDLNKFYF

SEQ ID NO: 156514 - protein, 14 aa, Homo sapiens
  CDR3 for beta chain variable domain of TCR clone 78257 (TRBV4-1, TRBJ2-2)
CASSQAVNTGELFF

SEQ ID NO: 156515 - protein, 14 aa, Homo sapiens
  CDR3 for alpha chain variable domain of TCR clone 78258 (TRAV20, TRAJ56)
CAVQFGGANSKLTF

SEQ ID NO: 156516 - protein, 12 aa, Homo sapiens
  CDR3 for beta chain variable domain of TCR clone 78258 (TRBV11-2, TRBJ2-2)
CASSLPTGELFF

SEQ ID NO: 156517 - protein, 14 aa, Homo sapiens
  CDR3 for alpha chain variable domain of TCR clone 78259 (TRAV26-1, TRAJ38)
CIADNAGNNRKLIG

SEQ ID NO: 156518 - protein, 15 aa, Homo sapiens
  CDR3 for beta chain variable domain of TCR clone 78259 (TRBV7-2, TRBJ2-1)
CASSLVAGRYNEQFF

SEQ ID NO: 156519 - protein, 12 aa, Homo sapiens
  CDR3 for alpha chain variable domain of TCR clone 78260 (TRAV3, TRAJ20)
CAVRDPDYKLSF

SEQ ID NO: 156520 - protein, 13 aa, Homo sapiens
  CDR3 for beta chain variable domain of TCR clone 78260 (TRBV19, TRBJ2-7)
CASSTSGSYEQYF

SEQ ID NO: 156521 - protein, 14 aa, Homo sapiens
  CDR3 for alpha chain variable domain of TCR clone 78261 (TRAV13-1, TRAJ44)
CAAKATGTASKLTF

SEQ ID NO: 156522 - protein, 16 aa, Homo sapiens
  CDR3 for beta chain variable domain of TCR clone 78261 (TRBV11-2, TRBJ1-2)
CASSLDTGGADYGYTF

SEQ ID NO: 156523 - protein, 14 aa, Homo sapiens
  CDR3 for alpha chain variable domain of TCR clone 78262 (TRAV1-2, TRAJ16)
CAVNRFSDGQKLLF

SEQ ID NO: 156524 - protein, 13 aa, Homo sapiens
  CDR3 for beta chain variable domain of TCR clone 78262 (TRBV19, TRBJ2-5)
CASSGRAGETQYF

SEQ ID NO: 156525 - protein, 15 aa, Homo sapiens
  CDR3 for alpha chain variable domain of TCR clone 78263 (TRAV21, TRAJ24)
CAARSSTDSWGKLQF

SEQ ID NO: 156526 - protein, 14 aa, Homo sapiens
  CDR3 for beta chain variable domain of TCR clone 78263 (TRBV11-2, TRBJ2-5)
CASGRTGGIETQYF

SEQ ID NO: 156527 - protein, 18 aa, Homo sapiens
  CDR3 for alpha chain variable domain of TCR clone 78264 (TRAV1-2, TRAJ18)
CAVRDMGDRGSTLGRLYF

SEQ ID NO: 156528 - protein, 16 aa, Homo sapiens
  CDR3 for beta chain variable domain of TCR clone 78264 (TRBV19, TRBJ2-2)
CASRSPGTGATGELFF

SEQ ID NO: 156529 - protein, 16 aa, Homo sapiens
  CDR3 for alpha chain variable domain of TCR clone 78265 (TRAV30, TRAJ24)
CGTEIVDADSWGKFQF

SEQ ID NO: 156530 - protein, 16 aa, Homo sapiens
  CDR3 for beta chain variable domain of TCR clone 78265 (TRBV5-1, TRBJ2-5)
CASSLRRTSGQETQYF

SEQ ID NO: 156531 - protein, 14 aa, Homo sapiens
  CDR3 for alpha chain variable domain of TCR clone 78266 (TRAV35, TRAJ33)
CAGSSQDSNYQLIW

SEQ ID NO: 156532 - protein, 15 aa, Homo sapiens
  CDR3 for beta chain variable domain of TCR clone 78266 (TRBV24-1, TRBJ2-1)
CATSGSGGFYNEQFF

SEQ ID NO: 156533 - protein, 13 aa, Homo sapiens
  CDR3 for alpha chain variable domain of TCR clone 78267 (TRAV8-3, TRAJ47)
CAVGARRGNKLVF

SEQ ID NO: 156534 - protein, 14 aa, Homo sapiens
  CDR3 for beta chain variable domain of TCR clone 78267 (TRBV6-1, TRBJ1-3)
CASVQGGGGNTIYF

SEQ ID NO: 156535 - protein, 12 aa, Homo sapiens
  CDR3 for alpha chain variable domain of TCR clone 78268 (TRAV2, TRAJ34)
CAVERNTDKLIF

SEQ ID NO: 156536 - protein, 14 aa, Homo sapiens
  CDR3 for beta chain variable domain of TCR clone 78268 (TRBV7-9, TRBJ2-1)
CASSDDSGYNEQFF

SEQ ID NO: 156537 - protein, 19 aa, Homo sapiens
  CDR3 for alpha chain variable domain of TCR clone 78269 (TRAV38-1, TRAJ53)
CAFMRHGLESGGSNYKLTF

SEQ ID NO: 156538 - protein, 15 aa, Homo sapiens
  CDR3 for beta chain variable domain of TCR clone 78269 (TRBV24-1, TRBJ1-1)
CATSDRRGVNTEAFF

SEQ ID NO: 156539 - protein, 14 aa, Homo sapiens
  CDR3 for alpha chain variable domain of TCR clone 78270 (TRAV4, TRAJ11)
CLVGEYSGYSTLTF

SEQ ID NO: 156540 - protein, 14 aa, Homo sapiens
  CDR3 for beta chain variable domain of TCR clone 78270 (TRBV7-9, TRBJ2-7)
CASSLGGSSYEQYF

SEQ ID NO: 156541 - protein, 11 aa, Homo sapiens
  CDR3 for alpha chain variable domain of TCR clone 78271 (TRAV8-3, TRAJ15)
CAVGPGTALIF

SEQ ID NO: 156542 - protein, 18 aa, Homo sapiens
  CDR3 for beta chain variable domain of TCR clone 78271 (TRBV18, TRBJ2-3)
CASSYTSGAAGGTDTQCF

SEQ ID NO: 156543 - protein, 14 aa, Homo sapiens
  CDR3 for alpha chain variable domain of TCR clone 78272 (TRAV12-1, TRAJ12)
CVVTRMVSSYKLIF

SEQ ID NO: 156544 - protein, 13 aa, Homo sapiens
  CDR3 for beta chain variable domain of TCR clone 78272 (TRBV20-1, TRBJ1-1)
CSARGGGNTEAFF

SEQ ID NO: 156545 - protein, 12 aa, Homo sapiens
  CDR3 for alpha chain variable domain of TCR clone 78273 (TRAV3, TRAJ31)
CAVRDGNAILMF

SEQ ID NO: 156546 - protein, 18 aa, Homo sapiens
  CDR3 for beta chain variable domain of TCR clone 78273 (TRBV7-2, TRBJ2-3)
CASSLKREGSGITDTQYF

SEQ ID NO: 156547 - protein, 17 aa, Homo sapiens
  CDR3 for alpha chain variable domain of TCR clone 78274 (TRAV4, TRAJ13)
CLVGVQGSSGGYQKVTF

SEQ ID NO: 156548 - protein, 17 aa, Homo sapiens
  CDR3 for beta chain variable domain of TCR clone 78274 (TRBV25-1, TRBJ2-1)
CASSAYGQGRGVYEQFF

SEQ ID NO: 156549 - protein, 16 aa, Homo sapiens
  CDR3 for alpha chain variable domain of TCR clone 78275 (TRAV35, TRAJ28)
CAGQRYSGAGSYQLTF

SEQ ID NO: 156550 - protein, 20 aa, Homo sapiens
  CDR3 for beta chain variable domain of TCR clone 78275 (TRBV7-8, TRBJ2-2)
CASSHLFPGPTIHITGELFF

SEQ ID NO: 156551 - protein, 18 aa, Homo sapiens
  CDR3 for alpha chain variable domain of TCR clone 78276 (TRAV1-2, TRAJ18)
CAVRDMGDRGSTLGRLYF

SEQ ID NO: 156552 - protein, 12 aa, Homo sapiens
  CDR3 for beta chain variable domain of TCR clone 78276 (TRBV11-2, TRBJ2-1)
CASSPGNNEQFF

SEQ ID NO: 156553 - protein, 15 aa, Homo sapiens
  CDR3 for alpha chain variable domain of TCR clone 78277 (TRAV17, TRAJ13)
CATVPNSGGYQKVTF

SEQ ID NO: 156554 - protein, 13 aa, Homo sapiens
  CDR3 for beta chain variable domain of TCR clone 78277 (TRBV10-3, TRBJ2-7)
CASKLAVNYEQYF

SEQ ID NO: 156555 - protein, 11 aa, Homo sapiens
  CDR3 for alpha chain variable domain of TCR clone 78278 (TRAV8-6, TRAJ13)
CALGIYQKVTF

SEQ ID NO: 156556 - protein, 15 aa, Homo sapiens
  CDR3 for beta chain variable domain of TCR clone 78278 (TRBV5-1, TRBJ2-7)
CARSLNGGPAREQYF

SEQ ID NO: 156557 - protein, 17 aa, Homo sapiens
  CDR3 for alpha chain variable domain of TCR clone 78279 (TRAV12-2, TRAJ53)
CAPLTDSQEGSNYKLTF

SEQ ID NO: 156558 - protein, 12 aa, Homo sapiens
  CDR3 for beta chain variable domain of TCR clone 78279 (TRBV11-2, TRBJ2-2)
CASSLGGGELSF

SEQ ID NO: 156559 - protein, 11 aa, Homo sapiens
  CDR3 for alpha chain variable domain of TCR clone 78280 (TRAV12-2, TRAJ31)
CAVTRWARLMF

SEQ ID NO: 156560 - protein, 15 aa, Homo sapiens
  CDR3 for beta chain variable domain of TCR clone 78280 (TRBV19, TRBJ2-7)
CASSTGGGLVNEQYF

SEQ ID NO: 156561 - protein, 16 aa, Homo sapiens
  CDR3 for alpha chain variable domain of TCR clone 78281 (TRAV3, TRAJ10)
CAVRDMRAGGGNKLTF

SEQ ID NO: 156562 - protein, 15 aa, Homo sapiens
  CDR3 for beta chain variable domain of TCR clone 78281 (TRBV11-2, TRBJ1-6)
CASTGSGTAVSPLHF

SEQ ID NO: 156563 - protein, 14 aa, Homo sapiens
  CDR3 for alpha chain variable domain of TCR clone 78282 (TRAV1-2, TRAJ16)
CAVNRFSDGQKLLF

SEQ ID NO: 156564 - protein, 15 aa, Homo sapiens
  CDR3 for beta chain variable domain of TCR clone 78282 (TRBV29-1, TRBJ2-5)
CSVAGASGTQETQYF

SEQ ID NO: 156565 - protein, 14 aa, Homo sapiens
  CDR3 for alpha chain variable domain of TCR clone 78283 (TRAV9-2, TRAJ39)
CALYIYNAGNMLTF

SEQ ID NO: 156566 - protein, 13 aa, Homo sapiens
  CDR3 for beta chain variable domain of TCR clone 78283 (TRBV10-3, TRBJ1-1)
CAIIPEGGTEAFF

SEQ ID NO: 156567 - protein, 16 aa, Homo sapiens
  CDR3 for alpha chain variable domain of TCR clone 78284 (TRAV20, TRAJ53)
CAVQAESGGSNYKLAF

SEQ ID NO: 156568 - protein, 14 aa, Homo sapiens
  CDR3 for beta chain variable domain of TCR clone 78284 (TRBV27, TRBJ2-5)
CASSRTFLVDTQYF

SEQ ID NO: 156569 - protein, 14 aa, Homo sapiens
  CDR3 for alpha chain variable domain of TCR clone 78285 (TRAV29/DV5, TRAJ36)
CAARRKTGANNLFF

SEQ ID NO: 156570 - protein, 15 aa, Homo sapiens
  CDR3 for beta chain variable domain of TCR clone 78285 (TRBV10-1, TRBJ2-3)
CASSATSGGFDTQYF

SEQ ID NO: 156571 - protein, 14 aa, Homo sapiens
  CDR3 for alpha chain variable domain of TCR clone 78286 (TRAV8-3, TRAJ4)
CAVGAAGGYNKLIF

SEQ ID NO: 156572 - protein, 15 aa, Homo sapiens
  CDR3 for beta chain variable domain of TCR clone 78286 (TRBV11-2, TRBJ2-2)
CASSSDRVNAGELFF

SEQ ID NO: 156573 - protein, 14 aa, Homo sapiens
  CDR3 for alpha chain variable domain of TCR clone 78287 (TRAV12-1, TRAJ54)
CVVNIYQGAQKLVF

SEQ ID NO: 156574 - protein, 13 aa, Homo sapiens
  CDR3 for beta chain variable domain of TCR clone 78287 (TRBV11-2, TRBJ2-1)
CASSLDLVNEQFF

SEQ ID NO: 156575 - protein, 17 aa, Homo sapiens
  CDR3 for alpha chain variable domain of TCR clone 78288 (TRAV3, TRAJ6)
CVVSRRTDTGGSYIPTF

SEQ ID NO: 156576 - protein, 18 aa, Homo sapiens
  CDR3 for beta chain variable domain of TCR clone 78288 (TRBV7-2, TRBJ2-3)
CASSLETSRGRKADTQYF

SEQ ID NO: 156577 - protein, 12 aa, Homo sapiens
  CDR3 for alpha chain variable domain of TCR clone 78289 (TRAV29/DV5, TRAJ53)
CAASGGNYKLTF

SEQ ID NO: 156578 - protein, 16 aa, Homo sapiens
  CDR3 for beta chain variable domain of TCR clone 78289 (TRBV7-3, TRBJ2-2)
CASSLKRGTLSGELFF

SEQ ID NO: 156579 - protein, 20 aa, Homo sapiens
  CDR3 for alpha chain variable domain of TCR clone 78290 (TRAV8-3, TRAJ44)
LSTSVLWVRLYTGTASKLTF

SEQ ID NO: 156580 - protein, 15 aa, Homo sapiens
  CDR3 for beta chain variable domain of TCR clone 78290 (TRBV6-5, TRBJ1-2)
CASSYSQTFNYGYTF

SEQ ID NO: 156581 - protein, 16 aa, Homo sapiens
  CDR3 for alpha chain variable domain of TCR clone 78291 (TRAV22, TRAJ45)
CAVERGKRGGADGPTF

SEQ ID NO: 156582 - protein, 11 aa, Homo sapiens
  CDR3 for beta chain variable domain of TCR clone 78291 (TRBV29-1, TRBJ2-5)
CSEDRTGTQYF

SEQ ID NO: 156583 - protein, 15 aa, Homo sapiens
  CDR3 for alpha chain variable domain of TCR clone 78292 (TRAV2, TRAJ24)
CAVVRLKNSWGKLQF

SEQ ID NO: 156584 - protein, 16 aa, Homo sapiens
  CDR3 for beta chain variable domain of TCR clone 78292 (TRBV7-7, TRBJ2-3)
CASSTGTSGSTDTQYF

SEQ ID NO: 156585 - protein, 11 aa, Homo sapiens
  CDR3 for alpha chain variable domain of TCR clone 78293 (TRAV3, TRAJ21)
CAVGNFNKFYL

SEQ ID NO: 156586 - protein, 13 aa, Homo sapiens
  CDR3 for beta chain variable domain of TCR clone 78293 (TRBV7-9, TRBJ1-2)
CASSLKQNYGYTF

SEQ ID NO: 156587 - protein, 18 aa, Homo sapiens
  CDR3 for alpha chain variable domain of TCR clone 78294 (TRAV20, TRAJ4)
CAVQPYYMFSGGYNKLIF

SEQ ID NO: 156588 - protein, 13 aa, Homo sapiens
  CDR3 for beta chain variable domain of TCR clone 78294 (TRBV19, TRBJ2-3)
CATWGKITDTQYF

SEQ ID NO: 156589 - protein, 13 aa, Homo sapiens
  CDR3 for alpha chain variable domain of TCR clone 78295 (TRAV21, TRAJ27)
CAARPGNAGKSTF

SEQ ID NO: 156590 - protein, 15 aa, Homo sapiens
  CDR3 for beta chain variable domain of TCR clone 78295 (TRBV20-1, TRBJ2-7)
CSARDRVSGMDGQYF

SEQ ID NO: 156591 - protein, 13 aa, Homo sapiens
  CDR3 for alpha chain variable domain of TCR clone 78296 (TRAV27, TRAJ56)
CAGKPGANSKLTF

SEQ ID NO: 156592 - protein, 15 aa, Homo sapiens
  CDR3 for beta chain variable domain of TCR clone 78296 (TRBV27, TRBJ2-1)
CASSNGGGSSNEQFF

SEQ ID NO: 156593 - protein, 14 aa, Homo sapiens
  CDR3 for alpha chain variable domain of TCR clone 78297 (TRAV12-1, TRAJ38)
CGELKAGNNRKLIW

SEQ ID NO: 156594 - protein, 12 aa, Homo sapiens
  CDR3 for beta chain variable domain of TCR clone 78297 (TRBV24-1, TRBJ1-1)
CATLYPDTEALF

SEQ ID NO: 156595 - protein, 15 aa, Homo sapiens
  CDR3 for alpha chain variable domain of TCR clone 78298 (TRAV2, TRAJ28)
CAVPYSGAGSYQLTF

SEQ ID NO: 156596 - protein, 17 aa, Homo sapiens
  CDR3 for beta chain variable domain of TCR clone 78298 (TRBV6-6, TRBJ1-6)
CASSYSIPDGGTSPLHF

SEQ ID NO: 156597 - protein, 14 aa, Homo sapiens
  CDR3 for alpha chain variable domain of TCR clone 78299 (TRAV12-2, TRAJ13)
CAVKKTGGYQKVTF

SEQ ID NO: 156598 - protein, 15 aa, Homo sapiens
  CDR3 for beta chain variable domain of TCR clone 78299 (TRBV18, TRBJ2-7)
CASSPRSGTAYEQYF

SEQ ID NO: 156599 - protein, 10 aa, Homo sapiens
  CDR3 for alpha chain variable domain of TCR clone 78300 (TRAV1-2, TRAJ20)
CALNDYRLSF

SEQ ID NO: 156600 - protein, 16 aa, Homo sapiens
  CDR3 for beta chain variable domain of TCR clone 78300 (TRBV20-1, TRBJ1-1)
CSARALTQGMNTEDFF

SEQ ID NO: 156601 - protein, 10 aa, Homo sapiens
  CDR3 for alpha chain variable domain of TCR clone 78301 (TRAV12-2, TRAJ43)
CAGDDMRFGA

SEQ ID NO: 156602 - protein, 16 aa, Homo sapiens
  CDR3 for beta chain variable domain of TCR clone 78301 (TRBV2, TRBJ2-4)
CASSEAPGGEQNMQYF

SEQ ID NO: 156603 - protein, 18 aa, Homo sapiens
  CDR3 for alpha chain variable domain of TCR clone 78302 (TRAV13-1, TRAJ52)
CAASKRSAGGTSYGKLTF

SEQ ID NO: 156604 - protein, 13 aa, Homo sapiens
  CDR3 for beta chain variable domain of TCR clone 78302 (TRBV4-2, TRBJ1-1)
CASSQAGNTEAFF

SEQ ID NO: 156605 - protein, 17 aa, Homo sapiens
  CDR3 for alpha chain variable domain of TCR clone 78303 (TRAV8-6, TRAJ8)
CAVKEGIENTGFQKLVF

SEQ ID NO: 156606 - protein, 12 aa, Homo sapiens
  CDR3 for beta chain variable domain of TCR clone 78303 (TRBV19, TRBJ1-4)
CASKDRPGGLFF

SEQ ID NO: 156607 - protein, 11 aa, Homo sapiens
  CDR3 for alpha chain variable domain of TCR clone 78304 (TRAV29/DV5, TRAJ47)
CAATYGNKLVF

SEQ ID NO: 156608 - protein, 17 aa, Homo sapiens
  CDR3 for beta chain variable domain of TCR clone 78304 (TRBV7-9, TRBJ2-1)
CASSLVAGYPSYNEQFF

SEQ ID NO: 156609 - protein, 15 aa, Homo sapiens
  CDR3 for alpha chain variable domain of TCR clone 78305 (TRAV12-1, TRAJ9)
CVVSFGDTGGFKTIF

SEQ ID NO: 156610 - protein, 15 aa, Homo sapiens
  CDR3 for beta chain variable domain of TCR clone 78305 (TRBV27, TRBJ2-1)
CASSNGGGSSNEQFF

SEQ ID NO: 156611 - protein, 14 aa, Homo sapiens
  CDR3 for alpha chain variable domain of TCR clone 78306 (TRAV20, TRAJ29)
CAVQESFRKHTSCL

SEQ ID NO: 156612 - protein, 16 aa, Homo sapiens
  CDR3 for beta chain variable domain of TCR clone 78306 (TRBV7-2, TRBJ2-7)
CASSLDLSGGVYEQYF

SEQ ID NO: 156613 - protein, 11 aa, Homo sapiens
  CDR3 for alpha chain variable domain of TCR clone 78307 (TRAV2, TRAJ33)
CAVDSNYQLIW

SEQ ID NO: 156614 - protein, 15 aa, Homo sapiens
  CDR3 for beta chain variable domain of TCR clone 78307 (TRBV7-2, TRBJ2-1)
CASSSGLAGGNEQFF

SEQ ID NO: 156615 - protein, 14 aa, Homo sapiens
  CDR3 for alpha chain variable domain of TCR clone 78308 (TRAV16, TRAJ15)
CALSGPQAGTALTF

SEQ ID NO: 156616 - protein, 12 aa, Homo sapiens
  CDR3 for beta chain variable domain of TCR clone 78308 (TRBV18, TRBJ2-5)
CASSPSKETQYF

SEQ ID NO: 156617 - protein, 12 aa, Homo sapiens
  CDR3 for alpha chain variable domain of TCR clone 78309 (TRAV13-1, TRAJ48)
CAANFGNEKLTF

SEQ ID NO: 156618 - protein, 14 aa, Homo sapiens
  CDR3 for beta chain variable domain of TCR clone 78309 (TRBV19, TRBJ2-1)
CAIPTFVLSGEQFF

SEQ ID NO: 156619 - protein, 13 aa, Homo sapiens
  CDR3 for alpha chain variable domain of TCR clone 78310 (TRAV27, TRAJ54)
CAGAGQGAQKLVF

SEQ ID NO: 156620 - protein, 15 aa, Homo sapiens
  CDR3 for beta chain variable domain of TCR clone 78310 (TRBV18, TRBJ2-6)
CASSPSYAGANGLTF

SEQ ID NO: 156621 - protein, 15 aa, Homo sapiens
  CDR3 for alpha chain variable domain of TCR clone 78311 (TRAV3, TRAJ4)
CAVRDGTGGYTKLIF

SEQ ID NO: 156622 - protein, 13 aa, Homo sapiens
  CDR3 for beta chain variable domain of TCR clone 78311 (TRBV12-5, TRBJ1-2)
CASGVRTGNGYTF

SEQ ID NO: 156623 - protein, 12 aa, Homo sapiens
  CDR3 for alpha chain variable domain of TCR clone 78312 (TRAV12-1, TRAJ40)
CVVYSGTYKYIF

SEQ ID NO: 156624 - protein, 14 aa, Homo sapiens
  CDR3 for beta chain variable domain of TCR clone 78312 (TRBV12-4, TRBJ1-1)
CASSLGTGGTEAFF

SEQ ID NO: 156625 - protein, 13 aa, Homo sapiens
  CDR3 for alpha chain variable domain of TCR clone 78313 (TRAV12-1, TRAJ13)
CVVTSGGYQKVTF

SEQ ID NO: 156626 - protein, 13 aa, Homo sapiens
  CDR3 for beta chain variable domain of TCR clone 78313 (TRBV10-3, TRBJ2-7)
CASKLAVNYEQYF

SEQ ID NO: 156627 - protein, 14 aa, Homo sapiens
  CDR3 for alpha chain variable domain of TCR clone 78314 (TRAV13-1, TRAJ40)
CAASMTSGTYKYIF

SEQ ID NO: 156628 - protein, 15 aa, Homo sapiens
  CDR3 for beta chain variable domain of TCR clone 78314 (TRBV7-3, TRBJ2-1)
CASSATGGGEVEQFF

SEQ ID NO: 156629 - protein, 11 aa, Homo sapiens
  CDR3 for alpha chain variable domain of TCR clone 78315 (TRAV1-2, TRAJ20)
CAVANDYKLSF

SEQ ID NO: 156630 - protein, 15 aa, Homo sapiens
  CDR3 for beta chain variable domain of TCR clone 78315 (TRBV20-1, TRBJ1-1)
CSASRGVTGNTEAFF

SEQ ID NO: 156631 - protein, 12 aa, Homo sapiens
  CDR3 for alpha chain variable domain of TCR clone 78316 (TRAV1-2, TRAJ26)
CAVRYYGQNFFF

SEQ ID NO: 156632 - protein, 15 aa, Homo sapiens
  CDR3 for beta chain variable domain of TCR clone 78316 (TRBV28, TRBJ2-1)
CASSIIAGGRSEQFF

SEQ ID NO: 156633 - protein, 12 aa, Homo sapiens
  CDR3 for alpha chain variable domain of TCR clone 78317 (TRAV29/DV5, TRAJ15)
CASNQAGTALIF

SEQ ID NO: 156634 - protein, 15 aa, Homo sapiens
  CDR3 for beta chain variable domain of TCR clone 78317 (TRBV11-2, TRBJ2-2)
CASSSDRVNARELFF

SEQ ID NO: 156635 - protein, 11 aa, Homo sapiens
  CDR3 for alpha chain variable domain of TCR clone 78318 (TRAV12-3, TRAJ27)
CAMANAGKSTF

SEQ ID NO: 156636 - protein, 14 aa, Homo sapiens
  CDR3 for beta chain variable domain of TCR clone 78318 (TRBV7-2, TRBJ2-7)
CASSPKTSFYEQYF

SEQ ID NO: 156637 - protein, 14 aa, Homo sapiens
  CDR3 for alpha chain variable domain of TCR clone 78319 (TRAV2, TRAJ9)
CAVEDRSGGFKTIF

SEQ ID NO: 156638 - protein, 13 aa, Homo sapiens
  CDR3 for beta chain variable domain of TCR clone 78319 (TRBV7-3, TRBJ2-5)
CASSCRGGETQYF

SEQ ID NO: 156639 - protein, 17 aa, Homo sapiens
  CDR3 for alpha chain variable domain of TCR clone 78320 (TRAV4, TRAJ18)
CLVGERSVGSTLGRLYF

SEQ ID NO: 156640 - protein, 14 aa, Homo sapiens
  CDR3 for beta chain variable domain of TCR clone 78320 (TRBV12-5, TRBJ2-5)
CASGSRTHQETQYF

SEQ ID NO: 156641 - protein, 16 aa, Homo sapiens
  CDR3 for alpha chain variable domain of TCR clone 78321 (TRAV27, TRAJ13)
CAGAKSDSGGYQKVTF

SEQ ID NO: 156642 - protein, 15 aa, Homo sapiens
  CDR3 for beta chain variable domain of TCR clone 78321 (TRBV5-5, TRBJ2-2)
CASSRQASEAGELFF

SEQ ID NO: 156643 - protein, 15 aa, Homo sapiens
  CDR3 for alpha chain variable domain of TCR clone 78322 (TRAV8-3, TRAJ15)
CAVGTPNQAGTALIF

SEQ ID NO: 156644 - protein, 14 aa, Homo sapiens
  CDR3 for beta chain variable domain of TCR clone 78322 (TRBV20-1, TRBJ2-1)
CSPNDEASYNEQFF

SEQ ID NO: 156645 - protein, 14 aa, Homo sapiens
  CDR3 for alpha chain variable domain of TCR clone 78323 (TRAV13-1, TRAJ35)
CAASKGGFGNVLHC

SEQ ID NO: 156646 - protein, 15 aa, Homo sapiens
  CDR3 for beta chain variable domain of TCR clone 78323 (TRBV12-4, TRBJ2-5)
CASSPPTGLQETQYF

SEQ ID NO: 156647 - protein, 13 aa, Homo sapiens
  CDR3 for alpha chain variable domain of TCR clone 78324 (TRAV8-6, TRAJ49)
CAVITNTGNQFYF

SEQ ID NO: 156648 - protein, 17 aa, Homo sapiens
  CDR3 for beta chain variable domain of TCR clone 78324 (TRBV11-3, TRBJ2-1)
CASSLYPPGVEYNEQFF

SEQ ID NO: 156649 - protein, 15 aa, Homo sapiens
  CDR3 for alpha chain variable domain of TCR clone 78325 (TRAV29/DV5, TRAJ57)
CAASLLRGGSEKLVF

SEQ ID NO: 156650 - protein, 16 aa, Homo sapiens
  CDR3 for beta chain variable domain of TCR clone 78325 (TRBV5-4, TRBJ2-3)
CASQQPGAGGADTQYF

SEQ ID NO: 156651 - protein, 14 aa, Homo sapiens
  CDR3 for alpha chain variable domain of TCR clone 78326 (TRAV38-1, TRAJ40)
CALRPTSGTYKYIF

SEQ ID NO: 156652 - protein, 15 aa, Homo sapiens
  CDR3 for beta chain variable domain of TCR clone 78326 (TRBV5-1, TRBJ2-7)
CASSLNGGPAREQYF

SEQ ID NO: 156653 - protein, 18 aa, Homo sapiens
  CDR3 for alpha chain variable domain of TCR clone 78327 (TRAV21, TRAJ52)
CAVRPSPAGGTSYGKLTF

SEQ ID NO: 156654 - protein, 14 aa, Homo sapiens
  CDR3 for beta chain variable domain of TCR clone 78327 (TRBV19, TRBJ2-1)
CASSRLASINEQFF

SEQ ID NO: 156655 - protein, 11 aa, Homo sapiens
  CDR3 for alpha chain variable domain of TCR clone 78328 (TRAV3, TRAJ21)
CAGGNFNKFYF

SEQ ID NO: 156656 - protein, 12 aa, Homo sapiens
  CDR3 for beta chain variable domain of TCR clone 78328 (TRBV29-1, TRBJ2-3)
CSVTGGADTQYF

SEQ ID NO: 156657 - protein, 15 aa, Homo sapiens
  CDR3 for alpha chain variable domain of TCR clone 78329 (TRAV17, TRAJ57)
CATAPSQGGSEKLVF

SEQ ID NO: 156658 - protein, 16 aa, Homo sapiens
  CDR3 for beta chain variable domain of TCR clone 78329 (TRBV12-4, TRBJ1-5)
CASSRPVGGSNQPQHF

SEQ ID NO: 156659 - protein, 14 aa, Homo sapiens
  CDR3 for alpha chain variable domain of TCR clone 78330 (TRAV26-1, TRAJ21)
CIVRVGHNFNKFYF

SEQ ID NO: 156660 - protein, 20 aa, Homo sapiens
  CDR3 for beta chain variable domain of TCR clone 78330 (TRBV28, TRBJ2-1)
CASTPIGRSPGLAGGNEQFF

SEQ ID NO: 156661 - protein, 12 aa, Homo sapiens
  CDR3 for alpha chain variable domain of TCR clone 78331 (TRAV41, TRAJ58)
CAVSASGSRLTF

SEQ ID NO: 156662 - protein, 15 aa, Homo sapiens
  CDR3 for beta chain variable domain of TCR clone 78331 (TRBV19, TRBJ2-2)
CASSPRTGWTGELFF

SEQ ID NO: 156663 - protein, 13 aa, Homo sapiens
  CDR3 for alpha chain variable domain of TCR clone 78332 (TRAV8-3, TRAJ48)
CAVVPFGNEKLTF

SEQ ID NO: 156664 - protein, 14 aa, Homo sapiens
  CDR3 for beta chain variable domain of TCR clone 78332 (TRBV18, TRBJ2-7)
CASSPRGGAYEKYF

SEQ ID NO: 156665 - protein, 18 aa, Homo sapiens
  CDR3 for alpha chain variable domain of TCR clone 78333 (TRAV12-3, TRAJ52)
CAMSRTNGGGTSYGKLTF

SEQ ID NO: 156666 - protein, 17 aa, Homo sapiens
  CDR3 for beta chain variable domain of TCR clone 78333 (TRBV7-3, TRBJ2-3)
CASSLMKRMRGADTQYF

SEQ ID NO: 156667 - protein, 15 aa, Homo sapiens
  CDR3 for alpha chain variable domain of TCR clone 78334 (TRAV38-2/DV8, TRAJ31)
CAYRTETRNNARPMF

SEQ ID NO: 156668 - protein, 13 aa, Homo sapiens
  CDR3 for beta chain variable domain of TCR clone 78334 (TRBV28, TRBJ2-1)
CASSPLPSSEQFF

SEQ ID NO: 156669 - protein, 16 aa, Homo sapiens
  CDR3 for alpha chain variable domain of TCR clone 78335 (TRAV12-2, TRAJ32)
CAVNLGQGGATNKLIF

SEQ ID NO: 156670 - protein, 15 aa, Homo sapiens
  CDR3 for beta chain variable domain of TCR clone 78335 (TRBV20-1, TRBJ2-7)
CSARGPLAGGREQFF

SEQ ID NO: 156671 - protein, 14 aa, Homo sapiens
  CDR3 for alpha chain variable domain of TCR clone 78336 (TRAV26-1, TRAJ26)
YIVRATFLGQNFVF

SEQ ID NO: 156672 - protein, 16 aa, Homo sapiens
  CDR3 for beta chain variable domain of TCR clone 78336 (TRBV12-4, TRBJ2-7)
CASRSTGTGPSYEQYF

SEQ ID NO: 156673 - protein, 13 aa, Homo sapiens
  CDR3 for alpha chain variable domain of TCR clone 78337 (TRAV17, TRAJ5)
CAPMDTGRRALTF

SEQ ID NO: 156674 - protein, 14 aa, Homo sapiens
  CDR3 for beta chain variable domain of TCR clone 78337 (TRBV5-1, TRBJ2-7)
CASSRGESLYEQYF

SEQ ID NO: 156675 - protein, 17 aa, Homo sapiens
  CDR3 for alpha chain variable domain of TCR clone 78338 (TRAV3, TRAJ38)
CAVRDCLNAGNNLKLIW

SEQ ID NO: 156676 - protein, 13 aa, Homo sapiens
  CDR3 for beta chain variable domain of TCR clone 78338 (TRBV23-1, TRBJ1-4)
CASRGKFNEKLFF

SEQ ID NO: 156677 - protein, 10 aa, Homo sapiens
  CDR3 for alpha chain variable domain of TCR clone 78339 (TRAV26-1, TRAJ22)
CIVSLNFFWF

SEQ ID NO: 156678 - protein, 15 aa, Homo sapiens
  CDR3 for beta chain variable domain of TCR clone 78339 (TRBV19, TRBJ1-6)
CASSTQGAVGSPLHF

SEQ ID NO: 156679 - protein, 15 aa, Homo sapiens
  CDR3 for alpha chain variable domain of TCR clone 78340 (TRAV4, TRAJ39)
CLVGPNNNAGNMLTL

SEQ ID NO: 156680 - protein, 13 aa, Homo sapiens
  CDR3 for beta chain variable domain of TCR clone 78340 (TRBV11-2, TRBJ2-5)
CASSSTGEETQYF

SEQ ID NO: 156681 - protein, 11 aa, Homo sapiens
  CDR3 for alpha chain variable domain of TCR clone 78341 (TRAV21, TRAJ9)
CAVPGGFKTIF

SEQ ID NO: 156682 - protein, 17 aa, Homo sapiens
  CDR3 for beta chain variable domain of TCR clone 78341 (TRBV7-9, TRBJ2-5)
CATAGGARDPVLRARHA

SEQ ID NO: 156683 - protein, 18 aa, Homo sapiens
  CDR3 for alpha chain variable domain of TCR clone 78342 (TRAV13-1, TRAJ52)
CAAKNPNAGGTSYGKLTF

SEQ ID NO: 156684 - protein, 15 aa, Homo sapiens
  CDR3 for beta chain variable domain of TCR clone 78342 (TRBV6-1, TRBJ2-3)
CASSEHGGITDTQYF

SEQ ID NO: 156685 - protein, 15 aa, Homo sapiens
  CDR3 for alpha chain variable domain of TCR clone 78343 (TRAV3, TRAJ45)
CAVRTPWGGADGLTF

SEQ ID NO: 156686 - protein, 16 aa, Homo sapiens
  CDR3 for beta chain variable domain of TCR clone 78343 (TRBV6-1, TRBJ2-2)
CASSFGQGANTGGLFF

SEQ ID NO: 156687 - protein, 16 aa, Homo sapiens
  CDR3 for alpha chain variable domain of TCR clone 78344 (TRAV27, TRAJ13)
CAGAKNDSGGYQKVTF

SEQ ID NO: 156688 - protein, 15 aa, Homo sapiens
  CDR3 for beta chain variable domain of TCR clone 78344 (TRBV29-1, TRBJ2-1)
CSVGRHALFYNEQFF

SEQ ID NO: 156689 - protein, 13 aa, Homo sapiens
  CDR3 for alpha chain variable domain of TCR clone 78345 (TRAV2, TRAJ40)
CAVVTSGTYKYIF

SEQ ID NO: 156690 - protein, 15 aa, Homo sapiens
  CDR3 for beta chain variable domain of TCR clone 78345 (TRBV11-3, TRBJ2-3)
CASLKYGREGDTQYF

SEQ ID NO: 156691 - protein, 12 aa, Homo sapiens
  CDR3 for alpha chain variable domain of TCR clone 78346 (TRAV9-2, TRAJ36)
CALKKGANNLFF

SEQ ID NO: 156692 - protein, 18 aa, Homo sapiens
  CDR3 for beta chain variable domain of TCR clone 78346 (TRBV11-2, TRBJ2-3)
CASSLGGASRGAPNTQYF

SEQ ID NO: 156693 - protein, 15 aa, Homo sapiens
  CDR3 for alpha chain variable domain of TCR clone 78347 (TRAV12-2, TRAJ53)
CAVNGGGGSNYKLTF

SEQ ID NO: 156694 - protein, 19 aa, Homo sapiens
  CDR3 for beta chain variable domain of TCR clone 78347 (TRBV7-7, TRBJ2-7)
CASSPQDRDLPGGTYEQYF

SEQ ID NO: 156695 - protein, 18 aa, Homo sapiens
  CDR3 for alpha chain variable domain of TCR clone 78348 (TRAV29/DV5, TRAJ26)
CSVLLCSKRKSEGQNFVF

SEQ ID NO: 156696 - protein, 17 aa, Homo sapiens
  CDR3 for beta chain variable domain of TCR clone 78348 (TRBV20-1, TRBJ2-2)
CSASGSGQGGLTGELFF

SEQ ID NO: 156697 - protein, 12 aa, Homo sapiens
  CDR3 for alpha chain variable domain of TCR clone 78349 (TRAV36/DV7, TRAJ54)
CAVVRGAQKLVF

SEQ ID NO: 156698 - protein, 14 aa, Homo sapiens
  CDR3 for beta chain variable domain of TCR clone 78349 (TRBV7-3, TRBJ1-1)
CDSSLKGGNTEAFF

SEQ ID NO: 156699 - protein, 13 aa, Homo sapiens
  CDR3 for alpha chain variable domain of TCR clone 78350 (TRAV30, TRAJ6)
CGFIEGGSYIPTF

SEQ ID NO: 156700 - protein, 14 aa, Homo sapiens
  CDR3 for beta chain variable domain of TCR clone 78350 (TRBV7-6, TRBJ2-3)
CASSLGTVTDTQYF

SEQ ID NO: 156701 - protein, 14 aa, Homo sapiens
  CDR3 for alpha chain variable domain of TCR clone 78351 (TRAV1-2, TRAJ8)
CAVRGDTGFQKLVF

SEQ ID NO: 156702 - protein, 15 aa, Homo sapiens
  CDR3 for beta chain variable domain of TCR clone 78351 (TRBV5-7, TRBJ2-3)
CASSPGLATTDTQYF

SEQ ID NO: 156703 - protein, 12 aa, Homo sapiens
  CDR3 for alpha chain variable domain of TCR clone 78352 (TRAV8-3, TRAJ20)
CAVGANDYKLSF

SEQ ID NO: 156704 - protein, 16 aa, Homo sapiens
  CDR3 for beta chain variable domain of TCR clone 78352 (TRBV19, TRBJ2-2)
CASRSPGTGATGELFC

SEQ ID NO: 156705 - protein, 12 aa, Homo sapiens
  CDR3 for alpha chain variable domain of TCR clone 78353 (TRAV30, TRAJ29)
CGTGSGNTPLVF

SEQ ID NO: 156706 - protein, 15 aa, Homo sapiens
  CDR3 for beta chain variable domain of TCR clone 78353 (TRBV29-1, TRBJ2-6)
CSVGDRGSGANVLTF

SEQ ID NO: 156707 - protein, 13 aa, Homo sapiens
  CDR3 for alpha chain variable domain of TCR clone 78354 (TRAV12-3, TRAJ13)
CAMSSGGYQRVTF

SEQ ID NO: 156708 - protein, 16 aa, Homo sapiens
  CDR3 for beta chain variable domain of TCR clone 78354 (TRBV20-1, TRBJ2-6)
CSASSQGYDGANVLTF

SEQ ID NO: 156709 - protein, 13 aa, Homo sapiens
  CDR3 for alpha chain variable domain of TCR clone 78355 (TRAV3, TRAJ15)
CAVRYQAGTALIF

SEQ ID NO: 156710 - protein, 15 aa, Homo sapiens
  CDR3 for beta chain variable domain of TCR clone 78355 (TRBV11-1, TRBJ2-7)
CASSLNYGASYEQYF

SEQ ID NO: 156711 - protein, 10 aa, Homo sapiens
  CDR3 for alpha chain variable domain of TCR clone 78356 (TRAV12-2, TRAJ52)
RSTSYGKLTF

SEQ ID NO: 156712 - protein, 14 aa, Homo sapiens
  CDR3 for beta chain variable domain of TCR clone 78356 (TRBV7-8, TRBJ2-3)
CASSLEAGTDTQYF

SEQ ID NO: 156713 - protein, 17 aa, Homo sapiens
  CDR3 for alpha chain variable domain of TCR clone 78357 (TRAV4, TRAJ42)
CLVGVLNYGGSQGNLIF

SEQ ID NO: 156714 - protein, 16 aa, Homo sapiens
  CDR3 for beta chain variable domain of TCR clone 78357 (TRBV7-6, TRBJ2-7)
CASSGGTGALSYEQYF

SEQ ID NO: 156715 - protein, 11 aa, Homo sapiens
  CDR3 for alpha chain variable domain of TCR clone 78358 (TRAV1-2, TRAJ40)
CAVPGTYKYIF

SEQ ID NO: 156716 - protein, 16 aa, Homo sapiens
  CDR3 for beta chain variable domain of TCR clone 78358 (TRBV29-1, TRBJ2-7)
CSVEVVWTSGSYEQYF

SEQ ID NO: 156717 - protein, 13 aa, Homo sapiens
  CDR3 for alpha chain variable domain of TCR clone 78359 (TRAV12-1, TRAJ13)
CVVTSGGYQKVTF

SEQ ID NO: 156718 - protein, 14 aa, Homo sapiens
  CDR3 for beta chain variable domain of TCR clone 78359 (TRBV27, TRBJ2-7)
CASSLAGLPYEQYF

SEQ ID NO: 156719 - protein, 13 aa, Homo sapiens
  CDR3 for alpha chain variable domain of TCR clone 78360 (TRAV8-1, TRAJ30)
CAVIMNRDDKIVF

SEQ ID NO: 156720 - protein, 14 aa, Homo sapiens
  CDR3 for beta chain variable domain of TCR clone 78360 (TRBV7-2, TRBJ1-6)
CASSLQGANSPLHF

SEQ ID NO: 156721 - protein, 13 aa, Homo sapiens
  CDR3 for alpha chain variable domain of TCR clone 78361 (TRAV12-1, TRAJ16)
CVVNVPDGQKLLF

SEQ ID NO: 156722 - protein, 13 aa, Homo sapiens
  CDR3 for beta chain variable domain of TCR clone 78361 (TRBV2, TRBJ1-1)
CARNPTGGFHAFF

SEQ ID NO: 156723 - protein, 14 aa, Homo sapiens
  CDR3 for alpha chain variable domain of TCR clone 78362 (TRAV13-1, TRAJ35)
CAASKGGFGNVLHC

SEQ ID NO: 156724 - protein, 12 aa, Homo sapiens
  CDR3 for beta chain variable domain of TCR clone 78362 (TRBV18, TRBJ2-7)
CASSTAMGEQYF

SEQ ID NO: 156725 - protein, 16 aa, Homo sapiens
  CDR3 for alpha chain variable domain of TCR clone 78363 (TRAV16, TRAJ4)
CALSRMFSGGYNKLIF

SEQ ID NO: 156726 - protein, 15 aa, Homo sapiens
  CDR3 for beta chain variable domain of TCR clone 78363 (TRBV6-1, TRBJ2-3)
CASSERGGITDTQYF

SEQ ID NO: 156727 - protein, 17 aa, Homo sapiens
  CDR3 for alpha chain variable domain of TCR clone 78364 (TRAV3, TRAJ38)
CAVRDCLNAGNNRKLIW

SEQ ID NO: 156728 - protein, 14 aa, Homo sapiens
  CDR3 for beta chain variable domain of TCR clone 78364 (TRBV5-5, TRBJ1-5)
CASSGQGVDQPQHS

SEQ ID NO: 156729 - protein, 13 aa, Homo sapiens
  CDR3 for alpha chain variable domain of TCR clone 78365 (TRAV21, TRAJ44)
CAAHTGTASKLTF

SEQ ID NO: 156730 - protein, 18 aa, Homo sapiens
  CDR3 for beta chain variable domain of TCR clone 78365 (TRBV25-1, TRBJ1-2)
CASSGLQNGQGLIFGYTL

SEQ ID NO: 156731 - protein, 14 aa, Homo sapiens
  CDR3 for alpha chain variable domain of TCR clone 78366 (TRAV12-1, TRAJ34)
CGEPASYNTDKLIF

SEQ ID NO: 156732 - protein, 14 aa, Homo sapiens
  CDR3 for beta chain variable domain of TCR clone 78366 (TRBV7-3, TRBJ2-1)
CASSLAGGTNEQFF

SEQ ID NO: 156733 - protein, 11 aa, Homo sapiens
  CDR3 for alpha chain variable domain of TCR clone 78367 (TRAV1-2, TRAJ20)
CAVANDYKLNF

SEQ ID NO: 156734 - protein, 18 aa, Homo sapiens
  CDR3 for beta chain variable domain of TCR clone 78367 (TRBV20-1, TRBJ2-6)
CSAETTPTHGSGANVLTF

SEQ ID NO: 156735 - protein, 17 aa, Homo sapiens
  CDR3 for alpha chain variable domain of TCR clone 78368 (TRAV8-3, TRAJ50)
CAVGAVDTETSYDKVIF

SEQ ID NO: 156736 - protein, 13 aa, Homo sapiens
  CDR3 for beta chain variable domain of TCR clone 78368 (TRBV7-9, TRBJ2-2)
CASSSAGTGELFL

SEQ ID NO: 156737 - protein, 14 aa, Homo sapiens
  CDR3 for alpha chain variable domain of TCR clone 78369 (TRAV14/DV4, TRAJ42)
CPRGSLRSQGNPIF

SEQ ID NO: 156738 - protein, 18 aa, Homo sapiens
  CDR3 for beta chain variable domain of TCR clone 78369 (TRBV20-1, TRBJ2-3)
CSASGLAGGPGTTDTQYF

SEQ ID NO: 156739 - protein, 12 aa, Homo sapiens
  CDR3 for alpha chain variable domain of TCR clone 78370 (TRAV25, TRAJ16)
CAGQQDGQKLLF

SEQ ID NO: 156740 - protein, 16 aa, Homo sapiens
  CDR3 for beta chain variable domain of TCR clone 78370 (TRBV19, TRBJ2-1)
CACSIQAGGSYNEQFF

SEQ ID NO: 156741 - protein, 15 aa, Homo sapiens
  CDR3 for alpha chain variable domain of TCR clone 78371 (TRAV17, TRAJ4)
CATGTWSGGYNKPIF

SEQ ID NO: 156742 - protein, 13 aa, Homo sapiens
  CDR3 for beta chain variable domain of TCR clone 78371 (TRBV6-6, TRBJ2-7)
CASSPKHLAEQYF

SEQ ID NO: 156743 - protein, 14 aa, Homo sapiens
  CDR3 for alpha chain variable domain of TCR clone 78372 (TRAV8-3, TRAJ4)
CAVGAAGGYNKLIF

SEQ ID NO: 156744 - protein, 12 aa, Homo sapiens
  CDR3 for beta chain variable domain of TCR clone 78372 (TRBV7-9, TRBJ1-1)
CASSLVRGEAFF

SEQ ID NO: 156745 - protein, 17 aa, Homo sapiens
  CDR3 for alpha chain variable domain of TCR clone 78373 (TRAV8-6, TRAJ58)
CAVSSWVGETSGSRLTF

SEQ ID NO: 156746 - protein, 15 aa, Homo sapiens
  CDR3 for beta chain variable domain of TCR clone 78373 (TRBV4-1, TRBJ1-4)
CASSDTGGTNEKLFF

SEQ ID NO: 156747 - protein, 15 aa, Homo sapiens
  CDR3 for alpha chain variable domain of TCR clone 78374 (TRAV12-3, TRAJ6)
CAMSATTGGSYIPTL

SEQ ID NO: 156748 - protein, 15 aa, Homo sapiens
  CDR3 for beta chain variable domain of TCR clone 78374 (TRBV5-1, TRBJ2-7)
CASSLNGGPAREQYF

SEQ ID NO: 156749 - protein, 22 aa, Homo sapiens
  CDR3 for alpha chain variable domain of TCR clone 78375 (TRAV12-2, TRAJ53)
SPVIQPPTSVPPILSSNYKLTF

SEQ ID NO: 156750 - protein, 18 aa, Homo sapiens
  CDR3 for beta chain variable domain of TCR clone 78375 (TRBV20-1, TRBJ2-3)
CSASGLAGGPGTTDTQYF

SEQ ID NO: 156751 - protein, 16 aa, Homo sapiens
  CDR3 for alpha chain variable domain of TCR clone 78376 (TRAV3, TRAJ37)
CAVRGEGSGNTGKLIF

SEQ ID NO: 156752 - protein, 15 aa, Homo sapiens
  CDR3 for beta chain variable domain of TCR clone 78376 (TRBV20-1, TRBJ2-1)
CSARGGTRYYNEQFF

SEQ ID NO: 156753 - protein, 14 aa, Homo sapiens
  CDR3 for alpha chain variable domain of TCR clone 78377 (TRAV17, TRAJ15)
CATTTNQAGTALIS

SEQ ID NO: 156754 - protein, 16 aa, Homo sapiens
  CDR3 for beta chain variable domain of TCR clone 78377 (TRBV4-1, TRBJ2-7)
CASSRGDILNSYEQYF

SEQ ID NO: 156755 - protein, 15 aa, Homo sapiens
  CDR3 for alpha chain variable domain of TCR clone 78378 (TRAV17, TRAJ35)
CATAFVVGFGNVLHC

SEQ ID NO: 156756 - protein, 16 aa, Homo sapiens
  CDR3 for beta chain variable domain of TCR clone 78378 (TRBV11-2, TRBJ2-7)
CASSPLAGGPRYEQYF

SEQ ID NO: 156757 - protein, 16 aa, Homo sapiens
  CDR3 for alpha chain variable domain of TCR clone 78379 (TRAV38-1, TRAJ32)
CAFMKGGGVATNKLIF

SEQ ID NO: 156758 - protein, 13 aa, Homo sapiens
  CDR3 for beta chain variable domain of TCR clone 78379 (TRBV20-1, TRBJ2-5)
CSAREAFQETQYF

SEQ ID NO: 156759 - protein, 16 aa, Homo sapiens
  CDR3 for alpha chain variable domain of TCR clone 78380 (TRAV3, TRAJ37)
CAVRGKGSGNTGKLIF

SEQ ID NO: 156760 - protein, 13 aa, Homo sapiens
  CDR3 for beta chain variable domain of TCR clone 78380 (TRBV14, TRBJ2-7)
CASSKDRRYEQYF

SEQ ID NO: 156761 - protein, 11 aa, Homo sapiens
  CDR3 for alpha chain variable domain of TCR clone 78381 (TRAV21, TRAJ34)
CAHYNTDKLIF

SEQ ID NO: 156762 - protein, 13 aa, Homo sapiens
  CDR3 for beta chain variable domain of TCR clone 78381 (TRBV7-6, TRBJ1-2)
CASSLVADYGYPF

SEQ ID NO: 156763 - protein, 12 aa, Homo sapiens
  CDR3 for alpha chain variable domain of TCR clone 78382 (TRAV12-2, TRAJ31)
CAVNTPDARLMF

SEQ ID NO: 156764 - protein, 13 aa, Homo sapiens
  CDR3 for beta chain variable domain of TCR clone 78382 (TRBV19, TRBJ2-1)
CASSMYRVNEQFF

SEQ ID NO: 156765 - protein, 13 aa, Homo sapiens
  CDR3 for alpha chain variable domain of TCR clone 78383 (TRAV21, TRAJ45)
CAVMGGGADGLTF

SEQ ID NO: 156766 - protein, 13 aa, Homo sapiens
  CDR3 for beta chain variable domain of TCR clone 78383 (TRBV7-9, TRBJ1-2)
CASSLKQNYGYTF

SEQ ID NO: 156767 - protein, 21 aa, Homo sapiens
  CDR3 for alpha chain variable domain of TCR clone 78384 (TRAV36/DV7, TRAJ39)
TATQTGDSAIYLPNAGNMLTF

SEQ ID NO: 156768 - protein, 15 aa, Homo sapiens
  CDR3 for beta chain variable domain of TCR clone 78384 (TRBV27, TRBJ2-1)
CASSNGGGSSNEQFF

SEQ ID NO: 156769 - protein, 16 aa, Homo sapiens
  CDR3 for alpha chain variable domain of TCR clone 78385 (TRAV12-3, TRAJ53)
CAMSPGSGGSNYKLTF

SEQ ID NO: 156770 - protein, 17 aa, Homo sapiens
  CDR3 for beta chain variable domain of TCR clone 78385 (TRBV28, TRBJ2-5)
CASSTPEGGALQETQYF

SEQ ID NO: 156771 - protein, 14 aa, Homo sapiens
  CDR3 for alpha chain variable domain of TCR clone 78386 (TRAV1-2, TRAJ8)
CAVREDTGFQKLVF

SEQ ID NO: 156772 - protein, 16 aa, Homo sapiens
  CDR3 for beta chain variable domain of TCR clone 78386 (TRBV19, TRBJ2-1)
CAGSKAGPSSYNEQFF

SEQ ID NO: 156773 - protein, 14 aa, Homo sapiens
  CDR3 for alpha chain variable domain of TCR clone 78387 (TRAV20, TRAJ20)
CAVRRGYNDYKLSF

SEQ ID NO: 156774 - protein, 13 aa, Homo sapiens
  CDR3 for beta chain variable domain of TCR clone 78387 (TRBV19, TRBJ2-5)
CASSETAQETQYF

SEQ ID NO: 156775 - protein, 12 aa, Homo sapiens
  CDR3 for alpha chain variable domain of TCR clone 78388 (TRAV2, TRAJ33)
CAVPDSNYQLIW

SEQ ID NO: 156776 - protein, 11 aa, Homo sapiens
  CDR3 for beta chain variable domain of TCR clone 78388 (TRBV11-2, TRBJ1-1)
CASSINTEAFF

SEQ ID NO: 156777 - protein, 15 aa, Homo sapiens
  CDR3 for alpha chain variable domain of TCR clone 78389 (TRAV4, TRAJ39)
CLVGPNNNAGNMLTF

SEQ ID NO: 156778 - protein, 17 aa, Homo sapiens
  CDR3 for beta chain variable domain of TCR clone 78389 (TRBV11-2, TRBJ2-5)
CASSSTGEETVLRARHA

SEQ ID NO: 156779 - protein, 12 aa, Homo sapiens
  CDR3 for alpha chain variable domain of TCR clone 78390 (TRAV12-3, TRAJ17)
CAMTLTGNKLTF

SEQ ID NO: 156780 - protein, 17 aa, Homo sapiens
  CDR3 for beta chain variable domain of TCR clone 78390 (TRBV20-1, TRBJ2-7)
CSARDRVSGMDESTSGR

SEQ ID NO: 156781 - protein, 13 aa, Homo sapiens
  CDR3 for alpha chain variable domain of TCR clone 78391 (TRAV12-3, TRAJ13)
CAMTSGGYQKVTF

SEQ ID NO: 156782 - protein, 13 aa, Homo sapiens
  CDR3 for beta chain variable domain of TCR clone 78391 (TRBV7-9, TRBJ1-2)
CASSLKQNYGYSF

SEQ ID NO: 156783 - protein, 16 aa, Homo sapiens
  CDR3 for alpha chain variable domain of TCR clone 78392 (TRAV12-3, TRAJ53)
CAMSVGSGGSNYKLKF

SEQ ID NO: 156784 - protein, 11 aa, Homo sapiens
  CDR3 for beta chain variable domain of TCR clone 78392 (TRBV29-1, TRBJ2-5)
CSVASGETQYF

SEQ ID NO: 156785 - protein, 13 aa, Homo sapiens
  CDR3 for alpha chain variable domain of TCR clone 78393 (TRAV12-1, TRAJ20)
CVGQRFNDYKLSF

SEQ ID NO: 156786 - protein, 14 aa, Homo sapiens
  CDR3 for beta chain variable domain of TCR clone 78393 (TRBV6-3, TRBJ1-5)
CASSYSRSAQPQHF

SEQ ID NO: 156787 - protein, 15 aa, Homo sapiens
  CDR3 for alpha chain variable domain of TCR clone 78394 (TRAV3, TRAJ5)
CAVRDLYTGRRALTF

SEQ ID NO: 156788 - protein, 16 aa, Homo sapiens
  CDR3 for beta chain variable domain of TCR clone 78394 (TRBV20-1, TRBJ1-4)
CSAPGQGLLTNEKLLF

SEQ ID NO: 156789 - protein, 14 aa, Homo sapiens
  CDR3 for alpha chain variable domain of TCR clone 78395 (TRAV26-1, TRAJ45)
CIEVTGGGADGLTF

SEQ ID NO: 156790 - protein, 16 aa, Homo sapiens
  CDR3 for beta chain variable domain of TCR clone 78395 (TRBV7-9, TRBJ2-1)
CASSDVAGGSYNEQFF

SEQ ID NO: 156791 - protein, 15 aa, Homo sapiens
  CDR3 for alpha chain variable domain of TCR clone 78396 (TRAV35, TRAJ40)
CAGQLGTSGTYKYIF

SEQ ID NO: 156792 - protein, 14 aa, Homo sapiens
  CDR3 for beta chain variable domain of TCR clone 78396 (TRBV7-3, TRBJ2-1)
CASSLAGGSNEQFF

SEQ ID NO: 156793 - protein, 15 aa, Homo sapiens
  CDR3 for alpha chain variable domain of TCR clone 78397 (TRAV23/DV6, TRAJ12)
CAAIDLGAMDSSYKL

SEQ ID NO: 156794 - protein, 15 aa, Homo sapiens
  CDR3 for beta chain variable domain of TCR clone 78397 (TRBV12-4, TRBJ2-5)
CASTLNSGRGETLYF

SEQ ID NO: 156795 - protein, 15 aa, Homo sapiens
  CDR3 for alpha chain variable domain of TCR clone 78398 (TRAV26-1, TRAJ44)
CIVRANTGTASKLTF

SEQ ID NO: 156796 - protein, 16 aa, Homo sapiens
  CDR3 for beta chain variable domain of TCR clone 78398 (TRBV7-7, TRBJ2-1)
CASSLASGAFYNEQFF

SEQ ID NO: 156797 - protein, 17 aa, Homo sapiens
  CDR3 for alpha chain variable domain of TCR clone 78399 (TRAV27, TRAJ26)
CAGARAPLDNYGQNFVF

SEQ ID NO: 156798 - protein, 15 aa, Homo sapiens
  CDR3 for beta chain variable domain of TCR clone 78399 (TRBV11-2, TRBJ2-5)
CASSPRSGCLETQYF

SEQ ID NO: 156799 - protein, 12 aa, Homo sapiens
  CDR3 for alpha chain variable domain of TCR clone 78400 (TRAV21, TRAJ3)
CCFYSSASKIIF

SEQ ID NO: 156800 - protein, 16 aa, Homo sapiens
  CDR3 for beta chain variable domain of TCR clone 78400 (TRBV19, TRBJ2-1)
RASSKAGPSSYNEQFF

SEQ ID NO: 156801 - protein, 13 aa, Homo sapiens
  CDR3 for alpha chain variable domain of TCR clone 78401 (TRAV8-3, TRAJ43)
CAVGPDKNNDMRF

SEQ ID NO: 156802 - protein, 14 aa, Homo sapiens
  CDR3 for beta chain variable domain of TCR clone 78401 (TRBV19, TRBJ2-1)
CASPTFVLSGEQFF

SEQ ID NO: 156803 - protein, 13 aa, Homo sapiens
  CDR3 for alpha chain variable domain of TCR clone 78402 (TRAV2, TRAJ15)
CAVASQAGTALIF

SEQ ID NO: 156804 - protein, 11 aa, Homo sapiens
  CDR3 for beta chain variable domain of TCR clone 78402 (TRBV7-9, TRBJ2-5)
CASSLGETRYF

SEQ ID NO: 156805 - protein, 12 aa, Homo sapiens
  CDR3 for alpha chain variable domain of TCR clone 78403 (TRAV12-3, TRAJ3)
CAIDSSASKIIF

SEQ ID NO: 156806 - protein, 17 aa, Homo sapiens
  CDR3 for beta chain variable domain of TCR clone 78403 (TRBV7-9, TRBJ2-3)
CAGSLEEAGAYPDTRYF

SEQ ID NO: 156807 - protein, 14 aa, Homo sapiens
  CDR3 for alpha chain variable domain of TCR clone 78404 (TRAV13-1, TRAJ35)
CAASKGGFGDVLHC

SEQ ID NO: 156808 - protein, 16 aa, Homo sapiens
  CDR3 for beta chain variable domain of TCR clone 78404 (TRBV19, TRBJ1-1)
CASRFGGPVTGTEAFF

SEQ ID NO: 156809 - protein, 13 aa, Homo sapiens
  CDR3 for alpha chain variable domain of TCR clone 78405 (TRAV3, TRAJ20)
CAVRPLNDYKLSF

SEQ ID NO: 156810 - protein, 12 aa, Homo sapiens
  CDR3 for beta chain variable domain of TCR clone 78405 (TRBV6-1, TRBJ2-1)
WATYGLNNEQFF

SEQ ID NO: 156811 - protein, 13 aa, Homo sapiens
  CDR3 for alpha chain variable domain of TCR clone 78406 (TRAV36/DV7, TRAJ37)
CAVFSSNTGKLIF

SEQ ID NO: 156812 - protein, 15 aa, Homo sapiens
  CDR3 for beta chain variable domain of TCR clone 78406 (TRBV12-4, TRBJ2-5)
CQQFFVRGRQDTQYF

SEQ ID NO: 156813 - protein, 13 aa, Homo sapiens
  CDR3 for alpha chain variable domain of TCR clone 78407 (TRAV12-3, TRAJ13)
CAMVTGGYQKVTF

SEQ ID NO: 156814 - protein, 14 aa, Homo sapiens
  CDR3 for beta chain variable domain of TCR clone 78407 (TRBV7-2, TRBJ2-5)
CASSTGGELKTQYF

SEQ ID NO: 156815 - protein, 14 aa, Homo sapiens
  CDR3 for alpha chain variable domain of TCR clone 78408 (TRAV12-2, TRAJ24)
CAVTPANSWGKLQF

SEQ ID NO: 156816 - protein, 12 aa, Homo sapiens
  CDR3 for beta chain variable domain of TCR clone 78408 (TRBV3-1, TRBJ2-1)
CASSQGSSGQFF

SEQ ID NO: 156817 - protein, 22 aa, Homo sapiens
  CDR3 for alpha chain variable domain of TCR clone 78409 (TRAV2, TRAJ22)
SLSLLILQVREADAAEQRQLTF

SEQ ID NO: 156818 - protein, 16 aa, Homo sapiens
  CDR3 for beta chain variable domain of TCR clone 78409 (TRBV2, TRBJ2-5)
CASSETQGVGEETQYF

SEQ ID NO: 156819 - protein, 13 aa, Homo sapiens
  CDR3 for alpha chain variable domain of TCR clone 78410 (TRAV8-4, TRAJ48)
CAVSLFGTEKLTF

SEQ ID NO: 156820 - protein, 15 aa, Homo sapiens
  CDR3 for beta chain variable domain of TCR clone 78410 (TRBV20-1, TRBJ2-7)
CSARKGLAESYEQYF

SEQ ID NO: 156821 - protein, 12 aa, Homo sapiens
  CDR3 for alpha chain variable domain of TCR clone 78411 (TRAV16, TRAJ49)
FALNEGGNQFYF

SEQ ID NO: 156822 - protein, 14 aa, Homo sapiens
  CDR3 for beta chain variable domain of TCR clone 78411 (TRBV7-9, TRBJ2-1)
CASRPTGLRNEQFF

SEQ ID NO: 156823 - protein, 15 aa, Homo sapiens
  CDR3 for alpha chain variable domain of TCR clone 78412 (TRAV12-1, TRAJ6)
CVVNCPLRRKLHTYI

SEQ ID NO: 156824 - protein, 14 aa, Homo sapiens
  CDR3 for beta chain variable domain of TCR clone 78412 (TRBV7-2, TRBJ1-1)
CASSFLTGTTEAFF

SEQ ID NO: 156825 - protein, 14 aa, Homo sapiens
  CDR3 for alpha chain variable domain of TCR clone 78413 (TRAV13-2, TRAJ29)
CAEGTFETNTPLVF

SEQ ID NO: 156826 - protein, 13 aa, Homo sapiens
  CDR3 for beta chain variable domain of TCR clone 78413 (TRBV2, TRBJ1-1)
CASNLLRNAEAFF

SEQ ID NO: 156827 - protein, 16 aa, Homo sapiens
  CDR3 for alpha chain variable domain of TCR clone 78414 (TRAV8-4, TRAJ9)
CAVTFNTGGFKNYLWI

SEQ ID NO: 156828 - protein, 15 aa, Homo sapiens
  CDR3 for beta chain variable domain of TCR clone 78414 (TRBV7-9, TRBJ2-2)
CASSPETGAGGELFF

SEQ ID NO: 156829 - protein, 16 aa, Homo sapiens
  CDR3 for alpha chain variable domain of TCR clone 78415 (TRAV13-1, TRAJ13)
CTAFFLGVTRKLPLEL

SEQ ID NO: 156830 - protein, 15 aa, Homo sapiens
  CDR3 for beta chain variable domain of TCR clone 78415 (TRBV7-8, TRBJ2-1)
CASSLADSVYNEQFF

SEQ ID NO: 156831 - protein, 14 aa, Homo sapiens
  CDR3 for alpha chain variable domain of TCR clone 78416 (TRAV2, TRAJ37)
CAVDFTSNTGKLIF

SEQ ID NO: 156832 - protein, 15 aa, Homo sapiens
  CDR3 for beta chain variable domain of TCR clone 78416 (TRBV20-1, TRBJ1-1)
CSASRGVTGITEAFF

SEQ ID NO: 156833 - protein, 18 aa, Homo sapiens
  CDR3 for alpha chain variable domain of TCR clone 78417 (TRAV21, TRAJ52)
CAVRPSPAGGTSYGKLTF

SEQ ID NO: 156834 - protein, 15 aa, Homo sapiens
  CDR3 for beta chain variable domain of TCR clone 78417 (TRBV19, TRBJ1-1)
CASASGQIQNTEAFF

SEQ ID NO: 156835 - protein, 15 aa, Homo sapiens
  CDR3 for alpha chain variable domain of TCR clone 78418 (TRAV8-6, TRAJ6)
CAVRDASGGSYIPTF

SEQ ID NO: 156836 - protein, 13 aa, Homo sapiens
  CDR3 for beta chain variable domain of TCR clone 78418 (TRBV7-9, TRBJ1-2)
CASSSDSIYGYTF

SEQ ID NO: 156837 - protein, 13 aa, Homo sapiens
  CDR3 for alpha chain variable domain of TCR clone 78419 (TRAV21, TRAJ57)
CAVTQGGSEKLVF

SEQ ID NO: 156838 - protein, 17 aa, Homo sapiens
  CDR3 for beta chain variable domain of TCR clone 78419 (TRBV5-1, TRBJ2-2)
CASSPRTGGMNTGELFF

SEQ ID NO: 156839 - protein, 14 aa, Homo sapiens
  CDR3 for alpha chain variable domain of TCR clone 78420 (TRAV38-1, TRAJ45)
CGYYSGGGADGLTF

SEQ ID NO: 156840 - protein, 20 aa, Homo sapiens
  CDR3 for beta chain variable domain of TCR clone 78420 (TRBV28, TRBJ2-1)
CASTPIGRSPGLAGGNEQFF

SEQ ID NO: 156841 - protein, 13 aa, Homo sapiens
  CDR3 for alpha chain variable domain of TCR clone 78421 (TRAV35, TRAJ42)
CAGFPGSQGNLIF

SEQ ID NO: 156842 - protein, 16 aa, Homo sapiens
  CDR3 for beta chain variable domain of TCR clone 78421 (TRBV5-4, TRBJ2-3)
CASQQPGAGGADTQYF

SEQ ID NO: 156843 - protein, 13 aa, Homo sapiens
  CDR3 for alpha chain variable domain of TCR clone 78422 (TRAV27, TRAJ6)
CAGGTRGSYIPTF

SEQ ID NO: 156844 - protein, 15 aa, Homo sapiens
  CDR3 for beta chain variable domain of TCR clone 78422 (TRBV5-1, TRBJ2-7)
CASSLNGGPAREQYF

SEQ ID NO: 156845 - protein, 14 aa, Homo sapiens
  CDR3 for alpha chain variable domain of TCR clone 78423 (TRAV12-2, TRAJ17)
CAVLFKAAGNKLTF

SEQ ID NO: 156846 - protein, 12 aa, Homo sapiens
  CDR3 for beta chain variable domain of TCR clone 78423 (TRBV12-5, TRBJ2-5)
CASGQGVETQYF

SEQ ID NO: 156847 - protein, 16 aa, Homo sapiens
  CDR3 for alpha chain variable domain of TCR clone 78424 (TRAV30, TRAJ24)
CGTEIVDADSRGKFQF

SEQ ID NO: 156848 - protein, 14 aa, Homo sapiens
  CDR3 for beta chain variable domain of TCR clone 78424 (TRBV12-5, TRBJ2-5)
CASGSRTHQETRYF

SEQ ID NO: 156849 - protein, 13 aa, Homo sapiens
  CDR3 for alpha chain variable domain of TCR clone 78425 (TRAV1-1, TRAJ9)
CAAQNTGGFKTIL

SEQ ID NO: 156850 - protein, 14 aa, Homo sapiens
  CDR3 for beta chain variable domain of TCR clone 78425 (TRBV20-1, TRBJ2-1)
CSAQIGGSANEQFF

SEQ ID NO: 156851 - protein, 13 aa, Homo sapiens
  CDR3 for alpha chain variable domain of TCR clone 78426 (TRAV9-2, TRAJ52)
CALSRHNAGGTSY

SEQ ID NO: 156852 - protein, 13 aa, Homo sapiens
  CDR3 for beta chain variable domain of TCR clone 78426 (TRBV7-9, TRBJ1-2)
CASSLKQNYGYTF

SEQ ID NO: 156853 - protein, 14 aa, Homo sapiens
  CDR3 for alpha chain variable domain of TCR clone 78427 (TRAV8-4, TRAJ9)
CAVRDRTGGFKTIF

SEQ ID NO: 156854 - protein, 13 aa, Homo sapiens
  CDR3 for beta chain variable domain of TCR clone 78427 (TRBV11-2, TRBJ2-7)
CASSLGDSYEQYF

SEQ ID NO: 156855 - protein, 14 aa, Homo sapiens
  CDR3 for alpha chain variable domain of TCR clone 78428 (TRAV12-2, TRAJ44)
CAANPAGTASKLTF

SEQ ID NO: 156856 - protein, 13 aa, Homo sapiens
  CDR3 for beta chain variable domain of TCR clone 78428 (TRBV20-1, TRBJ1-6)
CSAPLGVGSPLHF

SEQ ID NO: 156857 - protein, 14 aa, Homo sapiens
  CDR3 for alpha chain variable domain of TCR clone 78429 (TRAV12-2, TRAJ13)
CAVKKTGCYQKVTF

SEQ ID NO: 156858 - protein, 15 aa, Homo sapiens
  CDR3 for beta chain variable domain of TCR clone 78429 (TRBV28, TRBJ2-1)
CASSIIAGGRSEQFF

SEQ ID NO: 156859 - protein, 12 aa, Homo sapiens
  CDR3 for alpha chain variable domain of TCR clone 78430 (TRAV13-1, TRAJ36)
WRGGAGANNLFF

SEQ ID NO: 156860 - protein, 16 aa, Homo sapiens
  CDR3 for beta chain variable domain of TCR clone 78430 (TRBV7-9, TRBJ2-5)
CASRLEIGTRKETQHF

SEQ ID NO: 156861 - protein, 16 aa, Homo sapiens
  CDR3 for alpha chain variable domain of TCR clone 78431 (TRAV3, TRAJ4)
CAVRPSPSGGYNKLIF

SEQ ID NO: 156862 - protein, 15 aa, Homo sapiens
  CDR3 for beta chain variable domain of TCR clone 78431 (TRBV7-9, TRBJ2-5)
CASSFKAGREETQYF

SEQ ID NO: 156863 - protein, 13 aa, Homo sapiens
  CDR3 for alpha chain variable domain of TCR clone 78432 (TRAV2, TRAJ12)
CAVGADSSYKFIF

SEQ ID NO: 156864 - protein, 13 aa, Homo sapiens
  CDR3 for beta chain variable domain of TCR clone 78432 (TRBV20-1, TRBJ2-1)
CSARSSPRDEQFF

SEQ ID NO: 156865 - protein, 22 aa, Homo sapiens
  CDR3 for alpha chain variable domain of TCR clone 78433 (TRAV12-2, TRAJ32)
CSSETPSPVIQPPTSATNKLIF

SEQ ID NO: 156866 - protein, 14 aa, Homo sapiens
  CDR3 for beta chain variable domain of TCR clone 78433 (TRBV7-3, TRBJ2-1)
CASSLSGSYNEQFF

SEQ ID NO: 156867 - protein, 15 aa, Homo sapiens
  CDR3 for alpha chain variable domain of TCR clone 78434 (TRAV25, TRAJ53)
CPASNSGGSNYKLTF

SEQ ID NO: 156868 - protein, 14 aa, Homo sapiens
  CDR3 for beta chain variable domain of TCR clone 78434 (TRBV11-2, TRBJ2-3)
CASSRLARTDTQYF

SEQ ID NO: 156869 - protein, 12 aa, Homo sapiens
  CDR3 for alpha chain variable domain of TCR clone 78435 (TRAV12-3, TRAJ17)
CAMTLTGNKLTF

SEQ ID NO: 156870 - protein, 15 aa, Homo sapiens
  CDR3 for beta chain variable domain of TCR clone 78435 (TRBV20-1, TRBJ2-7)
LSARDRVSGMDEQYF

SEQ ID NO: 156871 - protein, 18 aa, Homo sapiens
  CDR3 for alpha chain variable domain of TCR clone 78436 (TRAV17, TRAJ45)
CATFLDLYSGGGADGLTF

SEQ ID NO: 156872 - protein, 15 aa, Homo sapiens
  CDR3 for beta chain variable domain of TCR clone 78436 (TRBV11-2, TRBJ2-1)
CASSKNRGLIYEQFF

SEQ ID NO: 156873 - protein, 16 aa, Homo sapiens
  CDR3 for alpha chain variable domain of TCR clone 78437 (TRAV12-3, TRAJ53)
CAMSPGSGGSNYKLTF

SEQ ID NO: 156874 - protein, 14 aa, Homo sapiens
  CDR3 for beta chain variable domain of TCR clone 78437 (TRBV12-5, TRBJ2-5)
CASGSRTNQETQYF

SEQ ID NO: 156875 - protein, 11 aa, Homo sapiens
  CDR3 for alpha chain variable domain of TCR clone 78438 (TRAV1-1, TRAJ23)
CAVRQGGKLIF

SEQ ID NO: 156876 - protein, 20 aa, Homo sapiens
  CDR3 for beta chain variable domain of TCR clone 78438 (TRBV7-8, TRBJ2-2)
CASSHLFPGPTIHITRELFL

SEQ ID NO: 156877 - protein, 14 aa, Homo sapiens
  CDR3 for alpha chain variable domain of TCR clone 78439 (TRAV12-2, TRAJ13)
CAVKKTGGYQKVTF

SEQ ID NO: 156878 - protein, 12 aa, Homo sapiens
  CDR3 for beta chain variable domain of TCR clone 78439 (TRBV20-1, TRBJ2-7)
CSAGLKMGEQYF

SEQ ID NO: 156879 - protein, 11 aa, Homo sapiens
  CDR3 for alpha chain variable domain of TCR clone 78440 (TRAV4, TRAJ23)
CLVAPGGKLIF

SEQ ID NO: 156880 - protein, 13 aa, Homo sapiens
  CDR3 for beta chain variable domain of TCR clone 78440 (TRBV7-7, TRBJ2-3)
CASSLSRADTQYF

SEQ ID NO: 156881 - protein, 18 aa, Homo sapiens
  CDR3 for alpha chain variable domain of TCR clone 78441 (TRAV12-3, TRAJ52)
CAMSVGGAGGTSYGKLTF

SEQ ID NO: 156882 - protein, 16 aa, Homo sapiens
  CDR3 for beta chain variable domain of TCR clone 78441 (TRBV7-9, TRBJ1-2)
RASSISLDRGGYGYTF

SEQ ID NO: 156883 - protein, 15 aa, Homo sapiens
  CDR3 for alpha chain variable domain of TCR clone 78442 (TRAV1-2, TRAJ28)
CAVQYSGAGSYQLTF

SEQ ID NO: 156884 - protein, 13 aa, Homo sapiens
  CDR3 for beta chain variable domain of TCR clone 78442 (TRBV10-3, TRBJ2-7)
CASKLAVNYEQYF

SEQ ID NO: 156885 - protein, 16 aa, Homo sapiens
  CDR3 for alpha chain variable domain of TCR clone 78443 (TRAV20, TRAJ10)
RAVLRGLTGGGNKLTF

SEQ ID NO: 156886 - protein, 14 aa, Homo sapiens
  CDR3 for beta chain variable domain of TCR clone 78443 (TRBV19, TRBJ1-5)
CASRAPDSFLSQHF

SEQ ID NO: 156887 - protein, 13 aa, Homo sapiens
  CDR3 for alpha chain variable domain of TCR clone 78444 (TRAV8-3, TRAJ21)
CAVAPVDFNKFYF

SEQ ID NO: 156888 - protein, 15 aa, Homo sapiens
  CDR3 for beta chain variable domain of TCR clone 78444 (TRBV7-9, TRBJ1-2)
CASSSFGDTNYGYTF

SEQ ID NO: 156889 - protein, 16 aa, Homo sapiens
  CDR3 for alpha chain variable domain of TCR clone 78445 (TRAV30, TRAJ24)
CGTEIVDADSWGKFQF

SEQ ID NO: 156890 - protein, 15 aa, Homo sapiens
  CDR3 for beta chain variable domain of TCR clone 78445 (TRBV7-8, TRBJ2-1)
CASSLAGGLYNEQFF

SEQ ID NO: 156891 - protein, 11 aa, Homo sapiens
  CDR3 for alpha chain variable domain of TCR clone 78446 (TRAV17, TRAJ36)
CAPTGASNLFF

SEQ ID NO: 156892 - protein, 13 aa, Homo sapiens
  CDR3 for beta chain variable domain of TCR clone 78446 (TRBV20-1, TRBJ1-1)
CSAPPGGHTEAFF

SEQ ID NO: 156893 - protein, 11 aa, Homo sapiens
  CDR3 for alpha chain variable domain of TCR clone 78447 (TRAV13-1, TRAJ20)
RAASNDYKLSF

SEQ ID NO: 156894 - protein, 14 aa, Homo sapiens
  CDR3 for beta chain variable domain of TCR clone 78447 (TRBV7-2, TRBJ2-7)
CASSPKTSFYEQYF

SEQ ID NO: 156895 - protein, 15 aa, Homo sapiens
  CDR3 for alpha chain variable domain of TCR clone 78448 (TRAV1-1, TRAJ24)
CALSGGTDSWGKFQF

SEQ ID NO: 156896 - protein, 16 aa, Homo sapiens
  CDR3 for beta chain variable domain of TCR clone 78448 (TRBV2, TRBJ2-7)
CASSDPWTGPSYEQYF

SEQ ID NO: 156897 - protein, 14 aa, Homo sapiens
  CDR3 for alpha chain variable domain of TCR clone 78449 (TRAV1-2, TRAJ16)
CAVNRFSDGQKLLF

SEQ ID NO: 156898 - protein, 15 aa, Homo sapiens
  CDR3 for beta chain variable domain of TCR clone 78449 (TRBV9, TRBJ1-6)
CASSVAGTGVSPLHF

SEQ ID NO: 156899 - protein, 18 aa, Homo sapiens
  CDR3 for alpha chain variable domain of TCR clone 78450 (TRAV29/DV5, TRAJ52)
CAAGFRGAGGTSYGKLTF

SEQ ID NO: 156900 - protein, 16 aa, Homo sapiens
  CDR3 for beta chain variable domain of TCR clone 78450 (TRBV7-3, TRBJ2-2)
YASSLKRGTLSGELFF

SEQ ID NO: 156901 - protein, 17 aa, Homo sapiens
  CDR3 for alpha chain variable domain of TCR clone 78451 (TRAV26-1, TRAJ11)
CIVRVGQRNSGYSTLTF

SEQ ID NO: 156902 - protein, 15 aa, Homo sapiens
  CDR3 for beta chain variable domain of TCR clone 78451 (TRBV27, TRBJ2-5)
CASSLIPSGGETQYF

SEQ ID NO: 156903 - protein, 15 aa, Homo sapiens
  CDR3 for alpha chain variable domain of TCR clone 78452 (TRAV17, TRAJ10)
CATVLLTGGGNKLTF

SEQ ID NO: 156904 - protein, 16 aa, Homo sapiens
  CDR3 for beta chain variable domain of TCR clone 78452 (TRBV11-2, TRBJ2-3)
CASSPWREVGTDTQYF

SEQ ID NO: 156905 - protein, 13 aa, Homo sapiens
  CDR3 for alpha chain variable domain of TCR clone 78453 (TRAV13-1, TRAJ21)
CAASIYNFNKFYF

SEQ ID NO: 156906 - protein, 12 aa, Homo sapiens
  CDR3 for beta chain variable domain of TCR clone 78453 (TRBV11-2, TRBJ2-1)
CASRPGNNEQFF

SEQ ID NO: 156907 - protein, 16 aa, Homo sapiens
  CDR3 for alpha chain variable domain of TCR clone 78454 (TRAV24, TRAJ53)
CAFNMGGGGSNYKLTF

SEQ ID NO: 156908 - protein, 15 aa, Homo sapiens
  CDR3 for beta chain variable domain of TCR clone 78454 (TRBV5-1, TRBJ2-1)
CASSPPRAPYNEQFF

SEQ ID NO: 156909 - protein, 16 aa, Homo sapiens
  CDR3 for alpha chain variable domain of TCR clone 78455 (TRAV38-1, TRAJ37)
CAFTGDGSSNTGKLIF

SEQ ID NO: 156910 - protein, 13 aa, Homo sapiens
  CDR3 for beta chain variable domain of TCR clone 78455 (TRBV12-4, TRBJ2-5)
CASSLFRRETQYF

SEQ ID NO: 156911 - protein, 15 aa, Homo sapiens
  CDR3 for alpha chain variable domain of TCR clone 78456 (TRAV3, TRAJ5)
CAVRDLDTGRRALTF

SEQ ID NO: 156912 - protein, 16 aa, Homo sapiens
  CDR3 for beta chain variable domain of TCR clone 78456 (TRBV4-2, TRBJ2-3)
CASSQELAGDTDTQYF

SEQ ID NO: 156913 - protein, 14 aa, Homo sapiens
  CDR3 for alpha chain variable domain of TCR clone 78457 (TRAV8-1, TRAJ24)
CAVNAADSWGKLQV

SEQ ID NO: 156914 - protein, 16 aa, Homo sapiens
  CDR3 for beta chain variable domain of TCR clone 78457 (TRBV4-3, TRBJ2-1)
CASSPALDRGVNEQFF

SEQ ID NO: 156915 - protein, 14 aa, Homo sapiens
  CDR3 for alpha chain variable domain of TCR clone 78458 (TRAV13-1, TRAJ35)
CAASKGGFGNVLHC

SEQ ID NO: 156916 - protein, 14 aa, Homo sapiens
  CDR3 for beta chain variable domain of TCR clone 78458 (TRBV11-2, TRBJ1-2)
CASSLYRGNYGYTF

SEQ ID NO: 156917 - protein, 13 aa, Homo sapiens
  CDR3 for alpha chain variable domain of TCR clone 78459 (TRAV2, TRAJ36)
CAVDQTGANNLFF

SEQ ID NO: 156918 - protein, 12 aa, Homo sapiens
  CDR3 for beta chain variable domain of TCR clone 78459 (TRBV19, TRBJ1-1)
CASMNRYTEAFS

SEQ ID NO: 156919 - protein, 14 aa, Homo sapiens
  CDR3 for alpha chain variable domain of TCR clone 78460 (TRAV13-1, TRAJ44)
CAAKATGTASKLTL

SEQ ID NO: 156920 - protein, 14 aa, Homo sapiens
  CDR3 for beta chain variable domain of TCR clone 78460 (TRBV25-1, TRBJ1-1)
CASTHLGGNTEAFF

SEQ ID NO: 156921 - protein, 14 aa, Homo sapiens
  CDR3 for alpha chain variable domain of TCR clone 78461 (TRAV3, TRAJ21)
CAVESQANFNKFYF

SEQ ID NO: 156922 - protein, 18 aa, Homo sapiens
  CDR3 for beta chain variable domain of TCR clone 78461 (TRBV7-9, TRBJ2-1)
CASSLAGSGTSGRNEQFF

SEQ ID NO: 156923 - protein, 13 aa, Homo sapiens
  CDR3 for alpha chain variable domain of TCR clone 78462 (TRAV17, TRAJ9)
CATDYTGGSKTIF

SEQ ID NO: 156924 - protein, 14 aa, Homo sapiens
  CDR3 for beta chain variable domain of TCR clone 78462 (TRBV19, TRBJ2-5)
CASSMTGQQETQYF

SEQ ID NO: 156925 - protein, 14 aa, Homo sapiens
  CDR3 for alpha chain variable domain of TCR clone 78463 (TRAV26-1, TRAJ44)
CISPLPGTASKLTF

SEQ ID NO: 156926 - protein, 16 aa, Homo sapiens
  CDR3 for beta chain variable domain of TCR clone 78463 (TRBV19, TRBJ2-1)
CASSKAGPSSYNERFF

SEQ ID NO: 156927 - protein, 12 aa, Homo sapiens
  CDR3 for alpha chain variable domain of TCR clone 78464 (TRAV8-3, TRAJ26)
CAGDNYGQNFVF

SEQ ID NO: 156928 - protein, 12 aa, Homo sapiens
  CDR3 for beta chain variable domain of TCR clone 78464 (TRBV2, TRBJ2-1)
CDYGPPGNEQFF

SEQ ID NO: 156929 - protein, 18 aa, Homo sapiens
  CDR3 for alpha chain variable domain of TCR clone 78465 (TRAV13-1, TRAJ52)
CAAKNPNAGGTSYGKLTF

SEQ ID NO: 156930 - protein, 15 aa, Homo sapiens
  CDR3 for beta chain variable domain of TCR clone 78465 (TRBV5-1, TRBJ2-3)
CASSVTSGSTDTQYF

SEQ ID NO: 156931 - protein, 14 aa, Homo sapiens
  CDR3 for alpha chain variable domain of TCR clone 78466 (TRAV13-1, TRAJ44)
CEAKATGTASKPTF

SEQ ID NO: 156932 - protein, 13 aa, Homo sapiens
  CDR3 for beta chain variable domain of TCR clone 78466 (TRBV5-5, TRBJ1-2)
CASSFWRGEDYTF

SEQ ID NO: 156933 - protein, 13 aa, Homo sapiens
  CDR3 for alpha chain variable domain of TCR clone 78467 (TRAV2, TRAJ40)
CAVVTSGTYKYIF

SEQ ID NO: 156934 - protein, 14 aa, Homo sapiens
  CDR3 for beta chain variable domain of TCR clone 78467 (TRBV19, TRBJ2-2)
CASSGQGIAGELFF

SEQ ID NO: 156935 - protein, 14 aa, Homo sapiens
  CDR3 for alpha chain variable domain of TCR clone 78468 (TRAV1-2, TRAJ8)
CAVREDTGFQKLVF

SEQ ID NO: 156936 - protein, 13 aa, Homo sapiens
  CDR3 for beta chain variable domain of TCR clone 78468 (TRBV20-1, TRBJ2-2)
CSASAAGTGELFF

SEQ ID NO: 156937 - protein, 10 aa, Homo sapiens
  CDR3 for alpha chain variable domain of TCR clone 78469 (TRAV9-2, TRAJ34)
CALSDDRLIF

SEQ ID NO: 156938 - protein, 14 aa, Homo sapiens
  CDR3 for beta chain variable domain of TCR clone 78469 (TRBV7-8, TRBJ2-7)
CASSVGQGAYEQYF

SEQ ID NO: 156939 - protein, 15 aa, Homo sapiens
  CDR3 for alpha chain variable domain of TCR clone 78470 (TRAV12-3, TRAJ6)
CAMSATTGGSYIPTF

SEQ ID NO: 156940 - protein, 15 aa, Homo sapiens
  CDR3 for beta chain variable domain of TCR clone 78470 (TRBV5-1, TRBJ2-7)
CASSLNVGPAREQYF

SEQ ID NO: 156941 - protein, 13 aa, Homo sapiens
  CDR3 for alpha chain variable domain of TCR clone 78471 (TRAV20, TRAJ48)
CAVQGVGNEKLTF

SEQ ID NO: 156942 - protein, 19 aa, Homo sapiens
  CDR3 for beta chain variable domain of TCR clone 78471 (TRBV2, TRBJ2-2)
CASSQPGLARGGNTGELFF

SEQ ID NO: 156943 - protein, 11 aa, Homo sapiens
  CDR3 for alpha chain variable domain of TCR clone 78472 (TRAV12-3, TRAJ43)
CAMSVSNDMRF

SEQ ID NO: 156944 - protein, 16 aa, Homo sapiens
  CDR3 for beta chain variable domain of TCR clone 78472 (TRBV7-3, TRBJ2-2)
CASSLKRGTLSGELFF

SEQ ID NO: 156945 - protein, 13 aa, Homo sapiens
  CDR3 for alpha chain variable domain of TCR clone 78473 (TRAV26-1, TRAJ34)
CIVRPWINDKLIF

SEQ ID NO: 156946 - protein, 13 aa, Homo sapiens
  CDR3 for beta chain variable domain of TCR clone 78473 (TRBV5-1, TRBJ2-1)
CASSLGSYNEQFF

SEQ ID NO: 156947 - protein, 11 aa, Homo sapiens
  CDR3 for alpha chain variable domain of TCR clone 78474 (TRAV26-1, TRAJ47)
CIFFHGTWKQT

SEQ ID NO: 156948 - protein, 13 aa, Homo sapiens
  CDR3 for beta chain variable domain of TCR clone 78474 (TRBV24-1, TRBJ2-7)
CATSDLGPYEQYF

SEQ ID NO: 156949 - protein, 14 aa, Homo sapiens
  CDR3 for alpha chain variable domain of TCR clone 78475 (TRAV27, TRAJ15)
CAGFGNQAGTALIF

SEQ ID NO: 156950 - protein, 11 aa, Homo sapiens
  CDR3 for beta chain variable domain of TCR clone 78475 (TRBV29-1, TRBJ1-1)
CSVEVGTRTFF

SEQ ID NO: 156951 - protein, 16 aa, Homo sapiens
  CDR3 for alpha chain variable domain of TCR clone 78476 (TRAV3, TRAJ10)
CAVRNMRAGGGDKLTF

SEQ ID NO: 156952 - protein, 17 aa, Homo sapiens
  CDR3 for beta chain variable domain of TCR clone 78476 (TRBV20-1, TRBJ2-2)
CSASGSGQGGLTGELFF

SEQ ID NO: 156953 - protein, 12 aa, Homo sapiens
  CDR3 for alpha chain variable domain of TCR clone 78477 (TRAV2, TRAJ9)
CSVGAGGFKTIF

SEQ ID NO: 156954 - protein, 16 aa, Homo sapiens
  CDR3 for beta chain variable domain of TCR clone 78477 (TRBV13, TRBJ2-2)
CASSPRTGEHTGELFF

SEQ ID NO: 156955 - protein, 15 aa, Homo sapiens
  CDR3 for alpha chain variable domain of TCR clone 78478 (TRAV17, TRAJ13)
CATVPDSGGYQKVTF

SEQ ID NO: 156956 - protein, 13 aa, Homo sapiens
  CDR3 for beta chain variable domain of TCR clone 78478 (TRBV3-1, TRBJ1-5)
CASSQAGGQPQHF

SEQ ID NO: 156957 - protein, 12 aa, Homo sapiens
  CDR3 for alpha chain variable domain of TCR clone 78479 (TRAV8-3, TRAJ27)
WAPKTNAGKSTF

SEQ ID NO: 156958 - protein, 15 aa, Homo sapiens
  CDR3 for beta chain variable domain of TCR clone 78479 (TRBV7-2, TRBJ2-1)
CASSSGLAGGNEQFF

SEQ ID NO: 156959 - protein, 15 aa, Homo sapiens
  CDR3 for alpha chain variable domain of TCR clone 78480 (TRAV13-1, TRAJ32)
CAASIYGGATNKLIF

SEQ ID NO: 156960 - protein, 14 aa, Homo sapiens
  CDR3 for beta chain variable domain of TCR clone 78480 (TRBV7-9, TRBJ2-1)
CASGLASGSNEQFF

SEQ ID NO: 156961 - protein, 15 aa, Homo sapiens
  CDR3 for alpha chain variable domain of TCR clone 78481 (TRAV8-3, TRAJ45)
CASSYSGGGADGLTF

SEQ ID NO: 156962 - protein, 13 aa, Homo sapiens
  CDR3 for beta chain variable domain of TCR clone 78481 (TRBV10-3, TRBJ2-7)
CASKLAVNYEQYF

SEQ ID NO: 156963 - protein, 13 aa, Homo sapiens
  CDR3 for alpha chain variable domain of TCR clone 78482 (TRAV8-2, TRAJ43)
CVVSDQRDNDMRF

SEQ ID NO: 156964 - protein, 12 aa, Homo sapiens
  CDR3 for beta chain variable domain of TCR clone 78482 (TRBV7-9, TRBJ2-7)
CASRTGFDEQYF

SEQ ID NO: 156965 - protein, 14 aa, Homo sapiens
  CDR3 for alpha chain variable domain of TCR clone 78483 (TRAV8-1, TRAJ5)
CAVRTDTGRRAPTF

SEQ ID NO: 156966 - protein, 14 aa, Homo sapiens
  CDR3 for beta chain variable domain of TCR clone 78483 (TRBV5-5, TRBJ1-2)
CASSLDPYNYGYTF

SEQ ID NO: 156967 - protein, 15 aa, Homo sapiens
  CDR3 for alpha chain variable domain of TCR clone 78484 (TRAV8-3, TRAJ40)
CAAPSLGSGTYRYIF

SEQ ID NO: 156968 - protein, 16 aa, Homo sapiens
  CDR3 for beta chain variable domain of TCR clone 78484 (TRBV7-3, TRBJ2-3)
CASSLSGYRPGDTQYF

SEQ ID NO: 156969 - protein, 13 aa, Homo sapiens
  CDR3 for alpha chain variable domain of TCR clone 78485 (TRAV17, TRAJ54)
CATVIQGAQKLVF

SEQ ID NO: 156970 - protein, 15 aa, Homo sapiens
  CDR3 for beta chain variable domain of TCR clone 78485 (TRBV13, TRBJ2-1)
CASILLSGLNNEQFF

SEQ ID NO: 156971 - protein, 15 aa, Homo sapiens
  CDR3 for alpha chain variable domain of TCR clone 78486 (TRAV26-1, TRAJ23)
CIVRVLDNQGGKLIF

SEQ ID NO: 156972 - protein, 15 aa, Homo sapiens
  CDR3 for beta chain variable domain of TCR clone 78486 (TRBV7-3, TRBJ2-1)
CASSFGQSNYNEQFF

SEQ ID NO: 156973 - protein, 12 aa, Homo sapiens
  CDR3 for alpha chain variable domain of TCR clone 78487 (TRAV2, TRAJ33)
CAFMDSNYQLIW

SEQ ID NO: 156974 - protein, 16 aa, Homo sapiens
  CDR3 for beta chain variable domain of TCR clone 78487 (TRBV2, TRBJ2-7)
CASSEPWTGPSYERYF

SEQ ID NO: 156975 - protein, 14 aa, Homo sapiens
  CDR3 for alpha chain variable domain of TCR clone 78488 (TRAV2, TRAJ37)
CAVDFTSNTGKLIF

SEQ ID NO: 156976 - protein, 11 aa, Homo sapiens
  CDR3 for beta chain variable domain of TCR clone 78488 (TRBV12-4, TRBJ1-6)
CASSSNSPLHF

SEQ ID NO: 156977 - protein, 14 aa, Homo sapiens
  CDR3 for alpha chain variable domain of TCR clone 78489 (TRAV1-2, TRAJ16)
CAVNRFSDGQKLLF

SEQ ID NO: 156978 - protein, 12 aa, Homo sapiens
  CDR3 for beta chain variable domain of TCR clone 78489 (TRBV11-2, TRBJ2-7)
CASSLPTYEQYF

SEQ ID NO: 156979 - protein, 15 aa, Homo sapiens
  CDR3 for alpha chain variable domain of TCR clone 78490 (TRAV26-1, TRAJ29)
CIVRVEGSGSTPLVF

SEQ ID NO: 156980 - protein, 15 aa, Homo sapiens
  CDR3 for beta chain variable domain of TCR clone 78490 (TRBV7-9, TRBJ1-5)
CAGSQGHQPNQPQHF

SEQ ID NO: 156981 - protein, 11 aa, Homo sapiens
  CDR3 for alpha chain variable domain of TCR clone 78491 (TRAV17, TRAJ9)
CATTGGFKTIF

SEQ ID NO: 156982 - protein, 14 aa, Homo sapiens
  CDR3 for beta chain variable domain of TCR clone 78491 (TRBV7-9, TRBJ2-2)
CSSSGLADTGELFF

SEQ ID NO: 156983 - protein, 17 aa, Homo sapiens
  CDR3 for alpha chain variable domain of TCR clone 78492 (TRAV8-1, TRAJ43)
RAVTNDMRFGAGTRLTV

SEQ ID NO: 156984 - protein, 15 aa, Homo sapiens
  CDR3 for beta chain variable domain of TCR clone 78492 (TRBV4-1, TRBJ1-4)
CASSDTGGTNEKLFF

SEQ ID NO: 156985 - protein, 16 aa, Homo sapiens
  CDR3 for alpha chain variable domain of TCR clone 78493 (TRAV3, TRAJ6)
CAVGDGMGRRKLHTYI

SEQ ID NO: 156986 - protein, 15 aa, Homo sapiens
  CDR3 for beta chain variable domain of TCR clone 78493 (TRBV5-1, TRBJ2-7)
CASSLGDFTTYEQYF

SEQ ID NO: 156987 - protein, 12 aa, Homo sapiens
  CDR3 for alpha chain variable domain of TCR clone 78494 (TRAV13-2, TRAJ23)
CAERHRGGKLIF

SEQ ID NO: 156988 - protein, 19 aa, Homo sapiens
  CDR3 for beta chain variable domain of TCR clone 78494 (TRBV25-1, TRBJ2-2)
CAILVYRVDRGRKTGELFF

SEQ ID NO: 156989 - protein, 15 aa, Homo sapiens
  CDR3 for alpha chain variable domain of TCR clone 78495 (TRAV8-3, TRAJ45)
CASSYSGGGADGLTF

SEQ ID NO: 156990 - protein, 17 aa, Homo sapiens
  CDR3 for beta chain variable domain of TCR clone 78495 (TRBV7-8, TRBJ1-2)
CASSLRPLQGHFYGYTF

SEQ ID NO: 156991 - protein, 14 aa, Homo sapiens
  CDR3 for alpha chain variable domain of TCR clone 78496 (TRAV3, TRAJ21)
CAVESQANFNTFYF

SEQ ID NO: 156992 - protein, 18 aa, Homo sapiens
  CDR3 for beta chain variable domain of TCR clone 78496 (TRBV7-9, TRBJ2-1)
CASSLAVSGTSGRNEQFF

SEQ ID NO: 156993 - protein, 12 aa, Homo sapiens
  CDR3 for alpha chain variable domain of TCR clone 78497 (TRAV24, TRAJ40)
CAFMPGTYKYIF

SEQ ID NO: 156994 - protein, 11 aa, Homo sapiens
  CDR3 for beta chain variable domain of TCR clone 78497 (TRBV10-1, TRBJ2-3)
CASSESDTQYF

SEQ ID NO: 156995 - protein, 13 aa, Homo sapiens
  CDR3 for alpha chain variable domain of TCR clone 78498 (TRAV8-3, TRAJ43)
CAVGPDNNNDMCF

SEQ ID NO: 156996 - protein, 12 aa, Homo sapiens
  CDR3 for beta chain variable domain of TCR clone 78498 (TRBV7-2, TRBJ1-6)
CASSLSSSPLHF

SEQ ID NO: 156997 - protein, 13 aa, Homo sapiens
  CDR3 for alpha chain variable domain of TCR clone 78499 (TRAV21, TRAJ20)
CAVGLRVDYKLSF

SEQ ID NO: 156998 - protein, 13 aa, Homo sapiens
  CDR3 for beta chain variable domain of TCR clone 78499 (TRBV3-1, TRBJ1-1)
CASSPGVITEAFF

SEQ ID NO: 156999 - protein, 13 aa, Homo sapiens
  CDR3 for alpha chain variable domain of TCR clone 78500 (TRAV13-1, TRAJ39)
CSKYSNAGNMLTF

SEQ ID NO: 157000 - protein, 16 aa, Homo sapiens
  CDR3 for beta chain variable domain of TCR clone 78500 (TRBV20-1, TRBJ1-4)
RSAPGQGLLTNEKLFF

SEQ ID NO: 157001 - protein, 14 aa, Homo sapiens
  CDR3 for alpha chain variable domain of TCR clone 78501 (TRAV23/DV6, TRAJ37)
CAASTSSNTGKLTF

SEQ ID NO: 157002 - protein, 13 aa, Homo sapiens
  CDR3 for beta chain variable domain of TCR clone 78501 (TRBV7-7, TRBJ1-1)
CASSLGANTEAFF

SEQ ID NO: 157003 - protein, 13 aa, Homo sapiens
  CDR3 for alpha chain variable domain of TCR clone 78502 (TRAV12-1, TRAJ33)
CGDAPDSNYQLTW

SEQ ID NO: 157004 - protein, 12 aa, Homo sapiens
  CDR3 for beta chain variable domain of TCR clone 78502 (TRBV11-2, TRBJ2-2)
CASSLGGGELFF

SEQ ID NO: 157005 - protein, 15 aa, Homo sapiens
  CDR3 for alpha chain variable domain of TCR clone 78503 (TRAV8-3, TRAJ7)
CAVGSISYGNNRLAF

SEQ ID NO: 157006 - protein, 15 aa, Homo sapiens
  CDR3 for beta chain variable domain of TCR clone 78503 (TRBV4-2, TRBJ1-1)
CASSQEDLPRTEALF

SEQ ID NO: 157007 - protein, 11 aa, Homo sapiens
  CDR3 for alpha chain variable domain of TCR clone 78504 (TRAV2, TRAJ13)
CASVGYQKVTF

SEQ ID NO: 157008 - protein, 20 aa, Homo sapiens
  CDR3 for beta chain variable domain of TCR clone 78504 (TRBV28, TRBJ2-1)
CASTPIGRSPGLAGGNEQFF

SEQ ID NO: 157009 - protein, 12 aa, Homo sapiens
  CDR3 for alpha chain variable domain of TCR clone 78505 (TRAV21, TRAJ31)
CAVSPARGRLVF

SEQ ID NO: 157010 - protein, 14 aa, Homo sapiens
  CDR3 for beta chain variable domain of TCR clone 78505 (TRBV28, TRBJ2-7)
CASSLLRISYEQYF

SEQ ID NO: 157011 - protein, 15 aa, Homo sapiens
  CDR3 for alpha chain variable domain of TCR clone 78506 (TRAV1-2, TRAJ30)
CAVRPHGNRDDKIIS

SEQ ID NO: 157012 - protein, 13 aa, Homo sapiens
  CDR3 for beta chain variable domain of TCR clone 78506 (TRBV4-1, TRBJ2-7)
CASSQGQAYEQYF

SEQ ID NO: 157013 - protein, 12 aa, Homo sapiens
  CDR3 for alpha chain variable domain of TCR clone 78507 (TRAV12-3, TRAJ17)
CAMTLTGNKLTF

SEQ ID NO: 157014 - protein, 14 aa, Homo sapiens
  CDR3 for beta chain variable domain of TCR clone 78507 (TRBV18, TRBJ2-7)
CASAPRGGAYEQYF

SEQ ID NO: 157015 - protein, 12 aa, Homo sapiens
  CDR3 for alpha chain variable domain of TCR clone 78508 (TRAV30, TRAJ43)
CGTEERGNDMRF

SEQ ID NO: 157016 - protein, 13 aa, Homo sapiens
  CDR3 for beta chain variable domain of TCR clone 78508 (TRBV7-9, TRBJ2-3)
CAGSPGSTDTQYF

SEQ ID NO: 157017 - protein, 12 aa, Homo sapiens
  CDR3 for alpha chain variable domain of TCR clone 78509 (TRAV3, TRAJ43)
CAVRDPNNDMRF

SEQ ID NO: 157018 - protein, 15 aa, Homo sapiens
  CDR3 for beta chain variable domain of TCR clone 78509 (TRBV27, TRBJ1-5)
CASSLGTGFDQAQHF

SEQ ID NO: 157019 - protein, 14 aa, Homo sapiens
  CDR3 for alpha chain variable domain of TCR clone 78510 (TRAV13-1, TRAJ44)
CAAKATGTASKLTF

SEQ ID NO: 157020 - protein, 15 aa, Homo sapiens
  CDR3 for beta chain variable domain of TCR clone 78510 (TRBV7-9, TRBJ1-5)
CASSQGHQPNQPQHF

SEQ ID NO: 157021 - protein, 15 aa, Homo sapiens
  CDR3 for alpha chain variable domain of TCR clone 78511 (TRAV13-1, TRAJ32)
CAASIYGVATNKLIF

SEQ ID NO: 157022 - protein, 17 aa, Homo sapiens
  CDR3 for beta chain variable domain of TCR clone 78511 (TRBV7-3, TRBJ2-5)
CASSLGSGRSGSETQYF

SEQ ID NO: 157023 - protein, 13 aa, Homo sapiens
  CDR3 for alpha chain variable domain of TCR clone 78512 (TRAV23/DV6, TRAJ47)
CAASMKRGNKLVF

SEQ ID NO: 157024 - protein, 14 aa, Homo sapiens
  CDR3 for beta chain variable domain of TCR clone 78512 (TRBV7-3, TRBJ1-1)
CASSLKGGNTEAFF

SEQ ID NO: 157025 - protein, 13 aa, Homo sapiens
  CDR3 for alpha chain variable domain of TCR clone 78513 (TRAV16, TRAJ11)
CALTQSGYSTLTF

SEQ ID NO: 157026 - protein, 14 aa, Homo sapiens
  CDR3 for beta chain variable domain of TCR clone 78513 (TRBV19, TRBJ2-7)
CVSSTTRSSYEQYF

SEQ ID NO: 157027 - protein, 14 aa, Homo sapiens
  CDR3 for alpha chain variable domain of TCR clone 78514 (TRAV8-6, TRAJ12)
CAVKAADSSYKLIF

SEQ ID NO: 157028 - protein, 15 aa, Homo sapiens
  CDR3 for beta chain variable domain of TCR clone 78514 (TRBV5-1, TRBJ2-5)
CASSLGLAGQETQYF

SEQ ID NO: 157029 - protein, 11 aa, Homo sapiens
  CDR3 for alpha chain variable domain of TCR clone 78515 (TRAV12-3, TRAJ27)
CAMANAGKSTF

SEQ ID NO: 157030 - protein, 14 aa, Homo sapiens
  CDR3 for beta chain variable domain of TCR clone 78515 (TRBV7-2, TRBJ2-7)
CASRSQGAAYEQYF

SEQ ID NO: 157031 - protein, 15 aa, Homo sapiens
  CDR3 for alpha chain variable domain of TCR clone 78516 (TRAV21, TRAJ53)
CATLNSGGSNYKLTF

SEQ ID NO: 157032 - protein, 13 aa, Homo sapiens
  CDR3 for beta chain variable domain of TCR clone 78516 (TRBV7-9, TRBJ2-4)
CATEGLAGNIQYF

SEQ ID NO: 157033 - protein, 14 aa, Homo sapiens
  CDR3 for alpha chain variable domain of TCR clone 78517 (TRAV13-1, TRAJ47)
CAASIQEYGNKLVF

SEQ ID NO: 157034 - protein, 13 aa, Homo sapiens
  CDR3 for beta chain variable domain of TCR clone 78517 (TRBV25-1, TRBJ1-1)
CASSGQVRAEAFF

SEQ ID NO: 157035 - protein, 11 aa, Homo sapiens
  CDR3 for alpha chain variable domain of TCR clone 78518 (TRAV2, TRAJ33)
CAVESNYQLIW

SEQ ID NO: 157036 - protein, 12 aa, Homo sapiens
  CDR3 for beta chain variable domain of TCR clone 78518 (TRBV6-5, TRBJ1-2)
CASTDPGYGYTF

SEQ ID NO: 157037 - protein, 14 aa, Homo sapiens
  CDR3 for alpha chain variable domain of TCR clone 78519 (TRAV2, TRAJ37)
CAVDFTSNTGKLTF

SEQ ID NO: 157038 - protein, 20 aa, Homo sapiens
  CDR3 for beta chain variable domain of TCR clone 78519 (TRBV7-8, TRBJ2-2)
CASSHLFPGPTIHITGELFF

SEQ ID NO: 157039 - protein, 15 aa, Homo sapiens
  CDR3 for alpha chain variable domain of TCR clone 78520 (TRAV25, TRAJ53)
CPTSNSGGSNYKRTF

SEQ ID NO: 157040 - protein, 14 aa, Homo sapiens
  CDR3 for beta chain variable domain of TCR clone 78520 (TRBV11-2, TRBJ2-3)
CASSRLARTDTQYF

SEQ ID NO: 157041 - protein, 15 aa, Homo sapiens
  CDR3 for alpha chain variable domain of TCR clone 78521 (TRAV17, TRAJ35)
CATAFVIGFGNVLHC

SEQ ID NO: 157042 - protein, 15 aa, Homo sapiens
  CDR3 for beta chain variable domain of TCR clone 78521 (TRBV7-9, TRBJ2-7)
CASSLALAEAYEQYV

SEQ ID NO: 157043 - protein, 14 aa, Homo sapiens
  CDR3 for alpha chain variable domain of TCR clone 78522 (TRAV26-1, TRAJ38)
CIADNAGNNRKLIW

SEQ ID NO: 157044 - protein, 14 aa, Homo sapiens
  CDR3 for beta chain variable domain of TCR clone 78522 (TRBV7-2, TRBJ1-1)
CASSFLTGTTEAFF

SEQ ID NO: 157045 - protein, 13 aa, Homo sapiens
  CDR3 for alpha chain variable domain of TCR clone 78523 (TRAV12-2, TRAJ11)
GAVPNSGYSTLTF

SEQ ID NO: 157046 - protein, 14 aa, Homo sapiens
  CDR3 for beta chain variable domain of TCR clone 78523 (TRBV4-1, TRBJ2-2)
CASSQAVNTGELFF

SEQ ID NO: 157047 - protein, 13 aa, Homo sapiens
  CDR3 for alpha chain variable domain of TCR clone 78524 (TRAV21, TRAJ11)
CAVPNSGYSTLTF

SEQ ID NO: 157048 - protein, 13 aa, Homo sapiens
  CDR3 for beta chain variable domain of TCR clone 78524 (TRBV7-2, TRBJ1-1)
CASNLKGAKVAFS

SEQ ID NO: 157049 - protein, 14 aa, Homo sapiens
  CDR3 for alpha chain variable domain of TCR clone 78525 (TRAV4, TRAJ10)
CLVGDTGGRNKLTF

SEQ ID NO: 157050 - protein, 13 aa, Homo sapiens
  CDR3 for beta chain variable domain of TCR clone 78525 (TRBV10-2, TRBJ2-5)
CASSVGPQETQYF

SEQ ID NO: 157051 - protein, 12 aa, Homo sapiens
  CDR3 for alpha chain variable domain of TCR clone 78526 (TRAV17, TRAJ20)
CATDSNDYKLSF

SEQ ID NO: 157052 - protein, 16 aa, Homo sapiens
  CDR3 for beta chain variable domain of TCR clone 78526 (TRBV7-2, TRBJ1-2)
CASSSNQDRRGHGDTF

SEQ ID NO: 157053 - protein, 13 aa, Homo sapiens
  CDR3 for alpha chain variable domain of TCR clone 78527 (TRAV36/DV7, TRAJ54)
CAVDIQGAQKLVF

SEQ ID NO: 157054 - protein, 14 aa, Homo sapiens
  CDR3 for beta chain variable domain of TCR clone 78527 (TRBV7-3, TRBJ2-1)
CASSLSGSYNEQFF

SEQ ID NO: 157055 - protein, 11 aa, Homo sapiens
  CDR3 for alpha chain variable domain of TCR clone 78528 (TRAV12-1, TRAJ43)
CVEYDNNDVRF

SEQ ID NO: 157056 - protein, 16 aa, Homo sapiens
  CDR3 for beta chain variable domain of TCR clone 78528 (TRBV5-4, TRBJ2-1)
CASSLVGSGQDNEQFF

SEQ ID NO: 157057 - protein, 14 aa, Homo sapiens
  CDR3 for alpha chain variable domain of TCR clone 78529 (TRAV14/DV4, TRAJ15)
CAMRRDQAGTALIF

SEQ ID NO: 157058 - protein, 14 aa, Homo sapiens
  CDR3 for beta chain variable domain of TCR clone 78529 (TRBV19, TRBJ2-3)
CASSVGRGSDTQYF

SEQ ID NO: 157059 - protein, 16 aa, Homo sapiens
  CDR3 for alpha chain variable domain of TCR clone 78530 (TRAV3, TRAJ37)
CAVRPHGSGNAGKLIF

SEQ ID NO: 157060 - protein, 13 aa, Homo sapiens
  CDR3 for beta chain variable domain of TCR clone 78530 (TRBV2, TRBJ1-5)
CASGTGGYQPQHF

SEQ ID NO: 157061 - protein, 14 aa, Homo sapiens
  CDR3 for alpha chain variable domain of TCR clone 78531 (TRAV3, TRAJ28)
CAVRRGAGSYQLTF

SEQ ID NO: 157062 - protein, 16 aa, Homo sapiens
  CDR3 for beta chain variable domain of TCR clone 78531 (TRBV4-1, TRBJ2-7)
CASSQAWTSGPLEQYF

SEQ ID NO: 157063 - protein, 14 aa, Homo sapiens
  CDR3 for alpha chain variable domain of TCR clone 78532 (TRAV12-1, TRAJ42)
CVVIYGGSHGNLIF

SEQ ID NO: 157064 - protein, 13 aa, Homo sapiens
  CDR3 for beta chain variable domain of TCR clone 78532 (TRBV18, TRBJ2-5)
CASSPPGKETQYF

SEQ ID NO: 157065 - protein, 16 aa, Homo sapiens
  CDR3 for alpha chain variable domain of TCR clone 78533 (TRAV3, TRAJ23)
CAVKIGIYNQGGKLIF

SEQ ID NO: 157066 - protein, 15 aa, Homo sapiens
  CDR3 for beta chain variable domain of TCR clone 78533 (TRBV6-3, TRBJ2-7)
CASSSPGTVFYEQYF

SEQ ID NO: 157067 - protein, 14 aa, Homo sapiens
  CDR3 for alpha chain variable domain of TCR clone 78534 (TRAV13-2, TRAJ43)
CAEIPTYNNNDMRF

SEQ ID NO: 157068 - protein, 15 aa, Homo sapiens
  CDR3 for beta chain variable domain of TCR clone 78534 (TRBV7-9, TRBJ1-6)
CASSSPGRGNSPLHF

SEQ ID NO: 157069 - protein, 12 aa, Homo sapiens
  CDR3 for alpha chain variable domain of TCR clone 78535 (TRAV17, TRAJ49)
CATVTTGNQVYF

SEQ ID NO: 157070 - protein, 18 aa, Homo sapiens
  CDR3 for beta chain variable domain of TCR clone 78535 (TRBV11-2, TRBJ2-6)
CASSLNPFLGTGANVLTF

SEQ ID NO: 157071 - protein, 14 aa, Homo sapiens
  CDR3 for alpha chain variable domain of TCR clone 78536 (TRAV23/DV6, TRAJ4)
CAANLSGGYNKLIF

SEQ ID NO: 157072 - protein, 17 aa, Homo sapiens
  CDR3 for beta chain variable domain of TCR clone 78536 (TRBV4-1, TRBJ1-3)
CASSPQRGIRSGNTIYF

SEQ ID NO: 157073 - protein, 15 aa, Homo sapiens
  CDR3 for alpha chain variable domain of TCR clone 78537 (TRAV3, TRAJ5)
CAVRDLDTGRRALTF

SEQ ID NO: 157074 - protein, 16 aa, Homo sapiens
  CDR3 for beta chain variable domain of TCR clone 78537 (TRBV2, TRBJ2-3)
CASSTSVEGVTDTQYF

SEQ ID NO: 157075 - protein, 17 aa, Homo sapiens
  CDR3 for alpha chain variable domain of TCR clone 78538 (TRAV3, TRAJ6)
CAVRDGPRAGGSYIPTF

SEQ ID NO: 157076 - protein, 13 aa, Homo sapiens
  CDR3 for beta chain variable domain of TCR clone 78538 (TRBV12-4, TRBJ2-5)
CASSPGTEETQYF

SEQ ID NO: 157077 - protein, 13 aa, Homo sapiens
  CDR3 for alpha chain variable domain of TCR clone 78539 (TRAV27, TRAJ45)
CRSLGGGADGLTF

SEQ ID NO: 157078 - protein, 17 aa, Homo sapiens
  CDR3 for beta chain variable domain of TCR clone 78539 (TRBV11-2, TRBJ2-1)
CASSLYPPGVEYNEQLF

SEQ ID NO: 157079 - protein, 15 aa, Homo sapiens
  CDR3 for alpha chain variable domain of TCR clone 78540 (TRAV2, TRAJ24)
CAVEVLTDSWGKFQF

SEQ ID NO: 157080 - protein, 20 aa, Homo sapiens
  CDR3 for beta chain variable domain of TCR clone 78540 (TRBV28, TRBJ2-1)
CASTPIGRSPGLAGGNEQFF

SEQ ID NO: 157081 - protein, 14 aa, Homo sapiens
  CDR3 for alpha chain variable domain of TCR clone 78541 (TRAV12-2, TRAJ13)
CAVKKTGGYQKVTF

SEQ ID NO: 157082 - protein, 12 aa, Homo sapiens
  CDR3 for beta chain variable domain of TCR clone 78541 (TRBV28, TRBJ2-6)
CAIQAGANVLTF

SEQ ID NO: 157083 - protein, 13 aa, Homo sapiens
  CDR3 for alpha chain variable domain of TCR clone 78542 (TRAV35, TRAJ42)
CAGFPGSQGNLIF

SEQ ID NO: 157084 - protein, 12 aa, Homo sapiens
  CDR3 for beta chain variable domain of TCR clone 78542 (TRBV11-2, TRBJ2-1)
CASSPGNNEQFF

SEQ ID NO: 157085 - protein, 16 aa, Homo sapiens
  CDR3 for alpha chain variable domain of TCR clone 78543 (TRAV8-3, TRAJ8)
CAVPRDGNTGFPKLVF

SEQ ID NO: 157086 - protein, 14 aa, Homo sapiens
  CDR3 for beta chain variable domain of TCR clone 78543 (TRBV28, TRBJ1-1)
CASSESGRGTEAFF

SEQ ID NO: 157087 - protein, 15 aa, Homo sapiens
  CDR3 for alpha chain variable domain of TCR clone 78544 (TRAV12-3, TRAJ5)
FAMSGLGTGRRALTF

SEQ ID NO: 157088 - protein, 16 aa, Homo sapiens
  CDR3 for beta chain variable domain of TCR clone 78544 (TRBV20-1, TRBJ2-3)
CSARLHSAGAIDTQYF

SEQ ID NO: 157089 - protein, 13 aa, Homo sapiens
  CDR3 for alpha chain variable domain of TCR clone 78545 (TRAV13-1, TRAJ5)
CAARVTGRRALTF

SEQ ID NO: 157090 - protein, 15 aa, Homo sapiens
  CDR3 for beta chain variable domain of TCR clone 78545 (TRBV7-9, TRBJ2-7)
CASSTGGGLTYEQYF

SEQ ID NO: 157091 - protein, 16 aa, Homo sapiens
  CDR3 for alpha chain variable domain of TCR clone 78546 (TRAV30, TRAJ24)
CGTEIVDADSWGKFQF

SEQ ID NO: 157092 - protein, 14 aa, Homo sapiens
  CDR3 for beta chain variable domain of TCR clone 78546 (TRBV11-2, TRBJ2-3)
CASSLGGGANTQYF

SEQ ID NO: 157093 - protein, 14 aa, Homo sapiens
  CDR3 for alpha chain variable domain of TCR clone 78547 (TRAV39, TRAJ42)
CAADIARSQGNLIF

SEQ ID NO: 157094 - protein, 15 aa, Homo sapiens
  CDR3 for beta chain variable domain of TCR clone 78547 (TRBV27, TRBJ2-7)
CASSLFGTGLDEQYF

SEQ ID NO: 157095 - protein, 16 aa, Homo sapiens
  CDR3 for alpha chain variable domain of TCR clone 78548 (TRAV13-1, TRAJ22)
CAAKGGRAGSARQLTF

SEQ ID NO: 157096 - protein, 15 aa, Homo sapiens
  CDR3 for beta chain variable domain of TCR clone 78548 (TRBV9, TRBJ1-6)
CASSVAGTGDSPLHF

SEQ ID NO: 157097 - protein, 16 aa, Homo sapiens
  CDR3 for alpha chain variable domain of TCR clone 78549 (TRAV12-3, TRAJ52)
CAVSSAGGTSYGKLTF

SEQ ID NO: 157098 - protein, 16 aa, Homo sapiens
  CDR3 for beta chain variable domain of TCR clone 78549 (TRBV6-6, TRBJ2-1)
CASSYSFSGSYNEQFF

SEQ ID NO: 157099 - protein, 14 aa, Homo sapiens
  CDR3 for alpha chain variable domain of TCR clone 78550 (TRAV1-1, TRAJ28)
CAAPSGAGSYQLAF

SEQ ID NO: 157100 - protein, 15 aa, Homo sapiens
  CDR3 for beta chain variable domain of TCR clone 78550 (TRBV7-2, TRBJ1-2)
CASSLVSGGDYGYTF

SEQ ID NO: 157101 - protein, 15 aa, Homo sapiens
  CDR3 for alpha chain variable domain of TCR clone 78551 (TRAV26-2, TRAJ57)
CILRDIRGGSEKLVV

SEQ ID NO: 157102 - protein, 15 aa, Homo sapiens
  CDR3 for beta chain variable domain of TCR clone 78551 (TRBV2, TRBJ2-1)
CASDIGLAGEGEQFF

SEQ ID NO: 157103 - protein, 14 aa, Homo sapiens
  CDR3 for alpha chain variable domain of TCR clone 78552 (TRAV12-3, TRAJ15)
CAMIPPQAGTAPIF

SEQ ID NO: 157104 - protein, 12 aa, Homo sapiens
  CDR3 for beta chain variable domain of TCR clone 78552 (TRBV11-2, TRBJ2-2)
CASSLGGGELFF

SEQ ID NO: 157105 - protein, 16 aa, Homo sapiens
  CDR3 for alpha chain variable domain of TCR clone 78553 (TRAV12-3, TRAJ53)
CAMSQGSGGSNYKLTF

SEQ ID NO: 157106 - protein, 16 aa, Homo sapiens
  CDR3 for beta chain variable domain of TCR clone 78553 (TRBV4-2, TRBJ1-1)
CASSQAGFGMNTEAFF

SEQ ID NO: 157107 - protein, 14 aa, Homo sapiens
  CDR3 for alpha chain variable domain of TCR clone 78554 (TRAV12-2, TRAJ13)
CAVKKTGGYQKVTF

SEQ ID NO: 157108 - protein, 15 aa, Homo sapiens
  CDR3 for beta chain variable domain of TCR clone 78554 (TRBV7-8, TRBJ2-7)
CASSLRHFEAYEQYF

SEQ ID NO: 157109 - protein, 14 aa, Homo sapiens
  CDR3 for alpha chain variable domain of TCR clone 78555 (TRAV17, TRAJ16)
CATADFSDGQKLLF

SEQ ID NO: 157110 - protein, 13 aa, Homo sapiens
  CDR3 for beta chain variable domain of TCR clone 78555 (TRBV4-1, TRBJ2-5)
CASSLTRGETQYF

SEQ ID NO: 157111 - protein, 14 aa, Homo sapiens
  CDR3 for alpha chain variable domain of TCR clone 78556 (TRAV26-1, TRAJ22)
CIVRVYCSARQLTF

SEQ ID NO: 157112 - protein, 17 aa, Homo sapiens
  CDR3 for beta chain variable domain of TCR clone 78556 (TRBV7-3, TRBJ2-3)
CASSPGGLAGFGDTQYF

SEQ ID NO: 157113 - protein, 16 aa, Homo sapiens
  CDR3 for alpha chain variable domain of TCR clone 78557 (TRAV30, TRAJ24)
CGTEIVDADSWGKFQF

SEQ ID NO: 157114 - protein, 18 aa, Homo sapiens
  CDR3 for beta chain variable domain of TCR clone 78557 (TRBV12-5, TRBJ2-5)
CASGSHTSRDPVLRARHA

SEQ ID NO: 157115 - protein, 17 aa, Homo sapiens
  CDR3 for alpha chain variable domain of TCR clone 78558 (TRAV4, TRAJ18)
CLVGERSVGSTLGGLYF

SEQ ID NO: 157116 - protein, 18 aa, Homo sapiens
  CDR3 for beta chain variable domain of TCR clone 78558 (TRBV11-2, TRBJ2-3)
CASSLGGASRGAPNTQYF

SEQ ID NO: 157117 - protein, 13 aa, Homo sapiens
  CDR3 for alpha chain variable domain of TCR clone 78559 (TRAV27, TRAJ56)
CAGKPGANSKLKF

SEQ ID NO: 157118 - protein, 18 aa, Homo sapiens
  CDR3 for beta chain variable domain of TCR clone 78559 (TRBV11-2, TRBJ2-3)
CASSLGGASRGAPNTQYF

SEQ ID NO: 157119 - protein, 13 aa, Homo sapiens
  CDR3 for alpha chain variable domain of TCR clone 78560 (TRAV27, TRAJ6)
CAGGTRGSYIPTF

SEQ ID NO: 157120 - protein, 15 aa, Homo sapiens
  CDR3 for beta chain variable domain of TCR clone 78560 (TRBV20-1, TRBJ2-7)
CSARDRVSGMDEQYF

SEQ ID NO: 157121 - protein, 21 aa, Homo sapiens
  CDR3 for alpha chain variable domain of TCR clone 78561 (TRAV1-1, TRAJ6)
CLLLLRCERLERTGGSYIPTF

SEQ ID NO: 157122 - protein, 20 aa, Homo sapiens
  CDR3 for beta chain variable domain of TCR clone 78561 (TRBV19, TRBJ2-1)
CASSISRTVTSTRLNNEQFF

SEQ ID NO: 157123 - protein, 14 aa, Homo sapiens
  CDR3 for alpha chain variable domain of TCR clone 78562 (TRAV36/DV7, TRAJ48)
RAQRRDFGNEKLTF

SEQ ID NO: 157124 - protein, 14 aa, Homo sapiens
  CDR3 for beta chain variable domain of TCR clone 78562 (TRBV28, TRBJ2-4)
CASTQVTGVNIQYF

SEQ ID NO: 157125 - protein, 14 aa, Homo sapiens
  CDR3 for alpha chain variable domain of TCR clone 78563 (TRAV26-1, TRAJ39)
CIVRGSRASNMLTF

SEQ ID NO: 157126 - protein, 15 aa, Homo sapiens
  CDR3 for beta chain variable domain of TCR clone 78563 (TRBV7-9, TRBJ1-5)
CASSQGHQPNQPQHF

SEQ ID NO: 157127 - protein, 13 aa, Homo sapiens
  CDR3 for alpha chain variable domain of TCR clone 78564 (TRAV13-2, TRAJ13)
CAERPGGYQKVTF

SEQ ID NO: 157128 - protein, 15 aa, Homo sapiens
  CDR3 for beta chain variable domain of TCR clone 78564 (TRBV4-1, TRBJ1-2)
CASSQGQGAAYGYTF

SEQ ID NO: 157129 - protein, 13 aa, Homo sapiens
  CDR3 for alpha chain variable domain of TCR clone 78565 (TRAV1-2, TRAJ9)
CAALNTVGFKTIL

SEQ ID NO: 157130 - protein, 13 aa, Homo sapiens
  CDR3 for beta chain variable domain of TCR clone 78565 (TRBV19, TRBJ1-2)
CASSVPGQDGYTF

SEQ ID NO: 157131 - protein, 10 aa, Homo sapiens
  CDR3 for alpha chain variable domain of TCR clone 78566 (TRAV30, TRAJ48)
CGIGNEKLTF

SEQ ID NO: 157132 - protein, 13 aa, Homo sapiens
  CDR3 for beta chain variable domain of TCR clone 78566 (TRBV7-9, TRBJ1-1)
CASSLSGETEAFF

SEQ ID NO: 157133 - protein, 16 aa, Homo sapiens
  CDR3 for alpha chain variable domain of TCR clone 78567 (TRAV8-3, TRAJ38)
CAVGASNAGNNRKLIW

SEQ ID NO: 157134 - protein, 15 aa, Homo sapiens
  CDR3 for beta chain variable domain of TCR clone 78567 (TRBV11-3, TRBJ1-3)
CASSLFGPSGNTTYF

SEQ ID NO: 157135 - protein, 13 aa, Homo sapiens
  CDR3 for alpha chain variable domain of TCR clone 78568 (TRAV3, TRAJ20)
CAVRDTPRYKLSF

SEQ ID NO: 157136 - protein, 16 aa, Homo sapiens
  CDR3 for beta chain variable domain of TCR clone 78568 (TRBV20-1, TRBJ2-7)
CSARAPGLELSYEQYF

SEQ ID NO: 157137 - protein, 18 aa, Homo sapiens
  CDR3 for alpha chain variable domain of TCR clone 78569 (TRAV21, TRAJ52)
CAVRPSPAGGTSYGKLTF

SEQ ID NO: 157138 - protein, 15 aa, Homo sapiens
  CDR3 for beta chain variable domain of TCR clone 78569 (TRBV20-1, TRBJ1-6)
CSARAASSYNSPLHF

SEQ ID NO: 157139 - protein, 19 aa, Homo sapiens
  CDR3 for alpha chain variable domain of TCR clone 78570 (TRAV29/DV5, TRAJ49)
CSVLLCSKLTVDTGNQFYF

SEQ ID NO: 157140 - protein, 16 aa, Homo sapiens
  CDR3 for beta chain variable domain of TCR clone 78570 (TRBV12-5, TRBJ2-5)
CASGPRTSGNQETQYF

SEQ ID NO: 157141 - protein, 13 aa, Homo sapiens
  CDR3 for alpha chain variable domain of TCR clone 78571 (TRAV20, TRAJ21)
CAVEGYNFNKFYF

SEQ ID NO: 157142 - protein, 14 aa, Homo sapiens
  CDR3 for beta chain variable domain of TCR clone 78571 (TRBV3-1, TRBJ2-5)
CASSQGPDQETQYV

SEQ ID NO: 157143 - protein, 15 aa, Homo sapiens
  CDR3 for alpha chain variable domain of TCR clone 78572 (TRAV20, TRAJ23)
CAVQAVRNQGGKLIF

SEQ ID NO: 157144 - protein, 18 aa, Homo sapiens
  CDR3 for beta chain variable domain of TCR clone 78572 (TRBV4-1, TRBJ1-6)
CASSQWDKKIIHPSTLGT

SEQ ID NO: 157145 - protein, 15 aa, Homo sapiens
  CDR3 for alpha chain variable domain of TCR clone 78573 (TRAV35, TRAJ58)
CAGRRQENSGSRLTF

SEQ ID NO: 157146 - protein, 16 aa, Homo sapiens
  CDR3 for beta chain variable domain of TCR clone 78573 (TRBV2, TRBJ2-1)
CASSVGGSLSYNEQFF

SEQ ID NO: 157147 - protein, 14 aa, Homo sapiens
  CDR3 for alpha chain variable domain of TCR clone 78574 (TRAV16, TRAJ40)
CALHESYYLRNLQI

SEQ ID NO: 157148 - protein, 12 aa, Homo sapiens
  CDR3 for beta chain variable domain of TCR clone 78574 (TRBV7-3, TRBJ2-3)
CASSSLTDTQCF

SEQ ID NO: 157149 - protein, 18 aa, Homo sapiens
  CDR3 for alpha chain variable domain of TCR clone 78575 (TRAV21, TRAJ52)
CAVRPSPAGGTSYGTLTF

SEQ ID NO: 157150 - protein, 14 aa, Homo sapiens
  CDR3 for beta chain variable domain of TCR clone 78575 (TRBV12-5, TRBJ2-5)
CASGSRTHQETQYF

SEQ ID NO: 157151 - protein, 14 aa, Homo sapiens
  CDR3 for alpha chain variable domain of TCR clone 78576 (TRAV20, TRAJ10)
CAVRVEGGGNKLTF

SEQ ID NO: 157152 - protein, 13 aa, Homo sapiens
  CDR3 for beta chain variable domain of TCR clone 78576 (TRBV13, TRBJ2-2)
CASSPGLTGGLFF

SEQ ID NO: 157153 - protein, 11 aa, Homo sapiens
  CDR3 for alpha chain variable domain of TCR clone 78577 (TRAV3, TRAJ32)
CAVREGILVVL

SEQ ID NO: 157154 - protein, 13 aa, Homo sapiens
  CDR3 for beta chain variable domain of TCR clone 78577 (TRBV2, TRBJ1-1)
CASSEGGNTEAFF

SEQ ID NO: 157155 - protein, 16 aa, Homo sapiens
  CDR3 for alpha chain variable domain of TCR clone 78578 (TRAV3, TRAJ37)
CAVRPHGSGNTGKLIF

SEQ ID NO: 157156 - protein, 16 aa, Homo sapiens
  CDR3 for beta chain variable domain of TCR clone 78578 (TRBV9, TRBJ1-2)
CASSVEEKVSPCGYTF

SEQ ID NO: 157157 - protein, 15 aa, Homo sapiens
  CDR3 for alpha chain variable domain of TCR clone 78579 (TRAV36/DV7, TRAJ53)
CAVEGSGGSNYKLTF

SEQ ID NO: 157158 - protein, 15 aa, Homo sapiens
  CDR3 for beta chain variable domain of TCR clone 78579 (TRBV11-2, TRBJ2-1)
CASSRNRGLMYEQFF

SEQ ID NO: 157159 - protein, 11 aa, Homo sapiens
  CDR3 for alpha chain variable domain of TCR clone 78580 (TRAV3, TRAJ13)
CAVTSYQKVTF

SEQ ID NO: 157160 - protein, 15 aa, Homo sapiens
  CDR3 for beta chain variable domain of TCR clone 78580 (TRBV7-9, TRBJ2-7)
CASSSSGLSVYEQYF

SEQ ID NO: 157161 - protein, 15 aa, Homo sapiens
  CDR3 for alpha chain variable domain of TCR clone 78581 (TRAV26-1, TRAJ40)
CIVRVTTSGTYKYIF

SEQ ID NO: 157162 - protein, 12 aa, Homo sapiens
  CDR3 for beta chain variable domain of TCR clone 78581 (TRBV7-9, TRBJ1-4)
CASSTDRDKLFF

SEQ ID NO: 157163 - protein, 14 aa, Homo sapiens
  CDR3 for alpha chain variable domain of TCR clone 78582 (TRAV2, TRAJ9)
CAVDPNTGGFKTIF

SEQ ID NO: 157164 - protein, 13 aa, Homo sapiens
  CDR3 for beta chain variable domain of TCR clone 78582 (TRBV20-1, TRBJ2-1)
CSASTGTSNGQFF

SEQ ID NO: 157165 - protein, 15 aa, Homo sapiens
  CDR3 for alpha chain variable domain of TCR clone 78583 (TRAV21, TRAJ53)
CATLNSGGSNYKLTF

SEQ ID NO: 157166 - protein, 16 aa, Homo sapiens
  CDR3 for beta chain variable domain of TCR clone 78583 (TRBV9, TRBJ2-1)
CASSVGGGGNHNEQFF

SEQ ID NO: 157167 - protein, 15 aa, Homo sapiens
  CDR3 for alpha chain variable domain of TCR clone 78584 (TRAV25, TRAJ52)
CAGRPGDTSYGELTF

SEQ ID NO: 157168 - protein, 17 aa, Homo sapiens
  CDR3 for beta chain variable domain of TCR clone 78584 (TRBV7-8, TRBJ2-6)
CASSAGTGGAGANVLTF

SEQ ID NO: 157169 - protein, 14 aa, Homo sapiens
  CDR3 for alpha chain variable domain of TCR clone 78585 (TRAV1-2, TRAJ16)
CAVNRFSDGQKLLF

SEQ ID NO: 157170 - protein, 15 aa, Homo sapiens
  CDR3 for beta chain variable domain of TCR clone 78585 (TRBV19, TRBJ2-5)
CASRGRGSYQETQYF

SEQ ID NO: 157171 - protein, 15 aa, Homo sapiens
  CDR3 for alpha chain variable domain of TCR clone 78586 (TRAV3, TRAJ4)
CAVRDGTGGYNKLIF

SEQ ID NO: 157172 - protein, 16 aa, Homo sapiens
  CDR3 for beta chain variable domain of TCR clone 78586 (TRBV27, TRBJ2-2)
CASSSSGVSSTGELFF

SEQ ID NO: 157173 - protein, 14 aa, Homo sapiens
  CDR3 for alpha chain variable domain of TCR clone 78587 (TRAV2, TRAJ37)
CAVDFTSNTGKLIF

SEQ ID NO: 157174 - protein, 12 aa, Homo sapiens
  CDR3 for beta chain variable domain of TCR clone 78587 (TRBV12-5, TRBJ2-5)
CASGQGVETQYF

SEQ ID NO: 157175 - protein, 15 aa, Homo sapiens
  CDR3 for alpha chain variable domain of TCR clone 78588 (TRAV38-2/DV8, TRAJ37)
CAYRPGSSNTGKLIF

SEQ ID NO: 157176 - protein, 13 aa, Homo sapiens
  CDR3 for beta chain variable domain of TCR clone 78588 (TRBV7-9, TRBJ1-2)
CASSLKQNYGYTF

SEQ ID NO: 157177 - protein, 12 aa, Homo sapiens
  CDR3 for alpha chain variable domain of TCR clone 78589 (TRAV8-4, TRAJ43)
CAVSVNNNDMRF

SEQ ID NO: 157178 - protein, 12 aa, Homo sapiens
  CDR3 for beta chain variable domain of TCR clone 78589 (TRBV14, TRBJ1-1)
CASSQLKGLAFF

SEQ ID NO: 157179 - protein, 14 aa, Homo sapiens
  CDR3 for alpha chain variable domain of TCR clone 78590 (TRAV35, TRAJ22)
CAGLRPGSARQLTF

SEQ ID NO: 157180 - protein, 15 aa, Homo sapiens
  CDR3 for beta chain variable domain of TCR clone 78590 (TRBV20-1, TRBJ2-7)
CSARDQVSGMDEQYF

SEQ ID NO: 157181 - protein, 12 aa, Homo sapiens
  CDR3 for alpha chain variable domain of TCR clone 78591 (TRAV21, TRAJ39)
CAADNAGNMLTF

SEQ ID NO: 157182 - protein, 15 aa, Homo sapiens
  CDR3 for beta chain variable domain of TCR clone 78591 (TRBV12-4, TRBJ1-1)
CASSLAVSRGAEAFF

SEQ ID NO: 157183 - protein, 18 aa, Homo sapiens
  CDR3 for alpha chain variable domain of TCR clone 78592 (TRAV21, TRAJ52)
CAVRPSPAGGTSYGKLTF

SEQ ID NO: 157184 - protein, 13 aa, Homo sapiens
  CDR3 for beta chain variable domain of TCR clone 78592 (TRBV19, TRBJ1-5)
CASSMRGYQPQHF

SEQ ID NO: 157185 - protein, 11 aa, Homo sapiens
  CDR3 for alpha chain variable domain of TCR clone 78593 (TRAV12-1, TRAJ34)
CVVNKGRELLF

SEQ ID NO: 157186 - protein, 12 aa, Homo sapiens
  CDR3 for beta chain variable domain of TCR clone 78593 (TRBV2, TRBJ2-1)
CAYGPPGNEQFF

SEQ ID NO: 157187 - protein, 11 aa, Homo sapiens
  CDR3 for alpha chain variable domain of TCR clone 78594 (TRAV17, TRAJ9)
CGFTGGFKTIF

SEQ ID NO: 157188 - protein, 12 aa, Homo sapiens
  CDR3 for beta chain variable domain of TCR clone 78594 (TRBV7-9, TRBJ2-7)
CASSLEGYEQYF

SEQ ID NO: 157189 - protein, 13 aa, Homo sapiens
  CDR3 for alpha chain variable domain of TCR clone 78595 (TRAV22, TRAJ29)
CAVGGSGNTPLVL

SEQ ID NO: 157190 - protein, 13 aa, Homo sapiens
  CDR3 for beta chain variable domain of TCR clone 78595 (TRBV4-2, TRBJ1-1)
CASSQAGNTEAFF

SEQ ID NO: 157191 - protein, 14 aa, Homo sapiens
  CDR3 for alpha chain variable domain of TCR clone 78596 (TRAV3, TRAJ21)
CPVESQANFNKFYF

SEQ ID NO: 157192 - protein, 18 aa, Homo sapiens
  CDR3 for beta chain variable domain of TCR clone 78596 (TRBV7-9, TRBJ2-1)
CASSLAVSGTSGRNEQFF

SEQ ID NO: 157193 - protein, 14 aa, Homo sapiens
  CDR3 for alpha chain variable domain of TCR clone 78597 (TRAV12-2, TRAJ17)
CAALFKAAGNKLTF

SEQ ID NO: 157194 - protein, 14 aa, Homo sapiens
  CDR3 for beta chain variable domain of TCR clone 78597 (TRBV7-2, TRBJ2-7)
CASSPKTSFYEQYF

SEQ ID NO: 157195 - protein, 16 aa, Homo sapiens
  CDR3 for alpha chain variable domain of TCR clone 78598 (TRAV8-3, TRAJ8)
CAVPRDGNTGFQNLVF

SEQ ID NO: 157196 - protein, 15 aa, Homo sapiens
  CDR3 for beta chain variable domain of TCR clone 78598 (TRBV6-1, TRBJ2-6)
CASSSRPSGANVLTF

SEQ ID NO: 157197 - protein, 18 aa, Homo sapiens
  CDR3 for alpha chain variable domain of TCR clone 78599 (TRAV12-3, TRAJ52)
CAMSVGGAGGTSYGKLRF

SEQ ID NO: 157198 - protein, 15 aa, Homo sapiens
  CDR3 for beta chain variable domain of TCR clone 78599 (TRBV27, TRBJ1-6)
CASSFDRGLGSPLHF

SEQ ID NO: 157199 - protein, 12 aa, Homo sapiens
  CDR3 for alpha chain variable domain of TCR clone 78600 (TRAV17, TRAJ57)
CATDGGSEKLVF

SEQ ID NO: 157200 - protein, 13 aa, Homo sapiens
  CDR3 for beta chain variable domain of TCR clone 78600 (TRBV7-9, TRBJ2-7)
CASSFAGAYEQFF

SEQ ID NO: 157201 - protein, 14 aa, Homo sapiens
  CDR3 for alpha chain variable domain of TCR clone 78601 (TRAV12-2, TRAJ40)
CAVMIPSGTYKYIF

SEQ ID NO: 157202 - protein, 14 aa, Homo sapiens
  CDR3 for beta chain variable domain of TCR clone 78601 (TRBV20-1, TRBJ1-1)
CSAQTRIGGTEAFF

SEQ ID NO: 157203 - protein, 13 aa, Homo sapiens
  CDR3 for alpha chain variable domain of TCR clone 78602 (TRAV3, TRAJ20)
CCEAFCNDYKLSF

SEQ ID NO: 157204 - protein, 15 aa, Homo sapiens
  CDR3 for beta chain variable domain of TCR clone 78602 (TRBV18, TRBJ1-1)
CASSPSSWVNTEAFF

SEQ ID NO: 157205 - protein, 15 aa, Homo sapiens
  CDR3 for alpha chain variable domain of TCR clone 78603 (TRAV27, TRAJ45)
CAPVDSVGGADGLTF

SEQ ID NO: 157206 - protein, 15 aa, Homo sapiens
  CDR3 for beta chain variable domain of TCR clone 78603 (TRBV23-1, TRBJ1-5)
CASSQSRGQGWGAYI

SEQ ID NO: 157207 - protein, 14 aa, Homo sapiens
  CDR3 for alpha chain variable domain of TCR clone 78604 (TRAV23/DV6, TRAJ37)
CAASTSSNTGKLIF

SEQ ID NO: 157208 - protein, 16 aa, Homo sapiens
  CDR3 for beta chain variable domain of TCR clone 78604 (TRBV7-9, TRBJ2-1)
CASSDVAGGSYNEQFF

SEQ ID NO: 157209 - protein, 12 aa, Homo sapiens
  CDR3 for alpha chain variable domain of TCR clone 78605 (TRAV21, TRAJ13)
PGPSGGYQKFTF

SEQ ID NO: 157210 - protein, 15 aa, Homo sapiens
  CDR3 for beta chain variable domain of TCR clone 78605 (TRBV7-9, TRBJ1-6)
CASSSPGRGNSPLHF

SEQ ID NO: 157211 - protein, 14 aa, Homo sapiens
  CDR3 for alpha chain variable domain of TCR clone 78606 (TRAV26-1, TRAJ45)
CIEVMGGGADGLTF

SEQ ID NO: 157212 - protein, 13 aa, Homo sapiens
  CDR3 for beta chain variable domain of TCR clone 78606 (TRBV7-6, TRBJ1-2)
CASSLVADYGYTF

SEQ ID NO: 157213 - protein, 11 aa, Homo sapiens
  CDR3 for alpha chain variable domain of TCR clone 78607 (TRAV21, TRAJ11)
CAVNGYSTLTF

SEQ ID NO: 157214 - protein, 14 aa, Homo sapiens
  CDR3 for beta chain variable domain of TCR clone 78607 (TRBV2, TRBJ2-5)
CASSEGSYQETQYF

SEQ ID NO: 157215 - protein, 15 aa, Homo sapiens
  CDR3 for alpha chain variable domain of TCR clone 78608 (TRAV25, TRAJ52)
CEGRPGGTSYGKLTF

SEQ ID NO: 157216 - protein, 17 aa, Homo sapiens
  CDR3 for beta chain variable domain of TCR clone 78608 (TRBV7-8, TRBJ2-6)
CASSAGTGGAGANVLTF

SEQ ID NO: 157217 - protein, 14 aa, Homo sapiens
  CDR3 for alpha chain variable domain of TCR clone 78609 (TRAV35, TRAJ33)
CAGSSQDSNYQIIW

SEQ ID NO: 157218 - protein, 15 aa, Homo sapiens
  CDR3 for beta chain variable domain of TCR clone 78609 (TRBV20-1, TRBJ2-7)
CSAESGTSGAYEQYF

SEQ ID NO: 157219 - protein, 13 aa, Homo sapiens
  CDR3 for alpha chain variable domain of TCR clone 78610 (TRAV21, TRAJ27)
CAARPGNAGKSTF

SEQ ID NO: 157220 - protein, 14 aa, Homo sapiens
  CDR3 for beta chain variable domain of TCR clone 78610 (TRBV7-6, TRBJ2-3)
CASSLGTVTATQYF

SEQ ID NO: 157221 - protein, 12 aa, Homo sapiens
  CDR3 for alpha chain variable domain of TCR clone 78611 (TRAV12-3, TRAJ17)
CAMTLTGNKLTF

SEQ ID NO: 157222 - protein, 15 aa, Homo sapiens
  CDR3 for beta chain variable domain of TCR clone 78611 (TRBV10-2, TRBJ2-6)
CASSEQGTGANVLSF

SEQ ID NO: 157223 - protein, 17 aa, Homo sapiens
  CDR3 for alpha chain variable domain of TCR clone 78612 (TRAV4, TRAJ18)
CLVGERSVGSTLGRLYF

SEQ ID NO: 157224 - protein, 15 aa, Homo sapiens
  CDR3 for beta chain variable domain of TCR clone 78612 (TRBV6-3, TRBJ2-7)
CASSSPGTVFYEQYF

SEQ ID NO: 157225 - protein, 15 aa, Homo sapiens
  CDR3 for alpha chain variable domain of TCR clone 78613 (TRAV8-4, TRAJ39)
CAVSHHRGAGNMLTF

SEQ ID NO: 157226 - protein, 15 aa, Homo sapiens
  CDR3 for beta chain variable domain of TCR clone 78613 (TRBV20-1, TRBJ1-1)
CSARPRQGVPTEAFF

SEQ ID NO: 157227 - protein, 14 aa, Homo sapiens
  CDR3 for alpha chain variable domain of TCR clone 78614 (TRAV2, TRAJ9)
CAVEDRSGGFKTVF

SEQ ID NO: 157228 - protein, 14 aa, Homo sapiens
  CDR3 for beta chain variable domain of TCR clone 78614 (TRBV18, TRBJ2-7)
CASSPRGGAYEQYF

SEQ ID NO: 157229 - protein, 14 aa, Homo sapiens
  CDR3 for alpha chain variable domain of TCR clone 78615 (TRAV12-3, TRAJ10)
SHLPLTGGGNKLTF

SEQ ID NO: 157230 - protein, 13 aa, Homo sapiens
  CDR3 for beta chain variable domain of TCR clone 78615 (TRBV9, TRBJ2-1)
CASSPAGGNEQFF

SEQ ID NO: 157231 - protein, 14 aa, Homo sapiens
  CDR3 for alpha chain variable domain of TCR clone 78616 (TRAV1-2, TRAJ16)
CAVNRFSAGQKLLF

SEQ ID NO: 157232 - protein, 14 aa, Homo sapiens
  CDR3 for beta chain variable domain of TCR clone 78616 (TRBV7-9, TRBJ2-3)
CASSLEDGTDTQYF

SEQ ID NO: 157233 - protein, 15 aa, Homo sapiens
  CDR3 for alpha chain variable domain of TCR clone 78617 (TRAV26-1, TRAJ29)
CIVRVEGSGNTPLVF

SEQ ID NO: 157234 - protein, 15 aa, Homo sapiens
  CDR3 for beta chain variable domain of TCR clone 78617 (TRBV5-1, TRBJ2-3)
CASSVTSGSTDTQYF

SEQ ID NO: 157235 - protein, 19 aa, Homo sapiens
  CDR3 for alpha chain variable domain of TCR clone 78618 (TRAV12-1, TRAJ13)
CVVNKRGEFWGLPESYLWN

SEQ ID NO: 157236 - protein, 17 aa, Homo sapiens
  CDR3 for beta chain variable domain of TCR clone 78618 (TRBV28, TRBJ2-5)
CASSTPEGDALQETQYF

SEQ ID NO: 157237 - protein, 18 aa, Homo sapiens
  CDR3 for alpha chain variable domain of TCR clone 78619 (TRAV21, TRAJ52)
CAVRPSPAGGTSYGKLTF

SEQ ID NO: 157238 - protein, 16 aa, Homo sapiens
  CDR3 for beta chain variable domain of TCR clone 78619 (TRBV7-3, TRBJ2-1)
CASSLEGYRPYNEQFF

SEQ ID NO: 157239 - protein, 16 aa, Homo sapiens
  CDR3 for alpha chain variable domain of TCR clone 78620 (TRAV20, TRAJ10)
CAVLRGLTGGGNKLTF

SEQ ID NO: 157240 - protein, 14 aa, Homo sapiens
  CDR3 for beta chain variable domain of TCR clone 78620 (TRBV19, TRBJ1-5)
CASRAPDSFLSQHS

SEQ ID NO: 157241 - protein, 14 aa, Homo sapiens
  CDR3 for alpha chain variable domain of TCR clone 78621 (TRAV1-2, TRAJ8)
CAVREYTGFQKLVF

SEQ ID NO: 157242 - protein, 15 aa, Homo sapiens
  CDR3 for beta chain variable domain of TCR clone 78621 (TRBV11-3, TRBJ2-3)
CASLKDGREGDTQYF

SEQ ID NO: 157243 - protein, 14 aa, Homo sapiens
  CDR3 for alpha chain variable domain of TCR clone 78622 (TRAV38-1, TRAJ29)
CAFITPSGNTPLVS

SEQ ID NO: 157244 - protein, 14 aa, Homo sapiens
  CDR3 for beta chain variable domain of TCR clone 78622 (TRBV18, TRBJ2-7)
CASSQRGGAYEQYF

SEQ ID NO: 157245 - protein, 18 aa, Homo sapiens
  CDR3 for alpha chain variable domain of TCR clone 78623 (TRAV26-2, TRAJ45)
CILRVDKYSGGGADGRTF

SEQ ID NO: 157246 - protein, 17 aa, Homo sapiens
  CDR3 for beta chain variable domain of TCR clone 78623 (TRBV25-1, TRBJ2-1)
CASSAYGQGRGVYEQFF

SEQ ID NO: 157247 - protein, 14 aa, Homo sapiens
  CDR3 for alpha chain variable domain of TCR clone 78624 (TRAV13-1, TRAJ44)
CAAKATGTASKLTF

SEQ ID NO: 157248 - protein, 16 aa, Homo sapiens
  CDR3 for beta chain variable domain of TCR clone 78624 (TRBV12-4, TRBJ2-5)
CASSFFVRGRQETQYF

SEQ ID NO: 157249 - protein, 18 aa, Homo sapiens
  CDR3 for alpha chain variable domain of TCR clone 78625 (TRAV16, TRAJ45)
CAQASYPPSGGGADGLTF

SEQ ID NO: 157250 - protein, 12 aa, Homo sapiens
  CDR3 for beta chain variable domain of TCR clone 78625 (TRBV11-3, TRBJ2-4)
CASSAGRVIQYF

SEQ ID NO: 157251 - protein, 13 aa, Homo sapiens
  CDR3 for alpha chain variable domain of TCR clone 78626 (TRAV8-3, TRAJ44)
CAVVPGTASKLTL

SEQ ID NO: 157252 - protein, 14 aa, Homo sapiens
  CDR3 for beta chain variable domain of TCR clone 78626 (TRBV11-2, TRBJ2-3)
CASRRLARTDTQYF

SEQ ID NO: 157253 - protein, 13 aa, Homo sapiens
  CDR3 for alpha chain variable domain of TCR clone 78627 (TRAV8-3, TRAJ28)
CAVGAVGSYQLTF

SEQ ID NO: 157254 - protein, 15 aa, Homo sapiens
  CDR3 for beta chain variable domain of TCR clone 78627 (TRBV28, TRBJ2-5)
CASSPGQGSVETQYF

SEQ ID NO: 157255 - protein, 13 aa, Homo sapiens
  CDR3 for alpha chain variable domain of TCR clone 78628 (TRAV17, TRAJ21)
CATDGGNFNKFYF

SEQ ID NO: 157256 - protein, 15 aa, Homo sapiens
  CDR3 for beta chain variable domain of TCR clone 78628 (TRBV27, TRBJ2-1)
CASSNGGGSSNEQFF

SEQ ID NO: 157257 - protein, 15 aa, Homo sapiens
  CDR3 for alpha chain variable domain of TCR clone 78629 (TRAV35, TRAJ50)
CAGQLRKTSYDKEIF

SEQ ID NO: 157258 - protein, 12 aa, Homo sapiens
  CDR3 for beta chain variable domain of TCR clone 78629 (TRBV5-1, TRBJ2-5)
CASSLGLETQYF

SEQ ID NO: 157259 - protein, 14 aa, Homo sapiens
  CDR3 for alpha chain variable domain of TCR clone 78630 (TRAV12-2, TRAJ13)
CAVKKTGGCQKVTF

SEQ ID NO: 157260 - protein, 16 aa, Homo sapiens
  CDR3 for beta chain variable domain of TCR clone 78630 (TRBV12-5, TRBJ2-5)
CASGPRTSGNQETQYF

SEQ ID NO: 157261 - protein, 20 aa, Homo sapiens
  CDR3 for alpha chain variable domain of TCR clone 78631 (TRAV26-1, TRAJ42)
CCVLLHRQTYYGGSQGNLIF

SEQ ID NO: 157262 - protein, 16 aa, Homo sapiens
  CDR3 for beta chain variable domain of TCR clone 78631 (TRBV7-3, TRBJ2-2)
CASSLKRGTLSGEMFF

SEQ ID NO: 157263 - protein, 14 aa, Homo sapiens
  CDR3 for alpha chain variable domain of TCR clone 78632 (TRAV17, TRAJ54)
CATDANQGAQKLVF

SEQ ID NO: 157264 - protein, 12 aa, Homo sapiens
  CDR3 for beta chain variable domain of TCR clone 78632 (TRBV6-3, TRBJ2-1)
CASRGSYNEQFF

SEQ ID NO: 157265 - protein, 10 aa, Homo sapiens
  CDR3 for alpha chain variable domain of TCR clone 78633 (TRAV1-2, TRAJ31)
CAFFDARLMF

SEQ ID NO: 157266 - protein, 16 aa, Homo sapiens
  CDR3 for beta chain variable domain of TCR clone 78633 (TRBV7-6, TRBJ2-7)
CASSGGTGALSYEQYF

SEQ ID NO: 157267 - protein, 14 aa, Homo sapiens
  CDR3 for alpha chain variable domain of TCR clone 78634 (TRAV17, TRAJ40)
CATAITSGTYKYIF

SEQ ID NO: 157268 - protein, 13 aa, Homo sapiens
  CDR3 for beta chain variable domain of TCR clone 78634 (TRBV27, TRBJ2-1)
CASSSGSYNEQFF

SEQ ID NO: 157269 - protein, 12 aa, Homo sapiens
  CDR3 for alpha chain variable domain of TCR clone 78635 (TRAV2, TRAJ10)
CASTGGGNKLTF

SEQ ID NO: 157270 - protein, 15 aa, Homo sapiens
  CDR3 for beta chain variable domain of TCR clone 78635 (TRBV9, TRBJ1-6)
CASSVAGTGDSPLHF

SEQ ID NO: 157271 - protein, 15 aa, Homo sapiens
  CDR3 for alpha chain variable domain of TCR clone 78636 (TRAV17, TRAJ52)
CATEAGGTSCGKLTF

SEQ ID NO: 157272 - protein, 14 aa, Homo sapiens
  CDR3 for beta chain variable domain of TCR clone 78636 (TRBV28, TRBJ1-5)
CASSLGVLVKPQHF

SEQ ID NO: 157273 - protein, 16 aa, Homo sapiens
  CDR3 for alpha chain variable domain of TCR clone 78637 (TRAV12-2, TRAJ28)
CAVITDSGAGSYQLTF

SEQ ID NO: 157274 - protein, 13 aa, Homo sapiens
  CDR3 for beta chain variable domain of TCR clone 78637 (TRBV24-1, TRBJ2-2)
CATSDWSTGELFF

SEQ ID NO: 157275 - protein, 16 aa, Homo sapiens
  CDR3 for alpha chain variable domain of TCR clone 78638 (TRAV26-1, TRAJ23)
CIVRVHPYNQGGKLVF

SEQ ID NO: 157276 - protein, 15 aa, Homo sapiens
  CDR3 for beta chain variable domain of TCR clone 78638 (TRBV5-7, TRBJ2-7)
CASSPYFEGSYEQYF

SEQ ID NO: 157277 - protein, 18 aa, Homo sapiens
  CDR3 for alpha chain variable domain of TCR clone 78639 (TRAV9-2, TRAJ52)
CALSRHNAGGTSYGKLTF

SEQ ID NO: 157278 - protein, 14 aa, Homo sapiens
  CDR3 for beta chain variable domain of TCR clone 78639 (TRBV4-2, TRBJ2-1)
CASGLDRAYNEQFF

SEQ ID NO: 157279 - protein, 14 aa, Homo sapiens
  CDR3 for alpha chain variable domain of TCR clone 78640 (TRAV8-3, TRAJ4)
CAVGAAGGYNKLIF

SEQ ID NO: 157280 - protein, 15 aa, Homo sapiens
  CDR3 for beta chain variable domain of TCR clone 78640 (TRBV5-1, TRBJ2-1)
CASSPPRAPYNGQFF

SEQ ID NO: 157281 - protein, 14 aa, Homo sapiens
  CDR3 for alpha chain variable domain of TCR clone 78641 (TRAV12-2, TRAJ6)
CVPLRPGGSYIPTF

SEQ ID NO: 157282 - protein, 13 aa, Homo sapiens
  CDR3 for beta chain variable domain of TCR clone 78641 (TRBV10-2, TRBJ2-7)
CASGASGGYEQYF

SEQ ID NO: 157283 - protein, 10 aa, Homo sapiens
  CDR3 for alpha chain variable domain of TCR clone 78642 (TRAV2, TRAJ34)
CAAVNDKLIF

SEQ ID NO: 157284 - protein, 15 aa, Homo sapiens
  CDR3 for beta chain variable domain of TCR clone 78642 (TRBV3-1, TRBJ2-2)
CASSQDWTRAGELFF

SEQ ID NO: 157285 - protein, 12 aa, Homo sapiens
  CDR3 for alpha chain variable domain of TCR clone 78643 (TRAV12-1, TRAJ40)
CVVYSGTYKYIF

SEQ ID NO: 157286 - protein, 18 aa, Homo sapiens
  CDR3 for beta chain variable domain of TCR clone 78643 (TRBV11-2, TRBJ2-3)
CASSLGGASRGSPNTQYF

SEQ ID NO: 157287 - protein, 15 aa, Homo sapiens
  CDR3 for alpha chain variable domain of TCR clone 78644 (TRAV8-3, TRAJ11)
CAVGLLNSGYSSLTF

SEQ ID NO: 157288 - protein, 16 aa, Homo sapiens
  CDR3 for beta chain variable domain of TCR clone 78644 (TRBV7-9, TRBJ1-2)
CASSLGFSSGEDGYTF

SEQ ID NO: 157289 - protein, 14 aa, Homo sapiens
  CDR3 for alpha chain variable domain of TCR clone 78645 (TRAV12-3, TRAJ10)
SHLPLTGGGNKLTF

SEQ ID NO: 157290 - protein, 15 aa, Homo sapiens
  CDR3 for beta chain variable domain of TCR clone 78645 (TRBV11-2, TRBJ2-1)
CASSKNRGLIYEQFF

SEQ ID NO: 157291 - protein, 12 aa, Homo sapiens
  CDR3 for alpha chain variable domain of TCR clone 78646 (TRAV16, TRAJ10)
CSRTGGGNKLTF

SEQ ID NO: 157292 - protein, 19 aa, Homo sapiens
  CDR3 for beta chain variable domain of TCR clone 78646 (TRBV4-3, TRBJ2-7)
CISAPAAKQPSGTPYEQYF

SEQ ID NO: 157293 - protein, 14 aa, Homo sapiens
  CDR3 for alpha chain variable domain of TCR clone 78647 (TRAV1-2, TRAJ29)
CAVRELTSATPLVF

SEQ ID NO: 157294 - protein, 14 aa, Homo sapiens
  CDR3 for beta chain variable domain of TCR clone 78647 (TRBV3-1, TRBJ2-5)
CASRQGPDQETQYF

SEQ ID NO: 157295 - protein, 14 aa, Homo sapiens
  CDR3 for alpha chain variable domain of TCR clone 78648 (TRAV12-2, TRAJ6)
CASKWGGGSDIPTF

SEQ ID NO: 157296 - protein, 13 aa, Homo sapiens
  CDR3 for beta chain variable domain of TCR clone 78648 (TRBV2, TRBJ1-1)
CASSEGGNTEAFF

SEQ ID NO: 157297 - protein, 15 aa, Homo sapiens
  CDR3 for alpha chain variable domain of TCR clone 78649 (TRAV38-2/DV8, TRAJ57)
CAYGRVFGKGTKLTV

SEQ ID NO: 157298 - protein, 15 aa, Homo sapiens
  CDR3 for beta chain variable domain of TCR clone 78649 (TRBV27, TRBJ1-5)
CASTFNRGSNQPQHF

SEQ ID NO: 157299 - protein, 13 aa, Homo sapiens
  CDR3 for alpha chain variable domain of TCR clone 78650 (TRAV8-6, TRAJ9)
CAVWATGGFKTIF

SEQ ID NO: 157300 - protein, 14 aa, Homo sapiens
  CDR3 for beta chain variable domain of TCR clone 78650 (TRBV2, TRBJ2-1)
CASSEALIYNEQFF

SEQ ID NO: 157301 - protein, 14 aa, Homo sapiens
  CDR3 for alpha chain variable domain of TCR clone 78651 (TRAV1-2, TRAJ16)
CAVNRFSDGQKLLF

SEQ ID NO: 157302 - protein, 18 aa, Homo sapiens
  CDR3 for beta chain variable domain of TCR clone 78651 (TRBV18, TRBJ2-3)
CASSYTSGAAGGTDTQYF

SEQ ID NO: 157303 - protein, 16 aa, Homo sapiens
  CDR3 for alpha chain variable domain of TCR clone 78652 (TRAV35, TRAJ28)
CAGQKYSGAGSYQLTF

SEQ ID NO: 157304 - protein, 16 aa, Homo sapiens
  CDR3 for beta chain variable domain of TCR clone 78652 (TRBV7-3, TRBJ2-2)
CASSLKRRTLSGELFF

SEQ ID NO: 157305 - protein, 12 aa, Homo sapiens
  CDR3 for alpha chain variable domain of TCR clone 78653 (TRAV12-3, TRAJ17)
CAMTLTGNKLTF

SEQ ID NO: 157306 - protein, 15 aa, Homo sapiens
  CDR3 for beta chain variable domain of TCR clone 78653 (TRBV19, TRBJ2-1)
CASSINREPSHEQFF

SEQ ID NO: 157307 - protein, 13 aa, Homo sapiens
  CDR3 for alpha chain variable domain of TCR clone 78654 (TRAV20, TRAJ37)
CAGCSSNTGKLIF

SEQ ID NO: 157308 - protein, 14 aa, Homo sapiens
  CDR3 for beta chain variable domain of TCR clone 78654 (TRBV4-1, TRBJ2-2)
CASSQAVNTGELFF

SEQ ID NO: 157309 - protein, 14 aa, Homo sapiens
  CDR3 for alpha chain variable domain of TCR clone 78655 (TRAV34, TRAJ44)
CGEDGTGTASKLTF

SEQ ID NO: 157310 - protein, 15 aa, Homo sapiens
  CDR3 for beta chain variable domain of TCR clone 78655 (TRBV5-1, TRBJ2-1)
CASSPPRAPYNEQFF

SEQ ID NO: 157311 - protein, 11 aa, Homo sapiens
  CDR3 for alpha chain variable domain of TCR clone 78656 (TRAV2, TRAJ13)
CASGGYQKVTF

SEQ ID NO: 157312 - protein, 13 aa, Homo sapiens
  CDR3 for beta chain variable domain of TCR clone 78656 (TRBV4-1, TRBJ1-1)
CASSRKMNTEAFF

SEQ ID NO: 157313 - protein, 16 aa, Homo sapiens
  CDR3 for alpha chain variable domain of TCR clone 78657 (TRAV3, TRAJ37)
CAVRPHGSGNTGKLIF

SEQ ID NO: 157314 - protein, 14 aa, Homo sapiens
  CDR3 for beta chain variable domain of TCR clone 78657 (TRBV7-2, TRBJ2-7)
CASSLPPGQGPQYF

SEQ ID NO: 157315 - protein, 15 aa, Homo sapiens
  CDR3 for alpha chain variable domain of TCR clone 78658 (TRAV38-1, TRAJ57)
CAFMDSQGGSEKLVF

SEQ ID NO: 157316 - protein, 13 aa, Homo sapiens
  CDR3 for beta chain variable domain of TCR clone 78658 (TRBV20-1, TRBJ1-1)
CSARGGGNTEAFF

SEQ ID NO: 157317 - protein, 17 aa, Homo sapiens
  CDR3 for alpha chain variable domain of TCR clone 78659 (TRAV3, TRAJ6)
CAVRDGPRAGGSYIPTF

SEQ ID NO: 157318 - protein, 12 aa, Homo sapiens
  CDR3 for beta chain variable domain of TCR clone 78659 (TRBV7-2, TRBJ2-7)
CASSLGDREQYF

SEQ ID NO: 157319 - protein, 13 aa, Homo sapiens
  CDR3 for alpha chain variable domain of TCR clone 78660 (TRAV30, TRAJ34)
CGTVGYNTDKLIF

SEQ ID NO: 157320 - protein, 16 aa, Homo sapiens
  CDR3 for beta chain variable domain of TCR clone 78660 (TRBV7-9, TRBJ1-2)
CASSLGFASGEDGYTF

SEQ ID NO: 157321 - protein, 13 aa, Homo sapiens
  CDR3 for alpha chain variable domain of TCR clone 78661 (TRAV20, TRAJ26)
CAVPTSYGQNFVF

SEQ ID NO: 157322 - protein, 16 aa, Homo sapiens
  CDR3 for beta chain variable domain of TCR clone 78661 (TRBV28, TRBJ2-7)
CASSPPQGRDVYEQYF

SEQ ID NO: 157323 - protein, 15 aa, Homo sapiens
  CDR3 for alpha chain variable domain of TCR clone 78662 (TRAV21, TRAJ24)
CAARSSTDSWGKLQF

SEQ ID NO: 157324 - protein, 13 aa, Homo sapiens
  CDR3 for beta chain variable domain of TCR clone 78662 (TRBV15, TRBJ1-6)
CATSGGLNSPLHF

SEQ ID NO: 157325 - protein, 13 aa, Homo sapiens
  CDR3 for alpha chain variable domain of TCR clone 78663 (TRAV2, TRAJ40)
CAVVTSGTYKYIF

SEQ ID NO: 157326 - protein, 13 aa, Homo sapiens
  CDR3 for beta chain variable domain of TCR clone 78663 (TRBV6-3, TRBJ2-3)
CASEGELKDTQYF

SEQ ID NO: 157327 - protein, 18 aa, Homo sapiens
  CDR3 for alpha chain variable domain of TCR clone 78664 (TRAV21, TRAJ52)
CAVRPSPAGGTSYGKLTF

SEQ ID NO: 157328 - protein, 16 aa, Homo sapiens
  CDR3 for beta chain variable domain of TCR clone 78664 (TRBV4-3, TRBJ2-1)
CASSPALDRGVNEQFF

SEQ ID NO: 157329 - protein, 15 aa, Homo sapiens
  CDR3 for alpha chain variable domain of TCR clone 78665 (TRAV17, TRAJ42)
CATDHYGGSQGNLIF

SEQ ID NO: 157330 - protein, 14 aa, Homo sapiens
  CDR3 for beta chain variable domain of TCR clone 78665 (TRBV4-1, TRBJ2-2)
CASSQAVNTGELFF

SEQ ID NO: 157331 - protein, 13 aa, Homo sapiens
  CDR3 for alpha chain variable domain of TCR clone 78666 (TRAV21, TRAJ45)
CAVMGGGADGLTF

SEQ ID NO: 157332 - protein, 15 aa, Homo sapiens
  CDR3 for beta chain variable domain of TCR clone 78666 (TRBV18, TRBJ2-7)
CASSPRPGTAYEQYF

SEQ ID NO: 157333 - protein, 11 aa, Homo sapiens
  CDR3 for alpha chain variable domain of TCR clone 78667 (TRAV3, TRAJ17)
CAEAAGNKLTL

SEQ ID NO: 157334 - protein, 15 aa, Homo sapiens
  CDR3 for beta chain variable domain of TCR clone 78667 (TRBV12-4, TRBJ2-7)
CASSLGSGGPYEQYF

SEQ ID NO: 157335 - protein, 15 aa, Homo sapiens
  CDR3 for alpha chain variable domain of TCR clone 78668 (TRAV12-1, TRAJ9)
CVVSFGDTGGFKTIF

SEQ ID NO: 157336 - protein, 14 aa, Homo sapiens
  CDR3 for beta chain variable domain of TCR clone 78668 (TRBV12-5, TRBJ2-5)
CASGSRTHQETQYF

SEQ ID NO: 157337 - protein, 15 aa, Homo sapiens
  CDR3 for alpha chain variable domain of TCR clone 78669 (TRAV17, TRAJ56)
CATDANTGANSKLTF

SEQ ID NO: 157338 - protein, 15 aa, Homo sapiens
  CDR3 for beta chain variable domain of TCR clone 78669 (TRBV4-1, TRBJ2-5)
CASSQWDLYQETQYF

SEQ ID NO: 157339 - protein, 15 aa, Homo sapiens
  CDR3 for alpha chain variable domain of TCR clone 78670 (TRAV17, TRAJ18)
CATDLRGSTLGRLYF

SEQ ID NO: 157340 - protein, 15 aa, Homo sapiens
  CDR3 for beta chain variable domain of TCR clone 78670 (TRBV6-1, TRBJ2-3)
CASSERGGITDTQYF

SEQ ID NO: 157341 - protein, 14 aa, Homo sapiens
  CDR3 for alpha chain variable domain of TCR clone 78671 (TRAV13-1, TRAJ35)
CAASKGGFGNVLHC

SEQ ID NO: 157342 - protein, 15 aa, Homo sapiens
  CDR3 for beta chain variable domain of TCR clone 78671 (TRBV11-1, TRBJ2-7)
CASSLNYGASYEQYF

SEQ ID NO: 157343 - protein, 15 aa, Homo sapiens
  CDR3 for alpha chain variable domain of TCR clone 78672 (TRAV35, TRAJ40)
CAGQLGTSGTYKYIF

SEQ ID NO: 157344 - protein, 14 aa, Homo sapiens
  CDR3 for beta chain variable domain of TCR clone 78672 (TRBV7-3, TRBJ2-1)
CASSLAGGTKEQFF

SEQ ID NO: 157345 - protein, 14 aa, Homo sapiens
  CDR3 for alpha chain variable domain of TCR clone 78673 (TRAV1-2, TRAJ8)
CAVREDTGFQKLVF

SEQ ID NO: 157346 - protein, 16 aa, Homo sapiens
  CDR3 for beta chain variable domain of TCR clone 78673 (TRBV9, TRBJ1-2)
CASSVEEKVSPYGYTF

SEQ ID NO: 157347 - protein, 13 aa, Homo sapiens
  CDR3 for alpha chain variable domain of TCR clone 78674 (TRAV20, TRAJ20)
CCAAGYNDYKLSF

SEQ ID NO: 157348 - protein, 13 aa, Homo sapiens
  CDR3 for beta chain variable domain of TCR clone 78674 (TRBV19, TRBJ2-5)
CASSETAPETQYF

SEQ ID NO: 157349 - protein, 12 aa, Homo sapiens
  CDR3 for alpha chain variable domain of TCR clone 78675 (TRAV17, TRAJ30)
CATDARDDKIIF

SEQ ID NO: 157350 - protein, 15 aa, Homo sapiens
  CDR3 for beta chain variable domain of TCR clone 78675 (TRBV19, TRBJ1-1)
CASTSGQIQNTEAFF

SEQ ID NO: 157351 - protein, 14 aa, Homo sapiens
  CDR3 for alpha chain variable domain of TCR clone 78676 (TRAV12-2, TRAJ33)
CAVKRARSNYQLIW

SEQ ID NO: 157352 - protein, 15 aa, Homo sapiens
  CDR3 for beta chain variable domain of TCR clone 78676 (TRBV18, TRBJ1-5)
CASSPSDRSNQPQHF

SEQ ID NO: 157353 - protein, 12 aa, Homo sapiens
  CDR3 for alpha chain variable domain of TCR clone 78677 (TRAV12-1, TRAJ23)
CVVNIPGGKLIF

SEQ ID NO: 157354 - protein, 15 aa, Homo sapiens
  CDR3 for beta chain variable domain of TCR clone 78677 (TRBV7-2, TRBJ2-7)
CASSLVSSGSYVQYF

SEQ ID NO: 157355 - protein, 13 aa, Homo sapiens
  CDR3 for alpha chain variable domain of TCR clone 78678 (TRAV23/DV6, TRAJ27)
CAASKPIQANQPL

SEQ ID NO: 157356 - protein, 14 aa, Homo sapiens
  CDR3 for beta chain variable domain of TCR clone 78678 (TRBV5-4, TRBJ1-1)
CASSLDSRRDEAFF

SEQ ID NO: 157357 - protein, 15 aa, Homo sapiens
  CDR3 for alpha chain variable domain of TCR clone 78679 (TRAV29/DV5, TRAJ42)
CAAKTDVGSQGNLIF

SEQ ID NO: 157358 - protein, 15 aa, Homo sapiens
  CDR3 for beta chain variable domain of TCR clone 78679 (TRBV5-1, TRBJ2-2)
CASSSQGGNTGELFF

SEQ ID NO: 157359 - protein, 12 aa, Homo sapiens
  CDR3 for alpha chain variable domain of TCR clone 78680 (TRAV12-3, TRAJ17)
CAMTLTGNKLTF

SEQ ID NO: 157360 - protein, 15 aa, Homo sapiens
  CDR3 for beta chain variable domain of TCR clone 78680 (TRBV3-1, TRBJ1-2)
CASSPTRLPEGGYTF

SEQ ID NO: 157361 - protein, 18 aa, Homo sapiens
  CDR3 for alpha chain variable domain of TCR clone 78681 (TRAV26-1, TRAJ23)
CIVRVGREVWNQGGKLIF

SEQ ID NO: 157362 - protein, 16 aa, Homo sapiens
  CDR3 for beta chain variable domain of TCR clone 78681 (TRBV12-4, TRBJ2-5)
CASSFFVRGRQETQYF

SEQ ID NO: 157363 - protein, 13 aa, Homo sapiens
  CDR3 for alpha chain variable domain of TCR clone 78682 (TRAV21, TRAJ37)
CAVSSGNTGKLIF

SEQ ID NO: 157364 - protein, 14 aa, Homo sapiens
  CDR3 for beta chain variable domain of TCR clone 78682 (TRBV11-2, TRBJ2-7)
CASSLGAGAYEQDF

SEQ ID NO: 157365 - protein, 14 aa, Homo sapiens
  CDR3 for alpha chain variable domain of TCR clone 78683 (TRAV29/DV5, TRAJ36)
CAARRKTGANNLFF

SEQ ID NO: 157366 - protein, 14 aa, Homo sapiens
  CDR3 for beta chain variable domain of TCR clone 78683 (TRBV12-5, TRBJ2-5)
CASGSRTHQETQSF

SEQ ID NO: 157367 - protein, 15 aa, Homo sapiens
  CDR3 for alpha chain variable domain of TCR clone 78684 (TRAV27, TRAJ38)
CAARRNAGNNRKLIW

SEQ ID NO: 157368 - protein, 13 aa, Homo sapiens
  CDR3 for beta chain variable domain of TCR clone 78684 (TRBV12-5, TRBJ2-3)
SASGDRQSDTQYF

SEQ ID NO: 157369 - protein, 11 aa, Homo sapiens
  CDR3 for alpha chain variable domain of TCR clone 78685 (TRAV3, TRAJ21)
CAVGNFNKFYF

SEQ ID NO: 157370 - protein, 12 aa, Homo sapiens
  CDR3 for beta chain variable domain of TCR clone 78685 (TRBV29-1, TRBJ2-3)
CSVTGGAYTQYF

SEQ ID NO: 157371 - protein, 15 aa, Homo sapiens
  CDR3 for alpha chain variable domain of TCR clone 78686 (TRAV8-3, TRAJ27)
CAVGPSKTNAGKSTF

SEQ ID NO: 157372 - protein, 16 aa, Homo sapiens
  CDR3 for beta chain variable domain of TCR clone 78686 (TRBV12-4, TRBJ2-3)
CASSDSIGASTDTQYF

SEQ ID NO: 157373 - protein, 13 aa, Homo sapiens
  CDR3 for alpha chain variable domain of TCR clone 78687 (TRAV2, TRAJ15)
CAVASQAGTALIF

SEQ ID NO: 157374 - protein, 15 aa, Homo sapiens
  CDR3 for beta chain variable domain of TCR clone 78687 (TRBV12-4, TRBJ2-5)
CASSPPTGLQETQYF

SEQ ID NO: 157375 - protein, 15 aa, Homo sapiens
  CDR3 for alpha chain variable domain of TCR clone 78688 (TRAV3, TRAJ9)
CAVRARNTGGFKTIF

SEQ ID NO: 157376 - protein, 20 aa, Homo sapiens
  CDR3 for beta chain variable domain of TCR clone 78688 (TRBV7-8, TRBJ2-2)
CASSHLFPGPTIHITGELFF

SEQ ID NO: 157377 - protein, 12 aa, Homo sapiens
  CDR3 for alpha chain variable domain of TCR clone 78689 (TRAV2, TRAJ15)
CAVAQAGTALIF

SEQ ID NO: 157378 - protein, 11 aa, Homo sapiens
  CDR3 for beta chain variable domain of TCR clone 78689 (TRBV12-4, TRBJ2-3)
CASTATDTQYF

SEQ ID NO: 157379 - protein, 10 aa, Homo sapiens
  CDR3 for alpha chain variable domain of TCR clone 78690 (TRAV1-2, TRAJ31)
CVSEDARLLF

SEQ ID NO: 157380 - protein, 14 aa, Homo sapiens
  CDR3 for beta chain variable domain of TCR clone 78690 (TRBV19, TRBJ2-1)
CASPTFVLSGEQFF

SEQ ID NO: 157381 - protein, 13 aa, Homo sapiens
  CDR3 for alpha chain variable domain of TCR clone 78691 (TRAV12-2, TRAJ42)
CAVKRGSQGNLIF

SEQ ID NO: 157382 - protein, 12 aa, Homo sapiens
  CDR3 for beta chain variable domain of TCR clone 78691 (TRBV5-7, TRBJ1-2)
CASSLVQNGHTF

SEQ ID NO: 157383 - protein, 12 aa, Homo sapiens
  CDR3 for alpha chain variable domain of TCR clone 78692 (TRAV13-1, TRAJ21)
CAAKEGFNKFYF

SEQ ID NO: 157384 - protein, 15 aa, Homo sapiens
  CDR3 for beta chain variable domain of TCR clone 78692 (TRBV20-1, TRBJ2-7)
CSARDRVSGMGEQYF

SEQ ID NO: 157385 - protein, 12 aa, Homo sapiens
  CDR3 for alpha chain variable domain of TCR clone 78693 (TRAV8-3, TRAJ20)
CAVGANDYKLSF

SEQ ID NO: 157386 - protein, 16 aa, Homo sapiens
  CDR3 for beta chain variable domain of TCR clone 78693 (TRBV19, TRBJ2-2)
CASRSPGRGATGELFF

SEQ ID NO: 157387 - protein, 14 aa, Homo sapiens
  CDR3 for alpha chain variable domain of TCR clone 78694 (TRAV1-2, TRAJ16)
CAVNRFSDRQKLLF

SEQ ID NO: 157388 - protein, 15 aa, Homo sapiens
  CDR3 for beta chain variable domain of TCR clone 78694 (TRBV9, TRBJ1-6)
CASSVAGTGDSPLHF

SEQ ID NO: 157389 - protein, 15 aa, Homo sapiens
  CDR3 for alpha chain variable domain of TCR clone 78695 (TRAV3, TRAJ5)
CAVRDLDTGRRALTF

SEQ ID NO: 157390 - protein, 13 aa, Homo sapiens
  CDR3 for beta chain variable domain of TCR clone 78695 (TRBV7-3, TRBJ1-1)
CASSQDWGAEASF

SEQ ID NO: 157391 - protein, 12 aa, Homo sapiens
  CDR3 for alpha chain variable domain of TCR clone 78696 (TRAV24, TRAJ41)
CAPYDSGYALNF

SEQ ID NO: 157392 - protein, 13 aa, Homo sapiens
  CDR3 for beta chain variable domain of TCR clone 78696 (TRBV7-9, TRBJ1-2)
CASSLKQNYGYTF

SEQ ID NO: 157393 - protein, 13 aa, Homo sapiens
  CDR3 for alpha chain variable domain of TCR clone 78697 (TRAV3, TRAJ27)
CAVRPLGAGKSTF

SEQ ID NO: 157394 - protein, 14 aa, Homo sapiens
  CDR3 for beta chain variable domain of TCR clone 78697 (TRBV23-1, TRBJ2-5)
CASSFLRSQETQYF

SEQ ID NO: 157395 - protein, 14 aa, Homo sapiens
  CDR3 for alpha chain variable domain of TCR clone 78698 (TRAV8-4, TRAJ34)
CAVSDPGDTDKLIF

SEQ ID NO: 157396 - protein, 17 aa, Homo sapiens
  CDR3 for beta chain variable domain of TCR clone 78698 (TRBV4-1, TRBJ2-5)
CASSQDLTGGPIETQYF

SEQ ID NO: 157397 - protein, 13 aa, Homo sapiens
  CDR3 for alpha chain variable domain of TCR clone 78699 (TRAV12-1, TRAJ6)
CVVFPGGSYIPTF

SEQ ID NO: 157398 - protein, 15 aa, Homo sapiens
  CDR3 for beta chain variable domain of TCR clone 78699 (TRBV11-2, TRBJ1-3)
CASSLDGTVGNTIYF

SEQ ID NO: 157399 - protein, 15 aa, Homo sapiens
  CDR3 for alpha chain variable domain of TCR clone 78700 (TRAV8-2, TRAJ40)
CVVLGTTSGTYKYIF

SEQ ID NO: 157400 - protein, 16 aa, Homo sapiens
  CDR3 for beta chain variable domain of TCR clone 78700 (TRBV20-1, TRBJ1-4)
CSARPYGGELNEKLFF

SEQ ID NO: 157401 - protein, 14 aa, Homo sapiens
  CDR3 for alpha chain variable domain of TCR clone 78701 (TRAV23/DV6, TRAJ37)
CAASTSNNTGKLIF

SEQ ID NO: 157402 - protein, 13 aa, Homo sapiens
  CDR3 for beta chain variable domain of TCR clone 78701 (TRBV7-7, TRBJ1-1)
CASSLGANTEAFF

SEQ ID NO: 157403 - protein, 13 aa, Homo sapiens
  CDR3 for alpha chain variable domain of TCR clone 78702 (TRAV1-1, TRAJ9)
CAAKNTGGFKTIF

SEQ ID NO: 157404 - protein, 14 aa, Homo sapiens
  CDR3 for beta chain variable domain of TCR clone 78702 (TRBV12-5, TRBJ2-5)
CASGSQTHQETQYF

SEQ ID NO: 157405 - protein, 13 aa, Homo sapiens
  CDR3 for alpha chain variable domain of TCR clone 78703 (TRAV12-3, TRAJ33)
CAMSVNSNYQLIW

SEQ ID NO: 157406 - protein, 13 aa, Homo sapiens
  CDR3 for beta chain variable domain of TCR clone 78703 (TRBV7-2, TRBJ2-2)
CASSLAVTGQLFF

SEQ ID NO: 157407 - protein, 11 aa, Homo sapiens
  CDR3 for alpha chain variable domain of TCR clone 78704 (TRAV1-1, TRAJ23)
CAVRQGGKLIF

SEQ ID NO: 157408 - protein, 16 aa, Homo sapiens
  CDR3 for beta chain variable domain of TCR clone 78704 (TRBV19, TRBJ2-1)
CASSIDGSFAYNEQFF

SEQ ID NO: 157409 - protein, 16 aa, Homo sapiens
  CDR3 for alpha chain variable domain of TCR clone 78705 (TRAV3, TRAJ10)
CAVRDMRAGGGNKLTF

SEQ ID NO: 157410 - protein, 14 aa, Homo sapiens
  CDR3 for beta chain variable domain of TCR clone 78705 (TRBV7-3, TRBJ2-3)
CASSSTGVADTQYF

SEQ ID NO: 157411 - protein, 11 aa, Homo sapiens
  CDR3 for alpha chain variable domain of TCR clone 78706 (TRAV1-2, TRAJ40)
CAVPGTYKYIF

SEQ ID NO: 157412 - protein, 14 aa, Homo sapiens
  CDR3 for beta chain variable domain of TCR clone 78706 (TRBV6-1, TRBJ1-3)
CASVQGGGGNTIYF

SEQ ID NO: 157413 - protein, 11 aa, Homo sapiens
  CDR3 for alpha chain variable domain of TCR clone 78707 (TRAV12-2, TRAJ49)
CAVNTGNQFYF

SEQ ID NO: 157414 - protein, 15 aa, Homo sapiens
  CDR3 for beta chain variable domain of TCR clone 78707 (TRBV7-2, TRBJ2-3)
CASSLVVRGPDTQYF

SEQ ID NO: 157415 - protein, 11 aa, Homo sapiens
  CDR3 for alpha chain variable domain of TCR clone 78708 (TRAV21, TRAJ34)
CAHYNTDKLIF

SEQ ID NO: 157416 - protein, 14 aa, Homo sapiens
  CDR3 for beta chain variable domain of TCR clone 78708 (TRBV7-6, TRBJ2-3)
CASSLGTVTDTQYF

SEQ ID NO: 157417 - protein, 16 aa, Homo sapiens
  CDR3 for alpha chain variable domain of TCR clone 78709 (TRAV30, TRAJ53)
CGITGGSGGSNYKLTF

SEQ ID NO: 157418 - protein, 18 aa, Homo sapiens
  CDR3 for beta chain variable domain of TCR clone 78709 (TRBV11-2, TRBJ2-3)
CASSLGGASRGAPNTQYF

SEQ ID NO: 157419 - protein, 15 aa, Homo sapiens
  CDR3 for alpha chain variable domain of TCR clone 78710 (TRAV26-1, TRAJ48)
CIVRVGDFGYEKLTF

SEQ ID NO: 157420 - protein, 16 aa, Homo sapiens
  CDR3 for beta chain variable domain of TCR clone 78710 (TRBV4-1, TRBJ2-3)
CASSQRAGGLTDTQYF

SEQ ID NO: 157421 - protein, 16 aa, Homo sapiens
  CDR3 for alpha chain variable domain of TCR clone 78711 (TRAV3, TRAJ10)
CAVRDMRAGGGNKLTF

SEQ ID NO: 157422 - protein, 16 aa, Homo sapiens
  CDR3 for beta chain variable domain of TCR clone 78711 (TRBV24-1, TRBJ2-3)
CATSDPGTGATDTQYF

SEQ ID NO: 157423 - protein, 14 aa, Homo sapiens
  CDR3 for alpha chain variable domain of TCR clone 78712 (TRAV12-3, TRAJ54)
CAMRGIQGAQKLVF

SEQ ID NO: 157424 - protein, 13 aa, Homo sapiens
  CDR3 for beta chain variable domain of TCR clone 78712 (TRBV19, TRBJ1-1)
CASSPANGGEAFF

SEQ ID NO: 157425 - protein, 14 aa, Homo sapiens
  CDR3 for alpha chain variable domain of TCR clone 78713 (TRAV1-2, TRAJ16)
CAVNRFSDGQKLLF

SEQ ID NO: 157426 - protein, 11 aa, Homo sapiens
  CDR3 for beta chain variable domain of TCR clone 78713 (TRBV12-4, TRBJ2-3)
CASSSVRGRYF

SEQ ID NO: 157427 - protein, 14 aa, Homo sapiens
  CDR3 for alpha chain variable domain of TCR clone 78714 (TRAV30, TRAJ33)
CGTVAPRSNYQLIW

SEQ ID NO: 157428 - protein, 18 aa, Homo sapiens
  CDR3 for beta chain variable domain of TCR clone 78714 (TRBV20-1, TRBJ2-6)
CSARTLAGGPSGANVLTF

SEQ ID NO: 157429 - protein, 15 aa, Homo sapiens
  CDR3 for alpha chain variable domain of TCR clone 78715 (TRAV26-1, TRAJ44)
CIVRANTGTASKLTF

SEQ ID NO: 157430 - protein, 16 aa, Homo sapiens
  CDR3 for beta chain variable domain of TCR clone 78715 (TRBV7-7, TRBJ2-1)
CASSLASGTSYNKQFF

SEQ ID NO: 157431 - protein, 15 aa, Homo sapiens
  CDR3 for alpha chain variable domain of TCR clone 78716 (TRAV21, TRAJ13)
CAVRQTSGGYQKVTF

SEQ ID NO: 157432 - protein, 15 aa, Homo sapiens
  CDR3 for beta chain variable domain of TCR clone 78716 (TRBV28, TRBJ2-7)
CASSPGGRGFYEQYF

SEQ ID NO: 157433 - protein, 17 aa, Homo sapiens
  CDR3 for alpha chain variable domain of TCR clone 78717 (TRAV12-2, TRAJ39)
CAVNNMLTFGGGTRLTV

SEQ ID NO: 157434 - protein, 16 aa, Homo sapiens
  CDR3 for beta chain variable domain of TCR clone 78717 (TRBV9, TRBJ2-7)
CASSAGPDRSPYEQYF

SEQ ID NO: 157435 - protein, 16 aa, Homo sapiens
  CDR3 for alpha chain variable domain of TCR clone 78718 (TRAV12-2, TRAJ18)
CAVTTDRGSTLGRLYF

SEQ ID NO: 157436 - protein, 16 aa, Homo sapiens
  CDR3 for beta chain variable domain of TCR clone 78718 (TRBV12-4, TRBJ1-5)
CASSRPVGGSNQPQHF

SEQ ID NO: 157437 - protein, 15 aa, Homo sapiens
  CDR3 for alpha chain variable domain of TCR clone 78719 (TRAV8-3, TRAJ45)
CASSYSGGGADGLTF

SEQ ID NO: 157438 - protein, 14 aa, Homo sapiens
  CDR3 for beta chain variable domain of TCR clone 78719 (TRBV11-2, TRBJ2-5)
CASSRTGGIETQYF

SEQ ID NO: 157439 - protein, 11 aa, Homo sapiens
  CDR3 for alpha chain variable domain of TCR clone 78720 (TRAV14/DV4, )
CPMREISRTLT

SEQ ID NO: 157440 - protein, 14 aa, Homo sapiens
  CDR3 for beta chain variable domain of TCR clone 78720 (TRBV2, TRBJ2-1)
CASSDRAYYNEQFF

SEQ ID NO: 157441 - protein, 14 aa, Homo sapiens
  CDR3 for alpha chain variable domain of TCR clone 78721 (TRAV38-1, TRAJ45)
CAYYSGGGADELTF

SEQ ID NO: 157442 - protein, 20 aa, Homo sapiens
  CDR3 for beta chain variable domain of TCR clone 78721 (TRBV28, TRBJ2-1)
CASTPIGRSPGLAGGNEQFF

SEQ ID NO: 157443 - protein, 13 aa, Homo sapiens
  CDR3 for alpha chain variable domain of TCR clone 78722 (TRAV12-3, TRAJ13)
CAMTSGGYQKVTF

SEQ ID NO: 157444 - protein, 14 aa, Homo sapiens
  CDR3 for beta chain variable domain of TCR clone 78722 (TRBV7-3, TRBJ2-1)
CASSLAGGTNEQFF

SEQ ID NO: 157445 - protein, 14 aa, Homo sapiens
  CDR3 for alpha chain variable domain of TCR clone 78723 (TRAV1-2, TRAJ16)
CAVNRFSDGQKLLF

SEQ ID NO: 157446 - protein, 13 aa, Homo sapiens
  CDR3 for beta chain variable domain of TCR clone 78723 (TRBV7-7, TRBJ1-1)
CASSLGANTEAFF

SEQ ID NO: 157447 - protein, 12 aa, Homo sapiens
  CDR3 for alpha chain variable domain of TCR clone 78724 (TRAV12-3, TRAJ17)
CAMTLTGNKLTF

SEQ ID NO: 157448 - protein, 13 aa, Homo sapiens
  CDR3 for beta chain variable domain of TCR clone 78724 (TRBV7-2, TRBJ2-2)
CASSLAVTGELVF

SEQ ID NO: 157449 - protein, 14 aa, Homo sapiens
  CDR3 for alpha chain variable domain of TCR clone 78725 (TRAV1-1, TRAJ27)
CAVIYNTNAGKSTF

SEQ ID NO: 157450 - protein, 13 aa, Homo sapiens
  CDR3 for beta chain variable domain of TCR clone 78725 (TRBV7-9, TRBJ1-2)
CASSVKQNYGYTF

SEQ ID NO: 157451 - protein, 12 aa, Homo sapiens
  CDR3 for alpha chain variable domain of TCR clone 78726 (TRAV1-1, TRAJ39)
CAVPVVGNMLTF

SEQ ID NO: 157452 - protein, 17 aa, Homo sapiens
  CDR3 for beta chain variable domain of TCR clone 78726 (TRBV7-8, TRBJ2-6)
CASSAGTGGAGANVLTF

SEQ ID NO: 157453 - protein, 12 aa, Homo sapiens
  CDR3 for alpha chain variable domain of TCR clone 78727 (TRAV8-3, TRAJ26)
CAGDSYGQNFVI

SEQ ID NO: 157454 - protein, 15 aa, Homo sapiens
  CDR3 for beta chain variable domain of TCR clone 78727 (TRBV9, TRBJ2-1)
CASSLAGSSYNEQFF

SEQ ID NO: 157455 - protein, 18 aa, Homo sapiens
  CDR3 for alpha chain variable domain of TCR clone 78728 (TRAV12-3, TRAJ18)
CAMSAEGDRGSTLGRLYF

SEQ ID NO: 157456 - protein, 15 aa, Homo sapiens
  CDR3 for beta chain variable domain of TCR clone 78728 (TRBV3-1, TRBJ2-7)
CASSQEWTGSYEQYF

SEQ ID NO: 157457 - protein, 11 aa, Homo sapiens
  CDR3 for alpha chain variable domain of TCR clone 78729 (TRAV2, TRAJ33)
SAVESNYQLIW

SEQ ID NO: 157458 - protein, 15 aa, Homo sapiens
  CDR3 for beta chain variable domain of TCR clone 78729 (TRBV19, TRBJ1-1)
CASTSGQIQNTEAFF

SEQ ID NO: 157459 - protein, 14 aa, Homo sapiens
  CDR3 for alpha chain variable domain of TCR clone 78730 (TRAV13-1, TRAJ44)
CAAKATGTARKLTF

SEQ ID NO: 157460 - protein, 14 aa, Homo sapiens
  CDR3 for beta chain variable domain of TCR clone 78730 (TRBV19, TRBJ2-2)
CASSTLHRSGELFF

SEQ ID NO: 157461 - protein, 14 aa, Homo sapiens
  CDR3 for alpha chain variable domain of TCR clone 78731 (TRAV8-3, TRAJ36)
CAVGPITGANNLFF

SEQ ID NO: 157462 - protein, 15 aa, Homo sapiens
  CDR3 for beta chain variable domain of TCR clone 78731 (TRBV4-1, TRBJ2-1)
CVSSQDPGNYNEQFF

SEQ ID NO: 157463 - protein, 11 aa, Homo sapiens
  CDR3 for alpha chain variable domain of TCR clone 78732 (TRAV2, TRAJ13)
CASGGYQKVTF

SEQ ID NO: 157464 - protein, 16 aa, Homo sapiens
  CDR3 for beta chain variable domain of TCR clone 78732 (TRBV28, TRBJ2-7)
CASSLFFETGGPEQYF

SEQ ID NO: 157465 - protein, 15 aa, Homo sapiens
  CDR3 for alpha chain variable domain of TCR clone 78733 (TRAV21, TRAJ24)
CAARSSTDSWGKLQF

SEQ ID NO: 157466 - protein, 13 aa, Homo sapiens
  CDR3 for beta chain variable domain of TCR clone 78733 (TRBV11-2, TRBJ2-5)
CASNSTGEETQYF

SEQ ID NO: 157467 - protein, 15 aa, Homo sapiens
  CDR3 for alpha chain variable domain of TCR clone 78734 (TRAV8-4, TRAJ29)
CAVSEDSRGNTPLVF

SEQ ID NO: 157468 - protein, 12 aa, Homo sapiens
  CDR3 for beta chain variable domain of TCR clone 78734 (TRBV14, TRBJ2-7)
CASSSLKGEQYF

SEQ ID NO: 157469 - protein, 13 aa, Homo sapiens
  CDR3 for alpha chain variable domain of TCR clone 78735 (TRAV8-6, TRAJ21)
CAVSPSSLNKFYF

SEQ ID NO: 157470 - protein, 14 aa, Homo sapiens
  CDR3 for beta chain variable domain of TCR clone 78735 (TRBV7-9, TRBJ2-5)
CASSLDPAQETQYF

SEQ ID NO: 157471 - protein, 15 aa, Homo sapiens
  CDR3 for alpha chain variable domain of TCR clone 78736 (TRAV35, TRAJ40)
CAGQLGTSGTYKYIF

SEQ ID NO: 157472 - protein, 13 aa, Homo sapiens
  CDR3 for beta chain variable domain of TCR clone 78736 (TRBV12-5, TRBJ2-3)
CASGDRQSDTQYF

SEQ ID NO: 157473 - protein, 14 aa, Homo sapiens
  CDR3 for alpha chain variable domain of TCR clone 78737 (TRAV17, TRAJ31)
CATVLRNNNSRLMF

SEQ ID NO: 157474 - protein, 14 aa, Homo sapiens
  CDR3 for beta chain variable domain of TCR clone 78737 (TRBV12-4, TRBJ2-5)
CASSLWQKQETQYF

SEQ ID NO: 157475 - protein, 12 aa, Homo sapiens
  CDR3 for alpha chain variable domain of TCR clone 78738 (TRAV12-3, TRAJ17)
CAMTLTGNKLTF

SEQ ID NO: 157476 - protein, 12 aa, Homo sapiens
  CDR3 for beta chain variable domain of TCR clone 78738 (TRBV12-4, TRBJ2-7)
CASSLGGYGQYF

SEQ ID NO: 157477 - protein, 14 aa, Homo sapiens
  CDR3 for alpha chain variable domain of TCR clone 78739 (TRAV1-1, TRAJ27)
CAVIYNTNAGKSTF

SEQ ID NO: 157478 - protein, 15 aa, Homo sapiens
  CDR3 for beta chain variable domain of TCR clone 78739 (TRBV19, TRBJ1-2)
RASSVGQVLNYGYTF

SEQ ID NO: 157479 - protein, 16 aa, Homo sapiens
  CDR3 for alpha chain variable domain of TCR clone 78740 (TRAV1-2, TRAJ10)
CAVRGVPTGGGNKLTF

SEQ ID NO: 157480 - protein, 15 aa, Homo sapiens
  CDR3 for beta chain variable domain of TCR clone 78740 (TRBV28, TRBJ2-1)
CASSIIAGGRSEQFF

SEQ ID NO: 157481 - protein, 14 aa, Homo sapiens
  CDR3 for alpha chain variable domain of TCR clone 78741 (TRAV1-2, TRAJ16)
CAVNRFSDDQKLLF

SEQ ID NO: 157482 - protein, 14 aa, Homo sapiens
  CDR3 for beta chain variable domain of TCR clone 78741 (TRBV7-9, TRBJ2-1)
CASSPRDSLYEQFF

SEQ ID NO: 157483 - protein, 13 aa, Homo sapiens
  CDR3 for alpha chain variable domain of TCR clone 78742 (TRAV14/DV4, TRAJ4)
CAMKAGGYNKLIF

SEQ ID NO: 157484 - protein, 15 aa, Homo sapiens
  CDR3 for beta chain variable domain of TCR clone 78742 (TRBV20-1, TRBJ2-7)
CSARDRVSGMDEQYF

SEQ ID NO: 157485 - protein, 13 aa, Homo sapiens
  CDR3 for alpha chain variable domain of TCR clone 78743 (TRAV12-2, TRAJ24)
CAVSTDSWGKLQF

SEQ ID NO: 157486 - protein, 12 aa, Homo sapiens
  CDR3 for beta chain variable domain of TCR clone 78743 (TRBV7-6, TRBJ2-7)
CASSLADSGQYF

SEQ ID NO: 157487 - protein, 13 aa, Homo sapiens
  CDR3 for alpha chain variable domain of TCR clone 78744 (TRAV14/DV4, TRAJ20)
CAMRESNDYKLSF

SEQ ID NO: 157488 - protein, 20 aa, Homo sapiens
  CDR3 for beta chain variable domain of TCR clone 78744 (TRBV28, TRBJ2-1)
CASTPIGRSPGLAGGNEQFF

SEQ ID NO: 157489 - protein, 13 aa, Homo sapiens
  CDR3 for alpha chain variable domain of TCR clone 78745 (TRAV4, TRAJ20)
CLVGSSNDYKLSF

SEQ ID NO: 157490 - protein, 15 aa, Homo sapiens
  CDR3 for beta chain variable domain of TCR clone 78745 (TRBV28, TRBJ2-1)
CASSGLAEVDNEQFF

SEQ ID NO: 157491 - protein, 15 aa, Homo sapiens
  CDR3 for alpha chain variable domain of TCR clone 78746 (TRAV17, TRAJ40)
CATVSSTSGTYKYIF

SEQ ID NO: 157492 - protein, 16 aa, Homo sapiens
  CDR3 for beta chain variable domain of TCR clone 78746 (TRBV20-1, TRBJ1-2)
CSASMGQGVANYGYTF

SEQ ID NO: 157493 - protein, 12 aa, Homo sapiens
  CDR3 for alpha chain variable domain of TCR clone 78747 (TRAV29/DV5, TRAJ49)
CAATDTVNQFYF

SEQ ID NO: 157494 - protein, 12 aa, Homo sapiens
  CDR3 for beta chain variable domain of TCR clone 78747 (TRBV12-4, TRBJ2-7)
CASSLGGYEQYF

SEQ ID NO: 157495 - protein, 12 aa, Homo sapiens
  CDR3 for alpha chain variable domain of TCR clone 78748 (TRAV12-1, TRAJ6)
CVVSERSYIPTS

SEQ ID NO: 157496 - protein, 21 aa, Homo sapiens
  CDR3 for beta chain variable domain of TCR clone 78748 (TRBV7-3, TRBJ2-1)
GGTQPCISVPAAYGLAGAQFF

SEQ ID NO: 157497 - protein, 13 aa, Homo sapiens
  CDR3 for alpha chain variable domain of TCR clone 78749 (TRAV12-1, TRAJ49)
CVVNTNTGNQFYF

SEQ ID NO: 157498 - protein, 14 aa, Homo sapiens
  CDR3 for beta chain variable domain of TCR clone 78749 (TRBV7-3, TRBJ2-2)
CASSSGGYTGELFF

SEQ ID NO: 157499 - protein, 14 aa, Homo sapiens
  CDR3 for alpha chain variable domain of TCR clone 78750 (TRAV2, TRAJ9)
CAVEDRSGGFETIF

SEQ ID NO: 157500 - protein, 13 aa, Homo sapiens
  CDR3 for beta chain variable domain of TCR clone 78750 (TRBV3-1, TRBJ1-5)
CAITRRDGQPQHF

SEQ ID NO: 157501 - protein, 13 aa, Homo sapiens
  CDR3 for alpha chain variable domain of TCR clone 78751 (TRAV3, TRAJ30)
CAVRDRGDDKIIF

SEQ ID NO: 157502 - protein, 16 aa, Homo sapiens
  CDR3 for beta chain variable domain of TCR clone 78751 (TRBV7-3, TRBJ2-2)
CASSLKRGALSGELFF

SEQ ID NO: 157503 - protein, 16 aa, Homo sapiens
  CDR3 for alpha chain variable domain of TCR clone 78752 (TRAV3, TRAJ40)
CAVRDRIASGTYKYIF

SEQ ID NO: 157504 - protein, 15 aa, Homo sapiens
  CDR3 for beta chain variable domain of TCR clone 78752 (TRBV2, TRBJ2-7)
CASSEGLARSYEQYF

SEQ ID NO: 157505 - protein, 13 aa, Homo sapiens
  CDR3 for alpha chain variable domain of TCR clone 78753 (TRAV22, TRAJ29)
CTVGGSGNTPLVF

SEQ ID NO: 157506 - protein, 13 aa, Homo sapiens
  CDR3 for beta chain variable domain of TCR clone 78753 (TRBV4-2, TRBJ1-1)
CASSQAGNTEAFF

SEQ ID NO: 157507 - protein, 11 aa, Homo sapiens
  CDR3 for alpha chain variable domain of TCR clone 78754 (TRAV12-1, TRAJ30)
CVVNGQDKIIF

SEQ ID NO: 157508 - protein, 16 aa, Homo sapiens
  CDR3 for beta chain variable domain of TCR clone 78754 (TRBV24-1, TRBJ2-3)
SATSDAISGITDTQYF

SEQ ID NO: 157509 - protein, 11 aa, Homo sapiens
  CDR3 for alpha chain variable domain of TCR clone 78755 (TRAV2, TRAJ33)
CAVDSNYQLIW

SEQ ID NO: 157510 - protein, 14 aa, Homo sapiens
  CDR3 for beta chain variable domain of TCR clone 78755 (TRBV6-1, TRBJ1-3)
CASVQGGGGNTIYF

SEQ ID NO: 157511 - protein, 14 aa, Homo sapiens
  CDR3 for alpha chain variable domain of TCR clone 78756 (TRAV17, TRAJ57)
CATDPQGGSEKLVF

SEQ ID NO: 157512 - protein, 19 aa, Homo sapiens
  CDR3 for beta chain variable domain of TCR clone 78756 (TRBV25-1, TRBJ2-2)
CAILVYRVDRGRKTGELFF

SEQ ID NO: 157513 - protein, 14 aa, Homo sapiens
  CDR3 for alpha chain variable domain of TCR clone 78757 (TRAV8-4, TRAJ15)
CAVSPYQAGTALIF

SEQ ID NO: 157514 - protein, 16 aa, Homo sapiens
  CDR3 for beta chain variable domain of TCR clone 78757 (TRBV4-1, TRBJ1-1)
CASSSMSERPNTEASF

SEQ ID NO: 157515 - protein, 13 aa, Homo sapiens
  CDR3 for alpha chain variable domain of TCR clone 78758 (TRAV3, TRAJ27)
CAVRPLGAGKSTF

SEQ ID NO: 157516 - protein, 15 aa, Homo sapiens
  CDR3 for beta chain variable domain of TCR clone 78758 (TRBV4-3, TRBJ1-1)
CASSQELGRGTEAFF

SEQ ID NO: 157517 - protein, 15 aa, Homo sapiens
  CDR3 for alpha chain variable domain of TCR clone 78759 (TRAV8-4, TRAJ7)
CAVSGGNYGNTRLAF

SEQ ID NO: 157518 - protein, 11 aa, Homo sapiens
  CDR3 for beta chain variable domain of TCR clone 78759 (TRBV20-1, TRBJ2-1)
CSLSSGSEQFF

SEQ ID NO: 157519 - protein, 14 aa, Homo sapiens
  CDR3 for alpha chain variable domain of TCR clone 78760 (TRAV13-1, TRAJ35)
CAASKGGFGNVLHC

SEQ ID NO: 157520 - protein, 14 aa, Homo sapiens
  CDR3 for beta chain variable domain of TCR clone 78760 (TRBV18, TRBJ2-5)
CASSPGASQETQYF

SEQ ID NO: 157521 - protein, 14 aa, Homo sapiens
  CDR3 for alpha chain variable domain of TCR clone 78761 (TRAV13-1, TRAJ28)
CAASPGAGSYQLTF

SEQ ID NO: 157522 - protein, 15 aa, Homo sapiens
  CDR3 for beta chain variable domain of TCR clone 78761 (TRBV7-9, TRBJ1-6)
CASSSPGRGNSPLHF

SEQ ID NO: 157523 - protein, 18 aa, Homo sapiens
  CDR3 for alpha chain variable domain of TCR clone 78762 (TRAV13-1, TRAJ52)
CAASKRSAGGTSYGKLTF

SEQ ID NO: 157524 - protein, 17 aa, Homo sapiens
  CDR3 for beta chain variable domain of TCR clone 78762 (TRBV13, TRBJ2-3)
CASSLSRVAGGRNTQYF

SEQ ID NO: 157525 - protein, 16 aa, Homo sapiens
  CDR3 for alpha chain variable domain of TCR clone 78763 (TRAV12-3, TRAJ53)
CAMSPGSGGSNYKLTF

SEQ ID NO: 157526 - protein, 14 aa, Homo sapiens
  CDR3 for beta chain variable domain of TCR clone 78763 (TRBV11-2, TRBJ2-3)
CASSRLARTDTQYF

SEQ ID NO: 157527 - protein, 13 aa, Homo sapiens
  CDR3 for alpha chain variable domain of TCR clone 78764 (TRAV21, TRAJ36)
CAVIKTGANNLFF

SEQ ID NO: 157528 - protein, 14 aa, Homo sapiens
  CDR3 for beta chain variable domain of TCR clone 78764 (TRBV19, TRBJ2-1)
CASPTFVLSGEQFF

SEQ ID NO: 157529 - protein, 15 aa, Homo sapiens
  CDR3 for alpha chain variable domain of TCR clone 78765 (TRAV21, TRAJ53)
CATLNSGCSNYKLTF

SEQ ID NO: 157530 - protein, 16 aa, Homo sapiens
  CDR3 for beta chain variable domain of TCR clone 78765 (TRBV9, TRBJ2-1)
CASSVGGGGNYNEQFF

SEQ ID NO: 157531 - protein, 13 aa, Homo sapiens
  CDR3 for alpha chain variable domain of TCR clone 78766 (TRAV26-2, TRAJ37)
CIRGSSNTGKLIF

SEQ ID NO: 157532 - protein, 15 aa, Homo sapiens
  CDR3 for beta chain variable domain of TCR clone 78766 (TRBV7-2, TRBJ2-5)
CQQPGGARRGETQYF

SEQ ID NO: 157533 - protein, 16 aa, Homo sapiens
  CDR3 for alpha chain variable domain of TCR clone 78767 (TRAV4, TRAJ22)
CLVGDLYSGSARQLTF

SEQ ID NO: 157534 - protein, 15 aa, Homo sapiens
  CDR3 for beta chain variable domain of TCR clone 78767 (TRBV7-3, TRBJ2-1)
CASSPTGGGEVEQFF

SEQ ID NO: 157535 - protein, 11 aa, Homo sapiens
  CDR3 for alpha chain variable domain of TCR clone 78768 (TRAV3, TRAJ21)
CAVGNFNKFYF

SEQ ID NO: 157536 - protein, 15 aa, Homo sapiens
  CDR3 for beta chain variable domain of TCR clone 78768 (TRBV27, TRBJ1-5)
CASSLGTGFDQPQHF

SEQ ID NO: 157537 - protein, 11 aa, Homo sapiens
  CDR3 for alpha chain variable domain of TCR clone 78769 (TRAV12-2, TRAJ31)
CVVTRWARLMF

SEQ ID NO: 157538 - protein, 15 aa, Homo sapiens
  CDR3 for beta chain variable domain of TCR clone 78769 (TRBV19, TRBJ2-7)
CASSIGGGLVNEQYF

SEQ ID NO: 157539 - protein, 12 aa, Homo sapiens
  CDR3 for alpha chain variable domain of TCR clone 78770 (TRAV13-1, TRAJ26)
CAATYYGQNFVF

SEQ ID NO: 157540 - protein, 12 aa, Homo sapiens
  CDR3 for beta chain variable domain of TCR clone 78770 (TRBV7-8, TRBJ2-7)
CASSLGDREQYF

SEQ ID NO: 157541 - protein, 16 aa, Homo sapiens
  CDR3 for alpha chain variable domain of TCR clone 78771 (TRAV8-3, TRAJ10)
CAVGPGVTGGGHKLTF

SEQ ID NO: 157542 - protein, 13 aa, Homo sapiens
  CDR3 for beta chain variable domain of TCR clone 78771 (TRBV18, TRBJ1-1)
CASSPGPSGEAFF

SEQ ID NO: 157543 - protein, 14 aa, Homo sapiens
  CDR3 for alpha chain variable domain of TCR clone 78772 (TRAV26-1, TRAJ22)
CIVRAYGSARQLTF

SEQ ID NO: 157544 - protein, 17 aa, Homo sapiens
  CDR3 for beta chain variable domain of TCR clone 78772 (TRBV7-3, TRBJ2-3)
CASSPGGLAGFGDTQYF

SEQ ID NO: 157545 - protein, 15 aa, Homo sapiens
  CDR3 for alpha chain variable domain of TCR clone 78773 (TRAV12-1, TRAJ44)
CVVFVNTGTASKLTF

SEQ ID NO: 157546 - protein, 12 aa, Homo sapiens
  CDR3 for beta chain variable domain of TCR clone 78773 (TRBV11-2, TRBJ2-2)
CASSLGGGELFF

SEQ ID NO: 157547 - protein, 14 aa, Homo sapiens
  CDR3 for alpha chain variable domain of TCR clone 78774 (TRAV35, TRAJ22)
CAGLRPGSARQLTF

SEQ ID NO: 157548 - protein, 14 aa, Homo sapiens
  CDR3 for beta chain variable domain of TCR clone 78774 (TRBV7-9, TRBJ2-7)
CASSLDRPTDEQYF

SEQ ID NO: 157549 - protein, 14 aa, Homo sapiens
  CDR3 for alpha chain variable domain of TCR clone 78775 (TRAV27, TRAJ36)
CAGPPKGGANNLFF

SEQ ID NO: 157550 - protein, 15 aa, Homo sapiens
  CDR3 for beta chain variable domain of TCR clone 78775 (TRBV18, TRBJ2-7)
CASSPASTPNYEQYF

SEQ ID NO: 157551 - protein, 16 aa, Homo sapiens
  CDR3 for alpha chain variable domain of TCR clone 78776 (TRAV3, TRAJ23)
CAVKIGIYNQGGKLIF

SEQ ID NO: 157552 - protein, 17 aa, Homo sapiens
  CDR3 for beta chain variable domain of TCR clone 78776 (TRBV10-3, TRBJ2-6)
CAISEATAPSGANVLTF

SEQ ID NO: 157553 - protein, 17 aa, Homo sapiens
  CDR3 for alpha chain variable domain of TCR clone 78777 (TRAV8-6, TRAJ8)
CSVKEGIENTGFQKLVF

SEQ ID NO: 157554 - protein, 12 aa, Homo sapiens
  CDR3 for beta chain variable domain of TCR clone 78777 (TRBV19, TRBJ1-4)
CASKDWPGGLFF

SEQ ID NO: 157555 - protein, 12 aa, Homo sapiens
  CDR3 for alpha chain variable domain of TCR clone 78778 (TRAV17, TRAJ57)
CATDAGSEKLVF

SEQ ID NO: 157556 - protein, 13 aa, Homo sapiens
  CDR3 for beta chain variable domain of TCR clone 78778 (TRBV7-9, TRBJ2-7)
CASSFAGAYEQYF

SEQ ID NO: 157557 - protein, 13 aa, Homo sapiens
  CDR3 for alpha chain variable domain of TCR clone 78779 (TRAV36/DV7, TRAJ37)
CAVFSSNTGKLIF

SEQ ID NO: 157558 - protein, 15 aa, Homo sapiens
  CDR3 for beta chain variable domain of TCR clone 78779 (TRBV12-4, TRBJ2-5)
CQQCFVRGRQETQYF

SEQ ID NO: 157559 - protein, 13 aa, Homo sapiens
  CDR3 for alpha chain variable domain of TCR clone 78780 (TRAV3, TRAJ27)
CAVSPLGAGKSTF

SEQ ID NO: 157560 - protein, 15 aa, Homo sapiens
  CDR3 for beta chain variable domain of TCR clone 78780 (TRBV9, TRBJ1-6)
CASSVAGTGDSPLHF

SEQ ID NO: 157561 - protein, 14 aa, Homo sapiens
  CDR3 for alpha chain variable domain of TCR clone 78781 (TRAV12-2, TRAJ13)
CAVKKTGGYQKVTF

SEQ ID NO: 157562 - protein, 16 aa, Homo sapiens
  CDR3 for beta chain variable domain of TCR clone 78781 (TRBV19, TRBJ2-1)
CASSKEGPSSYNEQFF

SEQ ID NO: 157563 - protein, 14 aa, Homo sapiens
  CDR3 for alpha chain variable domain of TCR clone 78782 (TRAV17, TRAJ4)
CATAPLGGYNKLIF

SEQ ID NO: 157564 - protein, 13 aa, Homo sapiens
  CDR3 for beta chain variable domain of TCR clone 78782 (TRBV12-4, TRBJ1-3)
CAGSLASGNTIYF

SEQ ID NO: 157565 - protein, 13 aa, Homo sapiens
  CDR3 for alpha chain variable domain of TCR clone 78783 (TRAV12-3, TRAJ40)
CAMSARGTYKYIF

SEQ ID NO: 157566 - protein, 16 aa, Homo sapiens
  CDR3 for beta chain variable domain of TCR clone 78783 (TRBV20-1, TRBJ2-3)
YSGEAGLAGGQDTQYF

SEQ ID NO: 157567 - protein, 13 aa, Homo sapiens
  CDR3 for alpha chain variable domain of TCR clone 78784 (TRAV23/DV6, TRAJ43)
CAASMGGNNDMRF

SEQ ID NO: 157568 - protein, 14 aa, Homo sapiens
  CDR3 for beta chain variable domain of TCR clone 78784 (TRBV3-1, TRBJ2-3)
CASSWSGVGGTQYF

SEQ ID NO: 157569 - protein, 15 aa, Homo sapiens
  CDR3 for alpha chain variable domain of TCR clone 78785 (TRAV13-1, TRAJ48)
CAPLGSNFGNEKLTF

SEQ ID NO: 157570 - protein, 15 aa, Homo sapiens
  CDR3 for beta chain variable domain of TCR clone 78785 (TRBV20-1, TRBJ2-1)
CSARGIGGTYNEQFF

SEQ ID NO: 157571 - protein, 10 aa, Homo sapiens
  CDR3 for alpha chain variable domain of TCR clone 78786 (TRAV8-4, TRAJ43)
CAVSADDMRF

SEQ ID NO: 157572 - protein, 15 aa, Homo sapiens
  CDR3 for beta chain variable domain of TCR clone 78786 (TRBV5-1, TRBJ2-3)
CASSVTSVSTDTQYF

SEQ ID NO: 157573 - protein, 10 aa, Homo sapiens
  CDR3 for alpha chain variable domain of TCR clone 78787 (TRAV1-2, TRAJ20)
CALNDYKLSF

SEQ ID NO: 157574 - protein, 16 aa, Homo sapiens
  CDR3 for beta chain variable domain of TCR clone 78787 (TRBV20-1, TRBJ1-1)
CSARALTQGMNTEDFF

SEQ ID NO: 157575 - protein, 16 aa, Homo sapiens
  CDR3 for alpha chain variable domain of TCR clone 78788 (TRAV16, TRAJ42)
CALSGYYGGSQGNLIF

SEQ ID NO: 157576 - protein, 13 aa, Homo sapiens
  CDR3 for beta chain variable domain of TCR clone 78788 (TRBV6-5, TRBJ1-4)
CASSEGVREKLFF

SEQ ID NO: 157577 - protein, 13 aa, Homo sapiens
  CDR3 for alpha chain variable domain of TCR clone 78789 (TRAV12-3, TRAJ7)
CAMTPYGNNRLAF

SEQ ID NO: 157578 - protein, 14 aa, Homo sapiens
  CDR3 for beta chain variable domain of TCR clone 78789 (TRBV25-1, TRBJ1-1)
CASTHLGGNTEAFF

SEQ ID NO: 157579 - protein, 13 aa, Homo sapiens
  CDR3 for alpha chain variable domain of TCR clone 78790 (TRAV13-2, TRAJ48)
CAEMDFGNEKLTF

SEQ ID NO: 157580 - protein, 15 aa, Homo sapiens
  CDR3 for beta chain variable domain of TCR clone 78790 (TRBV7-9, TRBJ1-6)
CASSSSGRGNSPLHF

SEQ ID NO: 157581 - protein, 13 aa, Homo sapiens
  CDR3 for alpha chain variable domain of TCR clone 78791 (TRAV17, TRAJ26)
CATVDNYGQNFVF

SEQ ID NO: 157582 - protein, 14 aa, Homo sapiens
  CDR3 for beta chain variable domain of TCR clone 78791 (TRBV2, TRBJ2-7)
CASSLTSGGYEQYF

SEQ ID NO: 157583 - protein, 15 aa, Homo sapiens
  CDR3 for alpha chain variable domain of TCR clone 78792 (TRAV8-2, TRAJ24)
CVVSDRTDSWGKLQF

SEQ ID NO: 157584 - protein, 13 aa, Homo sapiens
  CDR3 for beta chain variable domain of TCR clone 78792 (TRBV7-9, TRBJ1-2)
CASSVKQNYGYTF

SEQ ID NO: 157585 - protein, 21 aa, Homo sapiens
  CDR3 for alpha chain variable domain of TCR clone 78793 (TRAV8-4, TRAJ38)
CARLNAGNNHIQNPDPAVYQL

SEQ ID NO: 157586 - protein, 12 aa, Homo sapiens
  CDR3 for beta chain variable domain of TCR clone 78793 (TRBV6-1, TRBJ2-7)
CASSEPLYEQYF

SEQ ID NO: 157587 - protein, 15 aa, Homo sapiens
  CDR3 for alpha chain variable domain of TCR clone 78794 (TRAV17, TRAJ57)
CATGPSQGGSEKLVL

SEQ ID NO: 157588 - protein, 12 aa, Homo sapiens
  CDR3 for beta chain variable domain of TCR clone 78794 (TRBV12-4, TRBJ2-7)
CASSLGGYEQYF

SEQ ID NO: 157589 - protein, 14 aa, Homo sapiens
  CDR3 for alpha chain variable domain of TCR clone 78795 (TRAV1-2, TRAJ6)
CAVQASGGSYIPTF

SEQ ID NO: 157590 - protein, 14 aa, Homo sapiens
  CDR3 for beta chain variable domain of TCR clone 78795 (TRBV7-2, TRBJ2-7)
CASSPKTSFYEQYF

SEQ ID NO: 157591 - protein, 13 aa, Homo sapiens
  CDR3 for alpha chain variable domain of TCR clone 78796 (TRAV26-1, TRAJ33)
CIVRVEGNYQLIW

SEQ ID NO: 157592 - protein, 16 aa, Homo sapiens
  CDR3 for beta chain variable domain of TCR clone 78796 (TRBV15, TRBJ2-7)
CATSRDRGRRRGEQYF

SEQ ID NO: 157593 - protein, 16 aa, Homo sapiens
  CDR3 for alpha chain variable domain of TCR clone 78797 (TRAV30, TRAJ24)
CGTEIVDADSWGKFQF

SEQ ID NO: 157594 - protein, 13 aa, Homo sapiens
  CDR3 for beta chain variable domain of TCR clone 78797 (TRBV10-3, TRBJ2-7)
YASKLAVNYEQYF

SEQ ID NO: 157595 - protein, 15 aa, Homo sapiens
  CDR3 for alpha chain variable domain of TCR clone 78798 (TRAV8-3, TRAJ7)
CAVGSISYGNNRLAF

SEQ ID NO: 157596 - protein, 12 aa, Homo sapiens
  CDR3 for beta chain variable domain of TCR clone 78798 (TRBV11-2, TRBJ2-1)
CASSPGNNEQFF

SEQ ID NO: 157597 - protein, 14 aa, Homo sapiens
  CDR3 for alpha chain variable domain of TCR clone 78799 (TRAV35, TRAJ33)
CAGSSQDSNYQLIW

SEQ ID NO: 157598 - protein, 21 aa, Homo sapiens
  CDR3 for beta chain variable domain of TCR clone 78799 (TRBV5-1, TRBJ1-4)
GTRPFIFAPAAWKDGNEKLFF

SEQ ID NO: 157599 - protein, 14 aa, Homo sapiens
  CDR3 for alpha chain variable domain of TCR clone 78800 (TRAV13-1, TRAJ35)
CAASKGGFGNVLHC

SEQ ID NO: 157600 - protein, 16 aa, Homo sapiens
  CDR3 for beta chain variable domain of TCR clone 78800 (TRBV13, TRBJ2-2)
CASSPRTGEHTGELFF

SEQ ID NO: 157601 - protein, 15 aa, Homo sapiens
  CDR3 for alpha chain variable domain of TCR clone 78801 (TRAV13-1, TRAJ44)
CAASRGGGTASTLTF

SEQ ID NO: 157602 - protein, 14 aa, Homo sapiens
  CDR3 for beta chain variable domain of TCR clone 78801 (TRBV7-2, TRBJ2-5)
CASSPRGSSETQYF

SEQ ID NO: 157603 - protein, 17 aa, Homo sapiens
  CDR3 for alpha chain variable domain of TCR clone 78802 (TRAV1-1, TRAJ4)
CALYSKLIFGAGTRLAV

SEQ ID NO: 157604 - protein, 16 aa, Homo sapiens
  CDR3 for beta chain variable domain of TCR clone 78802 (TRBV7-3, TRBJ2-2)
CASSLKRGTLSGELFF

SEQ ID NO: 157605 - protein, 18 aa, Homo sapiens
  CDR3 for alpha chain variable domain of TCR clone 78803 (TRAV14/DV4, TRAJ21)
CAMREGQRTTSTNFTLDL

SEQ ID NO: 157606 - protein, 12 aa, Homo sapiens
  CDR3 for beta chain variable domain of TCR clone 78803 (TRBV29-1, TRBJ2-2)
CSVDKYTGELFF

SEQ ID NO: 157607 - protein, 14 aa, Homo sapiens
  CDR3 for alpha chain variable domain of TCR clone 78804 (TRAV1-2, TRAJ8)
CAVREDTGFQKLVF

SEQ ID NO: 157608 - protein, 16 aa, Homo sapiens
  CDR3 for beta chain variable domain of TCR clone 78804 (TRBV18, TRBJ1-4)
CASSLQTVATNEKLFF

SEQ ID NO: 157609 - protein, 15 aa, Homo sapiens
  CDR3 for alpha chain variable domain of TCR clone 78805 (TRAV26-1, TRAJ47)
CIVRVGWGYRNKLVF

SEQ ID NO: 157610 - protein, 13 aa, Homo sapiens
  CDR3 for beta chain variable domain of TCR clone 78805 (TRBV20-1, TRBJ2-7)
CSARGDTQDEQYF

SEQ ID NO: 157611 - protein, 14 aa, Homo sapiens
  CDR3 for alpha chain variable domain of TCR clone 78806 (TRAV17, TRAJ15)
CATDRGQAGTALIF

SEQ ID NO: 157612 - protein, 13 aa, Homo sapiens
  CDR3 for beta chain variable domain of TCR clone 78806 (TRBV19, TRBJ1-5)
CASSMRGYQPQHF

SEQ ID NO: 157613 - protein, 15 aa, Homo sapiens
  CDR3 for alpha chain variable domain of TCR clone 78807 (TRAV2, TRAJ15)
CAVEDRKQAGTALIF

SEQ ID NO: 157614 - protein, 13 aa, Homo sapiens
  CDR3 for beta chain variable domain of TCR clone 78807 (TRBV10-2, TRBJ2-1)
CASGASGDAKQFF

SEQ ID NO: 157615 - protein, 15 aa, Homo sapiens
  CDR3 for alpha chain variable domain of TCR clone 78808 (TRAV12-2, TRAJ53)
CAVNGGGGSHYKLTF

SEQ ID NO: 157616 - protein, 17 aa, Homo sapiens
  CDR3 for beta chain variable domain of TCR clone 78808 (TRBV7-3, TRBJ2-3)
RASSLMKRMRGADTQYF

SEQ ID NO: 157617 - protein, 13 aa, Homo sapiens
  CDR3 for alpha chain variable domain of TCR clone 78809 (TRAV35, TRAJ43)
CSGYPYNNNDMRF

SEQ ID NO: 157618 - protein, 15 aa, Homo sapiens
  CDR3 for beta chain variable domain of TCR clone 78809 (TRBV25-1, TRBJ1-4)
CASSKRIATNEKLFF

SEQ ID NO: 157619 - protein, 18 aa, Homo sapiens
  CDR3 for alpha chain variable domain of TCR clone 78810 (TRAV21, TRAJ52)
CAVRPSPAGGTSYGKLTF

SEQ ID NO: 157620 - protein, 13 aa, Homo sapiens
  CDR3 for beta chain variable domain of TCR clone 78810 (TRBV4-1, TRBJ2-1)
CASSQEVQYEQFF

SEQ ID NO: 157621 - protein, 14 aa, Homo sapiens
  CDR3 for alpha chain variable domain of TCR clone 78811 (TRAV38-1, TRAJ45)
CAYYSGGGADGLTF

SEQ ID NO: 157622 - protein, 15 aa, Homo sapiens
  CDR3 for beta chain variable domain of TCR clone 78811 (TRBV11-3, TRBJ2-3)
CASLKDGREGDTQYF

SEQ ID NO: 157623 - protein, 12 aa, Homo sapiens
  CDR3 for alpha chain variable domain of TCR clone 78812 (TRAV1-1, TRAJ9)
CAVDTGGFKTIF

SEQ ID NO: 157624 - protein, 14 aa, Homo sapiens
  CDR3 for beta chain variable domain of TCR clone 78812 (TRBV7-2, TRBJ2-7)
CASSPKTSFYEQYF

SEQ ID NO: 157625 - protein, 13 aa, Homo sapiens
  CDR3 for alpha chain variable domain of TCR clone 78813 (TRAV8-1, TRAJ28)
CAVSGAGSYQLPF

SEQ ID NO: 157626 - protein, 14 aa, Homo sapiens
  CDR3 for beta chain variable domain of TCR clone 78813 (TRBV7-2, TRBJ2-2)
CASRGQGAAGELFF

SEQ ID NO: 157627 - protein, 10 aa, Homo sapiens
  CDR3 for alpha chain variable domain of TCR clone 78814 (TRAV16, TRAJ22)
SAMYLRQLTF

SEQ ID NO: 157628 - protein, 15 aa, Homo sapiens
  CDR3 for beta chain variable domain of TCR clone 78814 (TRBV20-1, TRBJ2-7)
CSARDRVSGMDEQYF

SEQ ID NO: 157629 - protein, 14 aa, Homo sapiens
  CDR3 for alpha chain variable domain of TCR clone 78815 (TRAV8-3, TRAJ9)
CAVVYNTGGFKTIF

SEQ ID NO: 157630 - protein, 17 aa, Homo sapiens
  CDR3 for beta chain variable domain of TCR clone 78815 (TRBV28, TRBJ2-5)
CASSRQGGLAGAETQYF

SEQ ID NO: 157631 - protein, 15 aa, Homo sapiens
  CDR3 for alpha chain variable domain of TCR clone 78816 (TRAV2, TRAJ9)
CAVEGRGTGGFKTIF

SEQ ID NO: 157632 - protein, 19 aa, Homo sapiens
  CDR3 for beta chain variable domain of TCR clone 78816 (TRBV28, TRBJ2-7)
CASSYSGTSRLGWVYEQYF

SEQ ID NO: 157633 - protein, 20 aa, Homo sapiens
  CDR3 for alpha chain variable domain of TCR clone 78817 (TRAV12-3, TRAJ41)
SLFIRDSQPSDSATPEALNF

SEQ ID NO: 157634 - protein, 14 aa, Homo sapiens
  CDR3 for beta chain variable domain of TCR clone 78817 (TRBV4-2, TRBJ2-1)
CASGLDRAYNEQFF

SEQ ID NO: 157635 - protein, 14 aa, Homo sapiens
  CDR3 for alpha chain variable domain of TCR clone 78818 (TRAV2, TRAJ37)
CAVDFTSNTGKLIF

SEQ ID NO: 157636 - protein, 16 aa, Homo sapiens
  CDR3 for beta chain variable domain of TCR clone 78818 (TRBV6-1, TRBJ1-2)
CASSGAWQGRSHGYTF

SEQ ID NO: 157637 - protein, 13 aa, Homo sapiens
  CDR3 for alpha chain variable domain of TCR clone 78819 (TRAV26-1, TRAJ33)
CIVRVDSNYQLIW

SEQ ID NO: 157638 - protein, 15 aa, Homo sapiens
  CDR3 for beta chain variable domain of TCR clone 78819 (TRBV7-2, TRBJ1-5)
CASSLSAGINQPQHF

SEQ ID NO: 157639 - protein, 13 aa, Homo sapiens
  CDR3 for alpha chain variable domain of TCR clone 78820 (TRAV8-6, TRAJ49)
CAVITNTGNQFYL

SEQ ID NO: 157640 - protein, 14 aa, Homo sapiens
  CDR3 for beta chain variable domain of TCR clone 78820 (TRBV5-1, TRBJ2-7)
CASSRGESLYEQYF

SEQ ID NO: 157641 - protein, 15 aa, Homo sapiens
  CDR3 for alpha chain variable domain of TCR clone 78821 (TRAV4, TRAJ31)
CLVGGFLNNNARLMF

SEQ ID NO: 157642 - protein, 14 aa, Homo sapiens
  CDR3 for beta chain variable domain of TCR clone 78821 (TRBV2, TRBJ2-3)
CASSEGQNTDTQYF

SEQ ID NO: 157643 - protein, 12 aa, Homo sapiens
  CDR3 for alpha chain variable domain of TCR clone 78822 (TRAV12-3, TRAJ20)
CAMVRGDYKLSF

SEQ ID NO: 157644 - protein, 14 aa, Homo sapiens
  CDR3 for beta chain variable domain of TCR clone 78822 (TRBV5-5, TRBJ1-5)
CASSVQGVDQPQHF

SEQ ID NO: 157645 - protein, 10 aa, Homo sapiens
  CDR3 for alpha chain variable domain of TCR clone 78823 (TRAV25, TRAJ20)
CAGNDYKLSF

SEQ ID NO: 157646 - protein, 12 aa, Homo sapiens
  CDR3 for beta chain variable domain of TCR clone 78823 (TRBV18, TRBJ2-3)
CASSPLSDTQYF

SEQ ID NO: 157647 - protein, 12 aa, Homo sapiens
  CDR3 for alpha chain variable domain of TCR clone 78824 (TRAV12-1, TRAJ40)
CVVYSGTYKYIF

SEQ ID NO: 157648 - protein, 13 aa, Homo sapiens
  CDR3 for beta chain variable domain of TCR clone 78824 (TRBV7-2, TRBJ2-7)
CASSSPSGSEQYF

SEQ ID NO: 157649 - protein, 12 aa, Homo sapiens
  CDR3 for alpha chain variable domain of TCR clone 78825 (TRAV8-3, TRAJ26)
CAGDNYGQNFVF

SEQ ID NO: 157650 - protein, 12 aa, Homo sapiens
  CDR3 for beta chain variable domain of TCR clone 78825 (TRBV7-9, TRBJ2-7)
CASSIKREEQYF

SEQ ID NO: 157651 - protein, 15 aa, Homo sapiens
  CDR3 for alpha chain variable domain of TCR clone 78826 (TRAV26-1, TRAJ40)
CIVRVITSGTYKYIF

SEQ ID NO: 157652 - protein, 12 aa, Homo sapiens
  CDR3 for beta chain variable domain of TCR clone 78826 (TRBV7-9, TRBJ1-4)
CASSTDREKLFF

SEQ ID NO: 157653 - protein, 17 aa, Homo sapiens
  CDR3 for alpha chain variable domain of TCR clone 78827 (TRAV8-6, TRAJ58)
CAVSSWVGETSGSRLTF

SEQ ID NO: 157654 - protein, 14 aa, Homo sapiens
  CDR3 for beta chain variable domain of TCR clone 78827 (TRBV20-1, TRBJ2-1)
CSAQIGGSANEQFL

SEQ ID NO: 157655 - protein, 13 aa, Homo sapiens
  CDR3 for alpha chain variable domain of TCR clone 78828 (TRAV12-3, TRAJ9)
CAMRNTGGFKNIF

SEQ ID NO: 157656 - protein, 14 aa, Homo sapiens
  CDR3 for beta chain variable domain of TCR clone 78828 (TRBV11-2, TRBJ2-7)
CASSSTGEGYEQYF

SEQ ID NO: 157657 - protein, 13 aa, Homo sapiens
  CDR3 for alpha chain variable domain of TCR clone 78829 (TRAV21, TRAJ27)
CAARPGNAGKSPF

SEQ ID NO: 157658 - protein, 14 aa, Homo sapiens
  CDR3 for beta chain variable domain of TCR clone 78829 (TRBV7-6, TRBJ2-3)
CASSLGTVTDTQYF

SEQ ID NO: 157659 - protein, 12 aa, Homo sapiens
  CDR3 for alpha chain variable domain of TCR clone 78830 (TRAV12-3, TRAJ17)
CAMKLTGNKLTF

SEQ ID NO: 157660 - protein, 13 aa, Homo sapiens
  CDR3 for beta chain variable domain of TCR clone 78830 (TRBV7-3, TRBJ1-1)
CASSQDWGAEAFF

SEQ ID NO: 157661 - protein, 12 aa, Homo sapiens
  CDR3 for alpha chain variable domain of TCR clone 78831 (TRAV12-3, TRAJ17)
CAMTPTGNKLTF

SEQ ID NO: 157662 - protein, 17 aa, Homo sapiens
  CDR3 for beta chain variable domain of TCR clone 78831 (TRBV11-2, TRBJ2-1)
CASSLYPPGVEYNEQFF

SEQ ID NO: 157663 - protein, 13 aa, Homo sapiens
  CDR3 for alpha chain variable domain of TCR clone 78832 (TRAV4, TRAJ20)
CLVGSSNDYKLSF

SEQ ID NO: 157664 - protein, 14 aa, Homo sapiens
  CDR3 for beta chain variable domain of TCR clone 78832 (TRBV7-8, TRBJ2-3)
CASSSRDSTDTQYF

SEQ ID NO: 157665 - protein, 15 aa, Homo sapiens
  CDR3 for alpha chain variable domain of TCR clone 78833 (TRAV30, TRAJ57)
CGTAIPQGGSEKLVF

SEQ ID NO: 157666 - protein, 14 aa, Homo sapiens
  CDR3 for beta chain variable domain of TCR clone 78833 (TRBV7-2, TRBJ2-7)
CASSPKTSFYEQYF

SEQ ID NO: 157667 - protein, 11 aa, Homo sapiens
  CDR3 for alpha chain variable domain of TCR clone 78834 (TRAV12-1, TRAJ34)
CVVNKARELIF

SEQ ID NO: 157668 - protein, 12 aa, Homo sapiens
  CDR3 for beta chain variable domain of TCR clone 78834 (TRBV2, TRBJ2-1)
CAYGPPGNEQFF

SEQ ID NO: 157669 - protein, 17 aa, Homo sapiens
  CDR3 for alpha chain variable domain of TCR clone 78835 (TRAV16, TRAJ26)
CALSGTEFCLCSRNQIV

SEQ ID NO: 157670 - protein, 12 aa, Homo sapiens
  CDR3 for beta chain variable domain of TCR clone 78835 (TRBV11-2, TRBJ2-1)
CASSPGNNEQFF

SEQ ID NO: 157671 - protein, 19 aa, Homo sapiens
  CDR3 for alpha chain variable domain of TCR clone 78836 (TRAV38-1, TRAJ53)
CTFMKHGLESGGSNYKLTF

SEQ ID NO: 157672 - protein, 13 aa, Homo sapiens
  CDR3 for beta chain variable domain of TCR clone 78836 (TRBV19, TRBJ2-7)
CASSPRQSYEQYF

SEQ ID NO: 157673 - protein, 14 aa, Homo sapiens
  CDR3 for alpha chain variable domain of TCR clone 78837 (TRAV17, TRAJ57)
CATDPQGGSEKLVF

SEQ ID NO: 157674 - protein, 16 aa, Homo sapiens
  CDR3 for beta chain variable domain of TCR clone 78837 (TRBV5-1, TRBJ1-1)
CASSSGGNSLNTEAFF

SEQ ID NO: 157675 - protein, 15 aa, Homo sapiens
  CDR3 for alpha chain variable domain of TCR clone 78838 (TRAV12-3, TRAJ6)
CAMSATTGGSYIPTF

SEQ ID NO: 157676 - protein, 14 aa, Homo sapiens
  CDR3 for beta chain variable domain of TCR clone 78838 (TRBV11-2, TRBJ1-2)
CASSLGTANYGYTF

SEQ ID NO: 157677 - protein, 14 aa, Homo sapiens
  CDR3 for alpha chain variable domain of TCR clone 78839 (TRAV3, TRAJ9)
CAVRLNTGGFKTIF

SEQ ID NO: 157678 - protein, 15 aa, Homo sapiens
  CDR3 for beta chain variable domain of TCR clone 78839 (TRBV28, TRBJ2-1)
CASSGLAEVDNEQFF

SEQ ID NO: 157679 - protein, 15 aa, Homo sapiens
  CDR3 for alpha chain variable domain of TCR clone 78840 (TRAV38-2/DV8, TRAJ48)
CAYRSPGSGNEKLTF

SEQ ID NO: 157680 - protein, 13 aa, Homo sapiens
  CDR3 for beta chain variable domain of TCR clone 78840 (TRBV4-2, TRBJ1-2)
CASSLSASGGYTF

SEQ ID NO: 157681 - protein, 14 aa, Homo sapiens
  CDR3 for alpha chain variable domain of TCR clone 78841 (TRAV12-3, TRAJ29)
CAMSPYSGNTPLVF

SEQ ID NO: 157682 - protein, 17 aa, Homo sapiens
  CDR3 for beta chain variable domain of TCR clone 78841 (TRBV13, TRBJ2-3)
CASSLSRVAGGRNTQYF

SEQ ID NO: 157683 - protein, 16 aa, Homo sapiens
  CDR3 for alpha chain variable domain of TCR clone 78842 (TRAV8-3, TRAJ13)
CAVGAYPSGGYQKVTF

SEQ ID NO: 157684 - protein, 15 aa, Homo sapiens
  CDR3 for beta chain variable domain of TCR clone 78842 (TRBV19, TRBJ1-5)
CASSIVWADNEPQHF

SEQ ID NO: 157685 - protein, 15 aa, Homo sapiens
  CDR3 for alpha chain variable domain of TCR clone 78843 (TRAV23/DV6, TRAJ9)
CSKHRGNTGGFKTIF

SEQ ID NO: 157686 - protein, 18 aa, Homo sapiens
  CDR3 for beta chain variable domain of TCR clone 78843 (TRBV7-9, TRBJ2-7)
CASSLTTSGSRTWYEQYF

SEQ ID NO: 157687 - protein, 16 aa, Homo sapiens
  CDR3 for alpha chain variable domain of TCR clone 78844 (TRAV8-2, TRAJ7)
CVVSEGPYYGDNRLAF

SEQ ID NO: 157688 - protein, 13 aa, Homo sapiens
  CDR3 for beta chain variable domain of TCR clone 78844 (TRBV19, TRBJ2-1)
CASSMYRVNEQFF

SEQ ID NO: 157689 - protein, 13 aa, Homo sapiens
  CDR3 for alpha chain variable domain of TCR clone 78845 (TRAV21, TRAJ20)
CAVGLRVDYKLSF

SEQ ID NO: 157690 - protein, 11 aa, Homo sapiens
  CDR3 for beta chain variable domain of TCR clone 78845 (TRBV12-4, TRBJ2-3)
CASSSVRGRYF

SEQ ID NO: 157691 - protein, 16 aa, Homo sapiens
  CDR3 for alpha chain variable domain of TCR clone 78846 (TRAV16, TRAJ21)
CACGWATTSTNFTLDL

SEQ ID NO: 157692 - protein, 15 aa, Homo sapiens
  CDR3 for beta chain variable domain of TCR clone 78846 (TRBV19, TRBJ2-1)
CASSIQATSNNEQFF

SEQ ID NO: 157693 - protein, 13 aa, Homo sapiens
  CDR3 for alpha chain variable domain of TCR clone 78847 (TRAV12-2, TRAJ47)
CAVFMEYGNKMVF

SEQ ID NO: 157694 - protein, 14 aa, Homo sapiens
  CDR3 for beta chain variable domain of TCR clone 78847 (TRBV4-1, TRBJ1-5)
CASSQGPTNQPQHF

SEQ ID NO: 157695 - protein, 15 aa, Homo sapiens
  CDR3 for alpha chain variable domain of TCR clone 78848 (TRAV23/DV6, TRAJ18)
RAARYRGSTLGRLYF

SEQ ID NO: 157696 - protein, 13 aa, Homo sapiens
  CDR3 for beta chain variable domain of TCR clone 78848 (TRBV7-2, TRBJ2-7)
CASSSPSGSEQYF

SEQ ID NO: 157697 - protein, 15 aa, Homo sapiens
  CDR3 for alpha chain variable domain of TCR clone 78849 (TRAV4, TRAJ36)
CLVGDRQTGANNLFF

SEQ ID NO: 157698 - protein, 15 aa, Homo sapiens
  CDR3 for beta chain variable domain of TCR clone 78849 (TRBV9, TRBJ1-6)
CASSVAGTGDSPLHF

SEQ ID NO: 157699 - protein, 13 aa, Homo sapiens
  CDR3 for alpha chain variable domain of TCR clone 78850 (TRAV30, TRAJ31)
CGTETRNNARLMF

SEQ ID NO: 157700 - protein, 14 aa, Homo sapiens
  CDR3 for beta chain variable domain of TCR clone 78850 (TRBV19, TRBJ2-1)
CASPTFVLSGEQFF

SEQ ID NO: 157701 - protein, 12 aa, Homo sapiens
  CDR3 for alpha chain variable domain of TCR clone 78851 (TRAV13-1, TRAJ48)
CAANFGNEKLTF

SEQ ID NO: 157702 - protein, 11 aa, Homo sapiens
  CDR3 for beta chain variable domain of TCR clone 78851 (TRBV20-1, TRBJ1-5)
CSAQGDQPQYF

SEQ ID NO: 157703 - protein, 14 aa, Homo sapiens
  CDR3 for alpha chain variable domain of TCR clone 78852 (TRAV1-2, TRAJ8)
CSVREDTGFQKLVF

SEQ ID NO: 157704 - protein, 15 aa, Homo sapiens
  CDR3 for beta chain variable domain of TCR clone 78852 (TRBV12-4, TRBJ2-5)
CASSPPTGLQETQYF

SEQ ID NO: 157705 - protein, 13 aa, Homo sapiens
  CDR3 for alpha chain variable domain of TCR clone 78853 (TRAV1-2, TRAJ9)
CAALNTGGFKTIF

SEQ ID NO: 157706 - protein, 15 aa, Homo sapiens
  CDR3 for beta chain variable domain of TCR clone 78853 (TRBV7-2, TRBJ2-1)
CASSSGLAGGNEQFF

SEQ ID NO: 157707 - protein, 17 aa, Homo sapiens
  CDR3 for alpha chain variable domain of TCR clone 78854 (TRAV3, TRAJ32)
CTSVLSSYGGATNKLIF

SEQ ID NO: 157708 - protein, 13 aa, Homo sapiens
  CDR3 for beta chain variable domain of TCR clone 78854 (TRBV20-1, TRBJ2-7)
CSARPSTNYEQYF

SEQ ID NO: 157709 - protein, 14 aa, Homo sapiens
  CDR3 for alpha chain variable domain of TCR clone 78855 (TRAV1-2, TRAJ16)
CAVNWFSDGQKLLF

SEQ ID NO: 157710 - protein, 11 aa, Homo sapiens
  CDR3 for beta chain variable domain of TCR clone 78855 (TRBV29-1, TRBJ2-5)
CSEDRTGTQYF

SEQ ID NO: 157711 - protein, 15 aa, Homo sapiens
  CDR3 for alpha chain variable domain of TCR clone 78856 (TRAV13-1, TRAJ57)
CAASNTQGGSEKLVF

SEQ ID NO: 157712 - protein, 16 aa, Homo sapiens
  CDR3 for beta chain variable domain of TCR clone 78856 (TRBV19, TRBJ2-1)
CASSKAGPSSCNEQFF

SEQ ID NO: 157713 - protein, 14 aa, Homo sapiens
  CDR3 for alpha chain variable domain of TCR clone 78857 (TRAV12-2, TRAJ58)
CAMSTETSGSRLTF

SEQ ID NO: 157714 - protein, 12 aa, Homo sapiens
  CDR3 for beta chain variable domain of TCR clone 78857 (TRBV7-8, TRBJ2-7)
CASSLGDREQYF

SEQ ID NO: 157715 - protein, 12 aa, Homo sapiens
  CDR3 for alpha chain variable domain of TCR clone 78858 (TRAV8-3, TRAJ26)
CAGDNYGQNFVF

SEQ ID NO: 157716 - protein, 15 aa, Homo sapiens
  CDR3 for beta chain variable domain of TCR clone 78858 (TRBV10-2, TRBJ2-6)
CASSEQGTGANVLTF

SEQ ID NO: 157717 - protein, 16 aa, Homo sapiens
  CDR3 for alpha chain variable domain of TCR clone 78859 (TRAV30, TRAJ24)
CGTEIVDADRWGKFQF

SEQ ID NO: 157718 - protein, 19 aa, Homo sapiens
  CDR3 for beta chain variable domain of TCR clone 78859 (TRBV25-1, TRBJ2-2)
CAILVYRVDRGRKTGELFF

SEQ ID NO: 157719 - protein, 20 aa, Homo sapiens
  CDR3 for alpha chain variable domain of TCR clone 78860 (TRAV13-1, TRAJ10)
CAAKGHGRRKQTHLWDRHSA

SEQ ID NO: 157720 - protein, 13 aa, Homo sapiens
  CDR3 for beta chain variable domain of TCR clone 78860 (TRBV20-1, TRBJ1-1)
CSARGGGDTEAFF

SEQ ID NO: 157721 - protein, 14 aa, Homo sapiens
  CDR3 for alpha chain variable domain of TCR clone 78861 (TRAV38-2/DV8, TRAJ30)
CAYRSADRDDKIIF

SEQ ID NO: 157722 - protein, 16 aa, Homo sapiens
  CDR3 for beta chain variable domain of TCR clone 78861 (TRBV15, TRBJ1-3)
CATSSPIGFSGNTMYF

SEQ ID NO: 157723 - protein, 12 aa, Homo sapiens
  CDR3 for alpha chain variable domain of TCR clone 78862 (TRAV17, TRAJ57)
CATDGGSEKLVF

SEQ ID NO: 157724 - protein, 13 aa, Homo sapiens
  CDR3 for beta chain variable domain of TCR clone 78862 (TRBV7-9, TRBJ2-7)
CASSFAGAYERYF

SEQ ID NO: 157725 - protein, 15 aa, Homo sapiens
  CDR3 for alpha chain variable domain of TCR clone 78863 (TRAV21, TRAJ40)
CAVRPQTSGTYKYLF

SEQ ID NO: 157726 - protein, 13 aa, Homo sapiens
  CDR3 for beta chain variable domain of TCR clone 78863 (TRBV7-2, TRBJ2-2)
CASSSVRAGELFF

SEQ ID NO: 157727 - protein, 12 aa, Homo sapiens
  CDR3 for alpha chain variable domain of TCR clone 78864 (TRAV12-3, TRAJ17)
CAMTLTGDKLTF

SEQ ID NO: 157728 - protein, 15 aa, Homo sapiens
  CDR3 for beta chain variable domain of TCR clone 78864 (TRBV11-3, TRBJ2-7)
CASSPGPASSYEQYF

SEQ ID NO: 157729 - protein, 13 aa, Homo sapiens
  CDR3 for alpha chain variable domain of TCR clone 78865 (TRAV12-3, TRAJ13)
CAMSSGGYQKVTF

SEQ ID NO: 157730 - protein, 13 aa, Homo sapiens
  CDR3 for beta chain variable domain of TCR clone 78865 (TRBV20-1, TRBJ1-1)
CSAPPGGNTEAFF

SEQ ID NO: 157731 - protein, 11 aa, Homo sapiens
  CDR3 for alpha chain variable domain of TCR clone 78866 (TRAV13-1, TRAJ39)
CASHAGNVLTF

SEQ ID NO: 157732 - protein, 15 aa, Homo sapiens
  CDR3 for beta chain variable domain of TCR clone 78866 (TRBV6-3, TRBJ2-7)
CASSSPGTVFHEQYF

SEQ ID NO: 157733 - protein, 15 aa, Homo sapiens
  CDR3 for alpha chain variable domain of TCR clone 78867 (TRAV29/DV5, TRAJ44)
CAASAGTGTASKLTF

SEQ ID NO: 157734 - protein, 12 aa, Homo sapiens
  CDR3 for beta chain variable domain of TCR clone 78867 (TRBV11-2, TRBJ2-2)
CASSLGGGELFL

SEQ ID NO: 157735 - protein, 16 aa, Homo sapiens
  CDR3 for alpha chain variable domain of TCR clone 78868 (TRAV3, TRAJ21)
CAVRDIERGNFNKFYF

SEQ ID NO: 157736 - protein, 15 aa, Homo sapiens
  CDR3 for beta chain variable domain of TCR clone 78868 (TRBV29-1, TRBJ2-7)
CSVEFFDRGSYEQYF

SEQ ID NO: 157737 - protein, 12 aa, Homo sapiens
  CDR3 for alpha chain variable domain of TCR clone 78869 (TRAV26-2, TRAJ21)
CILTGNFNKFYF

SEQ ID NO: 157738 - protein, 14 aa, Homo sapiens
  CDR3 for beta chain variable domain of TCR clone 78869 (TRBV7-9, TRBJ1-1)
CASTPLQSYTEAFF

SEQ ID NO: 157739 - protein, 16 aa, Homo sapiens
  CDR3 for alpha chain variable domain of TCR clone 78870 (TRAV30, TRAJ24)
CGTEIVDADSWGKFQF

SEQ ID NO: 157740 - protein, 15 aa, Homo sapiens
  CDR3 for beta chain variable domain of TCR clone 78870 (TRBV7-2, TRBJ2-1)
CASSFSGGIYNEQFF

SEQ ID NO: 157741 - protein, 13 aa, Homo sapiens
  CDR3 for alpha chain variable domain of TCR clone 78871 (TRAV26-1, TRAJ30)
CIVNMNRDDKIIF

SEQ ID NO: 157742 - protein, 16 aa, Homo sapiens
  CDR3 for beta chain variable domain of TCR clone 78871 (TRBV16, TRBJ2-7)
CASSRPDGGSSYEQYF

SEQ ID NO: 157743 - protein, 12 aa, Homo sapiens
  CDR3 for alpha chain variable domain of TCR clone 78872 (TRAV17, TRAJ30)
CVPERRDDKIIF

SEQ ID NO: 157744 - protein, 14 aa, Homo sapiens
  CDR3 for beta chain variable domain of TCR clone 78872 (TRBV7-7, TRBJ2-2)
CASSRDGSTGELFF

SEQ ID NO: 157745 - protein, 13 aa, Homo sapiens
  CDR3 for alpha chain variable domain of TCR clone 78873 (TRAV26-2, TRAJ43)
CIPRAVNNNDMRF

SEQ ID NO: 157746 - protein, 15 aa, Homo sapiens
  CDR3 for beta chain variable domain of TCR clone 78873 (TRBV7-2, TRBJ2-1)
CASTHGTGIYNEQFF

SEQ ID NO: 157747 - protein, 13 aa, Homo sapiens
  CDR3 for alpha chain variable domain of TCR clone 78874 (TRAV21, TRAJ57)
CAVTQGGSEKLVF

SEQ ID NO: 157748 - protein, 16 aa, Homo sapiens
  CDR3 for beta chain variable domain of TCR clone 78874 (TRBV29-1, TRBJ2-7)
CSDEDAEDGTAYEQYF

SEQ ID NO: 157749 - protein, 14 aa, Homo sapiens
  CDR3 for alpha chain variable domain of TCR clone 78875 (TRAV1-2, TRAJ16)
CAVNRFSDGQKLLF

SEQ ID NO: 157750 - protein, 16 aa, Homo sapiens
  CDR3 for beta chain variable domain of TCR clone 78875 (TRBV11-2, TRBJ2-1)
CASSPRLAGVYNEQFF

SEQ ID NO: 157751 - protein, 10 aa, Homo sapiens
  CDR3 for alpha chain variable domain of TCR clone 78876 (TRAV30, TRAJ48)
CGIGNEKLTF

SEQ ID NO: 157752 - protein, 14 aa, Homo sapiens
  CDR3 for beta chain variable domain of TCR clone 78876 (TRBV7-6, TRBJ2-3)
CASSLGTVIDTQYF

SEQ ID NO: 157753 - protein, 16 aa, Homo sapiens
  CDR3 for alpha chain variable domain of TCR clone 78877 (TRAV1-2, TRAJ10)
CAVRGVLTGGGNKLTF

SEQ ID NO: 157754 - protein, 13 aa, Homo sapiens
  CDR3 for beta chain variable domain of TCR clone 78877 (TRBV2, TRBJ2-7)
CASSVGGSGEQYF

SEQ ID NO: 157755 - protein, 14 aa, Homo sapiens
  CDR3 for alpha chain variable domain of TCR clone 78878 (TRAV12-2, TRAJ13)
CGVKKTGGYQKVTF

SEQ ID NO: 157756 - protein, 12 aa, Homo sapiens
  CDR3 for beta chain variable domain of TCR clone 78878 (TRBV29-1, TRBJ1-1)
CSESDGNTEAFF

SEQ ID NO: 157757 - protein, 13 aa, Homo sapiens
  CDR3 for alpha chain variable domain of TCR clone 78879 (TRAV8-3, TRAJ40)
CAVVVSGTYKYIF

SEQ ID NO: 157758 - protein, 15 aa, Homo sapiens
  CDR3 for beta chain variable domain of TCR clone 78879 (TRBV19, TRBJ1-5)
CASSIRGAQKQPQHF

SEQ ID NO: 157759 - protein, 14 aa, Homo sapiens
  CDR3 for alpha chain variable domain of TCR clone 78880 (TRAV38-1, TRAJ29)
CAFITPSGNTPLVF

SEQ ID NO: 157760 - protein, 13 aa, Homo sapiens
  CDR3 for beta chain variable domain of TCR clone 78880 (TRBV4-1, TRBJ2-2)
CASSQENTGELFF

SEQ ID NO: 157761 - protein, 14 aa, Homo sapiens
  CDR3 for alpha chain variable domain of TCR clone 78881 (TRAV12-2, TRAJ40)
CAVKIPSGTYKCIF

SEQ ID NO: 157762 - protein, 14 aa, Homo sapiens
  CDR3 for beta chain variable domain of TCR clone 78881 (TRBV18, TRBJ2-5)
CASSPLRVQETQYF

SEQ ID NO: 157763 - protein, 13 aa, Homo sapiens
  CDR3 for alpha chain variable domain of TCR clone 78882 (TRAV13-1, TRAJ5)
CAARDTGRRALTF

SEQ ID NO: 157764 - protein, 12 aa, Homo sapiens
  CDR3 for beta chain variable domain of TCR clone 78882 (TRBV2, TRBJ2-1)
GRGLPSYNEQFF

SEQ ID NO: 157765 - protein, 11 aa, Homo sapiens
  CDR3 for alpha chain variable domain of TCR clone 78883 (TRAV21, TRAJ34)
CAVTNTDKLIF

SEQ ID NO: 157766 - protein, 13 aa, Homo sapiens
  CDR3 for beta chain variable domain of TCR clone 78883 (TRBV12-4, TRBJ1-1)
CASSLGGTTEAFF

SEQ ID NO: 157767 - protein, 17 aa, Homo sapiens
  CDR3 for alpha chain variable domain of TCR clone 78884 (TRAV8-6, TRAJ58)
CAVSSWVGETSGSRLTF

SEQ ID NO: 157768 - protein, 15 aa, Homo sapiens
  CDR3 for beta chain variable domain of TCR clone 78884 (TRBV19, TRBJ1-6)
CASSTQGAVGSPLHF

SEQ ID NO: 157769 - protein, 20 aa, Homo sapiens
  CDR3 for alpha chain variable domain of TCR clone 78885 (TRAV1-2, TRAJ34)
LLKELQMKDSASPNTDKLIF

SEQ ID NO: 157770 - protein, 13 aa, Homo sapiens
  CDR3 for beta chain variable domain of TCR clone 78885 (TRBV7-3, TRBJ1-1)
CASSQDWGAEAFF

SEQ ID NO: 157771 - protein, 14 aa, Homo sapiens
  CDR3 for alpha chain variable domain of TCR clone 78886 (TRAV38-1, TRAJ29)
CAFITPSGNTPLVF

SEQ ID NO: 157772 - protein, 15 aa, Homo sapiens
  CDR3 for beta chain variable domain of TCR clone 78886 (TRBV20-1, TRBJ1-1)
CSASRGVTGNTEAFF

SEQ ID NO: 157773 - protein, 13 aa, Homo sapiens
  CDR3 for alpha chain variable domain of TCR clone 78887 (TRAV27, TRAJ45)
CKSSGGGADGLTF

SEQ ID NO: 157774 - protein, 17 aa, Homo sapiens
  CDR3 for beta chain variable domain of TCR clone 78887 (TRBV11-2, TRBJ2-1)
CASSLYPPGVEYNEQFF

SEQ ID NO: 157775 - protein, 11 aa, Homo sapiens
  CDR3 for alpha chain variable domain of TCR clone 78888 (TRAV21, TRAJ48)
CAVDGNEKLTF

SEQ ID NO: 157776 - protein, 16 aa, Homo sapiens
  CDR3 for beta chain variable domain of TCR clone 78888 (TRBV12-4, TRBJ1-5)
CASSSGPRGSNEPQHF

SEQ ID NO: 157777 - protein, 14 aa, Homo sapiens
  CDR3 for alpha chain variable domain of TCR clone 78889 (TRAV26-1, TRAJ39)
CIVRGSRAGNMLTF

SEQ ID NO: 157778 - protein, 17 aa, Homo sapiens
  CDR3 for beta chain variable domain of TCR clone 78889 (TRBV19, TRBJ2-6)
CASSTGQVFSGANVLTF

SEQ ID NO: 157779 - protein, 13 aa, Homo sapiens
  CDR3 for alpha chain variable domain of TCR clone 78890 (TRAV12-2, TRAJ49)
CAVNMRTGNQFYF

SEQ ID NO: 157780 - protein, 11 aa, Homo sapiens
  CDR3 for beta chain variable domain of TCR clone 78890 (TRBV5-5, TRBJ1-1)
CASGLGVEAFF

SEQ ID NO: 157781 - protein, 10 aa, Homo sapiens
  CDR3 for alpha chain variable domain of TCR clone 78891 (TRAV23/DV6, TRAJ43)
CAAAVAALEQ

SEQ ID NO: 157782 - protein, 13 aa, Homo sapiens
  CDR3 for beta chain variable domain of TCR clone 78891 (TRBV12-4, TRBJ1-2)
CASSLRQGKGYSF

SEQ ID NO: 157783 - protein, 16 aa, Homo sapiens
  CDR3 for alpha chain variable domain of TCR clone 78892 (TRAV12-2, TRAJ43)
CAGDDMRFGAGTRLTV

SEQ ID NO: 157784 - protein, 16 aa, Homo sapiens
  CDR3 for beta chain variable domain of TCR clone 78892 (TRBV2, TRBJ2-4)
CASSEAPGGEQNIQFF

SEQ ID NO: 157785 - protein, 15 aa, Homo sapiens
  CDR3 for alpha chain variable domain of TCR clone 78893 (TRAV17, TRAJ23)
CATDAEDNQGGKLII

SEQ ID NO: 157786 - protein, 12 aa, Homo sapiens
  CDR3 for beta chain variable domain of TCR clone 78893 (TRBV2, TRBJ2-1)
CAKREGYNEQFF

SEQ ID NO: 157787 - protein, 12 aa, Homo sapiens
  CDR3 for alpha chain variable domain of TCR clone 78894 (TRAV3, TRAJ31)
CAVRPRGPRLMF

SEQ ID NO: 157788 - protein, 17 aa, Homo sapiens
  CDR3 for beta chain variable domain of TCR clone 78894 (TRBV7-9, TRBJ1-5)
CASSASQGGYSNQPQHF

SEQ ID NO: 157789 - protein, 12 aa, Homo sapiens
  CDR3 for alpha chain variable domain of TCR clone 78895 (TRAV38-2/DV8, TRAJ57)
CAWKGGSEKLAF

SEQ ID NO: 157790 - protein, 13 aa, Homo sapiens
  CDR3 for beta chain variable domain of TCR clone 78895 (TRBV5-1, TRBJ1-5)
CASSLAQDQPQHF

SEQ ID NO: 157791 - protein, 12 aa, Homo sapiens
  CDR3 for alpha chain variable domain of TCR clone 78896 (TRAV10, TRAJ43)
CVVVRVGNDMRF

SEQ ID NO: 157792 - protein, 15 aa, Homo sapiens
  CDR3 for beta chain variable domain of TCR clone 78896 (TRBV2, TRBJ2-7)
CVSSEGLARSYEQYF

SEQ ID NO: 157793 - protein, 16 aa, Homo sapiens
  CDR3 for alpha chain variable domain of TCR clone 78897 (TRAV12-2, TRAJ48)
CAVRGEANFGNEKLTF

SEQ ID NO: 157794 - protein, 14 aa, Homo sapiens
  CDR3 for beta chain variable domain of TCR clone 78897 (TRBV5-7, TRBJ2-1)
CATGTAYSYNEQFF

SEQ ID NO: 157795 - protein, 14 aa, Homo sapiens
  CDR3 for alpha chain variable domain of TCR clone 78898 (TRAV12-2, TRAJ24)
CAVTPADSWGKSQF

SEQ ID NO: 157796 - protein, 12 aa, Homo sapiens
  CDR3 for beta chain variable domain of TCR clone 78898 (TRBV3-1, TRBJ2-1)
CASSQGSSGQFF

SEQ ID NO: 157797 - protein, 14 aa, Homo sapiens
  CDR3 for alpha chain variable domain of TCR clone 78899 (TRAV12-3, TRAJ10)
SHPPLTGGGNKLTF

SEQ ID NO: 157798 - protein, 15 aa, Homo sapiens
  CDR3 for beta chain variable domain of TCR clone 78899 (TRBV4-1, TRBJ1-4)
CASSDTGGTNEKLFF

SEQ ID NO: 157799 - protein, 15 aa, Homo sapiens
  CDR3 for alpha chain variable domain of TCR clone 78900 (TRAV26-1, TRAJ44)
CIVRANAGTASKLTF

SEQ ID NO: 157800 - protein, 15 aa, Homo sapiens
  CDR3 for beta chain variable domain of TCR clone 78900 (TRBV15, TRBJ1-5)
CATSREQGGNQPQHF

SEQ ID NO: 157801 - protein, 11 aa, Homo sapiens
  CDR3 for alpha chain variable domain of TCR clone 78901 (TRAV12-1, TRAJ8)
CVVTGFQKLVF

SEQ ID NO: 157802 - protein, 11 aa, Homo sapiens
  CDR3 for beta chain variable domain of TCR clone 78901 (TRBV29-1, TRBJ2-5)
CSEDRTGTQYF

SEQ ID NO: 157803 - protein, 12 aa, Homo sapiens
  CDR3 for alpha chain variable domain of TCR clone 78902 (TRAV21, TRAJ39)
CAADNAGNMLTF

SEQ ID NO: 157804 - protein, 15 aa, Homo sapiens
  CDR3 for beta chain variable domain of TCR clone 78902 (TRBV6-1, TRBJ2-1)
CASSEAAYSYNEQFF

SEQ ID NO: 157805 - protein, 13 aa, Homo sapiens
  CDR3 for alpha chain variable domain of TCR clone 78903 (TRAV3, TRAJ30)
CAVRDRGDDKIIP

SEQ ID NO: 157806 - protein, 16 aa, Homo sapiens
  CDR3 for beta chain variable domain of TCR clone 78903 (TRBV7-3, TRBJ2-2)
CASSLKRGTLSGELFF

SEQ ID NO: 157807 - protein, 17 aa, Homo sapiens
  CDR3 for alpha chain variable domain of TCR clone 78904 (TRAV3, TRAJ6)
CAVRDGPRAGGSYIPTF

SEQ ID NO: 157808 - protein, 13 aa, Homo sapiens
  CDR3 for beta chain variable domain of TCR clone 78904 (TRBV19, TRBJ2-7)
CASSSDRTYEQYF

SEQ ID NO: 157809 - protein, 15 aa, Homo sapiens
  CDR3 for alpha chain variable domain of TCR clone 78905 (TRAV38-1, TRAJ37)
CAFIFGSGNTGKLIF

SEQ ID NO: 157810 - protein, 18 aa, Homo sapiens
  CDR3 for beta chain variable domain of TCR clone 78905 (TRBV25-1, TRBJ2-1)
CASSESRAGGPGYNEQFF

SEQ ID NO: 157811 - protein, 13 aa, Homo sapiens
  CDR3 for alpha chain variable domain of TCR clone 78906 (TRAV10, TRAJ45)
CVGSGGGADRLTF

SEQ ID NO: 157812 - protein, 15 aa, Homo sapiens
  CDR3 for beta chain variable domain of TCR clone 78906 (TRBV5-1, TRBJ2-7)
CASSLYPDGGYEQYF

SEQ ID NO: 157813 - protein, 13 aa, Homo sapiens
  CDR3 for alpha chain variable domain of TCR clone 78907 (TRAV1-2, TRAJ9)
CAALNTGGFKTIL

SEQ ID NO: 157814 - protein, 14 aa, Homo sapiens
  CDR3 for beta chain variable domain of TCR clone 78907 (TRBV7-3, TRBJ2-1)
CASSLAGGTNEQFF

SEQ ID NO: 157815 - protein, 14 aa, Homo sapiens
  CDR3 for alpha chain variable domain of TCR clone 78908 (TRAV9-2, TRAJ39)
CALYIYNAGNMLTF

SEQ ID NO: 157816 - protein, 14 aa, Homo sapiens
  CDR3 for beta chain variable domain of TCR clone 78908 (TRBV7-2, TRBJ2-5)
CASSFTQGQETQYF

SEQ ID NO: 157817 - protein, 15 aa, Homo sapiens
  CDR3 for alpha chain variable domain of TCR clone 78909 (TRAV23/DV6, TRAJ44)
CAARLLTGTASKLTF

SEQ ID NO: 157818 - protein, 15 aa, Homo sapiens
  CDR3 for beta chain variable domain of TCR clone 78909 (TRBV12-4, TRBJ1-5)
CVSTLNRVSNQPQHF

SEQ ID NO: 157819 - protein, 13 aa, Homo sapiens
  CDR3 for alpha chain variable domain of TCR clone 78910 (TRAV35, TRAJ21)
CAGQLSNFNKFYL

SEQ ID NO: 157820 - protein, 11 aa, Homo sapiens
  CDR3 for beta chain variable domain of TCR clone 78910 (TRBV7-6, TRBJ2-5)
CASSSQETQYF

SEQ ID NO: 157821 - protein, 12 aa, Homo sapiens
  CDR3 for alpha chain variable domain of TCR clone 78911 (TRAV13-1, TRAJ17)
CAARTAGNKLTF

SEQ ID NO: 157822 - protein, 15 aa, Homo sapiens
  CDR3 for beta chain variable domain of TCR clone 78911 (TRBV7-6, TRBJ1-1)
CASSPQGGANTEAFL

SEQ ID NO: 157823 - protein, 15 aa, Homo sapiens
  CDR3 for alpha chain variable domain of TCR clone 78912 (TRAV3, TRAJ13)
CAVRDIAGGYQKVTF

SEQ ID NO: 157824 - protein, 13 aa, Homo sapiens
  CDR3 for beta chain variable domain of TCR clone 78912 (TRBV2, TRBJ2-2)
CASSKKNTGELFL

SEQ ID NO: 157825 - protein, 21 aa, Homo sapiens
  CDR3 for alpha chain variable domain of TCR clone 78913 (TRAV10, TRAJ4)
TASQLSDSASCTTGGYNKLIF

SEQ ID NO: 157826 - protein, 12 aa, Homo sapiens
  CDR3 for beta chain variable domain of TCR clone 78913 (TRBV3-1, TRBJ2-2)
CASSLFPGELFF

SEQ ID NO: 157827 - protein, 14 aa, Homo sapiens
  CDR3 for alpha chain variable domain of TCR clone 78914 (TRAV3, TRAJ6)
CAVRDWEGSYIPTF

SEQ ID NO: 157828 - protein, 17 aa, Homo sapiens
  CDR3 for beta chain variable domain of TCR clone 78914 (TRBV6-5, TRBJ2-1)
CASRLSGRFESYNEQFF

SEQ ID NO: 157829 - protein, 18 aa, Homo sapiens
  CDR3 for alpha chain variable domain of TCR clone 78915 (TRAV26-2, TRAJ54)
CILRDGEVGIQGAQKLVF

SEQ ID NO: 157830 - protein, 16 aa, Homo sapiens
  CDR3 for beta chain variable domain of TCR clone 78915 (TRBV6-1, TRBJ2-5)
CASSETLDRGAETQYF

SEQ ID NO: 157831 - protein, 12 aa, Homo sapiens
  CDR3 for alpha chain variable domain of TCR clone 78916 (TRAV13-1, TRAJ49)
CAASPMVNQFYF

SEQ ID NO: 157832 - protein, 13 aa, Homo sapiens
  CDR3 for beta chain variable domain of TCR clone 78916 (TRBV20-1, TRBJ2-2)
CSASAAGTGELFF

SEQ ID NO: 157833 - protein, 12 aa, Homo sapiens
  CDR3 for alpha chain variable domain of TCR clone 78917 (TRAV13-2, TRAJ8)
CAPWLGFQKLVF

SEQ ID NO: 157834 - protein, 18 aa, Homo sapiens
  CDR3 for beta chain variable domain of TCR clone 78917 (TRBV12-4, TRBJ2-2)
CASSLVAGTRGRTGELFF

SEQ ID NO: 157835 - protein, 15 aa, Homo sapiens
  CDR3 for alpha chain variable domain of TCR clone 78918 (TRAV8-3, TRAJ45)
CASSYSGGGADGLTF

SEQ ID NO: 157836 - protein, 12 aa, Homo sapiens
  CDR3 for beta chain variable domain of TCR clone 78918 (TRBV12-5, TRBJ2-5)
CASGQGVETQYF

SEQ ID NO: 157837 - protein, 13 aa, Homo sapiens
  CDR3 for alpha chain variable domain of TCR clone 78919 (TRAV27, TRAJ45)
CRSSGGGADGITF

SEQ ID NO: 157838 - protein, 17 aa, Homo sapiens
  CDR3 for beta chain variable domain of TCR clone 78919 (TRBV11-2, TRBJ2-1)
CASSLYPPGVEYNEQSF

SEQ ID NO: 157839 - protein, 13 aa, Homo sapiens
  CDR3 for alpha chain variable domain of TCR clone 78920 (TRAV17, TRAJ15)
CATDARAGTALIF

SEQ ID NO: 157840 - protein, 15 aa, Homo sapiens
  CDR3 for beta chain variable domain of TCR clone 78920 (TRBV20-1, TRBJ2-7)
CSARDRVSGMDELYF

SEQ ID NO: 157841 - protein, 16 aa, Homo sapiens
  CDR3 for alpha chain variable domain of TCR clone 78921 (TRAV30, TRAJ48)
CGTEIKSNFGNEKLTF

SEQ ID NO: 157842 - protein, 16 aa, Homo sapiens
  CDR3 for beta chain variable domain of TCR clone 78921 (TRBV27, TRBJ2-1)
CQQFRAGGQSADEQFF

SEQ ID NO: 157843 - protein, 17 aa, Homo sapiens
  CDR3 for alpha chain variable domain of TCR clone 78922 (TRAV38-1, TRAJ45)
CAFMKHYMGGGAGGLTF

SEQ ID NO: 157844 - protein, 19 aa, Homo sapiens
  CDR3 for beta chain variable domain of TCR clone 78922 (TRBV6-1, TRBJ2-5)
CASSEQGLAGGLYQETQYF

SEQ ID NO: 157845 - protein, 13 aa, Homo sapiens
  CDR3 for alpha chain variable domain of TCR clone 78923 (TRAV23/DV6, TRAJ47)
CAASMTWGNKLVF

SEQ ID NO: 157846 - protein, 14 aa, Homo sapiens
  CDR3 for beta chain variable domain of TCR clone 78923 (TRBV7-3, TRBJ1-1)
CASSLKGGNTEAFF

SEQ ID NO: 157847 - protein, 14 aa, Homo sapiens
  CDR3 for alpha chain variable domain of TCR clone 78924 (TRAV23/DV6, TRAJ22)
CAASVSGSARQLTF

SEQ ID NO: 157848 - protein, 15 aa, Homo sapiens
  CDR3 for beta chain variable domain of TCR clone 78924 (TRBV7-9, TRBJ1-5)
CASSQGHQPNQPQHF

SEQ ID NO: 157849 - protein, 13 aa, Homo sapiens
  CDR3 for alpha chain variable domain of TCR clone 78925 (TRAV1-1, TRAJ15)
CAVVDQAGTALIF

SEQ ID NO: 157850 - protein, 16 aa, Homo sapiens
  CDR3 for beta chain variable domain of TCR clone 78925 (TRBV7-3, TRBJ2-2)
CASSLTGTGTTGELFF

SEQ ID NO: 157851 - protein, 17 aa, Homo sapiens
  CDR3 for alpha chain variable domain of TCR clone 78926 (TRAV23/DV6, TRAJ57)
CAASSTLSQGGSEKLVF

SEQ ID NO: 157852 - protein, 14 aa, Homo sapiens
  CDR3 for beta chain variable domain of TCR clone 78926 (TRBV25-1, TRBJ1-1)
CASTHLGGKTEAFF

SEQ ID NO: 157853 - protein, 13 aa, Homo sapiens
  CDR3 for alpha chain variable domain of TCR clone 78927 (TRAV12-2, TRAJ4)
CAGFSVGYNKLIF

SEQ ID NO: 157854 - protein, 14 aa, Homo sapiens
  CDR3 for beta chain variable domain of TCR clone 78927 (TRBV24-1, TRBJ1-1)
CATSIPRGDTEAFF

SEQ ID NO: 157855 - protein, 14 aa, Homo sapiens
  CDR3 for alpha chain variable domain of TCR clone 78928 (TRAV13-2, TRAJ11)
CAETRNSGYSTLTF

SEQ ID NO: 157856 - protein, 11 aa, Homo sapiens
  CDR3 for beta chain variable domain of TCR clone 78928 (TRBV10-3, TRBJ2-7)
CAISEGLEQYF

SEQ ID NO: 157857 - protein, 12 aa, Homo sapiens
  CDR3 for alpha chain variable domain of TCR clone 78929 (TRAV3, TRAJ26)
FAVRDYGQNFVF

SEQ ID NO: 157858 - protein, 16 aa, Homo sapiens
  CDR3 for beta chain variable domain of TCR clone 78929 (TRBV11-2, TRBJ1-2)
CASSPSGREANYGYTF

SEQ ID NO: 157859 - protein, 11 aa, Homo sapiens
  CDR3 for alpha chain variable domain of TCR clone 78930 (TRAV17, TRAJ43)
CATPRSNDMRF

SEQ ID NO: 157860 - protein, 14 aa, Homo sapiens
  CDR3 for beta chain variable domain of TCR clone 78930 (TRBV12-4, TRBJ1-1)
CASSLGTGGTEAFF

SEQ ID NO: 157861 - protein, 13 aa, Homo sapiens
  CDR3 for alpha chain variable domain of TCR clone 78931 (TRAV24, TRAJ13)
CAFDSGGYQKVTF

SEQ ID NO: 157862 - protein, 17 aa, Homo sapiens
  CDR3 for beta chain variable domain of TCR clone 78931 (TRBV13, TRBJ2-3)
CASSLSRVAGGRNTQYF

SEQ ID NO: 157863 - protein, 13 aa, Homo sapiens
  CDR3 for alpha chain variable domain of TCR clone 78932 (TRAV8-4, TRAJ10)
CAAFTGGGNKLTF

SEQ ID NO: 157864 - protein, 15 aa, Homo sapiens
  CDR3 for beta chain variable domain of TCR clone 78932 (TRBV2, TRBJ2-3)
CASSDFDKATDTQYF

SEQ ID NO: 157865 - protein, 14 aa, Homo sapiens
  CDR3 for alpha chain variable domain of TCR clone 78933 (TRAV3, TRAJ36)
CAVRDGTGASNLFF

SEQ ID NO: 157866 - protein, 16 aa, Homo sapiens
  CDR3 for beta chain variable domain of TCR clone 78933 (TRBV7-3, TRBJ2-5)
CASIQPGGSVQETQYF

SEQ ID NO: 157867 - protein, 16 aa, Homo sapiens
  CDR3 for alpha chain variable domain of TCR clone 78934 (TRAV12-1, TRAJ42)
CVVTPYYGGSQGNLIF

SEQ ID NO: 157868 - protein, 15 aa, Homo sapiens
  CDR3 for beta chain variable domain of TCR clone 78934 (TRBV4-2, TRBJ2-7)
CASSQGGRGIYEQYF

SEQ ID NO: 157869 - protein, 14 aa, Homo sapiens
  CDR3 for alpha chain variable domain of TCR clone 78935 (TRAV1-2, TRAJ16)
CAVNRFSHGQKLLF

SEQ ID NO: 157870 - protein, 15 aa, Homo sapiens
  CDR3 for beta chain variable domain of TCR clone 78935 (TRBV9, TRBJ1-6)
CASSVAGTGDSPLHF

SEQ ID NO: 157871 - protein, 14 aa, Homo sapiens
  CDR3 for alpha chain variable domain of TCR clone 78936 (TRAV35, TRAJ33)
CAGSSQDSNYQFIW

SEQ ID NO: 157872 - protein, 15 aa, Homo sapiens
  CDR3 for beta chain variable domain of TCR clone 78936 (TRBV20-1, TRBJ2-7)
CSAESGTSGAYEQYF

SEQ ID NO: 157873 - protein, 15 aa, Homo sapiens
  CDR3 for alpha chain variable domain of TCR clone 78937 (TRAV2, TRAJ22)
CAVPSRGGSARQLTF

SEQ ID NO: 157874 - protein, 17 aa, Homo sapiens
  CDR3 for beta chain variable domain of TCR clone 78937 (TRBV11-2, TRBJ2-1)
CASSLYPPGVEYNEQFF

SEQ ID NO: 157875 - protein, 14 aa, Homo sapiens
  CDR3 for alpha chain variable domain of TCR clone 78938 (TRAV21, TRAJ35)
CAVMPIGFGNVLHC

SEQ ID NO: 157876 - protein, 13 aa, Homo sapiens
  CDR3 for beta chain variable domain of TCR clone 78938 (TRBV7-9, TRBJ2-7)
CASSFAGAYEQYF

SEQ ID NO: 157877 - protein, 12 aa, Homo sapiens
  CDR3 for alpha chain variable domain of TCR clone 78939 (TRAV21, TRAJ39)
CAADNAGNMLTF

SEQ ID NO: 157878 - protein, 12 aa, Homo sapiens
  CDR3 for beta chain variable domain of TCR clone 78939 (TRBV5-4, TRBJ2-7)
CASRWAGQGENF

SEQ ID NO: 157879 - protein, 14 aa, Homo sapiens
  CDR3 for alpha chain variable domain of TCR clone 78940 (TRAV17, TRAJ22)
CATSPSGSARPLTF

SEQ ID NO: 157880 - protein, 15 aa, Homo sapiens
  CDR3 for beta chain variable domain of TCR clone 78940 (TRBV4-1, TRBJ2-5)
CASSQWDLYQETQYF

SEQ ID NO: 157881 - protein, 16 aa, Homo sapiens
  CDR3 for alpha chain variable domain of TCR clone 78941 (TRAV30, TRAJ24)
CGTEIVDADSGGKSQF

SEQ ID NO: 157882 - protein, 14 aa, Homo sapiens
  CDR3 for beta chain variable domain of TCR clone 78941 (TRBV12-5, TRBJ2-5)
CASGSRTHQETQYF

SEQ ID NO: 157883 - protein, 12 aa, Homo sapiens
  CDR3 for alpha chain variable domain of TCR clone 78942 (TRAV12-3, TRAJ17)
CAMTLTGNKLTF

SEQ ID NO: 157884 - protein, 14 aa, Homo sapiens
  CDR3 for beta chain variable domain of TCR clone 78942 (TRBV13, TRBJ2-7)
CASSLKGASYEQYF

SEQ ID NO: 157885 - protein, 11 aa, Homo sapiens
  CDR3 for alpha chain variable domain of TCR clone 78943 (TRAV12-1, TRAJ21)
CVVNNFNKSYF

SEQ ID NO: 157886 - protein, 17 aa, Homo sapiens
  CDR3 for beta chain variable domain of TCR clone 78943 (TRBV7-8, TRBJ2-1)
CASSPPTGTLAYNEQFF

SEQ ID NO: 157887 - protein, 11 aa, Homo sapiens
  CDR3 for alpha chain variable domain of TCR clone 78944 (TRAV35, TRAJ30)
CAGPVDDKIIF

SEQ ID NO: 157888 - protein, 14 aa, Homo sapiens
  CDR3 for beta chain variable domain of TCR clone 78944 (TRBV7-6, TRBJ1-6)
CASSQAGGGSPLHF

SEQ ID NO: 157889 - protein, 17 aa, Homo sapiens
  CDR3 for alpha chain variable domain of TCR clone 78945 (TRAV36/DV7, TRAJ52)
CAVAQRAGGTSYGKLTF

SEQ ID NO: 157890 - protein, 12 aa, Homo sapiens
  CDR3 for beta chain variable domain of TCR clone 78945 (TRBV19, TRBJ1-5)
CASSIAQQPQHF

SEQ ID NO: 157891 - protein, 14 aa, Homo sapiens
  CDR3 for alpha chain variable domain of TCR clone 78946 (TRAV1-2, TRAJ8)
CAVREDTGFQKLVF

SEQ ID NO: 157892 - protein, 15 aa, Homo sapiens
  CDR3 for beta chain variable domain of TCR clone 78946 (TRBV15, TRBJ1-1)
CATSLQGGRNTEAFL

SEQ ID NO: 157893 - protein, 13 aa, Homo sapiens
  CDR3 for alpha chain variable domain of TCR clone 78947 (TRAV27, TRAJ41)
CAGEGNSGYALNF

SEQ ID NO: 157894 - protein, 14 aa, Homo sapiens
  CDR3 for beta chain variable domain of TCR clone 78947 (TRBV25-1, TRBJ1-1)
CASTHLGGNTEAVF

SEQ ID NO: 157895 - protein, 11 aa, Homo sapiens
  CDR3 for alpha chain variable domain of TCR clone 78948 (TRAV1-1, TRAJ23)
CAVRQGGKLIF

SEQ ID NO: 157896 - protein, 17 aa, Homo sapiens
  CDR3 for beta chain variable domain of TCR clone 78948 (TRBV28, TRBJ2-5)
CASSRQGGLAGAETQYF

SEQ ID NO: 157897 - protein, 14 aa, Homo sapiens
  CDR3 for alpha chain variable domain of TCR clone 78949 (TRAV1-2, TRAJ16)
CAVNRFSDGQKLLF

SEQ ID NO: 157898 - protein, 13 aa, Homo sapiens
  CDR3 for beta chain variable domain of TCR clone 78949 (TRBV5-4, TRBJ1-1)
CASSFQVNTEAFF

SEQ ID NO: 157899 - protein, 12 aa, Homo sapiens
  CDR3 for alpha chain variable domain of TCR clone 78950 (TRAV12-3, TRAJ17)
CAMTLTGNKLTS

SEQ ID NO: 157900 - protein, 14 aa, Homo sapiens
  CDR3 for beta chain variable domain of TCR clone 78950 (TRBV9, TRBJ2-1)
CASSVDPRGKEQFF

SEQ ID NO: 157901 - protein, 14 aa, Homo sapiens
  CDR3 for alpha chain variable domain of TCR clone 78951 (TRAV38-2/DV8, TRAJ23)
CAYRSQNQGGKLIF

SEQ ID NO: 157902 - protein, 13 aa, Homo sapiens
  CDR3 for beta chain variable domain of TCR clone 78951 (TRBV7-9, TRBJ2-7)
CASSFAGAYEQYF

SEQ ID NO: 157903 - protein, 16 aa, Homo sapiens
  CDR3 for alpha chain variable domain of TCR clone 78952 (TRAV16, TRAJ52)
CALSAAGGTSYGKLTF

SEQ ID NO: 157904 - protein, 12 aa, Homo sapiens
  CDR3 for beta chain variable domain of TCR clone 78952 (TRBV12-4, TRBJ1-3)
RASSFSGNTIYF

SEQ ID NO: 157905 - protein, 16 aa, Homo sapiens
  CDR3 for alpha chain variable domain of TCR clone 78953 (TRAV12-3, TRAJ53)
CAMSPGSEGSNYKLTF

SEQ ID NO: 157906 - protein, 14 aa, Homo sapiens
  CDR3 for beta chain variable domain of TCR clone 78953 (TRBV4-1, TRBJ2-7)
CASSPVAGGDEQYF

SEQ ID NO: 157907 - protein, 18 aa, Homo sapiens
  CDR3 for alpha chain variable domain of TCR clone 78954 (TRAV21, TRAJ53)
CAVKGGENSGGSNYKLTF

SEQ ID NO: 157908 - protein, 14 aa, Homo sapiens
  CDR3 for beta chain variable domain of TCR clone 78954 (TRBV19, TRBJ2-1)
CASPTFVLSGEQFF

SEQ ID NO: 157909 - protein, 12 aa, Homo sapiens
  CDR3 for alpha chain variable domain of TCR clone 78955 (TRAV21, TRAJ31)
CVLAGNNARLMF

SEQ ID NO: 157910 - protein, 16 aa, Homo sapiens
  CDR3 for beta chain variable domain of TCR clone 78955 (TRBV27, TRBJ2-5)
CASSLGPGGTKETQYF

SEQ ID NO: 157911 - protein, 12 aa, Homo sapiens
  CDR3 for alpha chain variable domain of TCR clone 78956 (TRAV12-3, TRAJ17)
CAMTLTGNKLTF

SEQ ID NO: 157912 - protein, 15 aa, Homo sapiens
  CDR3 for beta chain variable domain of TCR clone 78956 (TRBV10-2, TRBJ2-7)
CASWNRGQATYEQYF

SEQ ID NO: 157913 - protein, 12 aa, Homo sapiens
  CDR3 for alpha chain variable domain of TCR clone 78957 (TRAV36/DV7, TRAJ54)
RAVVRGAQKLVS

SEQ ID NO: 157914 - protein, 14 aa, Homo sapiens
  CDR3 for beta chain variable domain of TCR clone 78957 (TRBV7-3, TRBJ1-1)
CASSLKGGNTEAFF

SEQ ID NO: 157915 - protein, 15 aa, Homo sapiens
  CDR3 for alpha chain variable domain of TCR clone 78958 (TRAV17, TRAJ56)
CATEPFTGANSKLTF

SEQ ID NO: 157916 - protein, 14 aa, Homo sapiens
  CDR3 for beta chain variable domain of TCR clone 78958 (TRBV19, TRBJ2-1)
CASPTFVLSGELFF

SEQ ID NO: 157917 - protein, 16 aa, Homo sapiens
  CDR3 for alpha chain variable domain of TCR clone 78959 (TRAV12-1, TRAJ22)
CVVNKISSGSARQLTF

SEQ ID NO: 157918 - protein, 13 aa, Homo sapiens
  CDR3 for beta chain variable domain of TCR clone 78959 (TRBV19, TRBJ2-1)
CASNGGVFSEQFF

SEQ ID NO: 157919 - protein, 14 aa, Homo sapiens
  CDR3 for alpha chain variable domain of TCR clone 78960 (TRAV13-1, TRAJ44)
CAAKATGTVSKLTF

SEQ ID NO: 157920 - protein, 17 aa, Homo sapiens
  CDR3 for beta chain variable domain of TCR clone 78960 (TRBV7-3, TRBJ2-3)
CASSLMKRMRGADTQYF

SEQ ID NO: 157921 - protein, 13 aa, Homo sapiens
  CDR3 for alpha chain variable domain of TCR clone 78961 (TRAV9-2, TRAJ53)
CALSGGSNYKLTF

SEQ ID NO: 157922 - protein, 17 aa, Homo sapiens
  CDR3 for beta chain variable domain of TCR clone 78961 (TRBV11-2, TRBJ2-1)
CARSLYPPGVEYNEQFF

SEQ ID NO: 157923 - protein, 13 aa, Homo sapiens
  CDR3 for alpha chain variable domain of TCR clone 78962 (TRAV3, TRAJ36)
CAVRDTGANNLFF

SEQ ID NO: 157924 - protein, 13 aa, Homo sapiens
  CDR3 for beta chain variable domain of TCR clone 78962 (TRBV19, TRBJ1-2)
CASSVPGQDGYAF

SEQ ID NO: 157925 - protein, 16 aa, Homo sapiens
  CDR3 for alpha chain variable domain of TCR clone 78963 (TRAV3, TRAJ5)
CAVRNLMDTGRRALTF

SEQ ID NO: 157926 - protein, 16 aa, Homo sapiens
  CDR3 for beta chain variable domain of TCR clone 78963 (TRBV12-5, TRBJ2-5)
CASGPRTNGNQETQYF

SEQ ID NO: 157927 - protein, 13 aa, Homo sapiens
  CDR3 for alpha chain variable domain of TCR clone 78964 (TRAV8-3, TRAJ48)
CAVVPFGNEKLTF

SEQ ID NO: 157928 - protein, 14 aa, Homo sapiens
  CDR3 for beta chain variable domain of TCR clone 78964 (TRBV19, TRBJ2-1)
CASPTFVLSGEQFF

SEQ ID NO: 157929 - protein, 14 aa, Homo sapiens
  CDR3 for alpha chain variable domain of TCR clone 78965 (TRAV35, TRAJ22)
CAGLRPGAARQLTF

SEQ ID NO: 157930 - protein, 13 aa, Homo sapiens
  CDR3 for beta chain variable domain of TCR clone 78965 (TRBV20-1, TRBJ2-7)
CSATHTSGYEQYF

SEQ ID NO: 157931 - protein, 15 aa, Homo sapiens
  CDR3 for alpha chain variable domain of TCR clone 78966 (TRAV2, TRAJ9)
CAVAALNTGGFKTIF

SEQ ID NO: 157932 - protein, 17 aa, Homo sapiens
  CDR3 for beta chain variable domain of TCR clone 78966 (TRBV7-8, TRBJ2-6)
CASSAGTGGAGANVLTF

SEQ ID NO: 157933 - protein, 15 aa, Homo sapiens
  CDR3 for alpha chain variable domain of TCR clone 78967 (TRAV21, TRAJ53)
CATLNSGGSNYKLTF

SEQ ID NO: 157934 - protein, 15 aa, Homo sapiens
  CDR3 for beta chain variable domain of TCR clone 78967 (TRBV18, TRBJ2-1)
CASSPPSAPYNEQFF

SEQ ID NO: 157935 - protein, 12 aa, Homo sapiens
  CDR3 for alpha chain variable domain of TCR clone 78968 (TRAV36/DV7, TRAJ54)
CAVVRGAQKQVF

SEQ ID NO: 157936 - protein, 14 aa, Homo sapiens
  CDR3 for beta chain variable domain of TCR clone 78968 (TRBV7-3, TRBJ1-1)
CASSLKGGNTEAFF

SEQ ID NO: 157937 - protein, 15 aa, Homo sapiens
  CDR3 for alpha chain variable domain of TCR clone 78969 (TRAV21, TRAJ53)
CATLNSGGSNYKLTF

SEQ ID NO: 157938 - protein, 15 aa, Homo sapiens
  CDR3 for beta chain variable domain of TCR clone 78969 (TRBV2, TRBJ2-7)
CASSGDGRGRYEQYF

SEQ ID NO: 157939 - protein, 15 aa, Homo sapiens
  CDR3 for alpha chain variable domain of TCR clone 78970 (TRAV12-2, TRAJ22)
CIVRVSFWFCKATDL

SEQ ID NO: 157940 - protein, 13 aa, Homo sapiens
  CDR3 for beta chain variable domain of TCR clone 78970 (TRBV7-9, TRBJ1-2)
CASSLKQNYGYTF

SEQ ID NO: 157941 - protein, 18 aa, Homo sapiens
  CDR3 for alpha chain variable domain of TCR clone 78971 (TRAV26-2, TRAJ45)
CILRVDKYSGGGADGLTF

SEQ ID NO: 157942 - protein, 18 aa, Homo sapiens
  CDR3 for beta chain variable domain of TCR clone 78971 (TRBV2, TRBJ1-4)
CASNLYREQLMKNCFLAV

SEQ ID NO: 157943 - protein, 15 aa, Homo sapiens
  CDR3 for alpha chain variable domain of TCR clone 78972 (TRAV3, TRAJ22)
CAVRDRGGSARQMTF

SEQ ID NO: 157944 - protein, 14 aa, Homo sapiens
  CDR3 for beta chain variable domain of TCR clone 78972 (TRBV25-1, TRBJ1-1)
CASTHLGGNTEAFF

SEQ ID NO: 157945 - protein, 15 aa, Homo sapiens
  CDR3 for alpha chain variable domain of TCR clone 78973 (TRAV12-1, TRAJ9)
CVVSFGDTGGFNTIF

SEQ ID NO: 157946 - protein, 13 aa, Homo sapiens
  CDR3 for beta chain variable domain of TCR clone 78973 (TRBV2, TRBJ1-4)
CASSERAGEKLFF

SEQ ID NO: 157947 - protein, 17 aa, Homo sapiens
  CDR3 for alpha chain variable domain of TCR clone 78974 (TRAV3, TRAJ6)
CAVRDGPRAGGSYTPTF

SEQ ID NO: 157948 - protein, 14 aa, Homo sapiens
  CDR3 for beta chain variable domain of TCR clone 78974 (TRBV11-2, TRBJ1-2)
CASSLGTANYGYTF

SEQ ID NO: 157949 - protein, 13 aa, Homo sapiens
  CDR3 for alpha chain variable domain of TCR clone 78975 (TRAV27, TRAJ56)
CAGKPGANSKLTF

SEQ ID NO: 157950 - protein, 14 aa, Homo sapiens
  CDR3 for beta chain variable domain of TCR clone 78975 (TRBV7-2, TRBJ2-7)
CANSPKTSFYEQYF

SEQ ID NO: 157951 - protein, 10 aa, Homo sapiens
  CDR3 for alpha chain variable domain of TCR clone 78976 (TRAV30, TRAJ48)
CGIGNEKLTF

SEQ ID NO: 157952 - protein, 20 aa, Homo sapiens
  CDR3 for beta chain variable domain of TCR clone 78976 (TRBV7-8, TRBJ2-2)
CASSHLFPGPTIHITGELFF

SEQ ID NO: 157953 - protein, 15 aa, Homo sapiens
  CDR3 for alpha chain variable domain of TCR clone 78977 (TRAV23/DV6, TRAJ18)
CAARYRGSTLGRLYF

SEQ ID NO: 157954 - protein, 13 aa, Homo sapiens
  CDR3 for beta chain variable domain of TCR clone 78977 (TRBV12-4, TRBJ1-1)
CASSPGTGFEAFF

SEQ ID NO: 157955 - protein, 12 aa, Homo sapiens
  CDR3 for alpha chain variable domain of TCR clone 78978 (TRAV3, TRAJ31)
CAVRPRGPRLMF

SEQ ID NO: 157956 - protein, 17 aa, Homo sapiens
  CDR3 for beta chain variable domain of TCR clone 78978 (TRBV7-9, TRBJ1-5)
CASSASQGGYSNQHQHF

SEQ ID NO: 157957 - protein, 14 aa, Homo sapiens
  CDR3 for alpha chain variable domain of TCR clone 78979 (TRAV1-2, TRAJ16)
CAVNRFSDGQKLLF

SEQ ID NO: 157958 - protein, 12 aa, Homo sapiens
  CDR3 for beta chain variable domain of TCR clone 78979 (TRBV7-9, TRBJ2-7)
CASSVEGYEQYF

SEQ ID NO: 157959 - protein, 14 aa, Homo sapiens
  CDR3 for alpha chain variable domain of TCR clone 78980 (TRAV8-3, TRAJ4)
CAVGAARGYNKLIF

SEQ ID NO: 157960 - protein, 15 aa, Homo sapiens
  CDR3 for beta chain variable domain of TCR clone 78980 (TRBV6-5, TRBJ2-1)
CASSYDAGAGNEQFF

SEQ ID NO: 157961 - protein, 15 aa, Homo sapiens
  CDR3 for alpha chain variable domain of TCR clone 78981 (TRAV2, TRAJ24)
CAVVRLKNSGGKLQF

SEQ ID NO: 157962 - protein, 16 aa, Homo sapiens
  CDR3 for beta chain variable domain of TCR clone 78981 (TRBV7-7, TRBJ2-3)
CASSPGTSGSTDTQYF

SEQ ID NO: 157963 - protein, 12 aa, Homo sapiens
  CDR3 for alpha chain variable domain of TCR clone 78982 (TRAV13-1, TRAJ21)
CAAKEGFNKFYF

SEQ ID NO: 157964 - protein, 15 aa, Homo sapiens
  CDR3 for beta chain variable domain of TCR clone 78982 (TRBV11-3, TRBJ2-2)
CASSLVGTGAGELFF

SEQ ID NO: 157965 - protein, 14 aa, Homo sapiens
  CDR3 for alpha chain variable domain of TCR clone 78983 (TRAV9-2, TRAJ39)
CALYIYSAGNMLTF

SEQ ID NO: 157966 - protein, 17 aa, Homo sapiens
  CDR3 for beta chain variable domain of TCR clone 78983 (TRBV20-1, TRBJ2-2)
CSASGSGQGGLTGELFF

SEQ ID NO: 157967 - protein, 14 aa, Homo sapiens
  CDR3 for alpha chain variable domain of TCR clone 78984 (TRAV12-3, TRAJ10)
SHLPLTGGGNKLTF

SEQ ID NO: 157968 - protein, 11 aa, Homo sapiens
  CDR3 for beta chain variable domain of TCR clone 78984 (TRBV20-1, TRBJ2-5)
CSAYRAETQYF

SEQ ID NO: 157969 - protein, 15 aa, Homo sapiens
  CDR3 for alpha chain variable domain of TCR clone 78985 (TRAV20, TRAJ43)
CAVKAGKSSNNDMRF

SEQ ID NO: 157970 - protein, 14 aa, Homo sapiens
  CDR3 for beta chain variable domain of TCR clone 78985 (TRBV27, TRBJ2-1)
CASRHLGGGKEQFF

SEQ ID NO: 157971 - protein, 14 aa, Homo sapiens
  CDR3 for alpha chain variable domain of TCR clone 78986 (TRAV12-2, TRAJ36)
CAVKISTGANNLFF

SEQ ID NO: 157972 - protein, 15 aa, Homo sapiens
  CDR3 for beta chain variable domain of TCR clone 78986 (TRBV7-9, TRBJ1-6)
CASSSPGRGNSPLHF

SEQ ID NO: 157973 - protein, 13 aa, Homo sapiens
  CDR3 for alpha chain variable domain of TCR clone 78987 (TRAV12-2, TRAJ15)
CAVFNQAGTALIF

SEQ ID NO: 157974 - protein, 17 aa, Homo sapiens
  CDR3 for beta chain variable domain of TCR clone 78987 (TRBV7-8, TRBJ1-5)
CASSRGGALISPSIMVM

SEQ ID NO: 157975 - protein, 17 aa, Homo sapiens
  CDR3 for alpha chain variable domain of TCR clone 78988 (TRAV12-2, TRAJ52)
CAVNPYAGGTSYGKLTF

SEQ ID NO: 157976 - protein, 16 aa, Homo sapiens
  CDR3 for beta chain variable domain of TCR clone 78988 (TRBV18, TRBJ1-5)
CASSPSTGNSNQPQHF

SEQ ID NO: 157977 - protein, 14 aa, Homo sapiens
  CDR3 for alpha chain variable domain of TCR clone 78989 (TRAV1-1, TRAJ27)
CAVIYNTNAGKSTF

SEQ ID NO: 157978 - protein, 13 aa, Homo sapiens
  CDR3 for beta chain variable domain of TCR clone 78989 (TRBV7-9, TRBJ1-2)
CASSLKQNYGYAF

SEQ ID NO: 157979 - protein, 16 aa, Homo sapiens
  CDR3 for alpha chain variable domain of TCR clone 78990 (TRAV12-1, TRAJ8)
CVVNGRGNTGFQKLVF

SEQ ID NO: 157980 - protein, 15 aa, Homo sapiens
  CDR3 for beta chain variable domain of TCR clone 78990 (TRBV28, TRBJ2-5)
CASSSGRVIQETQYF

SEQ ID NO: 157981 - protein, 15 aa, Homo sapiens
  CDR3 for alpha chain variable domain of TCR clone 78991 (TRAV8-3, TRAJ45)
CASSYSGGGADGLTF

SEQ ID NO: 157982 - protein, 13 aa, Homo sapiens
  CDR3 for beta chain variable domain of TCR clone 78991 (TRBV19, TRBJ1-2)
CASSQGQVYGYTF

SEQ ID NO: 157983 - protein, 14 aa, Homo sapiens
  CDR3 for alpha chain variable domain of TCR clone 78992 (TRAV20, TRAJ56)
CAVQFGGANSKLTF

SEQ ID NO: 157984 - protein, 14 aa, Homo sapiens
  CDR3 for beta chain variable domain of TCR clone 78992 (TRBV20-1, TRBJ2-7)
CSATRGRSSYEQYF

SEQ ID NO: 157985 - protein, 14 aa, Homo sapiens
  CDR3 for alpha chain variable domain of TCR clone 78993 (TRAV20, TRAJ42)
CAVQAGGSQGNLIF

SEQ ID NO: 157986 - protein, 14 aa, Homo sapiens
  CDR3 for beta chain variable domain of TCR clone 78993 (TRBV28, TRBJ1-2)
CASRIQGANYGYTI

SEQ ID NO: 157987 - protein, 18 aa, Homo sapiens
  CDR3 for alpha chain variable domain of TCR clone 78994 (TRAV21, TRAJ52)
CDVRPSPAGGTSYGKLTF

SEQ ID NO: 157988 - protein, 12 aa, Homo sapiens
  CDR3 for beta chain variable domain of TCR clone 78994 (TRBV11-2, TRBJ2-2)
CASSLGGGELFF

SEQ ID NO: 157989 - protein, 16 aa, Homo sapiens
  CDR3 for alpha chain variable domain of TCR clone 78995 (TRAV3, TRAJ6)
CAVRDGLGRRKLHTYI

SEQ ID NO: 157990 - protein, 15 aa, Homo sapiens
  CDR3 for beta chain variable domain of TCR clone 78995 (TRBV9, TRBJ2-1)
CASSLAGSSYNEQFF

SEQ ID NO: 157991 - protein, 12 aa, Homo sapiens
  CDR3 for alpha chain variable domain of TCR clone 78996 (TRAV13-2, TRAJ8)
CAPWLGFQKLVF

SEQ ID NO: 157992 - protein, 13 aa, Homo sapiens
  CDR3 for beta chain variable domain of TCR clone 78996 (TRBV19, TRBJ1-2)
CASSVPGQDGYTF

SEQ ID NO: 157993 - protein, 14 aa, Homo sapiens
  CDR3 for alpha chain variable domain of TCR clone 78997 (TRAV12-2, TRAJ17)
CAVLFKAAGNKLTF

SEQ ID NO: 157994 - protein, 14 aa, Homo sapiens
  CDR3 for beta chain variable domain of TCR clone 78997 (TRBV19, TRBJ2-1)
CASSMGSGATEQFF

SEQ ID NO: 157995 - protein, 12 aa, Homo sapiens
  CDR3 for alpha chain variable domain of TCR clone 78998 (TRAV2, TRAJ31)
CAVEDNNARLMF

SEQ ID NO: 157996 - protein, 14 aa, Homo sapiens
  CDR3 for beta chain variable domain of TCR clone 78998 (TRBV12-5, TRBJ2-5)
CASGSRTHQETQYF

SEQ ID NO: 157997 - protein, 13 aa, Homo sapiens
  CDR3 for alpha chain variable domain of TCR clone 78999 (TRAV27, TRAJ45)
CRSSGGGADGLTF

SEQ ID NO: 157998 - protein, 16 aa, Homo sapiens
  CDR3 for beta chain variable domain of TCR clone 78999 (TRBV12-4, TRBJ1-5)
CASSRPVGGSNQPQHF

SEQ ID NO: 157999 - protein, 13 aa, Homo sapiens
  CDR3 for alpha chain variable domain of TCR clone 79000 (TRAV8-6, TRAJ50)
CAVIKTSYDKVVF

SEQ ID NO: 158000 - protein, 15 aa, Homo sapiens
  CDR3 for beta chain variable domain of TCR clone 79000 (TRBV7-2, TRBJ2-2)
CASRRPGQNTGELFF

SEQ ID NO: 158001 - protein, 17 aa, Homo sapiens
  CDR3 for alpha chain variable domain of TCR clone 79001 (TRAV3, TRAJ42)
CAVRDRDFGGSQGNLIF

SEQ ID NO: 158002 - protein, 15 aa, Homo sapiens
  CDR3 for beta chain variable domain of TCR clone 79001 (TRBV6-6, TRBJ2-7)
CASSYSYGGSYEQYF

SEQ ID NO: 158003 - protein, 14 aa, Homo sapiens
  CDR3 for alpha chain variable domain of TCR clone 79002 (TRAV26-1, TRAJ38)
CIADNAGNNRKLIW

SEQ ID NO: 158004 - protein, 14 aa, Homo sapiens
  CDR3 for beta chain variable domain of TCR clone 79002 (TRBV20-1, TRBJ1-1)
CSAQTRIGGAEAFF

SEQ ID NO: 158005 - protein, 15 aa, Homo sapiens
  CDR3 for alpha chain variable domain of TCR clone 79003 (TRAV26-1, TRAJ29)
CIVRVTNSGNTPLVF

SEQ ID NO: 158006 - protein, 12 aa, Homo sapiens
  CDR3 for beta chain variable domain of TCR clone 79003 (TRBV20-1, TRBJ1-2)
CSASWQGYGYAF

SEQ ID NO: 158007 - protein, 14 aa, Homo sapiens
  CDR3 for alpha chain variable domain of TCR clone 79004 (TRAV12-3, TRAJ10)
SHLPLTGGGNKLTF

SEQ ID NO: 158008 - protein, 13 aa, Homo sapiens
  CDR3 for beta chain variable domain of TCR clone 79004 (TRBV27, TRBJ1-1)
CASSLSIGAEASF

SEQ ID NO: 158009 - protein, 13 aa, Homo sapiens
  CDR3 for alpha chain variable domain of TCR clone 79005 (TRAV12-1, TRAJ31)
CVVNMNNNARIMF

SEQ ID NO: 158010 - protein, 15 aa, Homo sapiens
  CDR3 for beta chain variable domain of TCR clone 79005 (TRBV4-1, TRBJ1-2)
CASSQGQGAAYGYTF

SEQ ID NO: 158011 - protein, 12 aa, Homo sapiens
  CDR3 for alpha chain variable domain of TCR clone 79006 (TRAV17, TRAJ49)
CATVTTGNQFYF

SEQ ID NO: 158012 - protein, 14 aa, Homo sapiens
  CDR3 for beta chain variable domain of TCR clone 79006 (TRBV20-1, TRBJ1-1)
CSARAVNGYTEAFF

SEQ ID NO: 158013 - protein, 12 aa, Homo sapiens
  CDR3 for alpha chain variable domain of TCR clone 79007 (TRAV27, TRAJ33)
CAGDGSNYQLIW

SEQ ID NO: 158014 - protein, 15 aa, Homo sapiens
  CDR3 for beta chain variable domain of TCR clone 79007 (TRBV6-5, TRBJ2-7)
CASSYSASGNYEQYF

SEQ ID NO: 158015 - protein, 10 aa, Homo sapiens
  CDR3 for alpha chain variable domain of TCR clone 79008 (TRAV12-3, TRAJ49)
CAMNDDQFYF

SEQ ID NO: 158016 - protein, 15 aa, Homo sapiens
  CDR3 for beta chain variable domain of TCR clone 79008 (TRBV7-2, TRBJ1-2)
CASNPRAGWNYGYTF

SEQ ID NO: 158017 - protein, 13 aa, Homo sapiens
  CDR3 for alpha chain variable domain of TCR clone 79009 (TRAV3, TRAJ20)
CAVRDTPRYKLSF

SEQ ID NO: 158018 - protein, 14 aa, Homo sapiens
  CDR3 for beta chain variable domain of TCR clone 79009 (TRBV12-5, TRBJ2-5)
CASGSRTHQETQYF

SEQ ID NO: 158019 - protein, 16 aa, Homo sapiens
  CDR3 for alpha chain variable domain of TCR clone 79010 (TRAV35, TRAJ52)
CAGQGSGGTSYGKLTF

SEQ ID NO: 158020 - protein, 16 aa, Homo sapiens
  CDR3 for beta chain variable domain of TCR clone 79010 (TRBV13, TRBJ2-3)
CQQPLQGSGGRNTQYF

SEQ ID NO: 158021 - protein, 16 aa, Homo sapiens
  CDR3 for alpha chain variable domain of TCR clone 79011 (TRAV4, TRAJ22)
CLVGDLYSGSARQLTF

SEQ ID NO: 158022 - protein, 12 aa, Homo sapiens
  CDR3 for beta chain variable domain of TCR clone 79011 (TRBV28, TRBJ2-3)
CASSLYRDTQYF

SEQ ID NO: 158023 - protein, 14 aa, Homo sapiens
  CDR3 for alpha chain variable domain of TCR clone 79012 (TRAV12-2, TRAJ40)
CAVKIPSGTYKYIF

SEQ ID NO: 158024 - protein, 15 aa, Homo sapiens
  CDR3 for beta chain variable domain of TCR clone 79012 (TRBV7-2, TRBJ2-1)
CASTHGTGIYNEQFF

SEQ ID NO: 158025 - protein, 12 aa, Homo sapiens
  CDR3 for alpha chain variable domain of TCR clone 79013 (TRAV12-3, TRAJ17)
CAMTLTGNKLTV

SEQ ID NO: 158026 - protein, 15 aa, Homo sapiens
  CDR3 for beta chain variable domain of TCR clone 79013 (TRBV19, TRBJ2-1)
CASSIVRGEGREQFF

SEQ ID NO: 158027 - protein, 11 aa, Homo sapiens
  CDR3 for alpha chain variable domain of TCR clone 79014 (TRAV23/DV6, TRAJ58)
CAAGLLRGETS

SEQ ID NO: 158028 - protein, 14 aa, Homo sapiens
  CDR3 for beta chain variable domain of TCR clone 79014 (TRBV2, TRBJ2-7)
CASSLTSGGYEQYF

SEQ ID NO: 158029 - protein, 13 aa, Homo sapiens
  CDR3 for alpha chain variable domain of TCR clone 79015 (TRAV26-1, TRAJ34)
CIVRGHNTDNLIF

SEQ ID NO: 158030 - protein, 15 aa, Homo sapiens
  CDR3 for beta chain variable domain of TCR clone 79015 (TRBV4-1, TRBJ2-7)
CASSQEWGPSYEQYF

SEQ ID NO: 158031 - protein, 16 aa, Homo sapiens
  CDR3 for alpha chain variable domain of TCR clone 79016 (TRAV1-2, TRAJ10)
CAVRGVLTGGGNKLTF

SEQ ID NO: 158032 - protein, 13 aa, Homo sapiens
  CDR3 for beta chain variable domain of TCR clone 79016 (TRBV7-9, TRBJ1-2)
CASSLKQSYGYTF

SEQ ID NO: 158033 - protein, 13 aa, Homo sapiens
  CDR3 for alpha chain variable domain of TCR clone 79017 (TRAV13-1, TRAJ39)
CAASIWAGNMLTF

SEQ ID NO: 158034 - protein, 15 aa, Homo sapiens
  CDR3 for beta chain variable domain of TCR clone 79017 (TRBV7-9, TRBJ1-1)
CASRLLEQGGTEAFF

SEQ ID NO: 158035 - protein, 15 aa, Homo sapiens
  CDR3 for alpha chain variable domain of TCR clone 79018 (TRAV8-3, TRAJ6)
CAVGPLGGGSYILTF

SEQ ID NO: 158036 - protein, 14 aa, Homo sapiens
  CDR3 for beta chain variable domain of TCR clone 79018 (TRBV19, TRBJ2-2)
CASSTGQGAGELFF

SEQ ID NO: 158037 - protein, 16 aa, Homo sapiens
  CDR3 for alpha chain variable domain of TCR clone 79019 (TRAV30, TRAJ24)
CGTEIVDADSWGKFQF

SEQ ID NO: 158038 - protein, 14 aa, Homo sapiens
  CDR3 for beta chain variable domain of TCR clone 79019 (TRBV2, TRBJ1-1)
CASSEGLLNTEAFF

SEQ ID NO: 158039 - protein, 14 aa, Homo sapiens
  CDR3 for alpha chain variable domain of TCR clone 79020 (TRAV12-1, TRAJ40)
CVVNRDSGTYKYIF

SEQ ID NO: 158040 - protein, 13 aa, Homo sapiens
  CDR3 for beta chain variable domain of TCR clone 79020 (TRBV4-2, TRBJ1-1)
CASSQAGNTEAFF

SEQ ID NO: 158041 - protein, 12 aa, Homo sapiens
  CDR3 for alpha chain variable domain of TCR clone 79021 (TRAV12-3, TRAJ17)
CAMTLTGNKLTF

SEQ ID NO: 158042 - protein, 15 aa, Homo sapiens
  CDR3 for beta chain variable domain of TCR clone 79021 (TRBV7-9, TRBJ2-7)
CASSLALAEAYEQYF

SEQ ID NO: 158043 - protein, 13 aa, Homo sapiens
  CDR3 for alpha chain variable domain of TCR clone 79022 (TRAV3, TRAJ21)
CAVREPDFNKFYF

SEQ ID NO: 158044 - protein, 17 aa, Homo sapiens
  CDR3 for beta chain variable domain of TCR clone 79022 (TRBV7-8, TRBJ2-6)
CASSAGTGGAGANDLTF

SEQ ID NO: 158045 - protein, 14 aa, Homo sapiens
  CDR3 for alpha chain variable domain of TCR clone 79023 (TRAV20, TRAJ10)
CAVRVEGGGNKLTF

SEQ ID NO: 158046 - protein, 18 aa, Homo sapiens
  CDR3 for beta chain variable domain of TCR clone 79023 (TRBV24-1, TRBJ2-1)
CATSDLMFLGRGVHEKFF

SEQ ID NO: 158047 - protein, 17 aa, Homo sapiens
  CDR3 for alpha chain variable domain of TCR clone 79024 (TRAV26-1, TRAJ11)
CIVRVGQSNSGYSTLTS

SEQ ID NO: 158048 - protein, 15 aa, Homo sapiens
  CDR3 for beta chain variable domain of TCR clone 79024 (TRBV27, TRBJ2-5)
CASSLIPSGGETQYF

SEQ ID NO: 158049 - protein, 11 aa, Homo sapiens
  CDR3 for alpha chain variable domain of TCR clone 79025 (TRAV21, TRAJ11)
CAVNGYSTLTF

SEQ ID NO: 158050 - protein, 11 aa, Homo sapiens
  CDR3 for beta chain variable domain of TCR clone 79025 (TRBV19, TRBJ1-1)
CASSIGSVAFF

SEQ ID NO: 158051 - protein, 22 aa, Homo sapiens
  CDR3 for alpha chain variable domain of TCR clone 79026 (TRAV8-6, TRAJ6)
CAVTLGEEATYLHLEEGPALLF

SEQ ID NO: 158052 - protein, 15 aa, Homo sapiens
  CDR3 for beta chain variable domain of TCR clone 79026 (TRBV7-2, TRBJ1-1)
CASSTQGGANTEAFF

SEQ ID NO: 158053 - protein, 16 aa, Homo sapiens
  CDR3 for alpha chain variable domain of TCR clone 79027 (TRAV2, TRAJ58)
CAVRGDRETSGSRLTF

SEQ ID NO: 158054 - protein, 12 aa, Homo sapiens
  CDR3 for beta chain variable domain of TCR clone 79027 (TRBV19, TRBJ2-3)
CASAGGADTQYF

SEQ ID NO: 158055 - protein, 15 aa, Homo sapiens
  CDR3 for alpha chain variable domain of TCR clone 79028 (TRAV14/DV4, TRAJ26)
CAMREGQNYGHNFVF

SEQ ID NO: 158056 - protein, 13 aa, Homo sapiens
  CDR3 for beta chain variable domain of TCR clone 79028 (TRBV24-1, TRBJ2-2)
CATSDWSTGELFF

SEQ ID NO: 158057 - protein, 15 aa, Homo sapiens
  CDR3 for alpha chain variable domain of TCR clone 79029 (TRAV26-1, TRAJ23)
CIVRVAGYQGGKLIF

SEQ ID NO: 158058 - protein, 18 aa, Homo sapiens
  CDR3 for beta chain variable domain of TCR clone 79029 (TRBV28, TRBJ2-1)
CASSPTSGRANSYNEQFF

SEQ ID NO: 158059 - protein, 19 aa, Homo sapiens
  CDR3 for alpha chain variable domain of TCR clone 79030 (TRAV3, TRAJ6)
CAVRDRNPSRSGGSYIPTF

SEQ ID NO: 158060 - protein, 15 aa, Homo sapiens
  CDR3 for beta chain variable domain of TCR clone 79030 (TRBV18, TRBJ2-7)
CASSPTFMDSYVQYF

SEQ ID NO: 158061 - protein, 15 aa, Homo sapiens
  CDR3 for alpha chain variable domain of TCR clone 79031 (TRAV38-1, TRAJ37)
CAFIHGSGNTGKLIF

SEQ ID NO: 158062 - protein, 12 aa, Homo sapiens
  CDR3 for beta chain variable domain of TCR clone 79031 (TRBV7-9, TRBJ2-7)
CVSSFGSYEQYF

SEQ ID NO: 158063 - protein, 17 aa, Homo sapiens
  CDR3 for alpha chain variable domain of TCR clone 79032 (TRAV12-3, TRAJ6)
CAMSARGGAGGSYKPTF

SEQ ID NO: 158064 - protein, 12 aa, Homo sapiens
  CDR3 for beta chain variable domain of TCR clone 79032 (TRBV12-4, TRBJ2-3)
CASSTLPDTQYF

SEQ ID NO: 158065 - protein, 14 aa, Homo sapiens
  CDR3 for alpha chain variable domain of TCR clone 79033 (TRAV35, TRAJ22)
CAGLRPGSARQLTF

SEQ ID NO: 158066 - protein, 12 aa, Homo sapiens
  CDR3 for beta chain variable domain of TCR clone 79033 (TRBV7-9, TRBJ2-7)
CATRTDAYEQYF

SEQ ID NO: 158067 - protein, 15 aa, Homo sapiens
  CDR3 for alpha chain variable domain of TCR clone 79034 (TRAV20, TRAJ58)
WAVQDLETSGSRLTF

SEQ ID NO: 158068 - protein, 13 aa, Homo sapiens
  CDR3 for beta chain variable domain of TCR clone 79034 (TRBV20-1, TRBJ1-1)
CSARGGGNTEAFF

SEQ ID NO: 158069 - protein, 14 aa, Homo sapiens
  CDR3 for alpha chain variable domain of TCR clone 79035 (TRAV13-1, TRAJ44)
CAAKATGTASKLTL

SEQ ID NO: 158070 - protein, 16 aa, Homo sapiens
  CDR3 for beta chain variable domain of TCR clone 79035 (TRBV15, TRBJ1-2)
CATSRGPRTGGGGYTF

SEQ ID NO: 158071 - protein, 13 aa, Homo sapiens
  CDR3 for alpha chain variable domain of TCR clone 79036 (TRAV3, TRAJ4)
CAVRDGGYNKLIF

SEQ ID NO: 158072 - protein, 14 aa, Homo sapiens
  CDR3 for beta chain variable domain of TCR clone 79036 (TRBV12-4, TRBJ1-2)
CASSSSAAGSSYSF

SEQ ID NO: 158073 - protein, 13 aa, Homo sapiens
  CDR3 for alpha chain variable domain of TCR clone 79037 (TRAV39, TRAJ33)
CAANPDSNSQLIW

SEQ ID NO: 158074 - protein, 13 aa, Homo sapiens
  CDR3 for beta chain variable domain of TCR clone 79037 (TRBV18, TRBJ1-1)
CASSGGRNTEAFF

SEQ ID NO: 158075 - protein, 14 aa, Homo sapiens
  CDR3 for alpha chain variable domain of TCR clone 79038 (TRAV29/DV5, TRAJ49)
CAASLSNTGNQFYF

SEQ ID NO: 158076 - protein, 15 aa, Homo sapiens
  CDR3 for beta chain variable domain of TCR clone 79038 (TRBV7-2, TRBJ2-7)
CASSLKGALTYEQYF

SEQ ID NO: 158077 - protein, 13 aa, Homo sapiens
  CDR3 for alpha chain variable domain of TCR clone 79039 (TRAV17, TRAJ20)
CATDAVGDYKLSF

SEQ ID NO: 158078 - protein, 15 aa, Homo sapiens
  CDR3 for beta chain variable domain of TCR clone 79039 (TRBV9, TRBJ1-3)
CASSARAGGGNTMYF

SEQ ID NO: 158079 - protein, 14 aa, Homo sapiens
  CDR3 for alpha chain variable domain of TCR clone 79040 (TRAV8-6, TRAJ12)
CAVKAADSSYKLIF

SEQ ID NO: 158080 - protein, 15 aa, Homo sapiens
  CDR3 for beta chain variable domain of TCR clone 79040 (TRBV20-1, TRBJ2-7)
CSAESGTSGAYEQYF

SEQ ID NO: 158081 - protein, 13 aa, Homo sapiens
  CDR3 for alpha chain variable domain of TCR clone 79041 (TRAV8-2, TRAJ9)
CVVRATGGFKTIF

SEQ ID NO: 158082 - protein, 12 aa, Homo sapiens
  CDR3 for beta chain variable domain of TCR clone 79041 (TRBV11-2, TRBJ2-2)
CASSPGGGELFF

SEQ ID NO: 158083 - protein, 13 aa, Homo sapiens
  CDR3 for alpha chain variable domain of TCR clone 79042 (TRAV12-3, TRAJ54)
CAMTLQGAQKLVF

SEQ ID NO: 158084 - protein, 12 aa, Homo sapiens
  CDR3 for beta chain variable domain of TCR clone 79042 (TRBV12-4, TRBJ2-7)
CASSLGGYEQYF

SEQ ID NO: 158085 - protein, 13 aa, Homo sapiens
  CDR3 for alpha chain variable domain of TCR clone 79043 (TRAV38-2/DV8, TRAJ34)
CAYRTWNTDKLIF

SEQ ID NO: 158086 - protein, 18 aa, Homo sapiens
  CDR3 for beta chain variable domain of TCR clone 79043 (TRBV6-6, TRBJ1-3)
CASSYSKWDSISGNTIYL

SEQ ID NO: 158087 - protein, 14 aa, Homo sapiens
  CDR3 for alpha chain variable domain of TCR clone 79044 (TRAV1-2, TRAJ8)
CAVREDTGFQKLVF

SEQ ID NO: 158088 - protein, 14 aa, Homo sapiens
  CDR3 for beta chain variable domain of TCR clone 79044 (TRBV7-9, TRBJ1-1)
CASTPLQSYTEDLF

SEQ ID NO: 158089 - protein, 13 aa, Homo sapiens
  CDR3 for alpha chain variable domain of TCR clone 79045 (TRAV17, TRAJ57)
CAIYQGGSEKLVF

SEQ ID NO: 158090 - protein, 15 aa, Homo sapiens
  CDR3 for beta chain variable domain of TCR clone 79045 (TRBV7-8, TRBJ2-1)
CASSLADSLYNEQFF

SEQ ID NO: 158091 - protein, 13 aa, Homo sapiens
  CDR3 for alpha chain variable domain of TCR clone 79046 (TRAV27, TRAJ45)
CRSSGGGADGLTF

SEQ ID NO: 158092 - protein, 17 aa, Homo sapiens
  CDR3 for beta chain variable domain of TCR clone 79046 (TRBV11-2, TRBJ2-1)
LASSLYPPGVEYNEQFF

SEQ ID NO: 158093 - protein, 12 aa, Homo sapiens
  CDR3 for alpha chain variable domain of TCR clone 79047 (TRAV12-1, TRAJ40)
CVVYSGTYKYIF

SEQ ID NO: 158094 - protein, 18 aa, Homo sapiens
  CDR3 for beta chain variable domain of TCR clone 79047 (TRBV11-2, TRBJ2-3)
CASSLGGSSRGAPNTQYF

SEQ ID NO: 158095 - protein, 18 aa, Homo sapiens
  CDR3 for alpha chain variable domain of TCR clone 79048 (TRAV12-3, TRAJ52)
CAMSVGGAGGTSYGKLTF

SEQ ID NO: 158096 - protein, 15 aa, Homo sapiens
  CDR3 for beta chain variable domain of TCR clone 79048 (TRBV27, TRBJ1-6)
CASSFDRGLGSPLHC

SEQ ID NO: 158097 - protein, 14 aa, Homo sapiens
  CDR3 for alpha chain variable domain of TCR clone 79049 (TRAV12-3, TRAJ10)
SHLPLTGGGNKLTF

SEQ ID NO: 158098 - protein, 16 aa, Homo sapiens
  CDR3 for beta chain variable domain of TCR clone 79049 (TRBV27, TRBJ2-2)
CASSFRGLVRTGELFF

SEQ ID NO: 158099 - protein, 15 aa, Homo sapiens
  CDR3 for alpha chain variable domain of TCR clone 79050 (TRAV3, TRAJ22)
CAVRDRGGSARQLTF

SEQ ID NO: 158100 - protein, 13 aa, Homo sapiens
  CDR3 for beta chain variable domain of TCR clone 79050 (TRBV2, TRBJ1-5)
CATAGPGNQPQHL

SEQ ID NO: 158101 - protein, 15 aa, Homo sapiens
  CDR3 for alpha chain variable domain of TCR clone 79051 (TRAV12-2, TRAJ57)
CAVSRGQGGSEKLVF

SEQ ID NO: 158102 - protein, 14 aa, Homo sapiens
  CDR3 for beta chain variable domain of TCR clone 79051 (TRBV20-1, TRBJ2-1)
CSAHPGLPYNEQSF

SEQ ID NO: 158103 - protein, 10 aa, Homo sapiens
  CDR3 for alpha chain variable domain of TCR clone 79052 (TRAV12-1, TRAJ20)
CVVNPRKLSF

SEQ ID NO: 158104 - protein, 16 aa, Homo sapiens
  CDR3 for beta chain variable domain of TCR clone 79052 (TRBV11-2, TRBJ1-2)
CASSLDTGGADYGYTF

SEQ ID NO: 158105 - protein, 13 aa, Homo sapiens
  CDR3 for alpha chain variable domain of TCR clone 79053 (TRAV29/DV5, TRAJ31)
CAASRNNNARLMF

SEQ ID NO: 158106 - protein, 18 aa, Homo sapiens
  CDR3 for beta chain variable domain of TCR clone 79053 (TRBV10-3, TRBJ2-3)
CAISESRVGPMRGDTQYF

SEQ ID NO: 158107 - protein, 12 aa, Homo sapiens
  CDR3 for alpha chain variable domain of TCR clone 79054 (TRAV8-3, TRAJ26)
CAGDNYGQNFVF

SEQ ID NO: 158108 - protein, 17 aa, Homo sapiens
  CDR3 for beta chain variable domain of TCR clone 79054 (TRBV15, TRBJ1-4)
CATSRYGTGDPNEKLFF

SEQ ID NO: 158109 - protein, 16 aa, Homo sapiens
  CDR3 for alpha chain variable domain of TCR clone 79055 (TRAV26-2, TRAJ45)
CTTASPIGGGADGLTF

SEQ ID NO: 158110 - protein, 13 aa, Homo sapiens
  CDR3 for beta chain variable domain of TCR clone 79055 (TRBV7-2, TRBJ1-6)
CASSLVGSSPLHF

SEQ ID NO: 158111 - protein, 10 aa, Homo sapiens
  CDR3 for alpha chain variable domain of TCR clone 79056 (TRAV26-1, TRAJ22)
CIVGLNFFWF

SEQ ID NO: 158112 - protein, 15 aa, Homo sapiens
  CDR3 for beta chain variable domain of TCR clone 79056 (TRBV4-2, TRBJ1-2)
CASSQRTGGRDGYTF

SEQ ID NO: 158113 - protein, 15 aa, Homo sapiens
  CDR3 for alpha chain variable domain of TCR clone 79057 (TRAV8-6, TRAJ6)
CAVRDASGGIYIPTF

SEQ ID NO: 158114 - protein, 13 aa, Homo sapiens
  CDR3 for beta chain variable domain of TCR clone 79057 (TRBV2, TRBJ2-2)
CASRAWRTGELFF

SEQ ID NO: 158115 - protein, 12 aa, Homo sapiens
  CDR3 for alpha chain variable domain of TCR clone 79058 (TRAV9-2, TRAJ36)
CALKKGANNLFF

SEQ ID NO: 158116 - protein, 13 aa, Homo sapiens
  CDR3 for beta chain variable domain of TCR clone 79058 (TRBV27, TRBJ1-1)
CASSLSIGAEALF

SEQ ID NO: 158117 - protein, 14 aa, Homo sapiens
  CDR3 for alpha chain variable domain of TCR clone 79059 (TRAV13-1, TRAJ35)
CAASKGGFGNVLHC

SEQ ID NO: 158118 - protein, 12 aa, Homo sapiens
  CDR3 for beta chain variable domain of TCR clone 79059 (TRBV7-3, TRBJ1-1)
CSSQDWGAEAFF

SEQ ID NO: 158119 - protein, 14 aa, Homo sapiens
  CDR3 for alpha chain variable domain of TCR clone 79060 (TRAV12-2, TRAJ3)
CAVSPYSSAPKIIF

SEQ ID NO: 158120 - protein, 14 aa, Homo sapiens
  CDR3 for beta chain variable domain of TCR clone 79060 (TRBV27, TRBJ2-1)
CAGSIAETYNEQFF

SEQ ID NO: 158121 - protein, 16 aa, Homo sapiens
  CDR3 for alpha chain variable domain of TCR clone 79061 (TRAV26-1, TRAJ37)
CIVRGDGSGNTGKLIF

SEQ ID NO: 158122 - protein, 15 aa, Homo sapiens
  CDR3 for beta chain variable domain of TCR clone 79061 (TRBV12-4, TRBJ2-5)
CASSPPTGLQETQYF

SEQ ID NO: 158123 - protein, 11 aa, Homo sapiens
  CDR3 for alpha chain variable domain of TCR clone 79062 (TRAV2, TRAJ31)
CAAGPPARLMF

SEQ ID NO: 158124 - protein, 13 aa, Homo sapiens
  CDR3 for beta chain variable domain of TCR clone 79062 (TRBV4-1, TRBJ2-3)
CASSRPPTDTQYF

SEQ ID NO: 158125 - protein, 16 aa, Homo sapiens
  CDR3 for alpha chain variable domain of TCR clone 79063 (TRAV3, TRAJ37)
CAVRGKGSGNTGKLIF

SEQ ID NO: 158126 - protein, 13 aa, Homo sapiens
  CDR3 for beta chain variable domain of TCR clone 79063 (TRBV14, TRBJ2-7)
CASSQNRRYEQYF

SEQ ID NO: 158127 - protein, 13 aa, Homo sapiens
  CDR3 for alpha chain variable domain of TCR clone 79064 (TRAV13-2, TRAJ48)
CAEMDFGNEKLTF

SEQ ID NO: 158128 - protein, 20 aa, Homo sapiens
  CDR3 for beta chain variable domain of TCR clone 79064 (TRBV28, TRBJ2-1)
CASTPIGRSPGLAGGNEQFF

SEQ ID NO: 158129 - protein, 20 aa, Homo sapiens
  CDR3 for alpha chain variable domain of TCR clone 79065 (TRAV2, TRAJ9)
CAVGAGGFKLSLEQEQDYLL

SEQ ID NO: 158130 - protein, 16 aa, Homo sapiens
  CDR3 for beta chain variable domain of TCR clone 79065 (TRBV13, TRBJ2-2)
CASSPRTGEHTGELFF

SEQ ID NO: 158131 - protein, 16 aa, Homo sapiens
  CDR3 for alpha chain variable domain of TCR clone 79066 (TRAV1-2, TRAJ10)
CAVRGVLTGGGNKLTF

SEQ ID NO: 158132 - protein, 12 aa, Homo sapiens
  CDR3 for beta chain variable domain of TCR clone 79066 (TRBV7-8, TRBJ2-1)
CASSLGDREQYF

SEQ ID NO: 158133 - protein, 11 aa, Homo sapiens
  CDR3 for alpha chain variable domain of TCR clone 79067 (TRAV12-3, TRAJ27)
CVMANAGKSTF

SEQ ID NO: 158134 - protein, 13 aa, Homo sapiens
  CDR3 for beta chain variable domain of TCR clone 79067 (TRBV20-1, TRBJ1-1)
CSARVGGNTEAFF

SEQ ID NO: 158135 - protein, 14 aa, Homo sapiens
  CDR3 for alpha chain variable domain of TCR clone 79068 (TRAV17, TRAJ22)
CATSPSGSARQLTF

SEQ ID NO: 158136 - protein, 15 aa, Homo sapiens
  CDR3 for beta chain variable domain of TCR clone 79068 (TRBV4-1, TRBJ2-5)
CASSQWDLYQETQYS

SEQ ID NO: 158137 - protein, 14 aa, Homo sapiens
  CDR3 for alpha chain variable domain of TCR clone 79069 (TRAV13-1, TRAJ39)
CSASYNNAGNMLTF

SEQ ID NO: 158138 - protein, 13 aa, Homo sapiens
  CDR3 for beta chain variable domain of TCR clone 79069 (TRBV24-1, TRBJ1-4)
CATNNGRSEKLFF

SEQ ID NO: 158139 - protein, 11 aa, Homo sapiens
  CDR3 for alpha chain variable domain of TCR clone 79070 (TRAV12-2, TRAJ31)
CAGTRWARLMF

SEQ ID NO: 158140 - protein, 15 aa, Homo sapiens
  CDR3 for beta chain variable domain of TCR clone 79070 (TRBV19, TRBJ2-7)
CASSIGGGLVNEQYF

SEQ ID NO: 158141 - protein, 15 aa, Homo sapiens
  CDR3 for alpha chain variable domain of TCR clone 79071 (TRAV17, TRAJ56)
CATEPFTGANSKLTF

SEQ ID NO: 158142 - protein, 16 aa, Homo sapiens
  CDR3 for beta chain variable domain of TCR clone 79071 (TRBV4-2, TRBJ2-1)
CASSPRAGQGANEQFF

SEQ ID NO: 158143 - protein, 13 aa, Homo sapiens
  CDR3 for alpha chain variable domain of TCR clone 79072 (TRAV2, TRAJ40)
CAVVTSGTYKYNF

SEQ ID NO: 158144 - protein, 16 aa, Homo sapiens
  CDR3 for beta chain variable domain of TCR clone 79072 (TRBV19, TRBJ2-2)
CASRSPGTGATGELFF

SEQ ID NO: 158145 - protein, 11 aa, Homo sapiens
  CDR3 for alpha chain variable domain of TCR clone 79073 (TRAV12-1, TRAJ26)
CVVAYVQNFVF

SEQ ID NO: 158146 - protein, 15 aa, Homo sapiens
  CDR3 for beta chain variable domain of TCR clone 79073 (TRBV12-4, TRBJ2-5)
CASSGTGQAQETQYF

SEQ ID NO: 158147 - protein, 12 aa, Homo sapiens
  CDR3 for alpha chain variable domain of TCR clone 79074 (TRAV12-3, TRAJ21)
CAMFNNFNKFYF

SEQ ID NO: 158148 - protein, 16 aa, Homo sapiens
  CDR3 for beta chain variable domain of TCR clone 79074 (TRBV7-9, TRBJ1-2)
CASSLAPLRAAYSYTF

SEQ ID NO: 158149 - protein, 13 aa, Homo sapiens
  CDR3 for alpha chain variable domain of TCR clone 79075 (TRAV20, TRAJ34)
CAVSSYNTDKLIF

SEQ ID NO: 158150 - protein, 13 aa, Homo sapiens
  CDR3 for beta chain variable domain of TCR clone 79075 (TRBV7-9, TRBJ1-2)
CASSLKQNYGYIF

SEQ ID NO: 158151 - protein, 16 aa, Homo sapiens
  CDR3 for alpha chain variable domain of TCR clone 79076 (TRAV3, TRAJ4)
CAVRPSPSGGYNKLIF

SEQ ID NO: 158152 - protein, 12 aa, Homo sapiens
  CDR3 for beta chain variable domain of TCR clone 79076 (TRBV7-9, TRBJ2-7)
CASSKGVYEQYF

SEQ ID NO: 158153 - protein, 12 aa, Homo sapiens
  CDR3 for alpha chain variable domain of TCR clone 79077 (TRAV12-3, TRAJ17)
CAMTLTGNKLTF

SEQ ID NO: 158154 - protein, 12 aa, Homo sapiens
  CDR3 for beta chain variable domain of TCR clone 79077 (TRBV2, TRBJ2-1)
CAYGPPGNDQFF

SEQ ID NO: 158155 - protein, 12 aa, Homo sapiens
  CDR3 for alpha chain variable domain of TCR clone 79078 (TRAV17, TRAJ4)
CATDGGYNKLIF

SEQ ID NO: 158156 - protein, 15 aa, Homo sapiens
  CDR3 for beta chain variable domain of TCR clone 79078 (TRBV27, TRBJ2-1)
CASSNGGGSSNEQFF

SEQ ID NO: 158157 - protein, 14 aa, Homo sapiens
  CDR3 for alpha chain variable domain of TCR clone 79079 (TRAV26-1, TRAJ38)
CIAYNAGNNRKLIW

SEQ ID NO: 158158 - protein, 17 aa, Homo sapiens
  CDR3 for beta chain variable domain of TCR clone 79079 (TRBV7-9, TRBJ2-3)
CASSPTVAGDLTDTQYF

SEQ ID NO: 158159 - protein, 10 aa, Homo sapiens
  CDR3 for alpha chain variable domain of TCR clone 79080 (TRAV12-3, TRAJ49)
CEMNDDQFYF

SEQ ID NO: 158160 - protein, 13 aa, Homo sapiens
  CDR3 for beta chain variable domain of TCR clone 79080 (TRBV12-4, TRBJ1-1)
CASSPGTGFEAFF

SEQ ID NO: 158161 - protein, 10 aa, Homo sapiens
  CDR3 for alpha chain variable domain of TCR clone 79081 (TRAV23/DV6, TRAJ57)
CAASSTLSQG

SEQ ID NO: 158162 - protein, 14 aa, Homo sapiens
  CDR3 for beta chain variable domain of TCR clone 79081 (TRBV4-1, TRBJ2-2)
CASSQAVNTGELFF

SEQ ID NO: 158163 - protein, 17 aa, Homo sapiens
  CDR3 for alpha chain variable domain of TCR clone 79082 (TRAV23/DV6, TRAJ57)
CAASSTLSQGGSEKLVF

SEQ ID NO: 158164 - protein, 14 aa, Homo sapiens
  CDR3 for beta chain variable domain of TCR clone 79082 (TRBV4-2, TRBJ2-1)
CASGLDRAYNEQFF

SEQ ID NO: 158165 - protein, 16 aa, Homo sapiens
  CDR3 for alpha chain variable domain of TCR clone 79083 (TRAV12-3, TRAJ53)
CAMSPGSGGSNYKLTF

SEQ ID NO: 158166 - protein, 13 aa, Homo sapiens
  CDR3 for beta chain variable domain of TCR clone 79083 (TRBV19, TRBJ2-2)
CASSIWSTGELFF

SEQ ID NO: 158167 - protein, 17 aa, Homo sapiens
  CDR3 for alpha chain variable domain of TCR clone 79084 (TRAV3, TRAJ38)
CAVRDCLNAGNNRKLIW

SEQ ID NO: 158168 - protein, 18 aa, Homo sapiens
  CDR3 for beta chain variable domain of TCR clone 79084 (TRBV13, TRBJ2-6)
CASSPMTSGGSGANVLTF

SEQ ID NO: 158169 - protein, 14 aa, Homo sapiens
  CDR3 for alpha chain variable domain of TCR clone 79085 (TRAV12-2, TRAJ40)
YAVKIPSGIYKYIF

SEQ ID NO: 158170 - protein, 13 aa, Homo sapiens
  CDR3 for beta chain variable domain of TCR clone 79085 (TRBV7-9, TRBJ1-2)
CASSLKQNYGYTF

SEQ ID NO: 158171 - protein, 16 aa, Homo sapiens
  CDR3 for alpha chain variable domain of TCR clone 79086 (TRAV21, TRAJ52)
CAVTNAGGTSYGNLTF

SEQ ID NO: 158172 - protein, 11 aa, Homo sapiens
  CDR3 for beta chain variable domain of TCR clone 79086 (TRBV2, TRBJ1-1)
CASREGTEAFF

SEQ ID NO: 158173 - protein, 12 aa, Homo sapiens
  CDR3 for alpha chain variable domain of TCR clone 79087 (TRAV13-1, TRAJ9)
CASHTGGFKTIF

SEQ ID NO: 158174 - protein, 18 aa, Homo sapiens
  CDR3 for beta chain variable domain of TCR clone 79087 (TRBV11-2, TRBJ2-3)
CASSLGGASRGAPNKQYF

SEQ ID NO: 158175 - protein, 14 aa, Homo sapiens
  CDR3 for alpha chain variable domain of TCR clone 79088 (TRAV8-6, TRAJ12)
CAVKAADSSYKLIF

SEQ ID NO: 158176 - protein, 15 aa, Homo sapiens
  CDR3 for beta chain variable domain of TCR clone 79088 (TRBV5-1, TRBJ2-5)
CASSLGLAEQEAQYF

SEQ ID NO: 158177 - protein, 13 aa, Homo sapiens
  CDR3 for alpha chain variable domain of TCR clone 79089 (TRAV25, TRAJ30)
CAGRVDRDDKIIF

SEQ ID NO: 158178 - protein, 17 aa, Homo sapiens
  CDR3 for beta chain variable domain of TCR clone 79089 (TRBV7-9, TRBJ2-6)
CASSFGAGYSGANVLAF

SEQ ID NO: 158179 - protein, 15 aa, Homo sapiens
  CDR3 for alpha chain variable domain of TCR clone 79090 (TRAV12-1, TRAJ44)
CVVDTPQGTASKLTL

SEQ ID NO: 158180 - protein, 14 aa, Homo sapiens
  CDR3 for beta chain variable domain of TCR clone 79090 (TRBV7-9, TRBJ2-1)
CASSPRDSLYEQFF

SEQ ID NO: 158181 - protein, 16 aa, Homo sapiens
  CDR3 for alpha chain variable domain of TCR clone 79091 (TRAV26-1, TRAJ23)
CIVRVERYNQGGKHIF

SEQ ID NO: 158182 - protein, 16 aa, Homo sapiens
  CDR3 for beta chain variable domain of TCR clone 79091 (TRBV9, TRBJ1-2)
CASSVDKGGGNYGYTF

SEQ ID NO: 158183 - protein, 12 aa, Homo sapiens
  CDR3 for alpha chain variable domain of TCR clone 79092 (TRAV1-1, TRAJ9)
CAVDTGGFKTIF

SEQ ID NO: 158184 - protein, 14 aa, Homo sapiens
  CDR3 for beta chain variable domain of TCR clone 79092 (TRBV7-8, TRBJ2-5)
CASSATGGQKTQYF

SEQ ID NO: 158185 - protein, 13 aa, Homo sapiens
  CDR3 for alpha chain variable domain of TCR clone 79093 (TRAV17, TRAJ26)
CATVDNYGQNFVF

SEQ ID NO: 158186 - protein, 11 aa, Homo sapiens
  CDR3 for beta chain variable domain of TCR clone 79093 (TRBV11-2, TRBJ2-2)
CASSLPGELFF

SEQ ID NO: 158187 - protein, 14 aa, Homo sapiens
  CDR3 for alpha chain variable domain of TCR clone 79094 (TRAV3, TRAJ7)
CAVREEEREQQTRF

SEQ ID NO: 158188 - protein, 12 aa, Homo sapiens
  CDR3 for beta chain variable domain of TCR clone 79094 (TRBV7-8, TRBJ2-7)
CDSSLGDREQYF

SEQ ID NO: 158189 - protein, 13 aa, Homo sapiens
  CDR3 for alpha chain variable domain of TCR clone 79095 (TRAV36/DV7, TRAJ53)
CALSGGSNYKLTF

SEQ ID NO: 158190 - protein, 13 aa, Homo sapiens
  CDR3 for beta chain variable domain of TCR clone 79095 (TRBV28, TRBJ2-4)
CASSQSPKNIQYF

SEQ ID NO: 158191 - protein, 16 aa, Homo sapiens
  CDR3 for alpha chain variable domain of TCR clone 79096 (TRAV12-2, TRAJ18)
CAVTTDRGSTLGRLYF

SEQ ID NO: 158192 - protein, 20 aa, Homo sapiens
  CDR3 for beta chain variable domain of TCR clone 79096 (TRBV7-8, TRBJ2-2)
CASSHLFPGPTIHITGELFF

SEQ ID NO: 158193 - protein, 11 aa, Homo sapiens
  CDR3 for alpha chain variable domain of TCR clone 79097 (TRAV1-1, TRAJ23)
CAVRQGGKLIF

SEQ ID NO: 158194 - protein, 20 aa, Homo sapiens
  CDR3 for beta chain variable domain of TCR clone 79097 (TRBV7-8, TRBJ2-2)
WASSHLFPGPTVHITGELFF

SEQ ID NO: 158195 - protein, 13 aa, Homo sapiens
  CDR3 for alpha chain variable domain of TCR clone 79098 (TRAV20, TRAJ49)
CAVQARTGNQFYF

SEQ ID NO: 158196 - protein, 13 aa, Homo sapiens
  CDR3 for beta chain variable domain of TCR clone 79098 (TRBV7-9, TRBJ1-2)
CASSLKQNYGYTF

SEQ ID NO: 158197 - protein, 17 aa, Homo sapiens
  CDR3 for alpha chain variable domain of TCR clone 79099 (TRAV8-1, TRAJ43)
CAVTNDMSFGAGTRLTV

SEQ ID NO: 158198 - protein, 17 aa, Homo sapiens
  CDR3 for beta chain variable domain of TCR clone 79099 (TRBV5-4, TRBJ2-1)
CASSSAGGRGPYNEQFF

SEQ ID NO: 158199 - protein, 16 aa, Homo sapiens
  CDR3 for alpha chain variable domain of TCR clone 79100 (TRAV26-1, TRAJ37)
CIVRGDGYGNTGKLIF

SEQ ID NO: 158200 - protein, 17 aa, Homo sapiens
  CDR3 for beta chain variable domain of TCR clone 79100 (TRBV4-1, TRBJ2-7)
CASSRDPLGVRGGEQYF

SEQ ID NO: 158201 - protein, 13 aa, Homo sapiens
  CDR3 for alpha chain variable domain of TCR clone 79101 (TRAV12-2, TRAJ12)
CAVNEDSSYKLIF

SEQ ID NO: 158202 - protein, 17 aa, Homo sapiens
  CDR3 for beta chain variable domain of TCR clone 79101 (TRBV20-1, TRBJ2-7)
CGATRAGGVAGVEEQYF

SEQ ID NO: 158203 - protein, 14 aa, Homo sapiens
  CDR3 for alpha chain variable domain of TCR clone 79102 (TRAV23/DV6, TRAJ13)
CVASETGGYQKVTF

SEQ ID NO: 158204 - protein, 16 aa, Homo sapiens
  CDR3 for beta chain variable domain of TCR clone 79102 (TRBV5-1, TRBJ1-3)
CASSPWAPSSGNTIYF

SEQ ID NO: 158205 - protein, 13 aa, Homo sapiens
  CDR3 for alpha chain variable domain of TCR clone 79103 (TRAV17, TRAJ9)
CTTDGTGGFKTIF

SEQ ID NO: 158206 - protein, 17 aa, Homo sapiens
  CDR3 for beta chain variable domain of TCR clone 79103 (TRBV6-5, TRBJ2-7)
CASSYSFWGQGSYEQYF

SEQ ID NO: 158207 - protein, 20 aa, Homo sapiens
  CDR3 for alpha chain variable domain of TCR clone 79104 (TRAV12-1, TRAJ42)
SSVIQLPTSVKGGSQGNLIF

SEQ ID NO: 158208 - protein, 18 aa, Homo sapiens
  CDR3 for beta chain variable domain of TCR clone 79104 (TRBV11-2, TRBJ2-3)
CASSLGGASRGAPNTQYF

SEQ ID NO: 158209 - protein, 15 aa, Homo sapiens
  CDR3 for alpha chain variable domain of TCR clone 79105 (TRAV8-3, TRAJ23)
CAVGDRYNQGGTLIF

SEQ ID NO: 158210 - protein, 22 aa, Homo sapiens
  CDR3 for beta chain variable domain of TCR clone 79105 (TRBV29-1, TRBJ2-5)
TVSNMSPEDSSIYLCSAGTQYF

SEQ ID NO: 158211 - protein, 13 aa, Homo sapiens
  CDR3 for alpha chain variable domain of TCR clone 79106 (TRAV21, TRAJ27)
CAARPGNAGKSTF

SEQ ID NO: 158212 - protein, 13 aa, Homo sapiens
  CDR3 for beta chain variable domain of TCR clone 79106 (TRBV2, TRBJ2-7)
CASSVGGSGEQYF

SEQ ID NO: 158213 - protein, 16 aa, Homo sapiens
  CDR3 for alpha chain variable domain of TCR clone 79107 (TRAV3, TRAJ23)
CAVKIGIYNQGGKRIF

SEQ ID NO: 158214 - protein, 17 aa, Homo sapiens
  CDR3 for beta chain variable domain of TCR clone 79107 (TRBV10-3, TRBJ2-6)
CAISESTAPSGANVLTF

SEQ ID NO: 158215 - protein, 20 aa, Homo sapiens
  CDR3 for alpha chain variable domain of TCR clone 79108 (TRAV21, TRAJ4)
AASQPGDSATLAGGYNKLIV

SEQ ID NO: 158216 - protein, 19 aa, Homo sapiens
  CDR3 for beta chain variable domain of TCR clone 79108 (TRBV18, TRBJ1-3)
CASSPLSRTGMSSGNTIYF

SEQ ID NO: 158217 - protein, 13 aa, Homo sapiens
  CDR3 for alpha chain variable domain of TCR clone 79109 (TRAV22, TRAJ44)
CALNPGTASKLTF

SEQ ID NO: 158218 - protein, 15 aa, Homo sapiens
  CDR3 for beta chain variable domain of TCR clone 79109 (TRBV27, TRBJ2-1)
CASSNGGGSSNEQFF

SEQ ID NO: 158219 - protein, 14 aa, Homo sapiens
  CDR3 for alpha chain variable domain of TCR clone 79110 (TRAV12-1, TRAJ17)
CVVNYKAAGNKLTF

SEQ ID NO: 158220 - protein, 12 aa, Homo sapiens
  CDR3 for beta chain variable domain of TCR clone 79110 (TRBV19, TRBJ1-5)
CASSIAQQPQHF

SEQ ID NO: 158221 - protein, 12 aa, Homo sapiens
  CDR3 for alpha chain variable domain of TCR clone 79111 (TRAV27, TRAJ21)
CAGVRQLQQILL

SEQ ID NO: 158222 - protein, 13 aa, Homo sapiens
  CDR3 for beta chain variable domain of TCR clone 79111 (TRBV7-9, TRBJ1-2)
CASSLKQNYGYTF

SEQ ID NO: 158223 - protein, 14 aa, Homo sapiens
  CDR3 for alpha chain variable domain of TCR clone 79112 (TRAV13-2, TRAJ11)
CAETGNSGYSTLTF

SEQ ID NO: 158224 - protein, 11 aa, Homo sapiens
  CDR3 for beta chain variable domain of TCR clone 79112 (TRBV10-3, TRBJ2-7)
CASSEGLEQYF

SEQ ID NO: 158225 - protein, 11 aa, Homo sapiens
  CDR3 for alpha chain variable domain of TCR clone 79113 (TRAV21, TRAJ34)
CAVTNTDKLIF

SEQ ID NO: 158226 - protein, 11 aa, Homo sapiens
  CDR3 for beta chain variable domain of TCR clone 79113 (TRBV11-2, TRBJ1-1)
RASSINTEAFF

SEQ ID NO: 158227 - protein, 15 aa, Homo sapiens
  CDR3 for alpha chain variable domain of TCR clone 79114 (TRAV29/DV5, TRAJ29)
CAASERSSGNTHLVF

SEQ ID NO: 158228 - protein, 17 aa, Homo sapiens
  CDR3 for beta chain variable domain of TCR clone 79114 (TRBV4-1, TRBJ1-4)
CASSQEGPRGVEEKLFF

SEQ ID NO: 158229 - protein, 13 aa, Homo sapiens
  CDR3 for alpha chain variable domain of TCR clone 79115 (TRAV8-1, TRAJ34)
CAVNGKGTDKLIF

SEQ ID NO: 158230 - protein, 13 aa, Homo sapiens
  CDR3 for beta chain variable domain of TCR clone 79115 (TRBV20-1, TRBJ2-5)
YSARLAGVETQYF

SEQ ID NO: 158231 - protein, 16 aa, Homo sapiens
  CDR3 for alpha chain variable domain of TCR clone 79116 (TRAV23/DV6, )
CADIQNPDPAGYQLRD

SEQ ID NO: 158232 - protein, 13 aa, Homo sapiens
  CDR3 for beta chain variable domain of TCR clone 79116 (TRBV28, TRBJ2-7)
CASRSSGVYEQYF

SEQ ID NO: 158233 - protein, 14 aa, Homo sapiens
  CDR3 for alpha chain variable domain of TCR clone 79117 (TRAV16, TRAJ54)
CALSGVQGAQKLVF

SEQ ID NO: 158234 - protein, 15 aa, Homo sapiens
  CDR3 for beta chain variable domain of TCR clone 79117 (TRBV18, TRBJ2-2)
CASSTRGLHTGELFF

SEQ ID NO: 158235 - protein, 14 aa, Homo sapiens
  CDR3 for alpha chain variable domain of TCR clone 79118 (TRAV1-2, TRAJ16)
CAVNRFSDGQKLLF

SEQ ID NO: 158236 - protein, 14 aa, Homo sapiens
  CDR3 for beta chain variable domain of TCR clone 79118 (TRBV7-2, TRBJ1-1)
CASSSLTGTTEAFF

SEQ ID NO: 158237 - protein, 16 aa, Homo sapiens
  CDR3 for alpha chain variable domain of TCR clone 79119 (TRAV3, TRAJ18)
CAVRDGRGSTQGRLYF

SEQ ID NO: 158238 - protein, 15 aa, Homo sapiens
  CDR3 for beta chain variable domain of TCR clone 79119 (TRBV7-9, TRBJ1-6)
CASSSPGRGNSPLHF

SEQ ID NO: 158239 - protein, 14 aa, Homo sapiens
  CDR3 for alpha chain variable domain of TCR clone 79120 (TRAV23/DV6, TRAJ6)
CAASRSGGSYIPTF

SEQ ID NO: 158240 - protein, 17 aa, Homo sapiens
  CDR3 for beta chain variable domain of TCR clone 79120 (TRBV20-1, TRBJ2-1)
GSASASGLAGSYNEQFF

SEQ ID NO: 158241 - protein, 12 aa, Homo sapiens
  CDR3 for alpha chain variable domain of TCR clone 79121 (TRAV16, TRAJ56)
CAPTGANSKLTF

SEQ ID NO: 158242 - protein, 12 aa, Homo sapiens
  CDR3 for beta chain variable domain of TCR clone 79121 (TRBV29-1, TRBJ2-3)
CSVTGGADTQYF

SEQ ID NO: 158243 - protein, 16 aa, Homo sapiens
  CDR3 for alpha chain variable domain of TCR clone 79122 (TRAV14/DV4, TRAJ54)
CAMREGRIQGAQKLVF

SEQ ID NO: 158244 - protein, 16 aa, Homo sapiens
  CDR3 for beta chain variable domain of TCR clone 79122 (TRBV25-1, TRBJ1-1)
CASSGDRDRGRIEAFF

SEQ ID NO: 158245 - protein, 14 aa, Homo sapiens
  CDR3 for alpha chain variable domain of TCR clone 79123 (TRAV1-2, TRAJ8)
CAVREDTGFQKLVF

SEQ ID NO: 158246 - protein, 15 aa, Homo sapiens
  CDR3 for beta chain variable domain of TCR clone 79123 (TRBV20-1, TRBJ2-7)
CSAESGTGGAYEQYF

SEQ ID NO: 158247 - protein, 12 aa, Homo sapiens
  CDR3 for alpha chain variable domain of TCR clone 79124 (TRAV21, TRAJ58)
CALSASGSRLTF

SEQ ID NO: 158248 - protein, 18 aa, Homo sapiens
  CDR3 for beta chain variable domain of TCR clone 79124 (TRBV11-2, TRBJ2-3)
CASSLGGASRGAPNTQYF

SEQ ID NO: 158249 - protein, 14 aa, Homo sapiens
  CDR3 for alpha chain variable domain of TCR clone 79125 (TRAV26-1, TRAJ21)
CIVRDVYNFNKFYF

SEQ ID NO: 158250 - protein, 11 aa, Homo sapiens
  CDR3 for beta chain variable domain of TCR clone 79125 (TRBV5-6, TRBJ2-5)
CASSLERTQYF

SEQ ID NO: 158251 - protein, 10 aa, Homo sapiens
  CDR3 for alpha chain variable domain of TCR clone 79126 (TRAV30, TRAJ48)
CGIGNEKLTF

SEQ ID NO: 158252 - protein, 14 aa, Homo sapiens
  CDR3 for beta chain variable domain of TCR clone 79126 (TRBV7-6, TRBJ2-3)
CASSVVGGTDTQYF

SEQ ID NO: 158253 - protein, 16 aa, Homo sapiens
  CDR3 for alpha chain variable domain of TCR clone 79127 (TRAV12-3, TRAJ53)
CAMSPGSGGSNYKLTF

SEQ ID NO: 158254 - protein, 13 aa, Homo sapiens
  CDR3 for beta chain variable domain of TCR clone 79127 (TRBV12-4, TRBJ1-2)
CASSLRQGKGYTF

SEQ ID NO: 158255 - protein, 16 aa, Homo sapiens
  CDR3 for alpha chain variable domain of TCR clone 79128 (TRAV30, TRAJ24)
CGTELVDADSWGKFKF

SEQ ID NO: 158256 - protein, 14 aa, Homo sapiens
  CDR3 for beta chain variable domain of TCR clone 79128 (TRBV12-5, TRBJ2-5)
CASGSRTHQETQYF

SEQ ID NO: 158257 - protein, 13 aa, Homo sapiens
  CDR3 for alpha chain variable domain of TCR clone 79129 (TRAV1-1, TRAJ23)
CALVANQGGKLIF

SEQ ID NO: 158258 - protein, 16 aa, Homo sapiens
  CDR3 for beta chain variable domain of TCR clone 79129 (TRBV5-5, TRBJ1-2)
CASSPTWGRGLYGYTF

SEQ ID NO: 158259 - protein, 12 aa, Homo sapiens
  CDR3 for alpha chain variable domain of TCR clone 79130 (TRAV2, TRAJ31)
CAVEDNNARLMF

SEQ ID NO: 158260 - protein, 16 aa, Homo sapiens
  CDR3 for beta chain variable domain of TCR clone 79130 (TRBV10-3, TRBJ2-1)
CAISGVGDGGGGAQFF

SEQ ID NO: 158261 - protein, 16 aa, Homo sapiens
  CDR3 for alpha chain variable domain of TCR clone 79131 (TRAV12-2, TRAJ10)
CAVNRVLTGGGNKLTF

SEQ ID NO: 158262 - protein, 12 aa, Homo sapiens
  CDR3 for beta chain variable domain of TCR clone 79131 (TRBV29-1, TRBJ2-3)
CSVTGGADTQYF

SEQ ID NO: 158263 - protein, 18 aa, Homo sapiens
  CDR3 for alpha chain variable domain of TCR clone 79132 (TRAV21, TRAJ52)
CAVRPSPAGGTSYGKLTF

SEQ ID NO: 158264 - protein, 13 aa, Homo sapiens
  CDR3 for beta chain variable domain of TCR clone 79132 (TRBV7-9, TRBJ2-5)
CASTPVGQETQYF

SEQ ID NO: 158265 - protein, 13 aa, Homo sapiens
  CDR3 for alpha chain variable domain of TCR clone 79133 (TRAV3, TRAJ16)
CAVRDRNGQELLF

SEQ ID NO: 158266 - protein, 15 aa, Homo sapiens
  CDR3 for beta chain variable domain of TCR clone 79133 (TRBV5-1, TRBJ2-1)
CASSPPRAPYNEQFF

SEQ ID NO: 158267 - protein, 12 aa, Homo sapiens
  CDR3 for alpha chain variable domain of TCR clone 79134 (TRAV8-3, TRAJ40)
CAVTSGAYKYIF

SEQ ID NO: 158268 - protein, 14 aa, Homo sapiens
  CDR3 for beta chain variable domain of TCR clone 79134 (TRBV12-4, TRBJ2-3)
CASSGQGSTDTQYF

SEQ ID NO: 158269 - protein, 14 aa, Homo sapiens
  CDR3 for alpha chain variable domain of TCR clone 79135 (TRAV8-4, TRAJ54)
CAVSEVWGAQKLVF

SEQ ID NO: 158270 - protein, 13 aa, Homo sapiens
  CDR3 for beta chain variable domain of TCR clone 79135 (TRBV27, TRBJ2-7)
CASSFVSSYEQYF

SEQ ID NO: 158271 - protein, 11 aa, Homo sapiens
  CDR3 for alpha chain variable domain of TCR clone 79136 (TRAV26-1, TRAJ27)
CIDPNAGKSTF

SEQ ID NO: 158272 - protein, 18 aa, Homo sapiens
  CDR3 for beta chain variable domain of TCR clone 79136 (TRBV7-9, TRBJ2-6)
CASSFPGAGISGANVLTV

SEQ ID NO: 158273 - protein, 16 aa, Homo sapiens
  CDR3 for alpha chain variable domain of TCR clone 79137 (TRAV30, TRAJ24)
CGTEIVDADSWGKFQF

SEQ ID NO: 158274 - protein, 14 aa, Homo sapiens
  CDR3 for beta chain variable domain of TCR clone 79137 (TRBV7-2, TRBJ1-5)
CASSTQGAGQPQHF

SEQ ID NO: 158275 - protein, 12 aa, Homo sapiens
  CDR3 for alpha chain variable domain of TCR clone 79138 (TRAV3, TRAJ20)
CAVRDHDYKLSF

SEQ ID NO: 158276 - protein, 16 aa, Homo sapiens
  CDR3 for beta chain variable domain of TCR clone 79138 (TRBV7-3, TRBJ2-2)
CASSLKRGTLSGELFF

SEQ ID NO: 158277 - protein, 13 aa, Homo sapiens
  CDR3 for alpha chain variable domain of TCR clone 79139 (TRAV21, TRAJ45)
CAVMGGGADGLTF

SEQ ID NO: 158278 - protein, 16 aa, Homo sapiens
  CDR3 for beta chain variable domain of TCR clone 79139 (TRBV20-1, TRBJ2-1)
CSARDPLAGGRGEQFF

SEQ ID NO: 158279 - protein, 14 aa, Homo sapiens
  CDR3 for alpha chain variable domain of TCR clone 79140 (TRAV1-2, TRAJ16)
CAVNRFSDGQKLLF

SEQ ID NO: 158280 - protein, 15 aa, Homo sapiens
  CDR3 for beta chain variable domain of TCR clone 79140 (TRBV28, TRBJ2-1)
CASSIIAGGRSEQFL

SEQ ID NO: 158281 - protein, 14 aa, Homo sapiens
  CDR3 for alpha chain variable domain of TCR clone 79141 (TRAV9-2, TRAJ24)
CALNPRGSWGKLQF

SEQ ID NO: 158282 - protein, 10 aa, Homo sapiens
  CDR3 for beta chain variable domain of TCR clone 79141 (TRBV23-1, TRBJ2-1)
KWSSYNEQFF

SEQ ID NO: 158283 - protein, 14 aa, Homo sapiens
  CDR3 for alpha chain variable domain of TCR clone 79142 (TRAV13-1, TRAJ40)
CAASMTSGTYKYIF

SEQ ID NO: 158284 - protein, 14 aa, Homo sapiens
  CDR3 for beta chain variable domain of TCR clone 79142 (TRBV19, TRBJ2-1)
CASPTFVLSGEQFF

SEQ ID NO: 158285 - protein, 17 aa, Homo sapiens
  CDR3 for alpha chain variable domain of TCR clone 79143 (TRAV27, TRAJ42)
CAERVMYYGGSQGNLIF

SEQ ID NO: 158286 - protein, 14 aa, Homo sapiens
  CDR3 for beta chain variable domain of TCR clone 79143 (TRBV6-6, TRBJ2-3)
CASRLQREADTQYF

SEQ ID NO: 158287 - protein, 11 aa, Homo sapiens
  CDR3 for alpha chain variable domain of TCR clone 79144 (TRAV26-1, TRAJ27)
CIDPNAGKSNF

SEQ ID NO: 158288 - protein, 18 aa, Homo sapiens
  CDR3 for beta chain variable domain of TCR clone 79144 (TRBV7-9, TRBJ2-6)
CASSFPGAGISGANVLTF

SEQ ID NO: 158289 - protein, 15 aa, Homo sapiens
  CDR3 for alpha chain variable domain of TCR clone 79145 (TRAV12-1, TRAJ44)
CVADLPTGTASKLTF

SEQ ID NO: 158290 - protein, 13 aa, Homo sapiens
  CDR3 for beta chain variable domain of TCR clone 79145 (TRBV6-5, TRBJ2-5)
CASSPQGGETQDF

SEQ ID NO: 158291 - protein, 12 aa, Homo sapiens
  CDR3 for alpha chain variable domain of TCR clone 79146 (TRAV13-1, TRAJ53)
AASGGSNYKPTF

SEQ ID NO: 158292 - protein, 15 aa, Homo sapiens
  CDR3 for beta chain variable domain of TCR clone 79146 (TRBV5-1, TRBJ2-1)
CASSPPRAPYNEQSF

SEQ ID NO: 158293 - protein, 16 aa, Homo sapiens
  CDR3 for alpha chain variable domain of TCR clone 79147 (TRAV3, TRAJ10)
CAVRDMRAGGGNKHTF

SEQ ID NO: 158294 - protein, 19 aa, Homo sapiens
  CDR3 for beta chain variable domain of TCR clone 79147 (TRBV6-3, TRBJ1-2)
CASSYSKGRTGPPNYGYTF

SEQ ID NO: 158295 - protein, 14 aa, Homo sapiens
  CDR3 for alpha chain variable domain of TCR clone 79148 (TRAV26-1, TRAJ21)
CIVRPPYKFNKFYF

SEQ ID NO: 158296 - protein, 14 aa, Homo sapiens
  CDR3 for beta chain variable domain of TCR clone 79148 (TRBV11-3, TRBJ2-1)
CASSATTSGSIQFF

SEQ ID NO: 158297 - protein, 15 aa, Homo sapiens
  CDR3 for alpha chain variable domain of TCR clone 79149 (TRAV12-1, TRAJ9)
CVVSFGDTGGFKTIF

SEQ ID NO: 158298 - protein, 15 aa, Homo sapiens
  CDR3 for beta chain variable domain of TCR clone 79149 (TRBV10-3, TRBJ1-5)
CAISDTGLGGQPQHF

SEQ ID NO: 158299 - protein, 14 aa, Homo sapiens
  CDR3 for alpha chain variable domain of TCR clone 79150 (TRAV1-2, TRAJ16)
CAVNRFSDGQKLLF

SEQ ID NO: 158300 - protein, 16 aa, Homo sapiens
  CDR3 for beta chain variable domain of TCR clone 79150 (TRBV5-1, TRBJ2-2)
CASSSRTGGRTGELFF

SEQ ID NO: 158301 - protein, 15 aa, Homo sapiens
  CDR3 for alpha chain variable domain of TCR clone 79151 (TRAV12-1, TRAJ45)
CVVLSGGGGADGLTF

SEQ ID NO: 158302 - protein, 18 aa, Homo sapiens
  CDR3 for beta chain variable domain of TCR clone 79151 (TRBV4-1, TRBJ1-5)
CASSQDPRGQGLNQPQHF

SEQ ID NO: 158303 - protein, 15 aa, Homo sapiens
  CDR3 for alpha chain variable domain of TCR clone 79152 (TRAV29/DV5, TRAJ24)
CAASGATDSCGKFQF

SEQ ID NO: 158304 - protein, 12 aa, Homo sapiens
  CDR3 for beta chain variable domain of TCR clone 79152 (TRBV11-2, TRBJ2-2)
CASSLPTGELFF

SEQ ID NO: 158305 - protein, 14 aa, Homo sapiens
  CDR3 for alpha chain variable domain of TCR clone 79153 (TRAV2, TRAJ20)
CAVEDGTNDYRLSF

SEQ ID NO: 158306 - protein, 13 aa, Homo sapiens
  CDR3 for beta chain variable domain of TCR clone 79153 (TRBV7-2, TRBJ1-1)
CASSRNTNTEAFF

SEQ ID NO: 158307 - protein, 18 aa, Homo sapiens
  CDR3 for alpha chain variable domain of TCR clone 79154 (TRAV29/DV5, TRAJ52)
CAAGFRGAGGTSYGKLTF

SEQ ID NO: 158308 - protein, 15 aa, Homo sapiens
  CDR3 for beta chain variable domain of TCR clone 79154 (TRBV7-2, TRBJ2-2)
CASRRPGQNTGELFF

SEQ ID NO: 158309 - protein, 14 aa, Homo sapiens
  CDR3 for alpha chain variable domain of TCR clone 79155 (TRAV16, TRAJ33)
CALSAMDSNYELIW

SEQ ID NO: 158310 - protein, 12 aa, Homo sapiens
  CDR3 for beta chain variable domain of TCR clone 79155 (TRBV5-1, TRBJ1-2)
CASSQDTYGYTF

SEQ ID NO: 158311 - protein, 11 aa, Homo sapiens
  CDR3 for alpha chain variable domain of TCR clone 79156 (TRAV2, TRAJ33)
CAVDSNYQLIW

SEQ ID NO: 158312 - protein, 13 aa, Homo sapiens
  CDR3 for beta chain variable domain of TCR clone 79156 (TRBV7-2, TRBJ2-7)
CASSSPGGSEQYF

SEQ ID NO: 158313 - protein, 13 aa, Homo sapiens
  CDR3 for alpha chain variable domain of TCR clone 79157 (TRAV21, TRAJ57)
CAVTQGGSEKLVF

SEQ ID NO: 158314 - protein, 16 aa, Homo sapiens
  CDR3 for beta chain variable domain of TCR clone 79157 (TRBV29-1, TRBJ2-7)
CSVEDSEDGTAYEQYF

SEQ ID NO: 158315 - protein, 14 aa, Homo sapiens
  CDR3 for alpha chain variable domain of TCR clone 79158 (TRAV12-2, TRAJ13)
CAVKKTGGYQKVTF

SEQ ID NO: 158316 - protein, 16 aa, Homo sapiens
  CDR3 for beta chain variable domain of TCR clone 79158 (TRBV19, TRBJ2-1)
CASSSGTSGDYNEQFF

SEQ ID NO: 158317 - protein, 13 aa, Homo sapiens
  CDR3 for alpha chain variable domain of TCR clone 79159 (TRAV8-3, TRAJ43)
CAVGPDNNNDMSF

SEQ ID NO: 158318 - protein, 12 aa, Homo sapiens
  CDR3 for beta chain variable domain of TCR clone 79159 (TRBV7-2, TRBJ1-6)
CASSLSSSPLHF

SEQ ID NO: 158319 - protein, 17 aa, Homo sapiens
  CDR3 for alpha chain variable domain of TCR clone 79160 (TRAV23/DV6, TRAJ57)
CAASSTLSQGGSEKLVF

SEQ ID NO: 158320 - protein, 16 aa, Homo sapiens
  CDR3 for beta chain variable domain of TCR clone 79160 (TRBV19, TRBJ2-2)
CASRSPGTGATGELFF

SEQ ID NO: 158321 - protein, 13 aa, Homo sapiens
  CDR3 for alpha chain variable domain of TCR clone 79161 (TRAV35, TRAJ42)
CAGFPGSQGNLIF

SEQ ID NO: 158322 - protein, 14 aa, Homo sapiens
  CDR3 for beta chain variable domain of TCR clone 79161 (TRBV4-1, TRBJ2-2)
CASSQAVNTGERFF

SEQ ID NO: 158323 - protein, 14 aa, Homo sapiens
  CDR3 for alpha chain variable domain of TCR clone 79162 (TRAV12-3, TRAJ9)
CAMSPNTGGFKTIF

SEQ ID NO: 158324 - protein, 12 aa, Homo sapiens
  CDR3 for beta chain variable domain of TCR clone 79162 (TRBV19, TRBJ1-5)
FASSIAQQPQHF

SEQ ID NO: 158325 - protein, 16 aa, Homo sapiens
  CDR3 for alpha chain variable domain of TCR clone 79163 (TRAV35, TRAJ28)
CAGQRYSGAGSYQLTF

SEQ ID NO: 158326 - protein, 13 aa, Homo sapiens
  CDR3 for beta chain variable domain of TCR clone 79163 (TRBV19, TRBJ1-2)
CASSQGQAYGYTF

SEQ ID NO: 158327 - protein, 13 aa, Homo sapiens
  CDR3 for alpha chain variable domain of TCR clone 79164 (TRAV23/DV6, TRAJ22)
CAPYSGSARQLTF

SEQ ID NO: 158328 - protein, 13 aa, Homo sapiens
  CDR3 for beta chain variable domain of TCR clone 79164 (TRBV6-1, TRBJ1-1)
CASRRQGNTEAFF

SEQ ID NO: 158329 - protein, 14 aa, Homo sapiens
  CDR3 for alpha chain variable domain of TCR clone 79165 (TRAV16, TRAJ32)
CALKSGGATNKLIF

SEQ ID NO: 158330 - protein, 14 aa, Homo sapiens
  CDR3 for beta chain variable domain of TCR clone 79165 (TRBV19, TRBJ2-7)
CASSMGQGAIEQYF

SEQ ID NO: 158331 - protein, 15 aa, Homo sapiens
  CDR3 for alpha chain variable domain of TCR clone 79166 (TRAV12-3, TRAJ6)
CAMSATTGGSYIPTF

SEQ ID NO: 158332 - protein, 14 aa, Homo sapiens
  CDR3 for beta chain variable domain of TCR clone 79166 (TRBV11-2, TRBJ2-5)
CASSRTGGIETQYF

SEQ ID NO: 158333 - protein, 15 aa, Homo sapiens
  CDR3 for alpha chain variable domain of TCR clone 79167 (TRAV3, TRAJ5)
CAVRDLDTGRRALTF

SEQ ID NO: 158334 - protein, 12 aa, Homo sapiens
  CDR3 for beta chain variable domain of TCR clone 79167 (TRBV11-2, TRBJ2-1)
CASSPGNNEQFF

SEQ ID NO: 158335 - protein, 13 aa, Homo sapiens
  CDR3 for alpha chain variable domain of TCR clone 79168 (TRAV21, TRAJ27)
CAARPGNAGKSTF

SEQ ID NO: 158336 - protein, 20 aa, Homo sapiens
  CDR3 for beta chain variable domain of TCR clone 79168 (TRBV4-2, TRBJ2-7)
CASSQASGGDLRAVLRAGHQ

SEQ ID NO: 158337 - protein, 14 aa, Homo sapiens
  CDR3 for alpha chain variable domain of TCR clone 79169 (TRAV12-1, TRAJ10)
SHLPLTGGGNKLTF

SEQ ID NO: 158338 - protein, 15 aa, Homo sapiens
  CDR3 for beta chain variable domain of TCR clone 79169 (TRBV20-1, TRBJ2-7)
CSAREGRDSLYEQYF

SEQ ID NO: 158339 - protein, 13 aa, Homo sapiens
  CDR3 for alpha chain variable domain of TCR clone 79170 (TRAV13-1, TRAJ39)
CSKYSNAGNMLTF

SEQ ID NO: 158340 - protein, 16 aa, Homo sapiens
  CDR3 for beta chain variable domain of TCR clone 79170 (TRBV20-1, TRBJ1-4)
CSAPGQGLLTNEKLFC

SEQ ID NO: 158341 - protein, 14 aa, Homo sapiens
  CDR3 for alpha chain variable domain of TCR clone 79171 (TRAV1-2, TRAJ16)
CAVRSASDGQKLLF

SEQ ID NO: 158342 - protein, 15 aa, Homo sapiens
  CDR3 for beta chain variable domain of TCR clone 79171 (TRBV11-3, TRBJ2-3)
CASLKDGREGDTQYF

SEQ ID NO: 158343 - protein, 14 aa, Homo sapiens
  CDR3 for alpha chain variable domain of TCR clone 79172 (TRAV1-2, TRAJ8)
CAVGEDTGFQKLVF

SEQ ID NO: 158344 - protein, 13 aa, Homo sapiens
  CDR3 for beta chain variable domain of TCR clone 79172 (TRBV4-2, TRBJ2-2)
CASEDRGTGELFF

SEQ ID NO: 158345 - protein, 16 aa, Homo sapiens
  CDR3 for alpha chain variable domain of TCR clone 79173 (TRAV26-1, TRAJ48)
CIVREPPNFGNEKLTF

SEQ ID NO: 158346 - protein, 12 aa, Homo sapiens
  CDR3 for beta chain variable domain of TCR clone 79173 (TRBV19, TRBJ2-1)
FASSRQGAEQFF

SEQ ID NO: 158347 - protein, 14 aa, Homo sapiens
  CDR3 for alpha chain variable domain of TCR clone 79174 (TRAV3, TRAJ21)
CAVRDKYNFNKFYF

SEQ ID NO: 158348 - protein, 15 aa, Homo sapiens
  CDR3 for beta chain variable domain of TCR clone 79174 (TRBV12-4, TRBJ2-6)
CASSLGTPGANVLTF

SEQ ID NO: 158349 - protein, 12 aa, Homo sapiens
  CDR3 for alpha chain variable domain of TCR clone 79175 (TRAV3, TRAJ26)
CAVRDYGPNFVF

SEQ ID NO: 158350 - protein, 16 aa, Homo sapiens
  CDR3 for beta chain variable domain of TCR clone 79175 (TRBV11-2, TRBJ1-2)
CASSPSGREANYGYTF

SEQ ID NO: 158351 - protein, 14 aa, Homo sapiens
  CDR3 for alpha chain variable domain of TCR clone 79176 (TRAV12-3, TRAJ9)
CAMSPNTGGFKTIF

SEQ ID NO: 158352 - protein, 15 aa, Homo sapiens
  CDR3 for beta chain variable domain of TCR clone 79176 (TRBV2, TRBJ2-7)
CASSEGLARSYEQYF

SEQ ID NO: 158353 - protein, 14 aa, Homo sapiens
  CDR3 for alpha chain variable domain of TCR clone 79177 (TRAV2, TRAJ9)
CAVEDRSGGFKTIF

SEQ ID NO: 158354 - protein, 18 aa, Homo sapiens
  CDR3 for beta chain variable domain of TCR clone 79177 (TRBV7-3, TRBJ2-3)
CASNSTGTYPGSTDTQYF

SEQ ID NO: 158355 - protein, 14 aa, Homo sapiens
  CDR3 for alpha chain variable domain of TCR clone 79178 (TRAV35, TRAJ42)
FAGRYGGSQGNLIF

SEQ ID NO: 158356 - protein, 15 aa, Homo sapiens
  CDR3 for beta chain variable domain of TCR clone 79178 (TRBV7-9, TRBJ2-1)
CASSLGWGRANEQFF

SEQ ID NO: 158357 - protein, 14 aa, Homo sapiens
  CDR3 for alpha chain variable domain of TCR clone 79179 (TRAV12-2, TRAJ40)
CAVKIPSGTYKYIF

SEQ ID NO: 158358 - protein, 17 aa, Homo sapiens
  CDR3 for beta chain variable domain of TCR clone 79179 (TRBV13, TRBJ2-3)
CASSLSRVAGGRDTQYF

SEQ ID NO: 158359 - protein, 14 aa, Homo sapiens
  CDR3 for alpha chain variable domain of TCR clone 79180 (TRAV1-2, TRAJ8)
CAVREDTGFQKLLF

SEQ ID NO: 158360 - protein, 12 aa, Homo sapiens
  CDR3 for beta chain variable domain of TCR clone 79180 (TRBV29-1, TRBJ2-3)
CSVTGGADTQYF

SEQ ID NO: 158361 - protein, 12 aa, Homo sapiens
  CDR3 for alpha chain variable domain of TCR clone 79181 (TRAV12-1, TRAJ40)
CVVYSGTYKYIF

SEQ ID NO: 158362 - protein, 18 aa, Homo sapiens
  CDR3 for beta chain variable domain of TCR clone 79181 (TRBV11-2, TRBJ2-3)
FASSLGGASRGAPNTQYF

SEQ ID NO: 158363 - protein, 15 aa, Homo sapiens
  CDR3 for alpha chain variable domain of TCR clone 79182 (TRAV3, TRAJ29)
CAVRAPLSGNTPLVF

SEQ ID NO: 158364 - protein, 13 aa, Homo sapiens
  CDR3 for beta chain variable domain of TCR clone 79182 (TRBV19, TRBJ1-2)
CASSVPGQDGYTF

SEQ ID NO: 158365 - protein, 14 aa, Homo sapiens
  CDR3 for alpha chain variable domain of TCR clone 79183 (TRAV23/DV6, TRAJ22)
CAASVSGSARQLTF

SEQ ID NO: 158366 - protein, 16 aa, Homo sapiens
  CDR3 for beta chain variable domain of TCR clone 79183 (TRBV19, TRBJ2-2)
CASSFPGQGLAGELFS

SEQ ID NO: 158367 - protein, 11 aa, Homo sapiens
  CDR3 for alpha chain variable domain of TCR clone 79184 (TRAV21, TRAJ11)
CAVNGYSTLTF

SEQ ID NO: 158368 - protein, 16 aa, Homo sapiens
  CDR3 for beta chain variable domain of TCR clone 79184 (TRBV4-3, TRBJ2-2)
CASSHRQGSGTGELFF

SEQ ID NO: 158369 - protein, 14 aa, Homo sapiens
  CDR3 for alpha chain variable domain of TCR clone 79185 (TRAV1-2, TRAJ8)
CAVREDTGFQKLVF

SEQ ID NO: 158370 - protein, 16 aa, Homo sapiens
  CDR3 for beta chain variable domain of TCR clone 79185 (TRBV4-1, TRBJ2-1)
CASSQEAGQGSDEQFF

SEQ ID NO: 158371 - protein, 16 aa, Homo sapiens
  CDR3 for alpha chain variable domain of TCR clone 79186 (TRAV30, TRAJ24)
CGTEIVDADSWGKFQF

SEQ ID NO: 158372 - protein, 15 aa, Homo sapiens
  CDR3 for beta chain variable domain of TCR clone 79186 (TRBV6-3, TRBJ2-7)
CASSSPGTVFYERYF

SEQ ID NO: 158373 - protein, 13 aa, Homo sapiens
  CDR3 for alpha chain variable domain of TCR clone 79187 (TRAV8-3, TRAJ48)
CAVVPFGNEKLTF

SEQ ID NO: 158374 - protein, 12 aa, Homo sapiens
  CDR3 for beta chain variable domain of TCR clone 79187 (TRBV11-2, TRBJ2-2)
CASSLGVGELFF

SEQ ID NO: 158375 - protein, 15 aa, Homo sapiens
  CDR3 for alpha chain variable domain of TCR clone 79188 (TRAV17, TRAJ57)
CATGPSQGGSEKLVF

SEQ ID NO: 158376 - protein, 17 aa, Homo sapiens
  CDR3 for beta chain variable domain of TCR clone 79188 (TRBV11-2, TRBJ2-1)
CASSLYPPGVEYNEQFF

SEQ ID NO: 158377 - protein, 15 aa, Homo sapiens
  CDR3 for alpha chain variable domain of TCR clone 79189 (TRAV12-3, TRAJ49)
CAMAVTPNTGNQFYF

SEQ ID NO: 158378 - protein, 18 aa, Homo sapiens
  CDR3 for beta chain variable domain of TCR clone 79189 (TRBV4-1, TRBJ1-5)
CASSQDPRGRGLNQPQHF

SEQ ID NO: 158379 - protein, 16 aa, Homo sapiens
  CDR3 for alpha chain variable domain of TCR clone 79190 (TRAV3, TRAJ10)
CAVRAMRAGGGNKLTF

SEQ ID NO: 158380 - protein, 13 aa, Homo sapiens
  CDR3 for beta chain variable domain of TCR clone 79190 (TRBV6-1, TRBJ1-1)
CASSRQGNTEAFF

SEQ ID NO: 158381 - protein, 14 aa, Homo sapiens
  CDR3 for alpha chain variable domain of TCR clone 79191 (TRAV8-4, TRAJ54)
CVVSEVLGAQKLVF

SEQ ID NO: 158382 - protein, 13 aa, Homo sapiens
  CDR3 for beta chain variable domain of TCR clone 79191 (TRBV27, TRBJ2-7)
CASSFVSSYEQYF

SEQ ID NO: 158383 - protein, 14 aa, Homo sapiens
  CDR3 for alpha chain variable domain of TCR clone 79192 (TRAV1-1, TRAJ28)
CAAPSGAGSYPLTF

SEQ ID NO: 158384 - protein, 15 aa, Homo sapiens
  CDR3 for beta chain variable domain of TCR clone 79192 (TRBV7-2, TRBJ1-2)
CASSLVSGGDYGYTF

SEQ ID NO: 158385 - protein, 12 aa, Homo sapiens
  CDR3 for alpha chain variable domain of TCR clone 79193 (TRAV13-1, TRAJ48)
CAANFGNEKLTF

SEQ ID NO: 158386 - protein, 15 aa, Homo sapiens
  CDR3 for beta chain variable domain of TCR clone 79193 (TRBV7-9, TRBJ1-5)
CASSQGHQPNQPQHF

SEQ ID NO: 158387 - protein, 14 aa, Homo sapiens
  CDR3 for alpha chain variable domain of TCR clone 79194 (TRAV12-2, TRAJ29)
CAVRRNSGNTPLVF

SEQ ID NO: 158388 - protein, 13 aa, Homo sapiens
  CDR3 for beta chain variable domain of TCR clone 79194 (TRBV12-4, TRBJ2-1)
CASSHYTGNEQFF

SEQ ID NO: 158389 - protein, 21 aa, Homo sapiens
  CDR3 for alpha chain variable domain of TCR clone 79195 (TRAV1-1, TRAJ6)
CLLLLRCERLERTGGSYIPTF

SEQ ID NO: 158390 - protein, 15 aa, Homo sapiens
  CDR3 for beta chain variable domain of TCR clone 79195 (TRBV7-2, TRBJ2-3)
RASSLVVRGPDTQYF

SEQ ID NO: 158391 - protein, 10 aa, Homo sapiens
  CDR3 for alpha chain variable domain of TCR clone 79196 (TRAV9-2, TRAJ49)
CALTVNQFYF

SEQ ID NO: 158392 - protein, 16 aa, Homo sapiens
  CDR3 for beta chain variable domain of TCR clone 79196 (TRBV19, TRBJ2-3)
CASSPGAASRTDTQYF

SEQ ID NO: 158393 - protein, 15 aa, Homo sapiens
  CDR3 for alpha chain variable domain of TCR clone 79197 (TRAV3, TRAJ29)
CAVRDLYSGNTPLVF

SEQ ID NO: 158394 - protein, 17 aa, Homo sapiens
  CDR3 for beta chain variable domain of TCR clone 79197 (TRBV20-1, TRBJ2-1)
CSARDTLAGVWDNEKFF

SEQ ID NO: 158395 - protein, 15 aa, Homo sapiens
  CDR3 for alpha chain variable domain of TCR clone 79198 (TRAV26-1, TRAJ37)
CIVKTGSSNTGKLIF

SEQ ID NO: 158396 - protein, 12 aa, Homo sapiens
  CDR3 for beta chain variable domain of TCR clone 79198 (TRBV7-8, TRBJ2-7)
CASGLGDREQYF

SEQ ID NO: 158397 - protein, 14 aa, Homo sapiens
  CDR3 for alpha chain variable domain of TCR clone 79199 (TRAV2, TRAJ9)
CAVEDRSGGFKTIF

SEQ ID NO: 158398 - protein, 20 aa, Homo sapiens
  CDR3 for beta chain variable domain of TCR clone 79199 (TRBV28, TRBJ2-1)
CASTPIGRSPGLAGGNEQFF

SEQ ID NO: 158399 - protein, 10 aa, Homo sapiens
  CDR3 for alpha chain variable domain of TCR clone 79200 (TRAV30, TRAJ48)
CGIGNEKLTF

SEQ ID NO: 158400 - protein, 12 aa, Homo sapiens
  CDR3 for beta chain variable domain of TCR clone 79200 (TRBV14, TRBJ2-5)
CASSHLKETQYF

SEQ ID NO: 158401 - protein, 18 aa, Homo sapiens
  CDR3 for alpha chain variable domain of TCR clone 79201 (TRAV21, TRAJ52)
CAVRPSPAGGTSYGKLTF

SEQ ID NO: 158402 - protein, 13 aa, Homo sapiens
  CDR3 for beta chain variable domain of TCR clone 79201 (TRBV2, TRBJ1-5)
CATAGQGNQPQHF

SEQ ID NO: 158403 - protein, 21 aa, Homo sapiens
  CDR3 for alpha chain variable domain of TCR clone 79202 (TRAV26-2, TRAJ45)
CALLHPERQGRSGGGADGLTF

SEQ ID NO: 158404 - protein, 15 aa, Homo sapiens
  CDR3 for beta chain variable domain of TCR clone 79202 (TRBV7-6, TRBJ2-5)
CASSKPTGPQETQYF

SEQ ID NO: 158405 - protein, 14 aa, Homo sapiens
  CDR3 for alpha chain variable domain of TCR clone 79203 (TRAV13-1, TRAJ44)
CAAKATGTASKLTF

SEQ ID NO: 158406 - protein, 17 aa, Homo sapiens
  CDR3 for beta chain variable domain of TCR clone 79203 (TRBV25-1, TRBJ1-1)
CASSTPPAGAMNTEAFF

SEQ ID NO: 158407 - protein, 17 aa, Homo sapiens
  CDR3 for alpha chain variable domain of TCR clone 79204 (TRAV17, TRAJ28)
CATDPRRGVAGSYQLTF

SEQ ID NO: 158408 - protein, 16 aa, Homo sapiens
  CDR3 for beta chain variable domain of TCR clone 79204 (TRBV25-1, TRBJ1-1)
CASSGDRDRGRIEAFF

SEQ ID NO: 158409 - protein, 14 aa, Homo sapiens
  CDR3 for alpha chain variable domain of TCR clone 79205 (TRAV12-1, TRAJ12)
CVVNDRDSSYKLIF

SEQ ID NO: 158410 - protein, 13 aa, Homo sapiens
  CDR3 for beta chain variable domain of TCR clone 79205 (TRBV7-9, TRBJ1-2)
CASSLKQNYGYTF

SEQ ID NO: 158411 - protein, 20 aa, Homo sapiens
  CDR3 for alpha chain variable domain of TCR clone 79206 (TRAV26-1, TRAJ47)
CCVLLHRQSSFMEYGNKLVF

SEQ ID NO: 158412 - protein, 14 aa, Homo sapiens
  CDR3 for beta chain variable domain of TCR clone 79206 (TRBV7-2, TRBJ1-2)
CASSRGGTNDGYTF

SEQ ID NO: 158413 - protein, 15 aa, Homo sapiens
  CDR3 for alpha chain variable domain of TCR clone 79207 (TRAV8-3, TRAJ27)
CAVGPSKTNAGKSTF

SEQ ID NO: 158414 - protein, 13 aa, Homo sapiens
  CDR3 for beta chain variable domain of TCR clone 79207 (TRBV7-3, TRBJ1-1)
CASSQDWGAEAFF

SEQ ID NO: 158415 - protein, 14 aa, Homo sapiens
  CDR3 for alpha chain variable domain of TCR clone 79208 (TRAV1-2, TRAJ8)
CAAREDTGFQKLVF

SEQ ID NO: 158416 - protein, 12 aa, Homo sapiens
  CDR3 for beta chain variable domain of TCR clone 79208 (TRBV29-1, TRBJ2-3)
CSVTGGADTQYF

SEQ ID NO: 158417 - protein, 14 aa, Homo sapiens
  CDR3 for alpha chain variable domain of TCR clone 79209 (TRAV1-2, TRAJ16)
CAVNRFSDGPKLLF

SEQ ID NO: 158418 - protein, 13 aa, Homo sapiens
  CDR3 for beta chain variable domain of TCR clone 79209 (TRBV7-9, TRBJ1-2)
CASSLKQNYGYTF

SEQ ID NO: 158419 - protein, 12 aa, Homo sapiens
  CDR3 for alpha chain variable domain of TCR clone 79210 (TRAV13-1, TRAJ53)
AASGGSNYKLTF

SEQ ID NO: 158420 - protein, 15 aa, Homo sapiens
  CDR3 for beta chain variable domain of TCR clone 79210 (TRBV5-1, TRBJ2-1)
CASSPTRAPYNEQFF

SEQ ID NO: 158421 - protein, 12 aa, Homo sapiens
  CDR3 for alpha chain variable domain of TCR clone 79211 (TRAV20, TRAJ20)
CAVRFNDYKLSF

SEQ ID NO: 158422 - protein, 14 aa, Homo sapiens
  CDR3 for beta chain variable domain of TCR clone 79211 (TRBV18, TRBJ2-5)
CASSPGVSQETQYF

SEQ ID NO: 158423 - protein, 15 aa, Homo sapiens
  CDR3 for alpha chain variable domain of TCR clone 79212 (TRAV26-2, TRAJ57)
CILRDIRGGSEKLVF

SEQ ID NO: 158424 - protein, 11 aa, Homo sapiens
  CDR3 for beta chain variable domain of TCR clone 79212 (TRBV29-1, TRBJ2-5)
CSEDRTGTQYF

SEQ ID NO: 158425 - protein, 17 aa, Homo sapiens
  CDR3 for alpha chain variable domain of TCR clone 79213 (TRAV3, TRAJ42)
CAVRDRDYGGSQGNLIF

SEQ ID NO: 158426 - protein, 15 aa, Homo sapiens
  CDR3 for beta chain variable domain of TCR clone 79213 (TRBV6-6, TRBJ2-7)
CASSYPYGGSYEQYF

SEQ ID NO: 158427 - protein, 15 aa, Homo sapiens
  CDR3 for alpha chain variable domain of TCR clone 79214 (TRAV26-1, TRAJ40)
CIVRVTTSGTYKYIF

SEQ ID NO: 158428 - protein, 14 aa, Homo sapiens
  CDR3 for beta chain variable domain of TCR clone 79214 (TRBV7-3, TRBJ1-1)
CASSRQGGDTEAFF

SEQ ID NO: 158429 - protein, 16 aa, Homo sapiens
  CDR3 for alpha chain variable domain of TCR clone 79215 (TRAV1-2, TRAJ10)
CAVRGVLTGGGNKLTF

SEQ ID NO: 158430 - protein, 13 aa, Homo sapiens
  CDR3 for beta chain variable domain of TCR clone 79215 (TRBV18, TRBJ2-7)
CASSRSGSYEQYF

SEQ ID NO: 158431 - protein, 15 aa, Homo sapiens
  CDR3 for alpha chain variable domain of TCR clone 79216 (TRAV12-2, TRAJ53)
CAVNGGGGSNYKLTF

SEQ ID NO: 158432 - protein, 17 aa, Homo sapiens
  CDR3 for beta chain variable domain of TCR clone 79216 (TRBV7-3, TRBJ2-3)
CASSLVKRMRGADTQYF

SEQ ID NO: 158433 - protein, 16 aa, Homo sapiens
  CDR3 for alpha chain variable domain of TCR clone 79217 (TRAV29/DV5, TRAJ30)
QCTSVQQANRDDKIIF

SEQ ID NO: 158434 - protein, 13 aa, Homo sapiens
  CDR3 for beta chain variable domain of TCR clone 79217 (TRBV12-5, TRBJ2-3)
CASQNRGTGTQYF

SEQ ID NO: 158435 - protein, 14 aa, Homo sapiens
  CDR3 for alpha chain variable domain of TCR clone 79218 (TRAV20, TRAJ42)
CAVQAGGCQGNLIF

SEQ ID NO: 158436 - protein, 14 aa, Homo sapiens
  CDR3 for beta chain variable domain of TCR clone 79218 (TRBV28, TRBJ1-2)
CASRIQGANHGYTF

SEQ ID NO: 158437 - protein, 12 aa, Homo sapiens
  CDR3 for alpha chain variable domain of TCR clone 79219 (TRAV13-1, TRAJ21)
CAAKEGFNKFYF

SEQ ID NO: 158438 - protein, 15 aa, Homo sapiens
  CDR3 for beta chain variable domain of TCR clone 79219 (TRBV19, TRBJ1-5)
CASSIVWADNQPQHF

SEQ ID NO: 158439 - protein, 15 aa, Homo sapiens
  CDR3 for alpha chain variable domain of TCR clone 79220 (TRAV23/DV6, TRAJ33)
CAASNSGGGNYQLIW

SEQ ID NO: 158440 - protein, 15 aa, Homo sapiens
  CDR3 for beta chain variable domain of TCR clone 79220 (TRBV12-4, TRBJ2-7)
CASSHMGAGDYEQYF

SEQ ID NO: 158441 - protein, 12 aa, Homo sapiens
  CDR3 for alpha chain variable domain of TCR clone 79221 (TRAV1-2, TRAJ29)
CAVPPGNTPLVF

SEQ ID NO: 158442 - protein, 13 aa, Homo sapiens
  CDR3 for beta chain variable domain of TCR clone 79221 (TRBV5-4, TRBJ1-1)
CASSVDLGTEAFF

SEQ ID NO: 158443 - protein, 15 aa, Homo sapiens
  CDR3 for alpha chain variable domain of TCR clone 79222 (TRAV38-1, TRAJ37)
CAFILGSGNTGKLIF

SEQ ID NO: 158444 - protein, 12 aa, Homo sapiens
  CDR3 for beta chain variable domain of TCR clone 79222 (TRBV7-9, TRBJ2-7)
CASSFGSYEQYF

SEQ ID NO: 158445 - protein, 21 aa, Homo sapiens
  CDR3 for alpha chain variable domain of TCR clone 79223 (TRAV26-1, TRAJ17)
CCVLLHRQSSGSKAAGNKLTF

SEQ ID NO: 158446 - protein, 14 aa, Homo sapiens
  CDR3 for beta chain variable domain of TCR clone 79223 (TRBV12-5, TRBJ2-5)
CASGSRTHQETQYF

SEQ ID NO: 158447 - protein, 15 aa, Homo sapiens
  CDR3 for alpha chain variable domain of TCR clone 79224 (TRAV38-2/DV8, TRAJ48)
CAYRSGGFGNEKLTF

SEQ ID NO: 158448 - protein, 16 aa, Homo sapiens
  CDR3 for beta chain variable domain of TCR clone 79224 (TRBV28, TRBJ2-7)
CVSSPWVATGDLSQYF

SEQ ID NO: 158449 - protein, 14 aa, Homo sapiens
  CDR3 for alpha chain variable domain of TCR clone 79225 (TRAV12-2, TRAJ44)
CAVNPAGTAIKLTF

SEQ ID NO: 158450 - protein, 13 aa, Homo sapiens
  CDR3 for beta chain variable domain of TCR clone 79225 (TRBV20-1, TRBJ1-6)
CSAPLGVGSPLHF

SEQ ID NO: 158451 - protein, 12 aa, Homo sapiens
  CDR3 for alpha chain variable domain of TCR clone 79226 (TRAV12-3, TRAJ17)
CAMTLTGNKLTF

SEQ ID NO: 158452 - protein, 13 aa, Homo sapiens
  CDR3 for beta chain variable domain of TCR clone 79226 (TRBV7-9, TRBJ2-5)
CASLPSGRETQYF

SEQ ID NO: 158453 - protein, 12 aa, Homo sapiens
  CDR3 for alpha chain variable domain of TCR clone 79227 (TRAV27, TRAJ35)
CAGADFGNVLHC

SEQ ID NO: 158454 - protein, 16 aa, Homo sapiens
  CDR3 for beta chain variable domain of TCR clone 79227 (TRBV6-1, TRBJ2-1)
CASILRKGSSYNEQFF

SEQ ID NO: 158455 - protein, 14 aa, Homo sapiens
  CDR3 for alpha chain variable domain of TCR clone 79228 (TRAV12-2, TRAJ24)
CAVTPADSWGKLRF

SEQ ID NO: 158456 - protein, 15 aa, Homo sapiens
  CDR3 for beta chain variable domain of TCR clone 79228 (TRBV20-1, TRBJ2-7)
CSARDRVSGMDEQYF

SEQ ID NO: 158457 - protein, 20 aa, Homo sapiens
  CDR3 for alpha chain variable domain of TCR clone 79229 (TRAV4, TRAJ29)
CCVLLPRGCVPFSGNTPLVF

SEQ ID NO: 158458 - protein, 17 aa, Homo sapiens
  CDR3 for beta chain variable domain of TCR clone 79229 (TRBV25-1, TRBJ2-7)
CASSDVRVVFSSYEQYF

SEQ ID NO: 158459 - protein, 15 aa, Homo sapiens
  CDR3 for alpha chain variable domain of TCR clone 79230 (TRAV12-2, TRAJ53)
CAVNGGGGSNYKLTF

SEQ ID NO: 158460 - protein, 13 aa, Homo sapiens
  CDR3 for beta chain variable domain of TCR clone 79230 (TRBV3-1, TRBJ1-1)
CASSPGVTTEALF

SEQ ID NO: 158461 - protein, 16 aa, Homo sapiens
  CDR3 for alpha chain variable domain of TCR clone 79231 (TRAV22, TRAJ45)
CAVEWGKRGGADGLTF

SEQ ID NO: 158462 - protein, 13 aa, Homo sapiens
  CDR3 for beta chain variable domain of TCR clone 79231 (TRBV27, TRBJ1-1)
CASSLSIGAEAFF

SEQ ID NO: 158463 - protein, 14 aa, Homo sapiens
  CDR3 for alpha chain variable domain of TCR clone 79232 (TRAV12-2, TRAJ17)
FAVLFKAAGNKLTF

SEQ ID NO: 158464 - protein, 14 aa, Homo sapiens
  CDR3 for beta chain variable domain of TCR clone 79232 (TRBV12-5, TRBJ2-5)
CASGSRTHQETQYF

SEQ ID NO: 158465 - protein, 12 aa, Homo sapiens
  CDR3 for alpha chain variable domain of TCR clone 79233 (TRAV1-2, TRAJ29)
CAVPSGNTPLVF

SEQ ID NO: 158466 - protein, 12 aa, Homo sapiens
  CDR3 for beta chain variable domain of TCR clone 79233 (TRBV7-9, TRBJ2-7)
CASGFGSYEQYF

SEQ ID NO: 158467 - protein, 15 aa, Homo sapiens
  CDR3 for alpha chain variable domain of TCR clone 79234 (TRAV3, TRAJ22)
CAVRDRGGSARQLTF

SEQ ID NO: 158468 - protein, 16 aa, Homo sapiens
  CDR3 for beta chain variable domain of TCR clone 79234 (TRBV5-4, TRBJ2-3)
CASQQPGVGGADTQYF

SEQ ID NO: 158469 - protein, 13 aa, Homo sapiens
  CDR3 for alpha chain variable domain of TCR clone 79235 (TRAV3, TRAJ15)
CAVRDQAGTALIF

SEQ ID NO: 158470 - protein, 12 aa, Homo sapiens
  CDR3 for beta chain variable domain of TCR clone 79235 (TRBV11-2, TRBJ2-2)
CASSLGGGELFF

SEQ ID NO: 158471 - protein, 14 aa, Homo sapiens
  CDR3 for alpha chain variable domain of TCR clone 79236 (TRAV16, TRAJ39)
CALSKNNAGNMLTF

SEQ ID NO: 158472 - protein, 11 aa, Homo sapiens
  CDR3 for beta chain variable domain of TCR clone 79236 (TRBV12-4, TRBJ2-3)
CASTATDTQYF

SEQ ID NO: 158473 - protein, 12 aa, Homo sapiens
  CDR3 for alpha chain variable domain of TCR clone 79237 (TRAV21, TRAJ43)
CAVRWNNNDMRF

SEQ ID NO: 158474 - protein, 15 aa, Homo sapiens
  CDR3 for beta chain variable domain of TCR clone 79237 (TRBV20-1, TRBJ2-1)
CSASPPSGGYNEQFF

SEQ ID NO: 158475 - protein, 14 aa, Homo sapiens
  CDR3 for alpha chain variable domain of TCR clone 79238 (TRAV12-1, TRAJ42)
CVVIYGGSQGNLIF

SEQ ID NO: 158476 - protein, 17 aa, Homo sapiens
  CDR3 for beta chain variable domain of TCR clone 79238 (TRBV3-1, TRBJ2-6)
CASSPNTGPAGANDLTF

SEQ ID NO: 158477 - protein, 13 aa, Homo sapiens
  CDR3 for alpha chain variable domain of TCR clone 79239 (TRAV29/DV5, TRAJ31)
CAASRNNNARLMF

SEQ ID NO: 158478 - protein, 14 aa, Homo sapiens
  CDR3 for beta chain variable domain of TCR clone 79239 (TRBV7-6, TRBJ2-3)
CASSLGTVTDTQYF

SEQ ID NO: 158479 - protein, 17 aa, Homo sapiens
  CDR3 for alpha chain variable domain of TCR clone 79240 (TRAV13-1, TRAJ31)
CAPRDRFMFGDGTQLVV

SEQ ID NO: 158480 - protein, 12 aa, Homo sapiens
  CDR3 for beta chain variable domain of TCR clone 79240 (TRBV7-9, TRBJ2-7)
CASSLEGYEQYF

SEQ ID NO: 158481 - protein, 14 aa, Homo sapiens
  CDR3 for alpha chain variable domain of TCR clone 79241 (TRAV1-2, TRAJ16)
CAVNRFSDGQKLLF

SEQ ID NO: 158482 - protein, 15 aa, Homo sapiens
  CDR3 for beta chain variable domain of TCR clone 79241 (TRBV7-9, TRBJ1-6)
CASSSPGRGNTPLHF

SEQ ID NO: 158483 - protein, 13 aa, Homo sapiens
  CDR3 for alpha chain variable domain of TCR clone 79242 (TRAV17, TRAJ9)
CATDYTGGFKTIF

SEQ ID NO: 158484 - protein, 15 aa, Homo sapiens
  CDR3 for beta chain variable domain of TCR clone 79242 (TRBV6-1, TRBJ1-5)
CASSVWVADGQPQHF

SEQ ID NO: 158485 - protein, 16 aa, Homo sapiens
  CDR3 for alpha chain variable domain of TCR clone 79243 (TRAV3, TRAJ10)
CAVRDMRAGGGNKLTF

SEQ ID NO: 158486 - protein, 12 aa, Homo sapiens
  CDR3 for beta chain variable domain of TCR clone 79243 (TRBV5-1, TRBJ1-2)
CASSQDTYGYTF

SEQ ID NO: 158487 - protein, 17 aa, Homo sapiens
  CDR3 for alpha chain variable domain of TCR clone 79244 (TRAV3, TRAJ6)
CAVRDGPRAGGSYIPTF

SEQ ID NO: 158488 - protein, 13 aa, Homo sapiens
  CDR3 for beta chain variable domain of TCR clone 79244 (TRBV27, TRBJ2-7)
CASSLTTGYEQYF

SEQ ID NO: 158489 - protein, 11 aa, Homo sapiens
  CDR3 for alpha chain variable domain of TCR clone 79245 (TRAV2, TRAJ33)
CAVDSNYQLIW

SEQ ID NO: 158490 - protein, 14 aa, Homo sapiens
  CDR3 for beta chain variable domain of TCR clone 79245 (TRBV7-3, TRBJ2-1)
CASSLAGGTNEQFF

SEQ ID NO: 158491 - protein, 15 aa, Homo sapiens
  CDR3 for alpha chain variable domain of TCR clone 79246 (TRAV3, TRAJ22)
CAVRDRGGSARQLTL

SEQ ID NO: 158492 - protein, 17 aa, Homo sapiens
  CDR3 for beta chain variable domain of TCR clone 79246 (TRBV13, TRBJ2-3)
CASSLSRVAGGRNTQYF

SEQ ID NO: 158493 - protein, 13 aa, Homo sapiens
  CDR3 for alpha chain variable domain of TCR clone 79247 (TRAV12-2, TRAJ9)
CAVGNTGGFKTIF

SEQ ID NO: 158494 - protein, 14 aa, Homo sapiens
  CDR3 for beta chain variable domain of TCR clone 79247 (TRBV7-2, TRBJ2-7)
CASRSQGAAYEQYF

SEQ ID NO: 158495 - protein, 13 aa, Homo sapiens
  CDR3 for alpha chain variable domain of TCR clone 79248 (TRAV35, TRAJ48)
CAGHEFGNEKLTF

SEQ ID NO: 158496 - protein, 13 aa, Homo sapiens
  CDR3 for beta chain variable domain of TCR clone 79248 (TRBV7-2, TRBJ1-6)
CASSLVGSTPLHF

SEQ ID NO: 158497 - protein, 13 aa, Homo sapiens
  CDR3 for alpha chain variable domain of TCR clone 79249 (TRAV21, TRAJ27)
CAARPGNAGKSTF

SEQ ID NO: 158498 - protein, 11 aa, Homo sapiens
  CDR3 for beta chain variable domain of TCR clone 79249 (TRBV20-1, TRBJ2-1)
CSLSSGSEQFF

SEQ ID NO: 158499 - protein, 18 aa, Homo sapiens
  CDR3 for alpha chain variable domain of TCR clone 79250 (TRAV21, TRAJ52)
CAVRPPPAGGTSYGKLTF

SEQ ID NO: 158500 - protein, 13 aa, Homo sapiens
  CDR3 for beta chain variable domain of TCR clone 79250 (TRBV29-1, TRBJ2-1)
CSVEGGRVNEQFF

SEQ ID NO: 158501 - protein, 11 aa, Homo sapiens
  CDR3 for alpha chain variable domain of TCR clone 79251 (TRAV12-1, TRAJ34)
CVVNRGRELIF

SEQ ID NO: 158502 - protein, 12 aa, Homo sapiens
  CDR3 for beta chain variable domain of TCR clone 79251 (TRBV2, TRBJ2-1)
CAYGPPGNEQFF

SEQ ID NO: 158503 - protein, 12 aa, Homo sapiens
  CDR3 for alpha chain variable domain of TCR clone 79252 (TRAV8-3, TRAJ20)
CAVGANDYKLSF

SEQ ID NO: 158504 - protein, 15 aa, Homo sapiens
  CDR3 for beta chain variable domain of TCR clone 79252 (TRBV4-1, TRBJ1-4)
CASSDTGGTNEKLFF

SEQ ID NO: 158505 - protein, 13 aa, Homo sapiens
  CDR3 for alpha chain variable domain of TCR clone 79253 (TRAV27, TRAJ29)
CAGAHSGNTPLVF

SEQ ID NO: 158506 - protein, 16 aa, Homo sapiens
  CDR3 for beta chain variable domain of TCR clone 79253 (TRBV7-2, TRBJ1-6)
CASSSFESSYNSPLHF

SEQ ID NO: 158507 - protein, 14 aa, Homo sapiens
  CDR3 for alpha chain variable domain of TCR clone 79254 (TRAV25, TRAJ6)
CAGRESGGSYIPTF

SEQ ID NO: 158508 - protein, 13 aa, Homo sapiens
  CDR3 for beta chain variable domain of TCR clone 79254 (TRBV2, TRBJ1-1)
CASSVSGYTEAFF

SEQ ID NO: 158509 - protein, 14 aa, Homo sapiens
  CDR3 for alpha chain variable domain of TCR clone 79255 (TRAV23/DV6, TRAJ4)
CAAPSSGGYNKLIF

SEQ ID NO: 158510 - protein, 16 aa, Homo sapiens
  CDR3 for beta chain variable domain of TCR clone 79255 (TRBV19, TRBJ1-1)
CASRFGGPVTGAEAFF

SEQ ID NO: 158511 - protein, 11 aa, Homo sapiens
  CDR3 for alpha chain variable domain of TCR clone 79256 (TRAV1-1, TRAJ20)
CAVFNDYKLSF

SEQ ID NO: 158512 - protein, 16 aa, Homo sapiens
  CDR3 for beta chain variable domain of TCR clone 79256 (TRBV29-1, TRBJ2-2)
CSVEKTSEGNTRELFF

SEQ ID NO: 158513 - protein, 16 aa, Homo sapiens
  CDR3 for alpha chain variable domain of TCR clone 79257 (TRAV12-3, TRAJ53)
CAMSPGSGGSNYKLTF

SEQ ID NO: 158514 - protein, 15 aa, Homo sapiens
  CDR3 for beta chain variable domain of TCR clone 79257 (TRBV7-9, TRBJ2-1)
CASSLGWGRANEQFF

SEQ ID NO: 158515 - protein, 14 aa, Homo sapiens
  CDR3 for alpha chain variable domain of TCR clone 79258 (TRAV1-2, TRAJ16)
CAVNRFSDGQKLIF

SEQ ID NO: 158516 - protein, 16 aa, Homo sapiens
  CDR3 for beta chain variable domain of TCR clone 79258 (TRBV11-2, TRBJ1-2)
CASSLDTGGADYGYTF

SEQ ID NO: 158517 - protein, 15 aa, Homo sapiens
  CDR3 for alpha chain variable domain of TCR clone 79259 (TRAV1-1, TRAJ36)
CAVRPQGTGANNLFL

SEQ ID NO: 158518 - protein, 17 aa, Homo sapiens
  CDR3 for beta chain variable domain of TCR clone 79259 (TRBV20-1, TRBJ2-7)
CSASGTSGRVGESEQYF

SEQ ID NO: 158519 - protein, 15 aa, Homo sapiens
  CDR3 for alpha chain variable domain of TCR clone 79260 (TRAV13-1, TRAJ44)
CAASRNTGTASKLTF

SEQ ID NO: 158520 - protein, 14 aa, Homo sapiens
  CDR3 for beta chain variable domain of TCR clone 79260 (TRBV11-2, TRBJ1-2)
CTSSLYRGNYGYTF

SEQ ID NO: 158521 - protein, 15 aa, Homo sapiens
  CDR3 for alpha chain variable domain of TCR clone 79261 (TRAV12-2, TRAJ53)
CAVNGGGGSNDKLTF

SEQ ID NO: 158522 - protein, 15 aa, Homo sapiens
  CDR3 for beta chain variable domain of TCR clone 79261 (TRBV20-1, TRBJ2-7)
CSARDRVSGMDEQYF

SEQ ID NO: 158523 - protein, 13 aa, Homo sapiens
  CDR3 for alpha chain variable domain of TCR clone 79262 (TRAV30, TRAJ24)
CGTVTDSWGELQF

SEQ ID NO: 158524 - protein, 15 aa, Homo sapiens
  CDR3 for beta chain variable domain of TCR clone 79262 (TRBV25-1, TRBJ1-4)
CASSPGDSTNEKLFF

SEQ ID NO: 158525 - protein, 18 aa, Homo sapiens
  CDR3 for alpha chain variable domain of TCR clone 79263 (TRAV21, TRAJ52)
CAVRPSPAGGTSYGKLTF

SEQ ID NO: 158526 - protein, 16 aa, Homo sapiens
  CDR3 for beta chain variable domain of TCR clone 79263 (TRBV4-2, TRBJ1-1)
CASSPSPGRAAPEAFF

SEQ ID NO: 158527 - protein, 14 aa, Homo sapiens
  CDR3 for alpha chain variable domain of TCR clone 79264 (TRAV9-2, TRAJ39)
CALYIYNAGNMLTF

SEQ ID NO: 158528 - protein, 19 aa, Homo sapiens
  CDR3 for beta chain variable domain of TCR clone 79264 (TRBV4-3, TRBJ2-7)
CASSQEFIGWQVTPYEQYF

SEQ ID NO: 158529 - protein, 14 aa, Homo sapiens
  CDR3 for alpha chain variable domain of TCR clone 79265 (TRAV30, TRAJ33)
CGTERRVSNYQLIW

SEQ ID NO: 158530 - protein, 16 aa, Homo sapiens
  CDR3 for beta chain variable domain of TCR clone 79265 (TRBV7-3, TRBJ2-2)
CASSLKRGTLSGELFF

SEQ ID NO: 158531 - protein, 15 aa, Homo sapiens
  CDR3 for alpha chain variable domain of TCR clone 79266 (TRAV23/DV6, TRAJ38)
CAASGGAGNNRKLIL

SEQ ID NO: 158532 - protein, 13 aa, Homo sapiens
  CDR3 for beta chain variable domain of TCR clone 79266 (TRBV7-2, TRBJ1-2)
CASSLPGLYGYTF

SEQ ID NO: 158533 - protein, 16 aa, Homo sapiens
  CDR3 for alpha chain variable domain of TCR clone 79267 (TRAV12-2, TRAJ18)
CAVTTDRGSTLGRPYF

SEQ ID NO: 158534 - protein, 14 aa, Homo sapiens
  CDR3 for beta chain variable domain of TCR clone 79267 (TRBV4-2, TRBJ1-5)
CASSQDSINQPQHF

SEQ ID NO: 158535 - protein, 14 aa, Homo sapiens
  CDR3 for alpha chain variable domain of TCR clone 79268 (TRAV23/DV6, TRAJ8)
CAASKNTGFQKLVV

SEQ ID NO: 158536 - protein, 16 aa, Homo sapiens
  CDR3 for beta chain variable domain of TCR clone 79268 (TRBV4-1, TRBJ2-6)
CASSQVGDPGANVLTF

SEQ ID NO: 158537 - protein, 12 aa, Homo sapiens
  CDR3 for alpha chain variable domain of TCR clone 79269 (TRAV12-1, TRAJ40)
CVVYSGTYKYIF

SEQ ID NO: 158538 - protein, 18 aa, Homo sapiens
  CDR3 for beta chain variable domain of TCR clone 79269 (TRBV11-3, TRBJ2-3)
CASSLGGASRGAPNTQYC

SEQ ID NO: 158539 - protein, 12 aa, Homo sapiens
  CDR3 for alpha chain variable domain of TCR clone 79270 (TRAV3, TRAJ20)
CAVRDHDYKPSF

SEQ ID NO: 158540 - protein, 15 aa, Homo sapiens
  CDR3 for beta chain variable domain of TCR clone 79270 (TRBV9, TRBJ1-6)
CASSVAGTGDSPLHF

SEQ ID NO: 158541 - protein, 17 aa, Homo sapiens
  CDR3 for alpha chain variable domain of TCR clone 79271 (TRAV2, TRAJ32)
CCLLLWGGGGATNKLIF

SEQ ID NO: 158542 - protein, 13 aa, Homo sapiens
  CDR3 for beta chain variable domain of TCR clone 79271 (TRBV20-1, TRBJ1-1)
CSARRGGNTEAFF

SEQ ID NO: 158543 - protein, 18 aa, Homo sapiens
  CDR3 for alpha chain variable domain of TCR clone 79272 (TRAV13-1, TRAJ52)
CAASKRSAGGTSYGKLTF

SEQ ID NO: 158544 - protein, 15 aa, Homo sapiens
  CDR3 for beta chain variable domain of TCR clone 79272 (TRBV19, TRBJ1-1)
CASTSGQIQNTEAFF

SEQ ID NO: 158545 - protein, 13 aa, Homo sapiens
  CDR3 for alpha chain variable domain of TCR clone 79273 (TRAV35, TRAJ36)
CAGTRIGANNLFF

SEQ ID NO: 158546 - protein, 15 aa, Homo sapiens
  CDR3 for beta chain variable domain of TCR clone 79273 (TRBV28, TRBJ2-5)
CASSPPWSYQETQYF

SEQ ID NO: 158547 - protein, 14 aa, Homo sapiens
  CDR3 for alpha chain variable domain of TCR clone 79274 (TRAV16, TRAJ15)
CALSFNQAGTALIF

SEQ ID NO: 158548 - protein, 15 aa, Homo sapiens
  CDR3 for beta chain variable domain of TCR clone 79274 (TRBV7-9, TRBJ1-5)
CASSQGHQPNQPQHF

SEQ ID NO: 158549 - protein, 13 aa, Homo sapiens
  CDR3 for alpha chain variable domain of TCR clone 79275 (TRAV13-1, TRAJ37)
CAAVSGNTGKLIF

SEQ ID NO: 158550 - protein, 12 aa, Homo sapiens
  CDR3 for beta chain variable domain of TCR clone 79275 (TRBV14, TRBJ2-7)
CASSLYKDEQYF

SEQ ID NO: 158551 - protein, 10 aa, Homo sapiens
  CDR3 for alpha chain variable domain of TCR clone 79276 (TRAV30, TRAJ48)
CGIGNEKLTF

SEQ ID NO: 158552 - protein, 18 aa, Homo sapiens
  CDR3 for beta chain variable domain of TCR clone 79276 (TRBV11-2, TRBJ2-3)
CASSLGGASRGAPNTQYF

SEQ ID NO: 158553 - protein, 14 aa, Homo sapiens
  CDR3 for alpha chain variable domain of TCR clone 79277 (TRAV12-1, TRAJ43)
CVVSGRSNNNDMRF

SEQ ID NO: 158554 - protein, 13 aa, Homo sapiens
  CDR3 for beta chain variable domain of TCR clone 79277 (TRBV10-3, TRBJ2-7)
CASKLAVNYEQYF

SEQ ID NO: 158555 - protein, 17 aa, Homo sapiens
  CDR3 for alpha chain variable domain of TCR clone 79278 (TRAV3, TRAJ12)
CAVRDGGRMDSSYKLIF

SEQ ID NO: 158556 - protein, 13 aa, Homo sapiens
  CDR3 for beta chain variable domain of TCR clone 79278 (TRBV20-1, TRBJ1-1)
CSATLGGGTEAFF

SEQ ID NO: 158557 - protein, 15 aa, Homo sapiens
  CDR3 for alpha chain variable domain of TCR clone 79279 (TRAV26-1, TRAJ40)
CIVRVTTSGTYKYIF

SEQ ID NO: 158558 - protein, 13 aa, Homo sapiens
  CDR3 for beta chain variable domain of TCR clone 79279 (TRBV7-6, TRBJ1-2)
CASSLVADYGYTF

SEQ ID NO: 158559 - protein, 13 aa, Homo sapiens
  CDR3 for alpha chain variable domain of TCR clone 79280 (TRAV25, TRAJ54)
FAGTIQGAQKLVF

SEQ ID NO: 158560 - protein, 15 aa, Homo sapiens
  CDR3 for beta chain variable domain of TCR clone 79280 (TRBV19, TRBJ1-5)
CASSILTGENQPQHF

SEQ ID NO: 158561 - protein, 14 aa, Homo sapiens
  CDR3 for alpha chain variable domain of TCR clone 79281 (TRAV38-1, TRAJ45)
CAYYSGGGADGLTF

SEQ ID NO: 158562 - protein, 14 aa, Homo sapiens
  CDR3 for beta chain variable domain of TCR clone 79281 (TRBV2, TRBJ2-7)
CASSLTSGGYEQYF

SEQ ID NO: 158563 - protein, 14 aa, Homo sapiens
  CDR3 for alpha chain variable domain of TCR clone 79282 (TRAV17, TRAJ16)
CATADFSYGQKLLF

SEQ ID NO: 158564 - protein, 15 aa, Homo sapiens
  CDR3 for beta chain variable domain of TCR clone 79282 (TRBV6-5, TRBJ2-1)
CASSYDAGAGNEQFF

SEQ ID NO: 158565 - protein, 12 aa, Homo sapiens
  CDR3 for alpha chain variable domain of TCR clone 79283 (TRAV12-2, TRAJ10)
WGVTGGGNKLTF

SEQ ID NO: 158566 - protein, 15 aa, Homo sapiens
  CDR3 for beta chain variable domain of TCR clone 79283 (TRBV7-9, TRBJ1-6)
CASSSPGRGNSPLHF

SEQ ID NO: 158567 - protein, 11 aa, Homo sapiens
  CDR3 for alpha chain variable domain of TCR clone 79284 (TRAV1-2, TRAJ20)
CAVANDYKLSF

SEQ ID NO: 158568 - protein, 14 aa, Homo sapiens
  CDR3 for beta chain variable domain of TCR clone 79284 (TRBV7-8, TRBJ2-3)
CASSLEAGTDTQYF

SEQ ID NO: 158569 - protein, 14 aa, Homo sapiens
  CDR3 for alpha chain variable domain of TCR clone 79285 (TRAV17, TRAJ37)
CATDGSSITGKLIF

SEQ ID NO: 158570 - protein, 13 aa, Homo sapiens
  CDR3 for beta chain variable domain of TCR clone 79285 (TRBV11-2, TRBJ2-1)
CASSLDLVNEQFF

SEQ ID NO: 158571 - protein, 13 aa, Homo sapiens
  CDR3 for alpha chain variable domain of TCR clone 79286 (TRAV8-2, TRAJ21)
CVVSSYNFNKFYF

SEQ ID NO: 158572 - protein, 15 aa, Homo sapiens
  CDR3 for beta chain variable domain of TCR clone 79286 (TRBV3-1, TRBJ2-2)
CASSQDWTRAGELFF

SEQ ID NO: 158573 - protein, 12 aa, Homo sapiens
  CDR3 for alpha chain variable domain of TCR clone 79287 (TRAV8-3, TRAJ20)
CAVGANDYKLSF

SEQ ID NO: 158574 - protein, 15 aa, Homo sapiens
  CDR3 for beta chain variable domain of TCR clone 79287 (TRBV11-2, TRBJ2-1)
CASSLGTSGLNEQFS

SEQ ID NO: 158575 - protein, 14 aa, Homo sapiens
  CDR3 for alpha chain variable domain of TCR clone 79288 (TRAV12-2, TRAJ13)
CAVKKTGGYQKVTL

SEQ ID NO: 158576 - protein, 15 aa, Homo sapiens
  CDR3 for beta chain variable domain of TCR clone 79288 (TRBV27, TRBJ2-3)
CASSSLAGVIDTQYF

SEQ ID NO: 158577 - protein, 13 aa, Homo sapiens
  CDR3 for alpha chain variable domain of TCR clone 79289 (TRAV12-1, TRAJ26)
SATYLYYGQNFAF

SEQ ID NO: 158578 - protein, 15 aa, Homo sapiens
  CDR3 for beta chain variable domain of TCR clone 79289 (TRBV5-1, TRBJ2-6)
CASSLDPSGANVLTF

SEQ ID NO: 158579 - protein, 13 aa, Homo sapiens
  CDR3 for alpha chain variable domain of TCR clone 79290 (TRAV23/DV6, TRAJ6)
CAAKTGGSYIPTF

SEQ ID NO: 158580 - protein, 16 aa, Homo sapiens
  CDR3 for beta chain variable domain of TCR clone 79290 (TRBV11-2, TRBJ1-2)
CASSLDTGGADYGYTF

SEQ ID NO: 158581 - protein, 14 aa, Homo sapiens
  CDR3 for alpha chain variable domain of TCR clone 79291 (TRAV17, TRAJ45)
CATDARGGADGLNF

SEQ ID NO: 158582 - protein, 11 aa, Homo sapiens
  CDR3 for beta chain variable domain of TCR clone 79291 (TRBV28, TRBJ2-5)
CATGNQETQYF

SEQ ID NO: 158583 - protein, 12 aa, Homo sapiens
  CDR3 for alpha chain variable domain of TCR clone 79292 (TRAV12-3, TRAJ17)
CAMTPTGNKLTF

SEQ ID NO: 158584 - protein, 18 aa, Homo sapiens
  CDR3 for beta chain variable domain of TCR clone 79292 (TRBV4-3, TRBJ1-6)
CASSQETPASSYNSPLHF

SEQ ID NO: 158585 - protein, 18 aa, Homo sapiens
  CDR3 for alpha chain variable domain of TCR clone 79293 (TRAV26-1, TRAJ52)
FIVRVEGAGGTSYGKLTF

SEQ ID NO: 158586 - protein, 13 aa, Homo sapiens
  CDR3 for beta chain variable domain of TCR clone 79293 (TRBV7-3, TRBJ1-2)
CASSLKRGYGYTF

SEQ ID NO: 158587 - protein, 14 aa, Homo sapiens
  CDR3 for alpha chain variable domain of TCR clone 79294 (TRAV4, TRAJ9)
CLVCSGTGGFKTIF

SEQ ID NO: 158588 - protein, 15 aa, Homo sapiens
  CDR3 for beta chain variable domain of TCR clone 79294 (TRBV7-2, TRBJ2-1)
CASSLASGRVNEQFF

SEQ ID NO: 158589 - protein, 17 aa, Homo sapiens
  CDR3 for alpha chain variable domain of TCR clone 79295 (TRAV3, TRAJ42)
CAVRDRDYGGSRGNLIF

SEQ ID NO: 158590 - protein, 17 aa, Homo sapiens
  CDR3 for beta chain variable domain of TCR clone 79295 (TRBV7-9, TRBJ2-3)
CASSPTVAGDLTDTQYF

SEQ ID NO: 158591 - protein, 11 aa, Homo sapiens
  CDR3 for alpha chain variable domain of TCR clone 79296 (TRAV12-2, TRAJ33)
CAVTSNYQLIW

SEQ ID NO: 158592 - protein, 14 aa, Homo sapiens
  CDR3 for beta chain variable domain of TCR clone 79296 (TRBV12-4, TRBJ2-2)
CASNQGANTEELFF

SEQ ID NO: 158593 - protein, 18 aa, Homo sapiens
  CDR3 for alpha chain variable domain of TCR clone 79297 (TRAV26-2, TRAJ45)
CILRVWGYSGGGADGLTF

SEQ ID NO: 158594 - protein, 17 aa, Homo sapiens
  CDR3 for beta chain variable domain of TCR clone 79297 (TRBV28, TRBJ2-3)
CASSPTPAGGRVDTQYF

SEQ ID NO: 158595 - protein, 12 aa, Homo sapiens
  CDR3 for alpha chain variable domain of TCR clone 79298 (TRAV13-1, TRAJ9)
CASHTGGFKTIF

SEQ ID NO: 158596 - protein, 17 aa, Homo sapiens
  CDR3 for beta chain variable domain of TCR clone 79298 (TRBV11-2, TRBJ2-3)
CQQLRGGLAGAPNTQYF

SEQ ID NO: 158597 - protein, 15 aa, Homo sapiens
  CDR3 for alpha chain variable domain of TCR clone 79299 (TRAV13-2, TRAJ45)
CAEHHSGGGADGLTF

SEQ ID NO: 158598 - protein, 19 aa, Homo sapiens
  CDR3 for beta chain variable domain of TCR clone 79299 (TRBV25-1, TRBJ2-2)
CAILVYRVDRGRKTGELFF

SEQ ID NO: 158599 - protein, 14 aa, Homo sapiens
  CDR3 for alpha chain variable domain of TCR clone 79300 (TRAV3, TRAJ16)
CCERLKSDGQKLLF

SEQ ID NO: 158600 - protein, 16 aa, Homo sapiens
  CDR3 for beta chain variable domain of TCR clone 79300 (TRBV19, TRBJ2-7)
CASSTPGQASSYEQYF

SEQ ID NO: 158601 - protein, 13 aa, Homo sapiens
  CDR3 for alpha chain variable domain of TCR clone 79301 (TRAV2, TRAJ40)
CAVVTSGTYIYIF

SEQ ID NO: 158602 - protein, 15 aa, Homo sapiens
  CDR3 for beta chain variable domain of TCR clone 79301 (TRBV11-3, TRBJ2-3)
CASLKDGREGDTQYF

SEQ ID NO: 158603 - protein, 13 aa, Homo sapiens
  CDR3 for alpha chain variable domain of TCR clone 79302 (TRAV2, TRAJ40)
CAVVTSGTYKYIF

SEQ ID NO: 158604 - protein, 13 aa, Homo sapiens
  CDR3 for beta chain variable domain of TCR clone 79302 (TRBV11-2, TRBJ1-1)
CASSFTENTEAFF

SEQ ID NO: 158605 - protein, 18 aa, Homo sapiens
  CDR3 for alpha chain variable domain of TCR clone 79303 (TRAV12-3, TRAJ52)
CAMSVGGAGGTSYGKLTF

SEQ ID NO: 158606 - protein, 13 aa, Homo sapiens
  CDR3 for beta chain variable domain of TCR clone 79303 (TRBV7-9, TRBJ2-3)
CASSPGSTDTQYF

SEQ ID NO: 158607 - protein, 12 aa, Homo sapiens
  CDR3 for alpha chain variable domain of TCR clone 79304 (TRAV3, TRAJ20)
CAVRDGDYKLSL

SEQ ID NO: 158608 - protein, 13 aa, Homo sapiens
  CDR3 for beta chain variable domain of TCR clone 79304 (TRBV9, TRBJ2-1)
CASSVGQGGEQFF

SEQ ID NO: 158609 - protein, 12 aa, Homo sapiens
  CDR3 for alpha chain variable domain of TCR clone 79305 (TRAV13-1, TRAJ48)
CAANFGNEKLTF

SEQ ID NO: 158610 - protein, 13 aa, Homo sapiens
  CDR3 for beta chain variable domain of TCR clone 79305 (TRBV10-3, TRBJ2-7)
CASKLAVNYEQYF

SEQ ID NO: 158611 - protein, 15 aa, Homo sapiens
  CDR3 for alpha chain variable domain of TCR clone 79306 (TRAV13-1, TRAJ44)
CAASRGGGTASKLTF

SEQ ID NO: 158612 - protein, 13 aa, Homo sapiens
  CDR3 for beta chain variable domain of TCR clone 79306 (TRBV29-1, TRBJ2-1)
CSVEGGRVNEQFF

SEQ ID NO: 158613 - protein, 14 aa, Homo sapiens
  CDR3 for alpha chain variable domain of TCR clone 79307 (TRAV3, TRAJ21)
CAVGDAYNFNKFYF

SEQ ID NO: 158614 - protein, 17 aa, Homo sapiens
  CDR3 for beta chain variable domain of TCR clone 79307 (TRBV20-1, TRBJ1-6)
CSARGGYTFSYNSPLHF

SEQ ID NO: 158615 - protein, 14 aa, Homo sapiens
  CDR3 for alpha chain variable domain of TCR clone 79308 (TRAV26-1, TRAJ40)
CIVSVARGTYKYIF

SEQ ID NO: 158616 - protein, 14 aa, Homo sapiens
  CDR3 for beta chain variable domain of TCR clone 79308 (TRBV7-3, TRBJ2-7)
CASSLKADSYEQYF

SEQ ID NO: 158617 - protein, 17 aa, Homo sapiens
  CDR3 for alpha chain variable domain of TCR clone 79309 (TRAV3, TRAJ6)
CAVRDGPRAGGSYIPTF

SEQ ID NO: 158618 - protein, 20 aa, Homo sapiens
  CDR3 for beta chain variable domain of TCR clone 79309 (TRBV28, TRBJ2-1)
CASTPIGRSPGLAGRNEQFF

SEQ ID NO: 158619 - protein, 14 aa, Homo sapiens
  CDR3 for alpha chain variable domain of TCR clone 79310 (TRAV16, TRAJ39)
CALSKNNAGNMLTF

SEQ ID NO: 158620 - protein, 12 aa, Homo sapiens
  CDR3 for beta chain variable domain of TCR clone 79310 (TRBV28, TRBJ2-6)
CAIQAGANVLTF

SEQ ID NO: 158621 - protein, 13 aa, Homo sapiens
  CDR3 for alpha chain variable domain of TCR clone 79311 (TRAV26-2, TRAJ43)
CILRAVNNNDMRF

SEQ ID NO: 158622 - protein, 15 aa, Homo sapiens
  CDR3 for beta chain variable domain of TCR clone 79311 (TRBV7-2, TRBJ2-1)
CASTHGTRIYNEQFF

SEQ ID NO: 158623 - protein, 14 aa, Homo sapiens
  CDR3 for alpha chain variable domain of TCR clone 79312 (TRAV26-1, TRAJ48)
CIVRTNFGNKKLTF

SEQ ID NO: 158624 - protein, 12 aa, Homo sapiens
  CDR3 for beta chain variable domain of TCR clone 79312 (TRBV20-1, TRBJ2-7)
CSASSGANEQYF

SEQ ID NO: 158625 - protein, 13 aa, Homo sapiens
  CDR3 for alpha chain variable domain of TCR clone 79313 (TRAV1-2, TRAJ9)
CAALNTGGFKTIF

SEQ ID NO: 158626 - protein, 16 aa, Homo sapiens
  CDR3 for beta chain variable domain of TCR clone 79313 (TRBV11-2, TRBJ2-7)
CASSPLAGGPRYEQYF

SEQ ID NO: 158627 - protein, 12 aa, Homo sapiens
  CDR3 for alpha chain variable domain of TCR clone 79314 (TRAV13-1, TRAJ53)
AASGGSNYKLTF

SEQ ID NO: 158628 - protein, 17 aa, Homo sapiens
  CDR3 for beta chain variable domain of TCR clone 79314 (TRBV7-8, TRBJ2-6)
CASSAGTGGAGANVLTF

SEQ ID NO: 158629 - protein, 15 aa, Homo sapiens
  CDR3 for alpha chain variable domain of TCR clone 79315 (TRAV34, TRAJ38)
CGADFTPGNNRKLIW

SEQ ID NO: 158630 - protein, 14 aa, Homo sapiens
  CDR3 for beta chain variable domain of TCR clone 79315 (TRBV5-5, TRBJ1-5)
CQQLEGGRRAAQHF

SEQ ID NO: 158631 - protein, 12 aa, Homo sapiens
  CDR3 for alpha chain variable domain of TCR clone 79316 (TRAV1-2, TRAJ29)
CAVPSGNTPLVF

SEQ ID NO: 158632 - protein, 12 aa, Homo sapiens
  CDR3 for beta chain variable domain of TCR clone 79316 (TRBV12-4, TRBJ2-7)
CACSLGGYEQYF

SEQ ID NO: 158633 - protein, 13 aa, Homo sapiens
  CDR3 for alpha chain variable domain of TCR clone 79317 (TRAV20, TRAJ48)
CAVHLFGNEKLTF

SEQ ID NO: 158634 - protein, 15 aa, Homo sapiens
  CDR3 for beta chain variable domain of TCR clone 79317 (TRBV6-5, TRBJ2-6)
CASSQWEAGANALTF

SEQ ID NO: 158635 - protein, 14 aa, Homo sapiens
  CDR3 for alpha chain variable domain of TCR clone 79318 (TRAV20, TRAJ10)
CAVRVEGGGNKLTF

SEQ ID NO: 158636 - protein, 15 aa, Homo sapiens
  CDR3 for beta chain variable domain of TCR clone 79318 (TRBV7-9, TRBJ1-2)
CQQLGFSSGEDGYTF

SEQ ID NO: 158637 - protein, 14 aa, Homo sapiens
  CDR3 for alpha chain variable domain of TCR clone 79319 (TRAV17, TRAJ12)
CATDEKGSSYKLIF

SEQ ID NO: 158638 - protein, 16 aa, Homo sapiens
  CDR3 for beta chain variable domain of TCR clone 79319 (TRBV11-2, TRBJ2-1)
CASSPRLAGVYNEQFF

SEQ ID NO: 158639 - protein, 11 aa, Homo sapiens
  CDR3 for alpha chain variable domain of TCR clone 79320 (TRAV13-1, TRAJ8)
CAARGLQKLVF

SEQ ID NO: 158640 - protein, 16 aa, Homo sapiens
  CDR3 for beta chain variable domain of TCR clone 79320 (TRBV19, TRBJ1-5)
CASSTRGTRSNQPQHF

SEQ ID NO: 158641 - protein, 18 aa, Homo sapiens
  CDR3 for alpha chain variable domain of TCR clone 79321 (TRAV12-3, TRAJ52)
CAMSRTNAGGTSYGKLTF

SEQ ID NO: 158642 - protein, 17 aa, Homo sapiens
  CDR3 for beta chain variable domain of TCR clone 79321 (TRBV7-3, TRBJ2-3)
CASSLMKRMRGADTQYL

SEQ ID NO: 158643 - protein, 16 aa, Homo sapiens
  CDR3 for alpha chain variable domain of TCR clone 79322 (TRAV12-2, TRAJ4)
CAEDLSGGYNKLILEQ

SEQ ID NO: 158644 - protein, 13 aa, Homo sapiens
  CDR3 for beta chain variable domain of TCR clone 79322 (TRBV7-9, TRBJ1-2)
CASSLKQNYGYTF

SEQ ID NO: 158645 - protein, 23 aa, Homo sapiens
  CDR3 for alpha chain variable domain of TCR clone 79323 (TRAV12-3, TRAJ6)
CAMSATTGGSYIPTLEEEPALLF

SEQ ID NO: 158646 - protein, 16 aa, Homo sapiens
  CDR3 for beta chain variable domain of TCR clone 79323 (TRBV20-1, TRBJ1-2)
CSASMGQGVANYGYTF

SEQ ID NO: 158647 - protein, 15 aa, Homo sapiens
  CDR3 for alpha chain variable domain of TCR clone 79324 (TRAV3, TRAJ5)
CAVRDLDTGRRALTF

SEQ ID NO: 158648 - protein, 14 aa, Homo sapiens
  CDR3 for beta chain variable domain of TCR clone 79324 (TRBV12-4, TRBJ1-1)
CASSLGTGGTEAFF

SEQ ID NO: 158649 - protein, 14 aa, Homo sapiens
  CDR3 for alpha chain variable domain of TCR clone 79325 (TRAV1-2, TRAJ16)
CAVNRFSDGQKLLF

SEQ ID NO: 158650 - protein, 18 aa, Homo sapiens
  CDR3 for beta chain variable domain of TCR clone 79325 (TRBV20-1, TRBJ2-6)
CSAETTPTHGSGANDLTF

SEQ ID NO: 158651 - protein, 14 aa, Homo sapiens
  CDR3 for alpha chain variable domain of TCR clone 79326 (TRAV2, TRAJ9)
CAVEDRSGGFKTIF

SEQ ID NO: 158652 - protein, 18 aa, Homo sapiens
  CDR3 for beta chain variable domain of TCR clone 79326 (TRBV11-2, TRBJ2-3)
CASSLGGASRGAPNTRYF

SEQ ID NO: 158653 - protein, 14 aa, Homo sapiens
  CDR3 for alpha chain variable domain of TCR clone 79327 (TRAV1-2, TRAJ16)
CAVNRFSDGQKLLF

SEQ ID NO: 158654 - protein, 13 aa, Homo sapiens
  CDR3 for beta chain variable domain of TCR clone 79327 (TRBV29-1, TRBJ1-1)
RSVGDSRNTEAFF

SEQ ID NO: 158655 - protein, 14 aa, Homo sapiens
  CDR3 for alpha chain variable domain of TCR clone 79328 (TRAV3, TRAJ9)
CAVRINTGGFKTIF

SEQ ID NO: 158656 - protein, 15 aa, Homo sapiens
  CDR3 for beta chain variable domain of TCR clone 79328 (TRBV7-2, TRBJ2-1)
CASSLASGRVNEQFF

SEQ ID NO: 158657 - protein, 11 aa, Homo sapiens
  CDR3 for alpha chain variable domain of TCR clone 79329 (TRAV12-2, )
CAVASLATTIS

SEQ ID NO: 158658 - protein, 16 aa, Homo sapiens
  CDR3 for beta chain variable domain of TCR clone 79329 (TRBV5-1, TRBJ2-2)
CASSSRTGGRTGELVF

SEQ ID NO: 158659 - protein, 15 aa, Homo sapiens
  CDR3 for alpha chain variable domain of TCR clone 79330 (TRAV2, TRAJ9)
CAVEDRGTGGFKTIC

SEQ ID NO: 158660 - protein, 16 aa, Homo sapiens
  CDR3 for beta chain variable domain of TCR clone 79330 (TRBV24-1, TRBJ2-3)
CATSDPGTGATDTQYF

SEQ ID NO: 158661 - protein, 13 aa, Homo sapiens
  CDR3 for alpha chain variable domain of TCR clone 79331 (TRAV8-2, TRAJ45)
CVVRLVQEEVLTD

SEQ ID NO: 158662 - protein, 16 aa, Homo sapiens
  CDR3 for beta chain variable domain of TCR clone 79331 (TRBV12-4, TRBJ2-5)
CASSFFVRGRQETQYF

SEQ ID NO: 158663 - protein, 14 aa, Homo sapiens
  CDR3 for alpha chain variable domain of TCR clone 79332 (TRAV17, TRAJ57)
CATDHQGGSEKLVF

SEQ ID NO: 158664 - protein, 18 aa, Homo sapiens
  CDR3 for beta chain variable domain of TCR clone 79332 (TRBV6-6, TRBJ1-3)
CASSYSKWDSISGNTIYF

SEQ ID NO: 158665 - protein, 12 aa, Homo sapiens
  CDR3 for alpha chain variable domain of TCR clone 79333 (TRAV1-2, TRAJ33)
CAALDSNYQLIW

SEQ ID NO: 158666 - protein, 14 aa, Homo sapiens
  CDR3 for beta chain variable domain of TCR clone 79333 (TRBV4-2, TRBJ2-1)
CASGLDRAYNEQFF

SEQ ID NO: 158667 - protein, 11 aa, Homo sapiens
  CDR3 for alpha chain variable domain of TCR clone 79334 (TRAV2, TRAJ40)
CAVEGTYKYIF

SEQ ID NO: 158668 - protein, 11 aa, Homo sapiens
  CDR3 for beta chain variable domain of TCR clone 79334 (TRBV11-2, TRBJ1-1)
CASSISTGAFF

SEQ ID NO: 158669 - protein, 12 aa, Homo sapiens
  CDR3 for alpha chain variable domain of TCR clone 79335 (TRAV13-1, TRAJ20)
RAASMGDYKLSF

SEQ ID NO: 158670 - protein, 15 aa, Homo sapiens
  CDR3 for beta chain variable domain of TCR clone 79335 (TRBV11-3, TRBJ2-3)
CASNGGLDSTDTQYF

SEQ ID NO: 158671 - protein, 14 aa, Homo sapiens
  CDR3 for alpha chain variable domain of TCR clone 79336 (TRAV26-1, TRAJ38)
CIADNAGNNRKLIW

SEQ ID NO: 158672 - protein, 14 aa, Homo sapiens
  CDR3 for beta chain variable domain of TCR clone 79336 (TRBV2, TRBJ2-7)
CASSLTSGGYEQYF

SEQ ID NO: 158673 - protein, 13 aa, Homo sapiens
  CDR3 for alpha chain variable domain of TCR clone 79337 (TRAV21, TRAJ33)
CAMSVNSNYQLIW

SEQ ID NO: 158674 - protein, 13 aa, Homo sapiens
  CDR3 for beta chain variable domain of TCR clone 79337 (TRBV7-2, TRBJ2-2)
CASSLAVTGELFF

SEQ ID NO: 158675 - protein, 14 aa, Homo sapiens
  CDR3 for alpha chain variable domain of TCR clone 79338 (TRAV12-2, TRAJ45)
CAVYSGGGADGLPF

SEQ ID NO: 158676 - protein, 14 aa, Homo sapiens
  CDR3 for beta chain variable domain of TCR clone 79338 (TRBV6-5, TRBJ1-2)
CASTRGGGSDGYTF

SEQ ID NO: 158677 - protein, 13 aa, Homo sapiens
  CDR3 for alpha chain variable domain of TCR clone 79339 (TRAV8-3, TRAJ43)
CAVGPDNNNDMRF

SEQ ID NO: 158678 - protein, 14 aa, Homo sapiens
  CDR3 for beta chain variable domain of TCR clone 79339 (TRBV19, TRBJ2-1)
CASPTFVLSGEQSF

SEQ ID NO: 158679 - protein, 14 aa, Homo sapiens
  CDR3 for alpha chain variable domain of TCR clone 79340 (TRAV12-3, TRAJ10)
SHLPLTGGGNKLTF

SEQ ID NO: 158680 - protein, 12 aa, Homo sapiens
  CDR3 for beta chain variable domain of TCR clone 79340 (TRBV7-8, TRBJ2-7)
CASRLGDREQYF

SEQ ID NO: 158681 - protein, 18 aa, Homo sapiens
  CDR3 for alpha chain variable domain of TCR clone 79341 (TRAV13-1, TRAJ52)
CAAKNPNAGGTSYGKLTF

SEQ ID NO: 158682 - protein, 13 aa, Homo sapiens
  CDR3 for beta chain variable domain of TCR clone 79341 (TRBV19, TRBJ1-2)
CATEPTGRYGYTF

SEQ ID NO: 158683 - protein, 18 aa, Homo sapiens
  CDR3 for alpha chain variable domain of TCR clone 79342 (TRAV13-1, TRAJ52)
CAASKRSAGGTSYGKLTF

SEQ ID NO: 158684 - protein, 17 aa, Homo sapiens
  CDR3 for beta chain variable domain of TCR clone 79342 (TRBV20-1, TRBJ1-5)
CSASLSPGQGGNQPQHF

SEQ ID NO: 158685 - protein, 13 aa, Homo sapiens
  CDR3 for alpha chain variable domain of TCR clone 79343 (TRAV30, TRAJ24)
CGTVTDSWGRLQF

SEQ ID NO: 158686 - protein, 14 aa, Homo sapiens
  CDR3 for beta chain variable domain of TCR clone 79343 (TRBV6-3, TRBJ2-2)
CASTYTPDTGELFF

SEQ ID NO: 158687 - protein, 12 aa, Homo sapiens
  CDR3 for alpha chain variable domain of TCR clone 79344 (TRAV21, TRAJ16)
CAVFSDGQKLLF

SEQ ID NO: 158688 - protein, 13 aa, Homo sapiens
  CDR3 for beta chain variable domain of TCR clone 79344 (TRBV7-9, TRBJ1-2)
CASSLKQNYGYTF

SEQ ID NO: 158689 - protein, 18 aa, Homo sapiens
  CDR3 for alpha chain variable domain of TCR clone 79345 (TRAV26-1, TRAJ23)
CIVRVGLEVWNQGGKLIF

SEQ ID NO: 158690 - protein, 16 aa, Homo sapiens
  CDR3 for beta chain variable domain of TCR clone 79345 (TRBV12-4, TRBJ2-5)
CASSFFVRGRQETPYF

SEQ ID NO: 158691 - protein, 13 aa, Homo sapiens
  CDR3 for alpha chain variable domain of TCR clone 79346 (TRAV12-3, TRAJ13)
CAMGTGGYQKVTF

SEQ ID NO: 158692 - protein, 17 aa, Homo sapiens
  CDR3 for beta chain variable domain of TCR clone 79346 (TRBV19, TRBJ2-6)
CASSTGQVFSGANVLTF

SEQ ID NO: 158693 - protein, 11 aa, Homo sapiens
  CDR3 for alpha chain variable domain of TCR clone 79347 (TRAV21, TRAJ41)
CAVRSGYALNF

SEQ ID NO: 158694 - protein, 12 aa, Homo sapiens
  CDR3 for beta chain variable domain of TCR clone 79347 (TRBV7-9, TRBJ1-2)
CSSLKQNYGYTV

SEQ ID NO: 158695 - protein, 12 aa, Homo sapiens
  CDR3 for alpha chain variable domain of TCR clone 79348 (TRAV36/DV7, TRAJ37)
CACYGNPGKLIF

SEQ ID NO: 158696 - protein, 14 aa, Homo sapiens
  CDR3 for beta chain variable domain of TCR clone 79348 (TRBV6-3, TRBJ1-4)
CASSGQNLNEKLFF

SEQ ID NO: 158697 - protein, 13 aa, Homo sapiens
  CDR3 for alpha chain variable domain of TCR clone 79349 (TRAV35, TRAJ42)
CAGFPGSQGNLIF

SEQ ID NO: 158698 - protein, 15 aa, Homo sapiens
  CDR3 for beta chain variable domain of TCR clone 79349 (TRBV7-3, TRBJ2-1)
CASSPTGGGEVEQFF

SEQ ID NO: 158699 - protein, 13 aa, Homo sapiens
  CDR3 for alpha chain variable domain of TCR clone 79350 (TRAV3, TRAJ27)
CAVRPLGAGKSTF

SEQ ID NO: 158700 - protein, 18 aa, Homo sapiens
  CDR3 for beta chain variable domain of TCR clone 79350 (TRBV11-2, TRBJ2-3)
CASSLGGASRGAPNTQYF

SEQ ID NO: 158701 - protein, 14 aa, Homo sapiens
  CDR3 for alpha chain variable domain of TCR clone 79351 (TRAV1-2, TRAJ16)
CAVNRFSDGRKLLF

SEQ ID NO: 158702 - protein, 13 aa, Homo sapiens
  CDR3 for beta chain variable domain of TCR clone 79351 (TRBV20-1, TRBJ1-1)
CSARVGGNTEAFF

SEQ ID NO: 158703 - protein, 23 aa, Homo sapiens
  CDR3 for alpha chain variable domain of TCR clone 79352 (TRAV26-1, )
CIADKAGNNHIQNPDPAVYQLRD

SEQ ID NO: 158704 - protein, 13 aa, Homo sapiens
  CDR3 for beta chain variable domain of TCR clone 79352 (TRBV20-1, TRBJ1-1)
CSARGGGNTEAFF

SEQ ID NO: 158705 - protein, 16 aa, Homo sapiens
  CDR3 for alpha chain variable domain of TCR clone 79353 (TRAV27, TRAJ13)
CAGAKSDSGGYQKVTF

SEQ ID NO: 158706 - protein, 13 aa, Homo sapiens
  CDR3 for beta chain variable domain of TCR clone 79353 (TRBV12-5, TRBJ2-3)
CASGDRQSDTQYF

SEQ ID NO: 158707 - protein, 14 aa, Homo sapiens
  CDR3 for alpha chain variable domain of TCR clone 79354 (TRAV8-3, TRAJ39)
CAVGANNAGNMLTF

SEQ ID NO: 158708 - protein, 14 aa, Homo sapiens
  CDR3 for beta chain variable domain of TCR clone 79354 (TRBV7-2, TRBJ2-5)
CASSPRGSSETQYF

SEQ ID NO: 158709 - protein, 16 aa, Homo sapiens
  CDR3 for alpha chain variable domain of TCR clone 79355 (TRAV27, TRAJ52)
CAGAPAGGTSYGKLTF

SEQ ID NO: 158710 - protein, 12 aa, Homo sapiens
  CDR3 for beta chain variable domain of TCR clone 79355 (TRBV27, TRBJ2-1)
CASRGSYNEQFF

SEQ ID NO: 158711 - protein, 13 aa, Homo sapiens
  CDR3 for alpha chain variable domain of TCR clone 79356 (TRAV17, TRAJ9)
CATFLTGGFKTIF

SEQ ID NO: 158712 - protein, 16 aa, Homo sapiens
  CDR3 for beta chain variable domain of TCR clone 79356 (TRBV12-5, TRBJ2-5)
CASGPRTSGNQETQYF

SEQ ID NO: 158713 - protein, 14 aa, Homo sapiens
  CDR3 for alpha chain variable domain of TCR clone 79357 (TRAV8-3, TRAJ6)
CAVGASGGSDIPTF

SEQ ID NO: 158714 - protein, 17 aa, Homo sapiens
  CDR3 for beta chain variable domain of TCR clone 79357 (TRBV18, TRBJ2-2)
CASSPSDPWQNTGELFF

SEQ ID NO: 158715 - protein, 15 aa, Homo sapiens
  CDR3 for alpha chain variable domain of TCR clone 79358 (TRAV17, TRAJ16)
CATALRFSDGQKLFF

SEQ ID NO: 158716 - protein, 15 aa, Homo sapiens
  CDR3 for beta chain variable domain of TCR clone 79358 (TRBV20-1, TRBJ1-1)
CSASRGVTGNTEAFF

SEQ ID NO: 158717 - protein, 16 aa, Homo sapiens
  CDR3 for alpha chain variable domain of TCR clone 79359 (TRAV3, TRAJ10)
CAVRDMRAGGGNKPTF

SEQ ID NO: 158718 - protein, 13 aa, Homo sapiens
  CDR3 for beta chain variable domain of TCR clone 79359 (TRBV4-2, TRBJ1-1)
CASSQAGNTEAFF

SEQ ID NO: 158719 - protein, 18 aa, Homo sapiens
  CDR3 for alpha chain variable domain of TCR clone 79360 (TRAV13-1, TRAJ52)
CAAKNPNAGGTSYGKLTF

SEQ ID NO: 158720 - protein, 15 aa, Homo sapiens
  CDR3 for beta chain variable domain of TCR clone 79360 (TRBV6-1, TRBJ2-3)
CASSDRGGITDTQYF

SEQ ID NO: 158721 - protein, 13 aa, Homo sapiens
  CDR3 for alpha chain variable domain of TCR clone 79361 (TRAV29/DV5, TRAJ31)
CAASRNNNARLMF

SEQ ID NO: 158722 - protein, 12 aa, Homo sapiens
  CDR3 for beta chain variable domain of TCR clone 79361 (TRBV14, TRBJ2-7)
CGSSRLKGEQYF

SEQ ID NO: 158723 - protein, 14 aa, Homo sapiens
  CDR3 for alpha chain variable domain of TCR clone 79362 (TRAV21, TRAJ35)
CAVMPIGFGNVLHC

SEQ ID NO: 158724 - protein, 16 aa, Homo sapiens
  CDR3 for beta chain variable domain of TCR clone 79362 (TRBV9, TRBJ2-2)
CASSAMGKGNTGELFF

SEQ ID NO: 158725 - protein, 13 aa, Homo sapiens
  CDR3 for alpha chain variable domain of TCR clone 79363 (TRAV26-1, TRAJ29)
CIVRGSGNTPLVF

SEQ ID NO: 158726 - protein, 16 aa, Homo sapiens
  CDR3 for beta chain variable domain of TCR clone 79363 (TRBV11-2, TRBJ2-7)
CASSLAPTGVNYEQYF

SEQ ID NO: 158727 - protein, 12 aa, Homo sapiens
  CDR3 for alpha chain variable domain of TCR clone 79364 (TRAV12-1, TRAJ40)
CVVYSGTYKYIF

SEQ ID NO: 158728 - protein, 13 aa, Homo sapiens
  CDR3 for beta chain variable domain of TCR clone 79364 (TRBV14, TRBJ2-7)
CASSQVAVGEQYF

SEQ ID NO: 158729 - protein, 13 aa, Homo sapiens
  CDR3 for alpha chain variable domain of TCR clone 79365 (TRAV8-3, TRAJ4)
WVFYSGGYNKLIF

SEQ ID NO: 158730 - protein, 14 aa, Homo sapiens
  CDR3 for beta chain variable domain of TCR clone 79365 (TRBV19, TRBJ1-5)
CASRAPDSFLSQHF

SEQ ID NO: 158731 - protein, 13 aa, Homo sapiens
  CDR3 for alpha chain variable domain of TCR clone 79366 (TRAV3, TRAJ21)
CAVREPDFNKFYF

SEQ ID NO: 158732 - protein, 13 aa, Homo sapiens
  CDR3 for beta chain variable domain of TCR clone 79366 (TRBV12-4, TRBJ2-7)
CASSPTETYEQYF

SEQ ID NO: 158733 - protein, 13 aa, Homo sapiens
  CDR3 for alpha chain variable domain of TCR clone 79367 (TRAV8-6, TRAJ5)
CAVLDTGRGALTF

SEQ ID NO: 158734 - protein, 12 aa, Homo sapiens
  CDR3 for beta chain variable domain of TCR clone 79367 (TRBV7-9, TRBJ1-6)
CASSASESPLHF

SEQ ID NO: 158735 - protein, 13 aa, Homo sapiens
  CDR3 for alpha chain variable domain of TCR clone 79368 (TRAV36/DV7, TRAJ49)
CAVEANTGNQFYF

SEQ ID NO: 158736 - protein, 13 aa, Homo sapiens
  CDR3 for beta chain variable domain of TCR clone 79368 (TRBV10-3, TRBJ2-7)
CASKLAVNYERYF

SEQ ID NO: 158737 - protein, 15 aa, Homo sapiens
  CDR3 for alpha chain variable domain of TCR clone 79369 (TRAV8-3, TRAJ23)
CAVGDRYNQGGKLSF

SEQ ID NO: 158738 - protein, 22 aa, Homo sapiens
  CDR3 for beta chain variable domain of TCR clone 79369 (TRBV29-1, TRBJ2-5)
TVSNMSPEDSSIYLCSAGTQYF

SEQ ID NO: 158739 - protein, 12 aa, Homo sapiens
  CDR3 for alpha chain variable domain of TCR clone 79370 (TRAV23/DV6, TRAJ30)
CTASKGDDKIIF

SEQ ID NO: 158740 - protein, 13 aa, Homo sapiens
  CDR3 for beta chain variable domain of TCR clone 79370 (TRBV19, TRBJ1-2)
CASSVPGQDGYTF

SEQ ID NO: 158741 - protein, 14 aa, Homo sapiens
  CDR3 for alpha chain variable domain of TCR clone 79371 (TRAV12-2, TRAJ24)
CAVTPADSWGKLQF

SEQ ID NO: 158742 - protein, 15 aa, Homo sapiens
  CDR3 for beta chain variable domain of TCR clone 79371 (TRBV7-3, TRBJ2-1)
CASSFGQSNYNEQFF

SEQ ID NO: 158743 - protein, 15 aa, Homo sapiens
  CDR3 for alpha chain variable domain of TCR clone 79372 (TRAV13-1, TRAJ52)
SYYNVGGTSYGKLTF

SEQ ID NO: 158744 - protein, 11 aa, Homo sapiens
  CDR3 for beta chain variable domain of TCR clone 79372 (TRBV12-4, TRBJ2-2)
CASSSAGELFF

SEQ ID NO: 158745 - protein, 10 aa, Homo sapiens
  CDR3 for alpha chain variable domain of TCR clone 79373 (TRAV30, TRAJ48)
CGIGNEKLTF

SEQ ID NO: 158746 - protein, 16 aa, Homo sapiens
  CDR3 for beta chain variable domain of TCR clone 79373 (TRBV7-3, TRBJ2-1)
CASSLEGYRSYNEQFF

SEQ ID NO: 158747 - protein, 14 aa, Homo sapiens
  CDR3 for alpha chain variable domain of TCR clone 79374 (TRAV1-2, TRAJ8)
CAAREDTGSQKLVF

SEQ ID NO: 158748 - protein, 16 aa, Homo sapiens
  CDR3 for beta chain variable domain of TCR clone 79374 (TRBV4-2, TRBJ2-3)
CASSQELAGDTDTQYF

SEQ ID NO: 158749 - protein, 14 aa, Homo sapiens
  CDR3 for alpha chain variable domain of TCR clone 79375 (TRAV8-3, TRAJ4)
CAVGAAGGYNKLIF

SEQ ID NO: 158750 - protein, 13 aa, Homo sapiens
  CDR3 for beta chain variable domain of TCR clone 79375 (TRBV27, TRBJ1-1)
CASSLSIGAEAFF

SEQ ID NO: 158751 - protein, 18 aa, Homo sapiens
  CDR3 for alpha chain variable domain of TCR clone 79376 (TRAV35, TRAJ28)
CAGHNYPLSVAGSYQLTF

SEQ ID NO: 158752 - protein, 12 aa, Homo sapiens
  CDR3 for beta chain variable domain of TCR clone 79376 (TRBV7-9, TRBJ1-1)
CASSLEGTEAFF

SEQ ID NO: 158753 - protein, 18 aa, Homo sapiens
  CDR3 for alpha chain variable domain of TCR clone 79377 (TRAV13-1, TRAJ52)
CAASKRSAGGTSYGKLTS

SEQ ID NO: 158754 - protein, 12 aa, Homo sapiens
  CDR3 for beta chain variable domain of TCR clone 79377 (TRBV11-2, TRBJ2-2)
CASSLGGGELFF

SEQ ID NO: 158755 - protein, 13 aa, Homo sapiens
  CDR3 for alpha chain variable domain of TCR clone 79378 (TRAV13-1, TRAJ11)
CAASIRGYSTLTF

SEQ ID NO: 158756 - protein, 17 aa, Homo sapiens
  CDR3 for beta chain variable domain of TCR clone 79378 (TRBV4-3, TRBJ1-2)
CASSSRLQAGGSGGYTF

SEQ ID NO: 158757 - protein, 11 aa, Homo sapiens
  CDR3 for alpha chain variable domain of TCR clone 79379 (TRAV2, TRAJ13)
CASGGYQKVTF

SEQ ID NO: 158758 - protein, 17 aa, Homo sapiens
  CDR3 for beta chain variable domain of TCR clone 79379 (TRBV7-3, TRBJ2-3)
CASSLMKGMRGADTQYF

SEQ ID NO: 158759 - protein, 14 aa, Homo sapiens
  CDR3 for alpha chain variable domain of TCR clone 79380 (TRAV12-2, TRAJ53)
CRERGGGSNYKLTF

SEQ ID NO: 158760 - protein, 16 aa, Homo sapiens
  CDR3 for beta chain variable domain of TCR clone 79380 (TRBV6-1, TRBJ1-2)
CASGGAWQGRSHGYTF

SEQ ID NO: 158761 - protein, 11 aa, Homo sapiens
  CDR3 for alpha chain variable domain of TCR clone 79381 (TRAV2, TRAJ33)
CAVDSNYQLIW

SEQ ID NO: 158762 - protein, 17 aa, Homo sapiens
  CDR3 for beta chain variable domain of TCR clone 79381 (TRBV20-1, TRBJ2-3)
CSARDGWNVKERDTQYF

SEQ ID NO: 158763 - protein, 12 aa, Homo sapiens
  CDR3 for alpha chain variable domain of TCR clone 79382 (TRAV20, TRAJ39)
CAVGSAGNMLTF

SEQ ID NO: 158764 - protein, 17 aa, Homo sapiens
  CDR3 for beta chain variable domain of TCR clone 79382 (TRBV4-1, TRBJ2-3)
CASSQGYVSGGTDTQYF

SEQ ID NO: 158765 - protein, 15 aa, Homo sapiens
  CDR3 for alpha chain variable domain of TCR clone 79383 (TRAV3, TRAJ15)
CAVRPANQAGTALIF

SEQ ID NO: 158766 - protein, 14 aa, Homo sapiens
  CDR3 for beta chain variable domain of TCR clone 79383 (TRBV4-1, TRBJ2-2)
CASSQAVKTGELFF

SEQ ID NO: 158767 - protein, 14 aa, Homo sapiens
  CDR3 for alpha chain variable domain of TCR clone 79384 (TRAV38-1, TRAJ43)
CTFMKHNNNNDMRF

SEQ ID NO: 158768 - protein, 17 aa, Homo sapiens
  CDR3 for beta chain variable domain of TCR clone 79384 (TRBV7-7, TRBJ1-4)
CASSLVGQGASNEKLFF

SEQ ID NO: 158769 - protein, 17 aa, Homo sapiens
  CDR3 for alpha chain variable domain of TCR clone 79385 (TRAV38-1, TRAJ45)
CAFMRPHSGGGADGLTF

SEQ ID NO: 158770 - protein, 15 aa, Homo sapiens
  CDR3 for beta chain variable domain of TCR clone 79385 (TRBV7-2, TRBJ2-3)
CASSLVVRGPDTQYF

SEQ ID NO: 158771 - protein, 11 aa, Homo sapiens
  CDR3 for alpha chain variable domain of TCR clone 79386 (TRAV17, TRAJ43)
RATPRSNDMRF

SEQ ID NO: 158772 - protein, 15 aa, Homo sapiens
  CDR3 for beta chain variable domain of TCR clone 79386 (TRBV11-2, TRBJ2-1)
CASSLGTSGLNEQFF

SEQ ID NO: 158773 - protein, 13 aa, Homo sapiens
  CDR3 for alpha chain variable domain of TCR clone 79387 (TRAV21, TRAJ27)
CAARPGHAGKSTF

SEQ ID NO: 158774 - protein, 13 aa, Homo sapiens
  CDR3 for beta chain variable domain of TCR clone 79387 (TRBV20-1, TRBJ1-1)
CSARGGGNTEAFF

SEQ ID NO: 158775 - protein, 15 aa, Homo sapiens
  CDR3 for alpha chain variable domain of TCR clone 79388 (TRAV17, TRAJ37)
CATDHGSSNTGQLIF

SEQ ID NO: 158776 - protein, 14 aa, Homo sapiens
  CDR3 for beta chain variable domain of TCR clone 79388 (TRBV7-2, TRBJ2-3)
CASSRTSGADTQYF

SEQ ID NO: 158777 - protein, 16 aa, Homo sapiens
  CDR3 for alpha chain variable domain of TCR clone 79389 (TRAV3, TRAJ37)
FAVRGRGSGNTGKLIF

SEQ ID NO: 158778 - protein, 13 aa, Homo sapiens
  CDR3 for beta chain variable domain of TCR clone 79389 (TRBV14, TRBJ2-7)
CASSQDRRGEQYF

SEQ ID NO: 158779 - protein, 13 aa, Homo sapiens
  CDR3 for alpha chain variable domain of TCR clone 79390 (TRAV13-1, TRAJ5)
FAARVTGRRALTF

SEQ ID NO: 158780 - protein, 15 aa, Homo sapiens
  CDR3 for beta chain variable domain of TCR clone 79390 (TRBV7-9, TRBJ2-7)
CASSPGGGLTYEQYF

SEQ ID NO: 158781 - protein, 15 aa, Homo sapiens
  CDR3 for alpha chain variable domain of TCR clone 79391 (TRAV8-3, TRAJ27)
CAVGPSKTNAGKSTF

SEQ ID NO: 158782 - protein, 11 aa, Homo sapiens
  CDR3 for beta chain variable domain of TCR clone 79391 (TRBV11-2, TRBJ1-1)
CASSINTEAFF

SEQ ID NO: 158783 - protein, 19 aa, Homo sapiens
  CDR3 for alpha chain variable domain of TCR clone 79392 (TRAV3, TRAJ6)
CAVRDRNPSRSGGSYIPTF

SEQ ID NO: 158784 - protein, 15 aa, Homo sapiens
  CDR3 for beta chain variable domain of TCR clone 79392 (TRBV18, TRBJ2-7)
CASSPTFMDSYEQYV

SEQ ID NO: 158785 - protein, 14 aa, Homo sapiens
  CDR3 for alpha chain variable domain of TCR clone 79393 (TRAV13-1, TRAJ44)
CAAKATGTASKLTF

SEQ ID NO: 158786 - protein, 17 aa, Homo sapiens
  CDR3 for beta chain variable domain of TCR clone 79393 (TRBV7-3, TRBJ2-3)
CASSLMKRMWGADTQYF

SEQ ID NO: 158787 - protein, 12 aa, Homo sapiens
  CDR3 for alpha chain variable domain of TCR clone 79394 (TRAV27, TRAJ13)
CAGAGGYQKVTF

SEQ ID NO: 158788 - protein, 15 aa, Homo sapiens
  CDR3 for beta chain variable domain of TCR clone 79394 (TRBV20-1, TRBJ2-6)
CSARDRGPGASVLTF

SEQ ID NO: 158789 - protein, 16 aa, Homo sapiens
  CDR3 for alpha chain variable domain of TCR clone 79395 (TRAV4, TRAJ22)
CLVGDLYSGSARQLTF

SEQ ID NO: 158790 - protein, 16 aa, Homo sapiens
  CDR3 for beta chain variable domain of TCR clone 79395 (TRBV7-9, TRBJ2-1)
CDSSDVAGGSYNEQFF

SEQ ID NO: 158791 - protein, 11 aa, Homo sapiens
  CDR3 for alpha chain variable domain of TCR clone 79396 (TRAV12-2, TRAJ29)
CAVTLRSPLVF

SEQ ID NO: 158792 - protein, 16 aa, Homo sapiens
  CDR3 for beta chain variable domain of TCR clone 79396 (TRBV19, TRBJ1-5)
CASSIDRGGPRKPQHF

SEQ ID NO: 158793 - protein, 12 aa, Homo sapiens
  CDR3 for alpha chain variable domain of TCR clone 79397 (TRAV12-3, TRAJ34)
CAMGYNTDKLIL

SEQ ID NO: 158794 - protein, 14 aa, Homo sapiens
  CDR3 for beta chain variable domain of TCR clone 79397 (TRBV4-1, TRBJ2-2)
CASSQAVNTGELFF

SEQ ID NO: 158795 - protein, 16 aa, Homo sapiens
  CDR3 for alpha chain variable domain of TCR clone 79398 (TRAV12-3, TRAJ53)
CAMSVGRGGSNYKLTF

SEQ ID NO: 158796 - protein, 13 aa, Homo sapiens
  CDR3 for beta chain variable domain of TCR clone 79398 (TRBV7-6, TRBJ1-2)
CASSLVADYGYTF

SEQ ID NO: 158797 - protein, 17 aa, Homo sapiens
  CDR3 for alpha chain variable domain of TCR clone 79399 (TRAV38-1, TRAJ28)
CAFMKPTSGAGSYQLTF

SEQ ID NO: 158798 - protein, 15 aa, Homo sapiens
  CDR3 for beta chain variable domain of TCR clone 79399 (TRBV5-1, TRBJ2-4)
CASSLGGGGSCIQYF

SEQ ID NO: 158799 - protein, 12 aa, Homo sapiens
  CDR3 for alpha chain variable domain of TCR clone 79400 (TRAV17, TRAJ57)
CATYGGSEKLVF

SEQ ID NO: 158800 - protein, 13 aa, Homo sapiens
  CDR3 for beta chain variable domain of TCR clone 79400 (TRBV7-9, TRBJ2-7)
CASSFAGAYEQYF

SEQ ID NO: 158801 - protein, 14 aa, Homo sapiens
  CDR3 for alpha chain variable domain of TCR clone 79401 (TRAV21, TRAJ36)
CAVPDQTGANNLFF

SEQ ID NO: 158802 - protein, 15 aa, Homo sapiens
  CDR3 for beta chain variable domain of TCR clone 79401 (TRBV19, TRBJ1-1)
CASTSGQIQNTEAFF

SEQ ID NO: 158803 - protein, 14 aa, Homo sapiens
  CDR3 for alpha chain variable domain of TCR clone 79402 (TRAV8-3, TRAJ4)
CAVGAAGGYKKLIF

SEQ ID NO: 158804 - protein, 15 aa, Homo sapiens
  CDR3 for beta chain variable domain of TCR clone 79402 (TRBV6-5, TRBJ2-1)
CASSYDAGAGNEQFF

SEQ ID NO: 158805 - protein, 17 aa, Homo sapiens
  CDR3 for alpha chain variable domain of TCR clone 79403 (TRAV4, TRAJ18)
CLVGEGSVGSTLGRLYF

SEQ ID NO: 158806 - protein, 18 aa, Homo sapiens
  CDR3 for beta chain variable domain of TCR clone 79403 (TRBV11-2, TRBJ2-3)
CASSLGGASRGAPNTQYF

SEQ ID NO: 158807 - protein, 14 aa, Homo sapiens
  CDR3 for alpha chain variable domain of TCR clone 79404 (TRAV6, TRAJ37)
CALGSQGNTGKLIF

SEQ ID NO: 158808 - protein, 15 aa, Homo sapiens
  CDR3 for beta chain variable domain of TCR clone 79404 (TRBV2, TRBJ2-1)
SASSEEREGDNEQFF

SEQ ID NO: 158809 - protein, 15 aa, Homo sapiens
  CDR3 for alpha chain variable domain of TCR clone 79405 (TRAV8-3, TRAJ45)
CASSYSGGGADGLTF

SEQ ID NO: 158810 - protein, 16 aa, Homo sapiens
  CDR3 for beta chain variable domain of TCR clone 79405 (TRBV7-9, TRBJ2-2)
CASSGCGGANTGELFF

SEQ ID NO: 158811 - protein, 11 aa, Homo sapiens
  CDR3 for alpha chain variable domain of TCR clone 79406 (TRAV1-2, TRAJ31)
CAVNNNARLMF

SEQ ID NO: 158812 - protein, 15 aa, Homo sapiens
  CDR3 for beta chain variable domain of TCR clone 79406 (TRBV12-4, TRBJ2-5)
CASSPPTGLQETQYF

SEQ ID NO: 158813 - protein, 13 aa, Homo sapiens
  CDR3 for alpha chain variable domain of TCR clone 79407 (TRAV21, TRAJ57)
CAVTQGGSEKLVF

SEQ ID NO: 158814 - protein, 15 aa, Homo sapiens
  CDR3 for beta chain variable domain of TCR clone 79407 (TRBV28, TRBJ2-5)
CASSSGRTIQETQYF

SEQ ID NO: 158815 - protein, 11 aa, Homo sapiens
  CDR3 for alpha chain variable domain of TCR clone 79408 (TRAV12-2, TRAJ33)
CAVTINYQLIW

SEQ ID NO: 158816 - protein, 14 aa, Homo sapiens
  CDR3 for beta chain variable domain of TCR clone 79408 (TRBV12-4, TRBJ2-2)
CASNQGANTGELFF

SEQ ID NO: 158817 - protein, 13 aa, Homo sapiens
  CDR3 for alpha chain variable domain of TCR clone 79409 (TRAV13-1, TRAJ43)
CSASLSNNNDMRF

SEQ ID NO: 158818 - protein, 14 aa, Homo sapiens
  CDR3 for beta chain variable domain of TCR clone 79409 (TRBV5-1, TRBJ2-5)
CASSLAGKQETQYF

SEQ ID NO: 158819 - protein, 12 aa, Homo sapiens
  CDR3 for alpha chain variable domain of TCR clone 79410 (TRAV20, TRAJ20)
CAVRFNDYKLSF

SEQ ID NO: 158820 - protein, 14 aa, Homo sapiens
  CDR3 for beta chain variable domain of TCR clone 79410 (TRBV20-1, TRBJ2-1)
CSAQIGGSANERFF

SEQ ID NO: 158821 - protein, 14 aa, Homo sapiens
  CDR3 for alpha chain variable domain of TCR clone 79411 (TRAV12-3, TRAJ10)
SHLPMTGGGNKLTF

SEQ ID NO: 158822 - protein, 14 aa, Homo sapiens
  CDR3 for beta chain variable domain of TCR clone 79411 (TRBV6-1, TRBJ1-3)
CASVQGGGGNTIYF

SEQ ID NO: 158823 - protein, 14 aa, Homo sapiens
  CDR3 for alpha chain variable domain of TCR clone 79412 (TRAV1-2, TRAJ8)
CAVREDIGFQKLVF

SEQ ID NO: 158824 - protein, 14 aa, Homo sapiens
  CDR3 for beta chain variable domain of TCR clone 79412 (TRBV7-6, TRBJ2-3)
CASSLGTVTDTQYF

SEQ ID NO: 158825 - protein, 12 aa, Homo sapiens
  CDR3 for alpha chain variable domain of TCR clone 79413 (TRAV8-3, TRAJ20)
CAVGGGDYKLSF

SEQ ID NO: 158826 - protein, 16 aa, Homo sapiens
  CDR3 for beta chain variable domain of TCR clone 79413 (TRBV5-1, TRBJ2-7)
CASSRGNHCTSSTSGR

SEQ ID NO: 158827 - protein, 13 aa, Homo sapiens
  CDR3 for alpha chain variable domain of TCR clone 79414 (TRAV12-1, TRAJ40)
CVVKEAGTYKYIF

SEQ ID NO: 158828 - protein, 17 aa, Homo sapiens
  CDR3 for beta chain variable domain of TCR clone 79414 (TRBV28, TRBJ2-5)
CASSTPEGDALQETQYF

SEQ ID NO: 158829 - protein, 18 aa, Homo sapiens
  CDR3 for alpha chain variable domain of TCR clone 79415 (TRAV21, TRAJ52)
CAVRPPPAGGTSYGKLTF

SEQ ID NO: 158830 - protein, 14 aa, Homo sapiens
  CDR3 for beta chain variable domain of TCR clone 79415 (TRBV19, TRBJ2-1)
CARGARSFQWEQFF

SEQ ID NO: 158831 - protein, 16 aa, Homo sapiens
  CDR3 for alpha chain variable domain of TCR clone 79416 (TRAV21, TRAJ52)
CAVTNAGGTSYGKLTF

SEQ ID NO: 158832 - protein, 17 aa, Homo sapiens
  CDR3 for beta chain variable domain of TCR clone 79416 (TRBV28, TRBJ2-5)
CASSRQGGLAGAETKYF

SEQ ID NO: 158833 - protein, 12 aa, Homo sapiens
  CDR3 for alpha chain variable domain of TCR clone 79417 (TRAV4, TRAJ26)
CLVGDYGQNFVL

SEQ ID NO: 158834 - protein, 16 aa, Homo sapiens
  CDR3 for beta chain variable domain of TCR clone 79417 (TRBV7-2, TRBJ1-2)
CASSSNQDRRGHGYTF

SEQ ID NO: 158835 - protein, 12 aa, Homo sapiens
  CDR3 for alpha chain variable domain of TCR clone 79418 (TRAV2, TRAJ33)
CAVPDSNYQLIW

SEQ ID NO: 158836 - protein, 15 aa, Homo sapiens
  CDR3 for beta chain variable domain of TCR clone 79418 (TRBV15, TRBJ1-5)
CATSRDPVSNQHQHF

SEQ ID NO: 158837 - protein, 14 aa, Homo sapiens
  CDR3 for alpha chain variable domain of TCR clone 79419 (TRAV35, TRAJ42)
CAGRYGGSQGNLIF

SEQ ID NO: 158838 - protein, 14 aa, Homo sapiens
  CDR3 for beta chain variable domain of TCR clone 79419 (TRBV11-1, TRBJ2-7)
CASSFRQGSYEQYF

SEQ ID NO: 158839 - protein, 13 aa, Homo sapiens
  CDR3 for alpha chain variable domain of TCR clone 79420 (TRAV21, TRAJ20)
CAVGVFADYKLSF

SEQ ID NO: 158840 - protein, 14 aa, Homo sapiens
  CDR3 for beta chain variable domain of TCR clone 79420 (TRBV4-2, TRBJ1-4)
CASSPASGNEKLFF

SEQ ID NO: 158841 - protein, 12 aa, Homo sapiens
  CDR3 for alpha chain variable domain of TCR clone 79421 (TRAV12-3, TRAJ17)
CAMTLTGNKLTF

SEQ ID NO: 158842 - protein, 15 aa, Homo sapiens
  CDR3 for beta chain variable domain of TCR clone 79421 (TRBV29-1, TRBJ2-7)
CSVEFFDRGSYEQYF

SEQ ID NO: 158843 - protein, 14 aa, Homo sapiens
  CDR3 for alpha chain variable domain of TCR clone 79422 (TRAV1-2, TRAJ8)
CAVREDTGFQKLVF

SEQ ID NO: 158844 - protein, 17 aa, Homo sapiens
  CDR3 for beta chain variable domain of TCR clone 79422 (TRBV11-2, TRBJ2-1)
CASSVYPPGVEYNEQFF

SEQ ID NO: 158845 - protein, 13 aa, Homo sapiens
  CDR3 for alpha chain variable domain of TCR clone 79423 (TRAV3, TRAJ21)
CAVREPDFNKFYF

SEQ ID NO: 158846 - protein, 13 aa, Homo sapiens
  CDR3 for beta chain variable domain of TCR clone 79423 (TRBV9, TRBJ2-1)
CAGSPSGGNEQFF

SEQ ID NO: 158847 - protein, 14 aa, Homo sapiens
  CDR3 for alpha chain variable domain of TCR clone 79424 (TRAV8-3, TRAJ4)
CAVGAAGGYNKLIF

SEQ ID NO: 158848 - protein, 17 aa, Homo sapiens
  CDR3 for beta chain variable domain of TCR clone 79424 (TRBV18, TRBJ2-2)
CASSPSDPWQNTGELFF

SEQ ID NO: 158849 - protein, 14 aa, Homo sapiens
  CDR3 for alpha chain variable domain of TCR clone 79425 (TRAV8-3, TRAJ34)
CAVGPPHNADKLIF

SEQ ID NO: 158850 - protein, 13 aa, Homo sapiens
  CDR3 for beta chain variable domain of TCR clone 79425 (TRBV12-5, TRBJ2-3)
CASGDRQSDTQYF

SEQ ID NO: 158851 - protein, 12 aa, Homo sapiens
  CDR3 for alpha chain variable domain of TCR clone 79426 (TRAV23/DV6, TRAJ30)
GAASKGDDKIIF

SEQ ID NO: 158852 - protein, 18 aa, Homo sapiens
  CDR3 for beta chain variable domain of TCR clone 79426 (TRBV10-3, TRBJ2-3)
CAISESRVGPMRGDTQYF

SEQ ID NO: 158853 - protein, 13 aa, Homo sapiens
  CDR3 for alpha chain variable domain of TCR clone 79427 (TRAV13-1, TRAJ11)
CAAVPAGYSTLTF

SEQ ID NO: 158854 - protein, 17 aa, Homo sapiens
  CDR3 for beta chain variable domain of TCR clone 79427 (TRBV25-1, TRBJ2-7)
CASSDARVVFSSYEQYF

SEQ ID NO: 158855 - protein, 11 aa, Homo sapiens
  CDR3 for alpha chain variable domain of TCR clone 79428 (TRAV12-2, TRAJ29)
CAVTLRSPLVF

SEQ ID NO: 158856 - protein, 12 aa, Homo sapiens
  CDR3 for beta chain variable domain of TCR clone 79428 (TRBV7-9, TRBJ2-7)
CASSLEGYEQYF

SEQ ID NO: 158857 - protein, 14 aa, Homo sapiens
  CDR3 for alpha chain variable domain of TCR clone 79429 (TRAV2, TRAJ9)
CAVEDRGGGFKTIF

SEQ ID NO: 158858 - protein, 14 aa, Homo sapiens
  CDR3 for beta chain variable domain of TCR clone 79429 (TRBV18, TRBJ2-7)
CASSPRGGAYEQYF

SEQ ID NO: 158859 - protein, 13 aa, Homo sapiens
  CDR3 for alpha chain variable domain of TCR clone 79430 (TRAV8-6, TRAJ21)
CAVSPSSPNKFYF

SEQ ID NO: 158860 - protein, 14 aa, Homo sapiens
  CDR3 for beta chain variable domain of TCR clone 79430 (TRBV7-9, TRBJ2-5)
CASSLDTAQETQYF

SEQ ID NO: 158861 - protein, 15 aa, Homo sapiens
  CDR3 for alpha chain variable domain of TCR clone 79431 (TRAV8-2, TRAJ40)
CVVLGTTSGTYKYIF

SEQ ID NO: 158862 - protein, 16 aa, Homo sapiens
  CDR3 for beta chain variable domain of TCR clone 79431 (TRBV19, TRBJ1-5)
CASSIDRGGPRQPQHF

SEQ ID NO: 158863 - protein, 14 aa, Homo sapiens
  CDR3 for alpha chain variable domain of TCR clone 79432 (TRAV1-2, TRAJ16)
CAVNRFSDGQKLLF

SEQ ID NO: 158864 - protein, 22 aa, Homo sapiens
  CDR3 for beta chain variable domain of TCR clone 79432 (TRBV7-9, TRBJ1-6)
CASSSPGRGNSPPLWERDQAHC

SEQ ID NO: 158865 - protein, 16 aa, Homo sapiens
  CDR3 for alpha chain variable domain of TCR clone 79433 (TRAV3, TRAJ27)
CAVRDPQGTTAGKSTF

SEQ ID NO: 158866 - protein, 17 aa, Homo sapiens
  CDR3 for beta chain variable domain of TCR clone 79433 (TRBV4-1, TRBJ2-7)
CASSQGRGLQTSYEQYF

SEQ ID NO: 158867 - protein, 17 aa, Homo sapiens
  CDR3 for alpha chain variable domain of TCR clone 79434 (TRAV35, TRAJ47)
GLLDCRTHTEYGNKLVF

SEQ ID NO: 158868 - protein, 16 aa, Homo sapiens
  CDR3 for beta chain variable domain of TCR clone 79434 (TRBV7-3, TRBJ2-2)
CASSLKRGTLSGELFF

SEQ ID NO: 158869 - protein, 14 aa, Homo sapiens
  CDR3 for alpha chain variable domain of TCR clone 79435 (TRAV21, TRAJ15)
CAVILNQAGTALIF

SEQ ID NO: 158870 - protein, 11 aa, Homo sapiens
  CDR3 for beta chain variable domain of TCR clone 79435 (TRBV20-1, TRBJ2-7)
CSARTSYEQYF

SEQ ID NO: 158871 - protein, 16 aa, Homo sapiens
  CDR3 for alpha chain variable domain of TCR clone 79436 (TRAV12-3, TRAJ53)
CAMSPGSGGSNYKLTF

SEQ ID NO: 158872 - protein, 15 aa, Homo sapiens
  CDR3 for beta chain variable domain of TCR clone 79436 (TRBV4-1, TRBJ2-2)
CASSEGQGITGELFF

SEQ ID NO: 158873 - protein, 13 aa, Homo sapiens
  CDR3 for alpha chain variable domain of TCR clone 79437 (TRAV3, TRAJ21)
CAVREPDFNKFYF

SEQ ID NO: 158874 - protein, 15 aa, Homo sapiens
  CDR3 for beta chain variable domain of TCR clone 79437 (TRBV2, TRBJ2-1)
CASSGLAGGYNEQFF

SEQ ID NO: 158875 - protein, 15 aa, Homo sapiens
  CDR3 for alpha chain variable domain of TCR clone 79438 (TRAV17, TRAJ16)
CATALRFSDGQKLLF

SEQ ID NO: 158876 - protein, 13 aa, Homo sapiens
  CDR3 for beta chain variable domain of TCR clone 79438 (TRBV19, TRBJ1-1)
CASSVRDISEAFF

SEQ ID NO: 158877 - protein, 17 aa, Homo sapiens
  CDR3 for alpha chain variable domain of TCR clone 79439 (TRAV17, TRAJ7)
CATLVRLAFGKGNQVVV

SEQ ID NO: 158878 - protein, 13 aa, Homo sapiens
  CDR3 for beta chain variable domain of TCR clone 79439 (TRBV12-4, TRBJ2-7)
CASSLERVREQYF

SEQ ID NO: 158879 - protein, 12 aa, Homo sapiens
  CDR3 for alpha chain variable domain of TCR clone 79440 (TRAV12-2, TRAJ10)
WGVTGGGNKLTF

SEQ ID NO: 158880 - protein, 14 aa, Homo sapiens
  CDR3 for beta chain variable domain of TCR clone 79440 (TRBV11-2, TRBJ2-3)
CASSLYAGRDTQYF

SEQ ID NO: 158881 - protein, 13 aa, Homo sapiens
  CDR3 for alpha chain variable domain of TCR clone 79441 (TRAV13-2, TRAJ53)
CAENMVSNYKLTF

SEQ ID NO: 158882 - protein, 13 aa, Homo sapiens
  CDR3 for beta chain variable domain of TCR clone 79441 (TRBV4-1, TRBJ2-2)
CASSQENTGELFF

SEQ ID NO: 158883 - protein, 14 aa, Homo sapiens
  CDR3 for alpha chain variable domain of TCR clone 79442 (TRAV1-2, TRAJ8)
CDVREDTGFQKLVF

SEQ ID NO: 158884 - protein, 18 aa, Homo sapiens
  CDR3 for beta chain variable domain of TCR clone 79442 (TRBV20-1, TRBJ2-6)
CSAETTPTHGSGANVLTF

SEQ ID NO: 158885 - protein, 12 aa, Homo sapiens
  CDR3 for alpha chain variable domain of TCR clone 79443 (TRAV2, TRAJ9)
CAVGAGGFKTIF

SEQ ID NO: 158886 - protein, 16 aa, Homo sapiens
  CDR3 for beta chain variable domain of TCR clone 79443 (TRBV13, TRBJ2-2)
CASSPRTGEHTGELFF

SEQ ID NO: 158887 - protein, 13 aa, Homo sapiens
  CDR3 for alpha chain variable domain of TCR clone 79444 (TRAV12-3, TRAJ7)
CAMSASGNNRLAF

SEQ ID NO: 158888 - protein, 14 aa, Homo sapiens
  CDR3 for beta chain variable domain of TCR clone 79444 (TRBV13, TRBJ2-5)
CASSLGPRGETQYS

SEQ ID NO: 158889 - protein, 14 aa, Homo sapiens
  CDR3 for alpha chain variable domain of TCR clone 79445 (TRAV17, TRAJ12)
CATDEKVSSYKLIF

SEQ ID NO: 158890 - protein, 16 aa, Homo sapiens
  CDR3 for beta chain variable domain of TCR clone 79445 (TRBV11-2, TRBJ2-1)
CASSPRLAGVYNEQFF

SEQ ID NO: 158891 - protein, 14 aa, Homo sapiens
  CDR3 for alpha chain variable domain of TCR clone 79446 (TRAV2, TRAJ41)
CAMGTSNSGYALNF

SEQ ID NO: 158892 - protein, 13 aa, Homo sapiens
  CDR3 for beta chain variable domain of TCR clone 79446 (TRBV4-1, TRBJ2-1)
CASSQEVQYEQFF

SEQ ID NO: 158893 - protein, 14 aa, Homo sapiens
  CDR3 for alpha chain variable domain of TCR clone 79447 (TRAV12-2, TRAJ4)
CAVLIGGGYNKLIF

SEQ ID NO: 158894 - protein, 16 aa, Homo sapiens
  CDR3 for beta chain variable domain of TCR clone 79447 (TRBV11-3, TRBJ2-5)
CASSSVVAGSTETQYF

SEQ ID NO: 158895 - protein, 14 aa, Homo sapiens
  CDR3 for alpha chain variable domain of TCR clone 79448 (TRAV8-3, TRAJ30)
CAVGDMNRDDKIIF

SEQ ID NO: 158896 - protein, 17 aa, Homo sapiens
  CDR3 for beta chain variable domain of TCR clone 79448 (TRBV19, TRBJ2-2)
CASNRNPGGFGTGELFF

SEQ ID NO: 158897 - protein, 22 aa, Homo sapiens
  CDR3 for alpha chain variable domain of TCR clone 79449 (TRAV27, TRAJ41)
CAVRTQIPDIQNPDPAVYQLRV

SEQ ID NO: 158898 - protein, 16 aa, Homo sapiens
  CDR3 for beta chain variable domain of TCR clone 79449 (TRBV5-1, TRBJ2-3)
CASSLGLAVYTDTQYF

SEQ ID NO: 158899 - protein, 16 aa, Homo sapiens
  CDR3 for alpha chain variable domain of TCR clone 79450 (TRAV30, TRAJ24)
CGTEIVDADSWGKFQF

SEQ ID NO: 158900 - protein, 15 aa, Homo sapiens
  CDR3 for beta chain variable domain of TCR clone 79450 (TRBV7-3, TRBJ1-1)
CASSQDWGLKLSLDK

SEQ ID NO: 158901 - protein, 13 aa, Homo sapiens
  CDR3 for alpha chain variable domain of TCR clone 79451 (TRAV36/DV7, TRAJ49)
CAVEANTGNQIYF

SEQ ID NO: 158902 - protein, 13 aa, Homo sapiens
  CDR3 for beta chain variable domain of TCR clone 79451 (TRBV10-3, TRBJ2-7)
CASKLAVNYEQYF

SEQ ID NO: 158903 - protein, 14 aa, Homo sapiens
  CDR3 for alpha chain variable domain of TCR clone 79452 (TRAV8-3, TRAJ9)
CAVVHNTGGFKTIF

SEQ ID NO: 158904 - protein, 14 aa, Homo sapiens
  CDR3 for beta chain variable domain of TCR clone 79452 (TRBV7-3, TRBJ2-2)
CACSSGGYTGELFF

SEQ ID NO: 158905 - protein, 23 aa, Homo sapiens
  CDR3 for alpha chain variable domain of TCR clone 79453 (TRAV26-1, TRAJ38)
CIADNAGNNHIQNPNPAVYQLRD

SEQ ID NO: 158906 - protein, 15 aa, Homo sapiens
  CDR3 for beta chain variable domain of TCR clone 79453 (TRBV20-1, TRBJ1-1)
CSARGGGTLKLSLDK

SEQ ID NO: 158907 - protein, 18 aa, Homo sapiens
  CDR3 for alpha chain variable domain of TCR clone 79454 (TRAV21, TRAJ52)
CAVRPSPAGGTSYGKLTF

SEQ ID NO: 158908 - protein, 14 aa, Homo sapiens
  CDR3 for beta chain variable domain of TCR clone 79454 (TRBV4-1, TRBJ2-2)
CASSRAVNTGELFF

SEQ ID NO: 158909 - protein, 16 aa, Homo sapiens
  CDR3 for alpha chain variable domain of TCR clone 79455 (TRAV12-2, TRAJ10)
CAVNRVLTGGGNKLTF

SEQ ID NO: 158910 - protein, 15 aa, Homo sapiens
  CDR3 for beta chain variable domain of TCR clone 79455 (TRBV28, TRBJ2-1)
CASSIIAGGRSEQFF

SEQ ID NO: 158911 - protein, 18 aa, Homo sapiens
  CDR3 for alpha chain variable domain of TCR clone 79456 (TRAV1-2, TRAJ18)
CAVRDMGDRGSTLGRLYF

SEQ ID NO: 158912 - protein, 16 aa, Homo sapiens
  CDR3 for beta chain variable domain of TCR clone 79456 (TRBV29-1, TRBJ1-2)
CSVEANRDIANYGHTF

SEQ ID NO: 158913 - protein, 15 aa, Homo sapiens
  CDR3 for alpha chain variable domain of TCR clone 79457 (TRAV21, TRAJ52)
CAVRGGGTSYGKPTF

SEQ ID NO: 158914 - protein, 15 aa, Homo sapiens
  CDR3 for beta chain variable domain of TCR clone 79457 (TRBV18, TRBJ1-5)
CASSPSDRSNQPQHF

SEQ ID NO: 158915 - protein, 14 aa, Homo sapiens
  CDR3 for alpha chain variable domain of TCR clone 79458 (TRAV17, TRAJ36)
CATDALSGANNLFF

SEQ ID NO: 158916 - protein, 15 aa, Homo sapiens
  CDR3 for beta chain variable domain of TCR clone 79458 (TRBV7-2, TRBJ2-3)
CASSSTGLETDTQYF

SEQ ID NO: 158917 - protein, 12 aa, Homo sapiens
  CDR3 for alpha chain variable domain of TCR clone 79459 (TRAV26-2, TRAJ21)
CILKGNFNKFYF

SEQ ID NO: 158918 - protein, 14 aa, Homo sapiens
  CDR3 for beta chain variable domain of TCR clone 79459 (TRBV7-9, TRBJ1-1)
CASTPPQSYTEAFF

SEQ ID NO: 158919 - protein, 12 aa, Homo sapiens
  CDR3 for alpha chain variable domain of TCR clone 79460 (TRAV12-2, TRAJ34)
CAVNFFTDKLIF

SEQ ID NO: 158920 - protein, 15 aa, Homo sapiens
  CDR3 for beta chain variable domain of TCR clone 79460 (TRBV11-2, TRBJ2-2)
CASSSDRVNAGELFF

SEQ ID NO: 158921 - protein, 15 aa, Homo sapiens
  CDR3 for alpha chain variable domain of TCR clone 79461 (TRAV3, TRAJ26)
CAVRDGDNYGQNFVF

SEQ ID NO: 158922 - protein, 12 aa, Homo sapiens
  CDR3 for beta chain variable domain of TCR clone 79461 (TRBV12-4, TRBJ1-3)
CASSFSGNTIYF

SEQ ID NO: 158923 - protein, 12 aa, Homo sapiens
  CDR3 for alpha chain variable domain of TCR clone 79462 (TRAV16, TRAJ56)
CAPPGANSKLTF

SEQ ID NO: 158924 - protein, 17 aa, Homo sapiens
  CDR3 for beta chain variable domain of TCR clone 79462 (TRBV27, TRBJ2-6)
CASSLTGFASGANVLTF

SEQ ID NO: 158925 - protein, 12 aa, Homo sapiens
  CDR3 for alpha chain variable domain of TCR clone 79463 (TRAV29/DV5, TRAJ49)
CAATDTGNQFYF

SEQ ID NO: 158926 - protein, 12 aa, Homo sapiens
  CDR3 for beta chain variable domain of TCR clone 79463 (TRBV12-4, TRBJ2-7)
CASSLGGYEKYF

SEQ ID NO: 158927 - protein, 13 aa, Homo sapiens
  CDR3 for alpha chain variable domain of TCR clone 79464 (TRAV26-1, TRAJ30)
CIVRVESNDKIIF

SEQ ID NO: 158928 - protein, 14 aa, Homo sapiens
  CDR3 for beta chain variable domain of TCR clone 79464 (TRBV7-6, TRBJ2-3)
CASSLGTVTDTQYF

SEQ ID NO: 158929 - protein, 15 aa, Homo sapiens
  CDR3 for alpha chain variable domain of TCR clone 79465 (TRAV3, TRAJ22)
CIVRVSFWFCKATDL

SEQ ID NO: 158930 - protein, 13 aa, Homo sapiens
  CDR3 for beta chain variable domain of TCR clone 79465 (TRBV7-9, TRBJ1-2)
CASSLKQNYGYTF

SEQ ID NO: 158931 - protein, 15 aa, Homo sapiens
  CDR3 for alpha chain variable domain of TCR clone 79466 (TRAV25, TRAJ52)
CAGRPGGTSYGKLTF

SEQ ID NO: 158932 - protein, 15 aa, Homo sapiens
  CDR3 for beta chain variable domain of TCR clone 79466 (TRBV10-2, TRBJ2-6)
CASSEQGTGANVLTF

SEQ ID NO: 158933 - protein, 16 aa, Homo sapiens
  CDR3 for alpha chain variable domain of TCR clone 79467 (TRAV3, TRAJ10)
CAVRDMRAGGGNKLTF

SEQ ID NO: 158934 - protein, 14 aa, Homo sapiens
  CDR3 for beta chain variable domain of TCR clone 79467 (TRBV25-1, TRBJ1-1)
CASTHLGGNTEAFL

SEQ ID NO: 158935 - protein, 14 aa, Homo sapiens
  CDR3 for alpha chain variable domain of TCR clone 79468 (TRAV1-2, TRAJ16)
CAVRSASDGQKLLF

SEQ ID NO: 158936 - protein, 16 aa, Homo sapiens
  CDR3 for beta chain variable domain of TCR clone 79468 (TRBV4-2, TRBJ1-1)
CASSPSPGRAAPEAFF

SEQ ID NO: 158937 - protein, 18 aa, Homo sapiens
  CDR3 for alpha chain variable domain of TCR clone 79469 (TRAV29/DV5, TRAJ53)
CSVLLCSKRGGSNYKLTF

SEQ ID NO: 158938 - protein, 17 aa, Homo sapiens
  CDR3 for beta chain variable domain of TCR clone 79469 (TRBV7-8, TRBJ2-6)
CASSAWTGGAGANVLTF

SEQ ID NO: 158939 - protein, 16 aa, Homo sapiens
  CDR3 for alpha chain variable domain of TCR clone 79470 (TRAV3, TRAJ4)
CAVRPSPSGGYNRLIF

SEQ ID NO: 158940 - protein, 12 aa, Homo sapiens
  CDR3 for beta chain variable domain of TCR clone 79470 (TRBV7-9, TRBJ2-7)
CASSQGVYEQYF

SEQ ID NO: 158941 - protein, 13 aa, Homo sapiens
  CDR3 for alpha chain variable domain of TCR clone 79471 (TRAV29/DV5, TRAJ31)
CAASRNNNARLMF

SEQ ID NO: 158942 - protein, 13 aa, Homo sapiens
  CDR3 for beta chain variable domain of TCR clone 79471 (TRBV12-4, TRBJ1-2)
CASSSGLTVISTF

SEQ ID NO: 158943 - protein, 12 aa, Homo sapiens
  CDR3 for alpha chain variable domain of TCR clone 79472 (TRAV3, TRAJ31)
CAVRDGNARLMF

SEQ ID NO: 158944 - protein, 14 aa, Homo sapiens
  CDR3 for beta chain variable domain of TCR clone 79472 (TRBV15, TRBJ2-7)
CATSRVARGYEQYF

SEQ ID NO: 158945 - protein, 13 aa, Homo sapiens
  CDR3 for alpha chain variable domain of TCR clone 79473 (TRAV12-3, TRAJ33)
CAMSVNSNYQLIW

SEQ ID NO: 158946 - protein, 14 aa, Homo sapiens
  CDR3 for beta chain variable domain of TCR clone 79473 (TRBV2, TRBJ2-7)
CASSLTSGGYEQYF

SEQ ID NO: 158947 - protein, 14 aa, Homo sapiens
  CDR3 for alpha chain variable domain of TCR clone 79474 (TRAV36/DV7, TRAJ57)
CAVGFPGGSERLVF

SEQ ID NO: 158948 - protein, 12 aa, Homo sapiens
  CDR3 for beta chain variable domain of TCR clone 79474 (TRBV19, TRBJ2-7)
CASTSGTYEQYF

SEQ ID NO: 158949 - protein, 12 aa, Homo sapiens
  CDR3 for alpha chain variable domain of TCR clone 79475 (TRAV13-2, TRAJ8)
CAPWLGFQKLVF

SEQ ID NO: 158950 - protein, 16 aa, Homo sapiens
  CDR3 for beta chain variable domain of TCR clone 79475 (TRBV12-4, TRBJ1-5)
CASSRPVGGSNQPQHF

SEQ ID NO: 158951 - protein, 11 aa, Homo sapiens
  CDR3 for alpha chain variable domain of TCR clone 79476 (TRAV1-2, TRAJ31)
CAVNNSARLMF

SEQ ID NO: 158952 - protein, 15 aa, Homo sapiens
  CDR3 for beta chain variable domain of TCR clone 79476 (TRBV28, TRBJ2-1)
CASSIIAGGRSEQFF

SEQ ID NO: 158953 - protein, 14 aa, Homo sapiens
  CDR3 for alpha chain variable domain of TCR clone 79477 (TRAV12-2, TRAJ13)
CAVKKTGGYKKVTF

SEQ ID NO: 158954 - protein, 17 aa, Homo sapiens
  CDR3 for beta chain variable domain of TCR clone 79477 (TRBV15, TRBJ2-4)
CATSRDNPQTGLDIQYF

SEQ ID NO: 158955 - protein, 16 aa, Homo sapiens
  CDR3 for alpha chain variable domain of TCR clone 79478 (TRAV35, TRAJ37)
CWAFLRGSSNTGKLIF

SEQ ID NO: 158956 - protein, 13 aa, Homo sapiens
  CDR3 for beta chain variable domain of TCR clone 79478 (TRBV2, TRBJ1-2)
CAISVRGNYGYTF

SEQ ID NO: 158957 - protein, 13 aa, Homo sapiens
  CDR3 for alpha chain variable domain of TCR clone 79479 (TRAV13-2, TRAJ40)
CAEFTSGTYKYIF

SEQ ID NO: 158958 - protein, 20 aa, Homo sapiens
  CDR3 for beta chain variable domain of TCR clone 79479 (TRBV19, TRBJ2-1)
CASSISRTVTSTRLNNEQFF

SEQ ID NO: 158959 - protein, 14 aa, Homo sapiens
  CDR3 for alpha chain variable domain of TCR clone 79480 (TRAV12-2, TRAJ17)
CAVLFKAAGNKLTF

SEQ ID NO: 158960 - protein, 17 aa, Homo sapiens
  CDR3 for beta chain variable domain of TCR clone 79480 (TRBV20-1, TRBJ2-2)
CSASGSGQGGLTGEVFF

SEQ ID NO: 158961 - protein, 15 aa, Homo sapiens
  CDR3 for alpha chain variable domain of TCR clone 79481 (TRAV4, TRAJ39)
CLVGPNNNAGNMLTF

SEQ ID NO: 158962 - protein, 16 aa, Homo sapiens
  CDR3 for beta chain variable domain of TCR clone 79481 (TRBV13, TRBJ2-2)
CASSPRTGGHTGELFF

SEQ ID NO: 158963 - protein, 13 aa, Homo sapiens
  CDR3 for alpha chain variable domain of TCR clone 79482 (TRAV12-1, TRAJ10)
CVVSTGGGNKLTF

SEQ ID NO: 158964 - protein, 16 aa, Homo sapiens
  CDR3 for beta chain variable domain of TCR clone 79482 (TRBV12-4, TRBJ1-5)
CASSRPVGGPNQPQHF

SEQ ID NO: 158965 - protein, 10 aa, Homo sapiens
  CDR3 for alpha chain variable domain of TCR clone 79483 (TRAV13-1, TRAJ27)
CAPLARQINL

SEQ ID NO: 158966 - protein, 13 aa, Homo sapiens
  CDR3 for beta chain variable domain of TCR clone 79483 (TRBV7-3, TRBJ1-1)
CTSSQDWGAEAFF

SEQ ID NO: 158967 - protein, 14 aa, Homo sapiens
  CDR3 for alpha chain variable domain of TCR clone 79484 (TRAV26-1, TRAJ44)
CISPLPGTASKLIF

SEQ ID NO: 158968 - protein, 16 aa, Homo sapiens
  CDR3 for beta chain variable domain of TCR clone 79484 (TRBV19, TRBJ2-1)
CASSKAGPSSYNEQFF

SEQ ID NO: 158969 - protein, 14 aa, Homo sapiens
  CDR3 for alpha chain variable domain of TCR clone 79485 (TRAV26-1, TRAJ48)
CIVRVGFGNEKLTF

SEQ ID NO: 158970 - protein, 14 aa, Homo sapiens
  CDR3 for beta chain variable domain of TCR clone 79485 (TRBV19, TRBJ2-1)
CASPTVVLSGEQFF

SEQ ID NO: 158971 - protein, 18 aa, Homo sapiens
  CDR3 for alpha chain variable domain of TCR clone 79486 (TRAV21, TRAJ52)
CAVRPSPAGGTSYGKLTF

SEQ ID NO: 158972 - protein, 12 aa, Homo sapiens
  CDR3 for beta chain variable domain of TCR clone 79486 (TRBV7-9, TRBJ1-1)
CASSLVRGEAFF

SEQ ID NO: 158973 - protein, 14 aa, Homo sapiens
  CDR3 for alpha chain variable domain of TCR clone 79487 (TRAV13-1, TRAJ9)
CAASALTGGFKTIL

SEQ ID NO: 158974 - protein, 13 aa, Homo sapiens
  CDR3 for beta chain variable domain of TCR clone 79487 (TRBV20-1, TRBJ1-1)
CSAGTVGNTEAFF

SEQ ID NO: 158975 - protein, 16 aa, Homo sapiens
  CDR3 for alpha chain variable domain of TCR clone 79488 (TRAV30, TRAJ24)
CGTEIVDADSWGKFQF

SEQ ID NO: 158976 - protein, 16 aa, Homo sapiens
  CDR3 for beta chain variable domain of TCR clone 79488 (TRBV10-2, TRBJ2-7)
CASSESPGSSGFEQYF

SEQ ID NO: 158977 - protein, 12 aa, Homo sapiens
  CDR3 for alpha chain variable domain of TCR clone 79489 (TRAV1-2, TRAJ33)
CAALDSNYQLIW

SEQ ID NO: 158978 - protein, 13 aa, Homo sapiens
  CDR3 for beta chain variable domain of TCR clone 79489 (TRBV7-9, TRBJ2-3)
CASSPGSTDTQYF

SEQ ID NO: 158979 - protein, 11 aa, Homo sapiens
  CDR3 for alpha chain variable domain of TCR clone 79490 (TRAV2, TRAJ21)
SAVFNFNKFYF

SEQ ID NO: 158980 - protein, 14 aa, Homo sapiens
  CDR3 for beta chain variable domain of TCR clone 79490 (TRBV15, TRBJ2-3)
CATRSGTSTDTQYF

SEQ ID NO: 158981 - protein, 14 aa, Homo sapiens
  CDR3 for alpha chain variable domain of TCR clone 79491 (TRAV1-2, TRAJ16)
CAVNRFSDGQKLLF

SEQ ID NO: 158982 - protein, 11 aa, Homo sapiens
  CDR3 for beta chain variable domain of TCR clone 79491 (TRBV19, TRBJ2-7)
CASGNSYEQYF

SEQ ID NO: 158983 - protein, 10 aa, Homo sapiens
  CDR3 for alpha chain variable domain of TCR clone 79492 (TRAV22, TRAJ15)
CAATGTALIF

SEQ ID NO: 158984 - protein, 14 aa, Homo sapiens
  CDR3 for beta chain variable domain of TCR clone 79492 (TRBV25-1, TRBJ1-1)
CASTHLGGNTEAFF

SEQ ID NO: 158985 - protein, 14 aa, Homo sapiens
  CDR3 for alpha chain variable domain of TCR clone 79493 (TRAV22, TRAJ29)
CAVTRNSGNTPLVF

SEQ ID NO: 158986 - protein, 13 aa, Homo sapiens
  CDR3 for beta chain variable domain of TCR clone 79493 (TRBV18, TRBJ1-1)
CTSSPETKPEAFF

SEQ ID NO: 158987 - protein, 14 aa, Homo sapiens
  CDR3 for alpha chain variable domain of TCR clone 79494 (TRAV2, TRAJ15)
CCGDREQAGTALIF

SEQ ID NO: 158988 - protein, 13 aa, Homo sapiens
  CDR3 for beta chain variable domain of TCR clone 79494 (TRBV10-2, TRBJ2-3)
CASSESGDHTQYF

SEQ ID NO: 158989 - protein, 16 aa, Homo sapiens
  CDR3 for alpha chain variable domain of TCR clone 79495 (TRAV23/DV6, TRAJ9)
CVASIGGNTGGFKTIF

SEQ ID NO: 158990 - protein, 14 aa, Homo sapiens
  CDR3 for beta chain variable domain of TCR clone 79495 (TRBV6-1, TRBJ2-5)
CASSYAGGEETQYF

SEQ ID NO: 158991 - protein, 17 aa, Homo sapiens
  CDR3 for alpha chain variable domain of TCR clone 79496 (TRAV13-1, TRAJ52)
CAAGRNAGGTSYGKLTF

SEQ ID NO: 158992 - protein, 17 aa, Homo sapiens
  CDR3 for beta chain variable domain of TCR clone 79496 (TRBV7-3, TRBJ2-3)
CASSPGGLAGFGDTQYF

SEQ ID NO: 158993 - protein, 10 aa, Homo sapiens
  CDR3 for alpha chain variable domain of TCR clone 79497 (TRAV12-3, TRAJ49)
CAMNDDQFYF

SEQ ID NO: 158994 - protein, 13 aa, Homo sapiens
  CDR3 for beta chain variable domain of TCR clone 79497 (TRBV12-4, TRBJ1-1)
CASSPGTGFEAFF

SEQ ID NO: 158995 - protein, 16 aa, Homo sapiens
  CDR3 for alpha chain variable domain of TCR clone 79498 (TRAV3, TRAJ37)
CAVRGKGPGNTGKLIF

SEQ ID NO: 158996 - protein, 15 aa, Homo sapiens
  CDR3 for beta chain variable domain of TCR clone 79498 (TRBV9, TRBJ1-4)
CASSVGGSTNEKLFF

SEQ ID NO: 158997 - protein, 17 aa, Homo sapiens
  CDR3 for alpha chain variable domain of TCR clone 79499 (TRAV3, TRAJ38)
CAVRDCLNAGNNRKLIW

SEQ ID NO: 158998 - protein, 14 aa, Homo sapiens
  CDR3 for beta chain variable domain of TCR clone 79499 (TRBV5-5, TRBJ1-5)
CAGSGQGVDQPQHF

SEQ ID NO: 158999 - protein, 15 aa, Homo sapiens
  CDR3 for alpha chain variable domain of TCR clone 79500 (TRAV3, TRAJ57)
CAASNTQGGSEKLVF

SEQ ID NO: 159000 - protein, 16 aa, Homo sapiens
  CDR3 for beta chain variable domain of TCR clone 79500 (TRBV19, TRBJ2-1)
CASSKAGPSSYNEQFF

SEQ ID NO: 159001 - protein, 18 aa, Homo sapiens
  CDR3 for alpha chain variable domain of TCR clone 79501 (TRAV13-1, TRAJ52)
CAAKNPNAGGTSYGKLTF

SEQ ID NO: 159002 - protein, 12 aa, Homo sapiens
  CDR3 for beta chain variable domain of TCR clone 79501 (TRBV11-2, TRBJ2-2)
CASSLPTGELFF

SEQ ID NO: 159003 - protein, 14 aa, Homo sapiens
  CDR3 for alpha chain variable domain of TCR clone 79502 (TRAV21, TRAJ35)
CAVMPIGFGNVLHC

SEQ ID NO: 159004 - protein, 13 aa, Homo sapiens
  CDR3 for beta chain variable domain of TCR clone 79502 (TRBV7-2, TRBJ2-7)
CASSSPSGSEQYF

SEQ ID NO: 159005 - protein, 12 aa, Homo sapiens
  CDR3 for alpha chain variable domain of TCR clone 79503 (TRAV1-2, TRAJ31)
CAARLNNARLMF

SEQ ID NO: 159006 - protein, 13 aa, Homo sapiens
  CDR3 for beta chain variable domain of TCR clone 79503 (TRBV12-5, TRBJ2-3)
CASGDRQSDTQYF

SEQ ID NO: 159007 - protein, 14 aa, Homo sapiens
  CDR3 for alpha chain variable domain of TCR clone 79504 (TRAV13-1, TRAJ3)
CAASKSSSASKIIF

SEQ ID NO: 159008 - protein, 14 aa, Homo sapiens
  CDR3 for beta chain variable domain of TCR clone 79504 (TRBV2, TRBJ2-7)
CASSGGTGAYEQYF

SEQ ID NO: 159009 - protein, 13 aa, Homo sapiens
  CDR3 for alpha chain variable domain of TCR clone 79505 (TRAV13-2, TRAJ40)
CAAFTSGTYKYIF

SEQ ID NO: 159010 - protein, 14 aa, Homo sapiens
  CDR3 for beta chain variable domain of TCR clone 79505 (TRBV10-2, TRBJ1-5)
CASSSTGRNQPQHF

SEQ ID NO: 159011 - protein, 15 aa, Homo sapiens
  CDR3 for alpha chain variable domain of TCR clone 79506 (TRAV4, TRAJ39)
CLVGPNNNAGTMLTF

SEQ ID NO: 159012 - protein, 13 aa, Homo sapiens
  CDR3 for beta chain variable domain of TCR clone 79506 (TRBV11-2, TRBJ2-5)
CASSSTGEETQYF

SEQ ID NO: 159013 - protein, 14 aa, Homo sapiens
  CDR3 for alpha chain variable domain of TCR clone 79507 (TRAV12-2, TRAJ17)
CAVLFKAAGNKLTF

SEQ ID NO: 159014 - protein, 17 aa, Homo sapiens
  CDR3 for beta chain variable domain of TCR clone 79507 (TRBV7-9, TRBJ1-4)
CASSSGQLGGRSEKLFF

SEQ ID NO: 159015 - protein, 15 aa, Homo sapiens
  CDR3 for alpha chain variable domain of TCR clone 79508 (TRAV12-1, TRAJ44)
CVADLPTGTASKLTF

SEQ ID NO: 159016 - protein, 16 aa, Homo sapiens
  CDR3 for beta chain variable domain of TCR clone 79508 (TRBV5-1, TRBJ2-5)
CASSLTTSLGKETQYF

SEQ ID NO: 159017 - protein, 14 aa, Homo sapiens
  CDR3 for alpha chain variable domain of TCR clone 79509 (TRAV9-2, TRAJ39)
CALYIYNAGNMLTF

SEQ ID NO: 159018 - protein, 15 aa, Homo sapiens
  CDR3 for beta chain variable domain of TCR clone 79509 (TRBV12-4, TRBJ2-5)
CASSPPTGLQETRYF

SEQ ID NO: 159019 - protein, 12 aa, Homo sapiens
  CDR3 for alpha chain variable domain of TCR clone 79510 (TRAV21, TRAJ49)
CAVSNTGNQFYF

SEQ ID NO: 159020 - protein, 20 aa, Homo sapiens
  CDR3 for beta chain variable domain of TCR clone 79510 (TRBV7-8, TRBJ2-2)
CASSHLFPGPTIHITGELFF

SEQ ID NO: 159021 - protein, 14 aa, Homo sapiens
  CDR3 for alpha chain variable domain of TCR clone 79511 (TRAV17, TRAJ56)
CATVPAGANSKLTF

SEQ ID NO: 159022 - protein, 13 aa, Homo sapiens
  CDR3 for beta chain variable domain of TCR clone 79511 (TRBV12-4, TRBJ2-2)
CASSITGAGELFF

SEQ ID NO: 159023 - protein, 15 aa, Homo sapiens
  CDR3 for alpha chain variable domain of TCR clone 79512 (TRAV12-3, TRAJ6)
CAMGATTGGSYIPTF

SEQ ID NO: 159024 - protein, 17 aa, Homo sapiens
  CDR3 for beta chain variable domain of TCR clone 79512 (TRBV7-3, TRBJ2-3)
CASSLMKRMRGADTQYF

SEQ ID NO: 159025 - protein, 13 aa, Homo sapiens
  CDR3 for alpha chain variable domain of TCR clone 79513 (TRAV8-3, TRAJ43)
CAVGPDNNNDMRF

SEQ ID NO: 159026 - protein, 12 aa, Homo sapiens
  CDR3 for beta chain variable domain of TCR clone 79513 (TRBV7-2, TRBJ1-6)
CASSLSSSPLYF

SEQ ID NO: 159027 - protein, 15 aa, Homo sapiens
  CDR3 for alpha chain variable domain of TCR clone 79514 (TRAV3, TRAJ5)
CALRDLDTGRRALTF

SEQ ID NO: 159028 - protein, 14 aa, Homo sapiens
  CDR3 for beta chain variable domain of TCR clone 79514 (TRBV25-1, TRBJ1-4)
CASSGGGQPEKLFF

SEQ ID NO: 159029 - protein, 16 aa, Homo sapiens
  CDR3 for alpha chain variable domain of TCR clone 79515 (TRAV30, TRAJ24)
CGTEIVDADSWGKFQF

SEQ ID NO: 159030 - protein, 13 aa, Homo sapiens
  CDR3 for beta chain variable domain of TCR clone 79515 (TRBV18, TRBJ1-2)
CASSASATEGYNF

SEQ ID NO: 159031 - protein, 14 aa, Homo sapiens
  CDR3 for alpha chain variable domain of TCR clone 79516 (TRAV12-1, TRAJ17)
CVVNYKAAGNKLTF

SEQ ID NO: 159032 - protein, 17 aa, Homo sapiens
  CDR3 for beta chain variable domain of TCR clone 79516 (TRBV20-1, TRBJ2-6)
CSASSSGLAGSYNEQFF

SEQ ID NO: 159033 - protein, 15 aa, Homo sapiens
  CDR3 for alpha chain variable domain of TCR clone 79517 (TRAV12-2, TRAJ53)
CAVNGGGGSNYKQTF

SEQ ID NO: 159034 - protein, 13 aa, Homo sapiens
  CDR3 for beta chain variable domain of TCR clone 79517 (TRBV3-1, TRBJ1-1)
CASSPGVITEAFF

SEQ ID NO: 159035 - protein, 17 aa, Homo sapiens
  CDR3 for alpha chain variable domain of TCR clone 79518 (TRAV38-2/DV8, TRAJ45)
CAYRSRYSGGGADGLTF

SEQ ID NO: 159036 - protein, 15 aa, Homo sapiens
  CDR3 for beta chain variable domain of TCR clone 79518 (TRBV19, TRBJ2-1)
CASSKGRGPYNEQFF

SEQ ID NO: 159037 - protein, 14 aa, Homo sapiens
  CDR3 for alpha chain variable domain of TCR clone 79519 (TRAV13-1, TRAJ44)
CAAKATGTASKLTF

SEQ ID NO: 159038 - protein, 17 aa, Homo sapiens
  CDR3 for beta chain variable domain of TCR clone 79519 (TRBV7-3, TRBJ2-3)
CASSLMKRMRGAATQYF

SEQ ID NO: 159039 - protein, 12 aa, Homo sapiens
  CDR3 for alpha chain variable domain of TCR clone 79520 (TRAV23/DV6, TRAJ3)
CAARAPQQCLQD

SEQ ID NO: 159040 - protein, 17 aa, Homo sapiens
  CDR3 for beta chain variable domain of TCR clone 79520 (TRBV7-9, TRBJ2-3)
CASSPTVAGDLTDTQYF

SEQ ID NO: 159041 - protein, 15 aa, Homo sapiens
  CDR3 for alpha chain variable domain of TCR clone 79521 (TRAV3, TRAJ22)
CAVRDRGGSARQLTF

SEQ ID NO: 159042 - protein, 14 aa, Homo sapiens
  CDR3 for beta chain variable domain of TCR clone 79521 (TRBV20-1, TRBJ2-7)
CSAKTGTGGYEQYF

SEQ ID NO: 159043 - protein, 16 aa, Homo sapiens
  CDR3 for alpha chain variable domain of TCR clone 79522 (TRAV30, TRAJ57)
CGTGWAPQGGSEKLGF

SEQ ID NO: 159044 - protein, 14 aa, Homo sapiens
  CDR3 for beta chain variable domain of TCR clone 79522 (TRBV18, TRBJ1-1)
CASSPGFQGVEAFF

SEQ ID NO: 159045 - protein, 13 aa, Homo sapiens
  CDR3 for alpha chain variable domain of TCR clone 79523 (TRAV12-2, TRAJ20)
CAVYPSNDYKLSI

SEQ ID NO: 159046 - protein, 15 aa, Homo sapiens
  CDR3 for beta chain variable domain of TCR clone 79523 (TRBV27, TRBJ2-5)
CASSLYPRGGETQYF

SEQ ID NO: 159047 - protein, 15 aa, Homo sapiens
  CDR3 for alpha chain variable domain of TCR clone 79524 (TRAV12-3, TRAJ27)
CAMRAYSTNAGKSTF

SEQ ID NO: 159048 - protein, 13 aa, Homo sapiens
  CDR3 for beta chain variable domain of TCR clone 79524 (TRBV11-2, TRBJ2-5)
CASSRGPSETQYF

SEQ ID NO: 159049 - protein, 14 aa, Homo sapiens
  CDR3 for alpha chain variable domain of TCR clone 79525 (TRAV38-1, TRAJ40)
CALRPTSGTYKYVF

SEQ ID NO: 159050 - protein, 14 aa, Homo sapiens
  CDR3 for beta chain variable domain of TCR clone 79525 (TRBV5-4, TRBJ1-1)
CASSLDSRRDEAFF

SEQ ID NO: 159051 - protein, 13 aa, Homo sapiens
  CDR3 for alpha chain variable domain of TCR clone 79526 (TRAV8-3, TRAJ6)
CAVGSGGSYIPTF

SEQ ID NO: 159052 - protein, 13 aa, Homo sapiens
  CDR3 for beta chain variable domain of TCR clone 79526 (TRBV19, TRBJ1-2)
CASSVPGQDGYTF

SEQ ID NO: 159053 - protein, 12 aa, Homo sapiens
  CDR3 for alpha chain variable domain of TCR clone 79527 (TRAV13-2, TRAJ23)
CAERHRGGKLIF

SEQ ID NO: 159054 - protein, 15 aa, Homo sapiens
  CDR3 for beta chain variable domain of TCR clone 79527 (TRBV28, TRBJ2-5)
CASSPPWSYQETQYF

SEQ ID NO: 159055 - protein, 18 aa, Homo sapiens
  CDR3 for alpha chain variable domain of TCR clone 79528 (TRAV26-1, TRAJ23)
CIVRVGLEVGNQGGKLIF

SEQ ID NO: 159056 - protein, 14 aa, Homo sapiens
  CDR3 for beta chain variable domain of TCR clone 79528 (TRBV7-6, TRBJ2-3)
CASSLGTVTDTQYF

SEQ ID NO: 159057 - protein, 13 aa, Homo sapiens
  CDR3 for alpha chain variable domain of TCR clone 79529 (TRAV2, TRAJ3)
CAVDGSSASKIIF

SEQ ID NO: 159058 - protein, 19 aa, Homo sapiens
  CDR3 for beta chain variable domain of TCR clone 79529 (TRBV5-1, TRBJ2-3)
CASSLWLAGGITTTDTQYF

SEQ ID NO: 159059 - protein, 14 aa, Homo sapiens
  CDR3 for alpha chain variable domain of TCR clone 79530 (TRAV12-3, TRAJ53)
CGAASGGSNYKLTF

SEQ ID NO: 159060 - protein, 13 aa, Homo sapiens
  CDR3 for beta chain variable domain of TCR clone 79530 (TRBV19, TRBJ1-5)
CASSTQDGQPQHF

SEQ ID NO: 159061 - protein, 15 aa, Homo sapiens
  CDR3 for alpha chain variable domain of TCR clone 79531 (TRAV12-1, TRAJ41)
CVVNSRTGSRYALNF

SEQ ID NO: 159062 - protein, 11 aa, Homo sapiens
  CDR3 for beta chain variable domain of TCR clone 79531 (TRBV6-4, TRBJ2-1)
CASSDSYAQFF

SEQ ID NO: 159063 - protein, 15 aa, Homo sapiens
  CDR3 for alpha chain variable domain of TCR clone 79532 (TRAV26-1, TRAJ22)
CIVRVSFWFCKATDP

SEQ ID NO: 159064 - protein, 14 aa, Homo sapiens
  CDR3 for beta chain variable domain of TCR clone 79532 (TRBV18, TRBJ2-7)
CASSPRGGAYEQYF

SEQ ID NO: 159065 - protein, 14 aa, Homo sapiens
  CDR3 for alpha chain variable domain of TCR clone 79533 (TRAV38-1, TRAJ29)
CACITPSGNTPLVF

SEQ ID NO: 159066 - protein, 14 aa, Homo sapiens
  CDR3 for beta chain variable domain of TCR clone 79533 (TRBV18, TRBJ2-7)
CASSPRGGAYEQYF

SEQ ID NO: 159067 - protein, 14 aa, Homo sapiens
  CDR3 for alpha chain variable domain of TCR clone 79534 (TRAV12-2, TRAJ53)
CAVKGGGSKYKLTF

SEQ ID NO: 159068 - protein, 14 aa, Homo sapiens
  CDR3 for beta chain variable domain of TCR clone 79534 (TRBV7-7, TRBJ2-2)
CATRQDSDTGELFF

SEQ ID NO: 159069 - protein, 17 aa, Homo sapiens
  CDR3 for alpha chain variable domain of TCR clone 79535 (TRAV3, TRAJ42)
CAVRDRDYGGSQGNLIF

SEQ ID NO: 159070 - protein, 14 aa, Homo sapiens
  CDR3 for beta chain variable domain of TCR clone 79535 (TRBV18, TRBJ2-7)
CASSPRGGAYEQYF

SEQ ID NO: 159071 - protein, 15 aa, Homo sapiens
  CDR3 for alpha chain variable domain of TCR clone 79536 (TRAV16, TRAJ10)
CALRELTGGENKLTF

SEQ ID NO: 159072 - protein, 14 aa, Homo sapiens
  CDR3 for beta chain variable domain of TCR clone 79536 (TRBV5-5, TRBJ2-7)
CASSLGQGTHEQYF

SEQ ID NO: 159073 - protein, 12 aa, Homo sapiens
  CDR3 for alpha chain variable domain of TCR clone 79537 (TRAV21, TRAJ23)
CAVMLQGGKIIF

SEQ ID NO: 159074 - protein, 14 aa, Homo sapiens
  CDR3 for beta chain variable domain of TCR clone 79537 (TRBV7-9, TRBJ1-4)
CAITEGEANEKLFF

SEQ ID NO: 159075 - protein, 17 aa, Homo sapiens
  CDR3 for alpha chain variable domain of TCR clone 79538 (TRAV3, TRAJ6)
CAVRDGPRAGGSYIPTF

SEQ ID NO: 159076 - protein, 14 aa, Homo sapiens
  CDR3 for beta chain variable domain of TCR clone 79538 (TRBV7-3, TRBJ2-1)
CASSLSGSYNEQFF

SEQ ID NO: 159077 - protein, 13 aa, Homo sapiens
  CDR3 for alpha chain variable domain of TCR clone 79539 (TRAV21, TRAJ57)
CAVTQGGSEKLVF

SEQ ID NO: 159078 - protein, 13 aa, Homo sapiens
  CDR3 for beta chain variable domain of TCR clone 79539 (TRBV9, TRBJ2-1)
CASSVGQGGEQFF

SEQ ID NO: 159079 - protein, 12 aa, Homo sapiens
  CDR3 for alpha chain variable domain of TCR clone 79540 (TRAV3, TRAJ31)
CAVRDGNAGLMF

SEQ ID NO: 159080 - protein, 18 aa, Homo sapiens
  CDR3 for beta chain variable domain of TCR clone 79540 (TRBV7-2, TRBJ2-3)
CASSLKREGSGITDTQYF

SEQ ID NO: 159081 - protein, 12 aa, Homo sapiens
  CDR3 for alpha chain variable domain of TCR clone 79541 (TRAV12-1, TRAJ40)
CVVYSGTDKYIF

SEQ ID NO: 159082 - protein, 18 aa, Homo sapiens
  CDR3 for beta chain variable domain of TCR clone 79541 (TRBV11-2, TRBJ2-3)
CASSLGGASRGAPNTQYF

SEQ ID NO: 159083 - protein, 18 aa, Homo sapiens
  CDR3 for alpha chain variable domain of TCR clone 79542 (TRAV26-1, TRAJ5)
CIVRVVPPRDTGRRAITF

SEQ ID NO: 159084 - protein, 15 aa, Homo sapiens
  CDR3 for beta chain variable domain of TCR clone 79542 (TRBV7-9, TRBJ2-7)
CASSLPMGQANEQYF

SEQ ID NO: 159085 - protein, 19 aa, Homo sapiens
  CDR3 for alpha chain variable domain of TCR clone 79543 (TRAV17, TRAJ57)
CFLLLCYGPSQGGSEKLVF

SEQ ID NO: 159086 - protein, 16 aa, Homo sapiens
  CDR3 for beta chain variable domain of TCR clone 79543 (TRBV12-4, TRBJ1-5)
CASSRPVGGSNQPQHF

SEQ ID NO: 159087 - protein, 15 aa, Homo sapiens
  CDR3 for alpha chain variable domain of TCR clone 79544 (TRAV21, TRAJ24)
CAARSSTDSWGKLQF

SEQ ID NO: 159088 - protein, 13 aa, Homo sapiens
  CDR3 for beta chain variable domain of TCR clone 79544 (TRBV11-2, TRBJ2-5)
CASSSTGEETQSF

SEQ ID NO: 159089 - protein, 13 aa, Homo sapiens
  CDR3 for alpha chain variable domain of TCR clone 79545 (TRAV29/DV5, TRAJ47)
CAASAEYGNKLVF

SEQ ID NO: 159090 - protein, 16 aa, Homo sapiens
  CDR3 for beta chain variable domain of TCR clone 79545 (TRBV12-5, TRBJ2-5)
CASGPRTSGNQETQYF

SEQ ID NO: 159091 - protein, 14 aa, Homo sapiens
  CDR3 for alpha chain variable domain of TCR clone 79546 (TRAV2, TRAJ9)
CAVEDRSGGFKTIF

SEQ ID NO: 159092 - protein, 12 aa, Homo sapiens
  CDR3 for beta chain variable domain of TCR clone 79546 (TRBV12-4, TRBJ2-4)
CASSSSGNIQCF

SEQ ID NO: 159093 - protein, 14 aa, Homo sapiens
  CDR3 for alpha chain variable domain of TCR clone 79547 (TRAV12-2, TRAJ13)
CAVKKTGGYQKVTF

SEQ ID NO: 159094 - protein, 14 aa, Homo sapiens
  CDR3 for beta chain variable domain of TCR clone 79547 (TRBV4-1, TRBJ2-7)
CASSPVAGGDEQYF

SEQ ID NO: 159095 - protein, 14 aa, Homo sapiens
  CDR3 for alpha chain variable domain of TCR clone 79548 (TRAV12-1, TRAJ17)
CVVNYKAAGNKLTL

SEQ ID NO: 159096 - protein, 12 aa, Homo sapiens
  CDR3 for beta chain variable domain of TCR clone 79548 (TRBV24-1, TRBJ1-1)
CATLYPDTEAFF

SEQ ID NO: 159097 - protein, 16 aa, Homo sapiens
  CDR3 for alpha chain variable domain of TCR clone 79549 (TRAV3, TRAJ32)
CAVRDMGGGATNKPIF

SEQ ID NO: 159098 - protein, 11 aa, Homo sapiens
  CDR3 for beta chain variable domain of TCR clone 79549 (TRBV12-4, TRBJ2-1)
CASSCLNEQFF

SEQ ID NO: 159099 - protein, 14 aa, Homo sapiens
  CDR3 for alpha chain variable domain of TCR clone 79550 (TRAV13-1, TRAJ6)
CVASITGGSYIPTF

SEQ ID NO: 159100 - protein, 14 aa, Homo sapiens
  CDR3 for beta chain variable domain of TCR clone 79550 (TRBV6-3, TRBJ2-1)
CASLHSAYYNEQFF

SEQ ID NO: 159101 - protein, 14 aa, Homo sapiens
  CDR3 for alpha chain variable domain of TCR clone 79551 (TRAV8-3, TRAJ4)
CAVGATGGYNKLIF

SEQ ID NO: 159102 - protein, 15 aa, Homo sapiens
  CDR3 for beta chain variable domain of TCR clone 79551 (TRBV6-5, TRBJ2-1)
CASSYDAGAGNEQFF

SEQ ID NO: 159103 - protein, 12 aa, Homo sapiens
  CDR3 for alpha chain variable domain of TCR clone 79552 (TRAV12-3, TRAJ17)
CAMTLTGNKLTF

SEQ ID NO: 159104 - protein, 12 aa, Homo sapiens
  CDR3 for beta chain variable domain of TCR clone 79552 (TRBV19, TRBJ1-4)
CASKDWPGGLFF

SEQ ID NO: 159105 - protein, 14 aa, Homo sapiens
  CDR3 for alpha chain variable domain of TCR clone 79553 (TRAV29/DV5, TRAJ20)
CAATIRSNDYKLSF

SEQ ID NO: 159106 - protein, 16 aa, Homo sapiens
  CDR3 for beta chain variable domain of TCR clone 79553 (TRBV19, TRBJ2-1)
CASSKAGPSSYNEQFF

SEQ ID NO: 159107 - protein, 12 aa, Homo sapiens
  CDR3 for alpha chain variable domain of TCR clone 79554 (TRAV2, TRAJ9)
CAVGAGGFKTIF

SEQ ID NO: 159108 - protein, 14 aa, Homo sapiens
  CDR3 for beta chain variable domain of TCR clone 79554 (TRBV3-1, TRBJ2-1)
CASSQAVYLGEQFF

SEQ ID NO: 159109 - protein, 15 aa, Homo sapiens
  CDR3 for alpha chain variable domain of TCR clone 79555 (TRAV17, TRAJ52)
CATEAGGTSYEKLTF

SEQ ID NO: 159110 - protein, 14 aa, Homo sapiens
  CDR3 for beta chain variable domain of TCR clone 79555 (TRBV28, TRBJ1-5)
CASSLGVLVKPQHF

SEQ ID NO: 159111 - protein, 14 aa, Homo sapiens
  CDR3 for alpha chain variable domain of TCR clone 79556 (TRAV8-3, TRAJ15)
CAVGRHQAGTALIF

SEQ ID NO: 159112 - protein, 15 aa, Homo sapiens
  CDR3 for beta chain variable domain of TCR clone 79556 (TRBV6-3, TRBJ2-7)
CASSSPGTVFYEQYF

SEQ ID NO: 159113 - protein, 15 aa, Homo sapiens
  CDR3 for alpha chain variable domain of TCR clone 79557 (TRAV2, TRAJ9)
CAVEDRGTGGFKTIF

SEQ ID NO: 159114 - protein, 12 aa, Homo sapiens
  CDR3 for beta chain variable domain of TCR clone 79557 (TRBV7-8, TRBJ2-7)
CASSLGDREQYF

SEQ ID NO: 159115 - protein, 12 aa, Homo sapiens
  CDR3 for alpha chain variable domain of TCR clone 79558 (TRAV2, TRAJ31)
CAVEDNNAILMF

SEQ ID NO: 159116 - protein, 16 aa, Homo sapiens
  CDR3 for beta chain variable domain of TCR clone 79558 (TRBV10-3, TRBJ2-1)
CAISGVGDGGGGEQFF

SEQ ID NO: 159117 - protein, 18 aa, Homo sapiens
  CDR3 for alpha chain variable domain of TCR clone 79559 (TRAV13-1, TRAJ52)
CAAKNPNAGGTSYGKLTF

SEQ ID NO: 159118 - protein, 12 aa, Homo sapiens
  CDR3 for beta chain variable domain of TCR clone 79559 (TRBV7-9, TRBJ2-7)
CASSLEGYEQYF

SEQ ID NO: 159119 - protein, 14 aa, Homo sapiens
  CDR3 for alpha chain variable domain of TCR clone 79560 (TRAV12-2, TRAJ40)
CAVKISSGTYKYIF

SEQ ID NO: 159120 - protein, 20 aa, Homo sapiens
  CDR3 for beta chain variable domain of TCR clone 79560 (TRBV28, TRBJ2-1)
CASTPIGRSPGLAGGNEQFF

SEQ ID NO: 159121 - protein, 13 aa, Homo sapiens
  CDR3 for alpha chain variable domain of TCR clone 79561 (TRAV13-1, TRAJ39)
CAASIGAGNMLTF

SEQ ID NO: 159122 - protein, 15 aa, Homo sapiens
  CDR3 for beta chain variable domain of TCR clone 79561 (TRBV7-9, TRBJ1-1)
CASSLLEQGGTEAFF

SEQ ID NO: 159123 - protein, 14 aa, Homo sapiens
  CDR3 for alpha chain variable domain of TCR clone 79562 (TRAV12-3, TRAJ6)
CAMSATGGSYKPTF

SEQ ID NO: 159124 - protein, 16 aa, Homo sapiens
  CDR3 for beta chain variable domain of TCR clone 79562 (TRBV4-2, TRBJ2-1)
CASSPRAGQGANEQFF

SEQ ID NO: 159125 - protein, 14 aa, Homo sapiens
  CDR3 for alpha chain variable domain of TCR clone 79563 (TRAV16, TRAJ37)
CALDISGNTGELIF

SEQ ID NO: 159126 - protein, 14 aa, Homo sapiens
  CDR3 for beta chain variable domain of TCR clone 79563 (TRBV7-6, TRBJ2-7)
CASSFRQGADEQYF

SEQ ID NO: 159127 - protein, 14 aa, Homo sapiens
  CDR3 for alpha chain variable domain of TCR clone 79564 (TRAV26-1, TRAJ21)
YIVRPPYNFNKFYF

SEQ ID NO: 159128 - protein, 14 aa, Homo sapiens
  CDR3 for beta chain variable domain of TCR clone 79564 (TRBV11-3, TRBJ2-1)
CASSATTSGSIQFF

SEQ ID NO: 159129 - protein, 23 aa, Homo sapiens
  CDR3 for alpha chain variable domain of TCR clone 79565 (TRAV12-2, TRAJ36)
SLLIRDSQPSDSATLERANNLFF

SEQ ID NO: 159130 - protein, 14 aa, Homo sapiens
  CDR3 for beta chain variable domain of TCR clone 79565 (TRBV6-1, TRBJ1-3)
CASVQGGGGNTIYF

SEQ ID NO: 159131 - protein, 12 aa, Homo sapiens
  CDR3 for alpha chain variable domain of TCR clone 79566 (TRAV13-2, TRAJ41)
CAKNIGRYALNF

SEQ ID NO: 159132 - protein, 12 aa, Homo sapiens
  CDR3 for beta chain variable domain of TCR clone 79566 (TRBV7-9, TRBJ1-1)
CASSLSGGAAFF

SEQ ID NO: 159133 - protein, 15 aa, Homo sapiens
  CDR3 for alpha chain variable domain of TCR clone 79567 (TRAV26-1, TRAJ40)
CIARVTTSGTYKYIF

SEQ ID NO: 159134 - protein, 12 aa, Homo sapiens
  CDR3 for beta chain variable domain of TCR clone 79567 (TRBV7-9, TRBJ1-4)
CASSTDREKLFF

SEQ ID NO: 159135 - protein, 13 aa, Homo sapiens
  CDR3 for alpha chain variable domain of TCR clone 79568 (TRAV12-2, TRAJ37)
CAGGSGNTGKLIF

SEQ ID NO: 159136 - protein, 17 aa, Homo sapiens
  CDR3 for beta chain variable domain of TCR clone 79568 (TRBV11-2, TRBJ2-1)
CASSLYPPGVEYNEQSF

SEQ ID NO: 159137 - protein, 16 aa, Homo sapiens
  CDR3 for alpha chain variable domain of TCR clone 79569 (TRAV2, TRAJ4)
CAVEDRFSGGYNKLIF

SEQ ID NO: 159138 - protein, 13 aa, Homo sapiens
  CDR3 for beta chain variable domain of TCR clone 79569 (TRBV7-7, TRBJ2-5)
RASSRSGQETQYF

SEQ ID NO: 159139 - protein, 15 aa, Homo sapiens
  CDR3 for alpha chain variable domain of TCR clone 79570 (TRAV13-1, TRAJ57)
QVPPLSQGGSEKLVF

SEQ ID NO: 159140 - protein, 16 aa, Homo sapiens
  CDR3 for beta chain variable domain of TCR clone 79570 (TRBV12-4, TRBJ1-5)
CASSRPVGGSNQPQHF

SEQ ID NO: 159141 - protein, 15 aa, Homo sapiens
  CDR3 for alpha chain variable domain of TCR clone 79571 (TRAV23/DV6, TRAJ13)
CAAWPGGGGYQKVTF

SEQ ID NO: 159142 - protein, 12 aa, Homo sapiens
  CDR3 for beta chain variable domain of TCR clone 79571 (TRBV12-5, TRBJ2-5)
CASGQGVETQYF

SEQ ID NO: 159143 - protein, 15 aa, Homo sapiens
  CDR3 for alpha chain variable domain of TCR clone 79572 (TRAV21, TRAJ24)
CAARSSTDSWGKLQF

SEQ ID NO: 159144 - protein, 13 aa, Homo sapiens
  CDR3 for beta chain variable domain of TCR clone 79572 (TRBV12-4, TRBJ2-2)
CASSITGSGELFF

SEQ ID NO: 159145 - protein, 16 aa, Homo sapiens
  CDR3 for alpha chain variable domain of TCR clone 79573 (TRAV3, TRAJ3)
CAVRDRAKSSASKIIF

SEQ ID NO: 159146 - protein, 16 aa, Homo sapiens
  CDR3 for beta chain variable domain of TCR clone 79573 (TRBV20-1, TRBJ2-4)
CSATALAELAKNIQYF

SEQ ID NO: 159147 - protein, 13 aa, Homo sapiens
  CDR3 for alpha chain variable domain of TCR clone 79574 (TRAV1-2, TRAJ9)
CAALNTGGFKTIF

SEQ ID NO: 159148 - protein, 14 aa, Homo sapiens
  CDR3 for beta chain variable domain of TCR clone 79574 (TRBV13, TRBJ2-3)
CASSSGSPTDTQYV

SEQ ID NO: 159149 - protein, 11 aa, Homo sapiens
  CDR3 for alpha chain variable domain of TCR clone 79575 (TRAV1-1, TRAJ23)
CAVPQGGKLIF

SEQ ID NO: 159150 - protein, 20 aa, Homo sapiens
  CDR3 for beta chain variable domain of TCR clone 79575 (TRBV7-8, TRBJ2-2)
CASSHLFPGPTIHITGELFF

SEQ ID NO: 159151 - protein, 12 aa, Homo sapiens
  CDR3 for alpha chain variable domain of TCR clone 79576 (TRAV12-1, TRAJ40)
CVFYSGTYKYIF

SEQ ID NO: 159152 - protein, 12 aa, Homo sapiens
  CDR3 for beta chain variable domain of TCR clone 79576 (TRBV11-2, TRBJ2-2)
CASSLPTGELFF

SEQ ID NO: 159153 - protein, 13 aa, Homo sapiens
  CDR3 for alpha chain variable domain of TCR clone 79577 (TRAV12-3, TRAJ13)
CAMSSGGYQKVTF

SEQ ID NO: 159154 - protein, 11 aa, Homo sapiens
  CDR3 for beta chain variable domain of TCR clone 79577 (TRBV20-1, TRBJ2-1)
CSARARKEQFF

SEQ ID NO: 159155 - protein, 16 aa, Homo sapiens
  CDR3 for alpha chain variable domain of TCR clone 79578 (TRAV35, TRAJ28)
CAGQRYSGAGSYQLTF

SEQ ID NO: 159156 - protein, 13 aa, Homo sapiens
  CDR3 for beta chain variable domain of TCR clone 79578 (TRBV18, TRBJ2-7)
CQLTERGAYEQYF

SEQ ID NO: 159157 - protein, 14 aa, Homo sapiens
  CDR3 for alpha chain variable domain of TCR clone 79579 (TRAV12-3, TRAJ33)
CAMSVPGSNYQLIW

SEQ ID NO: 159158 - protein, 12 aa, Homo sapiens
  CDR3 for beta chain variable domain of TCR clone 79579 (TRBV12-4, TRBJ2-7)
CASSLGGYEQYF

SEQ ID NO: 159159 - protein, 12 aa, Homo sapiens
  CDR3 for alpha chain variable domain of TCR clone 79580 (TRAV8-3, TRAJ26)
CAGDYYGQNFAF

SEQ ID NO: 159160 - protein, 15 aa, Homo sapiens
  CDR3 for beta chain variable domain of TCR clone 79580 (TRBV9, TRBJ2-1)
CASSLAGSSYNEQFF

SEQ ID NO: 159161 - protein, 12 aa, Homo sapiens
  CDR3 for alpha chain variable domain of TCR clone 79581 (TRAV16, TRAJ22)
CALEVSARQLTF

SEQ ID NO: 159162 - protein, 14 aa, Homo sapiens
  CDR3 for beta chain variable domain of TCR clone 79581 (TRBV11-2, TRBJ2-3)
CASSSIASTDTRYF

SEQ ID NO: 159163 - protein, 15 aa, Homo sapiens
  CDR3 for alpha chain variable domain of TCR clone 79582 (TRAV26-1, TRAJ44)
CIVRANTGTASKLTF

SEQ ID NO: 159164 - protein, 13 aa, Homo sapiens
  CDR3 for beta chain variable domain of TCR clone 79582 (TRBV7-9, TRBJ1-2)
CASSLKQNYGYTF

SEQ ID NO: 159165 - protein, 14 aa, Homo sapiens
  CDR3 for alpha chain variable domain of TCR clone 79583 (TRAV13-1, TRAJ35)
CAASKGGFGNVLHC

SEQ ID NO: 159166 - protein, 13 aa, Homo sapiens
  CDR3 for beta chain variable domain of TCR clone 79583 (TRBV7-3, TRBJ1-1)
CASSQDWGAEALF

SEQ ID NO: 159167 - protein, 12 aa, Homo sapiens
  CDR3 for alpha chain variable domain of TCR clone 79584 (TRAV8-3, TRAJ43)
CAVGAGNNDMRF

SEQ ID NO: 159168 - protein, 14 aa, Homo sapiens
  CDR3 for beta chain variable domain of TCR clone 79584 (TRBV4-3, TRBJ1-5)
CASSRDRGNQPQHF

SEQ ID NO: 159169 - protein, 14 aa, Homo sapiens
  CDR3 for alpha chain variable domain of TCR clone 79585 (TRAV26-1, TRAJ21)
CIVRHPYNFNKFYF

SEQ ID NO: 159170 - protein, 14 aa, Homo sapiens
  CDR3 for beta chain variable domain of TCR clone 79585 (TRBV11-3, TRBJ2-1)
CASSATTSGSIQFF

SEQ ID NO: 159171 - protein, 17 aa, Homo sapiens
  CDR3 for alpha chain variable domain of TCR clone 79586 (TRAV35, TRAJ28)
CAGLQVYSGAGGYQLTF

SEQ ID NO: 159172 - protein, 15 aa, Homo sapiens
  CDR3 for beta chain variable domain of TCR clone 79586 (TRBV2, TRBJ1-2)
CASSEIGGANYGYTF

SEQ ID NO: 159173 - protein, 14 aa, Homo sapiens
  CDR3 for alpha chain variable domain of TCR clone 79587 (TRAV1-2, TRAJ16)
CAVNRFSYGQKLLF

SEQ ID NO: 159174 - protein, 13 aa, Homo sapiens
  CDR3 for beta chain variable domain of TCR clone 79587 (TRBV7-9, TRBJ2-3)
CASSPGSTDTQYF

SEQ ID NO: 159175 - protein, 12 aa, Homo sapiens
  CDR3 for alpha chain variable domain of TCR clone 79588 (TRAV12-3, TRAJ3)
CATDSSASKIIF

SEQ ID NO: 159176 - protein, 17 aa, Homo sapiens
  CDR3 for beta chain variable domain of TCR clone 79588 (TRBV7-9, TRBJ2-3)
CASSLEEAGAYPDTQYF

SEQ ID NO: 159177 - protein, 13 aa, Homo sapiens
  CDR3 for alpha chain variable domain of TCR clone 79589 (TRAV12-3, TRAJ48)
CAMSLVGNEKLTF

SEQ ID NO: 159178 - protein, 14 aa, Homo sapiens
  CDR3 for beta chain variable domain of TCR clone 79589 (TRBV11-2, TRBJ2-3)
CASSRLARTDTQYF

SEQ ID NO: 159179 - protein, 16 aa, Homo sapiens
  CDR3 for alpha chain variable domain of TCR clone 79590 (TRAV3, TRAJ10)
CAVRDMRAGGGNKLTF

SEQ ID NO: 159180 - protein, 12 aa, Homo sapiens
  CDR3 for beta chain variable domain of TCR clone 79590 (TRBV11-2, TRBJ2-2)
CASSLTTGELFF

SEQ ID NO: 159181 - protein, 12 aa, Homo sapiens
  CDR3 for alpha chain variable domain of TCR clone 79591 (TRAV29/DV5, TRAJ49)
CAATDTGNQFYF

SEQ ID NO: 159182 - protein, 13 aa, Homo sapiens
  CDR3 for beta chain variable domain of TCR clone 79591 (TRBV6-6, TRBJ2-7)
CASSPKHLAEQYF

SEQ ID NO: 159183 - protein, 12 aa, Homo sapiens
  CDR3 for alpha chain variable domain of TCR clone 79592 (TRAV16, TRAJ13)
CITLRGYQKVTF

SEQ ID NO: 159184 - protein, 17 aa, Homo sapiens
  CDR3 for beta chain variable domain of TCR clone 79592 (TRBV28, TRBJ2-5)
CASSGQGGLAGAETQYF

SEQ ID NO: 159185 - protein, 11 aa, Homo sapiens
  CDR3 for alpha chain variable domain of TCR clone 79593 (TRAV1-2, TRAJ20)
CAVANDYKRSF

SEQ ID NO: 159186 - protein, 18 aa, Homo sapiens
  CDR3 for beta chain variable domain of TCR clone 79593 (TRBV20-1, TRBJ2-6)
CSAETTPTHGSGANVLTF

SEQ ID NO: 159187 - protein, 11 aa, Homo sapiens
  CDR3 for alpha chain variable domain of TCR clone 79594 (TRAV12-3, TRAJ43)
CAMSVSNDMRF

SEQ ID NO: 159188 - protein, 16 aa, Homo sapiens
  CDR3 for beta chain variable domain of TCR clone 79594 (TRBV20-1, TRBJ2-1)
CGARDSLGAVYNEQFF

SEQ ID NO: 159189 - protein, 13 aa, Homo sapiens
  CDR3 for alpha chain variable domain of TCR clone 79595 (TRAV8-3, TRAJ4)
WVFYYGGYNKLIF

SEQ ID NO: 159190 - protein, 16 aa, Homo sapiens
  CDR3 for beta chain variable domain of TCR clone 79595 (TRBV7-8, TRBJ2-3)
CASSTEGQRETDTQYF

SEQ ID NO: 159191 - protein, 13 aa, Homo sapiens
  CDR3 for alpha chain variable domain of TCR clone 79596 (TRAV13-2, TRAJ13)
CAGRPGGYQKVTF

SEQ ID NO: 159192 - protein, 14 aa, Homo sapiens
  CDR3 for beta chain variable domain of TCR clone 79596 (TRBV23-1, TRBJ2-5)
CASSFLRSQETQYF

SEQ ID NO: 159193 - protein, 13 aa, Homo sapiens
  CDR3 for alpha chain variable domain of TCR clone 79597 (TRAV8-1, TRAJ30)
CAVIMNRDDKIIF

SEQ ID NO: 159194 - protein, 14 aa, Homo sapiens
  CDR3 for beta chain variable domain of TCR clone 79597 (TRBV7-2, TRBJ1-6)
CASSLQGANSPPHF

SEQ ID NO: 159195 - protein, 12 aa, Homo sapiens
  CDR3 for alpha chain variable domain of TCR clone 79598 (TRAV2, TRAJ31)
CAVEDNNARLMF

SEQ ID NO: 159196 - protein, 16 aa, Homo sapiens
  CDR3 for beta chain variable domain of TCR clone 79598 (TRBV10-3, TRBJ2-1)
FAISGVGDGGGGEQFF

SEQ ID NO: 159197 - protein, 14 aa, Homo sapiens
  CDR3 for alpha chain variable domain of TCR clone 79599 (TRAV12-2, TRAJ52)
CAVPGGTSYGRLTF

SEQ ID NO: 159198 - protein, 12 aa, Homo sapiens
  CDR3 for beta chain variable domain of TCR clone 79599 (TRBV18, TRBJ2-1)
CASSPGTSEGFF

SEQ ID NO: 159199 - protein, 14 aa, Homo sapiens
  CDR3 for alpha chain variable domain of TCR clone 79600 (TRAV12-2, TRAJ13)
CAVKKTGGYQKVTF

SEQ ID NO: 159200 - protein, 16 aa, Homo sapiens
  CDR3 for beta chain variable domain of TCR clone 79600 (TRBV5-1, TRBJ2-2)
CASSLWDTTNTGELFF

SEQ ID NO: 159201 - protein, 11 aa, Homo sapiens
  CDR3 for alpha chain variable domain of TCR clone 79601 (TRAV12-1, TRAJ34)
CVVNKGRELIF

SEQ ID NO: 159202 - protein, 15 aa, Homo sapiens
  CDR3 for beta chain variable domain of TCR clone 79601 (TRBV7-9, TRBJ1-4)
CASSARTGGNEKLFF

SEQ ID NO: 159203 - protein, 19 aa, Homo sapiens
  CDR3 for alpha chain variable domain of TCR clone 79602 (TRAV29/DV5, TRAJ49)
CSVLLCGKLTVDTGNQFYF

SEQ ID NO: 159204 - protein, 17 aa, Homo sapiens
  CDR3 for beta chain variable domain of TCR clone 79602 (TRBV13, TRBJ2-3)
CASSLSRVAGGRNTQYF

SEQ ID NO: 159205 - protein, 12 aa, Homo sapiens
  CDR3 for alpha chain variable domain of TCR clone 79603 (TRAV29/DV5, TRAJ43)
CAAPYNNNDMRF

SEQ ID NO: 159206 - protein, 14 aa, Homo sapiens
  CDR3 for beta chain variable domain of TCR clone 79603 (TRBV23-1, TRBJ2-6)
CASSQTNPGHMGFW

SEQ ID NO: 159207 - protein, 14 aa, Homo sapiens
  CDR3 for alpha chain variable domain of TCR clone 79604 (TRAV1-2, TRAJ16)
CAVNRFSDGQKLLF

SEQ ID NO: 159208 - protein, 13 aa, Homo sapiens
  CDR3 for beta chain variable domain of TCR clone 79604 (TRBV19, TRBJ1-4)
CASGQTMGEKLFF

SEQ ID NO: 159209 - protein, 17 aa, Homo sapiens
  CDR3 for alpha chain variable domain of TCR clone 79605 (TRAV3, TRAJ38)
CAVRYCLNAGNNRKLIW

SEQ ID NO: 159210 - protein, 14 aa, Homo sapiens
  CDR3 for beta chain variable domain of TCR clone 79605 (TRBV5-5, TRBJ1-5)
CASSGQGVDQPQHF

SEQ ID NO: 159211 - protein, 12 aa, Homo sapiens
  CDR3 for alpha chain variable domain of TCR clone 79606 (TRAV17, TRAJ39)
CATGAAGNMLTF

SEQ ID NO: 159212 - protein, 14 aa, Homo sapiens
  CDR3 for beta chain variable domain of TCR clone 79606 (TRBV7-9, TRBJ1-2)
CASSRQDANYGYTF

SEQ ID NO: 159213 - protein, 13 aa, Homo sapiens
  CDR3 for alpha chain variable domain of TCR clone 79607 (TRAV8-3, TRAJ28)
CAVGAVGSYQHTF

SEQ ID NO: 159214 - protein, 14 aa, Homo sapiens
  CDR3 for beta chain variable domain of TCR clone 79607 (TRBV7-2, TRBJ2-7)
CASRSQGAAYEQYF

SEQ ID NO: 159215 - protein, 14 aa, Homo sapiens
  CDR3 for alpha chain variable domain of TCR clone 79608 (TRAV1-2, TRAJ8)
CAVREDTGFQKLVF

SEQ ID NO: 159216 - protein, 12 aa, Homo sapiens
  CDR3 for beta chain variable domain of TCR clone 79608 (TRBV19, TRBJ2-1)
CASSRQGAEQFF

SEQ ID NO: 159217 - protein, 16 aa, Homo sapiens
  CDR3 for alpha chain variable domain of TCR clone 79609 (TRAV12-2, TRAJ18)
CAVTTDRGSTLGRLYF

SEQ ID NO: 159218 - protein, 14 aa, Homo sapiens
  CDR3 for beta chain variable domain of TCR clone 79609 (TRBV4-2, TRBJ1-5)
CASSQDSINQPQHF

SEQ ID NO: 159219 - protein, 15 aa, Homo sapiens
  CDR3 for alpha chain variable domain of TCR clone 79610 (TRAV3, TRAJ3)
CAVRDRDSSASKIIF

SEQ ID NO: 159220 - protein, 18 aa, Homo sapiens
  CDR3 for beta chain variable domain of TCR clone 79610 (TRBV25-1, TRBJ1-2)
CASRGLQNGQGLIFGYTF

SEQ ID NO: 159221 - protein, 12 aa, Homo sapiens
  CDR3 for alpha chain variable domain of TCR clone 79611 (TRAV16, TRAJ10)
CSRTGGGNKLTF

SEQ ID NO: 159222 - protein, 18 aa, Homo sapiens
  CDR3 for beta chain variable domain of TCR clone 79611 (TRBV7-2, TRBJ2-3)
CASSLKREGSGITDTQYF

SEQ ID NO: 159223 - protein, 15 aa, Homo sapiens
  CDR3 for alpha chain variable domain of TCR clone 79612 (TRAV3, TRAJ29)
CAVRDINSGNKPLVF

SEQ ID NO: 159224 - protein, 16 aa, Homo sapiens
  CDR3 for beta chain variable domain of TCR clone 79612 (TRBV4-1, TRBJ2-5)
CASSQTFYGDQETQYF

SEQ ID NO: 159225 - protein, 13 aa, Homo sapiens
  CDR3 for alpha chain variable domain of TCR clone 79613 (TRAV4, TRAJ15)
CLVGPEAGTALIS

SEQ ID NO: 159226 - protein, 15 aa, Homo sapiens
  CDR3 for beta chain variable domain of TCR clone 79613 (TRBV7-2, TRBJ2-1)
CASSFDPGRRNEQFF

SEQ ID NO: 159227 - protein, 14 aa, Homo sapiens
  CDR3 for alpha chain variable domain of TCR clone 79614 (TRAV12-3, TRAJ13)
CAMKNSGGCQKVTF

SEQ ID NO: 159228 - protein, 13 aa, Homo sapiens
  CDR3 for beta chain variable domain of TCR clone 79614 (TRBV29-1, TRBJ2-5)
CSARDRVEETQYF

SEQ ID NO: 159229 - protein, 19 aa, Homo sapiens
  CDR3 for alpha chain variable domain of TCR clone 79615 (TRAV26-1, TRAJ52)
CIVRAHRNAGGTSYGNLTF

SEQ ID NO: 159230 - protein, 15 aa, Homo sapiens
  CDR3 for beta chain variable domain of TCR clone 79615 (TRBV12-4, TRBJ2-5)
CASSPPTGLQETQYF

SEQ ID NO: 159231 - protein, 12 aa, Homo sapiens
  CDR3 for alpha chain variable domain of TCR clone 79616 (TRAV35, TRAJ49)
CAGWNTGNQFYF

SEQ ID NO: 159232 - protein, 16 aa, Homo sapiens
  CDR3 for beta chain variable domain of TCR clone 79616 (TRBV5-1, TRBJ2-2)
CARSLWDTTNTGELFF

SEQ ID NO: 159233 - protein, 15 aa, Homo sapiens
  CDR3 for alpha chain variable domain of TCR clone 79617 (TRAV3, TRAJ5)
CAVRDLDTGRRALTF

SEQ ID NO: 159234 - protein, 14 aa, Homo sapiens
  CDR3 for beta chain variable domain of TCR clone 79617 (TRBV5-1, TRBJ1-1)
CASSLQGASTEAFF

SEQ ID NO: 159235 - protein, 10 aa, Homo sapiens
  CDR3 for alpha chain variable domain of TCR clone 79618 (TRAV30, TRAJ48)
CGIGIEKLTF

SEQ ID NO: 159236 - protein, 14 aa, Homo sapiens
  CDR3 for beta chain variable domain of TCR clone 79618 (TRBV7-6, TRBJ2-3)
CASSVAGGTDTQYF

SEQ ID NO: 159237 - protein, 13 aa, Homo sapiens
  CDR3 for alpha chain variable domain of TCR clone 79619 (TRAV3, TRAJ20)
CAVRDTPRYKLSF

SEQ ID NO: 159238 - protein, 15 aa, Homo sapiens
  CDR3 for beta chain variable domain of TCR clone 79619 (TRBV18, TRBJ2-7)
CASSPRSGTAYEQYF

SEQ ID NO: 159239 - protein, 14 aa, Homo sapiens
  CDR3 for alpha chain variable domain of TCR clone 79620 (TRAV2, TRAJ9)
CAVEDRSGGFKTIF

SEQ ID NO: 159240 - protein, 17 aa, Homo sapiens
  CDR3 for beta chain variable domain of TCR clone 79620 (TRBV7-8, TRBJ2-6)
CASSAGTGGAGANVMTF

SEQ ID NO: 159241 - protein, 12 aa, Homo sapiens
  CDR3 for alpha chain variable domain of TCR clone 79621 (TRAV13-1, TRAJ21)
CAAKEGFNKFYF

SEQ ID NO: 159242 - protein, 13 aa, Homo sapiens
  CDR3 for beta chain variable domain of TCR clone 79621 (TRBV4-1, TRBJ2-7)
CASSQGQAYEQYF

SEQ ID NO: 159243 - protein, 15 aa, Homo sapiens
  CDR3 for alpha chain variable domain of TCR clone 79622 (TRAV38-2/DV8, TRAJ48)
CAYRSGGFGNEKLTF

SEQ ID NO: 159244 - protein, 16 aa, Homo sapiens
  CDR3 for beta chain variable domain of TCR clone 79622 (TRBV28, TRBJ2-7)
CASSTWVATGDLSQYF

SEQ ID NO: 159245 - protein, 16 aa, Homo sapiens
  CDR3 for alpha chain variable domain of TCR clone 79623 (TRAV26-1, TRAJ23)
CIVRVHPYNQGGKLIF

SEQ ID NO: 159246 - protein, 18 aa, Homo sapiens
  CDR3 for beta chain variable domain of TCR clone 79623 (TRBV7-9, TRBJ2-7)
CASSLTTSGSRTWYEQYF

SEQ ID NO: 159247 - protein, 14 aa, Homo sapiens
  CDR3 for alpha chain variable domain of TCR clone 79624 (TRAV23/DV6, TRAJ8)
CAASKATGFQKLVL

SEQ ID NO: 159248 - protein, 15 aa, Homo sapiens
  CDR3 for beta chain variable domain of TCR clone 79624 (TRBV28, TRBJ2-3)
CASSPDRQGANTQYF

SEQ ID NO: 159249 - protein, 14 aa, Homo sapiens
  CDR3 for alpha chain variable domain of TCR clone 79625 (TRAV16, TRAJ33)
CALSAVDSNYQLIW

SEQ ID NO: 159250 - protein, 15 aa, Homo sapiens
  CDR3 for beta chain variable domain of TCR clone 79625 (TRBV28, TRBJ2-7)
CASSLEAYPIYEQYF

SEQ ID NO: 159251 - protein, 15 aa, Homo sapiens
  CDR3 for alpha chain variable domain of TCR clone 79626 (TRAV21, TRAJ10)
CAVPLLTGGGNKLTF

SEQ ID NO: 159252 - protein, 14 aa, Homo sapiens
  CDR3 for beta chain variable domain of TCR clone 79626 (TRBV12-4, TRBJ1-1)
CASSLGTGGTEALF

SEQ ID NO: 159253 - protein, 14 aa, Homo sapiens
  CDR3 for alpha chain variable domain of TCR clone 79627 (TRAV26-1, TRAJ44)
CIVSNTGTASKLTF

SEQ ID NO: 159254 - protein, 11 aa, Homo sapiens
  CDR3 for beta chain variable domain of TCR clone 79627 (TRBV19, TRBJ2-7)
CASGILGEQYF

SEQ ID NO: 159255 - protein, 13 aa, Homo sapiens
  CDR3 for alpha chain variable domain of TCR clone 79628 (TRAV13-2, TRAJ48)
CAEMDFGNEKLTF

SEQ ID NO: 159256 - protein, 15 aa, Homo sapiens
  CDR3 for beta chain variable domain of TCR clone 79628 (TRBV7-9, TRBJ1-6)
CASSSQGRGNSPLHF

SEQ ID NO: 159257 - protein, 10 aa, Homo sapiens
  CDR3 for alpha chain variable domain of TCR clone 79629 (TRAV29/DV5, TRAJ22)
CIVSLNFFWF

SEQ ID NO: 159258 - protein, 15 aa, Homo sapiens
  CDR3 for beta chain variable domain of TCR clone 79629 (TRBV4-2, TRBJ1-2)
CASSQRTGGRDGYTF

SEQ ID NO: 159259 - protein, 11 aa, Homo sapiens
  CDR3 for alpha chain variable domain of TCR clone 79630 (TRAV2, TRAJ33)
CAVDSNYQLIW

SEQ ID NO: 159260 - protein, 14 aa, Homo sapiens
  CDR3 for beta chain variable domain of TCR clone 79630 (TRBV11-2, TRBJ2-3)
FASSRLARTDTQYF

SEQ ID NO: 159261 - protein, 13 aa, Homo sapiens
  CDR3 for alpha chain variable domain of TCR clone 79631 (TRAV12-3, TRAJ13)
CAMTSGGYQQVTF

SEQ ID NO: 159262 - protein, 13 aa, Homo sapiens
  CDR3 for beta chain variable domain of TCR clone 79631 (TRBV20-1, TRBJ2-2)
CSALSGGAGELFF

SEQ ID NO: 159263 - protein, 14 aa, Homo sapiens
  CDR3 for alpha chain variable domain of TCR clone 79632 (TRAV1-2, TRAJ16)
CAVNRFSDGQKLLF

SEQ ID NO: 159264 - protein, 16 aa, Homo sapiens
  CDR3 for beta chain variable domain of TCR clone 79632 (TRBV20-1, TRBJ2-7)
CSASTSGRLSSYEQYF

SEQ ID NO: 159265 - protein, 13 aa, Homo sapiens
  CDR3 for alpha chain variable domain of TCR clone 79633 (TRAV12-1, TRAJ40)
CVVNSSGTYKYIL

SEQ ID NO: 159266 - protein, 14 aa, Homo sapiens
  CDR3 for beta chain variable domain of TCR clone 79633 (TRBV2, TRBJ1-6)
CACEVSSYNSPLHF

SEQ ID NO: 159267 - protein, 16 aa, Homo sapiens
  CDR3 for alpha chain variable domain of TCR clone 79634 (TRAV4, TRAJ5)
CLVGPEHGHGQESTYF

SEQ ID NO: 159268 - protein, 15 aa, Homo sapiens
  CDR3 for beta chain variable domain of TCR clone 79634 (TRBV27, TRBJ2-5)
CASSLIPSGGETQYF

SEQ ID NO: 159269 - protein, 16 aa, Homo sapiens
  CDR3 for alpha chain variable domain of TCR clone 79635 (TRAV30, TRAJ24)
CGTEILDADSWGKFQF

SEQ ID NO: 159270 - protein, 18 aa, Homo sapiens
  CDR3 for beta chain variable domain of TCR clone 79635 (TRBV7-9, TRBJ2-7)
CASSLTTSGSRTWYEQYF

SEQ ID NO: 159271 - protein, 12 aa, Homo sapiens
  CDR3 for alpha chain variable domain of TCR clone 79636 (TRAV13-1, TRAJ53)
AASGGSNYKLTF

SEQ ID NO: 159272 - protein, 15 aa, Homo sapiens
  CDR3 for beta chain variable domain of TCR clone 79636 (TRBV5-1, TRBJ2-1)
CVSSPPRAPYNEQFF

SEQ ID NO: 159273 - protein, 12 aa, Homo sapiens
  CDR3 for alpha chain variable domain of TCR clone 79637 (TRAV17, TRAJ12)
CATLRSSYKLIF

SEQ ID NO: 159274 - protein, 17 aa, Homo sapiens
  CDR3 for beta chain variable domain of TCR clone 79637 (TRBV4-3, TRBJ2-2)
CASSQDTSARSPGELFF

SEQ ID NO: 159275 - protein, 16 aa, Homo sapiens
  CDR3 for alpha chain variable domain of TCR clone 79638 (TRAV12-2, TRAJ18)
CAVTTDRGSTLGRLYL

SEQ ID NO: 159276 - protein, 13 aa, Homo sapiens
  CDR3 for beta chain variable domain of TCR clone 79638 (TRBV19, TRBJ2-3)
CATWDKITDTQYF

SEQ ID NO: 159277 - protein, 12 aa, Homo sapiens
  CDR3 for alpha chain variable domain of TCR clone 79639 (TRAV26-1, TRAJ36)
CIVRARADNLFF

SEQ ID NO: 159278 - protein, 13 aa, Homo sapiens
  CDR3 for beta chain variable domain of TCR clone 79639 (TRBV11-2, TRBJ2-5)
CASSRGPSETQYF

SEQ ID NO: 159279 - protein, 11 aa, Homo sapiens
  CDR3 for alpha chain variable domain of TCR clone 79640 (TRAV13-1, TRAJ39)
CASHAGNMLTF

SEQ ID NO: 159280 - protein, 16 aa, Homo sapiens
  CDR3 for beta chain variable domain of TCR clone 79640 (TRBV5-1, TRBJ1-1)
CASSSGGNSLNTEAFF

SEQ ID NO: 159281 - protein, 12 aa, Homo sapiens
  CDR3 for alpha chain variable domain of TCR clone 79641 (TRAV16, TRAJ26)
CALRSYGQDFVF

SEQ ID NO: 159282 - protein, 14 aa, Homo sapiens
  CDR3 for beta chain variable domain of TCR clone 79641 (TRBV10-3, TRBJ2-1)
CAISSDLAYNEQFF

SEQ ID NO: 159283 - protein, 16 aa, Homo sapiens
  CDR3 for alpha chain variable domain of TCR clone 79642 (TRAV30, TRAJ24)
CGTEIVDADSWGKFQF

SEQ ID NO: 159284 - protein, 16 aa, Homo sapiens
  CDR3 for beta chain variable domain of TCR clone 79642 (TRBV4-3, TRBJ2-2)
CASSHLQGSGTGELFF

SEQ ID NO: 159285 - protein, 13 aa, Homo sapiens
  CDR3 for alpha chain variable domain of TCR clone 79643 (TRAV8-1, TRAJ34)
CAVRPYNTDKLIF

SEQ ID NO: 159286 - protein, 15 aa, Homo sapiens
  CDR3 for beta chain variable domain of TCR clone 79643 (TRBV7-9, TRBJ1-3)
CAGSLRSGSGNTIYF

SEQ ID NO: 159287 - protein, 13 aa, Homo sapiens
  CDR3 for alpha chain variable domain of TCR clone 79644 (TRAV3, TRAJ27)
CAVRPLGAGKSTF

SEQ ID NO: 159288 - protein, 15 aa, Homo sapiens
  CDR3 for beta chain variable domain of TCR clone 79644 (TRBV9, TRBJ1-6)
CASSVAGTGDSTLHF

SEQ ID NO: 159289 - protein, 16 aa, Homo sapiens
  CDR3 for alpha chain variable domain of TCR clone 79645 (TRAV3, TRAJ10)
CAVRDMGAGGGNKLTF

SEQ ID NO: 159290 - protein, 20 aa, Homo sapiens
  CDR3 for beta chain variable domain of TCR clone 79645 (TRBV28, TRBJ2-1)
CASTPIGRSPGLAGGNEQFF

SEQ ID NO: 159291 - protein, 14 aa, Homo sapiens
  CDR3 for alpha chain variable domain of TCR clone 79646 (TRAV29/DV5, TRAJ49)
CAASLSNTGNQFYF

SEQ ID NO: 159292 - protein, 13 aa, Homo sapiens
  CDR3 for beta chain variable domain of TCR clone 79646 (TRBV5-4, TRBJ2-5)
CASSPVSQETQYF

SEQ ID NO: 159293 - protein, 16 aa, Homo sapiens
  CDR3 for alpha chain variable domain of TCR clone 79647 (TRAV26-1, TRAJ53)
CIVRVAMGGSNYKLTF

SEQ ID NO: 159294 - protein, 18 aa, Homo sapiens
  CDR3 for beta chain variable domain of TCR clone 79647 (TRBV11-2, TRBJ2-3)
CASSLGGASRGAPNTQYF

SEQ ID NO: 159295 - protein, 15 aa, Homo sapiens
  CDR3 for alpha chain variable domain of TCR clone 79648 (TRAV8-4, TRAJ12)
CAVSDRGDSSYKLIF

SEQ ID NO: 159296 - protein, 15 aa, Homo sapiens
  CDR3 for beta chain variable domain of TCR clone 79648 (TRBV11-3, TRBJ2-1)
CASSLAGQTYNEQFF

SEQ ID NO: 159297 - protein, 15 aa, Homo sapiens
  CDR3 for alpha chain variable domain of TCR clone 79649 (TRAV4, TRAJ39)
CLVGPNNNAGNMLTF

SEQ ID NO: 159298 - protein, 14 aa, Homo sapiens
  CDR3 for beta chain variable domain of TCR clone 79649 (TRBV11-2, TRBJ2-5)
CASSRTGGIETKYF

SEQ ID NO: 159299 - protein, 13 aa, Homo sapiens
  CDR3 for alpha chain variable domain of TCR clone 79650 (TRAV27, TRAJ41)
CAGEGNSGHALNF

SEQ ID NO: 159300 - protein, 14 aa, Homo sapiens
  CDR3 for beta chain variable domain of TCR clone 79650 (TRBV25-1, TRBJ1-1)
CASTHLGGNTEAFF

SEQ ID NO: 159301 - protein, 13 aa, Homo sapiens
  CDR3 for alpha chain variable domain of TCR clone 79651 (TRAV36/DV7, TRAJ38)
CAANAGNNRKLIW

SEQ ID NO: 159302 - protein, 14 aa, Homo sapiens
  CDR3 for beta chain variable domain of TCR clone 79651 (TRBV7-2, TRBJ2-7)
CASSLRWEVNEQYF

SEQ ID NO: 159303 - protein, 17 aa, Homo sapiens
  CDR3 for alpha chain variable domain of TCR clone 79652 (TRAV8-2, )
CVVNIQDPDPAVYQLRD

SEQ ID NO: 159304 - protein, 14 aa, Homo sapiens
  CDR3 for beta chain variable domain of TCR clone 79652 (TRBV7-9, TRBJ2-5)
CASSLVGGEETQYF

SEQ ID NO: 159305 - protein, 14 aa, Homo sapiens
  CDR3 for alpha chain variable domain of TCR clone 79653 (TRAV9-2, TRAJ39)
CALYIYNAGNMLTF

SEQ ID NO: 159306 - protein, 16 aa, Homo sapiens
  CDR3 for beta chain variable domain of TCR clone 79653 (TRBV4-3, TRBJ2-1)
CASSPALDRGVNEQFF

SEQ ID NO: 159307 - protein, 13 aa, Homo sapiens
  CDR3 for alpha chain variable domain of TCR clone 79654 (TRAV24, TRAJ42)
CAFSTGSQGNLIF

SEQ ID NO: 159308 - protein, 14 aa, Homo sapiens
  CDR3 for beta chain variable domain of TCR clone 79654 (TRBV20-1, TRBJ2-3)
CRAYSGGRTDTQYF

SEQ ID NO: 159309 - protein, 13 aa, Homo sapiens
  CDR3 for alpha chain variable domain of TCR clone 79655 (TRAV16, TRAJ26)
CITVLFLGQNFVF

SEQ ID NO: 159310 - protein, 12 aa, Homo sapiens
  CDR3 for beta chain variable domain of TCR clone 79655 (TRBV11-2, TRBJ2-1)
CASSPGNNEQFF

SEQ ID NO: 159311 - protein, 13 aa, Homo sapiens
  CDR3 for alpha chain variable domain of TCR clone 79656 (TRAV21, TRAJ27)
CAALNTNAGKSTF

SEQ ID NO: 159312 - protein, 14 aa, Homo sapiens
  CDR3 for beta chain variable domain of TCR clone 79656 (TRBV7-3, TRBJ1-1)
CASSLGTGYTEAFF

SEQ ID NO: 159313 - protein, 14 aa, Homo sapiens
  CDR3 for alpha chain variable domain of TCR clone 79657 (TRAV35, TRAJ22)
CAGLRPGSERQLTF

SEQ ID NO: 159314 - protein, 15 aa, Homo sapiens
  CDR3 for beta chain variable domain of TCR clone 79657 (TRBV12-4, TRBJ2-5)
CASSPPTGLQETQYF

SEQ ID NO: 159315 - protein, 15 aa, Homo sapiens
  CDR3 for alpha chain variable domain of TCR clone 79658 (TRAV38-1, TRAJ37)
CAFIHGSGNTGKLIF

SEQ ID NO: 159316 - protein, 14 aa, Homo sapiens
  CDR3 for beta chain variable domain of TCR clone 79658 (TRBV29-1, TRBJ2-5)
CSVETSGSVETQYF

SEQ ID NO: 159317 - protein, 11 aa, Homo sapiens
  CDR3 for alpha chain variable domain of TCR clone 79659 (TRAV13-1, TRAJ52)
PGVTSYGKLTF

SEQ ID NO: 159318 - protein, 16 aa, Homo sapiens
  CDR3 for beta chain variable domain of TCR clone 79659 (TRBV28, TRBJ2-7)
CASSPWVATGDLSQYF

SEQ ID NO: 159319 - protein, 13 aa, Homo sapiens
  CDR3 for alpha chain variable domain of TCR clone 79660 (TRAV12-2, TRAJ20)
CAVYPSNDYKLSF

SEQ ID NO: 159320 - protein, 15 aa, Homo sapiens
  CDR3 for beta chain variable domain of TCR clone 79660 (TRBV27, TRBJ2-5)
CASSLYQRGGETQYF

SEQ ID NO: 159321 - protein, 14 aa, Homo sapiens
  CDR3 for alpha chain variable domain of TCR clone 79661 (TRAV1-2, TRAJ16)
CAVNRFSDGQKLLF

SEQ ID NO: 159322 - protein, 13 aa, Homo sapiens
  CDR3 for beta chain variable domain of TCR clone 79661 (TRBV19, TRBJ1-2)
CASSPGTGVGYTF

SEQ ID NO: 159323 - protein, 12 aa, Homo sapiens
  CDR3 for alpha chain variable domain of TCR clone 79662 (TRAV12-2, TRAJ10)
WGITGGGNKLTF

SEQ ID NO: 159324 - protein, 16 aa, Homo sapiens
  CDR3 for beta chain variable domain of TCR clone 79662 (TRBV6-4, TRBJ1-2)
CASSEAVGDPNYGYTF

SEQ ID NO: 159325 - protein, 13 aa, Homo sapiens
  CDR3 for alpha chain variable domain of TCR clone 79663 (TRAV12-3, TRAJ7)
CAMSASGNNRLAF

SEQ ID NO: 159326 - protein, 13 aa, Homo sapiens
  CDR3 for beta chain variable domain of TCR clone 79663 (TRBV7-6, TRBJ1-2)
CASSLVADYGYTF

SEQ ID NO: 159327 - protein, 14 aa, Homo sapiens
  CDR3 for alpha chain variable domain of TCR clone 79664 (TRAV21, TRAJ10)
CAVALTGGGNKLTF

SEQ ID NO: 159328 - protein, 13 aa, Homo sapiens
  CDR3 for beta chain variable domain of TCR clone 79664 (TRBV7-2, TRBJ1-6)
CASSVGSNSPLHF

SEQ ID NO: 159329 - protein, 17 aa, Homo sapiens
  CDR3 for alpha chain variable domain of TCR clone 79665 (TRAV3, TRAJ38)
CAVRDCLNAGNNRKLIW

SEQ ID NO: 159330 - protein, 13 aa, Homo sapiens
  CDR3 for beta chain variable domain of TCR clone 79665 (TRBV7-3, TRBJ2-5)
CASSFRGGETQYF

SEQ ID NO: 159331 - protein, 12 aa, Homo sapiens
  CDR3 for alpha chain variable domain of TCR clone 79666 (TRAV12-2, TRAJ20)
CAVRPSDYKLSF

SEQ ID NO: 159332 - protein, 15 aa, Homo sapiens
  CDR3 for beta chain variable domain of TCR clone 79666 (TRBV20-1, TRBJ2-7)
CSARDRVSGMDEQYF

SEQ ID NO: 159333 - protein, 14 aa, Homo sapiens
  CDR3 for alpha chain variable domain of TCR clone 79667 (TRAV20, TRAJ29)
CSVQAWVGNTPLVF

SEQ ID NO: 159334 - protein, 15 aa, Homo sapiens
  CDR3 for beta chain variable domain of TCR clone 79667 (TRBV29-1, TRBJ2-7)
CSVEFFDRGSYEQYF

SEQ ID NO: 159335 - protein, 15 aa, Homo sapiens
  CDR3 for alpha chain variable domain of TCR clone 79668 (TRAV8-3, TRAJ45)
CASSYSGGGADGLTF

SEQ ID NO: 159336 - protein, 15 aa, Homo sapiens
  CDR3 for beta chain variable domain of TCR clone 79668 (TRBV11-3, TRBJ2-3)
CASLKDGREGDTQYF

SEQ ID NO: 159337 - protein, 12 aa, Homo sapiens
  CDR3 for alpha chain variable domain of TCR clone 79669 (TRAV21, TRAJ37)
CAVRGNTGKLIF

SEQ ID NO: 159338 - protein, 16 aa, Homo sapiens
  CDR3 for beta chain variable domain of TCR clone 79669 (TRBV19, TRBJ2-2)
CASRSPGTGATGELFS

SEQ ID NO: 159339 - protein, 14 aa, Homo sapiens
  CDR3 for alpha chain variable domain of TCR clone 79670 (TRAV17, TRAJ54)
CATDTNQGAQKLVF

SEQ ID NO: 159340 - protein, 12 aa, Homo sapiens
  CDR3 for beta chain variable domain of TCR clone 79670 (TRBV7-9, TRBJ2-7)
CASSIKREEQYF

SEQ ID NO: 159341 - protein, 15 aa, Homo sapiens
  CDR3 for alpha chain variable domain of TCR clone 79671 (TRAV23/DV6, TRAJ18)
CAARYRSSTLGRLYF

SEQ ID NO: 159342 - protein, 13 aa, Homo sapiens
  CDR3 for beta chain variable domain of TCR clone 79671 (TRBV7-2, TRBJ2-7)
CASSSPSGSEQYF

SEQ ID NO: 159343 - protein, 14 aa, Homo sapiens
  CDR3 for alpha chain variable domain of TCR clone 79672 (TRAV8-4, TRAJ37)
CAVSESSNTGKLIF

SEQ ID NO: 159344 - protein, 16 aa, Homo sapiens
  CDR3 for beta chain variable domain of TCR clone 79672 (TRBV19, TRBJ1-5)
CASSTWTGGGNQTQHF

SEQ ID NO: 159345 - protein, 15 aa, Homo sapiens
  CDR3 for alpha chain variable domain of TCR clone 79673 (TRAV17, TRAJ13)
CATDAGSGGYQKVTF

SEQ ID NO: 159346 - protein, 17 aa, Homo sapiens
  CDR3 for beta chain variable domain of TCR clone 79673 (TRBV11-2, TRBJ2-1)
CASSLYPPGVGYNEQFF

SEQ ID NO: 159347 - protein, 15 aa, Homo sapiens
  CDR3 for alpha chain variable domain of TCR clone 79674 (TRAV3, TRAJ9)
CAVRARNTGGFKTIF

SEQ ID NO: 159348 - protein, 15 aa, Homo sapiens
  CDR3 for beta chain variable domain of TCR clone 79674 (TRBV11-3, TRBJ2-3)
CASLKDGREGDTQYF

SEQ ID NO: 159349 - protein, 15 aa, Homo sapiens
  CDR3 for alpha chain variable domain of TCR clone 79675 (TRAV21, TRAJ24)
CAARSSTDSWGKLQF

SEQ ID NO: 159350 - protein, 17 aa, Homo sapiens
  CDR3 for beta chain variable domain of TCR clone 79675 (TRBV7-8, TRBJ2-6)
CASSAGTGGAGANVLTF

SEQ ID NO: 159351 - protein, 13 aa, Homo sapiens
  CDR3 for alpha chain variable domain of TCR clone 79676 (TRAV1-2, TRAJ9)
CAALNTGGFKTIF

SEQ ID NO: 159352 - protein, 12 aa, Homo sapiens
  CDR3 for beta chain variable domain of TCR clone 79676 (TRBV7-9, TRBJ2-7)
CASRTGFDEQYF

SEQ ID NO: 159353 - protein, 13 aa, Homo sapiens
  CDR3 for alpha chain variable domain of TCR clone 79677 (TRAV12-1, TRAJ33)
CGDAPDSNYQLIW

SEQ ID NO: 159354 - protein, 15 aa, Homo sapiens
  CDR3 for beta chain variable domain of TCR clone 79677 (TRBV20-1, TRBJ2-7)
CSARDRVSGMDEQYF

SEQ ID NO: 159355 - protein, 13 aa, Homo sapiens
  CDR3 for alpha chain variable domain of TCR clone 79678 (TRAV1-2, TRAJ9)
CAVLNTGGFKTIF

SEQ ID NO: 159356 - protein, 13 aa, Homo sapiens
  CDR3 for beta chain variable domain of TCR clone 79678 (TRBV19, TRBJ1-3)
CASRLSLGNTIYF

SEQ ID NO: 159357 - protein, 18 aa, Homo sapiens
  CDR3 for alpha chain variable domain of TCR clone 79679 (TRAV13-1, TRAJ52)
CAAKNPNAGGTSHGKLTF

SEQ ID NO: 159358 - protein, 18 aa, Homo sapiens
  CDR3 for beta chain variable domain of TCR clone 79679 (TRBV4-1, TRBJ1-4)
CASSPRTGGAWTNEKLFF

SEQ ID NO: 159359 - protein, 12 aa, Homo sapiens
  CDR3 for alpha chain variable domain of TCR clone 79680 (TRAV8-3, TRAJ26)
CAGDNYGQNFVF

SEQ ID NO: 159360 - protein, 15 aa, Homo sapiens
  CDR3 for beta chain variable domain of TCR clone 79680 (TRBV9, TRBJ2-1)
CASSLAGTSYNEQFF

SEQ ID NO: 159361 - protein, 16 aa, Homo sapiens
  CDR3 for alpha chain variable domain of TCR clone 79681 (TRAV26-1, TRAJ40)
CIVRGYPTSGTYKYIF

SEQ ID NO: 159362 - protein, 14 aa, Homo sapiens
  CDR3 for beta chain variable domain of TCR clone 79681 (TRBV5-1, TRBJ1-4)
CASSSGQGSEKLFF

SEQ ID NO: 159363 - protein, 15 aa, Homo sapiens
  CDR3 for alpha chain variable domain of TCR clone 79682 (TRAV17, TRAJ57)
CATGPSQGGSEKLVF

SEQ ID NO: 159364 - protein, 15 aa, Homo sapiens
  CDR3 for beta chain variable domain of TCR clone 79682 (TRBV7-9, TRBJ1-5)
CASSQGHQPNQPQHF

SEQ ID NO: 159365 - protein, 13 aa, Homo sapiens
  CDR3 for alpha chain variable domain of TCR clone 79683 (TRAV1-1, TRAJ9)
CAAKNTGGFKTIF

SEQ ID NO: 159366 - protein, 14 aa, Homo sapiens
  CDR3 for beta chain variable domain of TCR clone 79683 (TRBV20-1, TRBJ2-1)
CSAQIGGSANKQFF

SEQ ID NO: 159367 - protein, 17 aa, Homo sapiens
  CDR3 for alpha chain variable domain of TCR clone 79684 (TRAV3, TRAJ42)
CAVRDRGYGGSQGNLIF

SEQ ID NO: 159368 - protein, 14 aa, Homo sapiens
  CDR3 for beta chain variable domain of TCR clone 79684 (TRBV7-2, TRBJ2-5)
CASSPRGSSETQYF

SEQ ID NO: 159369 - protein, 21 aa, Homo sapiens
  CDR3 for alpha chain variable domain of TCR clone 79685 (TRAV26-2, TRAJ42)
CCVLLHPERRWYGGSQGNLIF

SEQ ID NO: 159370 - protein, 16 aa, Homo sapiens
  CDR3 for beta chain variable domain of TCR clone 79685 (TRBV12-4, TRBJ2-7)
CASSLIGGTGTYEQYF

SEQ ID NO: 159371 - protein, 16 aa, Homo sapiens
  CDR3 for alpha chain variable domain of TCR clone 79686 (TRAV8-3, TRAJ42)
SAVGEGNGGSQGNLIF

SEQ ID NO: 159372 - protein, 14 aa, Homo sapiens
  CDR3 for beta chain variable domain of TCR clone 79686 (TRBV7-2, TRBJ2-1)
CASSRGGARNGQFF

SEQ ID NO: 159373 - protein, 11 aa, Homo sapiens
  CDR3 for alpha chain variable domain of TCR clone 79687 (TRAV12-2, TRAJ21)
CAVEGFNKFYF

SEQ ID NO: 159374 - protein, 14 aa, Homo sapiens
  CDR3 for beta chain variable domain of TCR clone 79687 (TRBV11-2, TRBJ1-2)
CASSLYRGNYGYTF

SEQ ID NO: 159375 - protein, 14 aa, Homo sapiens
  CDR3 for alpha chain variable domain of TCR clone 79688 (TRAV38-1, TRAJ45)
CASHSGGGADGLTF

SEQ ID NO: 159376 - protein, 13 aa, Homo sapiens
  CDR3 for beta chain variable domain of TCR clone 79688 (TRBV10-3, TRBJ1-2)
CAISERDSYVYTF

SEQ ID NO: 159377 - protein, 14 aa, Homo sapiens
  CDR3 for alpha chain variable domain of TCR clone 79689 (TRAV13-2, TRAJ15)
CAENPNQAGTARIF

SEQ ID NO: 159378 - protein, 16 aa, Homo sapiens
  CDR3 for beta chain variable domain of TCR clone 79689 (TRBV12-4, TRBJ1-2)
CASSPTATGKTRGYTF

SEQ ID NO: 159379 - protein, 11 aa, Homo sapiens
  CDR3 for alpha chain variable domain of TCR clone 79690 (TRAV1-1, TRAJ20)
CAVFNGYKLSF

SEQ ID NO: 159380 - protein, 16 aa, Homo sapiens
  CDR3 for beta chain variable domain of TCR clone 79690 (TRBV29-1, TRBJ2-2)
CSVEKTSEGNTGELFF

SEQ ID NO: 159381 - protein, 12 aa, Homo sapiens
  CDR3 for alpha chain variable domain of TCR clone 79691 (TRAV13-2, TRAJ23)
CAERHRGGKLIF

SEQ ID NO: 159382 - protein, 16 aa, Homo sapiens
  CDR3 for beta chain variable domain of TCR clone 79691 (TRBV20-1, TRBJ1-4)
CSARGQGLLTNEKLFF

SEQ ID NO: 159383 - protein, 11 aa, Homo sapiens
  CDR3 for alpha chain variable domain of TCR clone 79692 (TRAV1-2, TRAJ20)
CAVANDYKLSF

SEQ ID NO: 159384 - protein, 14 aa, Homo sapiens
  CDR3 for beta chain variable domain of TCR clone 79692 (TRBV11-3, TRBJ1-1)
CASSLAPSNTEAFF

SEQ ID NO: 159385 - protein, 12 aa, Homo sapiens
  CDR3 for alpha chain variable domain of TCR clone 79693 (TRAV27, TRAJ9)
CAGESGGFKTNF

SEQ ID NO: 159386 - protein, 14 aa, Homo sapiens
  CDR3 for beta chain variable domain of TCR clone 79693 (TRBV6-1, TRBJ2-1)
CASAKDGFYNEQFF

SEQ ID NO: 159387 - protein, 15 aa, Homo sapiens
  CDR3 for alpha chain variable domain of TCR clone 79694 (TRAV38-1, TRAJ37)
CAFIFGSGNTGKLIF

SEQ ID NO: 159388 - protein, 13 aa, Homo sapiens
  CDR3 for beta chain variable domain of TCR clone 79694 (TRBV5-5, TRBJ1-2)
CASSLWRGEDYTF

SEQ ID NO: 159389 - protein, 14 aa, Homo sapiens
  CDR3 for alpha chain variable domain of TCR clone 79695 (TRAV1-2, TRAJ8)
CAVREDTGFQQLVF

SEQ ID NO: 159390 - protein, 16 aa, Homo sapiens
  CDR3 for beta chain variable domain of TCR clone 79695 (TRBV12-4, TRBJ1-5)
CASSRPVGGSNQPQHF

SEQ ID NO: 159391 - protein, 13 aa, Homo sapiens
  CDR3 for alpha chain variable domain of TCR clone 79696 (TRAV13-1, TRAJ40)
CAASKGGTYKYIF

SEQ ID NO: 159392 - protein, 13 aa, Homo sapiens
  CDR3 for beta chain variable domain of TCR clone 79696 (TRBV7-6, TRBJ1-2)
CASSLAADYGYTF

SEQ ID NO: 159393 - protein, 13 aa, Homo sapiens
  CDR3 for alpha chain variable domain of TCR clone 79697 (TRAV9-2, TRAJ53)
CALSGGSNYKLTF

SEQ ID NO: 159394 - protein, 16 aa, Homo sapiens
  CDR3 for beta chain variable domain of TCR clone 79697 (TRBV7-3, TRBJ2-1)
CASSLEGYRSYNEQFF

SEQ ID NO: 159395 - protein, 14 aa, Homo sapiens
  CDR3 for alpha chain variable domain of TCR clone 79698 (TRAV8-6, TRAJ29)
CAVSRASGNTPLVF

SEQ ID NO: 159396 - protein, 13 aa, Homo sapiens
  CDR3 for beta chain variable domain of TCR clone 79698 (TRBV19, TRBJ1-5)
CASSEGSNQPQNF

SEQ ID NO: 159397 - protein, 14 aa, Homo sapiens
  CDR3 for alpha chain variable domain of TCR clone 79699 (TRAV17, TRAJ12)
CATDEKDSSYKLIF

SEQ ID NO: 159398 - protein, 16 aa, Homo sapiens
  CDR3 for beta chain variable domain of TCR clone 79699 (TRBV11-2, TRBJ2-1)
CASSTRLAGVYNEQFF

SEQ ID NO: 159399 - protein, 15 aa, Homo sapiens
  CDR3 for alpha chain variable domain of TCR clone 79700 (TRAV8-3, TRAJ45)
CASSYPGGGADGLTF

SEQ ID NO: 159400 - protein, 17 aa, Homo sapiens
  CDR3 for beta chain variable domain of TCR clone 79700 (TRBV7-8, TRBJ1-2)
CASSLRPLQGHLYGYTF

SEQ ID NO: 159401 - protein, 17 aa, Homo sapiens
  CDR3 for alpha chain variable domain of TCR clone 79701 (TRAV3, TRAJ42)
CAVRDRDYGGSQGNLIF

SEQ ID NO: 159402 - protein, 14 aa, Homo sapiens
  CDR3 for beta chain variable domain of TCR clone 79701 (TRBV7-9, TRBJ1-1)
CASTPLQSYTEAFF

SEQ ID NO: 159403 - protein, 15 aa, Homo sapiens
  CDR3 for alpha chain variable domain of TCR clone 79702 (TRAV14/DV4, TRAJ46)
CAMREEKSSGDKLTF

SEQ ID NO: 159404 - protein, 13 aa, Homo sapiens
  CDR3 for beta chain variable domain of TCR clone 79702 (TRBV20-1, TRBJ2-5)
CSAREAFQETQYF

SEQ ID NO: 159405 - protein, 18 aa, Homo sapiens
  CDR3 for alpha chain variable domain of TCR clone 79703 (TRAV9-2, TRAJ52)
CALSRHNAGGTSYGKLTF

SEQ ID NO: 159406 - protein, 20 aa, Homo sapiens
  CDR3 for beta chain variable domain of TCR clone 79703 (TRBV7-8, TRBJ2-1)
CASSLAHRLAGVRSYNEQFF

SEQ ID NO: 159407 - protein, 13 aa, Homo sapiens
  CDR3 for alpha chain variable domain of TCR clone 79704 (TRAV12-3, TRAJ13)
CAMSSGGYQKVTF

SEQ ID NO: 159408 - protein, 17 aa, Homo sapiens
  CDR3 for beta chain variable domain of TCR clone 79704 (TRBV4-1, TRBJ1-4)
CASSQEGPRGVEEKLFL

SEQ ID NO: 159409 - protein, 17 aa, Homo sapiens
  CDR3 for alpha chain variable domain of TCR clone 79705 (TRAV3, TRAJ6)
CAVRDGPRAGGSYIPTF

SEQ ID NO: 159410 - protein, 12 aa, Homo sapiens
  CDR3 for beta chain variable domain of TCR clone 79705 (TRBV12-4, TRBJ2-5)
CQQFHFRETQYF

SEQ ID NO: 159411 - protein, 13 aa, Homo sapiens
  CDR3 for alpha chain variable domain of TCR clone 79706 (TRAV27, TRAJ3)
ASLRGSSASKIIF

SEQ ID NO: 159412 - protein, 15 aa, Homo sapiens
  CDR3 for beta chain variable domain of TCR clone 79706 (TRBV7-9, TRBJ1-4)
CASSRTGGFNEKLFF

SEQ ID NO: 159413 - protein, 13 aa, Homo sapiens
  CDR3 for alpha chain variable domain of TCR clone 79707 (TRAV8-1, TRAJ28)
CAVPGAGSYQLTF

SEQ ID NO: 159414 - protein, 14 aa, Homo sapiens
  CDR3 for beta chain variable domain of TCR clone 79707 (TRBV19, TRBJ2-5)
CASSMTGQQETQYF

SEQ ID NO: 159415 - protein, 16 aa, Homo sapiens
  CDR3 for alpha chain variable domain of TCR clone 79708 (TRAV14/DV4, TRAJ53)
CAMREGGGGSNYKLTF

SEQ ID NO: 159416 - protein, 15 aa, Homo sapiens
  CDR3 for beta chain variable domain of TCR clone 79708 (TRBV27, TRBJ2-1)
CASSNGGGSSNEQFF

SEQ ID NO: 159417 - protein, 14 aa, Homo sapiens
  CDR3 for alpha chain variable domain of TCR clone 79709 (TRAV38-1, TRAJ40)
CALRPTSGTYKYIF

SEQ ID NO: 159418 - protein, 13 aa, Homo sapiens
  CDR3 for beta chain variable domain of TCR clone 79709 (TRBV7-7, TRBJ2-2)
CASSLTSAGELFF

SEQ ID NO: 159419 - protein, 12 aa, Homo sapiens
  CDR3 for alpha chain variable domain of TCR clone 79710 (TRAV8-3, TRAJ26)
CAGDNYGQNFVF

SEQ ID NO: 159420 - protein, 11 aa, Homo sapiens
  CDR3 for beta chain variable domain of TCR clone 79710 (TRBV20-1, TRBJ1-1)
CSARVRVGAFF

SEQ ID NO: 159421 - protein, 13 aa, Homo sapiens
  CDR3 for alpha chain variable domain of TCR clone 79711 (TRAV3, TRAJ27)
CAVRPLGAGKSTF

SEQ ID NO: 159422 - protein, 13 aa, Homo sapiens
  CDR3 for beta chain variable domain of TCR clone 79711 (TRBV7-9, TRBJ2-3)
CASSPGSRDTQYF

SEQ ID NO: 159423 - protein, 12 aa, Homo sapiens
  CDR3 for alpha chain variable domain of TCR clone 79712 (TRAV8-3, TRAJ27)
CAVGAEAGKSTC

SEQ ID NO: 159424 - protein, 14 aa, Homo sapiens
  CDR3 for beta chain variable domain of TCR clone 79712 (TRBV2, TRBJ2-1)
CASRLIVGHDEQFF

SEQ ID NO: 159425 - protein, 12 aa, Homo sapiens
  CDR3 for alpha chain variable domain of TCR clone 79713 (TRAV20, TRAJ31)
CAVQADNARLMF

SEQ ID NO: 159426 - protein, 13 aa, Homo sapiens
  CDR3 for beta chain variable domain of TCR clone 79713 (TRBV4-2, TRBJ1-1)
CASSQAGNTEAFF

SEQ ID NO: 159427 - protein, 20 aa, Homo sapiens
  CDR3 for alpha chain variable domain of TCR clone 79714 (TRAV26-1, TRAJ42)
CCVLLRRQTYYGGSQGNLIF

SEQ ID NO: 159428 - protein, 16 aa, Homo sapiens
  CDR3 for beta chain variable domain of TCR clone 79714 (TRBV4-1, TRBJ1-1)
CASSSMSERPNTEAFF

SEQ ID NO: 159429 - protein, 22 aa, Homo sapiens
  CDR3 for alpha chain variable domain of TCR clone 79715 (TRAV26-1, TRAJ42)
CIVRPSMEEAKEISSLEKALNS

SEQ ID NO: 159430 - protein, 16 aa, Homo sapiens
  CDR3 for beta chain variable domain of TCR clone 79715 (TRBV7-3, TRBJ2-2)
CASSLKRGTLSGELFF

SEQ ID NO: 159431 - protein, 14 aa, Homo sapiens
  CDR3 for alpha chain variable domain of TCR clone 79716 (TRAV8-3, TRAJ9)
CAVVYNTGGFKTIF

SEQ ID NO: 159432 - protein, 14 aa, Homo sapiens
  CDR3 for beta chain variable domain of TCR clone 79716 (TRBV7-3, TRBJ2-2)
CASSSGGYTEELFF

SEQ ID NO: 159433 - protein, 14 aa, Homo sapiens
  CDR3 for alpha chain variable domain of TCR clone 79717 (TRAV12-2, TRAJ33)
CAVKRARSNYQLIW

SEQ ID NO: 159434 - protein, 12 aa, Homo sapiens
  CDR3 for beta chain variable domain of TCR clone 79717 (TRBV24-1, TRBJ2-3)
CATSDYTDTQYF

SEQ ID NO: 159435 - protein, 14 aa, Homo sapiens
  CDR3 for alpha chain variable domain of TCR clone 79718 (TRAV12-3, TRAJ10)
SHLPLTGGGNKLTF

SEQ ID NO: 159436 - protein, 13 aa, Homo sapiens
  CDR3 for beta chain variable domain of TCR clone 79718 (TRBV12-4, TRBJ2-2)
CASSPLPPGELFF

SEQ ID NO: 159437 - protein, 11 aa, Homo sapiens
  CDR3 for alpha chain variable domain of TCR clone 79719 (TRAV1-2, TRAJ31)
CAVNNNARLMF

SEQ ID NO: 159438 - protein, 15 aa, Homo sapiens
  CDR3 for beta chain variable domain of TCR clone 79719 (TRBV20-1, TRBJ2-7)
CSARDRVSGMDEQYF

SEQ ID NO: 159439 - protein, 14 aa, Homo sapiens
  CDR3 for alpha chain variable domain of TCR clone 79720 (TRAV8-4, TRAJ9)
CAVRINTGGFKTIF

SEQ ID NO: 159440 - protein, 14 aa, Homo sapiens
  CDR3 for beta chain variable domain of TCR clone 79720 (TRBV7-2, TRBJ2-7)
CASSPKTSFYEQYF

SEQ ID NO: 159441 - protein, 11 aa, Homo sapiens
  CDR3 for alpha chain variable domain of TCR clone 79721 (TRAV21, TRAJ34)
CAHYNTDKLIF

SEQ ID NO: 159442 - protein, 17 aa, Homo sapiens
  CDR3 for beta chain variable domain of TCR clone 79721 (TRBV20-1, TRBJ2-1)
CSARDPLAGVWDNEQFF

SEQ ID NO: 159443 - protein, 11 aa, Homo sapiens
  CDR3 for alpha chain variable domain of TCR clone 79722 (TRAV3, TRAJ13)
CAVTSYQKVTF

SEQ ID NO: 159444 - protein, 15 aa, Homo sapiens
  CDR3 for beta chain variable domain of TCR clone 79722 (TRBV7-9, TRBJ2-7)
CASSLALAEAYEQYF

SEQ ID NO: 159445 - protein, 15 aa, Homo sapiens
  CDR3 for alpha chain variable domain of TCR clone 79723 (TRAV17, TRAJ23)
CATDAKDNQGGKLIF

SEQ ID NO: 159446 - protein, 12 aa, Homo sapiens
  CDR3 for beta chain variable domain of TCR clone 79723 (TRBV2, TRBJ2-1)
CAKREGYNEQFF

SEQ ID NO: 159447 - protein, 13 aa, Homo sapiens
  CDR3 for alpha chain variable domain of TCR clone 79724 (TRAV13-2, TRAJ53)
CAENMGSSYKLTF

SEQ ID NO: 159448 - protein, 13 aa, Homo sapiens
  CDR3 for beta chain variable domain of TCR clone 79724 (TRBV4-1, TRBJ2-2)
CASSQENTGELVF

SEQ ID NO: 159449 - protein, 16 aa, Homo sapiens
  CDR3 for alpha chain variable domain of TCR clone 79725 (TRAV3, TRAJ37)
CAVRPHGSGNTGNLIF

SEQ ID NO: 159450 - protein, 17 aa, Homo sapiens
  CDR3 for beta chain variable domain of TCR clone 79725 (TRBV5-1, TRBJ2-5)
CASSPVALGQNQETQYF

SEQ ID NO: 159451 - protein, 21 aa, Homo sapiens
  CDR3 for alpha chain variable domain of TCR clone 79726 (TRAV1-1, TRAJ6)
CLLLLRCERLERTGGSYVPTF

SEQ ID NO: 159452 - protein, 15 aa, Homo sapiens
  CDR3 for beta chain variable domain of TCR clone 79726 (TRBV4-1, TRBJ1-4)
CASSDTGGTNEKLFF

SEQ ID NO: 159453 - protein, 11 aa, Homo sapiens
  CDR3 for alpha chain variable domain of TCR clone 79727 (TRAV2, TRAJ33)
CAVDSNYQLIW

SEQ ID NO: 159454 - protein, 15 aa, Homo sapiens
  CDR3 for beta chain variable domain of TCR clone 79727 (TRBV6-5, TRBJ2-1)
CASSYDAGAGNEQFF

SEQ ID NO: 159455 - protein, 17 aa, Homo sapiens
  CDR3 for alpha chain variable domain of TCR clone 79728 (TRAV3, TRAJ6)
CAVRDGPRAGGRYIPTF

SEQ ID NO: 159456 - protein, 18 aa, Homo sapiens
  CDR3 for beta chain variable domain of TCR clone 79728 (TRBV25-1, TRBJ1-2)
CASSGLQNGQGLIFGYTF

SEQ ID NO: 159457 - protein, 17 aa, Homo sapiens
  CDR3 for alpha chain variable domain of TCR clone 79729 (TRAV3, TRAJ28)
CAVREAYSGAGSYQLTF

SEQ ID NO: 159458 - protein, 18 aa, Homo sapiens
  CDR3 for beta chain variable domain of TCR clone 79729 (TRBV11-1, TRBJ2-1)
CASGNRAVGVGSKNEQFF

SEQ ID NO: 159459 - protein, 13 aa, Homo sapiens
  CDR3 for alpha chain variable domain of TCR clone 79730 (TRAV29/DV5, TRAJ33)
CAASVESNYQLIC

SEQ ID NO: 159460 - protein, 14 aa, Homo sapiens
  CDR3 for beta chain variable domain of TCR clone 79730 (TRBV11-2, TRBJ2-5)
CASSRTGGIETQYF

SEQ ID NO: 159461 - protein, 10 aa, Homo sapiens
  CDR3 for alpha chain variable domain of TCR clone 79731 (TRAV1-2, TRAJ20)
CACNDYKLSF

SEQ ID NO: 159462 - protein, 12 aa, Homo sapiens
  CDR3 for beta chain variable domain of TCR clone 79731 (TRBV11-2, TRBJ2-2)
CASSLGGGELFF

SEQ ID NO: 159463 - protein, 14 aa, Homo sapiens
  CDR3 for alpha chain variable domain of TCR clone 79732 (TRAV13-1, TRAJ44)
CAAKATGTASKLTF

SEQ ID NO: 159464 - protein, 14 aa, Homo sapiens
  CDR3 for beta chain variable domain of TCR clone 79732 (TRBV19, TRBJ2-2)
CASSTLRRSGELFF

SEQ ID NO: 159465 - protein, 15 aa, Homo sapiens
  CDR3 for alpha chain variable domain of TCR clone 79733 (TRAV12-3, TRAJ13)
CAMSARSGGYQKVTF

SEQ ID NO: 159466 - protein, 13 aa, Homo sapiens
  CDR3 for beta chain variable domain of TCR clone 79733 (TRBV7-9, TRBJ1-2)
CASSLKQNYGYTF

SEQ ID NO: 159467 - protein, 14 aa, Homo sapiens
  CDR3 for alpha chain variable domain of TCR clone 79734 (TRAV12-2, TRAJ6)
CASKWGGGSYIPTF

SEQ ID NO: 159468 - protein, 13 aa, Homo sapiens
  CDR3 for beta chain variable domain of TCR clone 79734 (TRBV2, TRBJ1-1)
CASSEGGNTVAFF

SEQ ID NO: 159469 - protein, 14 aa, Homo sapiens
  CDR3 for alpha chain variable domain of TCR clone 79735 (TRAV8-4, TRAJ9)
CAVRINTGCFKTIF

SEQ ID NO: 159470 - protein, 15 aa, Homo sapiens
  CDR3 for beta chain variable domain of TCR clone 79735 (TRBV10-2, TRBJ2-6)
CASSEQGTGANVLTF

SEQ ID NO: 159471 - protein, 13 aa, Homo sapiens
  CDR3 for alpha chain variable domain of TCR clone 79736 (TRAV27, TRAJ41)
CAGEGNSGYALNF

SEQ ID NO: 159472 - protein, 14 aa, Homo sapiens
  CDR3 for beta chain variable domain of TCR clone 79736 (TRBV7-9, TRBJ2-5)
CASSLDTAQETQYF

SEQ ID NO: 159473 - protein, 12 aa, Homo sapiens
  CDR3 for alpha chain variable domain of TCR clone 79737 (TRAV1-1, TRAJ8)
YAGGTGFQKLVF

SEQ ID NO: 159474 - protein, 15 aa, Homo sapiens
  CDR3 for beta chain variable domain of TCR clone 79737 (TRBV7-9, TRBJ1-4)
CASSRTGGFNEKLFF

SEQ ID NO: 159475 - protein, 18 aa, Homo sapiens
  CDR3 for alpha chain variable domain of TCR clone 79738 (TRAV8-3, TRAJ4)
WVRDPTSNDPGGYNKLIF

SEQ ID NO: 159476 - protein, 18 aa, Homo sapiens
  CDR3 for beta chain variable domain of TCR clone 79738 (TRBV7-9, TRBJ2-7)
CASSLTTSGSRTWYEQYF

SEQ ID NO: 159477 - protein, 15 aa, Homo sapiens
  CDR3 for alpha chain variable domain of TCR clone 79739 (TRAV17, TRAJ52)
CATEAGGTSYGKLTF

SEQ ID NO: 159478 - protein, 14 aa, Homo sapiens
  CDR3 for beta chain variable domain of TCR clone 79739 (TRBV28, TRBJ1-5)
CASSLGVLVKAQHF

SEQ ID NO: 159479 - protein, 10 aa, Homo sapiens
  CDR3 for alpha chain variable domain of TCR clone 79740 (TRAV23/DV6, TRAJ57)
CAAGSTLSQG

SEQ ID NO: 159480 - protein, 13 aa, Homo sapiens
  CDR3 for beta chain variable domain of TCR clone 79740 (TRBV15, TRBJ1-6)
CATSGGLNSPLHF

SEQ ID NO: 159481 - protein, 13 aa, Homo sapiens
  CDR3 for alpha chain variable domain of TCR clone 79741 (TRAV2, TRAJ21)
CAVEGLNFNKFYF

SEQ ID NO: 159482 - protein, 15 aa, Homo sapiens
  CDR3 for beta chain variable domain of TCR clone 79741 (TRBV28, TRBJ2-5)
CASSPGQGSIETQYF

SEQ ID NO: 159483 - protein, 16 aa, Homo sapiens
  CDR3 for alpha chain variable domain of TCR clone 79742 (TRAV20, TRAJ26)
CAVQHRRDNYGQNFVF

SEQ ID NO: 159484 - protein, 15 aa, Homo sapiens
  CDR3 for beta chain variable domain of TCR clone 79742 (TRBV7-9, TRBJ1-6)
CASSSPGRGNSPLHF

SEQ ID NO: 159485 - protein, 15 aa, Homo sapiens
  CDR3 for alpha chain variable domain of TCR clone 79743 (TRAV35, TRAJ23)
CAGPLGNNQGGKLIF

SEQ ID NO: 159486 - protein, 14 aa, Homo sapiens
  CDR3 for beta chain variable domain of TCR clone 79743 (TRBV7-9, TRBJ1-1)
CASTPLQSHTEAFF

SEQ ID NO: 159487 - protein, 14 aa, Homo sapiens
  CDR3 for alpha chain variable domain of TCR clone 79744 (TRAV27, TRAJ22)
CAGVVPGSARQLTF

SEQ ID NO: 159488 - protein, 13 aa, Homo sapiens
  CDR3 for beta chain variable domain of TCR clone 79744 (TRBV19, TRBJ1-2)
CASSVPGQDGYTF

SEQ ID NO: 159489 - protein, 18 aa, Homo sapiens
  CDR3 for alpha chain variable domain of TCR clone 79745 (TRAV4, TRAJ29)
CLVGAYRSQETHLLSLER

SEQ ID NO: 159490 - protein, 17 aa, Homo sapiens
  CDR3 for beta chain variable domain of TCR clone 79745 (TRBV25-1, TRBJ2-7)
CASSDARVVFSSYEQYF

SEQ ID NO: 159491 - protein, 13 aa, Homo sapiens
  CDR3 for alpha chain variable domain of TCR clone 79746 (TRAV13-1, TRAJ37)
CAAVSGNTGELIF

SEQ ID NO: 159492 - protein, 13 aa, Homo sapiens
  CDR3 for beta chain variable domain of TCR clone 79746 (TRBV7-9, TRBJ1-2)
CASSLKQNYGYTF

SEQ ID NO: 159493 - protein, 17 aa, Homo sapiens
  CDR3 for alpha chain variable domain of TCR clone 79747 (TRAV3, TRAJ42)
CAVRDRDYGGSQGNLIF

SEQ ID NO: 159494 - protein, 15 aa, Homo sapiens
  CDR3 for beta chain variable domain of TCR clone 79747 (TRBV7-2, TRBJ2-1)
CASSSGLAGGNEQFF

SEQ ID NO: 159495 - protein, 13 aa, Homo sapiens
  CDR3 for alpha chain variable domain of TCR clone 79748 (TRAV17, TRAJ34)
CAADLYNTDKLIF

SEQ ID NO: 159496 - protein, 15 aa, Homo sapiens
  CDR3 for beta chain variable domain of TCR clone 79748 (TRBV20-1, TRBJ2-3)
CSATGTSGFTDTQYF

SEQ ID NO: 159497 - protein, 14 aa, Homo sapiens
  CDR3 for alpha chain variable domain of TCR clone 79749 (TRAV12-2, TRAJ40)
CAVKIPSGTYKYIF

SEQ ID NO: 159498 - protein, 14 aa, Homo sapiens
  CDR3 for beta chain variable domain of TCR clone 79749 (TRBV7-2, TRBJ1-1)
CASSFLTGTTEAFF

SEQ ID NO: 159499 - protein, 14 aa, Homo sapiens
  CDR3 for alpha chain variable domain of TCR clone 79750 (TRAV1-2, TRAJ16)
CSVNRFSDGQKLLF

SEQ ID NO: 159500 - protein, 16 aa, Homo sapiens
  CDR3 for beta chain variable domain of TCR clone 79750 (TRBV7-3, TRBJ2-2)
CASSLKRGTLSGELFF

SEQ ID NO: 159501 - protein, 14 aa, Homo sapiens
  CDR3 for alpha chain variable domain of TCR clone 79751 (TRAV17, TRAJ34)
CATDSLEGTDKLVF

SEQ ID NO: 159502 - protein, 13 aa, Homo sapiens
  CDR3 for beta chain variable domain of TCR clone 79751 (TRBV11-2, TRBJ2-7)
CASSGTRPYEQYF

SEQ ID NO: 159503 - protein, 16 aa, Homo sapiens
  CDR3 for alpha chain variable domain of TCR clone 79752 (TRAV26-1, TRAJ23)
CIVRPHGNNQGGKLIF

SEQ ID NO: 159504 - protein, 13 aa, Homo sapiens
  CDR3 for beta chain variable domain of TCR clone 79752 (TRBV27, TRBJ2-7)
CASSLTTGHEQYF

SEQ ID NO: 159505 - protein, 14 aa, Homo sapiens
  CDR3 for alpha chain variable domain of TCR clone 79753 (TRAV1-2, TRAJ16)
CAVNRFSDGQKLLF

SEQ ID NO: 159506 - protein, 13 aa, Homo sapiens
  CDR3 for beta chain variable domain of TCR clone 79753 (TRBV7-3, TRBJ1-1)
CASSQDRGAEAFF

SEQ ID NO: 159507 - protein, 14 aa, Homo sapiens
  CDR3 for alpha chain variable domain of TCR clone 79754 (TRAV1-2, TRAJ16)
CAVNRFSDGQKLLF

SEQ ID NO: 159508 - protein, 14 aa, Homo sapiens
  CDR3 for beta chain variable domain of TCR clone 79754 (TRBV5-1, TRBJ2-7)
CASSFASGVNEQYF

SEQ ID NO: 159509 - protein, 16 aa, Homo sapiens
  CDR3 for alpha chain variable domain of TCR clone 79755 (TRAV30, TRAJ24)
CGTEIVDADSWGKFQF

SEQ ID NO: 159510 - protein, 17 aa, Homo sapiens
  CDR3 for beta chain variable domain of TCR clone 79755 (TRBV7-3, TRBJ2-3)
CASSLVKRMRGADTQYF

SEQ ID NO: 159511 - protein, 16 aa, Homo sapiens
  CDR3 for alpha chain variable domain of TCR clone 79756 (TRAV12-1, TRAJ22)
CVVNTISSGSARQPTF

SEQ ID NO: 159512 - protein, 13 aa, Homo sapiens
  CDR3 for beta chain variable domain of TCR clone 79756 (TRBV19, TRBJ2-1)
CASNGGVFSEQFF

SEQ ID NO: 159513 - protein, 13 aa, Homo sapiens
  CDR3 for alpha chain variable domain of TCR clone 79757 (TRAV36/DV7, TRAJ54)
CAVLIQGAQKLVS

SEQ ID NO: 159514 - protein, 13 aa, Homo sapiens
  CDR3 for beta chain variable domain of TCR clone 79757 (TRBV29-1, TRBJ2-4)
CSVGEGTKNIQYF

SEQ ID NO: 159515 - protein, 13 aa, Homo sapiens
  CDR3 for alpha chain variable domain of TCR clone 79758 (TRAV2, TRAJ40)
CAVVTSGTYKYIF

SEQ ID NO: 159516 - protein, 16 aa, Homo sapiens
  CDR3 for beta chain variable domain of TCR clone 79758 (TRBV5-7, TRBJ2-3)
CASSSLGGAITDTQYF

SEQ ID NO: 159517 - protein, 10 aa, Homo sapiens
  CDR3 for alpha chain variable domain of TCR clone 79759 (TRAV8-4, TRAJ30)
VFYRDDKIIF

SEQ ID NO: 159518 - protein, 14 aa, Homo sapiens
  CDR3 for beta chain variable domain of TCR clone 79759 (TRBV19, TRBJ2-1)
CASPTFVLSGEQFF

SEQ ID NO: 159519 - protein, 14 aa, Homo sapiens
  CDR3 for alpha chain variable domain of TCR clone 79760 (TRAV16, TRAJ17)
CALSEGAAGNKLTF

SEQ ID NO: 159520 - protein, 14 aa, Homo sapiens
  CDR3 for beta chain variable domain of TCR clone 79760 (TRBV28, TRBJ2-2)
RASRIRSGTGELFF

SEQ ID NO: 159521 - protein, 13 aa, Homo sapiens
  CDR3 for alpha chain variable domain of TCR clone 79761 (TRAV6, TRAJ3)
CSRRNSSASKIIF

SEQ ID NO: 159522 - protein, 17 aa, Homo sapiens
  CDR3 for beta chain variable domain of TCR clone 79761 (TRBV11-2, TRBJ2-1)
CASSLYPPGVEYNEQFF

SEQ ID NO: 159523 - protein, 13 aa, Homo sapiens
  CDR3 for alpha chain variable domain of TCR clone 79762 (TRAV21, TRAJ20)
CAVGLRVDYKLSF

SEQ ID NO: 159524 - protein, 15 aa, Homo sapiens
  CDR3 for beta chain variable domain of TCR clone 79762 (TRBV12-4, TRBJ2-5)
CASSPPTGLQETQYF

SEQ ID NO: 159525 - protein, 14 aa, Homo sapiens
  CDR3 for alpha chain variable domain of TCR clone 79763 (TRAV12-3, TRAJ10)
SHLPLTGGGNKLTF

SEQ ID NO: 159526 - protein, 17 aa, Homo sapiens
  CDR3 for beta chain variable domain of TCR clone 79763 (TRBV15, TRBJ1-4)
CATSRYGTGDPNEKLFF

SEQ ID NO: 159527 - protein, 15 aa, Homo sapiens
  CDR3 for alpha chain variable domain of TCR clone 79764 (TRAV13-1, TRAJ17)
CAASIERAAGNKLTF

SEQ ID NO: 159528 - protein, 14 aa, Homo sapiens
  CDR3 for beta chain variable domain of TCR clone 79764 (TRBV19, TRBJ2-1)
CASPTFVLSGEQFF

SEQ ID NO: 159529 - protein, 13 aa, Homo sapiens
  CDR3 for alpha chain variable domain of TCR clone 79765 (TRAV12-3, TRAJ43)
CAMIRPNNNDMRF

SEQ ID NO: 159530 - protein, 14 aa, Homo sapiens
  CDR3 for beta chain variable domain of TCR clone 79765 (TRBV7-2, TRBJ2-7)
CASSPKTSFYEQYF

SEQ ID NO: 159531 - protein, 13 aa, Homo sapiens
  CDR3 for alpha chain variable domain of TCR clone 79766 (TRAV38-2/DV8, TRAJ34)
CAYRTWNTDKLIF

SEQ ID NO: 159532 - protein, 11 aa, Homo sapiens
  CDR3 for beta chain variable domain of TCR clone 79766 (TRBV7-9, TRBJ2-5)
CASSLGETQYF

SEQ ID NO: 159533 - protein, 14 aa, Homo sapiens
  CDR3 for alpha chain variable domain of TCR clone 79767 (TRAV9-2, TRAJ48)
GAAPVDFGNEKLTF

SEQ ID NO: 159534 - protein, 16 aa, Homo sapiens
  CDR3 for beta chain variable domain of TCR clone 79767 (TRBV25-1, TRBJ2-7)
CASSELTGGGIYEQYF

SEQ ID NO: 159535 - protein, 15 aa, Homo sapiens
  CDR3 for alpha chain variable domain of TCR clone 79768 (TRAV17, TRAJ57)
CATGPSQGGSEKLIF

SEQ ID NO: 159536 - protein, 14 aa, Homo sapiens
  CDR3 for beta chain variable domain of TCR clone 79768 (TRBV12-5, TRBJ2-5)
CASGSRTHQETQYF

SEQ ID NO: 159537 - protein, 15 aa, Homo sapiens
  CDR3 for alpha chain variable domain of TCR clone 79769 (TRAV12-2, TRAJ3)
CAVNIWYSSASKIIF

SEQ ID NO: 159538 - protein, 14 aa, Homo sapiens
  CDR3 for beta chain variable domain of TCR clone 79769 (TRBV25-1, TRBJ1-1)
CASTHLGGNTEAFF

SEQ ID NO: 159539 - protein, 16 aa, Homo sapiens
  CDR3 for alpha chain variable domain of TCR clone 79770 (TRAV20, TRAJ22)
CAVQASSSGSARQLTF

SEQ ID NO: 159540 - protein, 13 aa, Homo sapiens
  CDR3 for beta chain variable domain of TCR clone 79770 (TRBV7-2, TRBJ2-5)
CASSQTIVETQYF

SEQ ID NO: 159541 - protein, 14 aa, Homo sapiens
  CDR3 for alpha chain variable domain of TCR clone 79771 (TRAV3, TRAJ9)
CAVRLNTGGSKTIF

SEQ ID NO: 159542 - protein, 18 aa, Homo sapiens
  CDR3 for beta chain variable domain of TCR clone 79771 (TRBV7-2, TRBJ2-3)
CASSLKREGSGITDTQYF

SEQ ID NO: 159543 - protein, 14 aa, Homo sapiens
  CDR3 for alpha chain variable domain of TCR clone 79772 (TRAV16, TRAJ4)
CALHFSGGYNKLIS

SEQ ID NO: 159544 - protein, 15 aa, Homo sapiens
  CDR3 for beta chain variable domain of TCR clone 79772 (TRBV7-2, TRBJ2-7)
CASSTRLAGVDEQYF

SEQ ID NO: 159545 - protein, 14 aa, Homo sapiens
  CDR3 for alpha chain variable domain of TCR clone 79773 (TRAV17, TRAJ17)
CATDDAAAGNKLTF

SEQ ID NO: 159546 - protein, 16 aa, Homo sapiens
  CDR3 for beta chain variable domain of TCR clone 79773 (TRBV19, TRBJ2-1)
RASSIETGSPYNEQFF

SEQ ID NO: 159547 - protein, 16 aa, Homo sapiens
  CDR3 for alpha chain variable domain of TCR clone 79774 (TRAV26-1, TRAJ37)
CIVRGDGSGNTGKLIF

SEQ ID NO: 159548 - protein, 17 aa, Homo sapiens
  CDR3 for beta chain variable domain of TCR clone 79774 (TRBV4-1, TRBJ2-7)
CASSRDPLGVRGGEQYV

SEQ ID NO: 159549 - protein, 16 aa, Homo sapiens
  CDR3 for alpha chain variable domain of TCR clone 79775 (TRAV4, TRAJ5)
CLVGPDHGHGQESPYF

SEQ ID NO: 159550 - protein, 15 aa, Homo sapiens
  CDR3 for beta chain variable domain of TCR clone 79775 (TRBV27, TRBJ2-5)
CASSLIPSGGETQYF

SEQ ID NO: 159551 - protein, 13 aa, Homo sapiens
  CDR3 for alpha chain variable domain of TCR clone 79776 (TRAV36/DV7, TRAJ49)
CAVEANTGNQFYF

SEQ ID NO: 159552 - protein, 14 aa, Homo sapiens
  CDR3 for beta chain variable domain of TCR clone 79776 (TRBV20-1, TRBJ2-5)
CSASSGRAAETQCF

SEQ ID NO: 159553 - protein, 11 aa, Homo sapiens
  CDR3 for alpha chain variable domain of TCR clone 79777 (TRAV17, TRAJ9)
CATTGGFITIF

SEQ ID NO: 159554 - protein, 14 aa, Homo sapiens
  CDR3 for beta chain variable domain of TCR clone 79777 (TRBV7-9, TRBJ2-2)
CASSGLADTGELFF

SEQ ID NO: 159555 - protein, 16 aa, Homo sapiens
  CDR3 for alpha chain variable domain of TCR clone 79778 (TRAV3, TRAJ37)
CAVRPHGSGNTGKLIF

SEQ ID NO: 159556 - protein, 14 aa, Homo sapiens
  CDR3 for beta chain variable domain of TCR clone 79778 (TRBV25-1, TRBJ1-1)
CASTHLGGNTEAVF

SEQ ID NO: 159557 - protein, 17 aa, Homo sapiens
  CDR3 for alpha chain variable domain of TCR clone 79779 (TRAV3, TRAJ42)
CAVRDRDYGGSQGNLIF

SEQ ID NO: 159558 - protein, 15 aa, Homo sapiens
  CDR3 for beta chain variable domain of TCR clone 79779 (TRBV10-3, TRBJ2-3)
CAISLTSGGTDTQYF

SEQ ID NO: 159559 - protein, 13 aa, Homo sapiens
  CDR3 for alpha chain variable domain of TCR clone 79780 (TRAV12-2, TRAJ39)
CAVKNNAGNMLTF

SEQ ID NO: 159560 - protein, 13 aa, Homo sapiens
  CDR3 for beta chain variable domain of TCR clone 79780 (TRBV2, TRBJ1-5)
CATAGPGNQPQHF

SEQ ID NO: 159561 - protein, 16 aa, Homo sapiens
  CDR3 for alpha chain variable domain of TCR clone 79781 (TRAV16, TRAJ21)
CACGWATTSTNFTLDL

SEQ ID NO: 159562 - protein, 15 aa, Homo sapiens
  CDR3 for beta chain variable domain of TCR clone 79781 (TRBV19, TRBJ2-1)
CASSMQATSYNEQFF

SEQ ID NO: 159563 - protein, 14 aa, Homo sapiens
  CDR3 for alpha chain variable domain of TCR clone 79782 (TRAV12-1, TRAJ12)
CVVTRMDSSYKLIF

SEQ ID NO: 159564 - protein, 15 aa, Homo sapiens
  CDR3 for beta chain variable domain of TCR clone 79782 (TRBV9, TRBJ1-6)
CASSVAGTGDSPLHF

SEQ ID NO: 159565 - protein, 11 aa, Homo sapiens
  CDR3 for alpha chain variable domain of TCR clone 79783 (TRAV13-1, TRAJ15)
CAATPGTALIF

SEQ ID NO: 159566 - protein, 17 aa, Homo sapiens
  CDR3 for beta chain variable domain of TCR clone 79783 (TRBV13, TRBJ2-3)
CASSLPRVAGGRNTQYF

SEQ ID NO: 159567 - protein, 11 aa, Homo sapiens
  CDR3 for alpha chain variable domain of TCR clone 79784 (TRAV3, TRAJ17)
PRGAAGNKLTF

SEQ ID NO: 159568 - protein, 16 aa, Homo sapiens
  CDR3 for beta chain variable domain of TCR clone 79784 (TRBV5-1, TRBJ2-2)
CASSSRTGGRTGELFF

SEQ ID NO: 159569 - protein, 16 aa, Homo sapiens
  CDR3 for alpha chain variable domain of TCR clone 79785 (TRAV16, TRAJ42)
CARKMNYGGSQGDLIF

SEQ ID NO: 159570 - protein, 15 aa, Homo sapiens
  CDR3 for beta chain variable domain of TCR clone 79785 (TRBV20-1, TRBJ2-7)
CSAREGRDSLYEQYF

SEQ ID NO: 159571 - protein, 14 aa, Homo sapiens
  CDR3 for alpha chain variable domain of TCR clone 79786 (TRAV30, TRAJ33)
CGTVAPRSNYQLIW

SEQ ID NO: 159572 - protein, 15 aa, Homo sapiens
  CDR3 for beta chain variable domain of TCR clone 79786 (TRBV20-1, TRBJ2-7)
CSARDRVSGMDEQYF

SEQ ID NO: 159573 - protein, 16 aa, Homo sapiens
  CDR3 for alpha chain variable domain of TCR clone 79787 (TRAV16, TRAJ4)
CITVLPFSGGYNKLIF

SEQ ID NO: 159574 - protein, 14 aa, Homo sapiens
  CDR3 for beta chain variable domain of TCR clone 79787 (TRBV19, TRBJ2-7)
CASSMGQGATEQYF

SEQ ID NO: 159575 - protein, 11 aa, Homo sapiens
  CDR3 for alpha chain variable domain of TCR clone 79788 (TRAV2, TRAJ21)
CAVFNFNKFYF

SEQ ID NO: 159576 - protein, 14 aa, Homo sapiens
  CDR3 for beta chain variable domain of TCR clone 79788 (TRBV25-1, TRBJ1-1)
CASTHLGGNTEAFF

SEQ ID NO: 159577 - protein, 11 aa, Homo sapiens
  CDR3 for alpha chain variable domain of TCR clone 79789 (TRAV1-1, TRAJ23)
CAVRQGGKLIF

SEQ ID NO: 159578 - protein, 18 aa, Homo sapiens
  CDR3 for beta chain variable domain of TCR clone 79789 (TRBV18, TRBJ2-3)
CASSYTSGAAGGTDTQYF

SEQ ID NO: 159579 - protein, 10 aa, Homo sapiens
  CDR3 for alpha chain variable domain of TCR clone 79790 (TRAV13-1, TRAJ27)
CAPLARQINL

SEQ ID NO: 159580 - protein, 13 aa, Homo sapiens
  CDR3 for beta chain variable domain of TCR clone 79790 (TRBV7-3, TRBJ1-1)
CASSLDWGAEAFF

SEQ ID NO: 159581 - protein, 14 aa, Homo sapiens
  CDR3 for alpha chain variable domain of TCR clone 79791 (TRAV3, TRAJ21)
CAVESQANFNKFYF

SEQ ID NO: 159582 - protein, 13 aa, Homo sapiens
  CDR3 for beta chain variable domain of TCR clone 79791 (TRBV7-9, TRBJ1-2)
CASSLKQNYGYTF

SEQ ID NO: 159583 - protein, 12 aa, Homo sapiens
  CDR3 for alpha chain variable domain of TCR clone 79792 (TRAV12-2, TRAJ4)
TAFSGGYNKLIF

SEQ ID NO: 159584 - protein, 14 aa, Homo sapiens
  CDR3 for beta chain variable domain of TCR clone 79792 (TRBV13, TRBJ2-5)
CASSLERVGETQYF

SEQ ID NO: 159585 - protein, 13 aa, Homo sapiens
  CDR3 for alpha chain variable domain of TCR clone 79793 (TRAV27, TRAJ41)
CAGEGNSGYALNF

SEQ ID NO: 159586 - protein, 14 aa, Homo sapiens
  CDR3 for beta chain variable domain of TCR clone 79793 (TRBV25-1, TRBJ1-1)
CASPHLGGNTEAFF

SEQ ID NO: 159587 - protein, 16 aa, Homo sapiens
  CDR3 for alpha chain variable domain of TCR clone 79794 (TRAV12-3, TRAJ53)
CAMSPGSGGSNYKLTF

SEQ ID NO: 159588 - protein, 11 aa, Homo sapiens
  CDR3 for beta chain variable domain of TCR clone 79794 (TRBV29-1, TRBJ2-5)
SAARTERGQYF

SEQ ID NO: 159589 - protein, 11 aa, Homo sapiens
  CDR3 for alpha chain variable domain of TCR clone 79795 (TRAV3, TRAJ21)
CAVGNFNKFYF

SEQ ID NO: 159590 - protein, 13 aa, Homo sapiens
  CDR3 for beta chain variable domain of TCR clone 79795 (TRBV19, TRBJ1-5)
CASSIGGEQPQHF

SEQ ID NO: 159591 - protein, 15 aa, Homo sapiens
  CDR3 for alpha chain variable domain of TCR clone 79796 (TRAV21, TRAJ53)
CATLNSGGSNYKLTF

SEQ ID NO: 159592 - protein, 12 aa, Homo sapiens
  CDR3 for beta chain variable domain of TCR clone 79796 (TRBV7-8, TRBJ2-7)
CASSLGDRKQYF

SEQ ID NO: 159593 - protein, 14 aa, Homo sapiens
  CDR3 for alpha chain variable domain of TCR clone 79797 (TRAV26-1, TRAJ38)
CIADNAGNNRKLIW

SEQ ID NO: 159594 - protein, 13 aa, Homo sapiens
  CDR3 for beta chain variable domain of TCR clone 79797 (TRBV29-1, TRBJ2-3)
SAALQGGADTQYF

SEQ ID NO: 159595 - protein, 14 aa, Homo sapiens
  CDR3 for alpha chain variable domain of TCR clone 79798 (TRAV35, TRAJ22)
CAELRPGSARQLTF

SEQ ID NO: 159596 - protein, 14 aa, Homo sapiens
  CDR3 for beta chain variable domain of TCR clone 79798 (TRBV11-3, TRBJ2-3)
CASSSGQGPDTQYF

SEQ ID NO: 159597 - protein, 14 aa, Homo sapiens
  CDR3 for alpha chain variable domain of TCR clone 79799 (TRAV30, TRAJ33)
CGTVAPRSNYQLIW

SEQ ID NO: 159598 - protein, 15 aa, Homo sapiens
  CDR3 for beta chain variable domain of TCR clone 79799 (TRBV20-1, TRBJ1-1)
CSASRGVTGNTEAFF

SEQ ID NO: 159599 - protein, 20 aa, Homo sapiens
  CDR3 for alpha chain variable domain of TCR clone 79800 (TRAV12-1, TRAJ42)
SSVIQPPTYVKGGSQGNLIF

SEQ ID NO: 159600 - protein, 18 aa, Homo sapiens
  CDR3 for beta chain variable domain of TCR clone 79800 (TRBV11-2, TRBJ2-3)
CASSLGGASRGAPNTQYF

SEQ ID NO: 159601 - protein, 13 aa, Homo sapiens
  CDR3 for alpha chain variable domain of TCR clone 79801 (TRAV1-2, TRAJ9)
CAALNTGGFKTIF

SEQ ID NO: 159602 - protein, 14 aa, Homo sapiens
  CDR3 for beta chain variable domain of TCR clone 79801 (TRBV20-1, TRBJ2-4)
CSASGRVGENIQYF

SEQ ID NO: 159603 - protein, 12 aa, Homo sapiens
  CDR3 for alpha chain variable domain of TCR clone 79802 (TRAV16, TRAJ10)
CSRMGGGNKLTF

SEQ ID NO: 159604 - protein, 13 aa, Homo sapiens
  CDR3 for beta chain variable domain of TCR clone 79802 (TRBV19, TRBJ2-7)
CASSIRSSYEQYF

SEQ ID NO: 159605 - protein, 14 aa, Homo sapiens
  CDR3 for alpha chain variable domain of TCR clone 79803 (TRAV35, TRAJ22)
CAGLRPGSPRQLTF

SEQ ID NO: 159606 - protein, 15 aa, Homo sapiens
  CDR3 for beta chain variable domain of TCR clone 79803 (TRBV12-4, TRBJ2-5)
CASSPPTGLQETQYF

SEQ ID NO: 159607 - protein, 12 aa, Homo sapiens
  CDR3 for alpha chain variable domain of TCR clone 79804 (TRAV21, TRAJ11)
CAATSGYSTLTF

SEQ ID NO: 159608 - protein, 14 aa, Homo sapiens
  CDR3 for beta chain variable domain of TCR clone 79804 (TRBV20-1, TRBJ2-7)
CSAPELAGVGGQYF

SEQ ID NO: 159609 - protein, 13 aa, Homo sapiens
  CDR3 for alpha chain variable domain of TCR clone 79805 (TRAV2, TRAJ36)
CAVDQTGANNLFF

SEQ ID NO: 159610 - protein, 12 aa, Homo sapiens
  CDR3 for beta chain variable domain of TCR clone 79805 (TRBV19, TRBJ1-1)
CASMNRYTGAFF

SEQ ID NO: 159611 - protein, 17 aa, Homo sapiens
  CDR3 for alpha chain variable domain of TCR clone 79806 (TRAV35, TRAJ28)
CAGLQVYSGAGSYQLTF

SEQ ID NO: 159612 - protein, 15 aa, Homo sapiens
  CDR3 for beta chain variable domain of TCR clone 79806 (TRBV2, TRBJ1-2)
CASSEIGGANYGYIF

SEQ ID NO: 159613 - protein, 14 aa, Homo sapiens
  CDR3 for alpha chain variable domain of TCR clone 79807 (TRAV1-2, TRAJ12)
CAVSGTDSSDKLIF

SEQ ID NO: 159614 - protein, 15 aa, Homo sapiens
  CDR3 for beta chain variable domain of TCR clone 79807 (TRBV2, TRBJ2-4)
CASSGTNLAKNIQYF

SEQ ID NO: 159615 - protein, 13 aa, Homo sapiens
  CDR3 for alpha chain variable domain of TCR clone 79808 (TRAV20, TRAJ31)
CAVQAWNNARLMF

SEQ ID NO: 159616 - protein, 13 aa, Homo sapiens
  CDR3 for beta chain variable domain of TCR clone 79808 (TRBV12-4, TRBJ1-2)
CASSLRQGKGYTS

SEQ ID NO: 159617 - protein, 12 aa, Homo sapiens
  CDR3 for alpha chain variable domain of TCR clone 79809 (TRAV3, TRAJ26)
CAVRDYGQNFVF

SEQ ID NO: 159618 - protein, 12 aa, Homo sapiens
  CDR3 for beta chain variable domain of TCR clone 79809 (TRBV11-2, TRBJ2-2)
CASSLGGGELFF

SEQ ID NO: 159619 - protein, 12 aa, Homo sapiens
  CDR3 for alpha chain variable domain of TCR clone 79810 (TRAV12-3, TRAJ17)
CAMTLTGNKLTF

SEQ ID NO: 159620 - protein, 15 aa, Homo sapiens
  CDR3 for beta chain variable domain of TCR clone 79810 (TRBV20-1, TRBJ2-7)
CSARDRVPGVDEQYF

SEQ ID NO: 159621 - protein, 12 aa, Homo sapiens
  CDR3 for alpha chain variable domain of TCR clone 79811 (TRAV3, TRAJ39)
CAVIEWSNMLTF

SEQ ID NO: 159622 - protein, 14 aa, Homo sapiens
  CDR3 for beta chain variable domain of TCR clone 79811 (TRBV7-8, TRBJ2-3)
CAGSFPDGQDTQYF

SEQ ID NO: 159623 - protein, 11 aa, Homo sapiens
  CDR3 for alpha chain variable domain of TCR clone 79812 (TRAV12-3, TRAJ43)
CAMSVSNDMRF

SEQ ID NO: 159624 - protein, 13 aa, Homo sapiens
  CDR3 for beta chain variable domain of TCR clone 79812 (TRBV5-7, TRBJ1-1)
CASSLFQNTEAFF

SEQ ID NO: 159625 - protein, 15 aa, Homo sapiens
  CDR3 for alpha chain variable domain of TCR clone 79813 (TRAV17, TRAJ57)
CATGPSQGGSEKLVF

SEQ ID NO: 159626 - protein, 15 aa, Homo sapiens
  CDR3 for beta chain variable domain of TCR clone 79813 (TRBV11-2, TRBJ2-2)
CASSSDRVNAGELFF

SEQ ID NO: 159627 - protein, 14 aa, Homo sapiens
  CDR3 for alpha chain variable domain of TCR clone 79814 (TRAV12-1, TRAJ12)
CVVTRMDSSYKLIF

SEQ ID NO: 159628 - protein, 15 aa, Homo sapiens
  CDR3 for beta chain variable domain of TCR clone 79814 (TRBV19, TRBJ1-2)
CASSVGQVLNYGYTF

SEQ ID NO: 159629 - protein, 14 aa, Homo sapiens
  CDR3 for alpha chain variable domain of TCR clone 79815 (TRAV12-1, TRAJ42)
CVVIYGGSQGNLIF

SEQ ID NO: 159630 - protein, 15 aa, Homo sapiens
  CDR3 for beta chain variable domain of TCR clone 79815 (TRBV7-9, TRBJ1-6)
CASSSPGRGNSPLHF

SEQ ID NO: 159631 - protein, 13 aa, Homo sapiens
  CDR3 for alpha chain variable domain of TCR clone 79816 (TRAV12-2, TRAJ20)
CAVYPSNDYKLSF

SEQ ID NO: 159632 - protein, 14 aa, Homo sapiens
  CDR3 for beta chain variable domain of TCR clone 79816 (TRBV4-1, TRBJ2-2)
CASSQAVNTGELFF

SEQ ID NO: 159633 - protein, 14 aa, Homo sapiens
  CDR3 for alpha chain variable domain of TCR clone 79817 (TRAV1-2, TRAJ16)
CAVNRFSDGQKLLF

SEQ ID NO: 159634 - protein, 16 aa, Homo sapiens
  CDR3 for beta chain variable domain of TCR clone 79817 (TRBV12-4, TRBJ2-2)
CASSFWIVGNTGELFF

SEQ ID NO: 159635 - protein, 12 aa, Homo sapiens
  CDR3 for alpha chain variable domain of TCR clone 79818 (TRAV12-3, TRAJ17)
CAMTLTGNKLIF

SEQ ID NO: 159636 - protein, 15 aa, Homo sapiens
  CDR3 for beta chain variable domain of TCR clone 79818 (TRBV20-1, TRBJ2-7)
CSARVRVSGMDEQYF

SEQ ID NO: 159637 - protein, 14 aa, Homo sapiens
  CDR3 for alpha chain variable domain of TCR clone 79819 (TRAV12-1, TRAJ9)
CVVNGYTGGFKTIF

SEQ ID NO: 159638 - protein, 13 aa, Homo sapiens
  CDR3 for beta chain variable domain of TCR clone 79819 (TRBV20-1, TRBJ1-1)
CSARAGGNTEAFF

SEQ ID NO: 159639 - protein, 10 aa, Homo sapiens
  CDR3 for alpha chain variable domain of TCR clone 79820 (TRAV23/DV6, TRAJ57)
CAASSTLSQG

SEQ ID NO: 159640 - protein, 20 aa, Homo sapiens
  CDR3 for beta chain variable domain of TCR clone 79820 (TRBV7-8, TRBJ2-2)
CASSHLFPGPTIHITGELFF

SEQ ID NO: 159641 - protein, 13 aa, Homo sapiens
  CDR3 for alpha chain variable domain of TCR clone 79821 (TRAV3, TRAJ29)
CAVREIIDTPLVF

SEQ ID NO: 159642 - protein, 14 aa, Homo sapiens
  CDR3 for beta chain variable domain of TCR clone 79821 (TRBV27, TRBJ2-1)
CASSATGGYNEQFF

SEQ ID NO: 159643 - protein, 14 aa, Homo sapiens
  CDR3 for alpha chain variable domain of TCR clone 79822 (TRAV25, TRAJ34)
CAGSTRRVSDKLIF

SEQ ID NO: 159644 - protein, 12 aa, Homo sapiens
  CDR3 for beta chain variable domain of TCR clone 79822 (TRBV11-2, TRBJ2-2)
CASSLGGGELFS

SEQ ID NO: 159645 - protein, 14 aa, Homo sapiens
  CDR3 for alpha chain variable domain of TCR clone 79823 (TRAV12-2, TRAJ13)
CALKKTGGYQKVTF

SEQ ID NO: 159646 - protein, 16 aa, Homo sapiens
  CDR3 for beta chain variable domain of TCR clone 79823 (TRBV4-1, TRBJ2-3)
CASSQSTSGAEDTQYF

SEQ ID NO: 159647 - protein, 12 aa, Homo sapiens
  CDR3 for alpha chain variable domain of TCR clone 79824 (TRAV8-1, TRAJ31)
CAVINNNARLMF

SEQ ID NO: 159648 - protein, 15 aa, Homo sapiens
  CDR3 for beta chain variable domain of TCR clone 79824 (TRBV20-1, TRBJ2-2)
CSARGGQGNTGEPFF

SEQ ID NO: 159649 - protein, 13 aa, Homo sapiens
  CDR3 for alpha chain variable domain of TCR clone 79825 (TRAV1-1, TRAJ9)
CAAKNTGGFKTIF

SEQ ID NO: 159650 - protein, 14 aa, Homo sapiens
  CDR3 for beta chain variable domain of TCR clone 79825 (TRBV20-1, TRBJ2-1)
CSAQIGGSANDQFF

SEQ ID NO: 159651 - protein, 17 aa, Homo sapiens
  CDR3 for alpha chain variable domain of TCR clone 79826 (TRAV1-2, TRAJ6)
CAVRDGPRAGGSYIPTF

SEQ ID NO: 159652 - protein, 20 aa, Homo sapiens
  CDR3 for beta chain variable domain of TCR clone 79826 (TRBV28, TRBJ2-1)
CASTPIGRSPGLAGGNEQFF

SEQ ID NO: 159653 - protein, 12 aa, Homo sapiens
  CDR3 for alpha chain variable domain of TCR clone 79827 (TRAV17, TRAJ12)
CATLRSSYKLIF

SEQ ID NO: 159654 - protein, 12 aa, Homo sapiens
  CDR3 for beta chain variable domain of TCR clone 79827 (TRBV11-2, TRBJ2-2)
CASSLGGGELFF

SEQ ID NO: 159655 - protein, 14 aa, Homo sapiens
  CDR3 for alpha chain variable domain of TCR clone 79828 (TRAV2, TRAJ37)
CAVDFTSNTGKLIF

SEQ ID NO: 159656 - protein, 13 aa, Homo sapiens
  CDR3 for beta chain variable domain of TCR clone 79828 (TRBV10-3, TRBJ1-2)
CAISERDSYGYTF

SEQ ID NO: 159657 - protein, 16 aa, Homo sapiens
  CDR3 for alpha chain variable domain of TCR clone 79829 (TRAV30, TRAJ24)
CGTEIVDADSWGKFQF

SEQ ID NO: 159658 - protein, 12 aa, Homo sapiens
  CDR3 for beta chain variable domain of TCR clone 79829 (TRBV7-3, TRBJ1-1)
CQQPGLGAEAFF

SEQ ID NO: 159659 - protein, 16 aa, Homo sapiens
  CDR3 for alpha chain variable domain of TCR clone 79830 (TRAV3, TRAJ5)
CAVRNLMDTGRRALTF

SEQ ID NO: 159660 - protein, 16 aa, Homo sapiens
  CDR3 for beta chain variable domain of TCR clone 79830 (TRBV4-2, TRBJ2-7)
CASSQEGLAKSYEQYF

SEQ ID NO: 159661 - protein, 16 aa, Homo sapiens
  CDR3 for alpha chain variable domain of TCR clone 79831 (TRAV20, TRAJ22)
CAVQASSSGSARPLTF

SEQ ID NO: 159662 - protein, 13 aa, Homo sapiens
  CDR3 for beta chain variable domain of TCR clone 79831 (TRBV7-2, TRBJ2-5)
CASSQTSVETQYF

SEQ ID NO: 159663 - protein, 15 aa, Homo sapiens
  CDR3 for alpha chain variable domain of TCR clone 79832 (TRAV2, TRAJ9)
CAVEDRGTGGFKTIF

SEQ ID NO: 159664 - protein, 15 aa, Homo sapiens
  CDR3 for beta chain variable domain of TCR clone 79832 (TRBV7-9, TRBJ2-2)
CASGPLDTFPGELFF

SEQ ID NO: 159665 - protein, 15 aa, Homo sapiens
  CDR3 for alpha chain variable domain of TCR clone 79833 (TRAV26-1, TRAJ40)
CIVRVTTSGTYKYIF

SEQ ID NO: 159666 - protein, 16 aa, Homo sapiens
  CDR3 for beta chain variable domain of TCR clone 79833 (TRBV20-1, TRBJ1-2)
CSASMGQGVANYGYTF

SEQ ID NO: 159667 - protein, 13 aa, Homo sapiens
  CDR3 for alpha chain variable domain of TCR clone 79834 (TRAV13-1, TRAJ5)
CAASDTGRRALTF

SEQ ID NO: 159668 - protein, 14 aa, Homo sapiens
  CDR3 for beta chain variable domain of TCR clone 79834 (TRBV19, TRBJ2-1)
CASGKSTQYNEQFF

SEQ ID NO: 159669 - protein, 15 aa, Homo sapiens
  CDR3 for alpha chain variable domain of TCR clone 79835 (TRAV17, TRAJ4)
CATGTWSGGYNKLIF

SEQ ID NO: 159670 - protein, 15 aa, Homo sapiens
  CDR3 for beta chain variable domain of TCR clone 79835 (TRBV20-1, TRBJ2-7)
CSVRDRVSGMDEQYF

SEQ ID NO: 159671 - protein, 12 aa, Homo sapiens
  CDR3 for alpha chain variable domain of TCR clone 79836 (TRAV2, TRAJ31)
CAVEDNNARLMF

SEQ ID NO: 159672 - protein, 16 aa, Homo sapiens
  CDR3 for beta chain variable domain of TCR clone 79836 (TRBV10-3, TRBJ2-1)
CAVSGVGDGGGGEQFF

SEQ ID NO: 159673 - protein, 17 aa, Homo sapiens
  CDR3 for alpha chain variable domain of TCR clone 79837 (TRAV4, TRAJ20)
CTTASWVKGNNDYKLSF

SEQ ID NO: 159674 - protein, 17 aa, Homo sapiens
  CDR3 for beta chain variable domain of TCR clone 79837 (TRBV11-2, TRBJ2-1)
CASSLYPPGVEYDEQFF

SEQ ID NO: 159675 - protein, 12 aa, Homo sapiens
  CDR3 for alpha chain variable domain of TCR clone 79838 (TRAV38-2/DV8, TRAJ48)
CALLSGNEKLTF

SEQ ID NO: 159676 - protein, 14 aa, Homo sapiens
  CDR3 for beta chain variable domain of TCR clone 79838 (TRBV2, TRBJ2-1)
CASSYRGTHNEQFF

SEQ ID NO: 159677 - protein, 15 aa, Homo sapiens
  CDR3 for alpha chain variable domain of TCR clone 79839 (TRAV26-1, TRAJ23)
CIVRVAGYQGGKLIF

SEQ ID NO: 159678 - protein, 14 aa, Homo sapiens
  CDR3 for beta chain variable domain of TCR clone 79839 (TRBV6-1, TRBJ1-3)
CASVQGGGGNTIYF

SEQ ID NO: 159679 - protein, 15 aa, Homo sapiens
  CDR3 for alpha chain variable domain of TCR clone 79840 (TRAV8-4, TRAJ3)
CAVTGENLVQQCLQD

SEQ ID NO: 159680 - protein, 16 aa, Homo sapiens
  CDR3 for beta chain variable domain of TCR clone 79840 (TRBV4-2, TRBJ1-1)
CASSQAGFGMNTEAFF

SEQ ID NO: 159681 - protein, 13 aa, Homo sapiens
  CDR3 for alpha chain variable domain of TCR clone 79841 (TRAV13-1, TRAJ21)
CAASIYNFNKFYF

SEQ ID NO: 159682 - protein, 13 aa, Homo sapiens
  CDR3 for beta chain variable domain of TCR clone 79841 (TRBV18, TRBJ2-5)
CASSLQGQETQYF

SEQ ID NO: 159683 - protein, 14 aa, Homo sapiens
  CDR3 for alpha chain variable domain of TCR clone 79842 (TRAV2, TRAJ37)
CAVDFTSNTGKLIF

SEQ ID NO: 159684 - protein, 14 aa, Homo sapiens
  CDR3 for beta chain variable domain of TCR clone 79842 (TRBV11-2, TRBJ2-7)
CASSLGAGAYEQYF

SEQ ID NO: 159685 - protein, 14 aa, Homo sapiens
  CDR3 for alpha chain variable domain of TCR clone 79843 (TRAV12-2, TRAJ13)
CAVKKTGGDQKVTL

SEQ ID NO: 159686 - protein, 15 aa, Homo sapiens
  CDR3 for beta chain variable domain of TCR clone 79843 (TRBV27, TRBJ2-1)
CASSNGGGSSNEQFF

SEQ ID NO: 159687 - protein, 14 aa, Homo sapiens
  CDR3 for alpha chain variable domain of TCR clone 79844 (TRAV12-1, TRAJ26)
CVVKGSNYGQNFVF

SEQ ID NO: 159688 - protein, 16 aa, Homo sapiens
  CDR3 for beta chain variable domain of TCR clone 79844 (TRBV12-5, TRBJ2-5)
CASGPRTSGNQETQYF

SEQ ID NO: 159689 - protein, 13 aa, Homo sapiens
  CDR3 for alpha chain variable domain of TCR clone 79845 (TRAV5, TRAJ30)
CAEIANRDDKIIF

SEQ ID NO: 159690 - protein, 13 aa, Homo sapiens
  CDR3 for beta chain variable domain of TCR clone 79845 (TRBV7-9, TRBJ1-2)
CASSLKQNYGYTF

SEQ ID NO: 159691 - protein, 17 aa, Homo sapiens
  CDR3 for alpha chain variable domain of TCR clone 79846 (TRAV13-1, TRAJ52)
CAASSGAGGTSYGKLTF

SEQ ID NO: 159692 - protein, 17 aa, Homo sapiens
  CDR3 for beta chain variable domain of TCR clone 79846 (TRBV7-8, TRBJ2-6)
CASSAGTGGAGANVLTF

SEQ ID NO: 159693 - protein, 14 aa, Homo sapiens
  CDR3 for alpha chain variable domain of TCR clone 79847 (TRAV12-2, TRAJ13)
CAVKKTGGYQKVTF

SEQ ID NO: 159694 - protein, 15 aa, Homo sapiens
  CDR3 for beta chain variable domain of TCR clone 79847 (TRBV7-8, TRBJ2-1)
CASSLAGGLYNEQFF

SEQ ID NO: 159695 - protein, 16 aa, Homo sapiens
  CDR3 for alpha chain variable domain of TCR clone 79848 (TRAV12-3, TRAJ53)
CAMSPGSGGSNYKLTF

SEQ ID NO: 159696 - protein, 13 aa, Homo sapiens
  CDR3 for beta chain variable domain of TCR clone 79848 (TRBV12-5, TRBJ2-3)
CASGDQQSDTQYF

SEQ ID NO: 159697 - protein, 15 aa, Homo sapiens
  CDR3 for alpha chain variable domain of TCR clone 79849 (TRAV17, TRAJ57)
CATGPSQGGSEKLVF

SEQ ID NO: 159698 - protein, 18 aa, Homo sapiens
  CDR3 for beta chain variable domain of TCR clone 79849 (TRBV7-9, TRBJ2-7)
CASSLTISGSRTWYEQYF

SEQ ID NO: 159699 - protein, 16 aa, Homo sapiens
  CDR3 for alpha chain variable domain of TCR clone 79850 (TRAV30, TRAJ24)
CGTEIVDAESWGKFQF

SEQ ID NO: 159700 - protein, 16 aa, Homo sapiens
  CDR3 for beta chain variable domain of TCR clone 79850 (TRBV28, TRBJ2-7)
CASSLFFETGGPEQYF

SEQ ID NO: 159701 - protein, 13 aa, Homo sapiens
  CDR3 for alpha chain variable domain of TCR clone 79851 (TRAV13-1, TRAJ6)
CAARRGGSYIPTF

SEQ ID NO: 159702 - protein, 16 aa, Homo sapiens
  CDR3 for beta chain variable domain of TCR clone 79851 (TRBV7-9, TRBJ2-2)
CASSLATGVGTGELFF

SEQ ID NO: 159703 - protein, 14 aa, Homo sapiens
  CDR3 for alpha chain variable domain of TCR clone 79852 (TRAV12-2, TRAJ17)
CAVLFKAAGNKLTF

SEQ ID NO: 159704 - protein, 16 aa, Homo sapiens
  CDR3 for beta chain variable domain of TCR clone 79852 (TRBV7-2, TRBJ1-3)
CASSRLEASSGNTIYF

SEQ ID NO: 159705 - protein, 14 aa, Homo sapiens
  CDR3 for alpha chain variable domain of TCR clone 79853 (TRAV13-1, TRAJ44)
CATKATGTASKLTF

SEQ ID NO: 159706 - protein, 15 aa, Homo sapiens
  CDR3 for beta chain variable domain of TCR clone 79853 (TRBV19, TRBJ2-1)
CASIKGRGPYNEQFF

SEQ ID NO: 159707 - protein, 15 aa, Homo sapiens
  CDR3 for alpha chain variable domain of TCR clone 79854 (TRAV3, TRAJ22)
CAVRDRGGSAKQLTF

SEQ ID NO: 159708 - protein, 16 aa, Homo sapiens
  CDR3 for beta chain variable domain of TCR clone 79854 (TRBV5-4, TRBJ2-3)
CASQQPGAGGADTQYF

SEQ ID NO: 159709 - protein, 16 aa, Homo sapiens
  CDR3 for alpha chain variable domain of TCR clone 79855 (TRAV3, TRAJ37)
CAVRGKGSGNTGKLIF

SEQ ID NO: 159710 - protein, 15 aa, Homo sapiens
  CDR3 for beta chain variable domain of TCR clone 79855 (TRBV2, TRBJ2-1)
CASSELAGSYNEQFF

SEQ ID NO: 159711 - protein, 14 aa, Homo sapiens
  CDR3 for alpha chain variable domain of TCR clone 79856 (TRAV8-2, TRAJ45)
CVVSAGGGAGGLTF

SEQ ID NO: 159712 - protein, 12 aa, Homo sapiens
  CDR3 for beta chain variable domain of TCR clone 79856 (TRBV12-4, TRBJ2-1)
CASSLVRVEQFF

SEQ ID NO: 159713 - protein, 14 aa, Homo sapiens
  CDR3 for alpha chain variable domain of TCR clone 79857 (TRAV38-1, TRAJ29)
CAFITPSGNTPLVF

SEQ ID NO: 159714 - protein, 15 aa, Homo sapiens
  CDR3 for beta chain variable domain of TCR clone 79857 (TRBV6-3, TRBJ2-2)
CASRGMTVDTGELFF

SEQ ID NO: 159715 - protein, 13 aa, Homo sapiens
  CDR3 for alpha chain variable domain of TCR clone 79858 (TRAV16, TRAJ34)
CALRTWNTNKLIF

SEQ ID NO: 159716 - protein, 16 aa, Homo sapiens
  CDR3 for beta chain variable domain of TCR clone 79858 (TRBV2, TRBJ1-3)
CASSERGVNSGNTIYF

SEQ ID NO: 159717 - protein, 11 aa, Homo sapiens
  CDR3 for alpha chain variable domain of TCR clone 79859 (TRAV3, TRAJ21)
CAVGNFNKFYF

SEQ ID NO: 159718 - protein, 13 aa, Homo sapiens
  CDR3 for beta chain variable domain of TCR clone 79859 (TRBV9, TRBJ2-1)
CASSPSGGNEQFF

SEQ ID NO: 159719 - protein, 13 aa, Homo sapiens
  CDR3 for alpha chain variable domain of TCR clone 79860 (TRAV8-3, TRAJ28)
CAVGAVGSYQLTF

SEQ ID NO: 159720 - protein, 14 aa, Homo sapiens
  CDR3 for beta chain variable domain of TCR clone 79860 (TRBV7-2, TRBJ2-7)
CASRSLGAAYEQYF

SEQ ID NO: 159721 - protein, 14 aa, Homo sapiens
  CDR3 for alpha chain variable domain of TCR clone 79861 (TRAV12-3, TRAJ10)
SHLPMTGGGNKLTF

SEQ ID NO: 159722 - protein, 16 aa, Homo sapiens
  CDR3 for beta chain variable domain of TCR clone 79861 (TRBV5-8, TRBJ2-2)
CASSLINPGGAGKLFF

SEQ ID NO: 159723 - protein, 14 aa, Homo sapiens
  CDR3 for alpha chain variable domain of TCR clone 79862 (TRAV27, TRAJ22)
CAGLPSGSARQLTF

SEQ ID NO: 159724 - protein, 17 aa, Homo sapiens
  CDR3 for beta chain variable domain of TCR clone 79862 (TRBV20-1, TRBJ2-1)
CSASSSGLAGSYNEQFF

SEQ ID NO: 159725 - protein, 13 aa, Homo sapiens
  CDR3 for alpha chain variable domain of TCR clone 79863 (TRAV35, TRAJ43)
CAGYPYNNNDMSF

SEQ ID NO: 159726 - protein, 15 aa, Homo sapiens
  CDR3 for beta chain variable domain of TCR clone 79863 (TRBV25-1, TRBJ1-4)
CASSKRIATNEKLFF

SEQ ID NO: 159727 - protein, 12 aa, Homo sapiens
  CDR3 for alpha chain variable domain of TCR clone 79864 (TRAV13-1, TRAJ48)
CAANFGDEKLTF

SEQ ID NO: 159728 - protein, 13 aa, Homo sapiens
  CDR3 for beta chain variable domain of TCR clone 79864 (TRBV7-3, TRBJ1-1)
CASSQDWGAEAFF

SEQ ID NO: 159729 - protein, 15 aa, Homo sapiens
  CDR3 for alpha chain variable domain of TCR clone 79865 (TRAV10, TRAJ6)
CVVSGGSGGSYIPTF

SEQ ID NO: 159730 - protein, 15 aa, Homo sapiens
  CDR3 for beta chain variable domain of TCR clone 79865 (TRBV6-5, TRBJ2-1)
CASRGDFDYYNEQFF

SEQ ID NO: 159731 - protein, 13 aa, Homo sapiens
  CDR3 for alpha chain variable domain of TCR clone 79866 (TRAV12-2, TRAJ34)
CAGRGYNTDKLIF

SEQ ID NO: 159732 - protein, 15 aa, Homo sapiens
  CDR3 for beta chain variable domain of TCR clone 79866 (TRBV28, TRBJ2-1)
CASRTGAGVIARQFF

SEQ ID NO: 159733 - protein, 11 aa, Homo sapiens
  CDR3 for alpha chain variable domain of TCR clone 79867 (TRAV4, TRAJ23)
CLVAPGGKLIF

SEQ ID NO: 159734 - protein, 11 aa, Homo sapiens
  CDR3 for beta chain variable domain of TCR clone 79867 (TRBV11-2, TRBJ2-2)
CASSLPGELFF

SEQ ID NO: 159735 - protein, 13 aa, Homo sapiens
  CDR3 for alpha chain variable domain of TCR clone 79868 (TRAV2, TRAJ40)
CAVVTSGTYNYIF

SEQ ID NO: 159736 - protein, 16 aa, Homo sapiens
  CDR3 for beta chain variable domain of TCR clone 79868 (TRBV7-9, TRBJ1-3)
CASSLGAGSSGNTIYF

SEQ ID NO: 159737 - protein, 13 aa, Homo sapiens
  CDR3 for alpha chain variable domain of TCR clone 79869 (TRAV3, TRAJ27)
CAVTNTSAGKSTF

SEQ ID NO: 159738 - protein, 13 aa, Homo sapiens
  CDR3 for beta chain variable domain of TCR clone 79869 (TRBV19, TRBJ2-7)
CASQSYGAGEQYF

SEQ ID NO: 159739 - protein, 12 aa, Homo sapiens
  CDR3 for alpha chain variable domain of TCR clone 79870 (TRAV26-1, TRAJ17)
CIVRSAGNKLTF

SEQ ID NO: 159740 - protein, 15 aa, Homo sapiens
  CDR3 for beta chain variable domain of TCR clone 79870 (TRBV6-1, TRBJ2-7)
CASSEPIAATTEQYF

SEQ ID NO: 159741 - protein, 13 aa, Homo sapiens
  CDR3 for alpha chain variable domain of TCR clone 79871 (TRAV8-1, TRAJ30)
CAVIMNRDDKIIF

SEQ ID NO: 159742 - protein, 16 aa, Homo sapiens
  CDR3 for beta chain variable domain of TCR clone 79871 (TRBV6-6, TRBJ2-1)
CASSYSFSGSYNEQFF

SEQ ID NO: 159743 - protein, 16 aa, Homo sapiens
  CDR3 for alpha chain variable domain of TCR clone 79872 (TRAV30, TRAJ24)
CGTEIADADSWGKFQF

SEQ ID NO: 159744 - protein, 12 aa, Homo sapiens
  CDR3 for beta chain variable domain of TCR clone 79872 (TRBV14, TRBJ2-5)
CASSQLKETQYF

SEQ ID NO: 159745 - protein, 13 aa, Homo sapiens
  CDR3 for alpha chain variable domain of TCR clone 79873 (TRAV13-1, TRAJ39)
CAASIVMQATCSA

SEQ ID NO: 159746 - protein, 16 aa, Homo sapiens
  CDR3 for beta chain variable domain of TCR clone 79873 (TRBV20-1, TRBJ1-4)
CSAPGQGLLTNEKLFF

SEQ ID NO: 159747 - protein, 14 aa, Homo sapiens
  CDR3 for alpha chain variable domain of TCR clone 79874 (TRAV17, TRAJ54)
CATDANQGAQKRVF

SEQ ID NO: 159748 - protein, 12 aa, Homo sapiens
  CDR3 for beta chain variable domain of TCR clone 79874 (TRBV7-9, TRBJ2-7)
CASSIKREEQYF

SEQ ID NO: 159749 - protein, 14 aa, Homo sapiens
  CDR3 for alpha chain variable domain of TCR clone 79875 (TRAV12-3, TRAJ10)
SHLPLTGGGNKLTF

SEQ ID NO: 159750 - protein, 16 aa, Homo sapiens
  CDR3 for beta chain variable domain of TCR clone 79875 (TRBV6-6, TRBJ2-3)
CASSYSHAGSTDTQYF

SEQ ID NO: 159751 - protein, 11 aa, Homo sapiens
  CDR3 for alpha chain variable domain of TCR clone 79876 (TRAV2, TRAJ20)
AAVYRDCKLSF

SEQ ID NO: 159752 - protein, 15 aa, Homo sapiens
  CDR3 for beta chain variable domain of TCR clone 79876 (TRBV20-1, TRBJ2-5)
CSAEGTGGLQETQYF

SEQ ID NO: 159753 - protein, 14 aa, Homo sapiens
  CDR3 for alpha chain variable domain of TCR clone 79877 (TRAV13-1, TRAJ35)
CAASKGGFGNVLHC

SEQ ID NO: 159754 - protein, 12 aa, Homo sapiens
  CDR3 for beta chain variable domain of TCR clone 79877 (TRBV28, TRBJ2-6)
CAIQAGANVLTF

SEQ ID NO: 159755 - protein, 14 aa, Homo sapiens
  CDR3 for alpha chain variable domain of TCR clone 79878 (TRAV26-1, TRAJ38)
CIADNAGNNRKLIW

SEQ ID NO: 159756 - protein, 17 aa, Homo sapiens
  CDR3 for beta chain variable domain of TCR clone 79878 (TRBV7-9, TRBJ2-3)
CASNPTVAGDLTDTQYF

SEQ ID NO: 159757 - protein, 14 aa, Homo sapiens
  CDR3 for alpha chain variable domain of TCR clone 79879 (TRAV12-2, TRAJ36)
CAVNPPTGANNLLF

SEQ ID NO: 159758 - protein, 13 aa, Homo sapiens
  CDR3 for beta chain variable domain of TCR clone 79879 (TRBV20-1, TRBJ1-6)
CSAPTGLGSPLHF

SEQ ID NO: 159759 - protein, 13 aa, Homo sapiens
  CDR3 for alpha chain variable domain of TCR clone 79880 (TRAV13-1, TRAJ40)
CAARTSGTYKYIF

SEQ ID NO: 159760 - protein, 17 aa, Homo sapiens
  CDR3 for beta chain variable domain of TCR clone 79880 (TRBV20-1, TRBJ2-1)
CSARDPLAGGWDNEQFF

SEQ ID NO: 159761 - protein, 15 aa, Homo sapiens
  CDR3 for alpha chain variable domain of TCR clone 79881 (TRAV8-6, TRAJ26)
CAVSDQSPGGQNFVF

SEQ ID NO: 159762 - protein, 13 aa, Homo sapiens
  CDR3 for beta chain variable domain of TCR clone 79881 (TRBV7-9, TRBJ1-2)
CASSLKQNYGYTF

SEQ ID NO: 159763 - protein, 23 aa, Homo sapiens
  CDR3 for alpha chain variable domain of TCR clone 79882 (TRAV26-1, )
CIADNAGNNHIQNPDPAVYQLRD

SEQ ID NO: 159764 - protein, 16 aa, Homo sapiens
  CDR3 for beta chain variable domain of TCR clone 79882 (TRBV19, TRBJ2-1)
CASSKAGPSSYNEQFF

SEQ ID NO: 159765 - protein, 17 aa, Homo sapiens
  CDR3 for alpha chain variable domain of TCR clone 79883 (TRAV4, TRAJ13)
CLVGVQGSSGGYQKFTF

SEQ ID NO: 159766 - protein, 18 aa, Homo sapiens
  CDR3 for beta chain variable domain of TCR clone 79883 (TRBV15, TRBJ2-3)
CATSRDGARSWDTDTQYF

SEQ ID NO: 159767 - protein, 13 aa, Homo sapiens
  CDR3 for alpha chain variable domain of TCR clone 79884 (TRAV13-1, TRAJ5)
CAAEHTGRRALTF

SEQ ID NO: 159768 - protein, 13 aa, Homo sapiens
  CDR3 for beta chain variable domain of TCR clone 79884 (TRBV28, TRBJ2-7)
CASSLPSRYEQYF

SEQ ID NO: 159769 - protein, 14 aa, Homo sapiens
  CDR3 for alpha chain variable domain of TCR clone 79885 (TRAV26-1, TRAJ38)
CIADNAGNKRKLIW

SEQ ID NO: 159770 - protein, 17 aa, Homo sapiens
  CDR3 for beta chain variable domain of TCR clone 79885 (TRBV7-9, TRBJ2-3)
CASSPTVAGDLTDTQYF

SEQ ID NO: 159771 - protein, 14 aa, Homo sapiens
  CDR3 for alpha chain variable domain of TCR clone 79886 (TRAV12-3, TRAJ10)
SHLPPTGGGNKLTF

SEQ ID NO: 159772 - protein, 14 aa, Homo sapiens
  CDR3 for beta chain variable domain of TCR clone 79886 (TRBV25-1, TRBJ1-1)
CASTHLGGNTEAFF

SEQ ID NO: 159773 - protein, 16 aa, Homo sapiens
  CDR3 for alpha chain variable domain of TCR clone 79887 (TRAV30, TRAJ24)
CGTEIVDADSWGKFQF

SEQ ID NO: 159774 - protein, 15 aa, Homo sapiens
  CDR3 for beta chain variable domain of TCR clone 79887 (TRBV5-1, TRBJ2-3)
CASSSTSGSTDTQYF

SEQ ID NO: 159775 - protein, 16 aa, Homo sapiens
  CDR3 for alpha chain variable domain of TCR clone 79888 (TRAV4, TRAJ22)
CLVGDLYSGSARQLTF

SEQ ID NO: 159776 - protein, 16 aa, Homo sapiens
  CDR3 for beta chain variable domain of TCR clone 79888 (TRBV7-9, TRBJ2-1)
CASSDVAGGSYNKQFF

SEQ ID NO: 159777 - protein, 15 aa, Homo sapiens
  CDR3 for alpha chain variable domain of TCR clone 79889 (TRAV23/DV6, TRAJ18)
CAARYRGSTLGRLYF

SEQ ID NO: 159778 - protein, 13 aa, Homo sapiens
  CDR3 for beta chain variable domain of TCR clone 79889 (TRBV19, TRBJ1-2)
CASSQGQVYGYTF

SEQ ID NO: 159779 - protein, 15 aa, Homo sapiens
  CDR3 for alpha chain variable domain of TCR clone 79890 (TRAV17, TRAJ56)
CATEPFTGANSKLKF

SEQ ID NO: 159780 - protein, 15 aa, Homo sapiens
  CDR3 for beta chain variable domain of TCR clone 79890 (TRBV28, TRBJ1-5)
CASSRTGGYVQPQHF

SEQ ID NO: 159781 - protein, 12 aa, Homo sapiens
  CDR3 for alpha chain variable domain of TCR clone 79891 (TRAV21, TRAJ56)
CAVGVNRSKLTF

SEQ ID NO: 159782 - protein, 11 aa, Homo sapiens
  CDR3 for beta chain variable domain of TCR clone 79891 (TRBV12-4, TRBJ2-3)
CASTATDTQYF

SEQ ID NO: 159783 - protein, 14 aa, Homo sapiens
  CDR3 for alpha chain variable domain of TCR clone 79892 (TRAV12-2, TRAJ13)
CAVKKTGGYQKVTF

SEQ ID NO: 159784 - protein, 15 aa, Homo sapiens
  CDR3 for beta chain variable domain of TCR clone 79892 (TRBV2, TRBJ2-5)
RASSEQGLIGETQYF

SEQ ID NO: 159785 - protein, 15 aa, Homo sapiens
  CDR3 for alpha chain variable domain of TCR clone 79893 (TRAV27, TRAJ38)
CAARRNAGNNRNLIW

SEQ ID NO: 159786 - protein, 13 aa, Homo sapiens
  CDR3 for beta chain variable domain of TCR clone 79893 (TRBV12-5, TRBJ2-3)
CASGDRRSDTQYF

SEQ ID NO: 159787 - protein, 15 aa, Homo sapiens
  CDR3 for alpha chain variable domain of TCR clone 79894 (TRAV17, TRAJ56)
CATEPFTGANSKLTF

SEQ ID NO: 159788 - protein, 15 aa, Homo sapiens
  CDR3 for beta chain variable domain of TCR clone 79894 (TRBV28, TRBJ1-5)
CASGRTGGYVQPQHF

SEQ ID NO: 159789 - protein, 15 aa, Homo sapiens
  CDR3 for alpha chain variable domain of TCR clone 79895 (TRAV14/DV4, TRAJ12)
CAMREGRDSSYKLIF

SEQ ID NO: 159790 - protein, 16 aa, Homo sapiens
  CDR3 for beta chain variable domain of TCR clone 79895 (TRBV11-2, TRBJ1-2)
CASSLDTGGADYGYTF

SEQ ID NO: 159791 - protein, 13 aa, Homo sapiens
  CDR3 for alpha chain variable domain of TCR clone 79896 (TRAV2, TRAJ29)
CAAGNSGNTPLVF

SEQ ID NO: 159792 - protein, 16 aa, Homo sapiens
  CDR3 for beta chain variable domain of TCR clone 79896 (TRBV7-9, TRBJ1-2)
CASNPGGGAINYGYTF

SEQ ID NO: 159793 - protein, 16 aa, Homo sapiens
  CDR3 for alpha chain variable domain of TCR clone 79897 (TRAV30, TRAJ24)
CGTEIVDADSWGKFQF

SEQ ID NO: 159794 - protein, 18 aa, Homo sapiens
  CDR3 for beta chain variable domain of TCR clone 79897 (TRBV12-5, TRBJ2-5)
CASGTDTSRDPVLRARHA

SEQ ID NO: 159795 - protein, 16 aa, Homo sapiens
  CDR3 for alpha chain variable domain of TCR clone 79898 (TRAV12-3, TRAJ53)
CAMSPGSGGSNYKLAF

SEQ ID NO: 159796 - protein, 12 aa, Homo sapiens
  CDR3 for beta chain variable domain of TCR clone 79898 (TRBV7-8, TRBJ2-7)
CASSLGDREQYF

SEQ ID NO: 159797 - protein, 15 aa, Homo sapiens
  CDR3 for alpha chain variable domain of TCR clone 79899 (TRAV13-1, TRAJ44)
CAASRGGGTARKLTF

SEQ ID NO: 159798 - protein, 14 aa, Homo sapiens
  CDR3 for beta chain variable domain of TCR clone 79899 (TRBV7-2, TRBJ2-5)
CASSPRGSSETQYF

SEQ ID NO: 159799 - protein, 11 aa, Homo sapiens
  CDR3 for alpha chain variable domain of TCR clone 79900 (TRAV3, TRAJ21)
CAVGNFNKFYF

SEQ ID NO: 159800 - protein, 14 aa, Homo sapiens
  CDR3 for beta chain variable domain of TCR clone 79900 (TRBV5-1, TRBJ2-3)
CASSLFGPTDTQYF

SEQ ID NO: 159801 - protein, 15 aa, Homo sapiens
  CDR3 for alpha chain variable domain of TCR clone 79901 (TRAV8-3, TRAJ27)
CAVGPSKTNAGKSTF

SEQ ID NO: 159802 - protein, 14 aa, Homo sapiens
  CDR3 for beta chain variable domain of TCR clone 79901 (TRBV7-3, TRBJ2-2)
CASSSGGYTGELFF

SEQ ID NO: 159803 - protein, 14 aa, Homo sapiens
  CDR3 for alpha chain variable domain of TCR clone 79902 (TRAV12-2, TRAJ5)
YAVNRSTGRRALTF

SEQ ID NO: 159804 - protein, 12 aa, Homo sapiens
  CDR3 for beta chain variable domain of TCR clone 79902 (TRBV19, TRBJ1-5)
CASSIAQQPQHF

SEQ ID NO: 159805 - protein, 12 aa, Homo sapiens
  CDR3 for alpha chain variable domain of TCR clone 79903 (TRAV29/DV5, TRAJ49)
SAATDTGNQFYF

SEQ ID NO: 159806 - protein, 12 aa, Homo sapiens
  CDR3 for beta chain variable domain of TCR clone 79903 (TRBV12-4, TRBJ2-7)
CASSLGGYEQYF

SEQ ID NO: 159807 - protein, 18 aa, Homo sapiens
  CDR3 for alpha chain variable domain of TCR clone 79904 (TRAV21, TRAJ52)
CAVRPSPAGGTSYGKLTF

SEQ ID NO: 159808 - protein, 14 aa, Homo sapiens
  CDR3 for beta chain variable domain of TCR clone 79904 (TRBV4-1, TRBJ1-1)
CASSRSGQSFEAFF

SEQ ID NO: 159809 - protein, 14 aa, Homo sapiens
  CDR3 for alpha chain variable domain of TCR clone 79905 (TRAV26-1, TRAJ49)
CIVRLTNTGNQIYF

SEQ ID NO: 159810 - protein, 13 aa, Homo sapiens
  CDR3 for beta chain variable domain of TCR clone 79905 (TRBV10-1, TRBJ1-1)
CASQGQTNTEAFF

SEQ ID NO: 159811 - protein, 13 aa, Homo sapiens
  CDR3 for alpha chain variable domain of TCR clone 79906 (TRAV40, TRAJ43)
SAVYYRPNNDMRF

SEQ ID NO: 159812 - protein, 15 aa, Homo sapiens
  CDR3 for beta chain variable domain of TCR clone 79906 (TRBV20-1, TRBJ2-7)
CSARDRVSGMDEQYF

SEQ ID NO: 159813 - protein, 13 aa, Homo sapiens
  CDR3 for alpha chain variable domain of TCR clone 79907 (TRAV8-3, TRAJ28)
CAVGAVGSYQLTF

SEQ ID NO: 159814 - protein, 16 aa, Homo sapiens
  CDR3 for beta chain variable domain of TCR clone 79907 (TRBV27, TRBJ2-2)
CASSFRGLVRTGELFF

SEQ ID NO: 159815 - protein, 13 aa, Homo sapiens
  CDR3 for alpha chain variable domain of TCR clone 79908 (TRAV8-6, TRAJ8)
CAVSNTGFHKLVF

SEQ ID NO: 159816 - protein, 15 aa, Homo sapiens
  CDR3 for beta chain variable domain of TCR clone 79908 (TRBV28, TRBJ2-5)
CASSSGRTIQETQYF

SEQ ID NO: 159817 - protein, 17 aa, Homo sapiens
  CDR3 for alpha chain variable domain of TCR clone 79909 (TRAV3, TRAJ42)
CAVRGRDYGGSQGNLIF

SEQ ID NO: 159818 - protein, 15 aa, Homo sapiens
  CDR3 for beta chain variable domain of TCR clone 79909 (TRBV3-1, TRBJ2-1)
CASSQVVDDWEEQFF

SEQ ID NO: 159819 - protein, 13 aa, Homo sapiens
  CDR3 for alpha chain variable domain of TCR clone 79910 (TRAV8-6, TRAJ49)
CAVITNTGNQFYF

SEQ ID NO: 159820 - protein, 16 aa, Homo sapiens
  CDR3 for beta chain variable domain of TCR clone 79910 (TRBV7-9, TRBJ1-2)
CASSLGFSSGEDGYTF

SEQ ID NO: 159821 - protein, 16 aa, Homo sapiens
  CDR3 for alpha chain variable domain of TCR clone 79911 (TRAV30, TRAJ24)
CGTEIVDADSWGKFQF

SEQ ID NO: 159822 - protein, 14 aa, Homo sapiens
  CDR3 for beta chain variable domain of TCR clone 79911 (TRBV23-1, TRBJ2-5)
CASSFLRSQETQYF

SEQ ID NO: 159823 - protein, 17 aa, Homo sapiens
  CDR3 for alpha chain variable domain of TCR clone 79912 (TRAV8-6, TRAJ58)
CAVSSCVGETSGSRLTF

SEQ ID NO: 159824 - protein, 14 aa, Homo sapiens
  CDR3 for beta chain variable domain of TCR clone 79912 (TRBV2, TRBJ2-7)
CASRPPGGHYEQYF

SEQ ID NO: 159825 - protein, 14 aa, Homo sapiens
  CDR3 for alpha chain variable domain of TCR clone 79913 (TRAV16, TRAJ15)
CTLSFNQAGTALIF

SEQ ID NO: 159826 - protein, 16 aa, Homo sapiens
  CDR3 for beta chain variable domain of TCR clone 79913 (TRBV9, TRBJ2-7)
CASSAGPDRSPYEQYF

SEQ ID NO: 159827 - protein, 18 aa, Homo sapiens
  CDR3 for alpha chain variable domain of TCR clone 79914 (TRAV21, TRAJ52)
CAVRPSPAGGTSYGKLTF

SEQ ID NO: 159828 - protein, 15 aa, Homo sapiens
  CDR3 for beta chain variable domain of TCR clone 79914 (TRBV4-1, TRBJ2-1)
CASSQVLAGGDEQFF

SEQ ID NO: 159829 - protein, 12 aa, Homo sapiens
  CDR3 for alpha chain variable domain of TCR clone 79915 (TRAV23/DV6, TRAJ31)
CAARRIGARLMF

SEQ ID NO: 159830 - protein, 13 aa, Homo sapiens
  CDR3 for beta chain variable domain of TCR clone 79915 (TRBV28, TRBJ2-7)
CASKAGGVYEQYF

SEQ ID NO: 159831 - protein, 13 aa, Homo sapiens
  CDR3 for alpha chain variable domain of TCR clone 79916 (TRAV12-1, TRAJ31)
CVGNMNNNARLMF

SEQ ID NO: 159832 - protein, 15 aa, Homo sapiens
  CDR3 for beta chain variable domain of TCR clone 79916 (TRBV4-1, TRBJ1-2)
CASSQGQGAAYGYTF

SEQ ID NO: 159833 - protein, 13 aa, Homo sapiens
  CDR3 for alpha chain variable domain of TCR clone 79917 (TRAV12-1, TRAJ9)
RVVLNTGGFKTIF

SEQ ID NO: 159834 - protein, 13 aa, Homo sapiens
  CDR3 for beta chain variable domain of TCR clone 79917 (TRBV20-1, TRBJ1-1)
CSARGGGNTEAFF

SEQ ID NO: 159835 - protein, 13 aa, Homo sapiens
  CDR3 for alpha chain variable domain of TCR clone 79918 (TRAV36/DV7, TRAJ34)
CAVGEVNTDKLIF

SEQ ID NO: 159836 - protein, 13 aa, Homo sapiens
  CDR3 for beta chain variable domain of TCR clone 79918 (TRBV6-1, TRBJ1-1)
CASSRQGNTEAFF

SEQ ID NO: 159837 - protein, 15 aa, Homo sapiens
  CDR3 for alpha chain variable domain of TCR clone 79919 (TRAV12-1, TRAJ9)
CVVSFGYTGGFKTIF

SEQ ID NO: 159838 - protein, 13 aa, Homo sapiens
  CDR3 for beta chain variable domain of TCR clone 79919 (TRBV2, TRBJ1-4)
CASSERAGEKLFF

SEQ ID NO: 159839 - protein, 14 aa, Homo sapiens
  CDR3 for alpha chain variable domain of TCR clone 79920 (TRAV3, TRAJ44)
CAVNNTGTASKPTF

SEQ ID NO: 159840 - protein, 14 aa, Homo sapiens
  CDR3 for beta chain variable domain of TCR clone 79920 (TRBV11-2, TRBJ2-3)
CASSLGGGTDTQYF

SEQ ID NO: 159841 - protein, 13 aa, Homo sapiens
  CDR3 for alpha chain variable domain of TCR clone 79921 (TRAV29/DV5, TRAJ31)
CAASRNNNARIMF

SEQ ID NO: 159842 - protein, 15 aa, Homo sapiens
  CDR3 for beta chain variable domain of TCR clone 79921 (TRBV2, TRBJ2-1)
CASSELAGSYNEQFF

SEQ ID NO: 159843 - protein, 16 aa, Homo sapiens
  CDR3 for alpha chain variable domain of TCR clone 79922 (TRAV12-3, TRAJ53)
CAMSPGSGGSKYKLTF

SEQ ID NO: 159844 - protein, 14 aa, Homo sapiens
  CDR3 for beta chain variable domain of TCR clone 79922 (TRBV4-2, TRBJ2-1)
CASGLDRAYNEQFF

SEQ ID NO: 159845 - protein, 13 aa, Homo sapiens
  CDR3 for alpha chain variable domain of TCR clone 79923 (TRAV13-1, TRAJ5)
CAASDTGRRALTF

SEQ ID NO: 159846 - protein, 12 aa, Homo sapiens
  CDR3 for beta chain variable domain of TCR clone 79923 (TRBV28, TRBJ2-3)
CASSLYRDTQYF

SEQ ID NO: 159847 - protein, 14 aa, Homo sapiens
  CDR3 for alpha chain variable domain of TCR clone 79924 (TRAV3, TRAJ6)
CAVRDGMGRRKLHT

SEQ ID NO: 159848 - protein, 15 aa, Homo sapiens
  CDR3 for beta chain variable domain of TCR clone 79924 (TRBV9, TRBJ2-1)
CASSLAGSSYNEQFF

SEQ ID NO: 159849 - protein, 15 aa, Homo sapiens
  CDR3 for alpha chain variable domain of TCR clone 79925 (TRAV26-2, TRAJ26)
CILRDFDNYGQNFAF

SEQ ID NO: 159850 - protein, 14 aa, Homo sapiens
  CDR3 for beta chain variable domain of TCR clone 79925 (TRBV29-1, TRBJ2-5)
CSFWTPYAGETQYF

SEQ ID NO: 159851 - protein, 13 aa, Homo sapiens
  CDR3 for alpha chain variable domain of TCR clone 79926 (TRAV12-2, TRAJ12)
CAVNWDSSYKLIF

SEQ ID NO: 159852 - protein, 14 aa, Homo sapiens
  CDR3 for beta chain variable domain of TCR clone 79926 (TRBV10-3, TRBJ2-7)
CAISDSGGDYEQYF

SEQ ID NO: 159853 - protein, 14 aa, Homo sapiens
  CDR3 for alpha chain variable domain of TCR clone 79927 (TRAV4, TRAJ10)
CTTASCKGGNKLTF

SEQ ID NO: 159854 - protein, 16 aa, Homo sapiens
  CDR3 for beta chain variable domain of TCR clone 79927 (TRBV6-1, TRBJ2-1)
CASILRQGSSYNEQFL

SEQ ID NO: 159855 - protein, 14 aa, Homo sapiens
  CDR3 for alpha chain variable domain of TCR clone 79928 (TRAV8-6, TRAJ10)
CAVTSTGGGNKLTL

SEQ ID NO: 159856 - protein, 13 aa, Homo sapiens
  CDR3 for beta chain variable domain of TCR clone 79928 (TRBV5-7, TRBJ2-5)
CASRSSGGGTQYF

SEQ ID NO: 159857 - protein, 11 aa, Homo sapiens
  CDR3 for alpha chain variable domain of TCR clone 79929 (TRAV1-2, TRAJ31)
GAVNNNARLMF

SEQ ID NO: 159858 - protein, 15 aa, Homo sapiens
  CDR3 for beta chain variable domain of TCR clone 79929 (TRBV28, TRBJ2-1)
CASSIIAGGRSEQFF

SEQ ID NO: 159859 - protein, 15 aa, Homo sapiens
  CDR3 for alpha chain variable domain of TCR clone 79930 (TRAV4, TRAJ39)
CLVGPNNNAGNMLPF

SEQ ID NO: 159860 - protein, 16 aa, Homo sapiens
  CDR3 for beta chain variable domain of TCR clone 79930 (TRBV13, TRBJ2-2)
CASSPRTGEHTGELFF

SEQ ID NO: 159861 - protein, 15 aa, Homo sapiens
  CDR3 for alpha chain variable domain of TCR clone 79931 (TRAV25, TRAJ52)
CAGRLGGTSYGKLTF

SEQ ID NO: 159862 - protein, 17 aa, Homo sapiens
  CDR3 for beta chain variable domain of TCR clone 79931 (TRBV7-8, TRBJ2-6)
CASSAGTGGAGANVLTF

SEQ ID NO: 159863 - protein, 13 aa, Homo sapiens
  CDR3 for alpha chain variable domain of TCR clone 79932 (TRAV27, TRAJ21)
CAGATHNFNKFYF

SEQ ID NO: 159864 - protein, 14 aa, Homo sapiens
  CDR3 for beta chain variable domain of TCR clone 79932 (TRBV2, TRBJ2-2)
CASKVARETGELFF

SEQ ID NO: 159865 - protein, 11 aa, Homo sapiens
  CDR3 for alpha chain variable domain of TCR clone 79933 (TRAV21, TRAJ34)
CAHYNTDKLIF

SEQ ID NO: 159866 - protein, 13 aa, Homo sapiens
  CDR3 for beta chain variable domain of TCR clone 79933 (TRBV7-6, TRBJ1-2)
CASSLVADYGCTF

SEQ ID NO: 159867 - protein, 15 aa, Homo sapiens
  CDR3 for alpha chain variable domain of TCR clone 79934 (TRAV13-1, TRAJ44)
CAASRGGGTASKLTF

SEQ ID NO: 159868 - protein, 16 aa, Homo sapiens
  CDR3 for beta chain variable domain of TCR clone 79934 (TRBV7-2, TRBJ2-7)
CASSLEAGGPWYEQYF

SEQ ID NO: 159869 - protein, 13 aa, Homo sapiens
  CDR3 for alpha chain variable domain of TCR clone 79935 (TRAV3, TRAJ21)
CAVREPDFNKFYF

SEQ ID NO: 159870 - protein, 14 aa, Homo sapiens
  CDR3 for beta chain variable domain of TCR clone 79935 (TRBV4-1, TRBJ2-2)
CASSQAVDTGELFF

SEQ ID NO: 159871 - protein, 13 aa, Homo sapiens
  CDR3 for alpha chain variable domain of TCR clone 79936 (TRAV12-1, TRAJ6)
CVVFPGGSYIPTF

SEQ ID NO: 159872 - protein, 10 aa, Homo sapiens
  CDR3 for beta chain variable domain of TCR clone 79936 (TRBV12-4, TRBJ1-2)
CASSFIWLHL

SEQ ID NO: 159873 - protein, 15 aa, Homo sapiens
  CDR3 for alpha chain variable domain of TCR clone 79937 (TRAV17, TRAJ37)
CATDHGSSNTGKLIF

SEQ ID NO: 159874 - protein, 16 aa, Homo sapiens
  CDR3 for beta chain variable domain of TCR clone 79937 (TRBV10-3, TRBJ2-1)
CAISGVGDGGGGEQFF

SEQ ID NO: 159875 - protein, 12 aa, Homo sapiens
  CDR3 for alpha chain variable domain of TCR clone 79938 (TRAV29/DV5, TRAJ15)
CASNQAGTALIF

SEQ ID NO: 159876 - protein, 16 aa, Homo sapiens
  CDR3 for beta chain variable domain of TCR clone 79938 (TRBV4-2, TRBJ1-1)
CASSQAGFGMNTEAFF

SEQ ID NO: 159877 - protein, 13 aa, Homo sapiens
  CDR3 for alpha chain variable domain of TCR clone 79939 (TRAV3, TRAJ21)
CAVREPDFNKFYF

SEQ ID NO: 159878 - protein, 16 aa, Homo sapiens
  CDR3 for beta chain variable domain of TCR clone 79939 (TRBV11-2, TRBJ2-3)
CASSPRGGGAGDTQYF

SEQ ID NO: 159879 - protein, 12 aa, Homo sapiens
  CDR3 for alpha chain variable domain of TCR clone 79940 (TRAV12-2, TRAJ10)
WGVTGGGNKLTC

SEQ ID NO: 159880 - protein, 16 aa, Homo sapiens
  CDR3 for beta chain variable domain of TCR clone 79940 (TRBV6-4, TRBJ1-2)
CASSEAVGDPNYGYTF

SEQ ID NO: 159881 - protein, 11 aa, Homo sapiens
  CDR3 for alpha chain variable domain of TCR clone 79941 (TRAV2, TRAJ13)
CASGGYQKVTF

SEQ ID NO: 159882 - protein, 15 aa, Homo sapiens
  CDR3 for beta chain variable domain of TCR clone 79941 (TRBV7-8, TRBJ2-1)
CASSLADSLYNEQFF

SEQ ID NO: 159883 - protein, 15 aa, Homo sapiens
  CDR3 for alpha chain variable domain of TCR clone 79942 (TRAV8-3, TRAJ7)
CAVGPISYGNNRLAF

SEQ ID NO: 159884 - protein, 14 aa, Homo sapiens
  CDR3 for beta chain variable domain of TCR clone 79942 (TRBV19, TRBJ2-2)
CASTVTANTGELFF

SEQ ID NO: 159885 - protein, 14 aa, Homo sapiens
  CDR3 for alpha chain variable domain of TCR clone 79943 (TRAV21, TRAJ45)
CAVSSGGGADGLTF

SEQ ID NO: 159886 - protein, 14 aa, Homo sapiens
  CDR3 for beta chain variable domain of TCR clone 79943 (TRBV12-4, TRBJ1-1)
CASSLGTGGTEAFF

SEQ ID NO: 159887 - protein, 12 aa, Homo sapiens
  CDR3 for alpha chain variable domain of TCR clone 79944 (TRAV16, TRAJ10)
CSRTGGGNELTF

SEQ ID NO: 159888 - protein, 15 aa, Homo sapiens
  CDR3 for beta chain variable domain of TCR clone 79944 (TRBV6-3, TRBJ2-7)
CASSSPGTVFYEQYF

SEQ ID NO: 159889 - protein, 16 aa, Homo sapiens
  CDR3 for alpha chain variable domain of TCR clone 79945 (TRAV1-2, TRAJ10)
CAVRGVLTGGGNKLTF

SEQ ID NO: 159890 - protein, 14 aa, Homo sapiens
  CDR3 for beta chain variable domain of TCR clone 79945 (TRBV4-2, TRBJ2-1)
CASGLDRAYNEQFF

SEQ ID NO: 159891 - protein, 14 aa, Homo sapiens
  CDR3 for alpha chain variable domain of TCR clone 79946 (TRAV12-2, TRAJ13)
CAVKKTGGYQKVTF

SEQ ID NO: 159892 - protein, 12 aa, Homo sapiens
  CDR3 for beta chain variable domain of TCR clone 79946 (TRBV5-4, TRBJ2-5)
CASSSTRETQYF

SEQ ID NO: 159893 - protein, 15 aa, Homo sapiens
  CDR3 for alpha chain variable domain of TCR clone 79947 (TRAV8-4, TRAJ47)
CTVSDPEEYGNKLVL

SEQ ID NO: 159894 - protein, 15 aa, Homo sapiens
  CDR3 for beta chain variable domain of TCR clone 79947 (TRBV11-2, TRBJ2-1)
CASSLGPDSYNEQFF

SEQ ID NO: 159895 - protein, 14 aa, Homo sapiens
  CDR3 for alpha chain variable domain of TCR clone 79948 (TRAV26-2, TRAJ32)
CCVGYGGATNKLIF

SEQ ID NO: 159896 - protein, 13 aa, Homo sapiens
  CDR3 for beta chain variable domain of TCR clone 79948 (TRBV7-9, TRBJ2-3)
CASSPGSTDTQYF

SEQ ID NO: 159897 - protein, 15 aa, Homo sapiens
  CDR3 for alpha chain variable domain of TCR clone 79949 (TRAV12-3, TRAJ6)
CAMSPASGGSYIPTF

SEQ ID NO: 159898 - protein, 15 aa, Homo sapiens
  CDR3 for beta chain variable domain of TCR clone 79949 (TRBV18, TRBJ2-7)
CASSPTFMDSYEQYF

SEQ ID NO: 159899 - protein, 13 aa, Homo sapiens
  CDR3 for alpha chain variable domain of TCR clone 79950 (TRAV30, TRAJ6)
CGFIEGGSYIPTF

SEQ ID NO: 159900 - protein, 13 aa, Homo sapiens
  CDR3 for beta chain variable domain of TCR clone 79950 (TRBV5-4, TRBJ2-5)
CASGPVSQETQYF

SEQ ID NO: 159901 - protein, 13 aa, Homo sapiens
  CDR3 for alpha chain variable domain of TCR clone 79951 (TRAV3, TRAJ15)
CAVRDHAGTALIF

SEQ ID NO: 159902 - protein, 15 aa, Homo sapiens
  CDR3 for beta chain variable domain of TCR clone 79951 (TRBV11-1, TRBJ2-7)
CASSLNYGASYEQYF

SEQ ID NO: 159903 - protein, 14 aa, Homo sapiens
  CDR3 for alpha chain variable domain of TCR clone 79952 (TRAV14/DV4, TRAJ54)
CAMRESPGAQKLVF

SEQ ID NO: 159904 - protein, 15 aa, Homo sapiens
  CDR3 for beta chain variable domain of TCR clone 79952 (TRBV5-1, TRBJ2-7)
CASSLNGGPAREQYF

SEQ ID NO: 159905 - protein, 16 aa, Homo sapiens
  CDR3 for alpha chain variable domain of TCR clone 79953 (TRAV12-2, TRAJ40)
CAVIRGGTSGTSKYIF

SEQ ID NO: 159906 - protein, 14 aa, Homo sapiens
  CDR3 for beta chain variable domain of TCR clone 79953 (TRBV20-1, TRBJ2-5)
CSARDGRAGETQYF

SEQ ID NO: 159907 - protein, 16 aa, Homo sapiens
  CDR3 for alpha chain variable domain of TCR clone 79954 (TRAV8-3, TRAJ18)
CAVGARRGSTLGRLYF

SEQ ID NO: 159908 - protein, 14 aa, Homo sapiens
  CDR3 for beta chain variable domain of TCR clone 79954 (TRBV5-4, TRBJ1-3)
CASSSRSAGNTIYF

SEQ ID NO: 159909 - protein, 15 aa, Homo sapiens
  CDR3 for alpha chain variable domain of TCR clone 79955 (TRAV12-1, TRAJ44)
CVADLPTGTASKLTF

SEQ ID NO: 159910 - protein, 13 aa, Homo sapiens
  CDR3 for beta chain variable domain of TCR clone 79955 (TRBV28, TRBJ1-2)
CASSPGSRNGYTF

SEQ ID NO: 159911 - protein, 13 aa, Homo sapiens
  CDR3 for alpha chain variable domain of TCR clone 79956 (TRAV13-1, TRAJ39)
CAASIWAGNMLTF

SEQ ID NO: 159912 - protein, 13 aa, Homo sapiens
  CDR3 for beta chain variable domain of TCR clone 79956 (TRBV12-4, TRBJ1-1)
CASSPGTGFEAFF

SEQ ID NO: 159913 - protein, 16 aa, Homo sapiens
  CDR3 for alpha chain variable domain of TCR clone 79957 (TRAV12-2, TRAJ40)
CAVIRGGTSGTYKYIF

SEQ ID NO: 159914 - protein, 16 aa, Homo sapiens
  CDR3 for beta chain variable domain of TCR clone 79957 (TRBV7-3, TRBJ2-2)
CASSLKRGTLSGELFF

SEQ ID NO: 159915 - protein, 13 aa, Homo sapiens
  CDR3 for alpha chain variable domain of TCR clone 79958 (TRAV12-1, TRAJ6)
CVVYPGGSYIPTF

SEQ ID NO: 159916 - protein, 14 aa, Homo sapiens
  CDR3 for beta chain variable domain of TCR clone 79958 (TRBV7-9, TRBJ1-2)
CASSRQGANYGYTF

SEQ ID NO: 159917 - protein, 12 aa, Homo sapiens
  CDR3 for alpha chain variable domain of TCR clone 79959 (TRAV13-1, TRAJ21)
CAAEEGFNKFYF

SEQ ID NO: 159918 - protein, 13 aa, Homo sapiens
  CDR3 for beta chain variable domain of TCR clone 79959 (TRBV7-3, TRBJ1-1)
CASSQDWGAEAFF

SEQ ID NO: 159919 - protein, 12 aa, Homo sapiens
  CDR3 for alpha chain variable domain of TCR clone 79960 (TRAV2, TRAJ10)
CASTGGVNKLTF

SEQ ID NO: 159920 - protein, 11 aa, Homo sapiens
  CDR3 for beta chain variable domain of TCR clone 79960 (TRBV6-3, TRBJ2-3)
CATGQADAQYF

SEQ ID NO: 159921 - protein, 15 aa, Homo sapiens
  CDR3 for alpha chain variable domain of TCR clone 79961 (TRAV2, TRAJ39)
CAVEDRRNAGNMPTF

SEQ ID NO: 159922 - protein, 16 aa, Homo sapiens
  CDR3 for beta chain variable domain of TCR clone 79961 (TRBV7-8, TRBJ2-7)
CASSLASGTPVYEQYF

SEQ ID NO: 159923 - protein, 14 aa, Homo sapiens
  CDR3 for alpha chain variable domain of TCR clone 79962 (TRAV1-2, TRAJ16)
CAVNRFSDGQKLLF

SEQ ID NO: 159924 - protein, 12 aa, Homo sapiens
  CDR3 for beta chain variable domain of TCR clone 79962 (TRBV7-2, TRBJ1-6)
CASSLSSSLLHF

SEQ ID NO: 159925 - protein, 14 aa, Homo sapiens
  CDR3 for alpha chain variable domain of TCR clone 79963 (TRAV8-2, TRAJ45)
CVVSAGGGAAGLTF

SEQ ID NO: 159926 - protein, 12 aa, Homo sapiens
  CDR3 for beta chain variable domain of TCR clone 79963 (TRBV12-4, TRBJ2-1)
CASSLVRVEQFF

SEQ ID NO: 159927 - protein, 14 aa, Homo sapiens
  CDR3 for alpha chain variable domain of TCR clone 79964 (TRAV26-1, TRAJ6)
CIVSPGGGSYIPTF

SEQ ID NO: 159928 - protein, 16 aa, Homo sapiens
  CDR3 for beta chain variable domain of TCR clone 79964 (TRBV4-1, TRBJ2-5)
CASSSGLAGVLGTQYF

SEQ ID NO: 159929 - protein, 14 aa, Homo sapiens
  CDR3 for alpha chain variable domain of TCR clone 79965 (TRAV26-1, TRAJ45)
CIEVTGGGADGLTF

SEQ ID NO: 159930 - protein, 15 aa, Homo sapiens
  CDR3 for beta chain variable domain of TCR clone 79965 (TRBV6-1, TRBJ2-4)
CASSEAVWTINIQYF

SEQ ID NO: 159931 - protein, 17 aa, Homo sapiens
  CDR3 for alpha chain variable domain of TCR clone 79966 (TRAV13-1, TRAJ52)
CAAGRNAGGTSYGKLTF

SEQ ID NO: 159932 - protein, 12 aa, Homo sapiens
  CDR3 for beta chain variable domain of TCR clone 79966 (TRBV28, TRBJ2-3)
CASSLYRDTQYF

SEQ ID NO: 159933 - protein, 14 aa, Homo sapiens
  CDR3 for alpha chain variable domain of TCR clone 79967 (TRAV8-4, TRAJ9)
CAVRINTGGFKTIF

SEQ ID NO: 159934 - protein, 14 aa, Homo sapiens
  CDR3 for beta chain variable domain of TCR clone 79967 (TRBV11-2, TRBJ2-5)
CASSRTGGIETQYF

SEQ ID NO: 159935 - protein, 16 aa, Homo sapiens
  CDR3 for alpha chain variable domain of TCR clone 79968 (TRAV3, TRAJ21)
CAVGDIERGNFNKFYF

SEQ ID NO: 159936 - protein, 13 aa, Homo sapiens
  CDR3 for beta chain variable domain of TCR clone 79968 (TRBV4-2, TRBJ1-1)
CASSQAGNTEAFF

SEQ ID NO: 159937 - protein, 13 aa, Homo sapiens
  CDR3 for alpha chain variable domain of TCR clone 79969 (TRAV29/DV5, TRAJ31)
CAARRNNNARLMF

SEQ ID NO: 159938 - protein, 12 aa, Homo sapiens
  CDR3 for beta chain variable domain of TCR clone 79969 (TRBV14, TRBJ2-7)
CASSLYKDEQYF

SEQ ID NO: 159939 - protein, 12 aa, Homo sapiens
  CDR3 for alpha chain variable domain of TCR clone 79970 (TRAV13-1, TRAJ53)
AASGGSNYKLTF

SEQ ID NO: 159940 - protein, 16 aa, Homo sapiens
  CDR3 for beta chain variable domain of TCR clone 79970 (TRBV28, TRBJ2-6)
CASGNRRGSGANVLTF

SEQ ID NO: 159941 - protein, 13 aa, Homo sapiens
  CDR3 for alpha chain variable domain of TCR clone 79971 (TRAV23/DV6, TRAJ34)
CAAIENNTDKLIF

SEQ ID NO: 159942 - protein, 15 aa, Homo sapiens
  CDR3 for beta chain variable domain of TCR clone 79971 (TRBV20-1, TRBJ2-7)
CSARDRVSGMDEQYF

SEQ ID NO: 159943 - protein, 14 aa, Homo sapiens
  CDR3 for alpha chain variable domain of TCR clone 79972 (TRAV12-1, TRAJ30)
CVVNIGGRDEKTIF

SEQ ID NO: 159944 - protein, 14 aa, Homo sapiens
  CDR3 for beta chain variable domain of TCR clone 79972 (TRBV20-1, TRBJ2-1)
CSAQIGGSANEQFF

SEQ ID NO: 159945 - protein, 12 aa, Homo sapiens
  CDR3 for alpha chain variable domain of TCR clone 79973 (TRAV13-1, TRAJ21)
CAAKEGFNTFYF

SEQ ID NO: 159946 - protein, 14 aa, Homo sapiens
  CDR3 for beta chain variable domain of TCR clone 79973 (TRBV5-4, TRBJ1-1)
CASSLDSRRDEAFF

SEQ ID NO: 159947 - protein, 13 aa, Homo sapiens
  CDR3 for alpha chain variable domain of TCR clone 79974 (TRAV21, TRAJ57)
CAVTQGGSDKLVF

SEQ ID NO: 159948 - protein, 15 aa, Homo sapiens
  CDR3 for beta chain variable domain of TCR clone 79974 (TRBV5-1, TRBJ1-1)
CASSSTTGTNTEAFF

SEQ ID NO: 159949 - protein, 10 aa, Homo sapiens
  CDR3 for alpha chain variable domain of TCR clone 79975 (TRAV26-1, TRAJ40)
CIAGTYKYIF

SEQ ID NO: 159950 - protein, 15 aa, Homo sapiens
  CDR3 for beta chain variable domain of TCR clone 79975 (TRBV19, TRBJ2-1)
CASSSPGVPLDEKFF

SEQ ID NO: 159951 - protein, 14 aa, Homo sapiens
  CDR3 for alpha chain variable domain of TCR clone 79976 (TRAV13-1, TRAJ3)
CAAEGYSRASKIIF

SEQ ID NO: 159952 - protein, 14 aa, Homo sapiens
  CDR3 for beta chain variable domain of TCR clone 79976 (TRBV19, TRBJ2-5)
CASSSSGIQETQYF

SEQ ID NO: 159953 - protein, 16 aa, Homo sapiens
  CDR3 for alpha chain variable domain of TCR clone 79977 (TRAV3, TRAJ10)
CAVGDMRAGGGNKLTF

SEQ ID NO: 159954 - protein, 17 aa, Homo sapiens
  CDR3 for beta chain variable domain of TCR clone 79977 (TRBV28, TRBJ2-5)
CASSTPEGDALQETQYF

SEQ ID NO: 159955 - protein, 15 aa, Homo sapiens
  CDR3 for alpha chain variable domain of TCR clone 79978 (TRAV26-2, TRAJ39)
CSLTGNNNAGNMLTF

SEQ ID NO: 159956 - protein, 15 aa, Homo sapiens
  CDR3 for beta chain variable domain of TCR clone 79978 (TRBV5-4, TRBJ1-1)
CASSSLGWANTEAFF

SEQ ID NO: 159957 - protein, 15 aa, Homo sapiens
  CDR3 for alpha chain variable domain of TCR clone 79979 (TRAV21, TRAJ53)
CATLNSGGSNYKLTF

SEQ ID NO: 159958 - protein, 14 aa, Homo sapiens
  CDR3 for beta chain variable domain of TCR clone 79979 (TRBV2, TRBJ2-3)
CASSEGQNTDTQYF

SEQ ID NO: 159959 - protein, 13 aa, Homo sapiens
  CDR3 for alpha chain variable domain of TCR clone 79980 (TRAV13-1, TRAJ39)
CAASIWSGNMLTF

SEQ ID NO: 159960 - protein, 15 aa, Homo sapiens
  CDR3 for beta chain variable domain of TCR clone 79980 (TRBV7-9, TRBJ1-1)
CASSLLEQGGTEAFF

SEQ ID NO: 159961 - protein, 12 aa, Homo sapiens
  CDR3 for alpha chain variable domain of TCR clone 79981 (TRAV2, TRAJ3)
CAVRSSASKIIF

SEQ ID NO: 159962 - protein, 15 aa, Homo sapiens
  CDR3 for beta chain variable domain of TCR clone 79981 (TRBV7-3, TRBJ2-1)
CASSPTGGGEVEQFF

SEQ ID NO: 159963 - protein, 13 aa, Homo sapiens
  CDR3 for alpha chain variable domain of TCR clone 79982 (TRAV17, TRAJ26)
LATVDNYGQNFVF

SEQ ID NO: 159964 - protein, 16 aa, Homo sapiens
  CDR3 for beta chain variable domain of TCR clone 79982 (TRBV2, TRBJ2-1)
CASSVGGSLSYNEQFF

SEQ ID NO: 159965 - protein, 14 aa, Homo sapiens
  CDR3 for alpha chain variable domain of TCR clone 79983 (TRAV1-2, TRAJ8)
CAVTEDTGFQKLVF

SEQ ID NO: 159966 - protein, 15 aa, Homo sapiens
  CDR3 for beta chain variable domain of TCR clone 79983 (TRBV6-3, TRBJ2-7)
CASSSPGTVFYEQYF

SEQ ID NO: 159967 - protein, 20 aa, Homo sapiens
  CDR3 for alpha chain variable domain of TCR clone 79984 (TRAV12-1, TRAJ42)
SSVIQPPTSVKGGSQGNLIF

SEQ ID NO: 159968 - protein, 15 aa, Homo sapiens
  CDR3 for beta chain variable domain of TCR clone 79984 (TRBV7-2, TRBJ2-1)
CASSSGLAGGNEQFF

SEQ ID NO: 159969 - protein, 15 aa, Homo sapiens
  CDR3 for alpha chain variable domain of TCR clone 79985 (TRAV23/DV6, TRAJ13)
CAAWPGGGGYQKVTF

SEQ ID NO: 159970 - protein, 13 aa, Homo sapiens
  CDR3 for beta chain variable domain of TCR clone 79985 (TRBV6-1, TRBJ1-1)
CASSRQGNTEAFF

SEQ ID NO: 159971 - protein, 14 aa, Homo sapiens
  CDR3 for alpha chain variable domain of TCR clone 79986 (TRAV26-1, TRAJ22)
CIVRVYGSARQLTF

SEQ ID NO: 159972 - protein, 17 aa, Homo sapiens
  CDR3 for beta chain variable domain of TCR clone 79986 (TRBV7-3, TRBJ2-3)
CASNPGGLAGFGDTQYF

SEQ ID NO: 159973 - protein, 14 aa, Homo sapiens
  CDR3 for alpha chain variable domain of TCR clone 79987 (TRAV17, TRAJ16)
CATADFSDGQKLLF

SEQ ID NO: 159974 - protein, 18 aa, Homo sapiens
  CDR3 for beta chain variable domain of TCR clone 79987 (TRBV11-2, TRBJ2-3)
CASSLGGASRGAPNTQYF

SEQ ID NO: 159975 - protein, 13 aa, Homo sapiens
  CDR3 for alpha chain variable domain of TCR clone 79988 (TRAV20, TRAJ37)
CAGCSSNTGKLIF

SEQ ID NO: 159976 - protein, 14 aa, Homo sapiens
  CDR3 for beta chain variable domain of TCR clone 79988 (TRBV12-5, TRBJ2-5)
CASGSRTDQETQYF

SEQ ID NO: 159977 - protein, 11 aa, Homo sapiens
  CDR3 for alpha chain variable domain of TCR clone 79989 (TRAV12-3, TRAJ6)
CAMSGSYIPTF

SEQ ID NO: 159978 - protein, 14 aa, Homo sapiens
  CDR3 for beta chain variable domain of TCR clone 79989 (TRBV7-8, TRBJ2-3)
RASSSGISTDTQYF

SEQ ID NO: 159979 - protein, 17 aa, Homo sapiens
  CDR3 for alpha chain variable domain of TCR clone 79990 (TRAV3, TRAJ6)
CAVRDGPRAGGSYIPTF

SEQ ID NO: 159980 - protein, 13 aa, Homo sapiens
  CDR3 for beta chain variable domain of TCR clone 79990 (TRBV7-2, TRBJ2-7)
CSSPKTSFYEQYF

SEQ ID NO: 159981 - protein, 13 aa, Homo sapiens
  CDR3 for alpha chain variable domain of TCR clone 79991 (TRAV23/DV6, TRAJ58)
CAARLIRGSRLTF

SEQ ID NO: 159982 - protein, 13 aa, Homo sapiens
  CDR3 for beta chain variable domain of TCR clone 79991 (TRBV2, TRBJ1-6)
CADSGSYNPPLHF

SEQ ID NO: 159983 - protein, 14 aa, Homo sapiens
  CDR3 for alpha chain variable domain of TCR clone 79992 (TRAV8-3, TRAJ4)
CAVGAAGGYNKLIF

SEQ ID NO: 159984 - protein, 15 aa, Homo sapiens
  CDR3 for beta chain variable domain of TCR clone 79992 (TRBV6-5, TRBJ2-1)
CASSYDAGAGNEQFF

SEQ ID NO: 159985 - protein, 16 aa, Homo sapiens
  CDR3 for alpha chain variable domain of TCR clone 79993 (TRAV3, TRAJ37)
CAVRPHGSGNTGKLIS

SEQ ID NO: 159986 - protein, 17 aa, Homo sapiens
  CDR3 for beta chain variable domain of TCR clone 79993 (TRBV20-1, TRBJ2-1)
CSASSSGLAGSYNEQFF

SEQ ID NO: 159987 - protein, 15 aa, Homo sapiens
  CDR3 for alpha chain variable domain of TCR clone 79994 (TRAV21, TRAJ37)
CAVRPTLSNTGKLIF

SEQ ID NO: 159988 - protein, 16 aa, Homo sapiens
  CDR3 for beta chain variable domain of TCR clone 79994 (TRBV24-1, TRBJ2-3)
CATSDRRQDLADTQYF

SEQ ID NO: 159989 - protein, 17 aa, Homo sapiens
  CDR3 for alpha chain variable domain of TCR clone 79995 (TRAV27, TRAJ26)
CAGARAPLDNYGQNFVF

SEQ ID NO: 159990 - protein, 14 aa, Homo sapiens
  CDR3 for beta chain variable domain of TCR clone 79995 (TRBV2, TRBJ1-5)
CASSGTGFNQPQHF

SEQ ID NO: 159991 - protein, 14 aa, Homo sapiens
  CDR3 for alpha chain variable domain of TCR clone 79996 (TRAV23/DV6, TRAJ40)
CAAKKNSGTYKYIF

SEQ ID NO: 159992 - protein, 14 aa, Homo sapiens
  CDR3 for beta chain variable domain of TCR clone 79996 (TRBV10-3, TRBJ2-5)
CAISERDYQETQYF

SEQ ID NO: 159993 - protein, 13 aa, Homo sapiens
  CDR3 for alpha chain variable domain of TCR clone 79997 (TRAV27, TRAJ42)
CAGARGSQGNLIF

SEQ ID NO: 159994 - protein, 14 aa, Homo sapiens
  CDR3 for beta chain variable domain of TCR clone 79997 (TRBV20-1, TRBJ1-1)
CSAQTRIEGTEAFF

SEQ ID NO: 159995 - protein, 10 aa, Homo sapiens
  CDR3 for alpha chain variable domain of TCR clone 79998 (TRAV20, TRAJ22)
CAAPARQLTF

SEQ ID NO: 159996 - protein, 13 aa, Homo sapiens
  CDR3 for beta chain variable domain of TCR clone 79998 (TRBV7-3, TRBJ1-1)
CASSQDWGAEAFF

SEQ ID NO: 159997 - protein, 13 aa, Homo sapiens
  CDR3 for alpha chain variable domain of TCR clone 79999 (TRAV12-1, TRAJ53)
CVVNAESNYKLTF

SEQ ID NO: 159998 - protein, 16 aa, Homo sapiens
  CDR3 for beta chain variable domain of TCR clone 79999 (TRBV19, TRBJ2-2)
CASRSPGTGATGELFF

SEQ ID NO: 159999 - protein, 12 aa, Homo sapiens
  CDR3 for alpha chain variable domain of TCR clone 80000 (TRAV8-3, TRAJ20)
CAVGANGYKLSF

SEQ ID NO: 160000 - protein, 16 aa, Homo sapiens
  CDR3 for beta chain variable domain of TCR clone 80000 (TRBV19, TRBJ2-2)
CASRSPGTGAAGELFF

SEQ ID NO: 160001 - protein, 13 aa, Homo sapiens
  CDR3 for alpha chain variable domain of TCR clone 80001 (TRAV21, TRAJ27)
CAARPGNAGKSTF

SEQ ID NO: 160002 - protein, 16 aa, Homo sapiens
  CDR3 for beta chain variable domain of TCR clone 80001 (TRBV11-2, TRBJ1-2)
CASSLDTGGADYGYTF

SEQ ID NO: 160003 - protein, 17 aa, Homo sapiens
  CDR3 for alpha chain variable domain of TCR clone 80002 (TRAV3, TRAJ28)
CAVRPLYSGAGSYQLTF

SEQ ID NO: 160004 - protein, 13 aa, Homo sapiens
  CDR3 for beta chain variable domain of TCR clone 80002 (TRBV15, TRBJ2-7)
CATSTTGHYEQYF

SEQ ID NO: 160005 - protein, 19 aa, Homo sapiens
  CDR3 for alpha chain variable domain of TCR clone 80003 (TRAV26-1, TRAJ52)
CIVRVANNAGGTSYGKLKF

SEQ ID NO: 160006 - protein, 14 aa, Homo sapiens
  CDR3 for beta chain variable domain of TCR clone 80003 (TRBV19, TRBJ1-2)
CASSIGAGSYGYTF

SEQ ID NO: 160007 - protein, 15 aa, Homo sapiens
  CDR3 for alpha chain variable domain of TCR clone 80004 (TRAV8-6, TRAJ6)
CAGSGESGGSYIPTF

SEQ ID NO: 160008 - protein, 14 aa, Homo sapiens
  CDR3 for beta chain variable domain of TCR clone 80004 (TRBV7-9, TRBJ2-1)
CASSSMVGFGEQFF

SEQ ID NO: 160009 - protein, 13 aa, Homo sapiens
  CDR3 for alpha chain variable domain of TCR clone 80005 (TRAV12-1, TRAJ22)
CVVYSGSARQLTF

SEQ ID NO: 160010 - protein, 15 aa, Homo sapiens
  CDR3 for beta chain variable domain of TCR clone 80005 (TRBV20-1, TRBJ2-7)
CSARDRVSVMDEQYF

SEQ ID NO: 160011 - protein, 14 aa, Homo sapiens
  CDR3 for alpha chain variable domain of TCR clone 80006 (TRAV2, TRAJ9)
CAVEDRSVGFKTIF

SEQ ID NO: 160012 - protein, 16 aa, Homo sapiens
  CDR3 for beta chain variable domain of TCR clone 80006 (TRBV27, TRBJ2-2)
CASSLRPGGAPGELFF

SEQ ID NO: 160013 - protein, 15 aa, Homo sapiens
  CDR3 for alpha chain variable domain of TCR clone 80007 (TRAV25, TRAJ52)
CAGTLGGTSYGKLTF

SEQ ID NO: 160014 - protein, 16 aa, Homo sapiens
  CDR3 for beta chain variable domain of TCR clone 80007 (TRBV15, TRBJ1-2)
CATSRGPRTGGGGYTF

SEQ ID NO: 160015 - protein, 14 aa, Homo sapiens
  CDR3 for alpha chain variable domain of TCR clone 80008 (TRAV2, TRAJ9)
CAVEDRRGGFKTIF

SEQ ID NO: 160016 - protein, 15 aa, Homo sapiens
  CDR3 for beta chain variable domain of TCR clone 80008 (TRBV7-2, TRBJ2-1)
CASSSGLAGGNEQFF

SEQ ID NO: 160017 - protein, 13 aa, Homo sapiens
  CDR3 for alpha chain variable domain of TCR clone 80009 (TRAV20, TRAJ31)
CAVQAIGGARLMF

SEQ ID NO: 160018 - protein, 14 aa, Homo sapiens
  CDR3 for beta chain variable domain of TCR clone 80009 (TRBV19, TRBJ2-1)
CASPTFVLSGEQFF

SEQ ID NO: 160019 - protein, 14 aa, Homo sapiens
  CDR3 for alpha chain variable domain of TCR clone 80010 (TRAV12-2, TRAJ17)
CAVLFKAAGNKLTF

SEQ ID NO: 160020 - protein, 18 aa, Homo sapiens
  CDR3 for beta chain variable domain of TCR clone 80010 (TRBV20-1, TRBJ2-6)
CSAETTPTHGSGANVLTF

SEQ ID NO: 160021 - protein, 13 aa, Homo sapiens
  CDR3 for alpha chain variable domain of TCR clone 80011 (TRAV12-3, TRAJ33)
CAMSLNSNYQLIW

SEQ ID NO: 160022 - protein, 13 aa, Homo sapiens
  CDR3 for beta chain variable domain of TCR clone 80011 (TRBV4-1, TRBJ1-1)
CASSQLGTGEAFF

SEQ ID NO: 160023 - protein, 16 aa, Homo sapiens
  CDR3 for alpha chain variable domain of TCR clone 80012 (TRAV17, TRAJ28)
CATATVSGAGSYQLTF

SEQ ID NO: 160024 - protein, 11 aa, Homo sapiens
  CDR3 for beta chain variable domain of TCR clone 80012 (TRBV7-9, TRBJ2-5)
CASSLGETQYF

SEQ ID NO: 160025 - protein, 16 aa, Homo sapiens
  CDR3 for alpha chain variable domain of TCR clone 80013 (TRAV3, TRAJ18)
CAVRDGRGSTLWRLYF

SEQ ID NO: 160026 - protein, 15 aa, Homo sapiens
  CDR3 for beta chain variable domain of TCR clone 80013 (TRBV7-9, TRBJ1-6)
CASSSPGRGNSPLHF

SEQ ID NO: 160027 - protein, 13 aa, Homo sapiens
  CDR3 for alpha chain variable domain of TCR clone 80014 (TRAV30, TRAJ34)
CGTVGYNTDKLIF

SEQ ID NO: 160028 - protein, 16 aa, Homo sapiens
  CDR3 for beta chain variable domain of TCR clone 80014 (TRBV7-9, TRBJ1-2)
CASSLGSSSGEDGYTF

SEQ ID NO: 160029 - protein, 23 aa, Homo sapiens
  CDR3 for alpha chain variable domain of TCR clone 80015 (TRAV1-1, TRAJ11)
LLQELQMKDSASYFCAGYSTLTF

SEQ ID NO: 160030 - protein, 15 aa, Homo sapiens
  CDR3 for beta chain variable domain of TCR clone 80015 (TRBV12-4, TRBJ2-5)
CASSPPTGLQETQYF

SEQ ID NO: 160031 - protein, 15 aa, Homo sapiens
  CDR3 for alpha chain variable domain of TCR clone 80016 (TRAV1-2, TRAJ30)
CAVRPHGNRDDKSIF

SEQ ID NO: 160032 - protein, 13 aa, Homo sapiens
  CDR3 for beta chain variable domain of TCR clone 80016 (TRBV4-1, TRBJ2-7)
CASSQGQAYEQYF

SEQ ID NO: 160033 - protein, 12 aa, Homo sapiens
  CDR3 for alpha chain variable domain of TCR clone 80017 (TRAV3, TRAJ43)
CAVRDPHNDMRF

SEQ ID NO: 160034 - protein, 15 aa, Homo sapiens
  CDR3 for beta chain variable domain of TCR clone 80017 (TRBV27, TRBJ1-5)
CASSLGTGFDQPQHF

SEQ ID NO: 160035 - protein, 13 aa, Homo sapiens
  CDR3 for alpha chain variable domain of TCR clone 80018 (TRAV3, TRAJ15)
CDVRDQAGTALIF

SEQ ID NO: 160036 - protein, 15 aa, Homo sapiens
  CDR3 for beta chain variable domain of TCR clone 80018 (TRBV11-1, TRBJ2-7)
CASSLNYGASYEQYF

SEQ ID NO: 160037 - protein, 12 aa, Homo sapiens
  CDR3 for alpha chain variable domain of TCR clone 80019 (TRAV22, TRAJ29)
CAPPSGNTPLVF

SEQ ID NO: 160038 - protein, 14 aa, Homo sapiens
  CDR3 for beta chain variable domain of TCR clone 80019 (TRBV11-2, TRBJ2-7)
CASSVGAGAYEQYF

SEQ ID NO: 160039 - protein, 13 aa, Homo sapiens
  CDR3 for alpha chain variable domain of TCR clone 80020 (TRAV3, TRAJ27)
CAVRPLGAGKSTF

SEQ ID NO: 160040 - protein, 15 aa, Homo sapiens
  CDR3 for beta chain variable domain of TCR clone 80020 (TRBV9, TRBJ1-6)
CASSVAGTRDSPLHF

SEQ ID NO: 160041 - protein, 13 aa, Homo sapiens
  CDR3 for alpha chain variable domain of TCR clone 80021 (TRAV38-2/DV8, TRAJ34)
CAYRTWNTDKLIF

SEQ ID NO: 160042 - protein, 16 aa, Homo sapiens
  CDR3 for beta chain variable domain of TCR clone 80021 (TRBV19, TRBJ2-1)
CASSKAGPSSYNGQFF

SEQ ID NO: 160043 - protein, 13 aa, Homo sapiens
  CDR3 for alpha chain variable domain of TCR clone 80022 (TRAV12-1, TRAJ22)
CVVYSGSSRQLTF

SEQ ID NO: 160044 - protein, 10 aa, Homo sapiens
  CDR3 for beta chain variable domain of TCR clone 80022 (TRBV6-3, TRBJ2-2)
CASRDGELFF

SEQ ID NO: 160045 - protein, 12 aa, Homo sapiens
  CDR3 for alpha chain variable domain of TCR clone 80023 (TRAV29/DV5, TRAJ49)
CAATDTGNQFYF

SEQ ID NO: 160046 - protein, 14 aa, Homo sapiens
  CDR3 for beta chain variable domain of TCR clone 80023 (TRBV2, TRBJ2-7)
CASSLTSGGYEQYF

SEQ ID NO: 160047 - protein, 16 aa, Homo sapiens
  CDR3 for alpha chain variable domain of TCR clone 80024 (TRAV12-1, TRAJ43)
CVVNPHRFGAGTRLTL

SEQ ID NO: 160048 - protein, 13 aa, Homo sapiens
  CDR3 for beta chain variable domain of TCR clone 80024 (TRBV20-1, TRBJ1-1)
CSARGGGNTEAFF

SEQ ID NO: 160049 - protein, 14 aa, Homo sapiens
  CDR3 for alpha chain variable domain of TCR clone 80025 (TRAV26-1, TRAJ38)
CIADNAGNNRMLIW

SEQ ID NO: 160050 - protein, 13 aa, Homo sapiens
  CDR3 for beta chain variable domain of TCR clone 80025 (TRBV20-1, TRBJ1-1)
CSARGGGNTEAFF

SEQ ID NO: 160051 - protein, 15 aa, Homo sapiens
  CDR3 for alpha chain variable domain of TCR clone 80026 (TRAV25, TRAJ52)
CAGTSGGTSYGKLTF

SEQ ID NO: 160052 - protein, 13 aa, Homo sapiens
  CDR3 for beta chain variable domain of TCR clone 80026 (TRBV6-5, TRBJ2-5)
CASSPQGGETHYF

SEQ ID NO: 160053 - protein, 17 aa, Homo sapiens
  CDR3 for alpha chain variable domain of TCR clone 80027 (TRAV13-1, TRAJ52)
CAASSGAGGTSYGKLTF

SEQ ID NO: 160054 - protein, 15 aa, Homo sapiens
  CDR3 for beta chain variable domain of TCR clone 80027 (TRBV2, TRBJ2-1)
CVSSELAGSYNEQFF

SEQ ID NO: 160055 - protein, 14 aa, Homo sapiens
  CDR3 for alpha chain variable domain of TCR clone 80028 (TRAV38-1, TRAJ43)
CAFMKHSNNNDMRF

SEQ ID NO: 160056 - protein, 15 aa, Homo sapiens
  CDR3 for beta chain variable domain of TCR clone 80028 (TRBV9, TRBJ1-6)
CASSVAGTGDSPLHF

SEQ ID NO: 160057 - protein, 14 aa, Homo sapiens
  CDR3 for alpha chain variable domain of TCR clone 80029 (TRAV12-3, TRAJ10)
SHLPLTGGGNKLTF

SEQ ID NO: 160058 - protein, 13 aa, Homo sapiens
  CDR3 for beta chain variable domain of TCR clone 80029 (TRBV7-7, TRBJ2-5)
CASSRSGQETQFF

SEQ ID NO: 160059 - protein, 12 aa, Homo sapiens
  CDR3 for alpha chain variable domain of TCR clone 80030 (TRAV9-2, TRAJ36)
RALKKGANNLFF

SEQ ID NO: 160060 - protein, 13 aa, Homo sapiens
  CDR3 for beta chain variable domain of TCR clone 80030 (TRBV27, TRBJ1-1)
CASSLSIGAEAFF

SEQ ID NO: 160061 - protein, 12 aa, Homo sapiens
  CDR3 for alpha chain variable domain of TCR clone 80031 (TRAV26-2, TRAJ21)
CILKVNFNKFYF

SEQ ID NO: 160062 - protein, 14 aa, Homo sapiens
  CDR3 for beta chain variable domain of TCR clone 80031 (TRBV7-9, TRBJ1-1)
CASTPLQSYTEAFF

SEQ ID NO: 160063 - protein, 13 aa, Homo sapiens
  CDR3 for alpha chain variable domain of TCR clone 80032 (TRAV20, TRAJ21)
CAVEGYNFNKFYF

SEQ ID NO: 160064 - protein, 13 aa, Homo sapiens
  CDR3 for beta chain variable domain of TCR clone 80032 (TRBV7-3, TRBJ1-1)
CASSQDWGAEAFF

SEQ ID NO: 160065 - protein, 16 aa, Homo sapiens
  CDR3 for alpha chain variable domain of TCR clone 80033 (TRAV3, TRAJ13)
CAVRDPNSGGYQKVTL

SEQ ID NO: 160066 - protein, 13 aa, Homo sapiens
  CDR3 for beta chain variable domain of TCR clone 80033 (TRBV7-9, TRBJ2-7)
CASSLQGSYEQYF

SEQ ID NO: 160067 - protein, 10 aa, Homo sapiens
  CDR3 for alpha chain variable domain of TCR clone 80034 (TRAV12-3, TRAJ49)
WAMNDDQFYF

SEQ ID NO: 160068 - protein, 13 aa, Homo sapiens
  CDR3 for beta chain variable domain of TCR clone 80034 (TRBV12-4, TRBJ1-1)
CASSPGTGFEAFF

SEQ ID NO: 160069 - protein, 23 aa, Homo sapiens
  CDR3 for alpha chain variable domain of TCR clone 80035 (TRAV26-1, TRAJ38)
CIADNAGNNHIQNPAPAVYQLSD

SEQ ID NO: 160070 - protein, 13 aa, Homo sapiens
  CDR3 for beta chain variable domain of TCR clone 80035 (TRBV20-1, TRBJ1-1)
CSARGGGNTEAFF

SEQ ID NO: 160071 - protein, 13 aa, Homo sapiens
  CDR3 for alpha chain variable domain of TCR clone 80036 (TRAV12-3, TRAJ40)
CAMSARGTYKYIF

SEQ ID NO: 160072 - protein, 16 aa, Homo sapiens
  CDR3 for beta chain variable domain of TCR clone 80036 (TRBV20-1, TRBJ2-3)
CSGEAGLAGWQDTQYF

SEQ ID NO: 160073 - protein, 14 aa, Homo sapiens
  CDR3 for alpha chain variable domain of TCR clone 80037 (TRAV12-1, TRAJ12)
CVVTRMDSSYKLIF

SEQ ID NO: 160074 - protein, 16 aa, Homo sapiens
  CDR3 for beta chain variable domain of TCR clone 80037 (TRBV13, TRBJ2-2)
CASSPRTGEHTGELFF

SEQ ID NO: 160075 - protein, 14 aa, Homo sapiens
  CDR3 for alpha chain variable domain of TCR clone 80038 (TRAV17, TRAJ57)
CATDPQGGSEKLVF

SEQ ID NO: 160076 - protein, 15 aa, Homo sapiens
  CDR3 for beta chain variable domain of TCR clone 80038 (TRBV7-9, TRBJ1-4)
CASSARTGGNEKLFF

SEQ ID NO: 160077 - protein, 14 aa, Homo sapiens
  CDR3 for alpha chain variable domain of TCR clone 80039 (TRAV35, TRAJ33)
CAGSSQDSNYQLIW

SEQ ID NO: 160078 - protein, 15 aa, Homo sapiens
  CDR3 for beta chain variable domain of TCR clone 80039 (TRBV20-1, TRBJ2-7)
CSDESGTSGAYEQYF

SEQ ID NO: 160079 - protein, 12 aa, Homo sapiens
  CDR3 for alpha chain variable domain of TCR clone 80040 (TRAV21, TRAJ33)
CAKMDSNYQLIW

SEQ ID NO: 160080 - protein, 14 aa, Homo sapiens
  CDR3 for beta chain variable domain of TCR clone 80040 (TRBV2, TRBJ2-7)
CASSLTSGVYEQYF

SEQ ID NO: 160081 - protein, 14 aa, Homo sapiens
  CDR3 for alpha chain variable domain of TCR clone 80041 (TRAV1-2, TRAJ16)
CAVNRFSDGQKPLF

SEQ ID NO: 160082 - protein, 12 aa, Homo sapiens
  CDR3 for beta chain variable domain of TCR clone 80041 (TRBV11-2, TRBJ2-2)
CASSLGGGELFF

SEQ ID NO: 160083 - protein, 15 aa, Homo sapiens
  CDR3 for alpha chain variable domain of TCR clone 80042 (TRAV12-2, TRAJ43)
CAFDMRFGAGTRLTV

SEQ ID NO: 160084 - protein, 19 aa, Homo sapiens
  CDR3 for beta chain variable domain of TCR clone 80042 (TRBV2, TRBJ2-7)
CASSDDETSGRANDYEQYF

SEQ ID NO: 160085 - protein, 16 aa, Homo sapiens
  CDR3 for alpha chain variable domain of TCR clone 80043 (TRAV3, TRAJ10)
CAVRDMNAGGGNKLTF

SEQ ID NO: 160086 - protein, 16 aa, Homo sapiens
  CDR3 for beta chain variable domain of TCR clone 80043 (TRBV6-3, TRBJ1-2)
CASSYSRRASNYGYTL

SEQ ID NO: 160087 - protein, 13 aa, Homo sapiens
  CDR3 for alpha chain variable domain of TCR clone 80044 (TRAV2, TRAJ40)
CAVVTSGTYKYIF

SEQ ID NO: 160088 - protein, 16 aa, Homo sapiens
  CDR3 for beta chain variable domain of TCR clone 80044 (TRBV29-1, TRBJ2-2)
CSVETRASGNTGELFF

SEQ ID NO: 160089 - protein, 10 aa, Homo sapiens
  CDR3 for alpha chain variable domain of TCR clone 80045 (TRAV8-4, TRAJ43)
CAVSADDMRF

SEQ ID NO: 160090 - protein, 15 aa, Homo sapiens
  CDR3 for beta chain variable domain of TCR clone 80045 (TRBV5-1, TRBJ2-3)
CASSITSGSTDTQYF

SEQ ID NO: 160091 - protein, 12 aa, Homo sapiens
  CDR3 for alpha chain variable domain of TCR clone 80046 (TRAV12-2, TRAJ10)
WGVTGGGNKLTF

SEQ ID NO: 160092 - protein, 14 aa, Homo sapiens
  CDR3 for beta chain variable domain of TCR clone 80046 (TRBV7-2, TRBJ2-7)
CASRSQGAAYEQYF

SEQ ID NO: 160093 - protein, 13 aa, Homo sapiens
  CDR3 for alpha chain variable domain of TCR clone 80047 (TRAV21, TRAJ27)
CAARPGNAGKSTF

SEQ ID NO: 160094 - protein, 14 aa, Homo sapiens
  CDR3 for beta chain variable domain of TCR clone 80047 (TRBV19, TRBJ2-5)
CASSMTGQQETQYF

SEQ ID NO: 160095 - protein, 16 aa, Homo sapiens
  CDR3 for alpha chain variable domain of TCR clone 80048 (TRAV30, TRAJ24)
CGTEIVDAYSWGKFQF

SEQ ID NO: 160096 - protein, 13 aa, Homo sapiens
  CDR3 for beta chain variable domain of TCR clone 80048 (TRBV18, TRBJ1-2)
CASSASATEGYTF

SEQ ID NO: 160097 - protein, 15 aa, Homo sapiens
  CDR3 for alpha chain variable domain of TCR clone 80049 (TRAV4, TRAJ39)
CLVGLNNNAGNMLTF

SEQ ID NO: 160098 - protein, 13 aa, Homo sapiens
  CDR3 for beta chain variable domain of TCR clone 80049 (TRBV11-2, TRBJ2-5)
CASSSTGEETQYF

SEQ ID NO: 160099 - protein, 12 aa, Homo sapiens
  CDR3 for alpha chain variable domain of TCR clone 80050 (TRAV13-1, TRAJ27)
CAAHTNARKSTF

SEQ ID NO: 160100 - protein, 14 aa, Homo sapiens
  CDR3 for beta chain variable domain of TCR clone 80050 (TRBV19, TRBJ2-2)
CASSGQGIAGELFF

SEQ ID NO: 160101 - protein, 12 aa, Homo sapiens
  CDR3 for alpha chain variable domain of TCR clone 80051 (TRAV23/DV6, TRAJ17)
CARGRCRQQANF

SEQ ID NO: 160102 - protein, 14 aa, Homo sapiens
  CDR3 for beta chain variable domain of TCR clone 80051 (TRBV7-2, TRBJ1-2)
CASSQTGSTYGYTF

SEQ ID NO: 160103 - protein, 11 aa, Homo sapiens
  CDR3 for alpha chain variable domain of TCR clone 80052 (TRAV38-1, TRAJ43)
CAFMKHNSGRH

SEQ ID NO: 160104 - protein, 11 aa, Homo sapiens
  CDR3 for beta chain variable domain of TCR clone 80052 (TRBV7-9, TRBJ2-3)
CAGSYTDTQYF

SEQ ID NO: 160105 - protein, 14 aa, Homo sapiens
  CDR3 for alpha chain variable domain of TCR clone 80053 (TRAV12-3, TRAJ37)
CVSECSSNTGKLIF

SEQ ID NO: 160106 - protein, 14 aa, Homo sapiens
  CDR3 for beta chain variable domain of TCR clone 80053 (TRBV20-1, TRBJ1-1)
CSAQTRIGGTEAFF

SEQ ID NO: 160107 - protein, 14 aa, Homo sapiens
  CDR3 for alpha chain variable domain of TCR clone 80054 (TRAV2, TRAJ9)
CAVDPNTGGFKTIF

SEQ ID NO: 160108 - protein, 12 aa, Homo sapiens
  CDR3 for beta chain variable domain of TCR clone 80054 (TRBV11-2, TRBJ2-2)
CASSLGGGELFF

SEQ ID NO: 160109 - protein, 13 aa, Homo sapiens
  CDR3 for alpha chain variable domain of TCR clone 80055 (TRAV8-6, TRAJ8)
CAFMNTGFQKLVL

SEQ ID NO: 160110 - protein, 15 aa, Homo sapiens
  CDR3 for beta chain variable domain of TCR clone 80055 (TRBV28, TRBJ2-5)
CASSSGRVIQETQYF

SEQ ID NO: 160111 - protein, 18 aa, Homo sapiens
  CDR3 for alpha chain variable domain of TCR clone 80056 (TRAV4, TRAJ20)
CCVLLPRGLQGNDYKLSF

SEQ ID NO: 160112 - protein, 15 aa, Homo sapiens
  CDR3 for beta chain variable domain of TCR clone 80056 (TRBV18, TRBJ2-7)
CASSPSSTGNYEQYF

SEQ ID NO: 160113 - protein, 12 aa, Homo sapiens
  CDR3 for alpha chain variable domain of TCR clone 80057 (TRAV9-2, TRAJ26)
CALRGYGQNFVF

SEQ ID NO: 160114 - protein, 12 aa, Homo sapiens
  CDR3 for beta chain variable domain of TCR clone 80057 (TRBV29-1, TRBJ2-3)
CSVTGGADTRYF

SEQ ID NO: 160115 - protein, 17 aa, Homo sapiens
  CDR3 for alpha chain variable domain of TCR clone 80058 (TRAV3, TRAJ42)
CAVRDRDYRGSQGNLIF

SEQ ID NO: 160116 - protein, 14 aa, Homo sapiens
  CDR3 for beta chain variable domain of TCR clone 80058 (TRBV12-5, TRBJ2-5)
CASGSRTHQETQYF

SEQ ID NO: 160117 - protein, 13 aa, Homo sapiens
  CDR3 for alpha chain variable domain of TCR clone 80059 (TRAV3, TRAJ41)
CAVRSNSGYALNF

SEQ ID NO: 160118 - protein, 13 aa, Homo sapiens
  CDR3 for beta chain variable domain of TCR clone 80059 (TRBV20-1, TRBJ2-2)
CSALSGGAGELFF

SEQ ID NO: 160119 - protein, 13 aa, Homo sapiens
  CDR3 for alpha chain variable domain of TCR clone 80060 (TRAV14/DV4, TRAJ26)
CAMREAYGQNFVF

SEQ ID NO: 160120 - protein, 19 aa, Homo sapiens
  CDR3 for beta chain variable domain of TCR clone 80060 (TRBV13, TRBJ2-6)
CASSLVHRDRGAGANALTF

SEQ ID NO: 160121 - protein, 16 aa, Homo sapiens
  CDR3 for alpha chain variable domain of TCR clone 80061 (TRAV26-1, TRAJ53)
CTVRVAMGGSNYKLTF

SEQ ID NO: 160122 - protein, 12 aa, Homo sapiens
  CDR3 for beta chain variable domain of TCR clone 80061 (TRBV7-9, TRBJ1-5)
CASSPQGQPQHL

SEQ ID NO: 160123 - protein, 14 aa, Homo sapiens
  CDR3 for alpha chain variable domain of TCR clone 80062 (TRAV3, TRAJ36)
CAVRDGTGANNLFF

SEQ ID NO: 160124 - protein, 16 aa, Homo sapiens
  CDR3 for beta chain variable domain of TCR clone 80062 (TRBV7-3, TRBJ2-5)
CASSQPGGSVQETQYF

SEQ ID NO: 160125 - protein, 16 aa, Homo sapiens
  CDR3 for alpha chain variable domain of TCR clone 80063 (TRAV17, TRAJ53)
CATDALSGGSNYKLTF

SEQ ID NO: 160126 - protein, 13 aa, Homo sapiens
  CDR3 for beta chain variable domain of TCR clone 80063 (TRBV7-3, TRBJ1-1)
CASSQDWGAEAFF

SEQ ID NO: 160127 - protein, 12 aa, Homo sapiens
  CDR3 for alpha chain variable domain of TCR clone 80064 (TRAV13-1, TRAJ9)
CASHTGGFKTIF

SEQ ID NO: 160128 - protein, 17 aa, Homo sapiens
  CDR3 for beta chain variable domain of TCR clone 80064 (TRBV4-1, TRBJ2-7)
CASSQPTSGSRGYEQYF

SEQ ID NO: 160129 - protein, 14 aa, Homo sapiens
  CDR3 for alpha chain variable domain of TCR clone 80065 (TRAV38-1, TRAJ40)
CALRPTSGTYKYIF

SEQ ID NO: 160130 - protein, 14 aa, Homo sapiens
  CDR3 for beta chain variable domain of TCR clone 80065 (TRBV20-1, TRBJ2-7)
CSAPELAGVGEQYF

SEQ ID NO: 160131 - protein, 14 aa, Homo sapiens
  CDR3 for alpha chain variable domain of TCR clone 80066 (TRAV13-1, TRAJ35)
CAASKGGFGNVLHC

SEQ ID NO: 160132 - protein, 12 aa, Homo sapiens
  CDR3 for beta chain variable domain of TCR clone 80066 (TRBV7-3, TRBJ1-1)
CQQPGLGAEAFF

SEQ ID NO: 160133 - protein, 14 aa, Homo sapiens
  CDR3 for alpha chain variable domain of TCR clone 80067 (TRAV2, TRAJ9)
CAVEDRSGGFKTIF

SEQ ID NO: 160134 - protein, 16 aa, Homo sapiens
  CDR3 for beta chain variable domain of TCR clone 80067 (TRBV4-1, TRBJ1-1)
CASSQDAGMGNTEAFF

SEQ ID NO: 160135 - protein, 15 aa, Homo sapiens
  CDR3 for alpha chain variable domain of TCR clone 80068 (TRAV26-1, TRAJ13)
CIVRASRGGYQKVTF

SEQ ID NO: 160136 - protein, 15 aa, Homo sapiens
  CDR3 for beta chain variable domain of TCR clone 80068 (TRBV7-9, TRBJ1-4)
CASSARTGGNEKLFF

SEQ ID NO: 160137 - protein, 17 aa, Homo sapiens
  CDR3 for alpha chain variable domain of TCR clone 80069 (TRAV13-1, TRAJ53)
CAASWKSSGGSNYKLTF

SEQ ID NO: 160138 - protein, 19 aa, Homo sapiens
  CDR3 for beta chain variable domain of TCR clone 80069 (TRBV7-9, TRBJ2-1)
CASSHNRGALLRSYNEQLF

SEQ ID NO: 160139 - protein, 12 aa, Homo sapiens
  CDR3 for alpha chain variable domain of TCR clone 80070 (TRAV26-1, TRAJ26)
CIVDNYGQNFVF

SEQ ID NO: 160140 - protein, 15 aa, Homo sapiens
  CDR3 for beta chain variable domain of TCR clone 80070 (TRBV7-2, TRBJ2-3)
CASSLRGGSTDTQYF

SEQ ID NO: 160141 - protein, 11 aa, Homo sapiens
  CDR3 for alpha chain variable domain of TCR clone 80071 (TRAV2, TRAJ13)
CASGGYQKVTF

SEQ ID NO: 160142 - protein, 14 aa, Homo sapiens
  CDR3 for beta chain variable domain of TCR clone 80071 (TRBV7-3, TRBJ2-1)
CASSLTGGTNEQFF

SEQ ID NO: 160143 - protein, 19 aa, Homo sapiens
  CDR3 for alpha chain variable domain of TCR clone 80072 (TRAV26-1, TRAJ28)
CIVRVAHAYSGAGSYQLTF

SEQ ID NO: 160144 - protein, 12 aa, Homo sapiens
  CDR3 for beta chain variable domain of TCR clone 80072 (TRBV12-4, TRBJ2-1)
CASSPGRNEQFF

SEQ ID NO: 160145 - protein, 14 aa, Homo sapiens
  CDR3 for alpha chain variable domain of TCR clone 80073 (TRAV13-2, TRAJ16)
CAENNWEDGQKLPF

SEQ ID NO: 160146 - protein, 14 aa, Homo sapiens
  CDR3 for beta chain variable domain of TCR clone 80073 (TRBV7-9, TRBJ1-1)
CASSLGGLKTEAFF

SEQ ID NO: 160147 - protein, 18 aa, Homo sapiens
  CDR3 for alpha chain variable domain of TCR clone 80074 (TRAV9-2, TRAJ52)
CALSRHNAGGTSYGKLTF

SEQ ID NO: 160148 - protein, 14 aa, Homo sapiens
  CDR3 for beta chain variable domain of TCR clone 80074 (TRBV20-1, TRBJ2-1)
CSAHPGLPYNEQFF

SEQ ID NO: 160149 - protein, 17 aa, Homo sapiens
  CDR3 for alpha chain variable domain of TCR clone 80075 (TRAV3, TRAJ38)
CDVRDCLNAGNNRKLIW

SEQ ID NO: 160150 - protein, 14 aa, Homo sapiens
  CDR3 for beta chain variable domain of TCR clone 80075 (TRBV5-5, TRBJ1-5)
CASSGQGVDQPQHF

SEQ ID NO: 160151 - protein, 17 aa, Homo sapiens
  CDR3 for alpha chain variable domain of TCR clone 80076 (TRAV3, TRAJ6)
CAVRDGPRAGGSYIPTL

SEQ ID NO: 160152 - protein, 15 aa, Homo sapiens
  CDR3 for beta chain variable domain of TCR clone 80076 (TRBV11-3, TRBJ2-7)
CASSPGPASSYEQYF

SEQ ID NO: 160153 - protein, 16 aa, Homo sapiens
  CDR3 for alpha chain variable domain of TCR clone 80077 (TRAV3, TRAJ10)
CAVRDMGAGGGNKLTF

SEQ ID NO: 160154 - protein, 16 aa, Homo sapiens
  CDR3 for beta chain variable domain of TCR clone 80077 (TRBV20-1, TRBJ1-4)
CSAPGQGLLTNEKLFF

SEQ ID NO: 160155 - protein, 14 aa, Homo sapiens
  CDR3 for alpha chain variable domain of TCR clone 80078 (TRAV38-1, TRAJ40)
CALRPTSGTYKYFF

SEQ ID NO: 160156 - protein, 14 aa, Homo sapiens
  CDR3 for beta chain variable domain of TCR clone 80078 (TRBV25-1, TRBJ1-1)
CASTHLGGNTEAFF

SEQ ID NO: 160157 - protein, 14 aa, Homo sapiens
  CDR3 for alpha chain variable domain of TCR clone 80079 (TRAV26-1, TRAJ48)
CIVSSNFGNEKLTF

SEQ ID NO: 160158 - protein, 15 aa, Homo sapiens
  CDR3 for beta chain variable domain of TCR clone 80079 (TRBV9, TRBJ1-6)
CASSVAGTGDSPLHF

SEQ ID NO: 160159 - protein, 12 aa, Homo sapiens
  CDR3 for alpha chain variable domain of TCR clone 80080 (TRAV12-3, TRAJ17)
CAMTLTGNKLTF

SEQ ID NO: 160160 - protein, 15 aa, Homo sapiens
  CDR3 for beta chain variable domain of TCR clone 80080 (TRBV5-1, TRBJ2-6)
CASSLEGSGANVLTF

SEQ ID NO: 160161 - protein, 17 aa, Homo sapiens
  CDR3 for alpha chain variable domain of TCR clone 80081 (TRAV8-3, TRAJ10)
EASNTVVLTGGGNKLTF

SEQ ID NO: 160162 - protein, 16 aa, Homo sapiens
  CDR3 for beta chain variable domain of TCR clone 80081 (TRBV7-9, TRBJ1-2)
CASSLGFSSGEDGYTF

SEQ ID NO: 160163 - protein, 11 aa, Homo sapiens
  CDR3 for alpha chain variable domain of TCR clone 80082 (TRAV2, TRAJ33)
CAVDSNYQFIW

SEQ ID NO: 160164 - protein, 15 aa, Homo sapiens
  CDR3 for beta chain variable domain of TCR clone 80082 (TRBV19, TRBJ1-2)
CASSVGQVLNYGYTF

SEQ ID NO: 160165 - protein, 13 aa, Homo sapiens
  CDR3 for alpha chain variable domain of TCR clone 80083 (TRAV27, TRAJ41)
CAGEGNSGYALKF

SEQ ID NO: 160166 - protein, 14 aa, Homo sapiens
  CDR3 for beta chain variable domain of TCR clone 80083 (TRBV7-2, TRBJ1-1)
CASSFLTGTTEAFF

SEQ ID NO: 160167 - protein, 15 aa, Homo sapiens
  CDR3 for alpha chain variable domain of TCR clone 80084 (TRAV3, TRAJ32)
CAVSSFGGATNKLIF

SEQ ID NO: 160168 - protein, 13 aa, Homo sapiens
  CDR3 for beta chain variable domain of TCR clone 80084 (TRBV20-1, TRBJ2-7)
CSARPSTNYEQYF

SEQ ID NO: 160169 - protein, 14 aa, Homo sapiens
  CDR3 for alpha chain variable domain of TCR clone 80085 (TRAV35, TRAJ50)
CAGHRKTPYDKVIF

SEQ ID NO: 160170 - protein, 13 aa, Homo sapiens
  CDR3 for beta chain variable domain of TCR clone 80085 (TRBV7-7, TRBJ2-3)
CASSLSRADTQYF

SEQ ID NO: 160171 - protein, 16 aa, Homo sapiens
  CDR3 for alpha chain variable domain of TCR clone 80086 (TRAV12-3, TRAJ53)
CAMSPGSGGSNYKLTF

SEQ ID NO: 160172 - protein, 14 aa, Homo sapiens
  CDR3 for beta chain variable domain of TCR clone 80086 (TRBV6-3, TRBJ1-1)
CASSYQRRDTEAFF

SEQ ID NO: 160173 - protein, 14 aa, Homo sapiens
  CDR3 for alpha chain variable domain of TCR clone 80087 (TRAV23/DV6, TRAJ4)
CAANLSGGYNKLIF

SEQ ID NO: 160174 - protein, 14 aa, Homo sapiens
  CDR3 for beta chain variable domain of TCR clone 80087 (TRBV25-1, TRBJ1-1)
CASTHLGGNTEAFF

SEQ ID NO: 160175 - protein, 11 aa, Homo sapiens
  CDR3 for alpha chain variable domain of TCR clone 80088 (TRAV3, TRAJ21)
CAVGNFNKPYF

SEQ ID NO: 160176 - protein, 16 aa, Homo sapiens
  CDR3 for beta chain variable domain of TCR clone 80088 (TRBV19, TRBJ2-1)
CASSKAGPSSCNEQFF

SEQ ID NO: 160177 - protein, 15 aa, Homo sapiens
  CDR3 for alpha chain variable domain of TCR clone 80089 (TRAV27, TRAJ38)
CAARRNAGNNRKLIW

SEQ ID NO: 160178 - protein, 16 aa, Homo sapiens
  CDR3 for beta chain variable domain of TCR clone 80089 (TRBV2, TRBJ2-3)
CASSTSVEGVTDTQYF

SEQ ID NO: 160179 - protein, 15 aa, Homo sapiens
  CDR3 for alpha chain variable domain of TCR clone 80090 (TRAV20, TRAJ43)
CAVQAGKSSNNEMRF

SEQ ID NO: 160180 - protein, 14 aa, Homo sapiens
  CDR3 for beta chain variable domain of TCR clone 80090 (TRBV27, TRBJ2-1)
CASRHLGGGKEQFF

SEQ ID NO: 160181 - protein, 16 aa, Homo sapiens
  CDR3 for alpha chain variable domain of TCR clone 80091 (TRAV26-1, TRAJ45)
CVVEKYSGGGADGLTF

SEQ ID NO: 160182 - protein, 15 aa, Homo sapiens
  CDR3 for beta chain variable domain of TCR clone 80091 (TRBV15, TRBJ2-7)
CHQQRPIQQAYEQYF

SEQ ID NO: 160183 - protein, 15 aa, Homo sapiens
  CDR3 for alpha chain variable domain of TCR clone 80092 (TRAV3, TRAJ3)
CAVSDMSSSASKIIF

SEQ ID NO: 160184 - protein, 14 aa, Homo sapiens
  CDR3 for beta chain variable domain of TCR clone 80092 (TRBV19, TRBJ2-1)
CASPTFVLSGEQFF

SEQ ID NO: 160185 - protein, 13 aa, Homo sapiens
  CDR3 for alpha chain variable domain of TCR clone 80093 (TRAV12-3, TRAJ54)
CAMSVQGAQKLVF

SEQ ID NO: 160186 - protein, 12 aa, Homo sapiens
  CDR3 for beta chain variable domain of TCR clone 80093 (TRBV7-8, TRBJ2-7)
CASSLGDREQYF

SEQ ID NO: 160187 - protein, 13 aa, Homo sapiens
  CDR3 for alpha chain variable domain of TCR clone 80094 (TRAV20, TRAJ37)
CAGCSSNTGKLIL

SEQ ID NO: 160188 - protein, 14 aa, Homo sapiens
  CDR3 for beta chain variable domain of TCR clone 80094 (TRBV12-4, TRBJ2-5)
CASSFGDRGETQYF

SEQ ID NO: 160189 - protein, 13 aa, Homo sapiens
  CDR3 for alpha chain variable domain of TCR clone 80095 (TRAV13-1, TRAJ27)
CAASTHQCRQINL

SEQ ID NO: 160190 - protein, 16 aa, Homo sapiens
  CDR3 for beta chain variable domain of TCR clone 80095 (TRBV27, TRBJ2-2)
CASSFRGLVRTGELVF

SEQ ID NO: 160191 - protein, 15 aa, Homo sapiens
  CDR3 for alpha chain variable domain of TCR clone 80096 (TRAV38-1, TRAJ57)
CAFMDSRGGSEKLVF

SEQ ID NO: 160192 - protein, 16 aa, Homo sapiens
  CDR3 for beta chain variable domain of TCR clone 80096 (TRBV10-3, TRBJ2-1)
CAIRGGGRGDYNEQFF

SEQ ID NO: 160193 - protein, 14 aa, Homo sapiens
  CDR3 for alpha chain variable domain of TCR clone 80097 (TRAV35, TRAJ50)
CAGHRKTSYDKVIF

SEQ ID NO: 160194 - protein, 16 aa, Homo sapiens
  CDR3 for beta chain variable domain of TCR clone 80097 (TRBV12-5, TRBJ2-5)
CASGPRTSGNQETQYF

SEQ ID NO: 160195 - protein, 11 aa, Homo sapiens
  CDR3 for alpha chain variable domain of TCR clone 80098 (TRAV12-2, TRAJ23)
CARGRGGKLIF

SEQ ID NO: 160196 - protein, 15 aa, Homo sapiens
  CDR3 for beta chain variable domain of TCR clone 80098 (TRBV4-1, TRBJ1-4)
CASSDTGGTNEKLFF

SEQ ID NO: 160197 - protein, 14 aa, Homo sapiens
  CDR3 for alpha chain variable domain of TCR clone 80099 (TRAV1-1, TRAJ27)
CAVSYNTNAGKSTF

SEQ ID NO: 160198 - protein, 13 aa, Homo sapiens
  CDR3 for beta chain variable domain of TCR clone 80099 (TRBV7-9, TRBJ1-2)
CASSLKQNYGYTF

SEQ ID NO: 160199 - protein, 13 aa, Homo sapiens
  CDR3 for alpha chain variable domain of TCR clone 80100 (TRAV21, TRAJ27)
CAARPGNAGKSTF

SEQ ID NO: 160200 - protein, 13 aa, Homo sapiens
  CDR3 for beta chain variable domain of TCR clone 80100 (TRBV7-3, TRBJ2-1)
CASSPVAYNEQFF

SEQ ID NO: 160201 - protein, 14 aa, Homo sapiens
  CDR3 for alpha chain variable domain of TCR clone 80101 (TRAV2, TRAJ22)
RAVGRGGSARQLTF

SEQ ID NO: 160202 - protein, 12 aa, Homo sapiens
  CDR3 for beta chain variable domain of TCR clone 80101 (TRBV19, TRBJ2-1)
CASSMQDTEQFF

SEQ ID NO: 160203 - protein, 11 aa, Homo sapiens
  CDR3 for alpha chain variable domain of TCR clone 80102 (TRAV12-2, TRAJ29)
CAVTLRSPLVF

SEQ ID NO: 160204 - protein, 12 aa, Homo sapiens
  CDR3 for beta chain variable domain of TCR clone 80102 (TRBV11-2, TRBJ2-2)
CASSLGGGELFF

SEQ ID NO: 160205 - protein, 14 aa, Homo sapiens
  CDR3 for alpha chain variable domain of TCR clone 80103 (TRAV26-1, TRAJ38)
CIADNAGNNRKLIW

SEQ ID NO: 160206 - protein, 13 aa, Homo sapiens
  CDR3 for beta chain variable domain of TCR clone 80103 (TRBV20-1, TRBJ1-1)
CSARGGGNTAAFF

SEQ ID NO: 160207 - protein, 13 aa, Homo sapiens
  CDR3 for alpha chain variable domain of TCR clone 80104 (TRAV27, TRAJ56)
CAGKPGANSKLTF

SEQ ID NO: 160208 - protein, 17 aa, Homo sapiens
  CDR3 for beta chain variable domain of TCR clone 80104 (TRBV11-2, TRBJ2-3)
CQQLRGASRGAPNTQYF

SEQ ID NO: 160209 - protein, 14 aa, Homo sapiens
  CDR3 for alpha chain variable domain of TCR clone 80105 (TRAV17, TRAJ56)
CATDYTGANSKLTF

SEQ ID NO: 160210 - protein, 14 aa, Homo sapiens
  CDR3 for beta chain variable domain of TCR clone 80105 (TRBV18, TRBJ2-1)
CAGSPVRGDNEQFF

SEQ ID NO: 160211 - protein, 14 aa, Homo sapiens
  CDR3 for alpha chain variable domain of TCR clone 80106 (TRAV17, TRAJ22)
CATSPSGSARQLTF

SEQ ID NO: 160212 - protein, 15 aa, Homo sapiens
  CDR3 for beta chain variable domain of TCR clone 80106 (TRBV4-1, TRBJ2-5)
CASRQLDLYQETQYF

SEQ ID NO: 160213 - protein, 14 aa, Homo sapiens
  CDR3 for alpha chain variable domain of TCR clone 80107 (TRAV35, TRAJ40)
CAGSTTSGTYKYIF

SEQ ID NO: 160214 - protein, 13 aa, Homo sapiens
  CDR3 for beta chain variable domain of TCR clone 80107 (TRBV20-1, TRBJ1-6)
CSAPLGVGSPLHL

SEQ ID NO: 160215 - protein, 12 aa, Homo sapiens
  CDR3 for alpha chain variable domain of TCR clone 80108 (TRAV8-4, TRAJ57)
CAVKGGSEKLVF

SEQ ID NO: 160216 - protein, 13 aa, Homo sapiens
  CDR3 for beta chain variable domain of TCR clone 80108 (TRBV4-2, TRBJ1-1)
CASSQAGNTEAFF

SEQ ID NO: 160217 - protein, 11 aa, Homo sapiens
  CDR3 for alpha chain variable domain of TCR clone 80109 (TRAV12-1, TRAJ43)
CVEYDNNDMRF

SEQ ID NO: 160218 - protein, 15 aa, Homo sapiens
  CDR3 for beta chain variable domain of TCR clone 80109 (TRBV18, TRBJ2-5)
CASSPRASGAETQYF

SEQ ID NO: 160219 - protein, 16 aa, Homo sapiens
  CDR3 for alpha chain variable domain of TCR clone 80110 (TRAV30, TRAJ24)
CGTEIVDADSWGNSSL

SEQ ID NO: 160220 - protein, 14 aa, Homo sapiens
  CDR3 for beta chain variable domain of TCR clone 80110 (TRBV19, TRBJ2-1)
CASPTFVLSGEQFF

SEQ ID NO: 160221 - protein, 11 aa, Homo sapiens
  CDR3 for alpha chain variable domain of TCR clone 80111 (TRAV26-1, TRAJ37)
CIVRVGGKLIF

SEQ ID NO: 160222 - protein, 14 aa, Homo sapiens
  CDR3 for beta chain variable domain of TCR clone 80111 (TRBV7-2, TRBJ2-7)
CASSLPPGQGPQYF

SEQ ID NO: 160223 - protein, 22 aa, Homo sapiens
  CDR3 for alpha chain variable domain of TCR clone 80112 (TRAV27, TRAJ38)
CAARRNAGNNHIQNPDPAVYQL

SEQ ID NO: 160224 - protein, 13 aa, Homo sapiens
  CDR3 for beta chain variable domain of TCR clone 80112 (TRBV12-5, TRBJ2-3)
CASGDRRSDTQYF

SEQ ID NO: 160225 - protein, 11 aa, Homo sapiens
  CDR3 for alpha chain variable domain of TCR clone 80113 (TRAV35, TRAJ57)
GPQGGSEKLVF

SEQ ID NO: 160226 - protein, 13 aa, Homo sapiens
  CDR3 for beta chain variable domain of TCR clone 80113 (TRBV25-1, TRBJ1-1)
CASSGQVRAEAFF

SEQ ID NO: 160227 - protein, 14 aa, Homo sapiens
  CDR3 for alpha chain variable domain of TCR clone 80114 (TRAV12-2, TRAJ9)
CAVNALEGGFKTIF

SEQ ID NO: 160228 - protein, 13 aa, Homo sapiens
  CDR3 for beta chain variable domain of TCR clone 80114 (TRBV27, TRBJ1-4)
CASSLMGDEKLFF

SEQ ID NO: 160229 - protein, 16 aa, Homo sapiens
  CDR3 for alpha chain variable domain of TCR clone 80115 (TRAV3, TRAJ5)
CAVRNLMDTGRRALTF

SEQ ID NO: 160230 - protein, 17 aa, Homo sapiens
  CDR3 for beta chain variable domain of TCR clone 80115 (TRBV28, TRBJ2-5)
CASSRQGGLAGAETQYF

SEQ ID NO: 160231 - protein, 15 aa, Homo sapiens
  CDR3 for alpha chain variable domain of TCR clone 80116 (TRAV23/DV6, TRAJ53)
CAASKLGSGGSNYKL

SEQ ID NO: 160232 - protein, 18 aa, Homo sapiens
  CDR3 for beta chain variable domain of TCR clone 80116 (TRBV11-2, TRBJ2-3)
CASSLGGASRGAPNTQYF

SEQ ID NO: 160233 - protein, 14 aa, Homo sapiens
  CDR3 for alpha chain variable domain of TCR clone 80117 (TRAV1-2, TRAJ8)
CAVREDTGFQKLVF

SEQ ID NO: 160234 - protein, 15 aa, Homo sapiens
  CDR3 for beta chain variable domain of TCR clone 80117 (TRBV6-5, TRBJ2-1)
CASGYDAGAGNEQFF

SEQ ID NO: 160235 - protein, 13 aa, Homo sapiens
  CDR3 for alpha chain variable domain of TCR clone 80118 (TRAV12-3, TRAJ43)
CAMIRPNNNDMRF

SEQ ID NO: 160236 - protein, 12 aa, Homo sapiens
  CDR3 for beta chain variable domain of TCR clone 80118 (TRBV11-2, TRBJ2-5)
CASSLGQGTQYF

SEQ ID NO: 160237 - protein, 15 aa, Homo sapiens
  CDR3 for alpha chain variable domain of TCR clone 80119 (TRAV3, TRAJ22)
CAVRDRGGSARQLTF

SEQ ID NO: 160238 - protein, 14 aa, Homo sapiens
  CDR3 for beta chain variable domain of TCR clone 80119 (TRBV19, TRBJ2-7)
CASTVQGRPYEQYF

SEQ ID NO: 160239 - protein, 13 aa, Homo sapiens
  CDR3 for alpha chain variable domain of TCR clone 80120 (TRAV3, TRAJ43)
CAVKARNNNDMRF

SEQ ID NO: 160240 - protein, 16 aa, Homo sapiens
  CDR3 for beta chain variable domain of TCR clone 80120 (TRBV7-9, TRBJ2-3)
CASSFSIAGGTDTQYF

SEQ ID NO: 160241 - protein, 13 aa, Homo sapiens
  CDR3 for alpha chain variable domain of TCR clone 80121 (TRAV3, TRAJ30)
CAVRDRGDDKIIF

SEQ ID NO: 160242 - protein, 14 aa, Homo sapiens
  CDR3 for beta chain variable domain of TCR clone 80121 (TRBV5-1, TRBJ1-1)
CASSRTAGDTEAFF

SEQ ID NO: 160243 - protein, 14 aa, Homo sapiens
  CDR3 for alpha chain variable domain of TCR clone 80122 (TRAV13-1, TRAJ44)
CAAKATGTASKLTF

SEQ ID NO: 160244 - protein, 11 aa, Homo sapiens
  CDR3 for beta chain variable domain of TCR clone 80122 (TRBV11-2, TRBJ1-1)
CASSINTEAFF

SEQ ID NO: 160245 - protein, 13 aa, Homo sapiens
  CDR3 for alpha chain variable domain of TCR clone 80123 (TRAV26-1, TRAJ31)
CIVRVDCNARLMF

SEQ ID NO: 160246 - protein, 17 aa, Homo sapiens
  CDR3 for beta chain variable domain of TCR clone 80123 (TRBV11-2, TRBJ2-1)
CASSLYPPGVEYNEQFF

SEQ ID NO: 160247 - protein, 15 aa, Homo sapiens
  CDR3 for alpha chain variable domain of TCR clone 80124 (TRAV12-1, TRAJ44)
CVVFINTGTASKLTF

SEQ ID NO: 160248 - protein, 17 aa, Homo sapiens
  CDR3 for beta chain variable domain of TCR clone 80124 (TRBV7-8, TRBJ2-6)
CASSAGTGGAGANVLTF

SEQ ID NO: 160249 - protein, 14 aa, Homo sapiens
  CDR3 for alpha chain variable domain of TCR clone 80125 (TRAV16, TRAJ54)
CALSGVQGAQKLVF

SEQ ID NO: 160250 - protein, 15 aa, Homo sapiens
  CDR3 for beta chain variable domain of TCR clone 80125 (TRBV18, TRBJ2-2)
CASSTSGLHTGELFS

SEQ ID NO: 160251 - protein, 13 aa, Homo sapiens
  CDR3 for alpha chain variable domain of TCR clone 80126 (TRAV20, TRAJ20)
CAVRDLNDYKLSF

SEQ ID NO: 160252 - protein, 12 aa, Homo sapiens
  CDR3 for beta chain variable domain of TCR clone 80126 (TRBV9, TRBJ2-1)
CASSITYNEQFF

SEQ ID NO: 160253 - protein, 13 aa, Homo sapiens
  CDR3 for alpha chain variable domain of TCR clone 80127 (TRAV2, TRAJ40)
CAVVTSGTYKYIF

SEQ ID NO: 160254 - protein, 15 aa, Homo sapiens
  CDR3 for beta chain variable domain of TCR clone 80127 (TRBV4-2, TRBJ1-2)
CASSQRTGGRDGYTF

SEQ ID NO: 160255 - protein, 14 aa, Homo sapiens
  CDR3 for alpha chain variable domain of TCR clone 80128 (TRAV6, TRAJ6)
CALPTSGGSYIPIF

SEQ ID NO: 160256 - protein, 17 aa, Homo sapiens
  CDR3 for beta chain variable domain of TCR clone 80128 (TRBV5-1, TRBJ2-5)
CASSPVALGQNQETQYF

SEQ ID NO: 160257 - protein, 12 aa, Homo sapiens
  CDR3 for alpha chain variable domain of TCR clone 80129 (TRAV2, TRAJ33)
CAFMDSNYQLIW

SEQ ID NO: 160258 - protein, 16 aa, Homo sapiens
  CDR3 for beta chain variable domain of TCR clone 80129 (TRBV2, TRBJ2-7)
CASSEPWTGPSYEQYL

SEQ ID NO: 160259 - protein, 12 aa, Homo sapiens
  CDR3 for alpha chain variable domain of TCR clone 80130 (TRAV12-1, TRAJ40)
CVFYSGTYKYIF

SEQ ID NO: 160260 - protein, 18 aa, Homo sapiens
  CDR3 for beta chain variable domain of TCR clone 80130 (TRBV12-4, TRBJ2-2)
WASSLVAGTRGRTGELFF

SEQ ID NO: 160261 - protein, 11 aa, Homo sapiens
  CDR3 for alpha chain variable domain of TCR clone 80131 (TRAV21, TRAJ34)
CAVTNTDKLIF

SEQ ID NO: 160262 - protein, 13 aa, Homo sapiens
  CDR3 for beta chain variable domain of TCR clone 80131 (TRBV10-3, TRBJ2-7)
CASKLAVNYEQYF

SEQ ID NO: 160263 - protein, 14 aa, Homo sapiens
  CDR3 for alpha chain variable domain of TCR clone 80132 (TRAV12-2, TRAJ44)
CAVNPAGTASKLTF

SEQ ID NO: 160264 - protein, 13 aa, Homo sapiens
  CDR3 for beta chain variable domain of TCR clone 80132 (TRBV20-1, TRBJ1-6)
CSASLGVGSPLHF

SEQ ID NO: 160265 - protein, 12 aa, Homo sapiens
  CDR3 for alpha chain variable domain of TCR clone 80133 (TRAV8-3, TRAJ26)
CAGDNYGQNFVF

SEQ ID NO: 160266 - protein, 14 aa, Homo sapiens
  CDR3 for beta chain variable domain of TCR clone 80133 (TRBV7-6, TRBJ2-3)
CASSVAGGTDTQYF

SEQ ID NO: 160267 - protein, 14 aa, Homo sapiens
  CDR3 for alpha chain variable domain of TCR clone 80134 (TRAV29/DV5, TRAJ36)
CAARRKTGANNLFF

SEQ ID NO: 160268 - protein, 13 aa, Homo sapiens
  CDR3 for beta chain variable domain of TCR clone 80134 (TRBV2, TRBJ1-1)
CASSEGGNTEAFF

SEQ ID NO: 160269 - protein, 15 aa, Homo sapiens
  CDR3 for alpha chain variable domain of TCR clone 80135 (TRAV26-2, TRAJ13)
CILRDLSGGYQKVTF

SEQ ID NO: 160270 - protein, 11 aa, Homo sapiens
  CDR3 for beta chain variable domain of TCR clone 80135 (TRBV7-9, TRBJ2-3)
CASSHTDTQYF

SEQ ID NO: 160271 - protein, 17 aa, Homo sapiens
  CDR3 for alpha chain variable domain of TCR clone 80136 (TRAV12-2, TRAJ52)
CAVNPYAGGTSYGKLTF

SEQ ID NO: 160272 - protein, 16 aa, Homo sapiens
  CDR3 for beta chain variable domain of TCR clone 80136 (TRBV5-5, TRBJ2-2)
CASSGRREGETGELFF

SEQ ID NO: 160273 - protein, 18 aa, Homo sapiens
  CDR3 for alpha chain variable domain of TCR clone 80137 (TRAV21, TRAJ52)
CAVMPSPAGGTSYGKLTF

SEQ ID NO: 160274 - protein, 16 aa, Homo sapiens
  CDR3 for beta chain variable domain of TCR clone 80137 (TRBV7-3, TRBJ2-1)
CASSLEGYRSYNEQFF

SEQ ID NO: 160275 - protein, 15 aa, Homo sapiens
  CDR3 for alpha chain variable domain of TCR clone 80138 (TRAV17, TRAJ40)
CATVSSTSGTYKYIL

SEQ ID NO: 160276 - protein, 15 aa, Homo sapiens
  CDR3 for beta chain variable domain of TCR clone 80138 (TRBV5-1, TRBJ2-1)
CASSQAGYWWNEQFF

SEQ ID NO: 160277 - protein, 13 aa, Homo sapiens
  CDR3 for alpha chain variable domain of TCR clone 80139 (TRAV1-2, TRAJ33)
CAVSEDSNYQLIW

SEQ ID NO: 160278 - protein, 16 aa, Homo sapiens
  CDR3 for beta chain variable domain of TCR clone 80139 (TRBV4-2, TRBJ2-7)
CASSQDGVERGYEQYL

SEQ ID NO: 160279 - protein, 15 aa, Homo sapiens
  CDR3 for alpha chain variable domain of TCR clone 80140 (TRAV3, TRAJ5)
CAVRDRETGRRALTF

SEQ ID NO: 160280 - protein, 15 aa, Homo sapiens
  CDR3 for beta chain variable domain of TCR clone 80140 (TRBV7-9, TRBJ2-2)
CASGPLDTFPGELFF

SEQ ID NO: 160281 - protein, 15 aa, Homo sapiens
  CDR3 for alpha chain variable domain of TCR clone 80141 (TRAV12-1, TRAJ4)
CVVTPWMGGYNKLIF

SEQ ID NO: 160282 - protein, 11 aa, Homo sapiens
  CDR3 for beta chain variable domain of TCR clone 80141 (TRBV12-4, TRBJ2-3)
CASTATDTQYF

SEQ ID NO: 160283 - protein, 11 aa, Homo sapiens
  CDR3 for alpha chain variable domain of TCR clone 80142 (TRAV21, TRAJ11)
CAVNGYSTLTF

SEQ ID NO: 160284 - protein, 16 aa, Homo sapiens
  CDR3 for beta chain variable domain of TCR clone 80142 (TRBV12-4, TRBJ1-2)
CASSPTATGKTRGYTF

SEQ ID NO: 160285 - protein, 11 aa, Homo sapiens
  CDR3 for alpha chain variable domain of TCR clone 80143 (TRAV1-1, TRAJ31)
CAVPKQCQTHV

SEQ ID NO: 160286 - protein, 17 aa, Homo sapiens
  CDR3 for beta chain variable domain of TCR clone 80143 (TRBV27, TRBJ2-6)
CASSAGTGFSGANDLTF

SEQ ID NO: 160287 - protein, 13 aa, Homo sapiens
  CDR3 for alpha chain variable domain of TCR clone 80144 (TRAV12-3, TRAJ13)
CAMTSGGYQKVTF

SEQ ID NO: 160288 - protein, 13 aa, Homo sapiens
  CDR3 for beta chain variable domain of TCR clone 80144 (TRBV20-1, TRBJ2-2)
CSALSGGAGELSF

SEQ ID NO: 160289 - protein, 12 aa, Homo sapiens
  CDR3 for alpha chain variable domain of TCR clone 80145 (TRAV10, TRAJ43)
CVVVRVGNDMRC

SEQ ID NO: 160290 - protein, 15 aa, Homo sapiens
  CDR3 for beta chain variable domain of TCR clone 80145 (TRBV2, TRBJ2-7)
CASSEGLARSYEQYF

SEQ ID NO: 160291 - protein, 12 aa, Homo sapiens
  CDR3 for alpha chain variable domain of TCR clone 80146 (TRAV13-2, TRAJ23)
CAERHRGGKLIF

SEQ ID NO: 160292 - protein, 16 aa, Homo sapiens
  CDR3 for beta chain variable domain of TCR clone 80146 (TRBV20-1, TRBJ1-4)
CSAPAQGLLTNEKLFF

SEQ ID NO: 160293 - protein, 13 aa, Homo sapiens
  CDR3 for alpha chain variable domain of TCR clone 80147 (TRAV12-1, TRAJ6)
CVVYPGGSYIPTF

SEQ ID NO: 160294 - protein, 13 aa, Homo sapiens
  CDR3 for beta chain variable domain of TCR clone 80147 (TRBV20-1, TRBJ1-3)
CSAGAYSGNTMYF

SEQ ID NO: 160295 - protein, 14 aa, Homo sapiens
  CDR3 for alpha chain variable domain of TCR clone 80148 (TRAV8-3, TRAJ30)
CAVGDMNRDDKIIF

SEQ ID NO: 160296 - protein, 17 aa, Homo sapiens
  CDR3 for beta chain variable domain of TCR clone 80148 (TRBV19, TRBJ2-2)
CASSRNPGGFGTGELLF

SEQ ID NO: 160297 - protein, 16 aa, Homo sapiens
  CDR3 for alpha chain variable domain of TCR clone 80149 (TRAV12-3, TRAJ53)
CAMSPGSGGSNYKLKF

SEQ ID NO: 160298 - protein, 12 aa, Homo sapiens
  CDR3 for beta chain variable domain of TCR clone 80149 (TRBV11-2, TRBJ2-2)
CASSLGGGELFF

SEQ ID NO: 160299 - protein, 14 aa, Homo sapiens
  CDR3 for alpha chain variable domain of TCR clone 80150 (TRAV27, TRAJ23)
CAGAFDNQGGKLIF

SEQ ID NO: 160300 - protein, 15 aa, Homo sapiens
  CDR3 for beta chain variable domain of TCR clone 80150 (TRBV7-3, TRBJ2-7)
CASSLTGQGKYEQYF

SEQ ID NO: 160301 - protein, 16 aa, Homo sapiens
  CDR3 for alpha chain variable domain of TCR clone 80151 (TRAV17, TRAJ52)
CATDPMGGTSYGKLTF

SEQ ID NO: 160302 - protein, 16 aa, Homo sapiens
  CDR3 for beta chain variable domain of TCR clone 80151 (TRBV7-3, TRBJ2-2)
CASSLKRGTLSGELFF

SEQ ID NO: 160303 - protein, 13 aa, Homo sapiens
  CDR3 for alpha chain variable domain of TCR clone 80152 (TRAV21, TRAJ37)
CAVSSGNTGKLIF

SEQ ID NO: 160304 - protein, 13 aa, Homo sapiens
  CDR3 for beta chain variable domain of TCR clone 80152 (TRBV7-6, TRBJ2-3)
CASSLRSNNTQYF

SEQ ID NO: 160305 - protein, 16 aa, Homo sapiens
  CDR3 for alpha chain variable domain of TCR clone 80153 (TRAV38-2/DV8, TRAJ57)
CAYRSVGQGGSEKLVF

SEQ ID NO: 160306 - protein, 17 aa, Homo sapiens
  CDR3 for beta chain variable domain of TCR clone 80153 (TRBV6-6, TRBJ2-5)
CASSYPLAGGPQETQYF

SEQ ID NO: 160307 - protein, 16 aa, Homo sapiens
  CDR3 for alpha chain variable domain of TCR clone 80154 (TRAV26-1, TRAJ32)
CIVRTNYGGATNKLIF

SEQ ID NO: 160308 - protein, 17 aa, Homo sapiens
  CDR3 for beta chain variable domain of TCR clone 80154 (TRBV11-2, TRBJ2-1)
CASSLYPPGVEYNEQFF

SEQ ID NO: 160309 - protein, 12 aa, Homo sapiens
  CDR3 for alpha chain variable domain of TCR clone 80155 (TRAV30, TRAJ43)
CGTEERGNDMRF

SEQ ID NO: 160310 - protein, 14 aa, Homo sapiens
  CDR3 for beta chain variable domain of TCR clone 80155 (TRBV6-1, TRBJ1-3)
CASVQGGGGNTIYF

SEQ ID NO: 160311 - protein, 12 aa, Homo sapiens
  CDR3 for alpha chain variable domain of TCR clone 80156 (TRAV12-3, TRAJ5)
CAMDTGRRALTF

SEQ ID NO: 160312 - protein, 14 aa, Homo sapiens
  CDR3 for beta chain variable domain of TCR clone 80156 (TRBV20-1, TRBJ2-1)
CSAQRGGSANEQFF

SEQ ID NO: 160313 - protein, 13 aa, Homo sapiens
  CDR3 for alpha chain variable domain of TCR clone 80157 (TRAV20, TRAJ21)
CAVEGYNFNKFYF

SEQ ID NO: 160314 - protein, 15 aa, Homo sapiens
  CDR3 for beta chain variable domain of TCR clone 80157 (TRBV5-5, TRBJ1-5)
CASSSTPGSNQPQHF

SEQ ID NO: 160315 - protein, 15 aa, Homo sapiens
  CDR3 for alpha chain variable domain of TCR clone 80158 (TRAV8-4, TRAJ40)
CAVSSITSGTYKYIL

SEQ ID NO: 160316 - protein, 13 aa, Homo sapiens
  CDR3 for beta chain variable domain of TCR clone 80158 (TRBV2, TRBJ2-1)
CATSRGTDNEQFF

SEQ ID NO: 160317 - protein, 11 aa, Homo sapiens
  CDR3 for alpha chain variable domain of TCR clone 80159 (TRAV4, TRAJ21)
CLIYNFNKFYL

SEQ ID NO: 160318 - protein, 17 aa, Homo sapiens
  CDR3 for beta chain variable domain of TCR clone 80159 (TRBV23-1, TRBJ2-1)
CISAPAVNRDQGGEQFF

SEQ ID NO: 160319 - protein, 14 aa, Homo sapiens
  CDR3 for alpha chain variable domain of TCR clone 80160 (TRAV12-1, TRAJ12)
CVVTRMDSSYKLIF

SEQ ID NO: 160320 - protein, 16 aa, Homo sapiens
  CDR3 for beta chain variable domain of TCR clone 80160 (TRBV12-5, TRBJ2-5)
CASGPRTSGNQETQYF

SEQ ID NO: 160321 - protein, 13 aa, Homo sapiens
  CDR3 for alpha chain variable domain of TCR clone 80161 (TRAV3, TRAJ26)
CAVSRGYGQNFFF

SEQ ID NO: 160322 - protein, 15 aa, Homo sapiens
  CDR3 for beta chain variable domain of TCR clone 80161 (TRBV27, TRBJ2-1)
CASSLARGAYNEQFF

SEQ ID NO: 160323 - protein, 14 aa, Homo sapiens
  CDR3 for alpha chain variable domain of TCR clone 80162 (TRAV26-2, TRAJ31)
CILIPGNNNARLMF

SEQ ID NO: 160324 - protein, 16 aa, Homo sapiens
  CDR3 for beta chain variable domain of TCR clone 80162 (TRBV7-3, TRBJ2-1)
CASSLVSGGSNNEQFF

SEQ ID NO: 160325 - protein, 12 aa, Homo sapiens
  CDR3 for alpha chain variable domain of TCR clone 80163 (TRAV36/DV7, TRAJ54)
CAVVRGAQKLVF

SEQ ID NO: 160326 - protein, 14 aa, Homo sapiens
  CDR3 for beta chain variable domain of TCR clone 80163 (TRBV7-3, TRBJ1-1)
CASSLKGGNTESFF

SEQ ID NO: 160327 - protein, 16 aa, Homo sapiens
  CDR3 for alpha chain variable domain of TCR clone 80164 (TRAV21, TRAJ37)
CAVRTAGSSNTGKLIF

SEQ ID NO: 160328 - protein, 13 aa, Homo sapiens
  CDR3 for beta chain variable domain of TCR clone 80164 (TRBV7-9, TRBJ2-5)
CASLPSGRETQFF

SEQ ID NO: 160329 - protein, 15 aa, Homo sapiens
  CDR3 for alpha chain variable domain of TCR clone 80165 (TRAV12-2, TRAJ57)
CAGSRGQGGSEKLVF

SEQ ID NO: 160330 - protein, 14 aa, Homo sapiens
  CDR3 for beta chain variable domain of TCR clone 80165 (TRBV20-1, TRBJ2-1)
CSAHPGLPYNEQFF

SEQ ID NO: 160331 - protein, 18 aa, Homo sapiens
  CDR3 for alpha chain variable domain of TCR clone 80166 (TRAV12-3, TRAJ52)
CAMCVGGAGGTSYGELTF

SEQ ID NO: 160332 - protein, 15 aa, Homo sapiens
  CDR3 for beta chain variable domain of TCR clone 80166 (TRBV27, TRBJ1-6)
CASSFDRGLGSPLHF

SEQ ID NO: 160333 - protein, 14 aa, Homo sapiens
  CDR3 for alpha chain variable domain of TCR clone 80167 (TRAV36/DV7, TRAJ45)
CPLYSGGGADGLTF

SEQ ID NO: 160334 - protein, 12 aa, Homo sapiens
  CDR3 for beta chain variable domain of TCR clone 80167 (TRBV7-8, TRBJ2-7)
CASSLGDREQYF

SEQ ID NO: 160335 - protein, 14 aa, Homo sapiens
  CDR3 for alpha chain variable domain of TCR clone 80168 (TRAV26-1, TRAJ22)
CIVRVYGSARQLSF

SEQ ID NO: 160336 - protein, 17 aa, Homo sapiens
  CDR3 for beta chain variable domain of TCR clone 80168 (TRBV7-3, TRBJ2-3)
CASSPGGLAGFGDTQYF

SEQ ID NO: 160337 - protein, 21 aa, Homo sapiens
  CDR3 for alpha chain variable domain of TCR clone 80169 (TRAV1-2, TRAJ37)
CLLPLCCERFHGSGNTGKLIF

SEQ ID NO: 160338 - protein, 14 aa, Homo sapiens
  CDR3 for beta chain variable domain of TCR clone 80169 (TRBV2, TRBJ2-5)
CASSEVLARETQYF

SEQ ID NO: 160339 - protein, 12 aa, Homo sapiens
  CDR3 for alpha chain variable domain of TCR clone 80170 (TRAV12-3, TRAJ17)
CAMTLTGNKLTF

SEQ ID NO: 160340 - protein, 16 aa, Homo sapiens
  CDR3 for beta chain variable domain of TCR clone 80170 (TRBV20-1, TRBJ2-2)
CSARSAGGLGTGELFF

SEQ ID NO: 160341 - protein, 12 aa, Homo sapiens
  CDR3 for alpha chain variable domain of TCR clone 80171 (TRAV1-1, TRAJ39)
CAVPVVGIMLTF

SEQ ID NO: 160342 - protein, 15 aa, Homo sapiens
  CDR3 for beta chain variable domain of TCR clone 80171 (TRBV19, TRBJ1-6)
CASSTQGAVGSPLHF

SEQ ID NO: 160343 - protein, 17 aa, Homo sapiens
  CDR3 for alpha chain variable domain of TCR clone 80172 (TRAV3, TRAJ38)
CAVRDCLNAGNNRKLIW

SEQ ID NO: 160344 - protein, 13 aa, Homo sapiens
  CDR3 for beta chain variable domain of TCR clone 80172 (TRBV23-1, TRBJ1-4)
CASRGKFNETLFF

SEQ ID NO: 160345 - protein, 15 aa, Homo sapiens
  CDR3 for alpha chain variable domain of TCR clone 80173 (TRAV23/DV6, TRAJ18)
CAARYRGSTLGRLYF

SEQ ID NO: 160346 - protein, 13 aa, Homo sapiens
  CDR3 for beta chain variable domain of TCR clone 80173 (TRBV7-2, TRBJ2-7)
CAGSSPSGSEQYF

SEQ ID NO: 160347 - protein, 13 aa, Homo sapiens
  CDR3 for alpha chain variable domain of TCR clone 80174 (TRAV21, TRAJ57)
CAVTQGGSEKLVF

SEQ ID NO: 160348 - protein, 16 aa, Homo sapiens
  CDR3 for beta chain variable domain of TCR clone 80174 (TRBV29-1, TRBJ2-7)
FSVEDAEDGTAYEQYF

SEQ ID NO: 160349 - protein, 15 aa, Homo sapiens
  CDR3 for alpha chain variable domain of TCR clone 80175 (TRAV2, TRAJ15)
CAVEDRGQAGTALIF

SEQ ID NO: 160350 - protein, 15 aa, Homo sapiens
  CDR3 for beta chain variable domain of TCR clone 80175 (TRBV7-9, TRBJ1-6)
CASSSPGRGNSPLHF

SEQ ID NO: 160351 - protein, 13 aa, Homo sapiens
  CDR3 for alpha chain variable domain of TCR clone 80176 (TRAV26-2, TRAJ43)
CILRAVNNNDMRF

SEQ ID NO: 160352 - protein, 13 aa, Homo sapiens
  CDR3 for beta chain variable domain of TCR clone 80176 (TRBV7-9, TRBJ1-2)
CASSLKQNYGYTF

SEQ ID NO: 160353 - protein, 23 aa, Homo sapiens
  CDR3 for alpha chain variable domain of TCR clone 80177 (TRAV8-3, )
CAVVTTRIPDIQNPYPAVYQLRD

SEQ ID NO: 160354 - protein, 14 aa, Homo sapiens
  CDR3 for beta chain variable domain of TCR clone 80177 (TRBV11-2, TRBJ2-7)
CASSPSTTSYEQYF

SEQ ID NO: 160355 - protein, 13 aa, Homo sapiens
  CDR3 for alpha chain variable domain of TCR clone 80178 (TRAV2, TRAJ24)
CAVTTDGWGKLQF

SEQ ID NO: 160356 - protein, 14 aa, Homo sapiens
  CDR3 for beta chain variable domain of TCR clone 80178 (TRBV13, TRBJ2-5)
CASSLGRGQETQYF

SEQ ID NO: 160357 - protein, 14 aa, Homo sapiens
  CDR3 for alpha chain variable domain of TCR clone 80179 (TRAV9-2, TRAJ39)
CALYIYNAGNMLTF

SEQ ID NO: 160358 - protein, 14 aa, Homo sapiens
  CDR3 for beta chain variable domain of TCR clone 80179 (TRBV13, TRBJ2-5)
CASSLGPRGETQYF

SEQ ID NO: 160359 - protein, 17 aa, Homo sapiens
  CDR3 for alpha chain variable domain of TCR clone 80180 (TRAV26-2, TRAJ42)
CILRDVGYGGSQGNLIF

SEQ ID NO: 160360 - protein, 16 aa, Homo sapiens
  CDR3 for beta chain variable domain of TCR clone 80180 (TRBV12-4, TRBJ2-7)
CASSSIGGTGTYEQYF

SEQ ID NO: 160361 - protein, 14 aa, Homo sapiens
  CDR3 for alpha chain variable domain of TCR clone 80181 (TRAV13-1, TRAJ9)
CAASALTGGFKTIF

SEQ ID NO: 160362 - protein, 13 aa, Homo sapiens
  CDR3 for beta chain variable domain of TCR clone 80181 (TRBV20-1, TRBJ1-1)
CSAGTVGNTEAFF

SEQ ID NO: 160363 - protein, 15 aa, Homo sapiens
  CDR3 for alpha chain variable domain of TCR clone 80182 (TRAV17, TRAJ57)
CATGPSQGGSEKLVF

SEQ ID NO: 160364 - protein, 15 aa, Homo sapiens
  CDR3 for beta chain variable domain of TCR clone 80182 (TRBV28, TRBJ2-7)
CASSLISGGSYEQYF

SEQ ID NO: 160365 - protein, 14 aa, Homo sapiens
  CDR3 for alpha chain variable domain of TCR clone 80183 (TRAV12-2, TRAJ17)
CAVLFKAAGNKLTF

SEQ ID NO: 160366 - protein, 12 aa, Homo sapiens
  CDR3 for beta chain variable domain of TCR clone 80183 (TRBV28, TRBJ2-6)
CAIQAGANVLTF

SEQ ID NO: 160367 - protein, 18 aa, Homo sapiens
  CDR3 for alpha chain variable domain of TCR clone 80184 (TRAV9-2, TRAJ52)
CALSRQNAGGTSYGKLTF

SEQ ID NO: 160368 - protein, 13 aa, Homo sapiens
  CDR3 for beta chain variable domain of TCR clone 80184 (TRBV7-9, TRBJ1-2)
CASSLKQNYGYTF

SEQ ID NO: 160369 - protein, 15 aa, Homo sapiens
  CDR3 for alpha chain variable domain of TCR clone 80185 (TRAV3, TRAJ22)
CAVRDRGGSARQLTF

SEQ ID NO: 160370 - protein, 12 aa, Homo sapiens
  CDR3 for beta chain variable domain of TCR clone 80185 (TRBV19, TRBJ1-5)
CASSIAQQPQHF

SEQ ID NO: 160371 - protein, 15 aa, Homo sapiens
  CDR3 for alpha chain variable domain of TCR clone 80186 (TRAV12-3, TRAJ49)
CAMAVTPNTGNQFYF

SEQ ID NO: 160372 - protein, 18 aa, Homo sapiens
  CDR3 for beta chain variable domain of TCR clone 80186 (TRBV4-1, TRBJ1-5)
CASSQDPRGQGLNQLQHF

SEQ ID NO: 160373 - protein, 13 aa, Homo sapiens
  CDR3 for alpha chain variable domain of TCR clone 80187 (TRAV8-3, TRAJ28)
CAVSAVGSYQLTF

SEQ ID NO: 160374 - protein, 14 aa, Homo sapiens
  CDR3 for beta chain variable domain of TCR clone 80187 (TRBV7-2, TRBJ2-7)
CASRSQGAAYEQYF

SEQ ID NO: 160375 - protein, 14 aa, Homo sapiens
  CDR3 for alpha chain variable domain of TCR clone 80188 (TRAV26-1, TRAJ34)
CIVRVAYNTDKLIF

SEQ ID NO: 160376 - protein, 13 aa, Homo sapiens
  CDR3 for beta chain variable domain of TCR clone 80188 (TRBV5-7, TRBJ2-6)
CASTSSGANVLTF

SEQ ID NO: 160377 - protein, 13 aa, Homo sapiens
  CDR3 for alpha chain variable domain of TCR clone 80189 (TRAV3, TRAJ21)
CAVREPDFNKFYF

SEQ ID NO: 160378 - protein, 13 aa, Homo sapiens
  CDR3 for beta chain variable domain of TCR clone 80189 (TRBV5-4, TRBJ2-5)
CASSRQEGETQYF

SEQ ID NO: 160379 - protein, 15 aa, Homo sapiens
  CDR3 for alpha chain variable domain of TCR clone 80190 (TRAV3, TRAJ36)
CAVIASQTGANNLFF

SEQ ID NO: 160380 - protein, 15 aa, Homo sapiens
  CDR3 for beta chain variable domain of TCR clone 80190 (TRBV20-1, TRBJ1-1)
CSASRGVTGNTEAFF

SEQ ID NO: 160381 - protein, 14 aa, Homo sapiens
  CDR3 for alpha chain variable domain of TCR clone 80191 (TRAV16, TRAJ57)
CALPTQGGSEKLVF

SEQ ID NO: 160382 - protein, 15 aa, Homo sapiens
  CDR3 for beta chain variable domain of TCR clone 80191 (TRBV28, TRBJ1-3)
CASWGGHLSGNTKYF

SEQ ID NO: 160383 - protein, 17 aa, Homo sapiens
  CDR3 for alpha chain variable domain of TCR clone 80192 (TRAV16, TRAJ58)
CITVLSNGETSGSRLTF

SEQ ID NO: 160384 - protein, 15 aa, Homo sapiens
  CDR3 for beta chain variable domain of TCR clone 80192 (TRBV11-3, TRBJ2-3)
CASLKDGREGDTQYF

SEQ ID NO: 160385 - protein, 14 aa, Homo sapiens
  CDR3 for alpha chain variable domain of TCR clone 80193 (TRAV38-1, TRAJ40)
CALRPTSGTYKYIF

SEQ ID NO: 160386 - protein, 15 aa, Homo sapiens
  CDR3 for beta chain variable domain of TCR clone 80193 (TRBV7-6, TRBJ1-6)
CASSLQARFNSPLHF

SEQ ID NO: 160387 - protein, 14 aa, Homo sapiens
  CDR3 for alpha chain variable domain of TCR clone 80194 (TRAV12-1, TRAJ12)
FVVTRMDSSYKLIF

SEQ ID NO: 160388 - protein, 13 aa, Homo sapiens
  CDR3 for beta chain variable domain of TCR clone 80194 (TRBV20-1, TRBJ1-1)
CSARGGGNTEAFF

SEQ ID NO: 160389 - protein, 15 aa, Homo sapiens
  CDR3 for alpha chain variable domain of TCR clone 80195 (TRAV13-1, TRAJ10)
CAATILTGGGNKLTF

SEQ ID NO: 160390 - protein, 15 aa, Homo sapiens
  CDR3 for beta chain variable domain of TCR clone 80195 (TRBV2, TRBJ2-7)
CASPLLGSGATEQYF

SEQ ID NO: 160391 - protein, 13 aa, Homo sapiens
  CDR3 for alpha chain variable domain of TCR clone 80196 (TRAV8-3, TRAJ5)
CAVGPRGRRAPTF

SEQ ID NO: 160392 - protein, 16 aa, Homo sapiens
  CDR3 for beta chain variable domain of TCR clone 80196 (TRBV11-3, TRBJ2-3)
CASSPGGLLGTDTQYF

SEQ ID NO: 160393 - protein, 16 aa, Homo sapiens
  CDR3 for alpha chain variable domain of TCR clone 80197 (TRAV38-1, TRAJ42)
CAFMKLGGGSQGNLIF

SEQ ID NO: 160394 - protein, 20 aa, Homo sapiens
  CDR3 for beta chain variable domain of TCR clone 80197 (TRBV28, TRBJ2-1)
CASTPIGRSPGLAGGNEQFF

SEQ ID NO: 160395 - protein, 14 aa, Homo sapiens
  CDR3 for alpha chain variable domain of TCR clone 80198 (TRAV3, TRAJ7)
CSVREEEREQQTRF

SEQ ID NO: 160396 - protein, 12 aa, Homo sapiens
  CDR3 for beta chain variable domain of TCR clone 80198 (TRBV7-8, TRBJ2-7)
CASSLGDREQYF

SEQ ID NO: 160397 - protein, 23 aa, Homo sapiens
  CDR3 for alpha chain variable domain of TCR clone 80199 (TRAV8-1, TRAJ6)
CAVNTPPEEATYLHLEEEPALLF

SEQ ID NO: 160398 - protein, 15 aa, Homo sapiens
  CDR3 for beta chain variable domain of TCR clone 80199 (TRBV11-2, TRBJ2-2)
CASSSDRVNAGELFF

SEQ ID NO: 160399 - protein, 13 aa, Homo sapiens
  CDR3 for alpha chain variable domain of TCR clone 80200 (TRAV8-6, TRAJ21)
CAVSPSSLNKFYF

SEQ ID NO: 160400 - protein, 18 aa, Homo sapiens
  CDR3 for beta chain variable domain of TCR clone 80200 (TRBV11-2, TRBJ2-3)
CASSLGGASRGAPNTRYF

SEQ ID NO: 160401 - protein, 15 aa, Homo sapiens
  CDR3 for alpha chain variable domain of TCR clone 80201 (TRAV21, TRAJ32)
CAVNSYVGATNKLIF

SEQ ID NO: 160402 - protein, 18 aa, Homo sapiens
  CDR3 for beta chain variable domain of TCR clone 80201 (TRBV7-9, TRBJ2-1)
CASSTGLAEGSSYNEQFF

SEQ ID NO: 160403 - protein, 11 aa, Homo sapiens
  CDR3 for alpha chain variable domain of TCR clone 80202 (TRAV12-1, TRAJ15)
CVVNAGTALLF

SEQ ID NO: 160404 - protein, 16 aa, Homo sapiens
  CDR3 for beta chain variable domain of TCR clone 80202 (TRBV28, TRBJ2-1)
CASSSRVRDSYNEQFF

SEQ ID NO: 160405 - protein, 13 aa, Homo sapiens
  CDR3 for alpha chain variable domain of TCR clone 80203 (TRAV30, TRAJ24)
CGTVTDSWGKLQF

SEQ ID NO: 160406 - protein, 13 aa, Homo sapiens
  CDR3 for beta chain variable domain of TCR clone 80203 (TRBV10-3, TRBJ2-7)
CASKLAVNYEQYF

SEQ ID NO: 160407 - protein, 14 aa, Homo sapiens
  CDR3 for alpha chain variable domain of TCR clone 80204 (TRAV8-4, TRAJ8)
CAVSLNTGFQKLVF

SEQ ID NO: 160408 - protein, 13 aa, Homo sapiens
  CDR3 for beta chain variable domain of TCR clone 80204 (TRBV7-9, TRBJ2-3)
RASSPGSTDTQYF

SEQ ID NO: 160409 - protein, 16 aa, Homo sapiens
  CDR3 for alpha chain variable domain of TCR clone 80205 (TRAV3, TRAJ5)
CAVRNLMDTGRRALTF

SEQ ID NO: 160410 - protein, 18 aa, Homo sapiens
  CDR3 for beta chain variable domain of TCR clone 80205 (TRBV4-1, TRBJ1-5)
CASSQDPRGQGLNQPQHF

SEQ ID NO: 160411 - protein, 12 aa, Homo sapiens
  CDR3 for alpha chain variable domain of TCR clone 80206 (TRAV3, TRAJ20)
CAVRDGAYKLSF

SEQ ID NO: 160412 - protein, 13 aa, Homo sapiens
  CDR3 for beta chain variable domain of TCR clone 80206 (TRBV9, TRBJ2-1)
CASSVGQGGEQFF

SEQ ID NO: 160413 - protein, 16 aa, Homo sapiens
  CDR3 for alpha chain variable domain of TCR clone 80207 (TRAV30, TRAJ24)
CGTEIVDADSWGKFQL

SEQ ID NO: 160414 - protein, 16 aa, Homo sapiens
  CDR3 for beta chain variable domain of TCR clone 80207 (TRBV2, TRBJ1-3)
CASSGGAGRSGNTIYF

SEQ ID NO: 160415 - protein, 15 aa, Homo sapiens
  CDR3 for alpha chain variable domain of TCR clone 80208 (TRAV8-4, TRAJ37)
CAVTYGSSNTGTLIF

SEQ ID NO: 160416 - protein, 13 aa, Homo sapiens
  CDR3 for beta chain variable domain of TCR clone 80208 (TRBV12-4, TRBJ2-5)
CASSLGGSRTQYF

SEQ ID NO: 160417 - protein, 16 aa, Homo sapiens
  CDR3 for alpha chain variable domain of TCR clone 80209 (TRAV30, TRAJ24)
CGTEIVDADSRGKFQF

SEQ ID NO: 160418 - protein, 17 aa, Homo sapiens
  CDR3 for beta chain variable domain of TCR clone 80209 (TRBV20-1, TRBJ2-2)
CSASGSGQGGLTGELFF

SEQ ID NO: 160419 - protein, 15 aa, Homo sapiens
  CDR3 for alpha chain variable domain of TCR clone 80210 (TRAV27, TRAJ38)
CGARRNAGNNRKLIW

SEQ ID NO: 160420 - protein, 13 aa, Homo sapiens
  CDR3 for beta chain variable domain of TCR clone 80210 (TRBV12-5, TRBJ2-3)
CASGDRQSDTQYF

SEQ ID NO: 160421 - protein, 17 aa, Homo sapiens
  CDR3 for alpha chain variable domain of TCR clone 80211 (TRAV35, TRAJ28)
CAGLQVYSGAGSYRLTF

SEQ ID NO: 160422 - protein, 15 aa, Homo sapiens
  CDR3 for beta chain variable domain of TCR clone 80211 (TRBV2, TRBJ1-2)
CASSEIGGANYGYTF

SEQ ID NO: 160423 - protein, 16 aa, Homo sapiens
  CDR3 for alpha chain variable domain of TCR clone 80212 (TRAV20, TRAJ22)
CAVQASSSGYARQLTF

SEQ ID NO: 160424 - protein, 13 aa, Homo sapiens
  CDR3 for beta chain variable domain of TCR clone 80212 (TRBV7-2, TRBJ2-5)
CASSQTSVETQYF

SEQ ID NO: 160425 - protein, 15 aa, Homo sapiens
  CDR3 for alpha chain variable domain of TCR clone 80213 (TRAV29/DV5, TRAJ40)
CAASAQGSGTYKYIF

SEQ ID NO: 160426 - protein, 14 aa, Homo sapiens
  CDR3 for beta chain variable domain of TCR clone 80213 (TRBV7-2, TRBJ2-3)
CQQLSGAFIDTQYF

SEQ ID NO: 160427 - protein, 12 aa, Homo sapiens
  CDR3 for alpha chain variable domain of TCR clone 80214 (TRAV13-1, TRAJ21)
CAAKEGFNKFYF

SEQ ID NO: 160428 - protein, 13 aa, Homo sapiens
  CDR3 for beta chain variable domain of TCR clone 80214 (TRBV7-3, TRBJ1-1)
CASSQDWGAEAVF

SEQ ID NO: 160429 - protein, 16 aa, Homo sapiens
  CDR3 for alpha chain variable domain of TCR clone 80215 (TRAV12-3, TRAJ53)
CAMSPGSGGSNYKLTF

SEQ ID NO: 160430 - protein, 11 aa, Homo sapiens
  CDR3 for beta chain variable domain of TCR clone 80215 (TRBV7-2, TRBJ2-7)
CASSLGLATHF

SEQ ID NO: 160431 - protein, 14 aa, Homo sapiens
  CDR3 for alpha chain variable domain of TCR clone 80216 (TRAV20, TRAJ8)
CAVREDTGFQKLVF

SEQ ID NO: 160432 - protein, 14 aa, Homo sapiens
  CDR3 for beta chain variable domain of TCR clone 80216 (TRBV7-6, TRBJ2-3)
CASSLGTVTDTQYF

SEQ ID NO: 160433 - protein, 15 aa, Homo sapiens
  CDR3 for alpha chain variable domain of TCR clone 80217 (TRAV16, TRAJ42)
CALRRGGGSQGNLIF

SEQ ID NO: 160434 - protein, 15 aa, Homo sapiens
  CDR3 for beta chain variable domain of TCR clone 80217 (TRBV7-2, TRBJ1-2)
CASSPRAGWNYGYTF

SEQ ID NO: 160435 - protein, 14 aa, Homo sapiens
  CDR3 for alpha chain variable domain of TCR clone 80218 (TRAV8-4, TRAJ13)
CAVTLSGGYQKVTF

SEQ ID NO: 160436 - protein, 15 aa, Homo sapiens
  CDR3 for beta chain variable domain of TCR clone 80218 (TRBV20-1, TRBJ2-7)
CSARDRVSGMDEQYF

SEQ ID NO: 160437 - protein, 15 aa, Homo sapiens
  CDR3 for alpha chain variable domain of TCR clone 80219 (TRAV21, TRAJ53)
CATLNSGGSNYKLTF

SEQ ID NO: 160438 - protein, 14 aa, Homo sapiens
  CDR3 for beta chain variable domain of TCR clone 80219 (TRBV9, TRBJ1-2)
CASGVSTRSYGYTF

SEQ ID NO: 160439 - protein, 12 aa, Homo sapiens
  CDR3 for alpha chain variable domain of TCR clone 80220 (TRAV17, TRAJ53)
CAFGGSNYKLTS

SEQ ID NO: 160440 - protein, 16 aa, Homo sapiens
  CDR3 for beta chain variable domain of TCR clone 80220 (TRBV11-2, TRBJ2-4)
CASSQEGRGGLDIQYF

SEQ ID NO: 160441 - protein, 13 aa, Homo sapiens
  CDR3 for alpha chain variable domain of TCR clone 80221 (TRAV8-6, TRAJ49)
CAGITNTGNQFYF

SEQ ID NO: 160442 - protein, 14 aa, Homo sapiens
  CDR3 for beta chain variable domain of TCR clone 80221 (TRBV5-1, TRBJ2-7)
CASSRGESLYEQYF

SEQ ID NO: 160443 - protein, 13 aa, Homo sapiens
  CDR3 for alpha chain variable domain of TCR clone 80222 (TRAV17, TRAJ9)
CATDYTGGFKTIF

SEQ ID NO: 160444 - protein, 16 aa, Homo sapiens
  CDR3 for beta chain variable domain of TCR clone 80222 (TRBV7-3, TRBJ2-1)
CASSLEGYRSYNEQFF

SEQ ID NO: 160445 - protein, 16 aa, Homo sapiens
  CDR3 for alpha chain variable domain of TCR clone 80223 (TRAV30, TRAJ24)
CGTEIVDADSWGKFQF

SEQ ID NO: 160446 - protein, 15 aa, Homo sapiens
  CDR3 for beta chain variable domain of TCR clone 80223 (TRBV5-1, TRBJ2-3)
CASSYTSGSTDTQYF

SEQ ID NO: 160447 - protein, 13 aa, Homo sapiens
  CDR3 for alpha chain variable domain of TCR clone 80224 (TRAV27, TRAJ16)
CAGACADGQKLLF

SEQ ID NO: 160448 - protein, 14 aa, Homo sapiens
  CDR3 for beta chain variable domain of TCR clone 80224 (TRBV11-2, TRBJ1-3)
CASSLAVPGNTIYF

SEQ ID NO: 160449 - protein, 15 aa, Homo sapiens
  CDR3 for alpha chain variable domain of TCR clone 80225 (TRAV27, TRAJ24)
CAGGTSADSWGKLQF

SEQ ID NO: 160450 - protein, 16 aa, Homo sapiens
  CDR3 for beta chain variable domain of TCR clone 80225 (TRBV7-3, TRBJ2-2)
CASSLKRGTLSGELFF

SEQ ID NO: 160451 - protein, 14 aa, Homo sapiens
  CDR3 for alpha chain variable domain of TCR clone 80226 (TRAV2, TRAJ9)
CAVEPNTGGFKTIF

SEQ ID NO: 160452 - protein, 14 aa, Homo sapiens
  CDR3 for beta chain variable domain of TCR clone 80226 (TRBV7-2, TRBJ2-7)
CASSPKTSFYEQYF

SEQ ID NO: 160453 - protein, 14 aa, Homo sapiens
  CDR3 for alpha chain variable domain of TCR clone 80227 (TRAV17, TRAJ4)
CATAPLGCYNKLIF

SEQ ID NO: 160454 - protein, 13 aa, Homo sapiens
  CDR3 for beta chain variable domain of TCR clone 80227 (TRBV12-4, TRBJ1-3)
CASSLASGNTIYF

SEQ ID NO: 160455 - protein, 10 aa, Homo sapiens
  CDR3 for alpha chain variable domain of TCR clone 80228 (TRAV23/DV6, TRAJ57)
CAASSTLSQG

SEQ ID NO: 160456 - protein, 16 aa, Homo sapiens
  CDR3 for beta chain variable domain of TCR clone 80228 (TRBV11-2, TRBJ2-1)
CASSPRLAGVYNEQFF

SEQ ID NO: 160457 - protein, 14 aa, Homo sapiens
  CDR3 for alpha chain variable domain of TCR clone 80229 (TRAV30, TRAJ33)
CGTERRFRNYQLIW

SEQ ID NO: 160458 - protein, 16 aa, Homo sapiens
  CDR3 for beta chain variable domain of TCR clone 80229 (TRBV7-3, TRBJ2-2)
CASSLKRGTLSGELFF

SEQ ID NO: 160459 - protein, 19 aa, Homo sapiens
  CDR3 for alpha chain variable domain of TCR clone 80230 (TRAV26-1, TRAJ28)
CIVRVAHAYSGAGSYQLTF

SEQ ID NO: 160460 - protein, 17 aa, Homo sapiens
  CDR3 for beta chain variable domain of TCR clone 80230 (TRBV9, TRBJ2-2)
RASSVGGQGTDTGELFF

SEQ ID NO: 160461 - protein, 12 aa, Homo sapiens
  CDR3 for alpha chain variable domain of TCR clone 80231 (TRAV12-2, TRAJ31)
CAVNTPDARLMF

SEQ ID NO: 160462 - protein, 17 aa, Homo sapiens
  CDR3 for beta chain variable domain of TCR clone 80231 (TRBV20-1, TRBJ1-6)
CSARGGYTFAYNSPLHF

SEQ ID NO: 160463 - protein, 12 aa, Homo sapiens
  CDR3 for alpha chain variable domain of TCR clone 80232 (TRAV13-1, TRAJ27)
CAAHTNAGKSTF

SEQ ID NO: 160464 - protein, 14 aa, Homo sapiens
  CDR3 for beta chain variable domain of TCR clone 80232 (TRBV19, TRBJ2-2)
RTSSGQGIAGELFF

SEQ ID NO: 160465 - protein, 11 aa, Homo sapiens
  CDR3 for alpha chain variable domain of TCR clone 80233 (TRAV1-2, TRAJ8)
CAVSSFQKLVF

SEQ ID NO: 160466 - protein, 19 aa, Homo sapiens
  CDR3 for beta chain variable domain of TCR clone 80233 (TRBV7-2, TRBJ2-5)
CASGTSGGTPPLGSEAQYF

SEQ ID NO: 160467 - protein, 13 aa, Homo sapiens
  CDR3 for alpha chain variable domain of TCR clone 80234 (TRAV12-3, TRAJ16)
CAVQLSDGQKLLF

SEQ ID NO: 160468 - protein, 13 aa, Homo sapiens
  CDR3 for beta chain variable domain of TCR clone 80234 (TRBV7-9, TRBJ1-2)
CASSLKQNYGYTF

SEQ ID NO: 160469 - protein, 15 aa, Homo sapiens
  CDR3 for alpha chain variable domain of TCR clone 80235 (TRAV12-2, TRAJ53)
CAVNGGGGSHYKLTF

SEQ ID NO: 160470 - protein, 14 aa, Homo sapiens
  CDR3 for beta chain variable domain of TCR clone 80235 (TRBV19, TRBJ2-2)
CASSTLHRSGELFF

SEQ ID NO: 160471 - protein, 15 aa, Homo sapiens
  CDR3 for alpha chain variable domain of TCR clone 80236 (TRAV26-1, TRAJ29)
CIVRVEGSGNTPLVF

SEQ ID NO: 160472 - protein, 13 aa, Homo sapiens
  CDR3 for beta chain variable domain of TCR clone 80236 (TRBV7-2, TRBJ2-5)
CQQLVRGGETQYF

SEQ ID NO: 160473 - protein, 12 aa, Homo sapiens
  CDR3 for alpha chain variable domain of TCR clone 80237 (TRAV12-3, TRAJ17)
CAMTLTSNKLNF

SEQ ID NO: 160474 - protein, 15 aa, Homo sapiens
  CDR3 for beta chain variable domain of TCR clone 80237 (TRBV20-1, TRBJ2-7)
CSARDRVSGMDEQYF

SEQ ID NO: 160475 - protein, 18 aa, Homo sapiens
  CDR3 for alpha chain variable domain of TCR clone 80238 (TRAV17, TRAJ45)
CATSLDLYSGGGADGLTF

SEQ ID NO: 160476 - protein, 15 aa, Homo sapiens
  CDR3 for beta chain variable domain of TCR clone 80238 (TRBV11-2, TRBJ2-1)
CASSKNWGLIYEQFF

SEQ ID NO: 160477 - protein, 14 aa, Homo sapiens
  CDR3 for alpha chain variable domain of TCR clone 80239 (TRAV12-2, TRAJ13)
CAVNPSGGYQKVTF

SEQ ID NO: 160478 - protein, 14 aa, Homo sapiens
  CDR3 for beta chain variable domain of TCR clone 80239 (TRBV12-4, TRBJ1-1)
CASSLGTEGTEAFF

SEQ ID NO: 160479 - protein, 14 aa, Homo sapiens
  CDR3 for alpha chain variable domain of TCR clone 80240 (TRAV8-1, TRAJ34)
CAVNPSYNTDKPIF

SEQ ID NO: 160480 - protein, 16 aa, Homo sapiens
  CDR3 for beta chain variable domain of TCR clone 80240 (TRBV7-2, TRBJ2-6)
CASSLAGRSGANVLTF

SEQ ID NO: 160481 - protein, 16 aa, Homo sapiens
  CDR3 for alpha chain variable domain of TCR clone 80241 (TRAV17, TRAJ28)
CATASVSGAGSYPLTF

SEQ ID NO: 160482 - protein, 11 aa, Homo sapiens
  CDR3 for beta chain variable domain of TCR clone 80241 (TRBV7-9, TRBJ2-5)
CASSLGETQYF

SEQ ID NO: 160483 - protein, 14 aa, Homo sapiens
  CDR3 for alpha chain variable domain of TCR clone 80242 (TRAV12-3, TRAJ30)
CAMSLLNRDDKIIF

SEQ ID NO: 160484 - protein, 12 aa, Homo sapiens
  CDR3 for beta chain variable domain of TCR clone 80242 (TRBV11-2, TRBJ2-2)
CASSLGGGELFL

SEQ ID NO: 160485 - protein, 13 aa, Homo sapiens
  CDR3 for alpha chain variable domain of TCR clone 80243 (TRAV13-1, TRAJ48)
CAAASFGHEKLTF

SEQ ID NO: 160486 - protein, 14 aa, Homo sapiens
  CDR3 for beta chain variable domain of TCR clone 80243 (TRBV18, TRBJ2-1)
CASSPGTSETEQFF

SEQ ID NO: 160487 - protein, 11 aa, Homo sapiens
  CDR3 for alpha chain variable domain of TCR clone 80244 (TRAV35, TRAJ34)
CWARNIDKLIF

SEQ ID NO: 160488 - protein, 14 aa, Homo sapiens
  CDR3 for beta chain variable domain of TCR clone 80244 (TRBV5-1, TRBJ2-7)
CASSRGESLYEQYF

SEQ ID NO: 160489 - protein, 12 aa, Homo sapiens
  CDR3 for alpha chain variable domain of TCR clone 80245 (TRAV9-2, TRAJ36)
CALKKGANNLFF

SEQ ID NO: 160490 - protein, 15 aa, Homo sapiens
  CDR3 for beta chain variable domain of TCR clone 80245 (TRBV6-3, TRBJ2-7)
CASSSPGTVFYEQYF

SEQ ID NO: 160491 - protein, 12 aa, Homo sapiens
  CDR3 for alpha chain variable domain of TCR clone 80246 (TRAV38-1, TRAJ47)
CAFETYGNKLVF

SEQ ID NO: 160492 - protein, 11 aa, Homo sapiens
  CDR3 for beta chain variable domain of TCR clone 80246 (TRBV19, TRBJ2-7)
CASGNSYEQYF

SEQ ID NO: 160493 - protein, 16 aa, Homo sapiens
  CDR3 for alpha chain variable domain of TCR clone 80247 (TRAV20, TRAJ10)
CAVLRGLTGGRNKLTF

SEQ ID NO: 160494 - protein, 14 aa, Homo sapiens
  CDR3 for beta chain variable domain of TCR clone 80247 (TRBV19, TRBJ1-5)
CASRAPDSFLSQHF

SEQ ID NO: 160495 - protein, 16 aa, Homo sapiens
  CDR3 for alpha chain variable domain of TCR clone 80248 (TRAV13-1, TRAJ45)
CAASWESGGGADGPTF

SEQ ID NO: 160496 - protein, 14 aa, Homo sapiens
  CDR3 for beta chain variable domain of TCR clone 80248 (TRBV12-4, TRBJ1-3)
CASGQTVSGNTIYF

SEQ ID NO: 160497 - protein, 17 aa, Homo sapiens
  CDR3 for alpha chain variable domain of TCR clone 80249 (TRAV8-6, TRAJ58)
CAVSSWVGETSGSRLTF

SEQ ID NO: 160498 - protein, 14 aa, Homo sapiens
  CDR3 for beta chain variable domain of TCR clone 80249 (TRBV4-2, TRBJ2-1)
CASGLDMAYNEQFF

SEQ ID NO: 160499 - protein, 17 aa, Homo sapiens
  CDR3 for alpha chain variable domain of TCR clone 80250 (TRAV13-1, TRAJ52)
CAASSGAGCTSYGKLTF

SEQ ID NO: 160500 - protein, 15 aa, Homo sapiens
  CDR3 for beta chain variable domain of TCR clone 80250 (TRBV2, TRBJ2-4)
CASSGTNLAKNIQYF

SEQ ID NO: 160501 - protein, 13 aa, Homo sapiens
  CDR3 for alpha chain variable domain of TCR clone 80251 (TRAV30, TRAJ24)
CGTVTDSWGKLQF

SEQ ID NO: 160502 - protein, 14 aa, Homo sapiens
  CDR3 for beta chain variable domain of TCR clone 80251 (TRBV6-3, TRBJ2-2)
CASTYTPDPGELFF

SEQ ID NO: 160503 - protein, 11 aa, Homo sapiens
  CDR3 for alpha chain variable domain of TCR clone 80252 (TRAV21, TRAJ34)
CAHYNTDKLIF

SEQ ID NO: 160504 - protein, 15 aa, Homo sapiens
  CDR3 for beta chain variable domain of TCR clone 80252 (TRBV7-9, TRBJ1-4)
CASSRTGGFNEKLFF

SEQ ID NO: 160505 - protein, 13 aa, Homo sapiens
  CDR3 for alpha chain variable domain of TCR clone 80253 (TRAV6, TRAJ40)
CALVTSGTYKYIF

SEQ ID NO: 160506 - protein, 13 aa, Homo sapiens
  CDR3 for beta chain variable domain of TCR clone 80253 (TRBV28, TRBJ2-7)
CASRFTPRPEQYS

SEQ ID NO: 160507 - protein, 15 aa, Homo sapiens
  CDR3 for alpha chain variable domain of TCR clone 80254 (TRAV17, TRAJ35)
CATAFVIGFGIVLHC

SEQ ID NO: 160508 - protein, 16 aa, Homo sapiens
  CDR3 for beta chain variable domain of TCR clone 80254 (TRBV11-2, TRBJ2-7)
CASSPLAGGPRYEQYF

SEQ ID NO: 160509 - protein, 12 aa, Homo sapiens
  CDR3 for alpha chain variable domain of TCR clone 80255 (TRAV27, TRAJ41)
CAGRNSGYALNF

SEQ ID NO: 160510 - protein, 15 aa, Homo sapiens
  CDR3 for beta chain variable domain of TCR clone 80255 (TRBV20-1, TRBJ1-5)
CSATSDRGLGQHQHF

SEQ ID NO: 160511 - protein, 14 aa, Homo sapiens
  CDR3 for alpha chain variable domain of TCR clone 80256 (TRAV12-3, TRAJ9)
CAMSPNTGGFKTIF

SEQ ID NO: 160512 - protein, 15 aa, Homo sapiens
  CDR3 for beta chain variable domain of TCR clone 80256 (TRBV6-5, TRBJ2-1)
CASSYDAGTGNEQFF

SEQ ID NO: 160513 - protein, 14 aa, Homo sapiens
  CDR3 for alpha chain variable domain of TCR clone 80257 (TRAV8-6, TRAJ56)
CAVSEAGANSKLTF

SEQ ID NO: 160514 - protein, 16 aa, Homo sapiens
  CDR3 for beta chain variable domain of TCR clone 80257 (TRBV27, TRBJ2-2)
CASSFRGLVRTGELFF

SEQ ID NO: 160515 - protein, 15 aa, Homo sapiens
  CDR3 for alpha chain variable domain of TCR clone 80258 (TRAV12-3, TRAJ6)
CATSATTGGSYIPTF

SEQ ID NO: 160516 - protein, 15 aa, Homo sapiens
  CDR3 for beta chain variable domain of TCR clone 80258 (TRBV7-6, TRBJ1-5)
CASSQSSGINQPQHF

SEQ ID NO: 160517 - protein, 13 aa, Homo sapiens
  CDR3 for alpha chain variable domain of TCR clone 80259 (TRAV12-3, TRAJ6)
CANPSGGSYIPTF

SEQ ID NO: 160518 - protein, 14 aa, Homo sapiens
  CDR3 for beta chain variable domain of TCR clone 80259 (TRBV19, TRBJ1-1)
CASSRDREATEAFF

SEQ ID NO: 160519 - protein, 16 aa, Homo sapiens
  CDR3 for alpha chain variable domain of TCR clone 80260 (TRAV12-3, TRAJ53)
CAMSPGSGGSNYKLTF

SEQ ID NO: 160520 - protein, 13 aa, Homo sapiens
  CDR3 for beta chain variable domain of TCR clone 80260 (TRBV7-3, TRBJ1-1)
CASGQDWGAEAFF

SEQ ID NO: 160521 - protein, 13 aa, Homo sapiens
  CDR3 for alpha chain variable domain of TCR clone 80261 (TRAV27, TRAJ56)
CAGKPGANSKLTF

SEQ ID NO: 160522 - protein, 13 aa, Homo sapiens
  CDR3 for beta chain variable domain of TCR clone 80261 (TRBV4-2, TRBJ1-1)
CASSQAGNTEAFF

SEQ ID NO: 160523 - protein, 14 aa, Homo sapiens
  CDR3 for alpha chain variable domain of TCR clone 80262 (TRAV12-2, TRAJ17)
CAVLFKAAGNKLTF

SEQ ID NO: 160524 - protein, 12 aa, Homo sapiens
  CDR3 for beta chain variable domain of TCR clone 80262 (TRBV7-2, TRBJ2-5)
CASSQYQETQYF

SEQ ID NO: 160525 - protein, 14 aa, Homo sapiens
  CDR3 for alpha chain variable domain of TCR clone 80263 (TRAV2, TRAJ9)
CAVEERSGGFKTIF

SEQ ID NO: 160526 - protein, 12 aa, Homo sapiens
  CDR3 for beta chain variable domain of TCR clone 80263 (TRBV7-9, TRBJ2-7)
CASSLEGYEQYF

SEQ ID NO: 160527 - protein, 12 aa, Homo sapiens
  CDR3 for alpha chain variable domain of TCR clone 80264 (TRAV12-2, TRAJ10)
WGATGGGNKLTF

SEQ ID NO: 160528 - protein, 16 aa, Homo sapiens
  CDR3 for beta chain variable domain of TCR clone 80264 (TRBV6-4, TRBJ1-2)
CASSEAVGDPNYGYTF

SEQ ID NO: 160529 - protein, 16 aa, Homo sapiens
  CDR3 for alpha chain variable domain of TCR clone 80265 (TRAV27, TRAJ45)
CPPRGRRGGGADGLTF

SEQ ID NO: 160530 - protein, 19 aa, Homo sapiens
  CDR3 for beta chain variable domain of TCR clone 80265 (TRBV25-1, TRBJ2-2)
CAILVYRVDRGRKTGELFF

SEQ ID NO: 160531 - protein, 14 aa, Homo sapiens
  CDR3 for alpha chain variable domain of TCR clone 80266 (TRAV1-2, TRAJ8)
CAVREDTGFQKLVF

SEQ ID NO: 160532 - protein, 13 aa, Homo sapiens
  CDR3 for beta chain variable domain of TCR clone 80266 (TRBV20-1, TRBJ1-4)
CGARTPYNEKLFF

SEQ ID NO: 160533 - protein, 15 aa, Homo sapiens
  CDR3 for alpha chain variable domain of TCR clone 80267 (TRAV26-2, TRAJ54)
FILRDVGQGAQKLVF

SEQ ID NO: 160534 - protein, 13 aa, Homo sapiens
  CDR3 for beta chain variable domain of TCR clone 80267 (TRBV7-9, TRBJ1-1)
CASSLAGVTEAFF

SEQ ID NO: 160535 - protein, 15 aa, Homo sapiens
  CDR3 for alpha chain variable domain of TCR clone 80268 (TRAV21, TRAJ40)
CAVRPQTSGTYQYIF

SEQ ID NO: 160536 - protein, 13 aa, Homo sapiens
  CDR3 for beta chain variable domain of TCR clone 80268 (TRBV7-2, TRBJ2-2)
CASSSVRAGELFF

SEQ ID NO: 160537 - protein, 14 aa, Homo sapiens
  CDR3 for alpha chain variable domain of TCR clone 80269 (TRAV8-2, TRAJ4)
CVVSPSGGYNKLTF

SEQ ID NO: 160538 - protein, 14 aa, Homo sapiens
  CDR3 for beta chain variable domain of TCR clone 80269 (TRBV10-3, TRBJ2-2)
CAISEVSHSGELFF

SEQ ID NO: 160539 - protein, 13 aa, Homo sapiens
  CDR3 for alpha chain variable domain of TCR clone 80270 (TRAV27, TRAJ54)
CAGAGQGAQKLVF

SEQ ID NO: 160540 - protein, 15 aa, Homo sapiens
  CDR3 for beta chain variable domain of TCR clone 80270 (TRBV18, TRBJ2-6)
RASSPSYAGANVLTF

SEQ ID NO: 160541 - protein, 15 aa, Homo sapiens
  CDR3 for alpha chain variable domain of TCR clone 80271 (TRAV8-3, TRAJ45)
CASSYSGGGADGLTL

SEQ ID NO: 160542 - protein, 12 aa, Homo sapiens
  CDR3 for beta chain variable domain of TCR clone 80271 (TRBV12-4, TRBJ2-7)
CASSLGGYEQYF

SEQ ID NO: 160543 - protein, 22 aa, Homo sapiens
  CDR3 for alpha chain variable domain of TCR clone 80272 (TRAV8-3, TRAJ32)
CAVEVVLQTSSSLGLALCLLSS

SEQ ID NO: 160544 - protein, 12 aa, Homo sapiens
  CDR3 for beta chain variable domain of TCR clone 80272 (TRBV7-8, TRBJ2-7)
CASSLGDREQYF

SEQ ID NO: 160545 - protein, 14 aa, Homo sapiens
  CDR3 for alpha chain variable domain of TCR clone 80273 (TRAV12-3, TRAJ11)
RAMTTNSGYSTLTF

SEQ ID NO: 160546 - protein, 15 aa, Homo sapiens
  CDR3 for beta chain variable domain of TCR clone 80273 (TRBV5-1, TRBJ2-1)
CASSPPRAPYNEQFF

SEQ ID NO: 160547 - protein, 14 aa, Homo sapiens
  CDR3 for alpha chain variable domain of TCR clone 80274 (TRAV17, TRAJ24)
CATVSTDSWGKLQF

SEQ ID NO: 160548 - protein, 14 aa, Homo sapiens
  CDR3 for beta chain variable domain of TCR clone 80274 (TRBV18, TRBJ2-7)
CASSPRGGAYEQYF

SEQ ID NO: 160549 - protein, 15 aa, Homo sapiens
  CDR3 for alpha chain variable domain of TCR clone 80275 (TRAV12-3, TRAJ6)
CAMSATTGGSYIPTF

SEQ ID NO: 160550 - protein, 17 aa, Homo sapiens
  CDR3 for beta chain variable domain of TCR clone 80275 (TRBV20-1, TRBJ1-1)
CSARGTGGSYGNTGAFF

SEQ ID NO: 160551 - protein, 10 aa, Homo sapiens
  CDR3 for alpha chain variable domain of TCR clone 80276 (TRAV12-3, TRAJ18)
CAMSAEAQPW

SEQ ID NO: 160552 - protein, 13 aa, Homo sapiens
  CDR3 for beta chain variable domain of TCR clone 80276 (TRBV15, TRBJ1-6)
CATSGGLNSPLHV

SEQ ID NO: 160553 - protein, 13 aa, Homo sapiens
  CDR3 for alpha chain variable domain of TCR clone 80277 (TRAV39, TRAJ58)
CAGEETSGSRLTF

SEQ ID NO: 160554 - protein, 13 aa, Homo sapiens
  CDR3 for beta chain variable domain of TCR clone 80277 (TRBV15, TRBJ2-7)
CATSTTGHYEHYF

SEQ ID NO: 160555 - protein, 16 aa, Homo sapiens
  CDR3 for alpha chain variable domain of TCR clone 80278 (TRAV20, TRAJ22)
CAVQASSSGSARQLTF

SEQ ID NO: 160556 - protein, 13 aa, Homo sapiens
  CDR3 for beta chain variable domain of TCR clone 80278 (TRBV7-2, TRBJ2-5)
CASSQTSVETQYL

SEQ ID NO: 160557 - protein, 13 aa, Homo sapiens
  CDR3 for alpha chain variable domain of TCR clone 80279 (TRAV13-2, TRAJ48)
CAEMDFGNEKLTF

SEQ ID NO: 160558 - protein, 15 aa, Homo sapiens
  CDR3 for beta chain variable domain of TCR clone 80279 (TRBV4-3, TRBJ2-1)
CASSQMRGAHNEQFF

SEQ ID NO: 160559 - protein, 15 aa, Homo sapiens
  CDR3 for alpha chain variable domain of TCR clone 80280 (TRAV3, TRAJ30)
CAVRDRVERGDKIIL

SEQ ID NO: 160560 - protein, 13 aa, Homo sapiens
  CDR3 for beta chain variable domain of TCR clone 80280 (TRBV29-1, TRBJ2-5)
CSACSSRRETQYF

SEQ ID NO: 160561 - protein, 16 aa, Homo sapiens
  CDR3 for alpha chain variable domain of TCR clone 80281 (TRAV4, TRAJ22)
CLVGDLYSGSARQLTF

SEQ ID NO: 160562 - protein, 14 aa, Homo sapiens
  CDR3 for beta chain variable domain of TCR clone 80281 (TRBV28, TRBJ1-3)
CASSFRDRVNTIYF

SEQ ID NO: 160563 - protein, 14 aa, Homo sapiens
  CDR3 for alpha chain variable domain of TCR clone 80282 (TRAV8-4, TRAJ9)
CAVRINTGGFKTIF

SEQ ID NO: 160564 - protein, 15 aa, Homo sapiens
  CDR3 for beta chain variable domain of TCR clone 80282 (TRBV10-2, TRBJ2-6)
GASSEQGTGANVLTF

SEQ ID NO: 160565 - protein, 15 aa, Homo sapiens
  CDR3 for alpha chain variable domain of TCR clone 80283 (TRAV13-1, TRAJ36)
CAVSIRQTGANNLFF

SEQ ID NO: 160566 - protein, 14 aa, Homo sapiens
  CDR3 for beta chain variable domain of TCR clone 80283 (TRBV6-1, TRBJ1-3)
CASVQGGGGNTIYF

SEQ ID NO: 160567 - protein, 16 aa, Homo sapiens
  CDR3 for alpha chain variable domain of TCR clone 80284 (TRAV22, TRAJ45)
CAVERGKRGGADGLTV

SEQ ID NO: 160568 - protein, 13 aa, Homo sapiens
  CDR3 for beta chain variable domain of TCR clone 80284 (TRBV27, TRBJ1-1)
CASSLSIGAEAFF

SEQ ID NO: 160569 - protein, 11 aa, Homo sapiens
  CDR3 for alpha chain variable domain of TCR clone 80285 (TRAV1-2, TRAJ20)
CAVANDYKLSF

SEQ ID NO: 160570 - protein, 11 aa, Homo sapiens
  CDR3 for beta chain variable domain of TCR clone 80285 (TRBV19, TRBJ1-1)
CASSIGSEAFF

SEQ ID NO: 160571 - protein, 13 aa, Homo sapiens
  CDR3 for alpha chain variable domain of TCR clone 80286 (TRAV2, TRAJ15)
CAVASQAGTALIF

SEQ ID NO: 160572 - protein, 13 aa, Homo sapiens
  CDR3 for beta chain variable domain of TCR clone 80286 (TRBV10-3, TRBJ1-2)
CAISERDSYGYTF

SEQ ID NO: 160573 - protein, 14 aa, Homo sapiens
  CDR3 for alpha chain variable domain of TCR clone 80287 (TRAV35, TRAJ50)
CAGHRKTSYDKVIF

SEQ ID NO: 160574 - protein, 13 aa, Homo sapiens
  CDR3 for beta chain variable domain of TCR clone 80287 (TRBV7-7, TRBJ2-3)
CASSLSRADTHYF

SEQ ID NO: 160575 - protein, 16 aa, Homo sapiens
  CDR3 for alpha chain variable domain of TCR clone 80288 (TRAV16, TRAJ52)
CALSAAGGTSYGKLTF

SEQ ID NO: 160576 - protein, 12 aa, Homo sapiens
  CDR3 for beta chain variable domain of TCR clone 80288 (TRBV12-4, TRBJ1-3)
CASSFSGNTIYS

SEQ ID NO: 160577 - protein, 15 aa, Homo sapiens
  CDR3 for alpha chain variable domain of TCR clone 80289 (TRAV3, TRAJ5)
CAVRDLDTGRRALTF

SEQ ID NO: 160578 - protein, 15 aa, Homo sapiens
  CDR3 for beta chain variable domain of TCR clone 80289 (TRBV7-2, TRBJ2-1)
CASSSGLAGGNEQFF

SEQ ID NO: 160579 - protein, 14 aa, Homo sapiens
  CDR3 for alpha chain variable domain of TCR clone 80290 (TRAV38-1, TRAJ45)
CASHSGGGADGLTF

SEQ ID NO: 160580 - protein, 12 aa, Homo sapiens
  CDR3 for beta chain variable domain of TCR clone 80290 (TRBV11-2, TRBJ2-1)
CASSPGNNEQFF

SEQ ID NO: 160581 - protein, 15 aa, Homo sapiens
  CDR3 for alpha chain variable domain of TCR clone 80291 (TRAV13-1, TRAJ11)
CAASNRNSGYSTLTL

SEQ ID NO: 160582 - protein, 11 aa, Homo sapiens
  CDR3 for beta chain variable domain of TCR clone 80291 (TRBV20-1, TRBJ2-7)
CSARLSYEQYF

SEQ ID NO: 160583 - protein, 12 aa, Homo sapiens
  CDR3 for alpha chain variable domain of TCR clone 80292 (TRAV12-3, TRAJ20)
CAMVRGDYKLSL

SEQ ID NO: 160584 - protein, 14 aa, Homo sapiens
  CDR3 for beta chain variable domain of TCR clone 80292 (TRBV5-5, TRBJ1-5)
CASSGQGVDQPQHF

SEQ ID NO: 160585 - protein, 12 aa, Homo sapiens
  CDR3 for alpha chain variable domain of TCR clone 80293 (TRAV3, TRAJ34)
CAVLGNTDKLVF

SEQ ID NO: 160586 - protein, 13 aa, Homo sapiens
  CDR3 for beta chain variable domain of TCR clone 80293 (TRBV19, TRBJ2-1)
CASSIGTGNEQFF

SEQ ID NO: 160587 - protein, 14 aa, Homo sapiens
  CDR3 for alpha chain variable domain of TCR clone 80294 (TRAV12-1, TRAJ26)
CVVKGSNYGQNFFF

SEQ ID NO: 160588 - protein, 17 aa, Homo sapiens
  CDR3 for beta chain variable domain of TCR clone 80294 (TRBV11-2, TRBJ2-6)
CASSQRDIFSGANVLTF

SEQ ID NO: 160589 - protein, 15 aa, Homo sapiens
  CDR3 for alpha chain variable domain of TCR clone 80295 (TRAV3, TRAJ22)
CAVRDRGGSARPLTF

SEQ ID NO: 160590 - protein, 13 aa, Homo sapiens
  CDR3 for beta chain variable domain of TCR clone 80295 (TRBV12-4, TRBJ1-2)
CASSLRQGKGYTF

SEQ ID NO: 160591 - protein, 14 aa, Homo sapiens
  CDR3 for alpha chain variable domain of TCR clone 80296 (TRAV1-2, TRAJ8)
CAVREDTGFQKLVF

SEQ ID NO: 160592 - protein, 15 aa, Homo sapiens
  CDR3 for beta chain variable domain of TCR clone 80296 (TRBV7-9, TRBJ1-1)
CANSHRGTVNTEAFF

SEQ ID NO: 160593 - protein, 18 aa, Homo sapiens
  CDR3 for alpha chain variable domain of TCR clone 80297 (TRAV21, TRAJ52)
CAVRPSPAGGTSYGKLTF

SEQ ID NO: 160594 - protein, 16 aa, Homo sapiens
  CDR3 for beta chain variable domain of TCR clone 80297 (TRBV11-2, TRBJ1-2)
CASSPSGREANYGYTF

SEQ ID NO: 160595 - protein, 13 aa, Homo sapiens
  CDR3 for alpha chain variable domain of TCR clone 80298 (TRAV12-1, TRAJ22)
CVASGGSARQLTF

SEQ ID NO: 160596 - protein, 11 aa, Homo sapiens
  CDR3 for beta chain variable domain of TCR clone 80298 (TRBV12-4, TRBJ2-3)
CASTATDTQYF

SEQ ID NO: 160597 - protein, 14 aa, Homo sapiens
  CDR3 for alpha chain variable domain of TCR clone 80299 (TRAV12-1, TRAJ15)
CLPPANQAGTALIF

SEQ ID NO: 160598 - protein, 13 aa, Homo sapiens
  CDR3 for beta chain variable domain of TCR clone 80299 (TRBV7-2, TRBJ2-4)
CASSREHANTQYF

SEQ ID NO: 160599 - protein, 13 aa, Homo sapiens
  CDR3 for alpha chain variable domain of TCR clone 80300 (TRAV27, TRAJ17)
CAGAATAGNKLTL

SEQ ID NO: 160600 - protein, 15 aa, Homo sapiens
  CDR3 for beta chain variable domain of TCR clone 80300 (TRBV5-1, TRBJ2-3)
CASRNQAGSTDTQYF

SEQ ID NO: 160601 - protein, 14 aa, Homo sapiens
  CDR3 for alpha chain variable domain of TCR clone 80301 (TRAV35, TRAJ42)
CCVPYGGSQGNLIF

SEQ ID NO: 160602 - protein, 18 aa, Homo sapiens
  CDR3 for beta chain variable domain of TCR clone 80301 (TRBV13, TRBJ2-6)
CASSPRTSGGSGANVLTF

SEQ ID NO: 160603 - protein, 16 aa, Homo sapiens
  CDR3 for alpha chain variable domain of TCR clone 80302 (TRAV12-3, TRAJ53)
CAMSPGSGGSNYKLTF

SEQ ID NO: 160604 - protein, 15 aa, Homo sapiens
  CDR3 for beta chain variable domain of TCR clone 80302 (TRBV13, TRBJ1-2)
CASSLGRQPGYGYTF

SEQ ID NO: 160605 - protein, 15 aa, Homo sapiens
  CDR3 for alpha chain variable domain of TCR clone 80303 (TRAV4, TRAJ26)
CLVGDMNNYGQNFVF

SEQ ID NO: 160606 - protein, 16 aa, Homo sapiens
  CDR3 for beta chain variable domain of TCR clone 80303 (TRBV28, TRBJ1-4)
CASSSRTGAANGKLFF

SEQ ID NO: 160607 - protein, 14 aa, Homo sapiens
  CDR3 for alpha chain variable domain of TCR clone 80304 (TRAV1-2, TRAJ16)
CAVSRFSDGQKLLS

SEQ ID NO: 160608 - protein, 15 aa, Homo sapiens
  CDR3 for beta chain variable domain of TCR clone 80304 (TRBV9, TRBJ1-6)
CASSVAGTGDSPLHF

SEQ ID NO: 160609 - protein, 14 aa, Homo sapiens
  CDR3 for alpha chain variable domain of TCR clone 80305 (TRAV3, TRAJ9)
CAVRGNTGGFKTIF

SEQ ID NO: 160610 - protein, 14 aa, Homo sapiens
  CDR3 for beta chain variable domain of TCR clone 80305 (TRBV15, TRBJ2-1)
CAASGVEDYNEQFF

SEQ ID NO: 160611 - protein, 13 aa, Homo sapiens
  CDR3 for alpha chain variable domain of TCR clone 80306 (TRAV16, TRAJ9)
CALRATGGLKTIF

SEQ ID NO: 160612 - protein, 16 aa, Homo sapiens
  CDR3 for beta chain variable domain of TCR clone 80306 (TRBV5-1, TRBJ1-3)
CASSRSGEDSGNTIYF

SEQ ID NO: 160613 - protein, 13 aa, Homo sapiens
  CDR3 for alpha chain variable domain of TCR clone 80307 (TRAV13-1, TRAJ13)
CAASKGGYQKVNF

SEQ ID NO: 160614 - protein, 16 aa, Homo sapiens
  CDR3 for beta chain variable domain of TCR clone 80307 (TRBV18, TRBJ1-2)
CASSPPERVTIYGYTF

SEQ ID NO: 160615 - protein, 13 aa, Homo sapiens
  CDR3 for alpha chain variable domain of TCR clone 80308 (TRAV12-2, TRAJ20)
CAVYLSNDYKLSF

SEQ ID NO: 160616 - protein, 15 aa, Homo sapiens
  CDR3 for beta chain variable domain of TCR clone 80308 (TRBV27, TRBJ2-5)
CASSLYPRGGETQYF

SEQ ID NO: 160617 - protein, 14 aa, Homo sapiens
  CDR3 for alpha chain variable domain of TCR clone 80309 (TRAV35, TRAJ13)
CAGSPSGCYQKVTF

SEQ ID NO: 160618 - protein, 13 aa, Homo sapiens
  CDR3 for beta chain variable domain of TCR clone 80309 (TRBV29-1, TRBJ1-1)
CSVGDSRNTEAFF

SEQ ID NO: 160619 - protein, 14 aa, Homo sapiens
  CDR3 for alpha chain variable domain of TCR clone 80310 (TRAV12-2, TRAJ40)
CAVKIPSGTYKYIF

SEQ ID NO: 160620 - protein, 14 aa, Homo sapiens
  CDR3 for beta chain variable domain of TCR clone 80310 (TRBV5-5, TRBJ1-5)
CASSGQGVDQPQHF

SEQ ID NO: 160621 - protein, 14 aa, Homo sapiens
  CDR3 for alpha chain variable domain of TCR clone 80311 (TRAV35, TRAJ48)
CAGQRDSGNEKLTF

SEQ ID NO: 160622 - protein, 14 aa, Homo sapiens
  CDR3 for beta chain variable domain of TCR clone 80311 (TRBV7-2, TRBJ2-7)
CASRSQGAAYEQYF

SEQ ID NO: 160623 - protein, 15 aa, Homo sapiens
  CDR3 for alpha chain variable domain of TCR clone 80312 (TRAV38-2/DV8, TRAJ47)
CAYRSAKGYGNKLVF

SEQ ID NO: 160624 - protein, 22 aa, Homo sapiens
  CDR3 for beta chain variable domain of TCR clone 80312 (TRBV7-8, TRBJ2-7)
CASSRVPLRGPSSGLFSYEQYF

SEQ ID NO: 160625 - protein, 13 aa, Homo sapiens
  CDR3 for alpha chain variable domain of TCR clone 80313 (TRAV12-3, TRAJ6)
CANPSGGSYIPTF

SEQ ID NO: 160626 - protein, 14 aa, Homo sapiens
  CDR3 for beta chain variable domain of TCR clone 80313 (TRBV19, TRBJ1-1)
CASSWDRDATEAFF

SEQ ID NO: 160627 - protein, 18 aa, Homo sapiens
  CDR3 for alpha chain variable domain of TCR clone 80314 (TRAV26-1, TRAJ5)
CIVRVVPPRDTGRRALTL

SEQ ID NO: 160628 - protein, 15 aa, Homo sapiens
  CDR3 for beta chain variable domain of TCR clone 80314 (TRBV7-9, TRBJ2-7)
CASSLPMGQANEQYF

SEQ ID NO: 160629 - protein, 15 aa, Homo sapiens
  CDR3 for alpha chain variable domain of TCR clone 80315 (TRAV8-3, TRAJ45)
CASSYSGGGADGLTS

SEQ ID NO: 160630 - protein, 13 aa, Homo sapiens
  CDR3 for beta chain variable domain of TCR clone 80315 (TRBV10-3, TRBJ2-7)
SASKLAVNYEQYF

SEQ ID NO: 160631 - protein, 15 aa, Homo sapiens
  CDR3 for alpha chain variable domain of TCR clone 80316 (TRAV23/DV6, TRAJ44)
CAATIRYGTASKLTF

SEQ ID NO: 160632 - protein, 14 aa, Homo sapiens
  CDR3 for beta chain variable domain of TCR clone 80316 (TRBV20-1, TRBJ2-7)
CSAPELAGVGEQYF

SEQ ID NO: 160633 - protein, 15 aa, Homo sapiens
  CDR3 for alpha chain variable domain of TCR clone 80317 (TRAV4, TRAJ12)
CLVGDLMDSSYKLIF

SEQ ID NO: 160634 - protein, 17 aa, Homo sapiens
  CDR3 for beta chain variable domain of TCR clone 80317 (TRBV5-1, TRBJ2-1)
CASSLGQISFSYNEQFF

SEQ ID NO: 160635 - protein, 17 aa, Homo sapiens
  CDR3 for alpha chain variable domain of TCR clone 80318 (TRAV13-2, TRAJ5)
CAESVVIVGHGQESTYF

SEQ ID NO: 160636 - protein, 18 aa, Homo sapiens
  CDR3 for beta chain variable domain of TCR clone 80318 (TRBV4-1, TRBJ2-3)
CASSHHLAGGRSTDTQYF

SEQ ID NO: 160637 - protein, 12 aa, Homo sapiens
  CDR3 for alpha chain variable domain of TCR clone 80319 (TRAV2, TRAJ33)
CAVWGSNYQLIW

SEQ ID NO: 160638 - protein, 14 aa, Homo sapiens
  CDR3 for beta chain variable domain of TCR clone 80319 (TRBV7-9, TRBJ2-1)
CASSPRDSLYEQFF

SEQ ID NO: 160639 - protein, 13 aa, Homo sapiens
  CDR3 for alpha chain variable domain of TCR clone 80320 (TRAV12-3, TRAJ20)
CAMSATNDYKPSF

SEQ ID NO: 160640 - protein, 16 aa, Homo sapiens
  CDR3 for beta chain variable domain of TCR clone 80320 (TRBV18, TRBJ2-7)
CASSPYRDGQTYEQYF

SEQ ID NO: 160641 - protein, 16 aa, Homo sapiens
  CDR3 for alpha chain variable domain of TCR clone 80321 (TRAV30, TRAJ24)
CGTEIVDADGWGKFQF

SEQ ID NO: 160642 - protein, 14 aa, Homo sapiens
  CDR3 for beta chain variable domain of TCR clone 80321 (TRBV12-5, TRBJ2-5)
CASGSRTHQENQYF

SEQ ID NO: 160643 - protein, 15 aa, Homo sapiens
  CDR3 for alpha chain variable domain of TCR clone 80322 (TRAV2, TRAJ24)
CAVVRLKNSWGKLQF

SEQ ID NO: 160644 - protein, 14 aa, Homo sapiens
  CDR3 for beta chain variable domain of TCR clone 80322 (TRBV4-1, TRBJ2-2)
CASSQAVNTGELFF

SEQ ID NO: 160645 - protein, 12 aa, Homo sapiens
  CDR3 for alpha chain variable domain of TCR clone 80323 (TRAV29/DV5, TRAJ49)
CAATGTGNQFYF

SEQ ID NO: 160646 - protein, 19 aa, Homo sapiens
  CDR3 for beta chain variable domain of TCR clone 80323 (TRBV25-1, TRBJ2-2)
CAILVYRVDRGRKTGELFF

SEQ ID NO: 160647 - protein, 15 aa, Homo sapiens
  CDR3 for alpha chain variable domain of TCR clone 80324 (TRAV2, TRAJ22)
CAVGFFSGSARQPTF

SEQ ID NO: 160648 - protein, 15 aa, Homo sapiens
  CDR3 for beta chain variable domain of TCR clone 80324 (TRBV2, TRBJ2-1)
CASSELAGGYNEQFF

SEQ ID NO: 160649 - protein, 17 aa, Homo sapiens
  CDR3 for alpha chain variable domain of TCR clone 80325 (TRAV3, TRAJ6)
CAVRDGPRAGGSYIPTL

SEQ ID NO: 160650 - protein, 14 aa, Homo sapiens
  CDR3 for beta chain variable domain of TCR clone 80325 (TRBV6-1, TRBJ1-3)
CASVQGGGGNTIYF

SEQ ID NO: 160651 - protein, 15 aa, Homo sapiens
  CDR3 for alpha chain variable domain of TCR clone 80326 (TRAV29/DV5, TRAJ53)
CAARYSGGSNYKLTF

SEQ ID NO: 160652 - protein, 13 aa, Homo sapiens
  CDR3 for beta chain variable domain of TCR clone 80326 (TRBV10-3, TRBJ2-7)
CASKLAVNYEQYF

SEQ ID NO: 160653 - protein, 14 aa, Homo sapiens
  CDR3 for alpha chain variable domain of TCR clone 80327 (TRAV2, TRAJ9)
CAAEDRSGGFKTIF

SEQ ID NO: 160654 - protein, 15 aa, Homo sapiens
  CDR3 for beta chain variable domain of TCR clone 80327 (TRBV11-3, TRBJ2-3)
CASLKDGREGDTQYF

SEQ ID NO: 160655 - protein, 15 aa, Homo sapiens
  CDR3 for alpha chain variable domain of TCR clone 80328 (TRAV26-1, TRAJ29)
CIVRVEGSGNTPLVF

SEQ ID NO: 160656 - protein, 16 aa, Homo sapiens
  CDR3 for beta chain variable domain of TCR clone 80328 (TRBV11-2, TRBJ1-2)
CASSLDTGGADYGYTF

SEQ ID NO: 160657 - protein, 13 aa, Homo sapiens
  CDR3 for alpha chain variable domain of TCR clone 80329 (TRAV8-6, TRAJ49)
CAVITNTGNQFSF

SEQ ID NO: 160658 - protein, 17 aa, Homo sapiens
  CDR3 for beta chain variable domain of TCR clone 80329 (TRBV11-2, TRBJ2-1)
CASSLYPPGVEYNEQFF

SEQ ID NO: 160659 - protein, 13 aa, Homo sapiens
  CDR3 for alpha chain variable domain of TCR clone 80330 (TRAV2, TRAJ24)
CAVPTDSWGKLQF

SEQ ID NO: 160660 - protein, 12 aa, Homo sapiens
  CDR3 for beta chain variable domain of TCR clone 80330 (TRBV11-2, TRBJ2-2)
CASSLGGGELFF

SEQ ID NO: 160661 - protein, 18 aa, Homo sapiens
  CDR3 for alpha chain variable domain of TCR clone 80331 (TRAV21, TRAJ52)
CAVRPSPAGGTSYGKLTF

SEQ ID NO: 160662 - protein, 13 aa, Homo sapiens
  CDR3 for beta chain variable domain of TCR clone 80331 (TRBV11-2, TRBJ2-7)
CASSGTRPYEQYF

SEQ ID NO: 160663 - protein, 12 aa, Homo sapiens
  CDR3 for alpha chain variable domain of TCR clone 80332 (TRAV8-3, TRAJ26)
CAGDNYGQNFVV

SEQ ID NO: 160664 - protein, 15 aa, Homo sapiens
  CDR3 for beta chain variable domain of TCR clone 80332 (TRBV9, TRBJ2-1)
CASSLAGSSYNEQFF

SEQ ID NO: 160665 - protein, 19 aa, Homo sapiens
  CDR3 for alpha chain variable domain of TCR clone 80333 (TRAV38-1, TRAJ53)
CAFMKHGLESGGSNYKLTF

SEQ ID NO: 160666 - protein, 13 aa, Homo sapiens
  CDR3 for beta chain variable domain of TCR clone 80333 (TRBV19, TRBJ1-2)
CASSVPGQDGYTF

SEQ ID NO: 160667 - protein, 11 aa, Homo sapiens
  CDR3 for alpha chain variable domain of TCR clone 80334 (TRAV12-3, TRAJ43)
CAMSVSNDMRF

SEQ ID NO: 160668 - protein, 16 aa, Homo sapiens
  CDR3 for beta chain variable domain of TCR clone 80334 (TRBV7-2, TRBJ2-3)
CASSESGPTGTDTQYF

SEQ ID NO: 160669 - protein, 14 aa, Homo sapiens
  CDR3 for alpha chain variable domain of TCR clone 80335 (TRAV1-2, TRAJ8)
CAVREDTGFQKLVF

SEQ ID NO: 160670 - protein, 18 aa, Homo sapiens
  CDR3 for beta chain variable domain of TCR clone 80335 (TRBV25-1, TRBJ1-2)
CASSGLQNGQGLIFGYTF

SEQ ID NO: 160671 - protein, 18 aa, Homo sapiens
  CDR3 for alpha chain variable domain of TCR clone 80336 (TRAV21, TRAJ52)
CAVRPSPAGGTSYGKLTF

SEQ ID NO: 160672 - protein, 16 aa, Homo sapiens
  CDR3 for beta chain variable domain of TCR clone 80336 (TRBV5-1, TRBJ2-2)
CASSLWDTTNTGELFF

SEQ ID NO: 160673 - protein, 14 aa, Homo sapiens
  CDR3 for alpha chain variable domain of TCR clone 80337 (TRAV38-1, TRAJ29)
CAFITPSGNTPLVF

SEQ ID NO: 160674 - protein, 15 aa, Homo sapiens
  CDR3 for beta chain variable domain of TCR clone 80337 (TRBV9, TRBJ1-6)
CASSVAGTGDSPLHF

SEQ ID NO: 160675 - protein, 20 aa, Homo sapiens
  CDR3 for alpha chain variable domain of TCR clone 80338 (TRAV12-1, TRAJ42)
SSVIQTPTSVKGGSQGNLIF

SEQ ID NO: 160676 - protein, 18 aa, Homo sapiens
  CDR3 for beta chain variable domain of TCR clone 80338 (TRBV11-2, TRBJ2-3)
CASSLGGASRGAPNTQYF

SEQ ID NO: 160677 - protein, 14 aa, Homo sapiens
  CDR3 for alpha chain variable domain of TCR clone 80339 (TRAV13-1, TRAJ35)
CAASKGGFGNVLHC

SEQ ID NO: 160678 - protein, 15 aa, Homo sapiens
  CDR3 for beta chain variable domain of TCR clone 80339 (TRBV5-7, TRBJ1-5)
CASSYGKLWDQPQHF

SEQ ID NO: 160679 - protein, 18 aa, Homo sapiens
  CDR3 for alpha chain variable domain of TCR clone 80340 (TRAV8-4, TRAJ52)
CAVTRANAGGTSYGKLTF

SEQ ID NO: 160680 - protein, 14 aa, Homo sapiens
  CDR3 for beta chain variable domain of TCR clone 80340 (TRBV19, TRBJ1-5)
CASGTEVYNQPQHF

SEQ ID NO: 160681 - protein, 15 aa, Homo sapiens
  CDR3 for alpha chain variable domain of TCR clone 80341 (TRAV17, TRAJ32)
CATTPYGGATNKLIF

SEQ ID NO: 160682 - protein, 14 aa, Homo sapiens
  CDR3 for beta chain variable domain of TCR clone 80341 (TRBV7-2, TRBJ2-7)
CASSPKTSFYEQYF

SEQ ID NO: 160683 - protein, 14 aa, Homo sapiens
  CDR3 for alpha chain variable domain of TCR clone 80342 (TRAV13-1, TRAJ9)
CAAGALTGGFKTIF

SEQ ID NO: 160684 - protein, 13 aa, Homo sapiens
  CDR3 for beta chain variable domain of TCR clone 80342 (TRBV20-1, TRBJ1-1)
CSAGTVGNTEAFF

SEQ ID NO: 160685 - protein, 14 aa, Homo sapiens
  CDR3 for alpha chain variable domain of TCR clone 80343 (TRAV35, TRAJ53)
CAGNSGGSNYKLTF

SEQ ID NO: 160686 - protein, 15 aa, Homo sapiens
  CDR3 for beta chain variable domain of TCR clone 80343 (TRBV27, TRBJ1-5)
CASSLGQGSVQPQHF

SEQ ID NO: 160687 - protein, 15 aa, Homo sapiens
  CDR3 for alpha chain variable domain of TCR clone 80344 (TRAV17, TRAJ48)
CATDETNFGNEKLTF

SEQ ID NO: 160688 - protein, 14 aa, Homo sapiens
  CDR3 for beta chain variable domain of TCR clone 80344 (TRBV10-3, TRBJ1-3)
CAIRGQRAGNTMYF

SEQ ID NO: 160689 - protein, 15 aa, Homo sapiens
  CDR3 for alpha chain variable domain of TCR clone 80345 (TRAV13-1, TRAJ17)
CAASIERAAGNKLTF

SEQ ID NO: 160690 - protein, 14 aa, Homo sapiens
  CDR3 for beta chain variable domain of TCR clone 80345 (TRBV7-9, TRBJ2-1)
CASSPRDFLYEQFF

SEQ ID NO: 160691 - protein, 13 aa, Homo sapiens
  CDR3 for alpha chain variable domain of TCR clone 80346 (TRAV38-2/DV8, TRAJ34)
CAYRTWNTDKLIF

SEQ ID NO: 160692 - protein, 16 aa, Homo sapiens
  CDR3 for beta chain variable domain of TCR clone 80346 (TRBV7-3, TRBJ2-2)
CASSLKRGTLSGELFF

SEQ ID NO: 160693 - protein, 16 aa, Homo sapiens
  CDR3 for alpha chain variable domain of TCR clone 80347 (TRAV35, TRAJ37)
CWAFLRGSSNTGKLIF

SEQ ID NO: 160694 - protein, 13 aa, Homo sapiens
  CDR3 for beta chain variable domain of TCR clone 80347 (TRBV2, TRBJ1-2)
CASSVRGNYGYAF

SEQ ID NO: 160695 - protein, 16 aa, Homo sapiens
  CDR3 for alpha chain variable domain of TCR clone 80348 (TRAV3, TRAJ15)
CAVRDRTNQAGTALIF

SEQ ID NO: 160696 - protein, 14 aa, Homo sapiens
  CDR3 for beta chain variable domain of TCR clone 80348 (TRBV7-2, TRBJ1-4)
CASSSGRGDRKLFF

SEQ ID NO: 160697 - protein, 18 aa, Homo sapiens
  CDR3 for alpha chain variable domain of TCR clone 80349 (TRAV26-1, TRAJ27)
CIVRPSFNYNTNAGKSTF

SEQ ID NO: 160698 - protein, 14 aa, Homo sapiens
  CDR3 for beta chain variable domain of TCR clone 80349 (TRBV10-3, TRBJ1-6)
CAISVDGDESPLQF

SEQ ID NO: 160699 - protein, 15 aa, Homo sapiens
  CDR3 for alpha chain variable domain of TCR clone 80350 (TRAV8-4, TRAJ47)
CAVSDLLGYGNKLGF

SEQ ID NO: 160700 - protein, 16 aa, Homo sapiens
  CDR3 for beta chain variable domain of TCR clone 80350 (TRBV19, TRBJ2-2)
CASSPSGGLNTGELFF

SEQ ID NO: 160701 - protein, 16 aa, Homo sapiens
  CDR3 for alpha chain variable domain of TCR clone 80351 (TRAV3, TRAJ3)
CAVRDRAKSSASKIIF

SEQ ID NO: 160702 - protein, 16 aa, Homo sapiens
  CDR3 for beta chain variable domain of TCR clone 80351 (TRBV20-1, TRBJ2-4)
CSATSLAELAKNIQYL

SEQ ID NO: 160703 - protein, 15 aa, Homo sapiens
  CDR3 for alpha chain variable domain of TCR clone 80352 (TRAV26-1, TRAJ40)
CIVRVTTSGTYKYIF

SEQ ID NO: 160704 - protein, 12 aa, Homo sapiens
  CDR3 for beta chain variable domain of TCR clone 80352 (TRBV7-9, IGHJ2)
CASSTDREKLFF

SEQ ID NO: 160705 - protein, 15 aa, Homo sapiens
  CDR3 for alpha chain variable domain of TCR clone 80353 (TRAV12-3, TRAJ6)
CAMSATSGGSYIPTF

SEQ ID NO: 160706 - protein, 11 aa, Homo sapiens
  CDR3 for beta chain variable domain of TCR clone 80353 (TRBV20-1, TRBJ1-5)
CGAQGDQPQHF

SEQ ID NO: 160707 - protein, 14 aa, Homo sapiens
  CDR3 for alpha chain variable domain of TCR clone 80354 (TRAV1-2, TRAJ8)
CAVREDTGFQKFVF

SEQ ID NO: 160708 - protein, 13 aa, Homo sapiens
  CDR3 for beta chain variable domain of TCR clone 80354 (TRBV12-4, TRBJ1-2)
CASSSGLTVISTF

SEQ ID NO: 160709 - protein, 12 aa, Homo sapiens
  CDR3 for alpha chain variable domain of TCR clone 80355 (TRAV29/DV5, TRAJ49)
CAATDTGNQFYF

SEQ ID NO: 160710 - protein, 12 aa, Homo sapiens
  CDR3 for beta chain variable domain of TCR clone 80355 (TRBV11-2, TRBJ2-5)
CASSLGQETQYF

SEQ ID NO: 160711 - protein, 11 aa, Homo sapiens
  CDR3 for alpha chain variable domain of TCR clone 80356 (TRAV12-1, TRAJ21)
CVVNNFNKFYF

SEQ ID NO: 160712 - protein, 11 aa, Homo sapiens
  CDR3 for beta chain variable domain of TCR clone 80356 (TRBV10-3, TRBJ2-7)
CAISEGREQYF

SEQ ID NO: 160713 - protein, 15 aa, Homo sapiens
  CDR3 for alpha chain variable domain of TCR clone 80357 (TRAV3, TRAJ22)
CAVRDRGGPARQLTF

SEQ ID NO: 160714 - protein, 16 aa, Homo sapiens
  CDR3 for beta chain variable domain of TCR clone 80357 (TRBV5-4, TRBJ2-3)
CASQQPGAGGADTQYF

SEQ ID NO: 160715 - protein, 16 aa, Homo sapiens
  CDR3 for alpha chain variable domain of TCR clone 80358 (TRAV30, TRAJ24)
CGTEIVDADSWGKFQF

SEQ ID NO: 160716 - protein, 15 aa, Homo sapiens
  CDR3 for beta chain variable domain of TCR clone 80358 (TRBV4-1, TRBJ2-7)
CASSQQGQGFDEQYF

SEQ ID NO: 160717 - protein, 13 aa, Homo sapiens
  CDR3 for alpha chain variable domain of TCR clone 80359 (TRAV12-1, TRAJ3)
CVVNPRGSSKIIF

SEQ ID NO: 160718 - protein, 13 aa, Homo sapiens
  CDR3 for beta chain variable domain of TCR clone 80359 (TRBV28, TRBJ1-5)
CASSDRGNQPQHF

SEQ ID NO: 160719 - protein, 13 aa, Homo sapiens
  CDR3 for alpha chain variable domain of TCR clone 80360 (TRAV2, TRAJ40)
CAVVTSGTYKYIF

SEQ ID NO: 160720 - protein, 15 aa, Homo sapiens
  CDR3 for beta chain variable domain of TCR clone 80360 (TRBV11-3, TRBJ2-3)
CASLKDGLEGDTQYF

SEQ ID NO: 160721 - protein, 15 aa, Homo sapiens
  CDR3 for alpha chain variable domain of TCR clone 80361 (TRAV8-3, TRAJ15)
CAAGAPNQAGTALIF

SEQ ID NO: 160722 - protein, 14 aa, Homo sapiens
  CDR3 for beta chain variable domain of TCR clone 80361 (TRBV20-1, TRBJ2-1)
CSPNDEASYNEQFF

SEQ ID NO: 160723 - protein, 14 aa, Homo sapiens
  CDR3 for alpha chain variable domain of TCR clone 80362 (TRAV36/DV7, TRAJ13)
WGSGENGGYQKVTF

SEQ ID NO: 160724 - protein, 15 aa, Homo sapiens
  CDR3 for beta chain variable domain of TCR clone 80362 (TRBV19, TRBJ2-1)
CASSAGTSSYNEQFF

SEQ ID NO: 160725 - protein, 11 aa, Homo sapiens
  CDR3 for alpha chain variable domain of TCR clone 80363 (TRAV16, TRAJ33)
CSLHSNYQLIW

SEQ ID NO: 160726 - protein, 15 aa, Homo sapiens
  CDR3 for beta chain variable domain of TCR clone 80363 (TRBV4-1, TRBJ2-7)
CASSQQGQGFDEQYF

SEQ ID NO: 160727 - protein, 14 aa, Homo sapiens
  CDR3 for alpha chain variable domain of TCR clone 80364 (TRAV9-2, TRAJ39)
CALYIYNAGNMLTF

SEQ ID NO: 160728 - protein, 14 aa, Homo sapiens
  CDR3 for beta chain variable domain of TCR clone 80364 (TRBV4-1, TRBJ2-2)
CASSQAVDTGELFF

SEQ ID NO: 160729 - protein, 13 aa, Homo sapiens
  CDR3 for alpha chain variable domain of TCR clone 80365 (TRAV8-1, TRAJ30)
CAVIMNRDDKIIL

SEQ ID NO: 160730 - protein, 14 aa, Homo sapiens
  CDR3 for beta chain variable domain of TCR clone 80365 (TRBV7-2, TRBJ1-6)
CASSLQGANSPPHF

SEQ ID NO: 160731 - protein, 14 aa, Homo sapiens
  CDR3 for alpha chain variable domain of TCR clone 80366 (TRAV27, TRAJ22)
CAGVSGLGKRQLTF

SEQ ID NO: 160732 - protein, 17 aa, Homo sapiens
  CDR3 for beta chain variable domain of TCR clone 80366 (TRBV14, TRBJ2-1)
CASSQDRRVTSYNEQFF

SEQ ID NO: 160733 - protein, 19 aa, Homo sapiens
  CDR3 for alpha chain variable domain of TCR clone 80367 (TRAV1-2, TRAJ26)
CLLPLCCERPDNYGQNFVF

SEQ ID NO: 160734 - protein, 15 aa, Homo sapiens
  CDR3 for beta chain variable domain of TCR clone 80367 (TRBV5-1, TRBJ2-3)
CASSVTSGSTDTQYF

SEQ ID NO: 160735 - protein, 14 aa, Homo sapiens
  CDR3 for alpha chain variable domain of TCR clone 80368 (TRAV38-1, TRAJ45)
CAYYSGGGADGLTF

SEQ ID NO: 160736 - protein, 19 aa, Homo sapiens
  CDR3 for beta chain variable domain of TCR clone 80368 (TRBV28, TRBJ2-1)
CQHPYWTVTGLAGGNEQFF

SEQ ID NO: 160737 - protein, 10 aa, Homo sapiens
  CDR3 for alpha chain variable domain of TCR clone 80369 (TRAV3, TRAJ6)
CAVRDGPRAG

SEQ ID NO: 160738 - protein, 14 aa, Homo sapiens
  CDR3 for beta chain variable domain of TCR clone 80369 (TRBV7-2, TRBJ2-7)
CASSPKTSFYEQYF

SEQ ID NO: 160739 - protein, 16 aa, Homo sapiens
  CDR3 for alpha chain variable domain of TCR clone 80370 (TRAV27, TRAJ13)
CAGAKSDSGGYQKVTF

SEQ ID NO: 160740 - protein, 15 aa, Homo sapiens
  CDR3 for beta chain variable domain of TCR clone 80370 (TRBV29-1, TRBJ2-1)
CSVGRHALFYNEQFC

SEQ ID NO: 160741 - protein, 13 aa, Homo sapiens
  CDR3 for alpha chain variable domain of TCR clone 80371 (TRAV23/DV6, TRAJ9)
CAASTTGGFKNIF

SEQ ID NO: 160742 - protein, 14 aa, Homo sapiens
  CDR3 for beta chain variable domain of TCR clone 80371 (TRBV5-1, TRBJ2-3)
CASRVDGVSDTQYF

SEQ ID NO: 160743 - protein, 15 aa, Homo sapiens
  CDR3 for alpha chain variable domain of TCR clone 80372 (TRAV2, TRAJ9)
WAVEDRGTGGFKTIF

SEQ ID NO: 160744 - protein, 16 aa, Homo sapiens
  CDR3 for beta chain variable domain of TCR clone 80372 (TRBV24-1, TRBJ2-3)
CATSDPGTGATDTQYF

SEQ ID NO: 160745 - protein, 13 aa, Homo sapiens
  CDR3 for alpha chain variable domain of TCR clone 80373 (TRAV21, TRAJ27)
CAARPGNAGKSTF

SEQ ID NO: 160746 - protein, 12 aa, Homo sapiens
  CDR3 for beta chain variable domain of TCR clone 80373 (TRBV28, TRBJ2-3)
CASSLYRDTQYF

SEQ ID NO: 160747 - protein, 15 aa, Homo sapiens
  CDR3 for alpha chain variable domain of TCR clone 80374 (TRAV35, TRAJ50)
CAGQLSKTSYDKVIF

SEQ ID NO: 160748 - protein, 12 aa, Homo sapiens
  CDR3 for beta chain variable domain of TCR clone 80374 (TRBV5-1, TRBJ2-5)
CASSLGLETQYF

SEQ ID NO: 160749 - protein, 15 aa, Homo sapiens
  CDR3 for alpha chain variable domain of TCR clone 80375 (TRAV8-6, TRAJ17)
CAVSEFQAAGNKLTF

SEQ ID NO: 160750 - protein, 15 aa, Homo sapiens
  CDR3 for beta chain variable domain of TCR clone 80375 (TRBV11-3, TRBJ2-2)
CASSLDARETGELFF

SEQ ID NO: 160751 - protein, 14 aa, Homo sapiens
  CDR3 for alpha chain variable domain of TCR clone 80376 (TRAV23/DV6, TRAJ37)
CEASTSSNTGKLIF

SEQ ID NO: 160752 - protein, 13 aa, Homo sapiens
  CDR3 for beta chain variable domain of TCR clone 80376 (TRBV7-7, TRBJ1-1)
CASSLGANTEAFF

SEQ ID NO: 160753 - protein, 15 aa, Homo sapiens
  CDR3 for alpha chain variable domain of TCR clone 80377 (TRAV26-1, TRAJ44)
CIVRANTGTASKLTF

SEQ ID NO: 160754 - protein, 16 aa, Homo sapiens
  CDR3 for beta chain variable domain of TCR clone 80377 (TRBV7-7, TRBJ2-1)
CDSSLASGTSYNEQFF

SEQ ID NO: 160755 - protein, 16 aa, Homo sapiens
  CDR3 for alpha chain variable domain of TCR clone 80378 (TRAV8-3, TRAJ10)
CAVGPILTGGGNKLTF

SEQ ID NO: 160756 - protein, 16 aa, Homo sapiens
  CDR3 for beta chain variable domain of TCR clone 80378 (TRBV7-2, TRBJ2-5)
CASSSKWLSGRETQYF

SEQ ID NO: 160757 - protein, 12 aa, Homo sapiens
  CDR3 for alpha chain variable domain of TCR clone 80379 (TRAV13-1, TRAJ27)
CAAHTNAGKSTF

SEQ ID NO: 160758 - protein, 14 aa, Homo sapiens
  CDR3 for beta chain variable domain of TCR clone 80379 (TRBV19, TRBJ2-2)
CASSGQGTAGELFF

SEQ ID NO: 160759 - protein, 15 aa, Homo sapiens
  CDR3 for alpha chain variable domain of TCR clone 80380 (TRAV8-4, TRAJ3)
CDVTGENLVQQCFQD

SEQ ID NO: 160760 - protein, 16 aa, Homo sapiens
  CDR3 for beta chain variable domain of TCR clone 80380 (TRBV4-2, TRBJ1-1)
CASSQAGFGMNTEAFF

SEQ ID NO: 160761 - protein, 14 aa, Homo sapiens
  CDR3 for alpha chain variable domain of TCR clone 80381 (TRAV14/DV4, TRAJ31)
CAMREGRNNARLMF

SEQ ID NO: 160762 - protein, 15 aa, Homo sapiens
  CDR3 for beta chain variable domain of TCR clone 80381 (TRBV6-3, TRBJ2-7)
CASSSPGTVFYEQYF

SEQ ID NO: 160763 - protein, 13 aa, Homo sapiens
  CDR3 for alpha chain variable domain of TCR clone 80382 (TRAV12-1, TRAJ26)
SATYLYYGQNFVF

SEQ ID NO: 160764 - protein, 15 aa, Homo sapiens
  CDR3 for beta chain variable domain of TCR clone 80382 (TRBV5-1, TRBJ2-6)
CASSLDPSGANALTF

SEQ ID NO: 160765 - protein, 13 aa, Homo sapiens
  CDR3 for alpha chain variable domain of TCR clone 80383 (TRAV21, TRAJ57)
CAVTQGGSEKLVF

SEQ ID NO: 160766 - protein, 11 aa, Homo sapiens
  CDR3 for beta chain variable domain of TCR clone 80383 (TRBV11-2, TRBJ2-2)
CDSSLPGELFF

SEQ ID NO: 160767 - protein, 12 aa, Homo sapiens
  CDR3 for alpha chain variable domain of TCR clone 80384 (TRAV12-3, TRAJ17)
YAMTLTGNKLTF

SEQ ID NO: 160768 - protein, 15 aa, Homo sapiens
  CDR3 for beta chain variable domain of TCR clone 80384 (TRBV10-2, TRBJ2-6)
CASSEQGTGANVLTF

SEQ ID NO: 160769 - protein, 17 aa, Homo sapiens
  CDR3 for alpha chain variable domain of TCR clone 80385 (TRAV16, TRAJ42)
FALSPKLYGGSQGNLIF

SEQ ID NO: 160770 - protein, 13 aa, Homo sapiens
  CDR3 for beta chain variable domain of TCR clone 80385 (TRBV19, TRBJ1-5)
CASSTRRDQPQHF

SEQ ID NO: 160771 - protein, 14 aa, Homo sapiens
  CDR3 for alpha chain variable domain of TCR clone 80386 (TRAV26-1, TRAJ49)
CIVRLANTGNQFYF

SEQ ID NO: 160772 - protein, 13 aa, Homo sapiens
  CDR3 for beta chain variable domain of TCR clone 80386 (TRBV4-1, TRBJ2-7)
CASSQGQAYEQYF

SEQ ID NO: 160773 - protein, 15 aa, Homo sapiens
  CDR3 for alpha chain variable domain of TCR clone 80387 (TRAV17, TRAJ52)
CATEAGGTSYGKLTF

SEQ ID NO: 160774 - protein, 14 aa, Homo sapiens
  CDR3 for beta chain variable domain of TCR clone 80387 (TRBV28, TRBJ1-5)
CASSLGALVKPQHF

SEQ ID NO: 160775 - protein, 14 aa, Homo sapiens
  CDR3 for alpha chain variable domain of TCR clone 80388 (TRAV1-2, TRAJ8)
CAVREDTGLQKLVF

SEQ ID NO: 160776 - protein, 13 aa, Homo sapiens
  CDR3 for beta chain variable domain of TCR clone 80388 (TRBV10-3, TRBJ1-2)
CAISERDSYGYTF

SEQ ID NO: 160777 - protein, 14 aa, Homo sapiens
  CDR3 for alpha chain variable domain of TCR clone 80389 (TRAV26-1, TRAJ38)
CIADNAGNNRKLIW

SEQ ID NO: 160778 - protein, 17 aa, Homo sapiens
  CDR3 for beta chain variable domain of TCR clone 80389 (TRBV28, TRBJ2-5)
CASSTPEGDALQETQYF

SEQ ID NO: 160779 - protein, 10 aa, Homo sapiens
  CDR3 for alpha chain variable domain of TCR clone 80390 (TRAV23/DV6, TRAJ57)
CAASSTLSQG

SEQ ID NO: 160780 - protein, 16 aa, Homo sapiens
  CDR3 for beta chain variable domain of TCR clone 80390 (TRBV6-5, TRBJ1-2)
CASRRPITQGAYGYTF

SEQ ID NO: 160781 - protein, 15 aa, Homo sapiens
  CDR3 for alpha chain variable domain of TCR clone 80391 (TRAV3, TRAJ20)
CAVRDIKLSDYKLSF

SEQ ID NO: 160782 - protein, 15 aa, Homo sapiens
  CDR3 for beta chain variable domain of TCR clone 80391 (TRBV7-9, TRBJ1-6)
CASSYPGRGNSPLHF

SEQ ID NO: 160783 - protein, 13 aa, Homo sapiens
  CDR3 for alpha chain variable domain of TCR clone 80392 (TRAV17, TRAJ5)
CAPMDTGRRALTF

SEQ ID NO: 160784 - protein, 13 aa, Homo sapiens
  CDR3 for beta chain variable domain of TCR clone 80392 (TRBV12-4, TRBJ2-2)
CASSITGSGELFF

SEQ ID NO: 160785 - protein, 14 aa, Homo sapiens
  CDR3 for alpha chain variable domain of TCR clone 80393 (TRAV16, TRAJ33)
CALSAMDSNYQLIW

SEQ ID NO: 160786 - protein, 17 aa, Homo sapiens
  CDR3 for beta chain variable domain of TCR clone 80393 (TRBV25-1, TRBJ2-7)
CASGDARVVFSSYEQYF

SEQ ID NO: 160787 - protein, 14 aa, Homo sapiens
  CDR3 for alpha chain variable domain of TCR clone 80394 (TRAV3, TRAJ7)
CAVREEEREQQTRF

SEQ ID NO: 160788 - protein, 12 aa, Homo sapiens
  CDR3 for beta chain variable domain of TCR clone 80394 (TRBV7-8, TRBJ2-7)
CASSLGHREQYF

SEQ ID NO: 160789 - protein, 14 aa, Homo sapiens
  CDR3 for alpha chain variable domain of TCR clone 80395 (TRAV1-1, TRAJ27)
CAVIYNTDAGKSTF

SEQ ID NO: 160790 - protein, 15 aa, Homo sapiens
  CDR3 for beta chain variable domain of TCR clone 80395 (TRBV7-2, TRBJ2-1)
CASSSGLAGGNEQFF

SEQ ID NO: 160791 - protein, 17 aa, Homo sapiens
  CDR3 for alpha chain variable domain of TCR clone 80396 (TRAV3, TRAJ38)
CAVRDCLNAGKNRKLIW

SEQ ID NO: 160792 - protein, 13 aa, Homo sapiens
  CDR3 for beta chain variable domain of TCR clone 80396 (TRBV23-1, TRBJ1-4)
CASRGKFNEKLFF

SEQ ID NO: 160793 - protein, 17 aa, Homo sapiens
  CDR3 for alpha chain variable domain of TCR clone 80397 (TRAV3, TRAJ6)
CAVRDGPRAGGSYIPAF

SEQ ID NO: 160794 - protein, 18 aa, Homo sapiens
  CDR3 for beta chain variable domain of TCR clone 80397 (TRBV7-9, TRBJ2-7)
CASSLTTSGSRTWYEQYF

SEQ ID NO: 160795 - protein, 13 aa, Homo sapiens
  CDR3 for alpha chain variable domain of TCR clone 80398 (TRAV26-2, TRAJ43)
CILRAVNNNDMRF

SEQ ID NO: 160796 - protein, 15 aa, Homo sapiens
  CDR3 for beta chain variable domain of TCR clone 80398 (TRBV7-2, TRBJ2-1)
CASTHGTGIYNERFF

SEQ ID NO: 160797 - protein, 14 aa, Homo sapiens
  CDR3 for alpha chain variable domain of TCR clone 80399 (TRAV8-1, TRAJ5)
CAGRTDTGRRALTF

SEQ ID NO: 160798 - protein, 12 aa, Homo sapiens
  CDR3 for beta chain variable domain of TCR clone 80399 (TRBV11-2, TRBJ2-1)
CASSPGNNEQFF

SEQ ID NO: 160799 - protein, 13 aa, Homo sapiens
  CDR3 for alpha chain variable domain of TCR clone 80400 (TRAV39, TRAJ33)
CAANPDSNYQVIW

SEQ ID NO: 160800 - protein, 13 aa, Homo sapiens
  CDR3 for beta chain variable domain of TCR clone 80400 (TRBV18, TRBJ1-1)
CASSGGRNTEAFF

SEQ ID NO: 160801 - protein, 12 aa, Homo sapiens
  CDR3 for alpha chain variable domain of TCR clone 80401 (TRAV35, TRAJ39)
LAPNNAGNLLTF

SEQ ID NO: 160802 - protein, 16 aa, Homo sapiens
  CDR3 for beta chain variable domain of TCR clone 80401 (TRBV2, TRBJ2-3)
CASSTSVEGVTDTQYF

SEQ ID NO: 160803 - protein, 15 aa, Homo sapiens
  CDR3 for alpha chain variable domain of TCR clone 80402 (TRAV26-1, TRAJ44)
CIVRANTGTASKLTF

SEQ ID NO: 160804 - protein, 16 aa, Homo sapiens
  CDR3 for beta chain variable domain of TCR clone 80402 (TRBV7-7, TRBJ2-1)
CSSSLASGTSYNEQFF

SEQ ID NO: 160805 - protein, 11 aa, Homo sapiens
  CDR3 for alpha chain variable domain of TCR clone 80403 (TRAV2, TRAJ21)
CAMFNFNKFYF

SEQ ID NO: 160806 - protein, 14 aa, Homo sapiens
  CDR3 for beta chain variable domain of TCR clone 80403 (TRBV15, TRBJ2-3)
CATRSGTSTDTQYF

SEQ ID NO: 160807 - protein, 20 aa, Homo sapiens
  CDR3 for alpha chain variable domain of TCR clone 80404 (TRAV25, TRAJ21)
TATQTTDVGTYPLSFNKFYF

SEQ ID NO: 160808 - protein, 15 aa, Homo sapiens
  CDR3 for beta chain variable domain of TCR clone 80404 (TRBV9, TRBJ1-6)
CASSVAGTGDSPLHF

SEQ ID NO: 160809 - protein, 13 aa, Homo sapiens
  CDR3 for alpha chain variable domain of TCR clone 80405 (TRAV3, TRAJ21)
CAVREPDFNKFYF

SEQ ID NO: 160810 - protein, 13 aa, Homo sapiens
  CDR3 for beta chain variable domain of TCR clone 80405 (TRBV9, TRBJ2-1)
CASSPSGGNEQVF

SEQ ID NO: 160811 - protein, 14 aa, Homo sapiens
  CDR3 for alpha chain variable domain of TCR clone 80406 (TRAV12-2, TRAJ17)
CAVLFKAAGNKLTF

SEQ ID NO: 160812 - protein, 17 aa, Homo sapiens
  CDR3 for beta chain variable domain of TCR clone 80406 (TRBV11-2, TRBJ2-1)
CASSLHPPGVEYNEQFF

SEQ ID NO: 160813 - protein, 12 aa, Homo sapiens
  CDR3 for alpha chain variable domain of TCR clone 80407 (TRAV1-1, TRAJ23)
CAVTNQGGKLIF

SEQ ID NO: 160814 - protein, 15 aa, Homo sapiens
  CDR3 for beta chain variable domain of TCR clone 80407 (TRBV7-9, TRBJ1-4)
CASSRTGGFNEKLFF

SEQ ID NO: 160815 - protein, 13 aa, Homo sapiens
  CDR3 for alpha chain variable domain of TCR clone 80408 (TRAV1-1, TRAJ23)
CAVVANQGGKLIF

SEQ ID NO: 160816 - protein, 18 aa, Homo sapiens
  CDR3 for beta chain variable domain of TCR clone 80408 (TRBV7-9, TRBJ2-7)
CASSLTTSGSRTWYEQYF

SEQ ID NO: 160817 - protein, 14 aa, Homo sapiens
  CDR3 for alpha chain variable domain of TCR clone 80409 (TRAV3, TRAJ6)
CAVRASRRKLHTYI

SEQ ID NO: 160818 - protein, 15 aa, Homo sapiens
  CDR3 for beta chain variable domain of TCR clone 80409 (TRBV18, TRBJ2-7)
CASSPLQGRTYEQYF

SEQ ID NO: 160819 - protein, 16 aa, Homo sapiens
  CDR3 for alpha chain variable domain of TCR clone 80410 (TRAV30, TRAJ24)
CGTEIVDADSWGKFQF

SEQ ID NO: 160820 - protein, 16 aa, Homo sapiens
  CDR3 for beta chain variable domain of TCR clone 80410 (TRBV11-3, TRBJ2-5)
CASSSVVAGSTETQYF

SEQ ID NO: 160821 - protein, 12 aa, Homo sapiens
  CDR3 for alpha chain variable domain of TCR clone 80411 (TRAV21, TRAJ30)
CAVMNRDGKIIF

SEQ ID NO: 160822 - protein, 17 aa, Homo sapiens
  CDR3 for beta chain variable domain of TCR clone 80411 (TRBV5-1, TRBJ1-1)
CASRPIRTGGVNTEAFF

SEQ ID NO: 160823 - protein, 11 aa, Homo sapiens
  CDR3 for alpha chain variable domain of TCR clone 80412 (TRAV17, TRAJ31)
CATSNNARLMF

SEQ ID NO: 160824 - protein, 16 aa, Homo sapiens
  CDR3 for beta chain variable domain of TCR clone 80412 (TRBV7-3, TRBJ2-2)
CASSLKRGTLSGELFF

SEQ ID NO: 160825 - protein, 14 aa, Homo sapiens
  CDR3 for alpha chain variable domain of TCR clone 80413 (TRAV27, TRAJ12)
CAGARMDSSYKLIF

SEQ ID NO: 160826 - protein, 18 aa, Homo sapiens
  CDR3 for beta chain variable domain of TCR clone 80413 (TRBV10-3, TRBJ2-7)
CAISGSGRPSGGRVEQYF

SEQ ID NO: 160827 - protein, 13 aa, Homo sapiens
  CDR3 for alpha chain variable domain of TCR clone 80414 (TRAV1-1, TRAJ28)
CVTSGAGSYQLPF

SEQ ID NO: 160828 - protein, 17 aa, Homo sapiens
  CDR3 for beta chain variable domain of TCR clone 80414 (TRBV18, TRBJ2-2)
CASSQRSSGQGPGELFF

SEQ ID NO: 160829 - protein, 13 aa, Homo sapiens
  CDR3 for alpha chain variable domain of TCR clone 80415 (TRAV8-3, TRAJ43)
CAVGPDINNDMRF

SEQ ID NO: 160830 - protein, 12 aa, Homo sapiens
  CDR3 for beta chain variable domain of TCR clone 80415 (TRBV7-2, TRBJ1-6)
CASSLSSSPLHF

SEQ ID NO: 160831 - protein, 12 aa, Homo sapiens
  CDR3 for alpha chain variable domain of TCR clone 80416 (TRAV12-3, TRAJ17)
CAMTLTGNKLTF

SEQ ID NO: 160832 - protein, 17 aa, Homo sapiens
  CDR3 for beta chain variable domain of TCR clone 80416 (TRBV20-1, TRBJ2-1)
CSAPPRLAGTRYNEQFF

SEQ ID NO: 160833 - protein, 12 aa, Homo sapiens
  CDR3 for alpha chain variable domain of TCR clone 80417 (TRAV2, TRAJ9)
CAVGAGGFKTIF

SEQ ID NO: 160834 - protein, 16 aa, Homo sapiens
  CDR3 for beta chain variable domain of TCR clone 80417 (TRBV13, TRBJ2-2)
CASSPRTGEHTWELFF

SEQ ID NO: 160835 - protein, 11 aa, Homo sapiens
  CDR3 for alpha chain variable domain of TCR clone 80418 (TRAV10, TRAJ20)
CVALNDYKLSF

SEQ ID NO: 160836 - protein, 13 aa, Homo sapiens
  CDR3 for beta chain variable domain of TCR clone 80418 (TRBV19, TRBJ1-1)
CASSGQVNTEAFF

SEQ ID NO: 160837 - protein, 12 aa, Homo sapiens
  CDR3 for alpha chain variable domain of TCR clone 80419 (TRAV13-1, TRAJ21)
CAAKEGFNKFYF

SEQ ID NO: 160838 - protein, 15 aa, Homo sapiens
  CDR3 for beta chain variable domain of TCR clone 80419 (TRBV11-2, TRBJ2-1)
CASSKNRGLIYEQFF

SEQ ID NO: 160839 - protein, 13 aa, Homo sapiens
  CDR3 for alpha chain variable domain of TCR clone 80420 (TRAV17, TRAJ40)
CAGALGGTYKYIF

SEQ ID NO: 160840 - protein, 16 aa, Homo sapiens
  CDR3 for beta chain variable domain of TCR clone 80420 (TRBV7-2, TRBJ1-4)
CASSLAPGRRDEELFF

SEQ ID NO: 160841 - protein, 16 aa, Homo sapiens
  CDR3 for alpha chain variable domain of TCR clone 80421 (TRAV30, TRAJ24)
CGTEIVDADSWGKFQF

SEQ ID NO: 160842 - protein, 16 aa, Homo sapiens
  CDR3 for beta chain variable domain of TCR clone 80421 (TRBV7-2, TRBJ2-1)
CASSLVAGAGYNEQFF

SEQ ID NO: 160843 - protein, 12 aa, Homo sapiens
  CDR3 for alpha chain variable domain of TCR clone 80422 (TRAV25, TRAJ7)
CAGSYGNNRLAS

SEQ ID NO: 160844 - protein, 19 aa, Homo sapiens
  CDR3 for beta chain variable domain of TCR clone 80422 (TRBV6-5, TRBJ1-6)
CASSHGTGRVRSYNSPLHF

SEQ ID NO: 160845 - protein, 13 aa, Homo sapiens
  CDR3 for alpha chain variable domain of TCR clone 80423 (TRAV2, TRAJ15)
CAVASQAGTALIF

SEQ ID NO: 160846 - protein, 11 aa, Homo sapiens
  CDR3 for beta chain variable domain of TCR clone 80423 (TRBV19, TRBJ1-1)
CASSIGSEAFF

SEQ ID NO: 160847 - protein, 15 aa, Homo sapiens
  CDR3 for alpha chain variable domain of TCR clone 80424 (TRAV4, TRAJ10)
CLVGDEEGGGNKPTF

SEQ ID NO: 160848 - protein, 15 aa, Homo sapiens
  CDR3 for beta chain variable domain of TCR clone 80424 (TRBV7-2, TRBJ2-7)
CASSLTGQGTYEQYF

SEQ ID NO: 160849 - protein, 15 aa, Homo sapiens
  CDR3 for alpha chain variable domain of TCR clone 80425 (TRAV8-3, TRAJ27)
CAVGPSKTNAGKSTF

SEQ ID NO: 160850 - protein, 14 aa, Homo sapiens
  CDR3 for beta chain variable domain of TCR clone 80425 (TRBV4-2, TRBJ2-1)
CASGLDRAYNEQFF

SEQ ID NO: 160851 - protein, 11 aa, Homo sapiens
  CDR3 for alpha chain variable domain of TCR clone 80426 (TRAV3, TRAJ17)
PRGAAGNKLPF

SEQ ID NO: 160852 - protein, 16 aa, Homo sapiens
  CDR3 for beta chain variable domain of TCR clone 80426 (TRBV7-6, TRBJ2-1)
CASSAPGPSSYNEQFF

SEQ ID NO: 160853 - protein, 13 aa, Homo sapiens
  CDR3 for alpha chain variable domain of TCR clone 80427 (TRAV13-1, TRAJ5)
CAASDTGRRALTF

SEQ ID NO: 160854 - protein, 13 aa, Homo sapiens
  CDR3 for beta chain variable domain of TCR clone 80427 (TRBV19, TRBJ1-4)
CATTARPSEKLFF

SEQ ID NO: 160855 - protein, 16 aa, Homo sapiens
  CDR3 for alpha chain variable domain of TCR clone 80428 (TRAV30, TRAJ24)
CGTEIVDADSWGKFQF

SEQ ID NO: 160856 - protein, 14 aa, Homo sapiens
  CDR3 for beta chain variable domain of TCR clone 80428 (TRBV7-9, TRBJ2-4)
CASSLAMGGNIQYV

SEQ ID NO: 160857 - protein, 15 aa, Homo sapiens
  CDR3 for alpha chain variable domain of TCR clone 80429 (TRAV1-2, TRAJ28)
CAVQYSGSGSYQLTF

SEQ ID NO: 160858 - protein, 13 aa, Homo sapiens
  CDR3 for beta chain variable domain of TCR clone 80429 (TRBV20-1, TRBJ2-7)
CSATHTSGYEQYF

SEQ ID NO: 160859 - protein, 15 aa, Homo sapiens
  CDR3 for alpha chain variable domain of TCR clone 80430 (TRAV23/DV6, TRAJ13)
CAAWPGGGGYQKVTF

SEQ ID NO: 160860 - protein, 14 aa, Homo sapiens
  CDR3 for beta chain variable domain of TCR clone 80430 (TRBV7-2, TRBJ2-7)
CASSLYPGRYEQYF

SEQ ID NO: 160861 - protein, 14 aa, Homo sapiens
  CDR3 for alpha chain variable domain of TCR clone 80431 (TRAV27, TRAJ44)
CAASFTGTASKLTF

SEQ ID NO: 160862 - protein, 13 aa, Homo sapiens
  CDR3 for beta chain variable domain of TCR clone 80431 (TRBV27, TRBJ2-3)
CATSGGGLYTQYL

SEQ ID NO: 160863 - protein, 14 aa, Homo sapiens
  CDR3 for alpha chain variable domain of TCR clone 80432 (TRAV6, TRAJ37)
CALGSQGNTGKLIF

SEQ ID NO: 160864 - protein, 15 aa, Homo sapiens
  CDR3 for beta chain variable domain of TCR clone 80432 (TRBV6-1, TRBJ2-7)
CASSESMGDFYEQYF

SEQ ID NO: 160865 - protein, 13 aa, Homo sapiens
  CDR3 for alpha chain variable domain of TCR clone 80433 (TRAV8-3, TRAJ48)
CAVVPFGNAKLTF

SEQ ID NO: 160866 - protein, 15 aa, Homo sapiens
  CDR3 for beta chain variable domain of TCR clone 80433 (TRBV11-2, TRBJ2-1)
CASSSPSTRYNEQFF

SEQ ID NO: 160867 - protein, 14 aa, Homo sapiens
  CDR3 for alpha chain variable domain of TCR clone 80434 (TRAV35, TRAJ33)
CAGSSQDSNYQLIW

SEQ ID NO: 160868 - protein, 14 aa, Homo sapiens
  CDR3 for beta chain variable domain of TCR clone 80434 (TRBV19, TRBJ2-1)
CASPTFVLSGEQFF

SEQ ID NO: 160869 - protein, 12 aa, Homo sapiens
  CDR3 for alpha chain variable domain of TCR clone 80435 (TRAV13-1, TRAJ21)
CAAKEGFDKFYF

SEQ ID NO: 160870 - protein, 14 aa, Homo sapiens
  CDR3 for beta chain variable domain of TCR clone 80435 (TRBV5-4, TRBJ1-1)
CASSLDSRRDEAFF

SEQ ID NO: 160871 - protein, 13 aa, Homo sapiens
  CDR3 for alpha chain variable domain of TCR clone 80436 (TRAV27, TRAJ29)
CAVAHSGNTPLVF

SEQ ID NO: 160872 - protein, 14 aa, Homo sapiens
  CDR3 for beta chain variable domain of TCR clone 80436 (TRBV7-9, TRBJ2-7)
CASSIGQGAGEQYF

SEQ ID NO: 160873 - protein, 14 aa, Homo sapiens
  CDR3 for alpha chain variable domain of TCR clone 80437 (TRAV3, TRAJ36)
CAVRDGTGANNLFS

SEQ ID NO: 160874 - protein, 16 aa, Homo sapiens
  CDR3 for beta chain variable domain of TCR clone 80437 (TRBV20-1, TRBJ2-6)
CSAREGPGVGANVLTF

SEQ ID NO: 160875 - protein, 17 aa, Homo sapiens
  CDR3 for alpha chain variable domain of TCR clone 80438 (TRAV3, TRAJ6)
CAVRDGPRAGGSYIPTF

SEQ ID NO: 160876 - protein, 14 aa, Homo sapiens
  CDR3 for beta chain variable domain of TCR clone 80438 (TRBV12-4, TRBJ2-3)
CASSLVPSTDTQYF

SEQ ID NO: 160877 - protein, 15 aa, Homo sapiens
  CDR3 for alpha chain variable domain of TCR clone 80439 (TRAV3, TRAJ20)
CAVRDITLSDYKLSF

SEQ ID NO: 160878 - protein, 15 aa, Homo sapiens
  CDR3 for beta chain variable domain of TCR clone 80439 (TRBV7-9, TRBJ1-6)
CASSSPGRGNSPLHF

SEQ ID NO: 160879 - protein, 15 aa, Homo sapiens
  CDR3 for alpha chain variable domain of TCR clone 80440 (TRAV4, TRAJ26)
CLVGDMNNYGQNFVF

SEQ ID NO: 160880 - protein, 13 aa, Homo sapiens
  CDR3 for beta chain variable domain of TCR clone 80440 (TRBV19, TRBJ1-2)
CASSVPGQDGYTF

SEQ ID NO: 160881 - protein, 12 aa, Homo sapiens
  CDR3 for alpha chain variable domain of TCR clone 80441 (TRAV10, TRAJ43)
CVVVRVGNDMRF

SEQ ID NO: 160882 - protein, 15 aa, Homo sapiens
  CDR3 for beta chain variable domain of TCR clone 80441 (TRBV2, TRBJ2-7)
CASSEGLARSYERYF

SEQ ID NO: 160883 - protein, 16 aa, Homo sapiens
  CDR3 for alpha chain variable domain of TCR clone 80442 (TRAV30, TRAJ57)
CGTGWAPQGGSKKLVF

SEQ ID NO: 160884 - protein, 14 aa, Homo sapiens
  CDR3 for beta chain variable domain of TCR clone 80442 (TRBV18, TRBJ1-1)
CASSPGFQGVEAFF

SEQ ID NO: 160885 - protein, 13 aa, Homo sapiens
  CDR3 for alpha chain variable domain of TCR clone 80443 (TRAV12-2, TRAJ37)
CAGGSGNTGKLIF

SEQ ID NO: 160886 - protein, 13 aa, Homo sapiens
  CDR3 for beta chain variable domain of TCR clone 80443 (TRBV20-1, TRBJ1-1)
CSARGGGNTEAFF

SEQ ID NO: 160887 - protein, 14 aa, Homo sapiens
  CDR3 for alpha chain variable domain of TCR clone 80444 (TRAV1-2, TRAJ16)
CAVNRFSDGQKLLF

SEQ ID NO: 160888 - protein, 15 aa, Homo sapiens
  CDR3 for beta chain variable domain of TCR clone 80444 (TRBV11-2, TRBJ1-3)
CASSLDGTVGNTIYF

SEQ ID NO: 160889 - protein, 15 aa, Homo sapiens
  CDR3 for alpha chain variable domain of TCR clone 80445 (TRAV8-4, TRAJ13)
CAVTEGTGGYQKVTF

SEQ ID NO: 160890 - protein, 13 aa, Homo sapiens
  CDR3 for beta chain variable domain of TCR clone 80445 (TRBV5-4, TRBJ2-5)
CASSPVSQETQYF

SEQ ID NO: 160891 - protein, 15 aa, Homo sapiens
  CDR3 for alpha chain variable domain of TCR clone 80446 (TRAV34, TRAJ38)
CGADFTPGNNRKLIW

SEQ ID NO: 160892 - protein, 14 aa, Homo sapiens
  CDR3 for beta chain variable domain of TCR clone 80446 (TRBV9, TRBJ2-1)
CASSVDPRGKEQFF

SEQ ID NO: 160893 - protein, 14 aa, Homo sapiens
  CDR3 for alpha chain variable domain of TCR clone 80447 (TRAV13-2, TRAJ17)
CAENGKAAGNKLTF

SEQ ID NO: 160894 - protein, 14 aa, Homo sapiens
  CDR3 for beta chain variable domain of TCR clone 80447 (TRBV5-4, TRBJ1-1)
CARSLDSRRDEAFF

SEQ ID NO: 160895 - protein, 14 aa, Homo sapiens
  CDR3 for alpha chain variable domain of TCR clone 80448 (TRAV2, TRAJ9)
CAVEDRSGGFKTIF

SEQ ID NO: 160896 - protein, 16 aa, Homo sapiens
  CDR3 for beta chain variable domain of TCR clone 80448 (TRBV7-9, TRBJ2-1)
CASSDVAGGSYNEQFF

SEQ ID NO: 160897 - protein, 12 aa, Homo sapiens
  CDR3 for alpha chain variable domain of TCR clone 80449 (TRAV21, TRAJ39)
CAADNAGNMLTF

SEQ ID NO: 160898 - protein, 13 aa, Homo sapiens
  CDR3 for beta chain variable domain of TCR clone 80449 (TRBV12-4, TRBJ1-1)
CASSPVTGFEAFF

SEQ ID NO: 160899 - protein, 16 aa, Homo sapiens
  CDR3 for alpha chain variable domain of TCR clone 80450 (TRAV3, TRAJ10)
CAVRDMRAGGGNKLTF

SEQ ID NO: 160900 - protein, 23 aa, Homo sapiens
  CDR3 for beta chain variable domain of TCR clone 80450 (TRBV3-1, TRBJ2-1)
CISVPADPGTSGGLPIPYNEQFF

SEQ ID NO: 160901 - protein, 12 aa, Homo sapiens
  CDR3 for alpha chain variable domain of TCR clone 80451 (TRAV10, TRAJ43)
CVVVRVGNDMRF

SEQ ID NO: 160902 - protein, 16 aa, Homo sapiens
  CDR3 for beta chain variable domain of TCR clone 80451 (TRBV20-1, TRBJ1-2)
CSASMGQGVANYGYTF

SEQ ID NO: 160903 - protein, 14 aa, Homo sapiens
  CDR3 for alpha chain variable domain of TCR clone 80452 (TRAV14/DV4, TRAJ20)
CAMRGSLNDYKLSF

SEQ ID NO: 160904 - protein, 12 aa, Homo sapiens
  CDR3 for beta chain variable domain of TCR clone 80452 (TRBV14, TRBJ2-7)
CASSLYKDEQYF

SEQ ID NO: 160905 - protein, 13 aa, Homo sapiens
  CDR3 for alpha chain variable domain of TCR clone 80453 (TRAV12-3, TRAJ40)
CVVPTSGTYKYIF

SEQ ID NO: 160906 - protein, 18 aa, Homo sapiens
  CDR3 for beta chain variable domain of TCR clone 80453 (TRBV7-6, TRBJ2-1)
CASSPRTSGMSSYNEQFF

SEQ ID NO: 160907 - protein, 13 aa, Homo sapiens
  CDR3 for alpha chain variable domain of TCR clone 80454 (TRAV1-2, TRAJ9)
CAALNTGGFKTIF

SEQ ID NO: 160908 - protein, 17 aa, Homo sapiens
  CDR3 for beta chain variable domain of TCR clone 80454 (TRBV5-4, TRBJ2-1)
CASSSAGGRGPYNEQFF

SEQ ID NO: 160909 - protein, 12 aa, Homo sapiens
  CDR3 for alpha chain variable domain of TCR clone 80455 (TRAV10, TRAJ34)
CVVSGKHRQAHL

SEQ ID NO: 160910 - protein, 14 aa, Homo sapiens
  CDR3 for beta chain variable domain of TCR clone 80455 (TRBV19, TRBJ2-1)
CASPTFVLGGEQFF

SEQ ID NO: 160911 - protein, 19 aa, Homo sapiens
  CDR3 for alpha chain variable domain of TCR clone 80456 (TRAV2, TRAJ20)
ILQVREADAAVYRGCKLSF

SEQ ID NO: 160912 - protein, 17 aa, Homo sapiens
  CDR3 for beta chain variable domain of TCR clone 80456 (TRBV11-2, TRBJ2-1)
CASSLYPPGVEYNEQFF

SEQ ID NO: 160913 - protein, 13 aa, Homo sapiens
  CDR3 for alpha chain variable domain of TCR clone 80457 (TRAV20, TRAJ56)
CAVQAEANSKLTF

SEQ ID NO: 160914 - protein, 14 aa, Homo sapiens
  CDR3 for beta chain variable domain of TCR clone 80457 (TRBV28, TRBJ1-1)
CASSPRTRWAEAFF

SEQ ID NO: 160915 - protein, 13 aa, Homo sapiens
  CDR3 for alpha chain variable domain of TCR clone 80458 (TRAV29/DV5, TRAJ31)
CAASRNNNARLMF

SEQ ID NO: 160916 - protein, 15 aa, Homo sapiens
  CDR3 for beta chain variable domain of TCR clone 80458 (TRBV7-9, TRBJ1-5)
CASSQGHQPNQPQHF

SEQ ID NO: 160917 - protein, 11 aa, Homo sapiens
  CDR3 for alpha chain variable domain of TCR clone 80459 (TRAV3, TRAJ21)
CAVGNFNKFYF

SEQ ID NO: 160918 - protein, 19 aa, Homo sapiens
  CDR3 for beta chain variable domain of TCR clone 80459 (TRBV28, TRBJ2-7)
CASSYSGTSRLGWVYEQYF

SEQ ID NO: 160919 - protein, 17 aa, Homo sapiens
  CDR3 for alpha chain variable domain of TCR clone 80460 (TRAV3, TRAJ6)
CAVRDGMGRRKLHTYIL

SEQ ID NO: 160920 - protein, 15 aa, Homo sapiens
  CDR3 for beta chain variable domain of TCR clone 80460 (TRBV9, TRBJ2-1)
CASSLAGSSYNEQFF

SEQ ID NO: 160921 - protein, 16 aa, Homo sapiens
  CDR3 for alpha chain variable domain of TCR clone 80461 (TRAV27, TRAJ53)
GAAPEGSGGSNYKLTF

SEQ ID NO: 160922 - protein, 15 aa, Homo sapiens
  CDR3 for beta chain variable domain of TCR clone 80461 (TRBV20-1, TRBJ1-1)
CSASRGVTGNTEAFF

SEQ ID NO: 160923 - protein, 16 aa, Homo sapiens
  CDR3 for alpha chain variable domain of TCR clone 80462 (TRAV12-3, TRAJ53)
CAMSPGSGGSNYKLTF

SEQ ID NO: 160924 - protein, 17 aa, Homo sapiens
  CDR3 for beta chain variable domain of TCR clone 80462 (TRBV28, TRBJ2-5)
CASSTTEGDALQETQYF

SEQ ID NO: 160925 - protein, 15 aa, Homo sapiens
  CDR3 for alpha chain variable domain of TCR clone 80463 (TRAV26-1, TRAJ29)
CIVRVEGSGNTPLVF

SEQ ID NO: 160926 - protein, 15 aa, Homo sapiens
  CDR3 for beta chain variable domain of TCR clone 80463 (TRBV7-9, TRBJ1-5)
CASSQGDQPNQPQHF

SEQ ID NO: 160927 - protein, 11 aa, Homo sapiens
  CDR3 for alpha chain variable domain of TCR clone 80464 (TRAV21, TRAJ34)
CAHYNTDKLIF

SEQ ID NO: 160928 - protein, 12 aa, Homo sapiens
  CDR3 for beta chain variable domain of TCR clone 80464 (TRBV11-2, TRBJ2-2)
CASSLPTGELFF

SEQ ID NO: 160929 - protein, 14 aa, Homo sapiens
  CDR3 for alpha chain variable domain of TCR clone 80465 (TRAV1-2, TRAJ16)
CAVNRFSDGQKMLF

SEQ ID NO: 160930 - protein, 15 aa, Homo sapiens
  CDR3 for beta chain variable domain of TCR clone 80465 (TRBV5-1, TRBJ2-2)
CASSSQGGNTGELFF

SEQ ID NO: 160931 - protein, 11 aa, Homo sapiens
  CDR3 for alpha chain variable domain of TCR clone 80466 (TRAV12-3, TRAJ27)
CAMANAGKSTF

SEQ ID NO: 160932 - protein, 15 aa, Homo sapiens
  CDR3 for beta chain variable domain of TCR clone 80466 (TRBV11-2, TRBJ2-1)
CASSLGTSGLNEQFF

SEQ ID NO: 160933 - protein, 11 aa, Homo sapiens
  CDR3 for alpha chain variable domain of TCR clone 80467 (TRAV21, TRAJ39)
LLVNAGNMLTF

SEQ ID NO: 160934 - protein, 18 aa, Homo sapiens
  CDR3 for beta chain variable domain of TCR clone 80467 (TRBV7-2, TRBJ2-7)
CASSFSGRGLAGGYEQYF

SEQ ID NO: 160935 - protein, 16 aa, Homo sapiens
  CDR3 for alpha chain variable domain of TCR clone 80468 (TRAV8-3, TRAJ10)
CAVGPGVTGGGNKLTF

SEQ ID NO: 160936 - protein, 13 aa, Homo sapiens
  CDR3 for beta chain variable domain of TCR clone 80468 (TRBV18, TRBJ1-1)
CASSPGPSGEDFF

SEQ ID NO: 160937 - protein, 16 aa, Homo sapiens
  CDR3 for alpha chain variable domain of TCR clone 80469 (TRAV3, TRAJ4)
CAVRPSPSGGCNKLIF

SEQ ID NO: 160938 - protein, 12 aa, Homo sapiens
  CDR3 for beta chain variable domain of TCR clone 80469 (TRBV7-9, TRBJ2-7)
CASSQGVYEQYF

SEQ ID NO: 160939 - protein, 14 aa, Homo sapiens
  CDR3 for alpha chain variable domain of TCR clone 80470 (TRAV13-1, TRAJ44)
CAAKATGTASKLTF

SEQ ID NO: 160940 - protein, 17 aa, Homo sapiens
  CDR3 for beta chain variable domain of TCR clone 80470 (TRBV7-3, TRBJ2-3)
RASSLMKRMRGADTHYF

SEQ ID NO: 160941 - protein, 16 aa, Homo sapiens
  CDR3 for alpha chain variable domain of TCR clone 80471 (TRAV4, TRAJ22)
CLVGDLYSGSARQLTF

SEQ ID NO: 160942 - protein, 12 aa, Homo sapiens
  CDR3 for beta chain variable domain of TCR clone 80471 (TRBV5-1, TRBJ2-7)
CASSFRGYEQYF

SEQ ID NO: 160943 - protein, 14 aa, Homo sapiens
  CDR3 for alpha chain variable domain of TCR clone 80472 (TRAV12-2, TRAJ15)
CAPHTGQAGTALTF

SEQ ID NO: 160944 - protein, 14 aa, Homo sapiens
  CDR3 for beta chain variable domain of TCR clone 80472 (TRBV7-2, TRBJ2-7)
CASSPKTSFYEQYF

SEQ ID NO: 160945 - protein, 16 aa, Homo sapiens
  CDR3 for alpha chain variable domain of TCR clone 80473 (TRAV21, TRAJ37)
CAVRAAGSSNTGKLIF

SEQ ID NO: 160946 - protein, 13 aa, Homo sapiens
  CDR3 for beta chain variable domain of TCR clone 80473 (TRBV7-9, TRBJ2-5)
CASLPSGRETQYF

SEQ ID NO: 160947 - protein, 17 aa, Homo sapiens
  CDR3 for alpha chain variable domain of TCR clone 80474 (TRAV12-2, TRAJ52)
CAVNPYAGGTSYGKLTF

SEQ ID NO: 160948 - protein, 12 aa, Homo sapiens
  CDR3 for beta chain variable domain of TCR clone 80474 (TRBV11-2, TRBJ2-2)
CASSLGGGELFF

SEQ ID NO: 160949 - protein, 14 aa, Homo sapiens
  CDR3 for alpha chain variable domain of TCR clone 80475 (TRAV12-2, TRAJ40)
CAVKIPSGTYKYIF

SEQ ID NO: 160950 - protein, 19 aa, Homo sapiens
  CDR3 for beta chain variable domain of TCR clone 80475 (TRBV28, TRBJ2-4)
CASSFQPGGPAHSKNIQYF

SEQ ID NO: 160951 - protein, 11 aa, Homo sapiens
  CDR3 for alpha chain variable domain of TCR clone 80476 (TRAV3, TRAJ21)
CAVGNFNKFYF

SEQ ID NO: 160952 - protein, 12 aa, Homo sapiens
  CDR3 for beta chain variable domain of TCR clone 80476 (TRBV18, TRBJ1-1)
CASSPGGTEAFF

SEQ ID NO: 160953 - protein, 14 aa, Homo sapiens
  CDR3 for alpha chain variable domain of TCR clone 80477 (TRAV16, TRAJ17)
CALSGRAAGNKLTF

SEQ ID NO: 160954 - protein, 12 aa, Homo sapiens
  CDR3 for beta chain variable domain of TCR clone 80477 (TRBV11-2, TRBJ2-2)
CASSLGGGELFF

SEQ ID NO: 160955 - protein, 14 aa, Homo sapiens
  CDR3 for alpha chain variable domain of TCR clone 80478 (TRAV1-2, TRAJ8)
CAVREETGFQKLVF

SEQ ID NO: 160956 - protein, 16 aa, Homo sapiens
  CDR3 for beta chain variable domain of TCR clone 80478 (TRBV7-9, TRBJ2-1)
CASSDVAGGSYNEQFF

SEQ ID NO: 160957 - protein, 14 aa, Homo sapiens
  CDR3 for alpha chain variable domain of TCR clone 80479 (TRAV13-1, TRAJ44)
CAAKATGTASKLTL

SEQ ID NO: 160958 - protein, 15 aa, Homo sapiens
  CDR3 for beta chain variable domain of TCR clone 80479 (TRBV4-3, TRBJ1-1)
CASSQELGRGTEAFF

SEQ ID NO: 160959 - protein, 13 aa, Homo sapiens
  CDR3 for alpha chain variable domain of TCR clone 80480 (TRAV8-3, TRAJ37)
CAVPSRNTGKLIF

SEQ ID NO: 160960 - protein, 12 aa, Homo sapiens
  CDR3 for beta chain variable domain of TCR clone 80480 (TRBV11-2, TRBJ2-1)
CASSPGNNEQFF

SEQ ID NO: 160961 - protein, 14 aa, Homo sapiens
  CDR3 for alpha chain variable domain of TCR clone 80481 (TRAV1-2, TRAJ8)
CAVREDTGFQKLVF

SEQ ID NO: 160962 - protein, 13 aa, Homo sapiens
  CDR3 for beta chain variable domain of TCR clone 80481 (TRBV19, TRBJ1-5)
CASSMRGYQPQHF

SEQ ID NO: 160963 - protein, 15 aa, Homo sapiens
  CDR3 for alpha chain variable domain of TCR clone 80482 (TRAV21, TRAJ53)
RATLNSGGSNYKLTF

SEQ ID NO: 160964 - protein, 16 aa, Homo sapiens
  CDR3 for beta chain variable domain of TCR clone 80482 (TRBV9, TRBJ2-1)
CASSVGGGGNYNEQFF

SEQ ID NO: 160965 - protein, 10 aa, Homo sapiens
  CDR3 for alpha chain variable domain of TCR clone 80483 (TRAV1-2, TRAJ23)
CAGQGGKLIF

SEQ ID NO: 160966 - protein, 13 aa, Homo sapiens
  CDR3 for beta chain variable domain of TCR clone 80483 (TRBV15, TRBJ1-6)
CATSGGLNSPLHF

SEQ ID NO: 160967 - protein, 13 aa, Homo sapiens
  CDR3 for alpha chain variable domain of TCR clone 80484 (TRAV21, TRAJ20)
CAVGLRVDYKLTF

SEQ ID NO: 160968 - protein, 11 aa, Homo sapiens
  CDR3 for beta chain variable domain of TCR clone 80484 (TRBV25-1, TRBJ2-1)
CATTRISEQFF

SEQ ID NO: 160969 - protein, 16 aa, Homo sapiens
  CDR3 for alpha chain variable domain of TCR clone 80485 (TRAV4, TRAJ9)
CLVGDPNRPGGCKTIF

SEQ ID NO: 160970 - protein, 16 aa, Homo sapiens
  CDR3 for beta chain variable domain of TCR clone 80485 (TRBV28, TRBJ1-4)
CASSPPYRGRSEKLFF

SEQ ID NO: 160971 - protein, 11 aa, Homo sapiens
  CDR3 for alpha chain variable domain of TCR clone 80486 (TRAV1-2, TRAJ31)
CAVNNNARLMF

SEQ ID NO: 160972 - protein, 11 aa, Homo sapiens
  CDR3 for beta chain variable domain of TCR clone 80486 (TRBV12-4, TRBJ2-3)
CASTATDTQYF

SEQ ID NO: 160973 - protein, 13 aa, Homo sapiens
  CDR3 for alpha chain variable domain of TCR clone 80487 (TRAV23/DV6, TRAJ47)
CAASMTRGNKLVL

SEQ ID NO: 160974 - protein, 14 aa, Homo sapiens
  CDR3 for beta chain variable domain of TCR clone 80487 (TRBV7-3, TRBJ1-1)
CASSLKGGNTEAFF

SEQ ID NO: 160975 - protein, 14 aa, Homo sapiens
  CDR3 for alpha chain variable domain of TCR clone 80488 (TRAV29/DV5, TRAJ45)
CAASFRGGADGLTF

SEQ ID NO: 160976 - protein, 12 aa, Homo sapiens
  CDR3 for beta chain variable domain of TCR clone 80488 (TRBV11-2, TRBJ2-2)
CASSLGGGELFF

SEQ ID NO: 160977 - protein, 15 aa, Homo sapiens
  CDR3 for alpha chain variable domain of TCR clone 80489 (TRAV3, TRAJ20)
CAVGDIKLSDYKLSF

SEQ ID NO: 160978 - protein, 16 aa, Homo sapiens
  CDR3 for beta chain variable domain of TCR clone 80489 (TRBV20-1, TRBJ1-4)
CSAPGQGLLTNEKLFF

SEQ ID NO: 160979 - protein, 13 aa, Homo sapiens
  CDR3 for alpha chain variable domain of TCR clone 80490 (TRAV3, TRAJ8)
FAVRFTGFQKLVF

SEQ ID NO: 160980 - protein, 15 aa, Homo sapiens
  CDR3 for beta chain variable domain of TCR clone 80490 (TRBV20-1, TRBJ2-7)
CSARDRVSGMDEQYF

SEQ ID NO: 160981 - protein, 15 aa, Homo sapiens
  CDR3 for alpha chain variable domain of TCR clone 80491 (TRAV25, TRAJ52)
CAGRPGGTSYGKLTF

SEQ ID NO: 160982 - protein, 16 aa, Homo sapiens
  CDR3 for beta chain variable domain of TCR clone 80491 (TRBV12-4, TRBJ1-5)
RASSSGPRGSNQPQHF

SEQ ID NO: 160983 - protein, 16 aa, Homo sapiens
  CDR3 for alpha chain variable domain of TCR clone 80492 (TRAV13-1, TRAJ48)
CSKYRESNFGNEKLTF

SEQ ID NO: 160984 - protein, 17 aa, Homo sapiens
  CDR3 for beta chain variable domain of TCR clone 80492 (TRBV28, TRBJ2-1)
CASSSARQAPTYNEQFF

SEQ ID NO: 160985 - protein, 14 aa, Homo sapiens
  CDR3 for alpha chain variable domain of TCR clone 80493 (TRAV34, TRAJ44)
CGADGTGTASKLTF

SEQ ID NO: 160986 - protein, 16 aa, Homo sapiens
  CDR3 for beta chain variable domain of TCR clone 80493 (TRBV12-4, TRBJ2-5)
CASSFFVRGRQETQYF

SEQ ID NO: 160987 - protein, 16 aa, Homo sapiens
  CDR3 for alpha chain variable domain of TCR clone 80494 (TRAV12-2, TRAJ10)
CAVNRVLTGGGNKLTF

SEQ ID NO: 160988 - protein, 12 aa, Homo sapiens
  CDR3 for beta chain variable domain of TCR clone 80494 (TRBV28, TRBJ2-7)
CASSFSSYEQYV

SEQ ID NO: 160989 - protein, 13 aa, Homo sapiens
  CDR3 for alpha chain variable domain of TCR clone 80495 (TRAV8-3, TRAJ6)
CAVGSGGSYIPTV

SEQ ID NO: 160990 - protein, 14 aa, Homo sapiens
  CDR3 for beta chain variable domain of TCR clone 80495 (TRBV11-2, TRBJ1-1)
CASSTQRGRTEAFF

SEQ ID NO: 160991 - protein, 14 aa, Homo sapiens
  CDR3 for alpha chain variable domain of TCR clone 80496 (TRAV8-2, TRAJ11)
CVVSEKSGYSTLTF

SEQ ID NO: 160992 - protein, 16 aa, Homo sapiens
  CDR3 for beta chain variable domain of TCR clone 80496 (TRBV28, TRBJ2-1)
CASSSPGYPRDNEQFF

SEQ ID NO: 160993 - protein, 19 aa, Homo sapiens
  CDR3 for alpha chain variable domain of TCR clone 80497 (TRAV2, TRAJ20)
ILQVREADAAVYRDCKLSV

SEQ ID NO: 160994 - protein, 13 aa, Homo sapiens
  CDR3 for beta chain variable domain of TCR clone 80497 (TRBV15, TRBJ1-6)
CATSGGLNSPLHF

SEQ ID NO: 160995 - protein, 16 aa, Homo sapiens
  CDR3 for alpha chain variable domain of TCR clone 80498 (TRAV30, TRAJ24)
CGTEIVDADSWGKFQF

SEQ ID NO: 160996 - protein, 13 aa, Homo sapiens
  CDR3 for beta chain variable domain of TCR clone 80498 (TRBV7-9, TRBJ1-2)
CASSPKTGYGYTF

SEQ ID NO: 160997 - protein, 12 aa, Homo sapiens
  CDR3 for alpha chain variable domain of TCR clone 80499 (TRAV12-3, TRAJ20)
CAMVRGDYKLSF

SEQ ID NO: 160998 - protein, 14 aa, Homo sapiens
  CDR3 for beta chain variable domain of TCR clone 80499 (TRBV4-2, TRBJ2-1)
CASGLDRAYNEQFF

SEQ ID NO: 160999 - protein, 16 aa, Homo sapiens
  CDR3 for alpha chain variable domain of TCR clone 80500 (TRAV3, TRAJ23)
CDVKIGIYNQGGKLIF

SEQ ID NO: 161000 - protein, 17 aa, Homo sapiens
  CDR3 for beta chain variable domain of TCR clone 80500 (TRBV10-3, TRBJ2-6)
CAISESTAPSGANVLTF

SEQ ID NO: 161001 - protein, 12 aa, Homo sapiens
  CDR3 for alpha chain variable domain of TCR clone 80501 (TRAV12-3, TRAJ42)
CAPGGSQGNPIF

SEQ ID NO: 161002 - protein, 14 aa, Homo sapiens
  CDR3 for beta chain variable domain of TCR clone 80501 (TRBV7-2, TRBJ1-6)
CASSLQGANSPLHF

SEQ ID NO: 161003 - protein, 12 aa, Homo sapiens
  CDR3 for alpha chain variable domain of TCR clone 80502 (TRAV21, TRAJ23)
CAVMLQGGKLIF

SEQ ID NO: 161004 - protein, 14 aa, Homo sapiens
  CDR3 for beta chain variable domain of TCR clone 80502 (TRBV7-9, TRBJ1-4)
CAITEGEATEKLFF

SEQ ID NO: 161005 - protein, 12 aa, Homo sapiens
  CDR3 for alpha chain variable domain of TCR clone 80503 (TRAV12-2, TRAJ21)
CAVNRNFNNFYF

SEQ ID NO: 161006 - protein, 14 aa, Homo sapiens
  CDR3 for beta chain variable domain of TCR clone 80503 (TRBV12-4, TRBJ2-3)
CASSLSGATDTQYF

SEQ ID NO: 161007 - protein, 16 aa, Homo sapiens
  CDR3 for alpha chain variable domain of TCR clone 80504 (TRAV17, TRAJ9)
CATGEWGGTGGFKTIL

SEQ ID NO: 161008 - protein, 15 aa, Homo sapiens
  CDR3 for beta chain variable domain of TCR clone 80504 (TRBV20-1, TRBJ1-2)
CSARDSRGRNYGYTF

SEQ ID NO: 161009 - protein, 16 aa, Homo sapiens
  CDR3 for alpha chain variable domain of TCR clone 80505 (TRAV30, TRAJ24)
CGTEIVDADSWGKFKF

SEQ ID NO: 161010 - protein, 13 aa, Homo sapiens
  CDR3 for beta chain variable domain of TCR clone 80505 (TRBV11-2, TRBJ2-5)
CASSSTGEETQYF

SEQ ID NO: 161011 - protein, 14 aa, Homo sapiens
  CDR3 for alpha chain variable domain of TCR clone 80506 (TRAV13-1, TRAJ40)
CAAHPTSGTYKYIF

SEQ ID NO: 161012 - protein, 15 aa, Homo sapiens
  CDR3 for beta chain variable domain of TCR clone 80506 (TRBV25-1, TRBJ1-4)
CASSKRIATNEKLFF

SEQ ID NO: 161013 - protein, 16 aa, Homo sapiens
  CDR3 for alpha chain variable domain of TCR clone 80507 (TRAV12-1, TRAJ48)
CVVNMVSNFGNEKLTF

SEQ ID NO: 161014 - protein, 18 aa, Homo sapiens
  CDR3 for beta chain variable domain of TCR clone 80507 (TRBV11-2, TRBJ2-6)
CASSLNPFPGTGANVLTF

SEQ ID NO: 161015 - protein, 15 aa, Homo sapiens
  CDR3 for alpha chain variable domain of TCR clone 80508 (TRAV12-1, TRAJ6)
CVVNCPLRRKLHTYI

SEQ ID NO: 161016 - protein, 12 aa, Homo sapiens
  CDR3 for beta chain variable domain of TCR clone 80508 (TRBV19, TRBJ1-1)
CASMNRYAEAFF

SEQ ID NO: 161017 - protein, 11 aa, Homo sapiens
  CDR3 for alpha chain variable domain of TCR clone 80509 (TRAV17, TRAJ31)
CATSNNARLIF

SEQ ID NO: 161018 - protein, 14 aa, Homo sapiens
  CDR3 for beta chain variable domain of TCR clone 80509 (TRBV18, TRBJ2-7)
CASSPRGGAYEQYF

SEQ ID NO: 161019 - protein, 16 aa, Homo sapiens
  CDR3 for alpha chain variable domain of TCR clone 80510 (TRAV3, TRAJ37)
CAVRPHGSGNTGKLIF

SEQ ID NO: 161020 - protein, 20 aa, Homo sapiens
  CDR3 for beta chain variable domain of TCR clone 80510 (TRBV7-9, TRBJ2-1)
CASSSPRAPRTRSSYNEQFF

SEQ ID NO: 161021 - protein, 13 aa, Homo sapiens
  CDR3 for alpha chain variable domain of TCR clone 80511 (TRAV30, TRAJ49)
CGTEPNTGNQFHF

SEQ ID NO: 161022 - protein, 14 aa, Homo sapiens
  CDR3 for beta chain variable domain of TCR clone 80511 (TRBV29-1, TRBJ2-1)
CSVEFRGIPFEQFF

SEQ ID NO: 161023 - protein, 13 aa, Homo sapiens
  CDR3 for alpha chain variable domain of TCR clone 80512 (TRAV35, TRAJ58)
CAGLETSGSRLTF

SEQ ID NO: 161024 - protein, 15 aa, Homo sapiens
  CDR3 for beta chain variable domain of TCR clone 80512 (TRBV20-1, TRBJ2-1)
CSARFSAGGLNEQFF

SEQ ID NO: 161025 - protein, 14 aa, Homo sapiens
  CDR3 for alpha chain variable domain of TCR clone 80513 (TRAV9-2, TRAJ39)
CALYIYNAGNMLTF

SEQ ID NO: 161026 - protein, 17 aa, Homo sapiens
  CDR3 for beta chain variable domain of TCR clone 80513 (TRBV5-1, TRBJ2-5)
CASSLLGLAANQETQYF

SEQ ID NO: 161027 - protein, 14 aa, Homo sapiens
  CDR3 for alpha chain variable domain of TCR clone 80514 (TRAV2, TRAJ37)
CAVDFTSNTGKLIF

SEQ ID NO: 161028 - protein, 13 aa, Homo sapiens
  CDR3 for beta chain variable domain of TCR clone 80514 (TRBV19, TRBJ1-2)
CASSQGQVYGYTF

SEQ ID NO: 161029 - protein, 14 aa, Homo sapiens
  CDR3 for alpha chain variable domain of TCR clone 80515 (TRAV3, TRAJ9)
CAVILNTGGFKTIF

SEQ ID NO: 161030 - protein, 15 aa, Homo sapiens
  CDR3 for beta chain variable domain of TCR clone 80515 (TRBV7-2, TRBJ2-1)
CASSLASGRVNEQFF

SEQ ID NO: 161031 - protein, 11 aa, Homo sapiens
  CDR3 for alpha chain variable domain of TCR clone 80516 (TRAV13-1, TRAJ39)
CASHAGNMLTF

SEQ ID NO: 161032 - protein, 14 aa, Homo sapiens
  CDR3 for beta chain variable domain of TCR clone 80516 (TRBV11-2, TRBJ1-5)
CASSVDRGRQPQHF

SEQ ID NO: 161033 - protein, 11 aa, Homo sapiens
  CDR3 for alpha chain variable domain of TCR clone 80517 (TRAV2, TRAJ13)
CASGGYQKVTF

SEQ ID NO: 161034 - protein, 14 aa, Homo sapiens
  CDR3 for beta chain variable domain of TCR clone 80517 (TRBV2, TRBJ1-2)
CASNEGTGPYGYTF

SEQ ID NO: 161035 - protein, 19 aa, Homo sapiens
  CDR3 for alpha chain variable domain of TCR clone 80518 (TRAV17, TRAJ39)
CFLLLCYGRLGNAGNMLTF

SEQ ID NO: 161036 - protein, 16 aa, Homo sapiens
  CDR3 for beta chain variable domain of TCR clone 80518 (TRBV7-9, TRBJ1-2)
CASSLGFSSGEDGYTF

SEQ ID NO: 161037 - protein, 16 aa, Homo sapiens
  CDR3 for alpha chain variable domain of TCR clone 80519 (TRAV17, TRAJ28)
CATASVSGAGSYQLTF

SEQ ID NO: 161038 - protein, 11 aa, Homo sapiens
  CDR3 for beta chain variable domain of TCR clone 80519 (TRBV7-9, TRBJ2-5)
CDSSLGETQYF

SEQ ID NO: 161039 - protein, 19 aa, Homo sapiens
  CDR3 for alpha chain variable domain of TCR clone 80520 (TRAV17, TRAJ17)
CATDGRPGVIKAAGNKLTV

SEQ ID NO: 161040 - protein, 17 aa, Homo sapiens
  CDR3 for beta chain variable domain of TCR clone 80520 (TRBV12-4, TRBJ1-1)
CASSLSGFRTMNTEAFF

SEQ ID NO: 161041 - protein, 14 aa, Homo sapiens
  CDR3 for alpha chain variable domain of TCR clone 80521 (TRAV3, TRAJ9)
CAVRLNTGGFKTIF

SEQ ID NO: 161042 - protein, 15 aa, Homo sapiens
  CDR3 for beta chain variable domain of TCR clone 80521 (TRBV7-2, TRBJ2-1)
CASSLASGRVNDQFF

SEQ ID NO: 161043 - protein, 17 aa, Homo sapiens
  CDR3 for alpha chain variable domain of TCR clone 80522 (TRAV3, TRAJ7)
CAVRDMSPLEGTTDSLL

SEQ ID NO: 161044 - protein, 12 aa, Homo sapiens
  CDR3 for beta chain variable domain of TCR clone 80522 (TRBV24-1, TRBJ2-2)
CATSDPGLTGLQ

SEQ ID NO: 161045 - protein, 15 aa, Homo sapiens
  CDR3 for alpha chain variable domain of TCR clone 80523 (TRAV21, TRAJ10)
CAVPLLTGGGNKLTF

SEQ ID NO: 161046 - protein, 14 aa, Homo sapiens
  CDR3 for beta chain variable domain of TCR clone 80523 (TRBV12-4, TRBJ1-1)
CASSLGTGGTEDFF

SEQ ID NO: 161047 - protein, 12 aa, Homo sapiens
  CDR3 for alpha chain variable domain of TCR clone 80524 (TRAV3, TRAJ27)
CAVRDKAGKSTF

SEQ ID NO: 161048 - protein, 14 aa, Homo sapiens
  CDR3 for beta chain variable domain of TCR clone 80524 (TRBV5-1, TRBJ1-2)
CASSVESTNYGYTF

SEQ ID NO: 161049 - protein, 13 aa, Homo sapiens
  CDR3 for alpha chain variable domain of TCR clone 80525 (TRAV3, TRAJ20)
CCEAFCNDYKLRF

SEQ ID NO: 161050 - protein, 15 aa, Homo sapiens
  CDR3 for beta chain variable domain of TCR clone 80525 (TRBV19, TRBJ2-6)
CASVRRDSGANVLTF

SEQ ID NO: 161051 - protein, 16 aa, Homo sapiens
  CDR3 for alpha chain variable domain of TCR clone 80526 (TRAV30, TRAJ24)
CGTEIVDADSWGKFRF

SEQ ID NO: 161052 - protein, 13 aa, Homo sapiens
  CDR3 for beta chain variable domain of TCR clone 80526 (TRBV19, TRBJ1-2)
CASSVPGQDGYTF

SEQ ID NO: 161053 - protein, 14 aa, Homo sapiens
  CDR3 for alpha chain variable domain of TCR clone 80527 (TRAV8-3, TRAJ4)
CAVGAAGGYNKLIF

SEQ ID NO: 161054 - protein, 16 aa, Homo sapiens
  CDR3 for beta chain variable domain of TCR clone 80527 (TRBV20-1, TRBJ1-4)
CSAPGQGLLTNEKLFF

SEQ ID NO: 161055 - protein, 13 aa, Homo sapiens
  CDR3 for alpha chain variable domain of TCR clone 80528 (TRAV21, TRAJ27)
CAARPGNAGKSTF

SEQ ID NO: 161056 - protein, 13 aa, Homo sapiens
  CDR3 for beta chain variable domain of TCR clone 80528 (TRBV20-1, TRBJ1-1)
CSARVGGNTEAFF

SEQ ID NO: 161057 - protein, 14 aa, Homo sapiens
  CDR3 for alpha chain variable domain of TCR clone 80529 (TRAV35, TRAJ22)
CAGLRPGSARQLTF

SEQ ID NO: 161058 - protein, 13 aa, Homo sapiens
  CDR3 for beta chain variable domain of TCR clone 80529 (TRBV12-4, TRBJ1-5)
CASSPDRAQPQHF

SEQ ID NO: 161059 - protein, 17 aa, Homo sapiens
  CDR3 for alpha chain variable domain of TCR clone 80530 (TRAV36/DV7, TRAJ52)
CAVAQRAGGTSYGKLTF

SEQ ID NO: 161060 - protein, 14 aa, Homo sapiens
  CDR3 for beta chain variable domain of TCR clone 80530 (TRBV4-1, TRBJ2-2)
CASSQAVNTGELFF

SEQ ID NO: 161061 - protein, 14 aa, Homo sapiens
  CDR3 for alpha chain variable domain of TCR clone 80531 (TRAV12-1, TRAJ17)
CVGNYKAAGNKLTF

SEQ ID NO: 161062 - protein, 16 aa, Homo sapiens
  CDR3 for beta chain variable domain of TCR clone 80531 (TRBV12-4, TRBJ1-5)
CASSRPVGGSNQPQHF

SEQ ID NO: 161063 - protein, 13 aa, Homo sapiens
  CDR3 for alpha chain variable domain of TCR clone 80532 (TRAV21, TRAJ20)
CAVGLRVDYKLSF

SEQ ID NO: 161064 - protein, 13 aa, Homo sapiens
  CDR3 for beta chain variable domain of TCR clone 80532 (TRBV6-1, TRBJ1-1)
CASSRHGNTEAFF

SEQ ID NO: 161065 - protein, 10 aa, Homo sapiens
  CDR3 for alpha chain variable domain of TCR clone 80533 (TRAV23/DV6, TRAJ31)
CARGGARLMF

SEQ ID NO: 161066 - protein, 14 aa, Homo sapiens
  CDR3 for beta chain variable domain of TCR clone 80533 (TRBV6-1, TRBJ1-3)
CASVQGGGGNTIYF

SEQ ID NO: 161067 - protein, 13 aa, Homo sapiens
  CDR3 for alpha chain variable domain of TCR clone 80534 (TRAV8-4, TRAJ30)
CAVSVNRDDKIIF

SEQ ID NO: 161068 - protein, 14 aa, Homo sapiens
  CDR3 for beta chain variable domain of TCR clone 80534 (TRBV25-1, TRBJ1-1)
CASTHLGGNTEAFF

SEQ ID NO: 161069 - protein, 11 aa, Homo sapiens
  CDR3 for alpha chain variable domain of TCR clone 80535 (TRAV8-6, TRAJ20)
CAVSYDYKLSF

SEQ ID NO: 161070 - protein, 14 aa, Homo sapiens
  CDR3 for beta chain variable domain of TCR clone 80535 (TRBV10-2, TRBJ2-2)
CASSERPNTGELFF

SEQ ID NO: 161071 - protein, 16 aa, Homo sapiens
  CDR3 for alpha chain variable domain of TCR clone 80536 (TRAV3, TRAJ37)
CAVRGKGSGNTGKLIF

SEQ ID NO: 161072 - protein, 13 aa, Homo sapiens
  CDR3 for beta chain variable domain of TCR clone 80536 (TRBV14, TRBJ2-7)
FASSQDRRYEQYF

SEQ ID NO: 161073 - protein, 14 aa, Homo sapiens
  CDR3 for alpha chain variable domain of TCR clone 80537 (TRAV12-2, TRAJ13)
CAVKKTGGYQKVTF

SEQ ID NO: 161074 - protein, 17 aa, Homo sapiens
  CDR3 for beta chain variable domain of TCR clone 80537 (TRBV15, TRBJ2-4)
CATSRDNPQTGLDIQYS

SEQ ID NO: 161075 - protein, 15 aa, Homo sapiens
  CDR3 for alpha chain variable domain of TCR clone 80538 (TRAV26-1, TRAJ40)
CIVRAVPSGTYRYIF

SEQ ID NO: 161076 - protein, 14 aa, Homo sapiens
  CDR3 for beta chain variable domain of TCR clone 80538 (TRBV19, TRBJ2-1)
CASKDPGLANEQFF

SEQ ID NO: 161077 - protein, 15 aa, Homo sapiens
  CDR3 for alpha chain variable domain of TCR clone 80539 (TRAV4, TRAJ39)
CLVGPHNNAGNMLTF

SEQ ID NO: 161078 - protein, 14 aa, Homo sapiens
  CDR3 for beta chain variable domain of TCR clone 80539 (TRBV19, TRBJ2-1)
CASPTFVLSGEQFF

SEQ ID NO: 161079 - protein, 12 aa, Homo sapiens
  CDR3 for alpha chain variable domain of TCR clone 80540 (TRAV12-3, TRAJ17)
CAMTLTGNKLTF

SEQ ID NO: 161080 - protein, 15 aa, Homo sapiens
  CDR3 for beta chain variable domain of TCR clone 80540 (TRBV5-1, TRBJ2-5)
CASSSGREMVETQYF

SEQ ID NO: 161081 - protein, 14 aa, Homo sapiens
  CDR3 for alpha chain variable domain of TCR clone 80541 (TRAV20, TRAJ9)
CAVQASTGGFKTIF

SEQ ID NO: 161082 - protein, 15 aa, Homo sapiens
  CDR3 for beta chain variable domain of TCR clone 80541 (TRBV6-5, TRBJ2-1)
CASSYDAGAGNEQFF

SEQ ID NO: 161083 - protein, 14 aa, Homo sapiens
  CDR3 for alpha chain variable domain of TCR clone 80542 (TRAV38-1, TRAJ45)
CAYYSGGGADGLTF

SEQ ID NO: 161084 - protein, 20 aa, Homo sapiens
  CDR3 for beta chain variable domain of TCR clone 80542 (TRBV28, TRBJ2-1)
CASTPIGRSPGLAGGNAQFF

SEQ ID NO: 161085 - protein, 11 aa, Homo sapiens
  CDR3 for alpha chain variable domain of TCR clone 80543 (TRAV35, TRAJ34)
CWARNTDKLIF

SEQ ID NO: 161086 - protein, 13 aa, Homo sapiens
  CDR3 for beta chain variable domain of TCR clone 80543 (TRBV4-1, TRBJ2-2)
CVSSQENTGELFF

SEQ ID NO: 161087 - protein, 13 aa, Homo sapiens
  CDR3 for alpha chain variable domain of TCR clone 80544 (TRAV3, TRAJ20)
CAVRDTPRYKLSF

SEQ ID NO: 161088 - protein, 15 aa, Homo sapiens
  CDR3 for beta chain variable domain of TCR clone 80544 (TRBV19, TRBJ2-1)
CASSIGLAGWDEQFF

SEQ ID NO: 161089 - protein, 14 aa, Homo sapiens
  CDR3 for alpha chain variable domain of TCR clone 80545 (TRAV26-1, TRAJ38)
RIADNAGNNRKLIW

SEQ ID NO: 161090 - protein, 13 aa, Homo sapiens
  CDR3 for beta chain variable domain of TCR clone 80545 (TRBV4-1, TRBJ2-7)
CASSQGQAYEQYF

SEQ ID NO: 161091 - protein, 18 aa, Homo sapiens
  CDR3 for alpha chain variable domain of TCR clone 80546 (TRAV13-1, TRAJ52)
CAAKNPNAGGASYGKLTF

SEQ ID NO: 161092 - protein, 15 aa, Homo sapiens
  CDR3 for beta chain variable domain of TCR clone 80546 (TRBV6-1, TRBJ2-3)
CASSERGGITDTQYF

SEQ ID NO: 161093 - protein, 14 aa, Homo sapiens
  CDR3 for alpha chain variable domain of TCR clone 80547 (TRAV20, TRAJ56)
CAVQFGGANSKLTF

SEQ ID NO: 161094 - protein, 14 aa, Homo sapiens
  CDR3 for beta chain variable domain of TCR clone 80547 (TRBV20-1, TRBJ2-7)
CSAKRGRSSYEQYS

SEQ ID NO: 161095 - protein, 15 aa, Homo sapiens
  CDR3 for alpha chain variable domain of TCR clone 80548 (TRAV35, TRAJ40)
CAGQLGTSGTYKYIF

SEQ ID NO: 161096 - protein, 12 aa, Homo sapiens
  CDR3 for beta chain variable domain of TCR clone 80548 (TRBV7-9, TRBJ1-4)
CASSTDREKLFF

SEQ ID NO: 161097 - protein, 11 aa, Homo sapiens
  CDR3 for alpha chain variable domain of TCR clone 80549 (TRAV12-1, TRAJ33)
CVVNSNYQLIW

SEQ ID NO: 161098 - protein, 14 aa, Homo sapiens
  CDR3 for beta chain variable domain of TCR clone 80549 (TRBV25-1, TRBJ1-1)
CASTHLGGNTEAFF

SEQ ID NO: 161099 - protein, 15 aa, Homo sapiens
  CDR3 for alpha chain variable domain of TCR clone 80550 (TRAV26-1, TRAJ29)
FIVRVEGSGNTPLVF

SEQ ID NO: 161100 - protein, 17 aa, Homo sapiens
  CDR3 for beta chain variable domain of TCR clone 80550 (TRBV7-2, TRBJ2-1)
CASSLKGVGNSYNEQFF

SEQ ID NO: 161101 - protein, 15 aa, Homo sapiens
  CDR3 for alpha chain variable domain of TCR clone 80551 (TRAV25, TRAJ10)
CEGPLLTGGGNKLTF

SEQ ID NO: 161102 - protein, 15 aa, Homo sapiens
  CDR3 for beta chain variable domain of TCR clone 80551 (TRBV12-5, TRBJ2-2)
CASGRLGGNTGELFF

SEQ ID NO: 161103 - protein, 18 aa, Homo sapiens
  CDR3 for alpha chain variable domain of TCR clone 80552 (TRAV13-1, TRAJ52)
CAAKNPNAGGTSYRKLTF

SEQ ID NO: 161104 - protein, 15 aa, Homo sapiens
  CDR3 for beta chain variable domain of TCR clone 80552 (TRBV6-1, TRBJ2-3)
CASSERGGITDTQYF

SEQ ID NO: 161105 - protein, 16 aa, Homo sapiens
  CDR3 for alpha chain variable domain of TCR clone 80553 (TRAV8-3, TRAJ44)
CAVASPALPVNSPLGL

SEQ ID NO: 161106 - protein, 12 aa, Homo sapiens
  CDR3 for beta chain variable domain of TCR clone 80553 (TRBV7-3, TRBJ2-1)
CASSLGFNEQFF

SEQ ID NO: 161107 - protein, 13 aa, Homo sapiens
  CDR3 for alpha chain variable domain of TCR clone 80554 (TRAV3, TRAJ21)
CAVREPDFNKFYF

SEQ ID NO: 161108 - protein, 15 aa, Homo sapiens
  CDR3 for beta chain variable domain of TCR clone 80554 (TRBV5-1, TRBJ2-7)
CASSLNGGPAREQYF

SEQ ID NO: 161109 - protein, 14 aa, Homo sapiens
  CDR3 for alpha chain variable domain of TCR clone 80555 (TRAV12-3, TRAJ42)
CAMNYGGSQGNLIF

SEQ ID NO: 161110 - protein, 14 aa, Homo sapiens
  CDR3 for beta chain variable domain of TCR clone 80555 (TRBV20-1, TRBJ2-7)
CSAKRGRSSYEQYF

SEQ ID NO: 161111 - protein, 13 aa, Homo sapiens
  CDR3 for alpha chain variable domain of TCR clone 80556 (TRAV12-3, TRAJ53)
CAMRGGSNYKLTF

SEQ ID NO: 161112 - protein, 15 aa, Homo sapiens
  CDR3 for beta chain variable domain of TCR clone 80556 (TRBV2, TRBJ2-1)
CATQARLVMVGEQFF

SEQ ID NO: 161113 - protein, 14 aa, Homo sapiens
  CDR3 for alpha chain variable domain of TCR clone 80557 (TRAV26-1, TRAJ39)
CSVRGSRAGNMLTF

SEQ ID NO: 161114 - protein, 15 aa, Homo sapiens
  CDR3 for beta chain variable domain of TCR clone 80557 (TRBV7-9, TRBJ1-5)
CASSQGHQPNQPQHF

SEQ ID NO: 161115 - protein, 14 aa, Homo sapiens
  CDR3 for alpha chain variable domain of TCR clone 80558 (TRAV3, TRAJ9)
CAVRLNTGGFKTIF

SEQ ID NO: 161116 - protein, 12 aa, Homo sapiens
  CDR3 for beta chain variable domain of TCR clone 80558 (TRBV11-2, TRBJ2-1)
CASSPGNNEQFF

SEQ ID NO: 161117 - protein, 16 aa, Homo sapiens
  CDR3 for alpha chain variable domain of TCR clone 80559 (TRAV12-2, TRAJ32)
CSVNLGQGGATNKLIF

SEQ ID NO: 161118 - protein, 15 aa, Homo sapiens
  CDR3 for beta chain variable domain of TCR clone 80559 (TRBV20-1, TRBJ2-7)
CSARGPLAGGREQYF

SEQ ID NO: 161119 - protein, 16 aa, Homo sapiens
  CDR3 for alpha chain variable domain of TCR clone 80560 (TRAV16, TRAJ4)
CALSRMFSGGYNKLIF

SEQ ID NO: 161120 - protein, 16 aa, Homo sapiens
  CDR3 for beta chain variable domain of TCR clone 80560 (TRBV18, TRBJ2-2)
CASSPPRTANTGELFF

SEQ ID NO: 161121 - protein, 18 aa, Homo sapiens
  CDR3 for alpha chain variable domain of TCR clone 80561 (TRAV12-3, TRAJ52)
CALSRTNAGGTSYGKLTF

SEQ ID NO: 161122 - protein, 17 aa, Homo sapiens
  CDR3 for beta chain variable domain of TCR clone 80561 (TRBV7-3, TRBJ2-3)
CASSLMKRMRGADTQYF

SEQ ID NO: 161123 - protein, 15 aa, Homo sapiens
  CDR3 for alpha chain variable domain of TCR clone 80562 (TRAV12-3, TRAJ49)
CAMAVTPNTGNQFYF

SEQ ID NO: 161124 - protein, 18 aa, Homo sapiens
  CDR3 for beta chain variable domain of TCR clone 80562 (TRBV4-1, TRBJ1-5)
CDSSQDPRGQGLNQPQHF

SEQ ID NO: 161125 - protein, 16 aa, Homo sapiens
  CDR3 for alpha chain variable domain of TCR clone 80563 (TRAV30, TRAJ24)
CGTEIVDADSWGKFQF

SEQ ID NO: 161126 - protein, 13 aa, Homo sapiens
  CDR3 for beta chain variable domain of TCR clone 80563 (TRBV11-2, TRBJ1-2)
CASSLDSPSGYTF

SEQ ID NO: 161127 - protein, 15 aa, Homo sapiens
  CDR3 for alpha chain variable domain of TCR clone 80564 (TRAV35, TRAJ50)
CAGQLLKTSYDKVIF

SEQ ID NO: 161128 - protein, 12 aa, Homo sapiens
  CDR3 for beta chain variable domain of TCR clone 80564 (TRBV5-1, TRBJ2-5)
CASSLGLETQYF

SEQ ID NO: 161129 - protein, 17 aa, Homo sapiens
  CDR3 for alpha chain variable domain of TCR clone 80565 (TRAV13-1, TRAJ31)
CAPRDRLMFGDGTQLVV

SEQ ID NO: 161130 - protein, 17 aa, Homo sapiens
  CDR3 for beta chain variable domain of TCR clone 80565 (TRBV20-1, TRBJ2-1)
CSAPPRLAGTRYNEQFF

SEQ ID NO: 161131 - protein, 14 aa, Homo sapiens
  CDR3 for alpha chain variable domain of TCR clone 80566 (TRAV21, TRAJ37)
RAVKGSSNAGKLIF

SEQ ID NO: 161132 - protein, 14 aa, Homo sapiens
  CDR3 for beta chain variable domain of TCR clone 80566 (TRBV7-2, TRBJ2-1)
CASSRGGARNEQFF

SEQ ID NO: 161133 - protein, 13 aa, Homo sapiens
  CDR3 for alpha chain variable domain of TCR clone 80567 (TRAV12-2, TRAJ10)
CAVPTGGGNKLTF

SEQ ID NO: 161134 - protein, 11 aa, Homo sapiens
  CDR3 for beta chain variable domain of TCR clone 80567 (TRBV6-1, TRBJ2-1)
CASISPNEQFF

SEQ ID NO: 161135 - protein, 12 aa, Homo sapiens
  CDR3 for alpha chain variable domain of TCR clone 80568 (TRAV17, TRAJ57)
CATDGGSEKLVF

SEQ ID NO: 161136 - protein, 13 aa, Homo sapiens
  CDR3 for beta chain variable domain of TCR clone 80568 (TRBV7-9, TRBJ2-7)
CASSFAGAYKQYF

SEQ ID NO: 161137 - protein, 15 aa, Homo sapiens
  CDR3 for alpha chain variable domain of TCR clone 80569 (TRAV12-3, TRAJ49)
CAMAVTPTTGNQFYF

SEQ ID NO: 161138 - protein, 18 aa, Homo sapiens
  CDR3 for beta chain variable domain of TCR clone 80569 (TRBV4-1, TRBJ1-5)
CASSQDPRGQGLNQPQHF

SEQ ID NO: 161139 - protein, 16 aa, Homo sapiens
  CDR3 for alpha chain variable domain of TCR clone 80570 (TRAV30, TRAJ24)
CGTEIVDADSWGKFQF

SEQ ID NO: 161140 - protein, 11 aa, Homo sapiens
  CDR3 for beta chain variable domain of TCR clone 80570 (TRBV10-3, TRBJ2-7)
CAISEGLEQYF

SEQ ID NO: 161141 - protein, 15 aa, Homo sapiens
  CDR3 for alpha chain variable domain of TCR clone 80571 (TRAV21, TRAJ45)
CAVSYSGGGADGLTF

SEQ ID NO: 161142 - protein, 13 aa, Homo sapiens
  CDR3 for beta chain variable domain of TCR clone 80571 (TRBV20-1, TRBJ2-5)
CSADTELQETQYF

SEQ ID NO: 161143 - protein, 15 aa, Homo sapiens
  CDR3 for alpha chain variable domain of TCR clone 80572 (TRAV22, TRAJ24)
CAVPLSTDSWGKLQF

SEQ ID NO: 161144 - protein, 14 aa, Homo sapiens
  CDR3 for beta chain variable domain of TCR clone 80572 (TRBV7-2, TRBJ2-7)
CTSRSQGAAYEQYF

SEQ ID NO: 161145 - protein, 14 aa, Homo sapiens
  CDR3 for alpha chain variable domain of TCR clone 80573 (TRAV4, TRAJ17)
CLVGGMAAGNKLTF

SEQ ID NO: 161146 - protein, 13 aa, Homo sapiens
  CDR3 for beta chain variable domain of TCR clone 80573 (TRBV18, TRBJ2-7)
CASQSGGGYEQYF

SEQ ID NO: 161147 - protein, 14 aa, Homo sapiens
  CDR3 for alpha chain variable domain of TCR clone 80574 (TRAV12-2, TRAJ40)
CAVKIPSGTYKYIF

SEQ ID NO: 161148 - protein, 13 aa, Homo sapiens
  CDR3 for beta chain variable domain of TCR clone 80574 (TRBV9, TRBJ2-1)
CASSPSGGNEQFF

SEQ ID NO: 161149 - protein, 15 aa, Homo sapiens
  CDR3 for alpha chain variable domain of TCR clone 80575 (TRAV8-3, TRAJ40)
CAAPSLDSGTYRYIF

SEQ ID NO: 161150 - protein, 16 aa, Homo sapiens
  CDR3 for beta chain variable domain of TCR clone 80575 (TRBV7-3, TRBJ2-3)
CASSLSGYRPEDTQYF

SEQ ID NO: 161151 - protein, 15 aa, Homo sapiens
  CDR3 for alpha chain variable domain of TCR clone 80576 (TRAV27, TRAJ38)
CAGRFNAGNNRKLVW

SEQ ID NO: 161152 - protein, 13 aa, Homo sapiens
  CDR3 for beta chain variable domain of TCR clone 80576 (TRBV12-5, TRBJ2-3)
CASQNRGTDTQYF

SEQ ID NO: 161153 - protein, 12 aa, Homo sapiens
  CDR3 for alpha chain variable domain of TCR clone 80577 (TRAV23/DV6, TRAJ32)
CSMPGATNKLVF

SEQ ID NO: 161154 - protein, 17 aa, Homo sapiens
  CDR3 for beta chain variable domain of TCR clone 80577 (TRBV13, TRBJ2-3)
CASSSLGTSGLTDTQYF

SEQ ID NO: 161155 - protein, 14 aa, Homo sapiens
  CDR3 for alpha chain variable domain of TCR clone 80578 (TRAV1-2, TRAJ16)
CAVNRFSDGQKLLF

SEQ ID NO: 161156 - protein, 19 aa, Homo sapiens
  CDR3 for beta chain variable domain of TCR clone 80578 (TRBV29-1, TRBJ2-7)
SAALKSWGLAGAKSSTSGR

SEQ ID NO: 161157 - protein, 14 aa, Homo sapiens
  CDR3 for alpha chain variable domain of TCR clone 80579 (TRAV12-2, TRAJ13)
CAVKKNGGYQKVTF

SEQ ID NO: 161158 - protein, 17 aa, Homo sapiens
  CDR3 for beta chain variable domain of TCR clone 80579 (TRBV20-1, TRBJ2-2)
CSASGSGQGGLTGELFF

SEQ ID NO: 161159 - protein, 12 aa, Homo sapiens
  CDR3 for alpha chain variable domain of TCR clone 80580 (TRAV12-3, TRAJ20)
CAMVRGDYKLSF

SEQ ID NO: 161160 - protein, 16 aa, Homo sapiens
  CDR3 for beta chain variable domain of TCR clone 80580 (TRBV12-4, TRBJ1-5)
CASSRPVGGSNQPQHF

SEQ ID NO: 161161 - protein, 14 aa, Homo sapiens
  CDR3 for alpha chain variable domain of TCR clone 80581 (TRAV1-2, TRAJ16)
CAVNRFSDGQKLLF

SEQ ID NO: 161162 - protein, 16 aa, Homo sapiens
  CDR3 for beta chain variable domain of TCR clone 80581 (TRBV20-1, TRBJ1-4)
CSAGPYGGELNEKLFF

SEQ ID NO: 161163 - protein, 13 aa, Homo sapiens
  CDR3 for alpha chain variable domain of TCR clone 80582 (TRAV12-2, TRAJ15)
CAVFNRAGTALIF

SEQ ID NO: 161164 - protein, 15 aa, Homo sapiens
  CDR3 for beta chain variable domain of TCR clone 80582 (TRBV7-8, TRBJ1-5)
CASSRGGGADQPQHF

SEQ ID NO: 161165 - protein, 12 aa, Homo sapiens
  CDR3 for alpha chain variable domain of TCR clone 80583 (TRAV21, TRAJ3)
CCFYCSASKIIF

SEQ ID NO: 161166 - protein, 16 aa, Homo sapiens
  CDR3 for beta chain variable domain of TCR clone 80583 (TRBV19, TRBJ2-1)
CASSKAGPSSYNEQFF

SEQ ID NO: 161167 - protein, 14 aa, Homo sapiens
  CDR3 for alpha chain variable domain of TCR clone 80584 (TRAV12-1, TRAJ43)
CVVNGRSNNNDIRF

SEQ ID NO: 161168 - protein, 13 aa, Homo sapiens
  CDR3 for beta chain variable domain of TCR clone 80584 (TRBV27, TRBJ1-1)
CASSLSIGAEAFF

SEQ ID NO: 161169 - protein, 15 aa, Homo sapiens
  CDR3 for alpha chain variable domain of TCR clone 80585 (TRAV8-3, TRAJ45)
CASSYSGGGADGLTF

SEQ ID NO: 161170 - protein, 14 aa, Homo sapiens
  CDR3 for beta chain variable domain of TCR clone 80585 (TRBV19, TRBJ2-1)
CARGARSFQWEQFF

SEQ ID NO: 161171 - protein, 14 aa, Homo sapiens
  CDR3 for alpha chain variable domain of TCR clone 80586 (TRAV2, TRAJ37)
CAVDFTSNTGKLIF

SEQ ID NO: 161172 - protein, 15 aa, Homo sapiens
  CDR3 for beta chain variable domain of TCR clone 80586 (TRBV5-1, TRBJ1-1)
CASSSTTGTNTEAFF

SEQ ID NO: 161173 - protein, 16 aa, Homo sapiens
  CDR3 for alpha chain variable domain of TCR clone 80587 (TRAV27, TRAJ13)
CAGDKSDSGGYQKVTF

SEQ ID NO: 161174 - protein, 15 aa, Homo sapiens
  CDR3 for beta chain variable domain of TCR clone 80587 (TRBV29-1, TRBJ2-1)
CSVGRHALFYNEQFF

SEQ ID NO: 161175 - protein, 13 aa, Homo sapiens
  CDR3 for alpha chain variable domain of TCR clone 80588 (TRAV13-1, TRAJ5)
RAARVTGRRALTF

SEQ ID NO: 161176 - protein, 15 aa, Homo sapiens
  CDR3 for beta chain variable domain of TCR clone 80588 (TRBV7-9, TRBJ2-7)
CASSPGGGLTYEQYF

SEQ ID NO: 161177 - protein, 10 aa, Homo sapiens
  CDR3 for alpha chain variable domain of TCR clone 80589 (TRAV26-1, TRAJ40)
CIAGTYKYIF

SEQ ID NO: 161178 - protein, 15 aa, Homo sapiens
  CDR3 for beta chain variable domain of TCR clone 80589 (TRBV9, TRBJ1-6)
CASSVAGTGDSPLHF

SEQ ID NO: 161179 - protein, 14 aa, Homo sapiens
  CDR3 for alpha chain variable domain of TCR clone 80590 (TRAV35, TRAJ33)
CAGSSQDSNYQLIW

SEQ ID NO: 161180 - protein, 15 aa, Homo sapiens
  CDR3 for beta chain variable domain of TCR clone 80590 (TRBV20-1, TRBJ2-7)
CRAESGTSGAYEQYF

SEQ ID NO: 161181 - protein, 15 aa, Homo sapiens
  CDR3 for alpha chain variable domain of TCR clone 80591 (TRAV3, TRAJ3)
CAVRDGHSSASKIIF

SEQ ID NO: 161182 - protein, 17 aa, Homo sapiens
  CDR3 for beta chain variable domain of TCR clone 80591 (TRBV25-1, TRBJ2-7)
CASSDARVVFASYEQYF

SEQ ID NO: 161183 - protein, 14 aa, Homo sapiens
  CDR3 for alpha chain variable domain of TCR clone 80592 (TRAV1-2, TRAJ16)
CAVNRSSDGQKLLF

SEQ ID NO: 161184 - protein, 13 aa, Homo sapiens
  CDR3 for beta chain variable domain of TCR clone 80592 (TRBV12-4, TRBJ2-5)
CASSLGGSRTQYF

SEQ ID NO: 161185 - protein, 11 aa, Homo sapiens
  CDR3 for alpha chain variable domain of TCR clone 80593 (TRAV12-3, TRAJ5)
SWPTGRRALTF

SEQ ID NO: 161186 - protein, 14 aa, Homo sapiens
  CDR3 for beta chain variable domain of TCR clone 80593 (TRBV6-1, TRBJ1-3)
CASVQGGGGNTIYF

SEQ ID NO: 161187 - protein, 14 aa, Homo sapiens
  CDR3 for alpha chain variable domain of TCR clone 80594 (TRAV26-1, TRAJ38)
CIADNAGNNRKLIW

SEQ ID NO: 161188 - protein, 13 aa, Homo sapiens
  CDR3 for beta chain variable domain of TCR clone 80594 (TRBV5-4, TRBJ2-3)
CASSRTGLGTQYF

SEQ ID NO: 161189 - protein, 17 aa, Homo sapiens
  CDR3 for alpha chain variable domain of TCR clone 80595 (TRAV13-1, TRAJ3)
CAASKAGRGSSASKIIF

SEQ ID NO: 161190 - protein, 15 aa, Homo sapiens
  CDR3 for beta chain variable domain of TCR clone 80595 (TRBV20-1, TRBJ1-5)
CSARKGGHSNQPQHF

SEQ ID NO: 161191 - protein, 12 aa, Homo sapiens
  CDR3 for alpha chain variable domain of TCR clone 80596 (TRAV9-2, TRAJ24)
CAQTDSWGKLQF

SEQ ID NO: 161192 - protein, 13 aa, Homo sapiens
  CDR3 for beta chain variable domain of TCR clone 80596 (TRBV12-4, TRBJ2-1)
CASSFQGYNGQFF

SEQ ID NO: 161193 - protein, 14 aa, Homo sapiens
  CDR3 for alpha chain variable domain of TCR clone 80597 (TRAV20, TRAJ42)
CALQAGGSQGNLIF

SEQ ID NO: 161194 - protein, 14 aa, Homo sapiens
  CDR3 for beta chain variable domain of TCR clone 80597 (TRBV28, TRBJ1-2)
CASRIQGANYGYTF

SEQ ID NO: 161195 - protein, 16 aa, Homo sapiens
  CDR3 for alpha chain variable domain of TCR clone 80598 (TRAV12-2, TRAJ28)
CAVITASGAGSYQLTF

SEQ ID NO: 161196 - protein, 12 aa, Homo sapiens
  CDR3 for beta chain variable domain of TCR clone 80598 (TRBV9, TRBJ2-2)
CASSLVTGELFF

SEQ ID NO: 161197 - protein, 16 aa, Homo sapiens
  CDR3 for alpha chain variable domain of TCR clone 80599 (TRAV12-3, TRAJ28)
CAMRANSGAGSYQLTF

SEQ ID NO: 161198 - protein, 15 aa, Homo sapiens
  CDR3 for beta chain variable domain of TCR clone 80599 (TRBV20-1, TRBJ2-7)
CSARDRVSGMDEQYF

SEQ ID NO: 161199 - protein, 11 aa, Homo sapiens
  CDR3 for alpha chain variable domain of TCR clone 80600 (TRAV2, TRAJ13)
CASGGYQKVTF

SEQ ID NO: 161200 - protein, 14 aa, Homo sapiens
  CDR3 for beta chain variable domain of TCR clone 80600 (TRBV5-7, TRBJ1-2)
CASGLVRGDYGYTF

SEQ ID NO: 161201 - protein, 11 aa, Homo sapiens
  CDR3 for alpha chain variable domain of TCR clone 80601 (TRAV1-2, TRAJ23)
CAVRQGGKLIF

SEQ ID NO: 161202 - protein, 20 aa, Homo sapiens
  CDR3 for beta chain variable domain of TCR clone 80601 (TRBV7-8, TRBJ2-2)
CASSHLFPGPTIHTTGELFF

SEQ ID NO: 161203 - protein, 15 aa, Homo sapiens
  CDR3 for alpha chain variable domain of TCR clone 80602 (TRAV20, TRAJ6)
CAVRPQSGGSYIPTF

SEQ ID NO: 161204 - protein, 14 aa, Homo sapiens
  CDR3 for beta chain variable domain of TCR clone 80602 (TRBV12-4, TRBJ2-7)
CASSASGGWYEQYF

SEQ ID NO: 161205 - protein, 13 aa, Homo sapiens
  CDR3 for alpha chain variable domain of TCR clone 80603 (TRAV21, TRAJ37)
CAVSSGNTGKLIF

SEQ ID NO: 161206 - protein, 15 aa, Homo sapiens
  CDR3 for beta chain variable domain of TCR clone 80603 (TRBV28, TRBJ2-5)
RASSSGRTIQETQYF

SEQ ID NO: 161207 - protein, 16 aa, Homo sapiens
  CDR3 for alpha chain variable domain of TCR clone 80604 (TRAV20, TRAJ53)
CAVQGNSGGGNYKLTF

SEQ ID NO: 161208 - protein, 14 aa, Homo sapiens
  CDR3 for beta chain variable domain of TCR clone 80604 (TRBV6-5, TRBJ2-7)
CASSPHRGLREQYF

SEQ ID NO: 161209 - protein, 16 aa, Homo sapiens
  CDR3 for alpha chain variable domain of TCR clone 80605 (TRAV3, TRAJ10)
CAVRGMRAGGGNKLTF

SEQ ID NO: 161210 - protein, 13 aa, Homo sapiens
  CDR3 for beta chain variable domain of TCR clone 80605 (TRBV6-1, TRBJ1-1)
CASSRQGNTEAFF

SEQ ID NO: 161211 - protein, 12 aa, Homo sapiens
  CDR3 for alpha chain variable domain of TCR clone 80606 (TRAV16, TRAJ27)
CALNTNAGKSTF

SEQ ID NO: 161212 - protein, 14 aa, Homo sapiens
  CDR3 for beta chain variable domain of TCR clone 80606 (TRBV12-4, TRBJ1-1)
CASTWTGHDTEAFF

SEQ ID NO: 161213 - protein, 12 aa, Homo sapiens
  CDR3 for alpha chain variable domain of TCR clone 80607 (TRAV3, TRAJ43)
CAVRDPNNDMRF

SEQ ID NO: 161214 - protein, 14 aa, Homo sapiens
  CDR3 for beta chain variable domain of TCR clone 80607 (TRBV12-5, TRBJ2-5)
CASGSRTHQETQYF

SEQ ID NO: 161215 - protein, 10 aa, Homo sapiens
  CDR3 for alpha chain variable domain of TCR clone 80608 (TRAV20, TRAJ22)
CAAPARQLTF

SEQ ID NO: 161216 - protein, 14 aa, Homo sapiens
  CDR3 for beta chain variable domain of TCR clone 80608 (TRBV19, TRBJ2-1)
CARSMGSGATEQFF

SEQ ID NO: 161217 - protein, 14 aa, Homo sapiens
  CDR3 for alpha chain variable domain of TCR clone 80609 (TRAV12-1, TRAJ36)
CVVNYWGKQPLLWD

SEQ ID NO: 161218 - protein, 13 aa, Homo sapiens
  CDR3 for beta chain variable domain of TCR clone 80609 (TRBV19, TRBJ1-2)
CASSVPGQDGYTF

SEQ ID NO: 161219 - protein, 11 aa, Homo sapiens
  CDR3 for alpha chain variable domain of TCR clone 80610 (TRAV1-1, TRAJ23)
CAVRQGGKLIF

SEQ ID NO: 161220 - protein, 20 aa, Homo sapiens
  CDR3 for beta chain variable domain of TCR clone 80610 (TRBV7-8, TRBJ2-2)
CASSHLFPRPTVHITGELFF

SEQ ID NO: 161221 - protein, 11 aa, Homo sapiens
  CDR3 for alpha chain variable domain of TCR clone 80611 (TRAV3, TRAJ21)
CAVGNFTKFYF

SEQ ID NO: 161222 - protein, 16 aa, Homo sapiens
  CDR3 for beta chain variable domain of TCR clone 80611 (TRBV19, TRBJ2-1)
CASSKAGPSSYNEHFF

SEQ ID NO: 161223 - protein, 15 aa, Homo sapiens
  CDR3 for alpha chain variable domain of TCR clone 80612 (TRAV12-3, TRAJ49)
CAMAVTPKTGNQFYF

SEQ ID NO: 161224 - protein, 18 aa, Homo sapiens
  CDR3 for beta chain variable domain of TCR clone 80612 (TRBV4-1, TRBJ1-5)
CASSQDPRGQGLNQPQHF

SEQ ID NO: 161225 - protein, 16 aa, Homo sapiens
  CDR3 for alpha chain variable domain of TCR clone 80613 (TRAV23/DV6, TRAJ9)
CAASIGGNTEGFKTIF

SEQ ID NO: 161226 - protein, 15 aa, Homo sapiens
  CDR3 for beta chain variable domain of TCR clone 80613 (TRBV6-3, TRBJ2-7)
CASSSPGTVLYEQYF

SEQ ID NO: 161227 - protein, 15 aa, Homo sapiens
  CDR3 for alpha chain variable domain of TCR clone 80614 (TRAV26-1, TRAJ39)
CIVRVARNAGNMLTF

SEQ ID NO: 161228 - protein, 14 aa, Homo sapiens
  CDR3 for beta chain variable domain of TCR clone 80614 (TRBV7-2, TRBJ2-7)
CASSPKTSFYEQYF

SEQ ID NO: 161229 - protein, 15 aa, Homo sapiens
  CDR3 for alpha chain variable domain of TCR clone 80615 (TRAV12-3, TRAJ6)
CAMSATKGGSYIPTF

SEQ ID NO: 161230 - protein, 13 aa, Homo sapiens
  CDR3 for beta chain variable domain of TCR clone 80615 (TRBV7-9, TRBJ1-2)
CASSLKQNYGYTF

SEQ ID NO: 161231 - protein, 13 aa, Homo sapiens
  CDR3 for alpha chain variable domain of TCR clone 80616 (TRAV13-1, TRAJ5)
CAASDTGRRALTF

SEQ ID NO: 161232 - protein, 17 aa, Homo sapiens
  CDR3 for beta chain variable domain of TCR clone 80616 (TRBV7-8, TRBJ2-6)
CASSAGTGGAGANVLTF

SEQ ID NO: 161233 - protein, 16 aa, Homo sapiens
  CDR3 for alpha chain variable domain of TCR clone 80617 (TRAV12-2, TRAJ39)
CAVNRGPNNAGNMLTF

SEQ ID NO: 161234 - protein, 15 aa, Homo sapiens
  CDR3 for beta chain variable domain of TCR clone 80617 (TRBV11-2, TRBJ2-2)
CASSSDRVNAGELFF

SEQ ID NO: 161235 - protein, 17 aa, Homo sapiens
  CDR3 for alpha chain variable domain of TCR clone 80618 (TRAV13-1, TRAJ52)
CAASSGAGGTSYGKLTF

SEQ ID NO: 161236 - protein, 17 aa, Homo sapiens
  CDR3 for beta chain variable domain of TCR clone 80618 (TRBV11-2, TRBJ2-6)
CASSQRDIFSGANVLTF

SEQ ID NO: 161237 - protein, 11 aa, Homo sapiens
  CDR3 for alpha chain variable domain of TCR clone 80619 (TRAV1-1, TRAJ20)
CAVFNDYKLSF

SEQ ID NO: 161238 - protein, 18 aa, Homo sapiens
  CDR3 for beta chain variable domain of TCR clone 80619 (TRBV7-9, TRBJ2-7)
CASSLTTSGSRTWYEQYF

SEQ ID NO: 161239 - protein, 14 aa, Homo sapiens
  CDR3 for alpha chain variable domain of TCR clone 80620 (TRAV2, TRAJ37)
CAVDFTSNTGKLIF

SEQ ID NO: 161240 - protein, 15 aa, Homo sapiens
  CDR3 for beta chain variable domain of TCR clone 80620 (TRBV20-1, TRBJ1-1)
CSAIRGVTGNTEAFF

SEQ ID NO: 161241 - protein, 17 aa, Homo sapiens
  CDR3 for alpha chain variable domain of TCR clone 80621 (TRAV3, TRAJ6)
CAVRDGPRAGGSCIPTL

SEQ ID NO: 161242 - protein, 14 aa, Homo sapiens
  CDR3 for beta chain variable domain of TCR clone 80621 (TRBV7-2, TRBJ2-7)
CASSPKTSFYEQYF

SEQ ID NO: 161243 - protein, 14 aa, Homo sapiens
  CDR3 for alpha chain variable domain of TCR clone 80622 (TRAV17, TRAJ37)
CATDGSSNTGQLIF

SEQ ID NO: 161244 - protein, 13 aa, Homo sapiens
  CDR3 for beta chain variable domain of TCR clone 80622 (TRBV11-2, TRBJ2-1)
CASSLDLVNEQFF

SEQ ID NO: 161245 - protein, 17 aa, Homo sapiens
  CDR3 for alpha chain variable domain of TCR clone 80623 (TRAV21, TRAJ52)
CAVGVSAGGTSYGKLTF

SEQ ID NO: 161246 - protein, 13 aa, Homo sapiens
  CDR3 for beta chain variable domain of TCR clone 80623 (TRBV5-1, TRBJ1-2)
CASSFQGNYGYTF

SEQ ID NO: 161247 - protein, 17 aa, Homo sapiens
  CDR3 for alpha chain variable domain of TCR clone 80624 (TRAV3, TRAJ38)
CAVRDCLNAGNNRKLIW

SEQ ID NO: 161248 - protein, 15 aa, Homo sapiens
  CDR3 for beta chain variable domain of TCR clone 80624 (TRBV7-9, TRBJ1-4)
CASSRTGGFNEKLFF

SEQ ID NO: 161249 - protein, 15 aa, Homo sapiens
  CDR3 for alpha chain variable domain of TCR clone 80625 (TRAV12-1, TRAJ44)
CLVFVNTGTASKLTF

SEQ ID NO: 161250 - protein, 17 aa, Homo sapiens
  CDR3 for beta chain variable domain of TCR clone 80625 (TRBV7-8, TRBJ2-6)
CASSAGTGGAGANVLTF

SEQ ID NO: 161251 - protein, 15 aa, Homo sapiens
  CDR3 for alpha chain variable domain of TCR clone 80626 (TRAV12-2, TRAJ53)
CAVNGGGGSNYKLTF

SEQ ID NO: 161252 - protein, 14 aa, Homo sapiens
  CDR3 for beta chain variable domain of TCR clone 80626 (TRBV11-2, TRBJ2-5)
CASSRTGGVETQYF

SEQ ID NO: 161253 - protein, 15 aa, Homo sapiens
  CDR3 for alpha chain variable domain of TCR clone 80627 (TRAV2, TRAJ9)
CAVEDRGTGGFKTIF

SEQ ID NO: 161254 - protein, 14 aa, Homo sapiens
  CDR3 for beta chain variable domain of TCR clone 80627 (TRBV7-6, TRBJ2-3)
CASSLGTVTDTQYF

SEQ ID NO: 161255 - protein, 14 aa, Homo sapiens
  CDR3 for alpha chain variable domain of TCR clone 80628 (TRAV30, TRAJ26)
CGTEIVSYGQNFVF

SEQ ID NO: 161256 - protein, 13 aa, Homo sapiens
  CDR3 for beta chain variable domain of TCR clone 80628 (TRBV19, TRBJ1-3)
CASRLSLGNTIYF

SEQ ID NO: 161257 - protein, 14 aa, Homo sapiens
  CDR3 for alpha chain variable domain of TCR clone 80629 (TRAV1-2, TRAJ16)
CAVNRFSDGQKLLF

SEQ ID NO: 161258 - protein, 14 aa, Homo sapiens
  CDR3 for beta chain variable domain of TCR clone 80629 (TRBV2, TRBJ2-1)
CASRTGSSYNEQFF

SEQ ID NO: 161259 - protein, 14 aa, Homo sapiens
  CDR3 for alpha chain variable domain of TCR clone 80630 (TRAV12-3, TRAJ9)
CAMSPNTGCFKTIF

SEQ ID NO: 161260 - protein, 12 aa, Homo sapiens
  CDR3 for beta chain variable domain of TCR clone 80630 (TRBV19, TRBJ1-5)
CASSIAQQPQHF

SEQ ID NO: 161261 - protein, 11 aa, Homo sapiens
  CDR3 for alpha chain variable domain of TCR clone 80631 (TRAV12-1, TRAJ43)
CVEYDNNDMRF

SEQ ID NO: 161262 - protein, 12 aa, Homo sapiens
  CDR3 for beta chain variable domain of TCR clone 80631 (TRBV11-2, TRBJ2-2)
CASSLGGGELFF

SEQ ID NO: 161263 - protein, 14 aa, Homo sapiens
  CDR3 for alpha chain variable domain of TCR clone 80632 (TRAV1-2, TRAJ16)
CAVNRFSDGKKLLF

SEQ ID NO: 161264 - protein, 14 aa, Homo sapiens
  CDR3 for beta chain variable domain of TCR clone 80632 (TRBV7-9, TRBJ2-3)
CASSLEDGTDTQYF

SEQ ID NO: 161265 - protein, 14 aa, Homo sapiens
  CDR3 for alpha chain variable domain of TCR clone 80633 (TRAV3, TRAJ5)
SAVRSDTGRRALTF

SEQ ID NO: 161266 - protein, 14 aa, Homo sapiens
  CDR3 for beta chain variable domain of TCR clone 80633 (TRBV7-2, TRBJ2-3)
CASSFVMPTDTQYF

SEQ ID NO: 161267 - protein, 16 aa, Homo sapiens
  CDR3 for alpha chain variable domain of TCR clone 80634 (TRAV30, TRAJ24)
CGTEIVDADSWGKFQF

SEQ ID NO: 161268 - protein, 17 aa, Homo sapiens
  CDR3 for beta chain variable domain of TCR clone 80634 (TRBV11-3, TRBJ2-5)
CASSLPGVRGGKETQYF

SEQ ID NO: 161269 - protein, 14 aa, Homo sapiens
  CDR3 for alpha chain variable domain of TCR clone 80635 (TRAV27, TRAJ22)
CAGVVPGSARQLTF

SEQ ID NO: 161270 - protein, 13 aa, Homo sapiens
  CDR3 for beta chain variable domain of TCR clone 80635 (TRBV7-9, TRBJ1-2)
CASSLKQNYGYTF

SEQ ID NO: 161271 - protein, 13 aa, Homo sapiens
  CDR3 for alpha chain variable domain of TCR clone 80636 (TRAV27, TRAJ57)
CRSAQGGSEKLVF

SEQ ID NO: 161272 - protein, 12 aa, Homo sapiens
  CDR3 for beta chain variable domain of TCR clone 80636 (TRBV11-2, TRBJ2-2)
CASSLGGGELFF

SEQ ID NO: 161273 - protein, 12 aa, Homo sapiens
  CDR3 for alpha chain variable domain of TCR clone 80637 (TRAV21, TRAJ23)
CAAMLQGGKLIF

SEQ ID NO: 161274 - protein, 14 aa, Homo sapiens
  CDR3 for beta chain variable domain of TCR clone 80637 (TRBV7-9, TRBJ1-4)
CAMTEGEANEKLFF

SEQ ID NO: 161275 - protein, 21 aa, Homo sapiens
  CDR3 for alpha chain variable domain of TCR clone 80638 (TRAV12-1, TRAJ32)
SSVIQPPTSMNYGGATNKLIF

SEQ ID NO: 161276 - protein, 15 aa, Homo sapiens
  CDR3 for beta chain variable domain of TCR clone 80638 (TRBV7-9, TRBJ2-2)
CVSGPLDTFPGELFF

SEQ ID NO: 161277 - protein, 19 aa, Homo sapiens
  CDR3 for alpha chain variable domain of TCR clone 80639 (TRAV26-1, TRAJ52)
CIVRAHRSAGGTSYGKLTF

SEQ ID NO: 161278 - protein, 15 aa, Homo sapiens
  CDR3 for beta chain variable domain of TCR clone 80639 (TRBV12-4, TRBJ2-5)
CASSPPTGLQETQYF

SEQ ID NO: 161279 - protein, 14 aa, Homo sapiens
  CDR3 for alpha chain variable domain of TCR clone 80640 (TRAV12-3, TRAJ10)
SHLPLTGGGNKLTF

SEQ ID NO: 161280 - protein, 16 aa, Homo sapiens
  CDR3 for beta chain variable domain of TCR clone 80640 (TRBV5-1, TRBJ2-2)
CASSSYREGDTGELFF

SEQ ID NO: 161281 - protein, 15 aa, Homo sapiens
  CDR3 for alpha chain variable domain of TCR clone 80641 (TRAV27, TRAJ38)
CAVRRNAGNNRKLIW

SEQ ID NO: 161282 - protein, 12 aa, Homo sapiens
  CDR3 for beta chain variable domain of TCR clone 80641 (TRBV11-2, TRBJ2-2)
CASSLGGGELFF

SEQ ID NO: 161283 - protein, 14 aa, Homo sapiens
  CDR3 for alpha chain variable domain of TCR clone 80642 (TRAV13-1, TRAJ44)
CAAKATGAASKLTF

SEQ ID NO: 161284 - protein, 13 aa, Homo sapiens
  CDR3 for beta chain variable domain of TCR clone 80642 (TRBV5-5, TRBJ1-2)
CASSFWRGEDYTF

SEQ ID NO: 161285 - protein, 18 aa, Homo sapiens
  CDR3 for alpha chain variable domain of TCR clone 80643 (TRAV12-3, TRAJ52)
CAMSVGGAGGTSYGKLTF

SEQ ID NO: 161286 - protein, 14 aa, Homo sapiens
  CDR3 for beta chain variable domain of TCR clone 80643 (TRBV20-1, TRBJ1-1)
CSAQTRIGGTEAFF

SEQ ID NO: 161287 - protein, 19 aa, Homo sapiens
  CDR3 for alpha chain variable domain of TCR clone 80644 (TRAV38-1, TRAJ53)
CAFIKHGLESGGSNYKLTF

SEQ ID NO: 161288 - protein, 13 aa, Homo sapiens
  CDR3 for beta chain variable domain of TCR clone 80644 (TRBV19, TRBJ2-7)
CASSPRQSYEQYF

SEQ ID NO: 161289 - protein, 15 aa, Homo sapiens
  CDR3 for alpha chain variable domain of TCR clone 80645 (TRAV26-1, TRAJ40)
CIVRVTTSGTYKYIF

SEQ ID NO: 161290 - protein, 15 aa, Homo sapiens
  CDR3 for beta chain variable domain of TCR clone 80645 (TRBV20-1, TRBJ2-7)
RSARDRVSGMDEQYF

SEQ ID NO: 161291 - protein, 15 aa, Homo sapiens
  CDR3 for alpha chain variable domain of TCR clone 80646 (TRAV35, TRAJ40)
CAGQLGTSGTYRYIF

SEQ ID NO: 161292 - protein, 14 aa, Homo sapiens
  CDR3 for beta chain variable domain of TCR clone 80646 (TRBV7-3, TRBJ2-1)
CASGLAGGTNEQFF

SEQ ID NO: 161293 - protein, 13 aa, Homo sapiens
  CDR3 for alpha chain variable domain of TCR clone 80647 (TRAV5, TRAJ30)
CAEIANRDDKIIF

SEQ ID NO: 161294 - protein, 14 aa, Homo sapiens
  CDR3 for beta chain variable domain of TCR clone 80647 (TRBV4-1, TRBJ2-2)
CASSRAVNTGELFF

SEQ ID NO: 161295 - protein, 16 aa, Homo sapiens
  CDR3 for alpha chain variable domain of TCR clone 80648 (TRAV3, TRAJ37)
CAVRGKGSGNTGKLIF

SEQ ID NO: 161296 - protein, 16 aa, Homo sapiens
  CDR3 for beta chain variable domain of TCR clone 80648 (TRBV28, TRBJ1-5)
CASSFRGGYSSQPQHF

SEQ ID NO: 161297 - protein, 15 aa, Homo sapiens
  CDR3 for alpha chain variable domain of TCR clone 80649 (TRAV25, TRAJ43)
CAVFMRSGAGTRLTV

SEQ ID NO: 161298 - protein, 12 aa, Homo sapiens
  CDR3 for beta chain variable domain of TCR clone 80649 (TRBV11-2, TRBJ2-3)
CASSYRPDTQYF

SEQ ID NO: 161299 - protein, 12 aa, Homo sapiens
  CDR3 for alpha chain variable domain of TCR clone 80650 (TRAV8-3, TRAJ20)
CAVGASDYKLSF

SEQ ID NO: 161300 - protein, 15 aa, Homo sapiens
  CDR3 for beta chain variable domain of TCR clone 80650 (TRBV11-2, TRBJ2-1)
CASSLGTSGLNEQFF

SEQ ID NO: 161301 - protein, 15 aa, Homo sapiens
  CDR3 for alpha chain variable domain of TCR clone 80651 (TRAV8-3, TRAJ32)
CAVGHYGGATNKLIF

SEQ ID NO: 161302 - protein, 14 aa, Homo sapiens
  CDR3 for beta chain variable domain of TCR clone 80651 (TRBV29-1, TRBJ2-2)
CSVLAETNTGELFF

SEQ ID NO: 161303 - protein, 12 aa, Homo sapiens
  CDR3 for alpha chain variable domain of TCR clone 80652 (TRAV21, TRAJ58)
CAAETSGSRLTF

SEQ ID NO: 161304 - protein, 15 aa, Homo sapiens
  CDR3 for beta chain variable domain of TCR clone 80652 (TRBV20-1, TRBJ2-7)
CSARDPVKGEGEQHF

SEQ ID NO: 161305 - protein, 16 aa, Homo sapiens
  CDR3 for alpha chain variable domain of TCR clone 80653 (TRAV30, TRAJ24)
RGTEIVDADSWGKFKF

SEQ ID NO: 161306 - protein, 14 aa, Homo sapiens
  CDR3 for beta chain variable domain of TCR clone 80653 (TRBV12-5, TRBJ2-5)
CASGSRTHQETQYF

SEQ ID NO: 161307 - protein, 15 aa, Homo sapiens
  CDR3 for alpha chain variable domain of TCR clone 80654 (TRAV12-3, TRAJ11)
CAMSEENSGYSTLPF

SEQ ID NO: 161308 - protein, 16 aa, Homo sapiens
  CDR3 for beta chain variable domain of TCR clone 80654 (TRBV5-1, TRBJ2-7)
CASSLEGLAGLYEQYF

SEQ ID NO: 161309 - protein, 13 aa, Homo sapiens
  CDR3 for alpha chain variable domain of TCR clone 80655 (TRAV13-2, TRAJ48)
CADMDFGNEKLTF

SEQ ID NO: 161310 - protein, 13 aa, Homo sapiens
  CDR3 for beta chain variable domain of TCR clone 80655 (TRBV7-9, TRBJ1-2)
CASSLKQNYGYTF

SEQ ID NO: 161311 - protein, 14 aa, Homo sapiens
  CDR3 for alpha chain variable domain of TCR clone 80656 (TRAV29/DV5, TRAJ36)
CAARRKTGANHLFF

SEQ ID NO: 161312 - protein, 14 aa, Homo sapiens
  CDR3 for beta chain variable domain of TCR clone 80656 (TRBV12-5, TRBJ2-5)
CASGSRTHQETQYF

SEQ ID NO: 161313 - protein, 15 aa, Homo sapiens
  CDR3 for alpha chain variable domain of TCR clone 80657 (TRAV17, TRAJ57)
CATGPSQGGSEKLVF

SEQ ID NO: 161314 - protein, 15 aa, Homo sapiens
  CDR3 for beta chain variable domain of TCR clone 80657 (TRBV2, TRBJ2-3)
CASSDFEKATDTQYF

SEQ ID NO: 161315 - protein, 13 aa, Homo sapiens
  CDR3 for alpha chain variable domain of TCR clone 80658 (TRAV17, TRAJ5)
CALRGTGRRALTF

SEQ ID NO: 161316 - protein, 18 aa, Homo sapiens
  CDR3 for beta chain variable domain of TCR clone 80658 (TRBV11-2, TRBJ2-3)
CASSLGGASRGAPNTQYF

SEQ ID NO: 161317 - protein, 16 aa, Homo sapiens
  CDR3 for alpha chain variable domain of TCR clone 80659 (TRAV8-3, TRAJ48)
CAVGLISNFGDEKLTF

SEQ ID NO: 161318 - protein, 13 aa, Homo sapiens
  CDR3 for beta chain variable domain of TCR clone 80659 (TRBV20-1, TRBJ1-5)
CSASWGRSQPQHF

SEQ ID NO: 161319 - protein, 14 aa, Homo sapiens
  CDR3 for alpha chain variable domain of TCR clone 80660 (TRAV13-1, TRAJ24)
CAASRTDSWGKLQF

SEQ ID NO: 161320 - protein, 12 aa, Homo sapiens
  CDR3 for beta chain variable domain of TCR clone 80660 (TRBV11-2, TRBJ2-2)
CASSLGGGELFF

SEQ ID NO: 161321 - protein, 13 aa, Homo sapiens
  CDR3 for alpha chain variable domain of TCR clone 80661 (TRAV8-3, TRAJ28)
CAVGAVGSYQLTF

SEQ ID NO: 161322 - protein, 15 aa, Homo sapiens
  CDR3 for beta chain variable domain of TCR clone 80661 (TRBV7-9, TRBJ1-5)
CASSQGHQPNQPQHI

SEQ ID NO: 161323 - protein, 15 aa, Homo sapiens
  CDR3 for alpha chain variable domain of TCR clone 80662 (TRAV2, TRAJ24)
CAVVRLTNSWGKLQF

SEQ ID NO: 161324 - protein, 16 aa, Homo sapiens
  CDR3 for beta chain variable domain of TCR clone 80662 (TRBV7-7, TRBJ2-3)
CASSPGTSGSTDTQYF

SEQ ID NO: 161325 - protein, 13 aa, Homo sapiens
  CDR3 for alpha chain variable domain of TCR clone 80663 (TRAV17, TRAJ26)
CATVDNYGQNFVF

SEQ ID NO: 161326 - protein, 16 aa, Homo sapiens
  CDR3 for beta chain variable domain of TCR clone 80663 (TRBV2, TRBJ2-1)
CASSVGGSLSYNDQFF

SEQ ID NO: 161327 - protein, 17 aa, Homo sapiens
  CDR3 for alpha chain variable domain of TCR clone 80664 (TRAV26-2, TRAJ42)
CILRDVGYGGSQGNLIF

SEQ ID NO: 161328 - protein, 16 aa, Homo sapiens
  CDR3 for beta chain variable domain of TCR clone 80664 (TRBV12-4, TRBJ2-7)
CASCLIGGTGTYEQYF

SEQ ID NO: 161329 - protein, 11 aa, Homo sapiens
  CDR3 for alpha chain variable domain of TCR clone 80665 (TRAV23/DV6, TRAJ58)
CAARLLRGETS

SEQ ID NO: 161330 - protein, 13 aa, Homo sapiens
  CDR3 for beta chain variable domain of TCR clone 80665 (TRBV4-2, TRBJ1-1)
CASSQAGNTEAFF

SEQ ID NO: 161331 - protein, 13 aa, Homo sapiens
  CDR3 for alpha chain variable domain of TCR clone 80666 (TRAV8-3, TRAJ43)
CAVGPDNNNDMRF

SEQ ID NO: 161332 - protein, 14 aa, Homo sapiens
  CDR3 for beta chain variable domain of TCR clone 80666 (TRBV19, TRBJ2-1)
CASPTFALSGEQFF

SEQ ID NO: 161333 - protein, 13 aa, Homo sapiens
  CDR3 for alpha chain variable domain of TCR clone 80667 (TRAV12-3, TRAJ33)
CAMRAGSNYQLIW

SEQ ID NO: 161334 - protein, 12 aa, Homo sapiens
  CDR3 for beta chain variable domain of TCR clone 80667 (TRBV11-2, TRBJ2-2)
CASSLGGGELFF

SEQ ID NO: 161335 - protein, 15 aa, Homo sapiens
  CDR3 for alpha chain variable domain of TCR clone 80668 (TRAV23/DV6, TRAJ37)
CAAGGGSSNTGKLIF

SEQ ID NO: 161336 - protein, 17 aa, Homo sapiens
  CDR3 for beta chain variable domain of TCR clone 80668 (TRBV20-1, TRBJ2-7)
CSATRAGGVAGVEEQYF

SEQ ID NO: 161337 - protein, 16 aa, Homo sapiens
  CDR3 for alpha chain variable domain of TCR clone 80669 (TRAV3, TRAJ10)
CAVRDMRAGGGNKLTF

SEQ ID NO: 161338 - protein, 13 aa, Homo sapiens
  CDR3 for beta chain variable domain of TCR clone 80669 (TRBV6-3, TRBJ2-3)
CASEGELKDTQYF

SEQ ID NO: 161339 - protein, 14 aa, Homo sapiens
  CDR3 for alpha chain variable domain of TCR clone 80670 (TRAV8-4, TRAJ9)
CAVRINTGGFKTIF

SEQ ID NO: 161340 - protein, 15 aa, Homo sapiens
  CDR3 for beta chain variable domain of TCR clone 80670 (TRBV10-2, TRBJ2-6)
CASSEQGTGANDLSF

SEQ ID NO: 161341 - protein, 12 aa, Homo sapiens
  CDR3 for alpha chain variable domain of TCR clone 80671 (TRAV9-2, TRAJ20)
CALSEGDYKPSF

SEQ ID NO: 161342 - protein, 13 aa, Homo sapiens
  CDR3 for beta chain variable domain of TCR clone 80671 (TRBV11-2, TRBJ1-6)
CASSLAGVSPLHF

SEQ ID NO: 161343 - protein, 14 aa, Homo sapiens
  CDR3 for alpha chain variable domain of TCR clone 80672 (TRAV8-4, TRAJ13)
CAVTLSGGYQKVTF

SEQ ID NO: 161344 - protein, 16 aa, Homo sapiens
  CDR3 for beta chain variable domain of TCR clone 80672 (TRBV4-2, TRBJ1-1)
CASSQAGFGMNTEAFF

SEQ ID NO: 161345 - protein, 15 aa, Homo sapiens
  CDR3 for alpha chain variable domain of TCR clone 80673 (TRAV25, TRAJ53)
CAATGGGGSNYKLTF

SEQ ID NO: 161346 - protein, 14 aa, Homo sapiens
  CDR3 for beta chain variable domain of TCR clone 80673 (TRBV7-2, TRBJ2-7)
CASRSQGAAYEQYF

SEQ ID NO: 161347 - protein, 11 aa, Homo sapiens
  CDR3 for alpha chain variable domain of TCR clone 80674 (TRAV12-1, TRAJ43)
CVEYDNNDMRF

SEQ ID NO: 161348 - protein, 15 aa, Homo sapiens
  CDR3 for beta chain variable domain of TCR clone 80674 (TRBV18, TRBJ2-5)
RASSPRASEAETQYF

SEQ ID NO: 161349 - protein, 15 aa, Homo sapiens
  CDR3 for alpha chain variable domain of TCR clone 80675 (TRAV38-1, TRAJ37)
CAFIHGSGNTGKLIF

SEQ ID NO: 161350 - protein, 13 aa, Homo sapiens
  CDR3 for beta chain variable domain of TCR clone 80675 (TRBV4-1, TRBJ2-2)
CASSQENTGELFF

SEQ ID NO: 161351 - protein, 12 aa, Homo sapiens
  CDR3 for alpha chain variable domain of TCR clone 80676 (TRAV8-4, TRAJ22)
CVAPGSARQLTF

SEQ ID NO: 161352 - protein, 14 aa, Homo sapiens
  CDR3 for beta chain variable domain of TCR clone 80676 (TRBV13, TRBJ2-1)
CASSTALSYNEQFF

SEQ ID NO: 161353 - protein, 14 aa, Homo sapiens
  CDR3 for alpha chain variable domain of TCR clone 80677 (TRAV12-2, TRAJ17)
CAVLFKAAGNKLTF

SEQ ID NO: 161354 - protein, 15 aa, Homo sapiens
  CDR3 for beta chain variable domain of TCR clone 80677 (TRBV11-3, TRBJ2-7)
CASSPGPASSYEQYF

SEQ ID NO: 161355 - protein, 14 aa, Homo sapiens
  CDR3 for alpha chain variable domain of TCR clone 80678 (TRAV8-3, TRAJ6)
CAVGASGGSYIPTF

SEQ ID NO: 161356 - protein, 21 aa, Homo sapiens
  CDR3 for beta chain variable domain of TCR clone 80678 (TRBV18, TRBJ2-2)
GSLFLSQLTIGSLAEHRGAVF

SEQ ID NO: 161357 - protein, 12 aa, Homo sapiens
  CDR3 for alpha chain variable domain of TCR clone 80679 (TRAV27, TRAJ30)
CAETIGDDKIIF

SEQ ID NO: 161358 - protein, 13 aa, Homo sapiens
  CDR3 for beta chain variable domain of TCR clone 80679 (TRBV7-3, TRBJ2-5)
CASSFRGSQTQYF

SEQ ID NO: 161359 - protein, 14 aa, Homo sapiens
  CDR3 for alpha chain variable domain of TCR clone 80680 (TRAV27, TRAJ23)
CAGLSYNQGGKLIF

SEQ ID NO: 161360 - protein, 15 aa, Homo sapiens
  CDR3 for beta chain variable domain of TCR clone 80680 (TRBV20-1, TRBJ2-7)
CSARDRVSGMDEQYL

SEQ ID NO: 161361 - protein, 14 aa, Homo sapiens
  CDR3 for alpha chain variable domain of TCR clone 80681 (TRAV26-1, TRAJ39)
CIVRVGNAGNMLTF

SEQ ID NO: 161362 - protein, 14 aa, Homo sapiens
  CDR3 for beta chain variable domain of TCR clone 80681 (TRBV12-4, TRBJ2-5)
CASSLWQKQETQYF

SEQ ID NO: 161363 - protein, 16 aa, Homo sapiens
  CDR3 for alpha chain variable domain of TCR clone 80682 (TRAV12-3, TRAJ53)
CAMSPGSGGGNYKLTF

SEQ ID NO: 161364 - protein, 15 aa, Homo sapiens
  CDR3 for beta chain variable domain of TCR clone 80682 (TRBV7-2, TRBJ2-1)
CASSSGLAGGNEQFF

SEQ ID NO: 161365 - protein, 14 aa, Homo sapiens
  CDR3 for alpha chain variable domain of TCR clone 80683 (TRAV38-2/DV8, TRAJ23)
CAYRKPNQGGKLIF

SEQ ID NO: 161366 - protein, 19 aa, Homo sapiens
  CDR3 for beta chain variable domain of TCR clone 80683 (TRBV6-3, TRBJ1-2)
CASSYSKGRTGPPNYGYTF

SEQ ID NO: 161367 - protein, 14 aa, Homo sapiens
  CDR3 for alpha chain variable domain of TCR clone 80684 (TRAV12-2, TRAJ45)
CAVYSGGGADGLTF

SEQ ID NO: 161368 - protein, 14 aa, Homo sapiens
  CDR3 for beta chain variable domain of TCR clone 80684 (TRBV6-5, TRBJ1-2)
CASTRGGGSDGCTF

SEQ ID NO: 161369 - protein, 11 aa, Homo sapiens
  CDR3 for alpha chain variable domain of TCR clone 80685 (TRAV2, TRAJ13)
CASGGYQKVTF

SEQ ID NO: 161370 - protein, 15 aa, Homo sapiens
  CDR3 for beta chain variable domain of TCR clone 80685 (TRBV19, TRBJ2-3)
CASSIEAGEADTQYF

SEQ ID NO: 161371 - protein, 14 aa, Homo sapiens
  CDR3 for alpha chain variable domain of TCR clone 80686 (TRAV8-6, TRAJ53)
CAVTSGGSNYKLTF

SEQ ID NO: 161372 - protein, 11 aa, Homo sapiens
  CDR3 for beta chain variable domain of TCR clone 80686 (TRBV24-1, TRBJ2-3)
CTTSDLDTQYF

SEQ ID NO: 161373 - protein, 13 aa, Homo sapiens
  CDR3 for alpha chain variable domain of TCR clone 80687 (TRAV13-1, TRAJ21)
CAASIYNFNKFYF

SEQ ID NO: 161374 - protein, 21 aa, Homo sapiens
  CDR3 for beta chain variable domain of TCR clone 80687 (TRBV27, TRBJ1-4)
CASSLMGDEKLFWQWNPALCL

SEQ ID NO: 161375 - protein, 14 aa, Homo sapiens
  CDR3 for alpha chain variable domain of TCR clone 80688 (TRAV23/DV6, TRAJ4)
CAANLSGGYNKLIF

SEQ ID NO: 161376 - protein, 17 aa, Homo sapiens
  CDR3 for beta chain variable domain of TCR clone 80688 (TRBV4-1, TRBJ1-3)
GASSPQRGIRFGNTIYF

SEQ ID NO: 161377 - protein, 11 aa, Homo sapiens
  CDR3 for alpha chain variable domain of TCR clone 80689 (TRAV12-2, TRAJ54)
CAVEGAQKLVF

SEQ ID NO: 161378 - protein, 17 aa, Homo sapiens
  CDR3 for beta chain variable domain of TCR clone 80689 (TRBV18, TRBJ1-3)
CASSPYPTGPSGSTIYF

SEQ ID NO: 161379 - protein, 14 aa, Homo sapiens
  CDR3 for alpha chain variable domain of TCR clone 80690 (TRAV1-2, TRAJ8)
YAVREDTGFQKLVF

SEQ ID NO: 161380 - protein, 18 aa, Homo sapiens
  CDR3 for beta chain variable domain of TCR clone 80690 (TRBV11-2, TRBJ2-3)
CASSLGGASRGAPNTQYF

SEQ ID NO: 161381 - protein, 13 aa, Homo sapiens
  CDR3 for alpha chain variable domain of TCR clone 80691 (TRAV2, TRAJ15)
CAVASQAGTALIF

SEQ ID NO: 161382 - protein, 17 aa, Homo sapiens
  CDR3 for beta chain variable domain of TCR clone 80691 (TRBV15, TRBJ1-4)
CATSRYGTGDPNEKLFF

SEQ ID NO: 161383 - protein, 13 aa, Homo sapiens
  CDR3 for alpha chain variable domain of TCR clone 80692 (TRAV1-2, TRAJ12)
CAVSMDCSYKLIF

SEQ ID NO: 161384 - protein, 14 aa, Homo sapiens
  CDR3 for beta chain variable domain of TCR clone 80692 (TRBV19, TRBJ2-1)
CASSSGRDYNEQFF

SEQ ID NO: 161385 - protein, 11 aa, Homo sapiens
  CDR3 for alpha chain variable domain of TCR clone 80693 (TRAV2, TRAJ13)
CASGGYQKVTF

SEQ ID NO: 161386 - protein, 15 aa, Homo sapiens
  CDR3 for beta chain variable domain of TCR clone 80693 (TRBV7-2, TRBJ2-2)
CASRRPGQNTGELFF

SEQ ID NO: 161387 - protein, 14 aa, Homo sapiens
  CDR3 for alpha chain variable domain of TCR clone 80694 (TRAV12-2, TRAJ33)
CAVKRARSNYQLIW

SEQ ID NO: 161388 - protein, 12 aa, Homo sapiens
  CDR3 for beta chain variable domain of TCR clone 80694 (TRBV24-1, TRBJ2-3)
CATSDSTDRQYF

SEQ ID NO: 161389 - protein, 13 aa, Homo sapiens
  CDR3 for alpha chain variable domain of TCR clone 80695 (TRAV20, TRAJ21)
CSVEGYNFNKFYF

SEQ ID NO: 161390 - protein, 14 aa, Homo sapiens
  CDR3 for beta chain variable domain of TCR clone 80695 (TRBV3-1, TRBJ2-5)
CASSQGPDQETQYF

SEQ ID NO: 161391 - protein, 14 aa, Homo sapiens
  CDR3 for alpha chain variable domain of TCR clone 80696 (TRAV13-1, TRAJ15)
CAASTNQAGTALIF

SEQ ID NO: 161392 - protein, 11 aa, Homo sapiens
  CDR3 for beta chain variable domain of TCR clone 80696 (TRBV7-2, TRBJ2-1)
CASSLRDNEFL

SEQ ID NO: 161393 - protein, 16 aa, Homo sapiens
  CDR3 for alpha chain variable domain of TCR clone 80697 (TRAV12-2, TRAJ32)
CAVNLGQGVATNKLIF

SEQ ID NO: 161394 - protein, 15 aa, Homo sapiens
  CDR3 for beta chain variable domain of TCR clone 80697 (TRBV20-1, TRBJ2-7)
CSARGPLAGGREQYF

SEQ ID NO: 161395 - protein, 12 aa, Homo sapiens
  CDR3 for alpha chain variable domain of TCR clone 80698 (TRAV13-1, TRAJ49)
CAASPMGNQFYF

SEQ ID NO: 161396 - protein, 17 aa, Homo sapiens
  CDR3 for beta chain variable domain of TCR clone 80698 (TRBV11-2, TRBJ2-1)
CASSLYPPGVEYSEQFF

SEQ ID NO: 161397 - protein, 16 aa, Homo sapiens
  CDR3 for alpha chain variable domain of TCR clone 80699 (TRAV3, TRAJ32)
CAVRENYGGATNKPIF

SEQ ID NO: 161398 - protein, 12 aa, Homo sapiens
  CDR3 for beta chain variable domain of TCR clone 80699 (TRBV20-1, TRBJ1-2)
CSVTPEGYGYTF

SEQ ID NO: 161399 - protein, 13 aa, Homo sapiens
  CDR3 for alpha chain variable domain of TCR clone 80700 (TRAV21, TRAJ15)
CAVSNQAGTALIF

SEQ ID NO: 161400 - protein, 14 aa, Homo sapiens
  CDR3 for beta chain variable domain of TCR clone 80700 (TRBV27, TRBJ2-2)
CASSLGAATGELFF

SEQ ID NO: 161401 - protein, 13 aa, Homo sapiens
  CDR3 for alpha chain variable domain of TCR clone 80701 (TRAV2, TRAJ40)
CAVVTSGTYKYIF

SEQ ID NO: 161402 - protein, 14 aa, Homo sapiens
  CDR3 for beta chain variable domain of TCR clone 80701 (TRBV19, TRBJ2-3)
CASSAPMGTDTQYF

SEQ ID NO: 161403 - protein, 12 aa, Homo sapiens
  CDR3 for alpha chain variable domain of TCR clone 80702 (TRAV1-1, TRAJ43)
CAPRVSSNDMRF

SEQ ID NO: 161404 - protein, 15 aa, Homo sapiens
  CDR3 for beta chain variable domain of TCR clone 80702 (TRBV5-1, TRBJ2-7)
CASSLGDFTTCEQYF

SEQ ID NO: 161405 - protein, 14 aa, Homo sapiens
  CDR3 for alpha chain variable domain of TCR clone 80703 (TRAV12-2, TRAJ13)
CAVKKTGGYQKVTF

SEQ ID NO: 161406 - protein, 17 aa, Homo sapiens
  CDR3 for beta chain variable domain of TCR clone 80703 (TRBV19, TRBJ2-6)
CASSTGQVFSGANVLTF

SEQ ID NO: 161407 - protein, 17 aa, Homo sapiens
  CDR3 for alpha chain variable domain of TCR clone 80704 (TRAV13-1, TRAJ31)
CAPRDRLMFGDGTQLVV

SEQ ID NO: 161408 - protein, 12 aa, Homo sapiens
  CDR3 for beta chain variable domain of TCR clone 80704 (TRBV7-9, TRBJ2-7)
CSSSLEGYEQYF

SEQ ID NO: 161409 - protein, 15 aa, Homo sapiens
  CDR3 for alpha chain variable domain of TCR clone 80705 (TRAV26-1, TRAJ44)
CIVRANTGTASKLTF

SEQ ID NO: 161410 - protein, 16 aa, Homo sapiens
  CDR3 for beta chain variable domain of TCR clone 80705 (TRBV7-7, TRBJ2-1)
CASSLASGTSDNEQFF

SEQ ID NO: 161411 - protein, 15 aa, Homo sapiens
  CDR3 for alpha chain variable domain of TCR clone 80706 (TRAV3, TRAJ5)
CAVRGRKTGRRALTF

SEQ ID NO: 161412 - protein, 15 aa, Homo sapiens
  CDR3 for beta chain variable domain of TCR clone 80706 (TRBV7-9, TRBJ2-2)
CASGPLDTFPGELFF

SEQ ID NO: 161413 - protein, 14 aa, Homo sapiens
  CDR3 for alpha chain variable domain of TCR clone 80707 (TRAV8-4, TRAJ48)
CAVSETFGNEKLNF

SEQ ID NO: 161414 - protein, 14 aa, Homo sapiens
  CDR3 for beta chain variable domain of TCR clone 80707 (TRBV13, TRBJ2-7)
CASSLKGASYEQYF

SEQ ID NO: 161415 - protein, 15 aa, Homo sapiens
  CDR3 for alpha chain variable domain of TCR clone 80708 (TRAV17, TRAJ16)
CATALRFPDGQKLLF

SEQ ID NO: 161416 - protein, 15 aa, Homo sapiens
  CDR3 for beta chain variable domain of TCR clone 80708 (TRBV13, TRBJ1-5)
CASSFGQGGVQPQHF

SEQ ID NO: 161417 - protein, 14 aa, Homo sapiens
  CDR3 for alpha chain variable domain of TCR clone 80709 (TRAV4, TRAJ17)
CIVGDMAAGNKLTF

SEQ ID NO: 161418 - protein, 13 aa, Homo sapiens
  CDR3 for beta chain variable domain of TCR clone 80709 (TRBV18, TRBJ2-7)
CASQSGGGYEQYF

SEQ ID NO: 161419 - protein, 13 aa, Homo sapiens
  CDR3 for alpha chain variable domain of TCR clone 80710 (TRAV36/DV7, TRAJ49)
CAVEANTGNQCYF

SEQ ID NO: 161420 - protein, 13 aa, Homo sapiens
  CDR3 for beta chain variable domain of TCR clone 80710 (TRBV10-3, TRBJ2-7)
CASKLAVNYEQYF

SEQ ID NO: 161421 - protein, 14 aa, Homo sapiens
  CDR3 for alpha chain variable domain of TCR clone 80711 (TRAV1-2, TRAJ8)
CAVREDTGFQKLVF

SEQ ID NO: 161422 - protein, 19 aa, Homo sapiens
  CDR3 for beta chain variable domain of TCR clone 80711 (TRBV28, TRBJ2-1)
CASSFSTRGSGRTRYEQFF

SEQ ID NO: 161423 - protein, 11 aa, Homo sapiens
  CDR3 for alpha chain variable domain of TCR clone 80712 (TRAV1-1, TRAJ23)
CAVRQGGKLIF

SEQ ID NO: 161424 - protein, 13 aa, Homo sapiens
  CDR3 for beta chain variable domain of TCR clone 80712 (TRBV7-2, TRBJ2-2)
CASSLAVTGELFF

SEQ ID NO: 161425 - protein, 19 aa, Homo sapiens
  CDR3 for alpha chain variable domain of TCR clone 80713 (TRAV26-1, TRAJ52)
CIVRAHRNAGDTSYGKLTF

SEQ ID NO: 161426 - protein, 15 aa, Homo sapiens
  CDR3 for beta chain variable domain of TCR clone 80713 (TRBV29-1, TRBJ2-1)
CSGRDRKSSYNEQFF

SEQ ID NO: 161427 - protein, 11 aa, Homo sapiens
  CDR3 for alpha chain variable domain of TCR clone 80714 (TRAV12-1, TRAJ8)
CVVTGFQKLVF

SEQ ID NO: 161428 - protein, 16 aa, Homo sapiens
  CDR3 for beta chain variable domain of TCR clone 80714 (TRBV19, TRBJ2-3)
CASSPGAASRTDTQYF

SEQ ID NO: 161429 - protein, 15 aa, Homo sapiens
  CDR3 for alpha chain variable domain of TCR clone 80715 (TRAV21, TRAJ32)
CAVNSYGGATNKPIF

SEQ ID NO: 161430 - protein, 18 aa, Homo sapiens
  CDR3 for beta chain variable domain of TCR clone 80715 (TRBV7-9, TRBJ2-1)
CASSTGLAEGSSYNEQFF

SEQ ID NO: 161431 - protein, 14 aa, Homo sapiens
  CDR3 for alpha chain variable domain of TCR clone 80716 (TRAV8-3, TRAJ4)
CAVGAAGGYNKLIF

SEQ ID NO: 161432 - protein, 13 aa, Homo sapiens
  CDR3 for beta chain variable domain of TCR clone 80716 (TRBV11-1, TRBJ2-1)
CASRTLGVGEQFF

SEQ ID NO: 161433 - protein, 15 aa, Homo sapiens
  CDR3 for alpha chain variable domain of TCR clone 80717 (TRAV12-2, TRAJ43)
CALDMRFGAGTRLTV

SEQ ID NO: 161434 - protein, 17 aa, Homo sapiens
  CDR3 for beta chain variable domain of TCR clone 80717 (TRBV13, TRBJ2-3)
CASSLSRVAGGRNTQYF

SEQ ID NO: 161435 - protein, 14 aa, Homo sapiens
  CDR3 for alpha chain variable domain of TCR clone 80718 (TRAV12-2, TRAJ17)
CAALFKAAGNKLTF

SEQ ID NO: 161436 - protein, 11 aa, Homo sapiens
  CDR3 for beta chain variable domain of TCR clone 80718 (TRBV7-8, TRBJ2-7)
CASSLSLEQYF

SEQ ID NO: 161437 - protein, 16 aa, Homo sapiens
  CDR3 for alpha chain variable domain of TCR clone 80719 (TRAV3, TRAJ10)
CAVRDMRAGGGNKLTF

SEQ ID NO: 161438 - protein, 19 aa, Homo sapiens
  CDR3 for beta chain variable domain of TCR clone 80719 (TRBV6-3, TRBJ1-2)
CASSYSKGRTGPPNYGYTL

SEQ ID NO: 161439 - protein, 15 aa, Homo sapiens
  CDR3 for alpha chain variable domain of TCR clone 80720 (TRAV21, TRAJ40)
CAVRPQTSGTYKYIF

SEQ ID NO: 161440 - protein, 15 aa, Homo sapiens
  CDR3 for beta chain variable domain of TCR clone 80720 (TRBV5-7, TRBJ1-5)
CASSYGKLWDQPQHF

SEQ ID NO: 161441 - protein, 17 aa, Homo sapiens
  CDR3 for alpha chain variable domain of TCR clone 80721 (TRAV3, TRAJ6)
CAVRDGPRSGGSYIPTF

SEQ ID NO: 161442 - protein, 13 aa, Homo sapiens
  CDR3 for beta chain variable domain of TCR clone 80721 (TRBV20-1, TRBJ1-6)
CSAPLGVGSPLHF

SEQ ID NO: 161443 - protein, 13 aa, Homo sapiens
  CDR3 for alpha chain variable domain of TCR clone 80722 (TRAV26-1, TRAJ29)
CIVRRSGNTPLVF

SEQ ID NO: 161444 - protein, 16 aa, Homo sapiens
  CDR3 for beta chain variable domain of TCR clone 80722 (TRBV11-2, TRBJ2-7)
CASSLAPIGVNYEQYF

SEQ ID NO: 161445 - protein, 15 aa, Homo sapiens
  CDR3 for alpha chain variable domain of TCR clone 80723 (TRAV21, TRAJ53)
CATLNSGGSNYKLTF

SEQ ID NO: 161446 - protein, 16 aa, Homo sapiens
  CDR3 for beta chain variable domain of TCR clone 80723 (TRBV20-1, TRBJ1-2)
CSASMGQGVANYGYTV

SEQ ID NO: 161447 - protein, 14 aa, Homo sapiens
  CDR3 for alpha chain variable domain of TCR clone 80724 (TRAV12-2, TRAJ29)
CAVRRNSGNTPLVF

SEQ ID NO: 161448 - protein, 16 aa, Homo sapiens
  CDR3 for beta chain variable domain of TCR clone 80724 (TRBV27, TRBJ2-2)
CASSFRGLVRTGELFF

SEQ ID NO: 161449 - protein, 12 aa, Homo sapiens
  CDR3 for alpha chain variable domain of TCR clone 80725 (TRAV12-3, TRAJ17)
CAMTLTGNKPTF

SEQ ID NO: 161450 - protein, 15 aa, Homo sapiens
  CDR3 for beta chain variable domain of TCR clone 80725 (TRBV10-2, TRBJ2-6)
CASSEQGTGANVLTF

SEQ ID NO: 161451 - protein, 13 aa, Homo sapiens
  CDR3 for alpha chain variable domain of TCR clone 80726 (TRAV20, TRAJ21)
CAVEGYNFNKFYF

SEQ ID NO: 161452 - protein, 11 aa, Homo sapiens
  CDR3 for beta chain variable domain of TCR clone 80726 (TRBV7-8, TRBJ2-7)
CASSLSLEQYF

SEQ ID NO: 161453 - protein, 11 aa, Homo sapiens
  CDR3 for alpha chain variable domain of TCR clone 80727 (TRAV2, TRAJ21)
CAVFNFNKFYF

SEQ ID NO: 161454 - protein, 14 aa, Homo sapiens
  CDR3 for beta chain variable domain of TCR clone 80727 (TRBV15, TRBJ2-3)
CATRSGTSTDTRYF

SEQ ID NO: 161455 - protein, 13 aa, Homo sapiens
  CDR3 for alpha chain variable domain of TCR clone 80728 (TRAV2, TRAJ33)
CAVEDGSNYQLIW

SEQ ID NO: 161456 - protein, 14 aa, Homo sapiens
  CDR3 for beta chain variable domain of TCR clone 80728 (TRBV25-1, TRBJ1-1)
CASTHLGGNTEAFF

SEQ ID NO: 161457 - protein, 13 aa, Homo sapiens
  CDR3 for alpha chain variable domain of TCR clone 80729 (TRAV1-1, TRAJ9)
CAAKNTGGFKTIF

SEQ ID NO: 161458 - protein, 15 aa, Homo sapiens
  CDR3 for beta chain variable domain of TCR clone 80729 (TRBV9, TRBJ1-6)
CASSVAGTGDSPLHF

SEQ ID NO: 161459 - protein, 14 aa, Homo sapiens
  CDR3 for alpha chain variable domain of TCR clone 80730 (TRAV1-2, TRAJ16)
CAVNRFSDGQKLLF

SEQ ID NO: 161460 - protein, 13 aa, Homo sapiens
  CDR3 for beta chain variable domain of TCR clone 80730 (TRBV7-3, TRBJ1-1)
CQQLKGGNTEAFF

SEQ ID NO: 161461 - protein, 11 aa, Homo sapiens
  CDR3 for alpha chain variable domain of TCR clone 80731 (TRAV8-6, TRAJ42)
CAVRGRKPRNS

SEQ ID NO: 161462 - protein, 13 aa, Homo sapiens
  CDR3 for beta chain variable domain of TCR clone 80731 (TRBV7-3, TRBJ1-1)
CASSQDWGAEAFF

SEQ ID NO: 161463 - protein, 11 aa, Homo sapiens
  CDR3 for alpha chain variable domain of TCR clone 80732 (TRAV3, TRAJ21)
CAVGNFNKFYF

SEQ ID NO: 161464 - protein, 12 aa, Homo sapiens
  CDR3 for beta chain variable domain of TCR clone 80732 (TRBV12-5, TRBJ2-5)
CASGQGVETQYF

SEQ ID NO: 161465 - protein, 12 aa, Homo sapiens
  CDR3 for alpha chain variable domain of TCR clone 80733 (TRAV13-1, TRAJ21)
CAAKEGFDKFYF

SEQ ID NO: 161466 - protein, 15 aa, Homo sapiens
  CDR3 for beta chain variable domain of TCR clone 80733 (TRBV20-1, TRBJ2-7)
CSARDRVSGMDEQYF

SEQ ID NO: 161467 - protein, 13 aa, Homo sapiens
  CDR3 for alpha chain variable domain of TCR clone 80734 (TRAV13-1, TRAJ12)
CAASPDSSYKLIF

SEQ ID NO: 161468 - protein, 12 aa, Homo sapiens
  CDR3 for beta chain variable domain of TCR clone 80734 (TRBV11-2, TRBJ2-2)
CASSLGGGELFF

SEQ ID NO: 161469 - protein, 13 aa, Homo sapiens
  CDR3 for alpha chain variable domain of TCR clone 80735 (TRAV27, TRAJ54)
CAGAGQGARKLVF

SEQ ID NO: 161470 - protein, 15 aa, Homo sapiens
  CDR3 for beta chain variable domain of TCR clone 80735 (TRBV18, TRBJ2-6)
CASSPSYAGANVLTF

SEQ ID NO: 161471 - protein, 16 aa, Homo sapiens
  CDR3 for alpha chain variable domain of TCR clone 80736 (TRAV26-1, TRAJ36)
CIVRAIGRSGANNPFF

SEQ ID NO: 161472 - protein, 14 aa, Homo sapiens
  CDR3 for beta chain variable domain of TCR clone 80736 (TRBV25-1, TRBJ2-1)
CASSKTGGYNEQFF

SEQ ID NO: 161473 - protein, 15 aa, Homo sapiens
  CDR3 for alpha chain variable domain of TCR clone 80737 (TRAV38-1, TRAJ45)
CAFMKGGGGADGLTF

SEQ ID NO: 161474 - protein, 13 aa, Homo sapiens
  CDR3 for beta chain variable domain of TCR clone 80737 (TRBV7-9, TRBJ1-2)
CASRLKQNYGYTF

SEQ ID NO: 161475 - protein, 13 aa, Homo sapiens
  CDR3 for alpha chain variable domain of TCR clone 80738 (TRAV35, TRAJ22)
CAGLSGSAMQLTF

SEQ ID NO: 161476 - protein, 16 aa, Homo sapiens
  CDR3 for beta chain variable domain of TCR clone 80738 (TRBV7-9, TRBJ2-1)
CASSLVLTGQGNEQFF

SEQ ID NO: 161477 - protein, 14 aa, Homo sapiens
  CDR3 for alpha chain variable domain of TCR clone 80739 (TRAV12-3, TRAJ42)
CAMNYGGSQGNLIF

SEQ ID NO: 161478 - protein, 15 aa, Homo sapiens
  CDR3 for beta chain variable domain of TCR clone 80739 (TRBV5-7, TRBJ1-5)
CASSYGKLLDQPQHF

SEQ ID NO: 161479 - protein, 15 aa, Homo sapiens
  CDR3 for alpha chain variable domain of TCR clone 80740 (TRAV35, TRAJ40)
CAGQLGTSGTYKYIF

SEQ ID NO: 161480 - protein, 13 aa, Homo sapiens
  CDR3 for beta chain variable domain of TCR clone 80740 (TRBV7-3, TRBJ1-1)
CASSQDWGAEAFF

SEQ ID NO: 161481 - protein, 11 aa, Homo sapiens
  CDR3 for alpha chain variable domain of TCR clone 80741 (TRAV21, TRAJ11)
CAVNGYSTLTF

SEQ ID NO: 161482 - protein, 15 aa, Homo sapiens
  CDR3 for beta chain variable domain of TCR clone 80741 (TRBV19, TRBJ2-1)
CASSIQATSYNEQFF

SEQ ID NO: 161483 - protein, 11 aa, Homo sapiens
  CDR3 for alpha chain variable domain of TCR clone 80742 (TRAV2, TRAJ23)
CAVETRGKLIF

SEQ ID NO: 161484 - protein, 14 aa, Homo sapiens
  CDR3 for beta chain variable domain of TCR clone 80742 (TRBV2, TRBJ1-1)
CASRSGTMNTEAFF

SEQ ID NO: 161485 - protein, 14 aa, Homo sapiens
  CDR3 for alpha chain variable domain of TCR clone 80743 (TRAV8-3, TRAJ4)
CAVGAAGGYNKLIF

SEQ ID NO: 161486 - protein, 15 aa, Homo sapiens
  CDR3 for beta chain variable domain of TCR clone 80743 (TRBV6-5, TRBJ2-1)
CASSYDGGAGNEQFF

SEQ ID NO: 161487 - protein, 11 aa, Homo sapiens
  CDR3 for alpha chain variable domain of TCR clone 80744 (TRAV13-2, TRAJ23)
CAESPRGKLIF

SEQ ID NO: 161488 - protein, 18 aa, Homo sapiens
  CDR3 for beta chain variable domain of TCR clone 80744 (TRBV6-5, TRBJ1-1)
CASSYSAPGGTGGTEAFF

SEQ ID NO: 161489 - protein, 14 aa, Homo sapiens
  CDR3 for alpha chain variable domain of TCR clone 80745 (TRAV1-2, TRAJ12)
CAVSGTDSSYKLIF

SEQ ID NO: 161490 - protein, 15 aa, Homo sapiens
  CDR3 for beta chain variable domain of TCR clone 80745 (TRBV2, TRBJ2-4)
CASSGTNLAKNMQYF

SEQ ID NO: 161491 - protein, 13 aa, Homo sapiens
  CDR3 for alpha chain variable domain of TCR clone 80746 (TRAV21, TRAJ26)
CAVLDNYGQNFVF

SEQ ID NO: 161492 - protein, 16 aa, Homo sapiens
  CDR3 for beta chain variable domain of TCR clone 80746 (TRBV29-1, TRBJ2-2)
CSVETRASGNTGELLF

SEQ ID NO: 161493 - protein, 10 aa, Homo sapiens
  CDR3 for alpha chain variable domain of TCR clone 80747 (TRAV12-3, TRAJ18)
CAMSAEAQPW

SEQ ID NO: 161494 - protein, 14 aa, Homo sapiens
  CDR3 for beta chain variable domain of TCR clone 80747 (TRBV25-1, TRBJ1-1)
CASTHLGGNTEAFF

SEQ ID NO: 161495 - protein, 12 aa, Homo sapiens
  CDR3 for alpha chain variable domain of TCR clone 80748 (TRAV8-3, TRAJ20)
CAVDFNDYKLSF

SEQ ID NO: 161496 - protein, 15 aa, Homo sapiens
  CDR3 for beta chain variable domain of TCR clone 80748 (TRBV20-1, TRBJ2-7)
CSAREGRDSLYEQYF

SEQ ID NO: 161497 - protein, 12 aa, Homo sapiens
  CDR3 for alpha chain variable domain of TCR clone 80749 (TRAV13-2, TRAJ23)
CAERHRGGELIF

SEQ ID NO: 161498 - protein, 14 aa, Homo sapiens
  CDR3 for beta chain variable domain of TCR clone 80749 (TRBV25-1, TRBJ1-1)
CASTHLGGNTEAFF

SEQ ID NO: 161499 - protein, 13 aa, Homo sapiens
  CDR3 for alpha chain variable domain of TCR clone 80750 (TRAV27, TRAJ41)
CAGEGNSGYALNF

SEQ ID NO: 161500 - protein, 14 aa, Homo sapiens
  CDR3 for beta chain variable domain of TCR clone 80750 (TRBV18, TRBJ2-7)
CASSPRGGAYEQYF

SEQ ID NO: 161501 - protein, 11 aa, Homo sapiens
  CDR3 for alpha chain variable domain of TCR clone 80751 (TRAV20, TRAJ23)
CACNQGGKLIF

SEQ ID NO: 161502 - protein, 13 aa, Homo sapiens
  CDR3 for beta chain variable domain of TCR clone 80751 (TRBV7-3, TRBJ1-1)
CASSQDWGAEAFF

SEQ ID NO: 161503 - protein, 14 aa, Homo sapiens
  CDR3 for alpha chain variable domain of TCR clone 80752 (TRAV12-2, TRAJ6)
CAVNVSRKLHTYIL

SEQ ID NO: 161504 - protein, 12 aa, Homo sapiens
  CDR3 for beta chain variable domain of TCR clone 80752 (TRBV29-1, TRBJ2-3)
CSVTGGADTQYF

SEQ ID NO: 161505 - protein, 11 aa, Homo sapiens
  CDR3 for alpha chain variable domain of TCR clone 80753 (TRAV12-1, TRAJ30)
CVVNGQNKIIF

SEQ ID NO: 161506 - protein, 12 aa, Homo sapiens
  CDR3 for beta chain variable domain of TCR clone 80753 (TRBV27, TRBJ2-2)
CASKLFTGELFF

SEQ ID NO: 161507 - protein, 15 aa, Homo sapiens
  CDR3 for alpha chain variable domain of TCR clone 80754 (TRAV34, TRAJ38)
CGADFTPGNNRKLIW

SEQ ID NO: 161508 - protein, 13 aa, Homo sapiens
  CDR3 for beta chain variable domain of TCR clone 80754 (TRBV10-1, TRBJ1-1)
CASQGQTNTEAFF

SEQ ID NO: 161509 - protein, 15 aa, Homo sapiens
  CDR3 for alpha chain variable domain of TCR clone 80755 (TRAV4, TRAJ17)
CLVGDIGAAGNKLKF

SEQ ID NO: 161510 - protein, 14 aa, Homo sapiens
  CDR3 for beta chain variable domain of TCR clone 80755 (TRBV6-3, TRBJ2-7)
CASSYSVRVYEQYF

SEQ ID NO: 161511 - protein, 15 aa, Homo sapiens
  CDR3 for alpha chain variable domain of TCR clone 80756 (TRAV3, TRAJ7)
CAVRDKDNGNNRLAF

SEQ ID NO: 161512 - protein, 19 aa, Homo sapiens
  CDR3 for beta chain variable domain of TCR clone 80756 (TRBV5-8, TRBJ2-3)
CASSFLGTGGSHRTDTQYF

SEQ ID NO: 161513 - protein, 15 aa, Homo sapiens
  CDR3 for alpha chain variable domain of TCR clone 80757 (TRAV27, TRAJ38)
CAARRNAGNNRKLIW

SEQ ID NO: 161514 - protein, 14 aa, Homo sapiens
  CDR3 for beta chain variable domain of TCR clone 80757 (TRBV7-2, TRBJ1-1)
CASSFLTGTTEAFF

SEQ ID NO: 161515 - protein, 17 aa, Homo sapiens
  CDR3 for alpha chain variable domain of TCR clone 80758 (TRAV3, TRAJ6)
CAVRDGPRAGGSYIPTF

SEQ ID NO: 161516 - protein, 15 aa, Homo sapiens
  CDR3 for beta chain variable domain of TCR clone 80758 (TRBV19, TRBJ2-3)
CASRETMGSRNTQYF

SEQ ID NO: 161517 - protein, 16 aa, Homo sapiens
  CDR3 for alpha chain variable domain of TCR clone 80759 (TRAV12-2, TRAJ40)
CAVIRGGTAGTYKYIF

SEQ ID NO: 161518 - protein, 16 aa, Homo sapiens
  CDR3 for beta chain variable domain of TCR clone 80759 (TRBV7-9, TRBJ2-1)
CASSDVAGGSYNEQFF

SEQ ID NO: 161519 - protein, 13 aa, Homo sapiens
  CDR3 for alpha chain variable domain of TCR clone 80760 (TRAV8-3, TRAJ43)
CAVVPYSNNDMRF

SEQ ID NO: 161520 - protein, 13 aa, Homo sapiens
  CDR3 for beta chain variable domain of TCR clone 80760 (TRBV7-2, TRBJ2-2)
CASSSVRAGELFF

SEQ ID NO: 161521 - protein, 12 aa, Homo sapiens
  CDR3 for alpha chain variable domain of TCR clone 80761 (TRAV17, TRAJ30)
CVPERRDDKNIF

SEQ ID NO: 161522 - protein, 14 aa, Homo sapiens
  CDR3 for beta chain variable domain of TCR clone 80761 (TRBV7-7, TRBJ2-2)
CASSRDRSTGELFF

SEQ ID NO: 161523 - protein, 16 aa, Homo sapiens
  CDR3 for alpha chain variable domain of TCR clone 80762 (TRAV36/DV7, TRAJ33)
WRPGNKVQDSNYQLIW

SEQ ID NO: 161524 - protein, 15 aa, Homo sapiens
  CDR3 for beta chain variable domain of TCR clone 80762 (TRBV29-1, TRBJ2-1)
CRVGRHALFYNEQFF

SEQ ID NO: 161525 - protein, 12 aa, Homo sapiens
  CDR3 for alpha chain variable domain of TCR clone 80763 (TRAV13-1, TRAJ53)
CAAGGSNYKLKF

SEQ ID NO: 161526 - protein, 11 aa, Homo sapiens
  CDR3 for beta chain variable domain of TCR clone 80763 (TRBV2, TRBJ1-1)
CASREGTEAFF

SEQ ID NO: 161527 - protein, 14 aa, Homo sapiens
  CDR3 for alpha chain variable domain of TCR clone 80764 (TRAV1-2, TRAJ8)
CAVREDTGFQKFVF

SEQ ID NO: 161528 - protein, 13 aa, Homo sapiens
  CDR3 for beta chain variable domain of TCR clone 80764 (TRBV27, TRBJ1-1)
CASSLSIGAEAFF

SEQ ID NO: 161529 - protein, 16 aa, Homo sapiens
  CDR3 for alpha chain variable domain of TCR clone 80765 (TRAV14/DV4, TRAJ15)
CAMREGPAQAGTALIF

SEQ ID NO: 161530 - protein, 14 aa, Homo sapiens
  CDR3 for beta chain variable domain of TCR clone 80765 (TRBV6-3, TRBJ1-1)
CASRYTGESTEAFF

SEQ ID NO: 161531 - protein, 14 aa, Homo sapiens
  CDR3 for alpha chain variable domain of TCR clone 80766 (TRAV26-1, TRAJ34)
CIVRVAYNADKLIF

SEQ ID NO: 161532 - protein, 15 aa, Homo sapiens
  CDR3 for beta chain variable domain of TCR clone 80766 (TRBV7-9, TRBJ1-4)
CAGSRTGGFNEKLFF

SEQ ID NO: 161533 - protein, 15 aa, Homo sapiens
  CDR3 for alpha chain variable domain of TCR clone 80767 (TRAV38-1, TRAJ37)
CAFIFGSGHTGKLIF

SEQ ID NO: 161534 - protein, 12 aa, Homo sapiens
  CDR3 for beta chain variable domain of TCR clone 80767 (TRBV7-9, TRBJ2-7)
CASSLEGYEQYF

SEQ ID NO: 161535 - protein, 16 aa, Homo sapiens
  CDR3 for alpha chain variable domain of TCR clone 80768 (TRAV30, TRAJ24)
CGTEIVDADSWGKFQF

SEQ ID NO: 161536 - protein, 16 aa, Homo sapiens
  CDR3 for beta chain variable domain of TCR clone 80768 (TRBV10-3, TRBJ2-7)
CAISADFADRPYEQYF

SEQ ID NO: 161537 - protein, 18 aa, Homo sapiens
  CDR3 for alpha chain variable domain of TCR clone 80769 (TRAV21, TRAJ52)
CAVRPSPAGGTSYGKLTF

SEQ ID NO: 161538 - protein, 15 aa, Homo sapiens
  CDR3 for beta chain variable domain of TCR clone 80769 (TRBV4-3, TRBJ2-7)
CASSQGGRGIYEQYF

SEQ ID NO: 161539 - protein, 16 aa, Homo sapiens
  CDR3 for alpha chain variable domain of TCR clone 80770 (TRAV1-2, TRAJ10)
CAVRGVLTGGGNKLTF

SEQ ID NO: 161540 - protein, 15 aa, Homo sapiens
  CDR3 for beta chain variable domain of TCR clone 80770 (TRBV9, TRBJ2-1)
CASSLAGSSYNEQFF

SEQ ID NO: 161541 - protein, 16 aa, Homo sapiens
  CDR3 for alpha chain variable domain of TCR clone 80771 (TRAV8-3, TRAJ44)
CAVGPLNTGTASKLTF

SEQ ID NO: 161542 - protein, 13 aa, Homo sapiens
  CDR3 for beta chain variable domain of TCR clone 80771 (TRBV10-3, TRBJ2-7)
CASKLAVNYEQYF

SEQ ID NO: 161543 - protein, 12 aa, Homo sapiens
  CDR3 for alpha chain variable domain of TCR clone 80772 (TRAV16, TRAJ10)
CYRTGGGNKLTF

SEQ ID NO: 161544 - protein, 15 aa, Homo sapiens
  CDR3 for beta chain variable domain of TCR clone 80772 (TRBV6-3, TRBJ2-7)
CASSSPGTVFYEQYF

SEQ ID NO: 161545 - protein, 14 aa, Homo sapiens
  CDR3 for alpha chain variable domain of TCR clone 80773 (TRAV2, TRAJ37)
CAVDFTSNTGKLIF

SEQ ID NO: 161546 - protein, 14 aa, Homo sapiens
  CDR3 for beta chain variable domain of TCR clone 80773 (TRBV4-1, TRBJ2-2)
CASSQAVNTGELFF

SEQ ID NO: 161547 - protein, 13 aa, Homo sapiens
  CDR3 for alpha chain variable domain of TCR clone 80774 (TRAV17, TRAJ9)
CATDYTGGFKTIF

SEQ ID NO: 161548 - protein, 15 aa, Homo sapiens
  CDR3 for beta chain variable domain of TCR clone 80774 (TRBV10-3, TRBJ2-7)
CAISEKGGTSSTSGR

SEQ ID NO: 161549 - protein, 18 aa, Homo sapiens
  CDR3 for alpha chain variable domain of TCR clone 80775 (TRAV21, TRAJ52)
CAVRPSPAGGTRYGKLTF

SEQ ID NO: 161550 - protein, 12 aa, Homo sapiens
  CDR3 for beta chain variable domain of TCR clone 80775 (TRBV11-2, TRBJ2-2)
CASSLGGGELFF

SEQ ID NO: 161551 - protein, 15 aa, Homo sapiens
  CDR3 for alpha chain variable domain of TCR clone 80776 (TRAV21, TRAJ32)
CSAAPYGGATNKLIF

SEQ ID NO: 161552 - protein, 17 aa, Homo sapiens
  CDR3 for beta chain variable domain of TCR clone 80776 (TRBV18, TRBJ2-3)
CASSPFGDGGFTDTQYF

SEQ ID NO: 161553 - protein, 12 aa, Homo sapiens
  CDR3 for alpha chain variable domain of TCR clone 80777 (TRAV35, TRAJ49)
CAGWNTGNQFYF

SEQ ID NO: 161554 - protein, 14 aa, Homo sapiens
  CDR3 for beta chain variable domain of TCR clone 80777 (TRBV12-5, TRBJ2-5)
CASGSRTHQETQYF

SEQ ID NO: 161555 - protein, 14 aa, Homo sapiens
  CDR3 for alpha chain variable domain of TCR clone 80778 (TRAV1-2, TRAJ8)
CAVREDTGFQKLVF

SEQ ID NO: 161556 - protein, 13 aa, Homo sapiens
  CDR3 for beta chain variable domain of TCR clone 80778 (TRBV20-1, TRBJ1-1)
CSAPPGGHTEAFF

SEQ ID NO: 161557 - protein, 14 aa, Homo sapiens
  CDR3 for alpha chain variable domain of TCR clone 80779 (TRAV1-2, TRAJ8)
CAVREDTGFQKLVF

SEQ ID NO: 161558 - protein, 16 aa, Homo sapiens
  CDR3 for beta chain variable domain of TCR clone 80779 (TRBV7-6, TRBJ2-6)
CASSLPGPSGANVLTF

SEQ ID NO: 161559 - protein, 17 aa, Homo sapiens
  CDR3 for alpha chain variable domain of TCR clone 80780 (TRAV2, TRAJ22)
ILQVREADAAEQRQLTF

SEQ ID NO: 161560 - protein, 13 aa, Homo sapiens
  CDR3 for beta chain variable domain of TCR clone 80780 (TRBV7-9, TRBJ2-7)
CASSLKAGQEQYF

SEQ ID NO: 161561 - protein, 13 aa, Homo sapiens
  CDR3 for alpha chain variable domain of TCR clone 80781 (TRAV8-6, TRAJ21)
CAVSPSSLNKFYF

SEQ ID NO: 161562 - protein, 21 aa, Homo sapiens
  CDR3 for beta chain variable domain of TCR clone 80781 (TRBV6-4, TRBJ2-1)
CASRRLKAGTSHPGSYNEQFF

SEQ ID NO: 161563 - protein, 14 aa, Homo sapiens
  CDR3 for alpha chain variable domain of TCR clone 80782 (TRAV1-1, TRAJ34)
CAVSPSYNTNKLIF

SEQ ID NO: 161564 - protein, 15 aa, Homo sapiens
  CDR3 for beta chain variable domain of TCR clone 80782 (TRBV6-3, TRBJ2-7)
CASSSPGTVFYEQYF

SEQ ID NO: 161565 - protein, 12 aa, Homo sapiens
  CDR3 for alpha chain variable domain of TCR clone 80783 (TRAV13-1, TRAJ11)
CAASKGYSTLTF

SEQ ID NO: 161566 - protein, 20 aa, Homo sapiens
  CDR3 for beta chain variable domain of TCR clone 80783 (TRBV7-8, TRBJ2-2)
CASSHLFPGPTIHITGELFF

SEQ ID NO: 161567 - protein, 11 aa, Homo sapiens
  CDR3 for alpha chain variable domain of TCR clone 80784 (TRAV21, TRAJ48)
CAVAGNEKLTF

SEQ ID NO: 161568 - protein, 16 aa, Homo sapiens
  CDR3 for beta chain variable domain of TCR clone 80784 (TRBV12-4, TRBJ1-5)
CASSSGPRGSNQPQHF

SEQ ID NO: 161569 - protein, 15 aa, Homo sapiens
  CDR3 for alpha chain variable domain of TCR clone 80785 (TRAV23/DV6, TRAJ13)
CAAWPGGGGDQKVTF

SEQ ID NO: 161570 - protein, 17 aa, Homo sapiens
  CDR3 for beta chain variable domain of TCR clone 80785 (TRBV19, TRBJ2-7)
CASSISFYDSYPYEQYF

SEQ ID NO: 161571 - protein, 13 aa, Homo sapiens
  CDR3 for alpha chain variable domain of TCR clone 80786 (TRAV21, TRAJ36)
CAVIKTGTNNLFF

SEQ ID NO: 161572 - protein, 13 aa, Homo sapiens
  CDR3 for beta chain variable domain of TCR clone 80786 (TRBV29-1, TRBJ2-3)
CSATRGGRDTQYF

SEQ ID NO: 161573 - protein, 14 aa, Homo sapiens
  CDR3 for alpha chain variable domain of TCR clone 80787 (TRAV1-2, TRAJ16)
CAVNRFSDGQKLLF

SEQ ID NO: 161574 - protein, 17 aa, Homo sapiens
  CDR3 for beta chain variable domain of TCR clone 80787 (TRBV2, TRBJ2-1)
CASSRNSLLAGGDEQFF

SEQ ID NO: 161575 - protein, 13 aa, Homo sapiens
  CDR3 for alpha chain variable domain of TCR clone 80788 (TRAV8-3, TRAJ48)
CCGRNFGNEKLTF

SEQ ID NO: 161576 - protein, 12 aa, Homo sapiens
  CDR3 for beta chain variable domain of TCR clone 80788 (TRBV7-2, TRBJ2-5)
CASSQYQETQYF

SEQ ID NO: 161577 - protein, 10 aa, Homo sapiens
  CDR3 for alpha chain variable domain of TCR clone 80789 (TRAV30, TRAJ32)
CGTEKDMVVL

SEQ ID NO: 161578 - protein, 13 aa, Homo sapiens
  CDR3 for beta chain variable domain of TCR clone 80789 (TRBV10-3, TRBJ2-7)
CASKLAANYEQYF

SEQ ID NO: 161579 - protein, 17 aa, Homo sapiens
  CDR3 for alpha chain variable domain of TCR clone 80790 (TRAV3, TRAJ6)
CAVRDGPRAGGSYIPTF

SEQ ID NO: 161580 - protein, 22 aa, Homo sapiens
  CDR3 for beta chain variable domain of TCR clone 80790 (TRBV6-1, TRBJ1-3)
CASVQGGGWKHHIFWRGKLAHC

SEQ ID NO: 161581 - protein, 13 aa, Homo sapiens
  CDR3 for alpha chain variable domain of TCR clone 80791 (TRAV8-1, TRAJ5)
CAVIYTGRRALTF

SEQ ID NO: 161582 - protein, 12 aa, Homo sapiens
  CDR3 for beta chain variable domain of TCR clone 80791 (TRBV25-1, TRBJ2-1)
CASSIRDNEQLF

SEQ ID NO: 161583 - protein, 16 aa, Homo sapiens
  CDR3 for alpha chain variable domain of TCR clone 80792 (TRAV38-2/DV8, TRAJ47)
CAYRSAIMEYGKKLVF

SEQ ID NO: 161584 - protein, 14 aa, Homo sapiens
  CDR3 for beta chain variable domain of TCR clone 80792 (TRBV19, TRBJ2-7)
CASSIFAGTYEQYF

SEQ ID NO: 161585 - protein, 13 aa, Homo sapiens
  CDR3 for alpha chain variable domain of TCR clone 80793 (TRAV27, TRAJ45)
CRSSGGGADGLTF

SEQ ID NO: 161586 - protein, 15 aa, Homo sapiens
  CDR3 for beta chain variable domain of TCR clone 80793 (TRBV7-9, TRBJ1-4)
CASSRTGGFNEKLFF

SEQ ID NO: 161587 - protein, 17 aa, Homo sapiens
  CDR3 for alpha chain variable domain of TCR clone 80794 (TRAV26-1, TRAJ37)
CIVRFITVSSNTGKLIF

SEQ ID NO: 161588 - protein, 16 aa, Homo sapiens
  CDR3 for beta chain variable domain of TCR clone 80794 (TRBV7-2, TRBJ2-1)
CASSLVAGAGYNEQFF

SEQ ID NO: 161589 - protein, 12 aa, Homo sapiens
  CDR3 for alpha chain variable domain of TCR clone 80795 (TRAV12-3, TRAJ42)
CAPGGSQGNLIF

SEQ ID NO: 161590 - protein, 13 aa, Homo sapiens
  CDR3 for beta chain variable domain of TCR clone 80795 (TRBV5-7, TRBJ2-6)
CASTSSGANVLSF

SEQ ID NO: 161591 - protein, 12 aa, Homo sapiens
  CDR3 for alpha chain variable domain of TCR clone 80796 (TRAV12-2, TRAJ10)
WGVTGGGNKLTL

SEQ ID NO: 161592 - protein, 14 aa, Homo sapiens
  CDR3 for beta chain variable domain of TCR clone 80796 (TRBV27, TRBJ2-7)
CASATGTERREQYF

SEQ ID NO: 161593 - protein, 22 aa, Homo sapiens
  CDR3 for alpha chain variable domain of TCR clone 80797 (TRAV1-1, TRAJ38)
CASNAGNNHIQNPDPAVYQLRD

SEQ ID NO: 161594 - protein, 14 aa, Homo sapiens
  CDR3 for beta chain variable domain of TCR clone 80797 (TRBV15, TRBJ2-1)
CATSVVEDYNEQFF

SEQ ID NO: 161595 - protein, 14 aa, Homo sapiens
  CDR3 for alpha chain variable domain of TCR clone 80798 (TRAV35, TRAJ22)
CAGLRPGSARQLTF

SEQ ID NO: 161596 - protein, 13 aa, Homo sapiens
  CDR3 for beta chain variable domain of TCR clone 80798 (TRBV20-1, TRBJ1-1)
CSARGGGDTEAFF

SEQ ID NO: 161597 - protein, 16 aa, Homo sapiens
  CDR3 for alpha chain variable domain of TCR clone 80799 (TRAV3, TRAJ37)
CAVRPLGSGNTGKLIF

SEQ ID NO: 161598 - protein, 16 aa, Homo sapiens
  CDR3 for beta chain variable domain of TCR clone 80799 (TRBV9, TRBJ1-2)
CASSVEEKVSPYGYTF

SEQ ID NO: 161599 - protein, 12 aa, Homo sapiens
  CDR3 for alpha chain variable domain of TCR clone 80800 (TRAV16, TRAJ56)
CAPTGANSKLTF

SEQ ID NO: 161600 - protein, 17 aa, Homo sapiens
  CDR3 for beta chain variable domain of TCR clone 80800 (TRBV12-4, TRBJ2-6)
CASSLTGFASGANVLTF

SEQ ID NO: 161601 - protein, 12 aa, Homo sapiens
  CDR3 for alpha chain variable domain of TCR clone 80801 (TRAV25, TRAJ38)
CAGTGNNRKLIW

SEQ ID NO: 161602 - protein, 14 aa, Homo sapiens
  CDR3 for beta chain variable domain of TCR clone 80801 (TRBV25-1, TRBJ1-1)
CASTHLGGNTEAFF

SEQ ID NO: 161603 - protein, 11 aa, Homo sapiens
  CDR3 for alpha chain variable domain of TCR clone 80802 (TRAV1-1, TRAJ23)
CAVRQGGKLIF

SEQ ID NO: 161604 - protein, 14 aa, Homo sapiens
  CDR3 for beta chain variable domain of TCR clone 80802 (TRBV19, TRBJ2-1)
CSSPTFVLSGEQFF

SEQ ID NO: 161605 - protein, 13 aa, Homo sapiens
  CDR3 for alpha chain variable domain of TCR clone 80803 (TRAV17, TRAJ26)
CATVDNYGQNFVF

SEQ ID NO: 161606 - protein, 12 aa, Homo sapiens
  CDR3 for beta chain variable domain of TCR clone 80803 (TRBV11-2, TRBJ2-2)
CASSLGGGELFF

SEQ ID NO: 161607 - protein, 14 aa, Homo sapiens
  CDR3 for alpha chain variable domain of TCR clone 80804 (TRAV26-1, TRAJ38)
CIADNAGNNRKPIW

SEQ ID NO: 161608 - protein, 15 aa, Homo sapiens
  CDR3 for beta chain variable domain of TCR clone 80804 (TRBV7-6, TRBJ1-4)
CASSLGAGAGEKLFF

SEQ ID NO: 161609 - protein, 14 aa, Homo sapiens
  CDR3 for alpha chain variable domain of TCR clone 80805 (TRAV16, TRAJ42)
CALLAGGSQGNLIF

SEQ ID NO: 161610 - protein, 15 aa, Homo sapiens
  CDR3 for beta chain variable domain of TCR clone 80805 (TRBV2, TRBJ2-7)
CASIEGLARSYEQYF

SEQ ID NO: 161611 - protein, 14 aa, Homo sapiens
  CDR3 for alpha chain variable domain of TCR clone 80806 (TRAV30, TRAJ26)
CGTEIVSYGQNFVF

SEQ ID NO: 161612 - protein, 14 aa, Homo sapiens
  CDR3 for beta chain variable domain of TCR clone 80806 (TRBV13, TRBJ2-7)
CASSLKGASYEQYF

SEQ ID NO: 161613 - protein, 14 aa, Homo sapiens
  CDR3 for alpha chain variable domain of TCR clone 80807 (TRAV1-2, TRAJ16)
CVVNRFSDGQKLLF

SEQ ID NO: 161614 - protein, 12 aa, Homo sapiens
  CDR3 for beta chain variable domain of TCR clone 80807 (TRBV11-2, TRBJ2-2)
CASSLGGGELFF

SEQ ID NO: 161615 - protein, 10 aa, Homo sapiens
  CDR3 for alpha chain variable domain of TCR clone 80808 (TRAV36/DV7, TRAJ49)
CALTGNQFYF

SEQ ID NO: 161616 - protein, 15 aa, Homo sapiens
  CDR3 for beta chain variable domain of TCR clone 80808 (TRBV27, TRBJ2-1)
CASSNGGGSSNEQFF

SEQ ID NO: 161617 - protein, 14 aa, Homo sapiens
  CDR3 for alpha chain variable domain of TCR clone 80809 (TRAV1-2, TRAJ16)
CAVNRFSDGQKLLF

SEQ ID NO: 161618 - protein, 14 aa, Homo sapiens
  CDR3 for beta chain variable domain of TCR clone 80809 (TRBV7-9, TRBJ2-3)
CASSLEDGTDTQYC

SEQ ID NO: 161619 - protein, 18 aa, Homo sapiens
  CDR3 for alpha chain variable domain of TCR clone 80810 (TRAV12-3, TRAJ52)
CAMCAGGAGGTSYGKLTF

SEQ ID NO: 161620 - protein, 15 aa, Homo sapiens
  CDR3 for beta chain variable domain of TCR clone 80810 (TRBV27, TRBJ1-6)
CASSFDRGLGSPLHF

SEQ ID NO: 161621 - protein, 14 aa, Homo sapiens
  CDR3 for alpha chain variable domain of TCR clone 80811 (TRAV8-2, TRAJ11)
CVVSEKSGYSTFTF

SEQ ID NO: 161622 - protein, 16 aa, Homo sapiens
  CDR3 for beta chain variable domain of TCR clone 80811 (TRBV28, TRBJ2-1)
CASSSPEYPRDNEQFF

SEQ ID NO: 161623 - protein, 11 aa, Homo sapiens
  CDR3 for alpha chain variable domain of TCR clone 80812 (TRAV1-1, TRAJ23)
CAVRQGGKLIF

SEQ ID NO: 161624 - protein, 20 aa, Homo sapiens
  CDR3 for beta chain variable domain of TCR clone 80812 (TRBV7-8, TRBJ2-2)
CATSHLFPGPTIHITGELFF

SEQ ID NO: 161625 - protein, 12 aa, Homo sapiens
  CDR3 for alpha chain variable domain of TCR clone 80813 (TRAV27, TRAJ35)
CAGADFGNVLHC

SEQ ID NO: 161626 - protein, 14 aa, Homo sapiens
  CDR3 for beta chain variable domain of TCR clone 80813 (TRBV12-5, TRBJ2-5)
CASGSRTHQETQYF

SEQ ID NO: 161627 - protein, 19 aa, Homo sapiens
  CDR3 for alpha chain variable domain of TCR clone 80814 (TRAV38-1, TRAJ53)
CAFMKHGLESGGSNYKLTI

SEQ ID NO: 161628 - protein, 13 aa, Homo sapiens
  CDR3 for beta chain variable domain of TCR clone 80814 (TRBV19, TRBJ2-7)
CASSPRQSYEQYF

SEQ ID NO: 161629 - protein, 14 aa, Homo sapiens
  CDR3 for alpha chain variable domain of TCR clone 80815 (TRAV13-1, TRAJ39)
CAASYNNAGNMLTF

SEQ ID NO: 161630 - protein, 13 aa, Homo sapiens
  CDR3 for beta chain variable domain of TCR clone 80815 (TRBV24-1, TRBJ1-4)
CATNNGRSENLFF

SEQ ID NO: 161631 - protein, 14 aa, Homo sapiens
  CDR3 for alpha chain variable domain of TCR clone 80816 (TRAV1-1, TRAJ28)
CAAPSGAGSYQLTF

SEQ ID NO: 161632 - protein, 17 aa, Homo sapiens
  CDR3 for beta chain variable domain of TCR clone 80816 (TRBV13, TRBJ2-3)
CASSLSRVAGGRNTQYF

SEQ ID NO: 161633 - protein, 13 aa, Homo sapiens
  CDR3 for alpha chain variable domain of TCR clone 80817 (TRAV17, TRAJ39)
CATEDNAGNMLTF

SEQ ID NO: 161634 - protein, 14 aa, Homo sapiens
  CDR3 for beta chain variable domain of TCR clone 80817 (TRBV19, TRBJ1-2)
CASSPTGGAGVYTF

SEQ ID NO: 161635 - protein, 14 aa, Homo sapiens
  CDR3 for alpha chain variable domain of TCR clone 80818 (TRAV26-1, TRAJ39)
CIVRGSRAGNMLTF

SEQ ID NO: 161636 - protein, 15 aa, Homo sapiens
  CDR3 for beta chain variable domain of TCR clone 80818 (TRBV7-9, TRBJ1-5)
CASSQGHQLNQPQHF

SEQ ID NO: 161637 - protein, 14 aa, Homo sapiens
  CDR3 for alpha chain variable domain of TCR clone 80819 (TRAV1-2, TRAJ16)
CAVNRFSDGQKLLF

SEQ ID NO: 161638 - protein, 14 aa, Homo sapiens
  CDR3 for beta chain variable domain of TCR clone 80819 (TRBV4-2, TRBJ2-7)
CASSQGQTAYEQYF

SEQ ID NO: 161639 - protein, 14 aa, Homo sapiens
  CDR3 for alpha chain variable domain of TCR clone 80820 (TRAV1-2, TRAJ16)
CAVNRFSGGQKLLF

SEQ ID NO: 161640 - protein, 14 aa, Homo sapiens
  CDR3 for beta chain variable domain of TCR clone 80820 (TRBV7-3, TRBJ1-1)
CASSLGTGYTEAFF

SEQ ID NO: 161641 - protein, 11 aa, Homo sapiens
  CDR3 for alpha chain variable domain of TCR clone 80821 (TRAV2, TRAJ33)
CAVDSNYQLIW

SEQ ID NO: 161642 - protein, 14 aa, Homo sapiens
  CDR3 for beta chain variable domain of TCR clone 80821 (TRBV11-2, TRBJ2-3)
CASSILARTDTQYF

SEQ ID NO: 161643 - protein, 13 aa, Homo sapiens
  CDR3 for alpha chain variable domain of TCR clone 80822 (TRAV16, TRAJ11)
CALTQSGYSTLTF

SEQ ID NO: 161644 - protein, 14 aa, Homo sapiens
  CDR3 for beta chain variable domain of TCR clone 80822 (TRBV19, TRBJ2-7)
CASSTTRRSYEQYF

SEQ ID NO: 161645 - protein, 13 aa, Homo sapiens
  CDR3 for alpha chain variable domain of TCR clone 80823 (TRAV1-2, TRAJ20)
CAVRDGNDYKLSF

SEQ ID NO: 161646 - protein, 15 aa, Homo sapiens
  CDR3 for beta chain variable domain of TCR clone 80823 (TRBV5-1, TRBJ2-1)
CASSPPRAPYNEQFF

SEQ ID NO: 161647 - protein, 17 aa, Homo sapiens
  CDR3 for alpha chain variable domain of TCR clone 80824 (TRAV21, TRAJ52)
CAVGVNAGGTSYGKLTF

SEQ ID NO: 161648 - protein, 13 aa, Homo sapiens
  CDR3 for beta chain variable domain of TCR clone 80824 (TRBV5-1, TRBJ1-2)
CASSVQGNYGYTF

SEQ ID NO: 161649 - protein, 13 aa, Homo sapiens
  CDR3 for alpha chain variable domain of TCR clone 80825 (TRAV8-6, TRAJ49)
CAVITNTGNQLYF

SEQ ID NO: 161650 - protein, 17 aa, Homo sapiens
  CDR3 for beta chain variable domain of TCR clone 80825 (TRBV11-2, TRBJ2-1)
CASSLYPPGVEYNEQFF

SEQ ID NO: 161651 - protein, 11 aa, Homo sapiens
  CDR3 for alpha chain variable domain of TCR clone 80826 (TRAV2, TRAJ33)
CAVDINYQLIW

SEQ ID NO: 161652 - protein, 14 aa, Homo sapiens
  CDR3 for beta chain variable domain of TCR clone 80826 (TRBV11-2, TRBJ2-3)
CASSRLARTDTQYF

SEQ ID NO: 161653 - protein, 11 aa, Homo sapiens
  CDR3 for alpha chain variable domain of TCR clone 80827 (TRAV21, TRAJ48)
CAVDGNERLTF

SEQ ID NO: 161654 - protein, 16 aa, Homo sapiens
  CDR3 for beta chain variable domain of TCR clone 80827 (TRBV12-4, TRBJ1-5)
CASSSGPRGSNQPQHF

SEQ ID NO: 161655 - protein, 13 aa, Homo sapiens
  CDR3 for alpha chain variable domain of TCR clone 80828 (TRAV12-1, TRAJ7)
CVVNMRGNKRLAF

SEQ ID NO: 161656 - protein, 15 aa, Homo sapiens
  CDR3 for beta chain variable domain of TCR clone 80828 (TRBV27, TRBJ2-3)
CASSLGLAATDTQYF

SEQ ID NO: 161657 - protein, 14 aa, Homo sapiens
  CDR3 for alpha chain variable domain of TCR clone 80829 (TRAV1-2, TRAJ8)
YAVREDTGFQKLVF

SEQ ID NO: 161658 - protein, 16 aa, Homo sapiens
  CDR3 for beta chain variable domain of TCR clone 80829 (TRBV28, TRBJ1-4)
CASSPPYRGRSEKLFF

SEQ ID NO: 161659 - protein, 13 aa, Homo sapiens
  CDR3 for alpha chain variable domain of TCR clone 80830 (TRAV13-1, TRAJ21)
CAASIYNFNKFYF

SEQ ID NO: 161660 - protein, 13 aa, Homo sapiens
  CDR3 for beta chain variable domain of TCR clone 80830 (TRBV4-1, TRBJ2-2)
CASSQENTGELFF

SEQ ID NO: 161661 - protein, 13 aa, Homo sapiens
  CDR3 for alpha chain variable domain of TCR clone 80831 (TRAV1-2, TRAJ9)
WAALNTGGFKTIF

SEQ ID NO: 161662 - protein, 13 aa, Homo sapiens
  CDR3 for beta chain variable domain of TCR clone 80831 (TRBV19, TRBJ1-2)
CASSVPGQDGYTF

SEQ ID NO: 161663 - protein, 12 aa, Homo sapiens
  CDR3 for alpha chain variable domain of TCR clone 80832 (TRAV1-1, TRAJ39)
CAVPVVGNMLTF

SEQ ID NO: 161664 - protein, 15 aa, Homo sapiens
  CDR3 for beta chain variable domain of TCR clone 80832 (TRBV19, TRBJ1-6)
CASSTQRAVGSPLHF

SEQ ID NO: 161665 - protein, 15 aa, Homo sapiens
  CDR3 for alpha chain variable domain of TCR clone 80833 (TRAV17, TRAJ56)
TSVLRTPGANSKLTF

SEQ ID NO: 161666 - protein, 15 aa, Homo sapiens
  CDR3 for beta chain variable domain of TCR clone 80833 (TRBV6-3, TRBJ2-7)
CASSSPGTVFYEQYF

SEQ ID NO: 161667 - protein, 11 aa, Homo sapiens
  CDR3 for alpha chain variable domain of TCR clone 80834 (TRAV2, TRAJ13)
CASGGYQKVTF

SEQ ID NO: 161668 - protein, 14 aa, Homo sapiens
  CDR3 for beta chain variable domain of TCR clone 80834 (TRBV7-9, TRBJ2-3)
CASSLEDGTDTQYF

SEQ ID NO: 161669 - protein, 14 aa, Homo sapiens
  CDR3 for alpha chain variable domain of TCR clone 80835 (TRAV36/DV7, TRAJ44)
CCGANTGTASKLTF

SEQ ID NO: 161670 - protein, 17 aa, Homo sapiens
  CDR3 for beta chain variable domain of TCR clone 80835 (TRBV11-2, TRBJ2-1)
CASSLYPPGVEYNEQFF

SEQ ID NO: 161671 - protein, 14 aa, Homo sapiens
  CDR3 for alpha chain variable domain of TCR clone 80836 (TRAV3, TRAJ20)
CAVPPAPNDYKLSF

SEQ ID NO: 161672 - protein, 16 aa, Homo sapiens
  CDR3 for beta chain variable domain of TCR clone 80836 (TRBV4-2, TRBJ2-3)
CASSQELAGDTDTQYF

SEQ ID NO: 161673 - protein, 11 aa, Homo sapiens
  CDR3 for alpha chain variable domain of TCR clone 80837 (TRAV17, TRAJ31)
CATDRTARLML

SEQ ID NO: 161674 - protein, 14 aa, Homo sapiens
  CDR3 for beta chain variable domain of TCR clone 80837 (TRBV4-2, TRBJ2-3)
CASSQERGTDTQYF

SEQ ID NO: 161675 - protein, 13 aa, Homo sapiens
  CDR3 for alpha chain variable domain of TCR clone 80838 (TRAV8-3, TRAJ48)
CAVVPFGNEKLTF

SEQ ID NO: 161676 - protein, 15 aa, Homo sapiens
  CDR3 for beta chain variable domain of TCR clone 80838 (TRBV11-2, TRBJ2-1)
CASSAPSTRYNEQFF

SEQ ID NO: 161677 - protein, 11 aa, Homo sapiens
  CDR3 for alpha chain variable domain of TCR clone 80839 (TRAV2, TRAJ33)
CAVDSNYQLIW

SEQ ID NO: 161678 - protein, 16 aa, Homo sapiens
  CDR3 for beta chain variable domain of TCR clone 80839 (TRBV7-2, TRBJ2-7)
CASSLEAGGPWYEQYF

SEQ ID NO: 161679 - protein, 13 aa, Homo sapiens
  CDR3 for alpha chain variable domain of TCR clone 80840 (TRAV12-2, TRAJ20)
CAVNRFDDYKLSF

SEQ ID NO: 161680 - protein, 13 aa, Homo sapiens
  CDR3 for beta chain variable domain of TCR clone 80840 (TRBV7-9, TRBJ1-2)
CASSLKQNYGYTF

SEQ ID NO: 161681 - protein, 16 aa, Homo sapiens
  CDR3 for alpha chain variable domain of TCR clone 80841 (TRAV3, TRAJ6)
CAVRDGPRAGGSYIHI

SEQ ID NO: 161682 - protein, 14 aa, Homo sapiens
  CDR3 for beta chain variable domain of TCR clone 80841 (TRBV7-2, TRBJ2-7)
CASSPKTSFYEQYF

SEQ ID NO: 161683 - protein, 13 aa, Homo sapiens
  CDR3 for alpha chain variable domain of TCR clone 80842 (TRAV8-1, TRAJ28)
CAVSGAGSYQLTF

SEQ ID NO: 161684 - protein, 12 aa, Homo sapiens
  CDR3 for beta chain variable domain of TCR clone 80842 (TRBV29-1, TRBJ2-3)
CSVTGGADTQYF

SEQ ID NO: 161685 - protein, 13 aa, Homo sapiens
  CDR3 for alpha chain variable domain of TCR clone 80843 (TRAV2, TRAJ21)
FAVEDLNFNKFYF

SEQ ID NO: 161686 - protein, 15 aa, Homo sapiens
  CDR3 for beta chain variable domain of TCR clone 80843 (TRBV28, TRBJ2-5)
CASSPGQGSIETQYF

SEQ ID NO: 161687 - protein, 15 aa, Homo sapiens
  CDR3 for alpha chain variable domain of TCR clone 80844 (TRAV8-3, TRAJ40)
CAAPSLGSGTYKYIF

SEQ ID NO: 161688 - protein, 16 aa, Homo sapiens
  CDR3 for beta chain variable domain of TCR clone 80844 (TRBV7-3, TRBJ2-3)
CASSLSGYRPEDTQHF

SEQ ID NO: 161689 - protein, 18 aa, Homo sapiens
  CDR3 for alpha chain variable domain of TCR clone 80845 (TRAV26-1, TRAJ23)
CIVRVGLEVWNQGGKLIF

SEQ ID NO: 161690 - protein, 16 aa, Homo sapiens
  CDR3 for beta chain variable domain of TCR clone 80845 (TRBV7-3, TRBJ2-2)
CASSLKRGTLSGELFF

SEQ ID NO: 161691 - protein, 19 aa, Homo sapiens
  CDR3 for alpha chain variable domain of TCR clone 80846 (TRAV26-1, TRAJ52)
CIVRAHRNAGGTRYGKLTF

SEQ ID NO: 161692 - protein, 15 aa, Homo sapiens
  CDR3 for beta chain variable domain of TCR clone 80846 (TRBV12-4, TRBJ2-5)
CASSPPTGLQETQYF

SEQ ID NO: 161693 - protein, 16 aa, Homo sapiens
  CDR3 for alpha chain variable domain of TCR clone 80847 (TRAV12-3, TRAJ53)
CAMSPGSGGSNYKLTF

SEQ ID NO: 161694 - protein, 17 aa, Homo sapiens
  CDR3 for beta chain variable domain of TCR clone 80847 (TRBV28, TRBJ2-5)
CASSKPEGDALQETQYF

SEQ ID NO: 161695 - protein, 11 aa, Homo sapiens
  CDR3 for alpha chain variable domain of TCR clone 80848 (TRAV12-2, TRAJ49)
CALHGGNQFYF

SEQ ID NO: 161696 - protein, 13 aa, Homo sapiens
  CDR3 for beta chain variable domain of TCR clone 80848 (TRBV4-1, TRBJ1-1)
CASSQLGTGEAFF

SEQ ID NO: 161697 - protein, 13 aa, Homo sapiens
  CDR3 for alpha chain variable domain of TCR clone 80849 (TRAV35, TRAJ36)
CAGPRIGANNLFF

SEQ ID NO: 161698 - protein, 15 aa, Homo sapiens
  CDR3 for beta chain variable domain of TCR clone 80849 (TRBV28, TRBJ2-5)
CASSPPLSYQETQYF

SEQ ID NO: 161699 - protein, 18 aa, Homo sapiens
  CDR3 for alpha chain variable domain of TCR clone 80850 (TRAV21, TRAJ52)
CAVGPSPAGGTSYGKLPF

SEQ ID NO: 161700 - protein, 17 aa, Homo sapiens
  CDR3 for beta chain variable domain of TCR clone 80850 (TRBV13, TRBJ2-3)
CASSLSRVAGGRNTQYF

SEQ ID NO: 161701 - protein, 12 aa, Homo sapiens
  CDR3 for alpha chain variable domain of TCR clone 80851 (TRAV8-4, TRAJ43)
CAVSVNNNDMRF

SEQ ID NO: 161702 - protein, 17 aa, Homo sapiens
  CDR3 for beta chain variable domain of TCR clone 80851 (TRBV11-2, TRBJ2-1)
CASSLYPPGVEYNEQFF

SEQ ID NO: 161703 - protein, 15 aa, Homo sapiens
  CDR3 for alpha chain variable domain of TCR clone 80852 (TRAV21, TRAJ53)
CATLNSGGSNYKLTF

SEQ ID NO: 161704 - protein, 11 aa, Homo sapiens
  CDR3 for beta chain variable domain of TCR clone 80852 (TRBV18, TRBJ2-5)
CASSPRETQYF

SEQ ID NO: 161705 - protein, 14 aa, Homo sapiens
  CDR3 for alpha chain variable domain of TCR clone 80853 (TRAV17, TRAJ54)
CATDANQGVQKLVF

SEQ ID NO: 161706 - protein, 12 aa, Homo sapiens
  CDR3 for beta chain variable domain of TCR clone 80853 (TRBV6-3, TRBJ2-1)
CASSGSYNEQFF

SEQ ID NO: 161707 - protein, 15 aa, Homo sapiens
  CDR3 for alpha chain variable domain of TCR clone 80854 (TRAV2, TRAJ9)
CAVEDRGTEGFKTIF

SEQ ID NO: 161708 - protein, 17 aa, Homo sapiens
  CDR3 for beta chain variable domain of TCR clone 80854 (TRBV7-8, TRBJ2-6)
CASSAGTGGAGANVLTF

SEQ ID NO: 161709 - protein, 14 aa, Homo sapiens
  CDR3 for alpha chain variable domain of TCR clone 80855 (TRAV12-3, TRAJ57)
CAMSAWGGTEKLVF

SEQ ID NO: 161710 - protein, 14 aa, Homo sapiens
  CDR3 for beta chain variable domain of TCR clone 80855 (TRBV18, TRBJ2-5)
CASSPGVSQETQYF

SEQ ID NO: 161711 - protein, 13 aa, Homo sapiens
  CDR3 for alpha chain variable domain of TCR clone 80856 (TRAV22, TRAJ12)
CAVLMDSSYKLIF

SEQ ID NO: 161712 - protein, 17 aa, Homo sapiens
  CDR3 for beta chain variable domain of TCR clone 80856 (TRBV5-1, TRBJ2-7)
CASSKPEGREASYEQYF

SEQ ID NO: 161713 - protein, 13 aa, Homo sapiens
  CDR3 for alpha chain variable domain of TCR clone 80857 (TRAV1-2, TRAJ9)
CAALNTGGFKTIF

SEQ ID NO: 161714 - protein, 11 aa, Homo sapiens
  CDR3 for beta chain variable domain of TCR clone 80857 (TRBV19, TRBJ2-4)
CASSNKNIQYF

SEQ ID NO: 161715 - protein, 14 aa, Homo sapiens
  CDR3 for alpha chain variable domain of TCR clone 80858 (TRAV1-2, TRAJ16)
CAVNRLSDGQKLLF

SEQ ID NO: 161716 - protein, 11 aa, Homo sapiens
  CDR3 for beta chain variable domain of TCR clone 80858 (TRBV7-9, TRBJ2-3)
CASSPTDTQYF

SEQ ID NO: 161717 - protein, 15 aa, Homo sapiens
  CDR3 for alpha chain variable domain of TCR clone 80859 (TRAV3, TRAJ5)
CAVRDRKTSRRALTF

SEQ ID NO: 161718 - protein, 15 aa, Homo sapiens
  CDR3 for beta chain variable domain of TCR clone 80859 (TRBV7-8, TRBJ2-1)
CASSLADSLYNEQFF

SEQ ID NO: 161719 - protein, 12 aa, Homo sapiens
  CDR3 for alpha chain variable domain of TCR clone 80860 (TRAV21, TRAJ49)
CAVSWTGNQVYF

SEQ ID NO: 161720 - protein, 18 aa, Homo sapiens
  CDR3 for beta chain variable domain of TCR clone 80860 (TRBV7-8, TRBJ2-1)
CASSPAEGLAGGLNEQFF

SEQ ID NO: 161721 - protein, 11 aa, Homo sapiens
  CDR3 for alpha chain variable domain of TCR clone 80861 (TRAV13-1, TRAJ6)
CSTLGSYIPTF

SEQ ID NO: 161722 - protein, 13 aa, Homo sapiens
  CDR3 for beta chain variable domain of TCR clone 80861 (TRBV6-6, TRBJ2-1)
CASSLHQGDEQFF

SEQ ID NO: 161723 - protein, 14 aa, Homo sapiens
  CDR3 for alpha chain variable domain of TCR clone 80862 (TRAV8-4, TRAJ38)
CARLNAGNNRKLIW

SEQ ID NO: 161724 - protein, 12 aa, Homo sapiens
  CDR3 for beta chain variable domain of TCR clone 80862 (TRBV6-1, TRBJ2-7)
CASSEPPYEQYF

SEQ ID NO: 161725 - protein, 15 aa, Homo sapiens
  CDR3 for alpha chain variable domain of TCR clone 80863 (TRAV17, TRAJ13)
CATDAGSGGYQKVTF

SEQ ID NO: 161726 - protein, 14 aa, Homo sapiens
  CDR3 for beta chain variable domain of TCR clone 80863 (TRBV6-1, TRBJ1-3)
CASVQGGGGNTIYF

SEQ ID NO: 161727 - protein, 13 aa, Homo sapiens
  CDR3 for alpha chain variable domain of TCR clone 80864 (TRAV23/DV6, TRAJ6)
CAAKTGGSYIPTF

SEQ ID NO: 161728 - protein, 12 aa, Homo sapiens
  CDR3 for beta chain variable domain of TCR clone 80864 (TRBV27, TRBJ2-2)
CASKLFTGELFF

SEQ ID NO: 161729 - protein, 12 aa, Homo sapiens
  CDR3 for alpha chain variable domain of TCR clone 80865 (TRAV29/DV5, TRAJ34)
CAASGNTDKLIF

SEQ ID NO: 161730 - protein, 14 aa, Homo sapiens
  CDR3 for beta chain variable domain of TCR clone 80865 (TRBV7-2, TRBJ2-7)
CASSPKTSFYEQYF

SEQ ID NO: 161731 - protein, 13 aa, Homo sapiens
  CDR3 for alpha chain variable domain of TCR clone 80866 (TRAV2, TRAJ29)
CAVYSSGNTPLVF

SEQ ID NO: 161732 - protein, 16 aa, Homo sapiens
  CDR3 for beta chain variable domain of TCR clone 80866 (TRBV13, TRBJ2-2)
CASSPRTGEHTGELFF

SEQ ID NO: 161733 - protein, 11 aa, Homo sapiens
  CDR3 for alpha chain variable domain of TCR clone 80867 (TRAV17, TRAJ9)
CATTGGFKTIF

SEQ ID NO: 161734 - protein, 14 aa, Homo sapiens
  CDR3 for beta chain variable domain of TCR clone 80867 (TRBV7-9, TRBJ2-2)
CASSGLADSGELFF

SEQ ID NO: 161735 - protein, 18 aa, Homo sapiens
  CDR3 for alpha chain variable domain of TCR clone 80868 (TRAV26-1, TRAJ22)
CIVRVALISSGSARQLTL

SEQ ID NO: 161736 - protein, 13 aa, Homo sapiens
  CDR3 for beta chain variable domain of TCR clone 80868 (TRBV13, TRBJ2-5)
CASSPEVGETQYF

SEQ ID NO: 161737 - protein, 13 aa, Homo sapiens
  CDR3 for alpha chain variable domain of TCR clone 80869 (TRAV35, TRAJ22)
CAGLSGSARQLTF

SEQ ID NO: 161738 - protein, 11 aa, Homo sapiens
  CDR3 for beta chain variable domain of TCR clone 80869 (TRBV7-8, TRBJ2-7)
CASSLSLEQYF

SEQ ID NO: 161739 - protein, 13 aa, Homo sapiens
  CDR3 for alpha chain variable domain of TCR clone 80870 (TRAV20, TRAJ37)
CAGCSSNTGKLIF

SEQ ID NO: 161740 - protein, 13 aa, Homo sapiens
  CDR3 for beta chain variable domain of TCR clone 80870 (TRBV12-4, TRBJ1-1)
CASSPGTGFEAFF

SEQ ID NO: 161741 - protein, 14 aa, Homo sapiens
  CDR3 for alpha chain variable domain of TCR clone 80871 (TRAV12-2, TRAJ17)
CAVLFKAAGNKLAF

SEQ ID NO: 161742 - protein, 13 aa, Homo sapiens
  CDR3 for beta chain variable domain of TCR clone 80871 (TRBV19, TRBJ1-2)
CASSQGQVYGYTF

SEQ ID NO: 161743 - protein, 15 aa, Homo sapiens
  CDR3 for alpha chain variable domain of TCR clone 80872 (TRAV3, TRAJ5)
CAVRDLDTGRRALTF

SEQ ID NO: 161744 - protein, 11 aa, Homo sapiens
  CDR3 for beta chain variable domain of TCR clone 80872 (TRBV11-2, TRBJ1-1)
CASSINTEAFF

SEQ ID NO: 161745 - protein, 17 aa, Homo sapiens
  CDR3 for alpha chain variable domain of TCR clone 80873 (TRAV27, TRAJ42)
CAERVIYYGGSQGNLIF

SEQ ID NO: 161746 - protein, 16 aa, Homo sapiens
  CDR3 for beta chain variable domain of TCR clone 80873 (TRBV28, TRBJ2-7)
CASSSGTSGRGYEQYF

SEQ ID NO: 161747 - protein, 12 aa, Homo sapiens
  CDR3 for alpha chain variable domain of TCR clone 80874 (TRAV12-3, TRAJ17)
CAMTLTGNKLTF

SEQ ID NO: 161748 - protein, 17 aa, Homo sapiens
  CDR3 for beta chain variable domain of TCR clone 80874 (TRBV7-3, TRBJ2-5)
CASSLGSGRSGSETQYF

SEQ ID NO: 161749 - protein, 13 aa, Homo sapiens
  CDR3 for alpha chain variable domain of TCR clone 80875 (TRAV21, TRAJ33)
CAVAGDSNYQLIW

SEQ ID NO: 161750 - protein, 13 aa, Homo sapiens
  CDR3 for beta chain variable domain of TCR clone 80875 (TRBV20-1, TRBJ2-2)
CSASAAGTGELFF

SEQ ID NO: 161751 - protein, 14 aa, Homo sapiens
  CDR3 for alpha chain variable domain of TCR clone 80876 (TRAV12-2, TRAJ13)
CAAKKTGGYQKVTF

SEQ ID NO: 161752 - protein, 13 aa, Homo sapiens
  CDR3 for beta chain variable domain of TCR clone 80876 (TRBV20-1, TRBJ1-1)
CSARLEQGTEAFF

SEQ ID NO: 161753 - protein, 16 aa, Homo sapiens
  CDR3 for alpha chain variable domain of TCR clone 80877 (TRAV30, TRAJ24)
CGTEIVDADSWGKFQF

SEQ ID NO: 161754 - protein, 15 aa, Homo sapiens
  CDR3 for beta chain variable domain of TCR clone 80877 (TRBV7-9, TRBJ2-7)
CASSLDLQGPYEQYF

SEQ ID NO: 161755 - protein, 17 aa, Homo sapiens
  CDR3 for alpha chain variable domain of TCR clone 80878 (TRAV14/DV4, TRAJ4)
CAMREASGRGGYNKLIF

SEQ ID NO: 161756 - protein, 15 aa, Homo sapiens
  CDR3 for beta chain variable domain of TCR clone 80878 (TRBV20-1, TRBJ2-7)
CSARDRVSGMDEQYF

SEQ ID NO: 161757 - protein, 12 aa, Homo sapiens
  CDR3 for alpha chain variable domain of TCR clone 80879 (TRAV4, TRAJ26)
CLVGDYGQNFVF

SEQ ID NO: 161758 - protein, 13 aa, Homo sapiens
  CDR3 for beta chain variable domain of TCR clone 80879 (TRBV7-9, TRBJ1-1)
CASSLVSAPEAFF

SEQ ID NO: 161759 - protein, 18 aa, Homo sapiens
  CDR3 for alpha chain variable domain of TCR clone 80880 (TRAV21, TRAJ52)
CAVRPSPAGGTSYGKLTF

SEQ ID NO: 161760 - protein, 13 aa, Homo sapiens
  CDR3 for beta chain variable domain of TCR clone 80880 (TRBV7-3, TRBJ1-1)
FASSQDWGAEAFF

SEQ ID NO: 161761 - protein, 11 aa, Homo sapiens
  CDR3 for alpha chain variable domain of TCR clone 80881 (TRAV1-1, TRAJ23)
CAVRQGGKLIF

SEQ ID NO: 161762 - protein, 19 aa, Homo sapiens
  CDR3 for beta chain variable domain of TCR clone 80881 (TRBV27, TRBJ2-1)
CASSLEILSPGAAGNEQFF

SEQ ID NO: 161763 - protein, 12 aa, Homo sapiens
  CDR3 for alpha chain variable domain of TCR clone 80882 (TRAV8-3, TRAJ41)
CAVALSGYALNF

SEQ ID NO: 161764 - protein, 18 aa, Homo sapiens
  CDR3 for beta chain variable domain of TCR clone 80882 (TRBV20-1, TRBJ2-6)
CSAETTPTHGYGANVLTF

SEQ ID NO: 161765 - protein, 11 aa, Homo sapiens
  CDR3 for alpha chain variable domain of TCR clone 80883 (TRAV1-1, TRAJ23)
CAVRQGGKLIF

SEQ ID NO: 161766 - protein, 14 aa, Homo sapiens
  CDR3 for beta chain variable domain of TCR clone 80883 (TRBV19, TRBJ2-1)
CDSPTFVLSGEQFF

SEQ ID NO: 161767 - protein, 15 aa, Homo sapiens
  CDR3 for alpha chain variable domain of TCR clone 80884 (TRAV3, TRAJ36)
CAVRASQTGANNLFF

SEQ ID NO: 161768 - protein, 14 aa, Homo sapiens
  CDR3 for beta chain variable domain of TCR clone 80884 (TRBV4-1, TRBJ2-2)
CASSQAVNTGELFF

SEQ ID NO: 161769 - protein, 12 aa, Homo sapiens
  CDR3 for alpha chain variable domain of TCR clone 80885 (TRAV17, TRAJ20)
CATDSNDYKLSF

SEQ ID NO: 161770 - protein, 13 aa, Homo sapiens
  CDR3 for beta chain variable domain of TCR clone 80885 (TRBV19, TRBJ1-2)
CASSVPGQDGYTF

SEQ ID NO: 161771 - protein, 12 aa, Homo sapiens
  CDR3 for alpha chain variable domain of TCR clone 80886 (TRAV12-1, TRAJ40)
CVVYSGTYKYLF

SEQ ID NO: 161772 - protein, 18 aa, Homo sapiens
  CDR3 for beta chain variable domain of TCR clone 80886 (TRBV11-2, TRBJ2-3)
CASSLGGASRGAPNTQYF

SEQ ID NO: 161773 - protein, 13 aa, Homo sapiens
  CDR3 for alpha chain variable domain of TCR clone 80887 (TRAV2, TRAJ40)
CAVVTSGTYKYIF

SEQ ID NO: 161774 - protein, 14 aa, Homo sapiens
  CDR3 for beta chain variable domain of TCR clone 80887 (TRBV7-2, TRBJ1-2)
CASSQTGSTYGYTF

SEQ ID NO: 161775 - protein, 17 aa, Homo sapiens
  CDR3 for alpha chain variable domain of TCR clone 80888 (TRAV17, TRAJ28)
CATDPRRGGAGSYQLTF

SEQ ID NO: 161776 - protein, 16 aa, Homo sapiens
  CDR3 for beta chain variable domain of TCR clone 80888 (TRBV25-1, TRBJ1-1)
CASSGDRDRGRIEAFS

SEQ ID NO: 161777 - protein, 12 aa, Homo sapiens
  CDR3 for alpha chain variable domain of TCR clone 80889 (TRAV17, TRAJ4)
CATDGGYNRLIF

SEQ ID NO: 161778 - protein, 13 aa, Homo sapiens
  CDR3 for beta chain variable domain of TCR clone 80889 (TRBV29-1, TRBJ2-2)
CSTTGVNTGELFF

SEQ ID NO: 161779 - protein, 16 aa, Homo sapiens
  CDR3 for alpha chain variable domain of TCR clone 80890 (TRAV12-2, TRAJ10)
CAVNRALTGGGNKLTF

SEQ ID NO: 161780 - protein, 12 aa, Homo sapiens
  CDR3 for beta chain variable domain of TCR clone 80890 (TRBV28, TRBJ2-7)
CASSFSSYEQYF

SEQ ID NO: 161781 - protein, 11 aa, Homo sapiens
  CDR3 for alpha chain variable domain of TCR clone 80891 (TRAV35, TRAJ30)
CAGPGDDKIIF

SEQ ID NO: 161782 - protein, 14 aa, Homo sapiens
  CDR3 for beta chain variable domain of TCR clone 80891 (TRBV18, TRBJ2-5)
CASSPGVSQETQYF

SEQ ID NO: 161783 - protein, 18 aa, Homo sapiens
  CDR3 for alpha chain variable domain of TCR clone 80892 (TRAV2, TRAJ38)
CAVEDFPNAGNNHIQNPD

SEQ ID NO: 161784 - protein, 14 aa, Homo sapiens
  CDR3 for beta chain variable domain of TCR clone 80892 (TRBV29-1, TRBJ1-4)
CSVSGRQGGEKLFF

SEQ ID NO: 161785 - protein, 12 aa, Homo sapiens
  CDR3 for alpha chain variable domain of TCR clone 80893 (TRAV36/DV7, TRAJ54)
CAVVRGAQKLVF

SEQ ID NO: 161786 - protein, 14 aa, Homo sapiens
  CDR3 for beta chain variable domain of TCR clone 80893 (TRBV7-3, TRBJ1-1)
CASSLKGGNTEACF

SEQ ID NO: 161787 - protein, 12 aa, Homo sapiens
  CDR3 for alpha chain variable domain of TCR clone 80894 (TRAV13-1, TRAJ49)
CAASPMGNQFYF

SEQ ID NO: 161788 - protein, 17 aa, Homo sapiens
  CDR3 for beta chain variable domain of TCR clone 80894 (TRBV13, TRBJ2-3)
CASSLSRVAGGRNTQYF

SEQ ID NO: 161789 - protein, 16 aa, Homo sapiens
  CDR3 for alpha chain variable domain of TCR clone 80895 (TRAV4, TRAJ22)
CLVGDLYSGSARQLTF

SEQ ID NO: 161790 - protein, 16 aa, Homo sapiens
  CDR3 for beta chain variable domain of TCR clone 80895 (TRBV7-9, TRBJ2-1)
CASSDVAWGSYNEQFF

SEQ ID NO: 161791 - protein, 17 aa, Homo sapiens
  CDR3 for alpha chain variable domain of TCR clone 80896 (TRAV26-1, TRAJ37)
CIVRVITVSSNTGKLIF

SEQ ID NO: 161792 - protein, 15 aa, Homo sapiens
  CDR3 for beta chain variable domain of TCR clone 80896 (TRBV10-1, TRBJ2-3)
CASIATSGGFDTQYF

SEQ ID NO: 161793 - protein, 14 aa, Homo sapiens
  CDR3 for alpha chain variable domain of TCR clone 80897 (TRAV29/DV5, TRAJ49)
CAASLSKTGNQFYF

SEQ ID NO: 161794 - protein, 15 aa, Homo sapiens
  CDR3 for beta chain variable domain of TCR clone 80897 (TRBV20-1, TRBJ2-1)
CSARGIGGTYNEQFF

SEQ ID NO: 161795 - protein, 13 aa, Homo sapiens
  CDR3 for alpha chain variable domain of TCR clone 80898 (TRAV12-2, TRAJ6)
CAMNVSRKLHTYI

SEQ ID NO: 161796 - protein, 12 aa, Homo sapiens
  CDR3 for beta chain variable domain of TCR clone 80898 (TRBV29-1, TRBJ2-3)
CSVTGGADTQYF

SEQ ID NO: 161797 - protein, 13 aa, Homo sapiens
  CDR3 for alpha chain variable domain of TCR clone 80899 (TRAV8-6, TRAJ54)
CAVSEEGAQKLVF

SEQ ID NO: 161798 - protein, 11 aa, Homo sapiens
  CDR3 for beta chain variable domain of TCR clone 80899 (TRBV12-4, TRBJ2-3)
CASSSVRGRYF

SEQ ID NO: 161799 - protein, 19 aa, Homo sapiens
  CDR3 for alpha chain variable domain of TCR clone 80900 (TRAV38-1, TRAJ53)
CAFMKHGLASGGSNYKLTF

SEQ ID NO: 161800 - protein, 13 aa, Homo sapiens
  CDR3 for beta chain variable domain of TCR clone 80900 (TRBV19, TRBJ2-7)
CASSPRQSYEQYF

SEQ ID NO: 161801 - protein, 15 aa, Homo sapiens
  CDR3 for alpha chain variable domain of TCR clone 80901 (TRAV8-6, TRAJ10)
CAVSDQAGGGNKLTF

SEQ ID NO: 161802 - protein, 12 aa, Homo sapiens
  CDR3 for beta chain variable domain of TCR clone 80901 (TRBV5-1, TRBJ2-1)
CASIGGYNEQFF

SEQ ID NO: 161803 - protein, 23 aa, Homo sapiens
  CDR3 for alpha chain variable domain of TCR clone 80902 (TRAV26-1, TRAJ38)
CIADNAGNNHIQNPDPAVYQLRD

SEQ ID NO: 161804 - protein, 12 aa, Homo sapiens
  CDR3 for beta chain variable domain of TCR clone 80902 (TRBV20-1, TRBJ1-1)
QCWGGGNTEAFF

SEQ ID NO: 161805 - protein, 14 aa, Homo sapiens
  CDR3 for alpha chain variable domain of TCR clone 80903 (TRAV8-4, TRAJ9)
CAVRINTGGFQTIF

SEQ ID NO: 161806 - protein, 15 aa, Homo sapiens
  CDR3 for beta chain variable domain of TCR clone 80903 (TRBV10-2, TRBJ2-6)
CASSEQGTGANVLTF

SEQ ID NO: 161807 - protein, 13 aa, Homo sapiens
  CDR3 for alpha chain variable domain of TCR clone 80904 (TRAV12-3, TRAJ40)
CAMSDSGTYKYIF

SEQ ID NO: 161808 - protein, 14 aa, Homo sapiens
  CDR3 for beta chain variable domain of TCR clone 80904 (TRBV7-2, TRBJ1-5)
CASSTKGAGQPQHF

SEQ ID NO: 161809 - protein, 18 aa, Homo sapiens
  CDR3 for alpha chain variable domain of TCR clone 80905 (TRAV26-1, TRAJ52)
CIVRVEGTGGTSYGKLTF

SEQ ID NO: 161810 - protein, 13 aa, Homo sapiens
  CDR3 for beta chain variable domain of TCR clone 80905 (TRBV7-3, TRBJ1-2)
CASSLKRGYGYTF

SEQ ID NO: 161811 - protein, 13 aa, Homo sapiens
  CDR3 for alpha chain variable domain of TCR clone 80906 (TRAV21, TRAJ20)
CAVGLRVDYKLSF

SEQ ID NO: 161812 - protein, 14 aa, Homo sapiens
  CDR3 for beta chain variable domain of TCR clone 80906 (TRBV4-1, TRBJ1-1)
CASSQQGNGNEAFF

SEQ ID NO: 161813 - protein, 12 aa, Homo sapiens
  CDR3 for alpha chain variable domain of TCR clone 80907 (TRAV4, TRAJ26)
CLVGDYGQNFVF

SEQ ID NO: 161814 - protein, 13 aa, Homo sapiens
  CDR3 for beta chain variable domain of TCR clone 80907 (TRBV20-1, TRBJ2-7)
CSATHTSGYEQYF

SEQ ID NO: 161815 - protein, 23 aa, Homo sapiens
  CDR3 for alpha chain variable domain of TCR clone 80908 (TRAV26-1, TRAJ38)
CIADNAGNNHIQNPDPAVYQLRE

SEQ ID NO: 161816 - protein, 12 aa, Homo sapiens
  CDR3 for beta chain variable domain of TCR clone 80908 (TRBV11-2, TRBJ2-2)
CASSLGGGELFF

SEQ ID NO: 161817 - protein, 12 aa, Homo sapiens
  CDR3 for alpha chain variable domain of TCR clone 80909 (TRAV17, TRAJ39)
CATGAAGNMLTF

SEQ ID NO: 161818 - protein, 14 aa, Homo sapiens
  CDR3 for beta chain variable domain of TCR clone 80909 (TRBV2, TRBJ1-5)
CASSENRGGQPQHF

SEQ ID NO: 161819 - protein, 15 aa, Homo sapiens
  CDR3 for alpha chain variable domain of TCR clone 80910 (TRAV2, TRAJ9)
CAVEDRVTGGFKTIF

SEQ ID NO: 161820 - protein, 14 aa, Homo sapiens
  CDR3 for beta chain variable domain of TCR clone 80910 (TRBV4-1, TRBJ2-2)
CASSQAVNTGELFF

SEQ ID NO: 161821 - protein, 13 aa, Homo sapiens
  CDR3 for alpha chain variable domain of TCR clone 80911 (TRAV21, TRAJ27)
CAARPGNAGKSTF

SEQ ID NO: 161822 - protein, 15 aa, Homo sapiens
  CDR3 for beta chain variable domain of TCR clone 80911 (TRBV19, TRBJ1-2)
CASSVGQVLNYGYTF

SEQ ID NO: 161823 - protein, 11 aa, Homo sapiens
  CDR3 for alpha chain variable domain of TCR clone 80912 (TRAV4, TRAJ23)
CLVAPGGKLIF

SEQ ID NO: 161824 - protein, 15 aa, Homo sapiens
  CDR3 for beta chain variable domain of TCR clone 80912 (TRBV7-2, TRBJ2-1)
CASSFQADEYNEQFF

SEQ ID NO: 161825 - protein, 11 aa, Homo sapiens
  CDR3 for alpha chain variable domain of TCR clone 80913 (TRAV12-2, TRAJ33)
CAVGSNYRLIW

SEQ ID NO: 161826 - protein, 14 aa, Homo sapiens
  CDR3 for beta chain variable domain of TCR clone 80913 (TRBV6-1, TRBJ2-2)
CASVEHIESGELFF

SEQ ID NO: 161827 - protein, 15 aa, Homo sapiens
  CDR3 for alpha chain variable domain of TCR clone 80914 (TRAV27, TRAJ38)
CAARRNAGNNRKLIW

SEQ ID NO: 161828 - protein, 13 aa, Homo sapiens
  CDR3 for beta chain variable domain of TCR clone 80914 (TRBV20-1, TRBJ1-1)
CSARAGGNTEALF

SEQ ID NO: 161829 - protein, 16 aa, Homo sapiens
  CDR3 for alpha chain variable domain of TCR clone 80915 (TRAV12-2, TRAJ40)
CAVIRGGTSGTYKSIF

SEQ ID NO: 161830 - protein, 14 aa, Homo sapiens
  CDR3 for beta chain variable domain of TCR clone 80915 (TRBV20-1, TRBJ2-5)
CSARDGRAGETQYF

SEQ ID NO: 161831 - protein, 16 aa, Homo sapiens
  CDR3 for alpha chain variable domain of TCR clone 80916 (TRAV12-2, TRAJ18)
CAVTTDRGSTLGRLYF

SEQ ID NO: 161832 - protein, 11 aa, Homo sapiens
  CDR3 for beta chain variable domain of TCR clone 80916 (TRBV12-4, TRBJ2-3)
CASTATDTQYF

SEQ ID NO: 161833 - protein, 13 aa, Homo sapiens
  CDR3 for alpha chain variable domain of TCR clone 80917 (TRAV1-1, TRAJ33)
CAVRRDCNYQLIW

SEQ ID NO: 161834 - protein, 16 aa, Homo sapiens
  CDR3 for beta chain variable domain of TCR clone 80917 (TRBV6-1, TRBJ2-2)
CASSAFRGGDTGELFF

SEQ ID NO: 161835 - protein, 12 aa, Homo sapiens
  CDR3 for alpha chain variable domain of TCR clone 80918 (TRAV21, TRAJ11)
CAATSGYSTLTF

SEQ ID NO: 161836 - protein, 12 aa, Homo sapiens
  CDR3 for beta chain variable domain of TCR clone 80918 (TRBV11-2, TRBJ2-2)
CASSLGGGELFF

SEQ ID NO: 161837 - protein, 13 aa, Homo sapiens
  CDR3 for alpha chain variable domain of TCR clone 80919 (TRAV2, TRAJ24)
CAVTTDSWGKLQF

SEQ ID NO: 161838 - protein, 14 aa, Homo sapiens
  CDR3 for beta chain variable domain of TCR clone 80919 (TRBV13, TRBJ2-5)
CASSLGRGRETQYF

SEQ ID NO: 161839 - protein, 18 aa, Homo sapiens
  CDR3 for alpha chain variable domain of TCR clone 80920 (TRAV12-3, TRAJ52)
CAMSVGGAGGTSYGKLTF

SEQ ID NO: 161840 - protein, 14 aa, Homo sapiens
  CDR3 for beta chain variable domain of TCR clone 80920 (TRBV7-2, TRBJ2-7)
CVSRSQGAAYEQYF

SEQ ID NO: 161841 - protein, 12 aa, Homo sapiens
  CDR3 for alpha chain variable domain of TCR clone 80921 (TRAV29/DV5, TRAJ49)
CAATDTGNQFYF

SEQ ID NO: 161842 - protein, 19 aa, Homo sapiens
  CDR3 for beta chain variable domain of TCR clone 80921 (TRBV25-1, TRBJ2-2)
CAILVYRVDRGRRTGELFF

SEQ ID NO: 161843 - protein, 14 aa, Homo sapiens
  CDR3 for alpha chain variable domain of TCR clone 80922 (TRAV12-1, TRAJ9)
CVVTGHTGGFKTIF

SEQ ID NO: 161844 - protein, 13 aa, Homo sapiens
  CDR3 for beta chain variable domain of TCR clone 80922 (TRBV20-1, TRBJ1-1)
CSARAGGNTEAFF

SEQ ID NO: 161845 - protein, 14 aa, Homo sapiens
  CDR3 for alpha chain variable domain of TCR clone 80923 (TRAV35, TRAJ33)
CAGSSQDSNYQLIW

SEQ ID NO: 161846 - protein, 19 aa, Homo sapiens
  CDR3 for beta chain variable domain of TCR clone 80923 (TRBV25-1, TRBJ2-2)
CAILVYRVDRGRKTGELFF

SEQ ID NO: 161847 - protein, 15 aa, Homo sapiens
  CDR3 for alpha chain variable domain of TCR clone 80924 (TRAV26-1, TRAJ56)
CIVRVATGANSKLTF

SEQ ID NO: 161848 - protein, 15 aa, Homo sapiens
  CDR3 for beta chain variable domain of TCR clone 80924 (TRBV9, TRBJ1-6)
CASSVAGTGDSPLHF

SEQ ID NO: 161849 - protein, 17 aa, Homo sapiens
  CDR3 for alpha chain variable domain of TCR clone 80925 (TRAV8-3, TRAJ34)
CAIPGKLIFGTGTRLQV

SEQ ID NO: 161850 - protein, 14 aa, Homo sapiens
  CDR3 for beta chain variable domain of TCR clone 80925 (TRBV7-9, TRBJ2-2)
CASSGLADTGELFF

SEQ ID NO: 161851 - protein, 10 aa, Homo sapiens
  CDR3 for alpha chain variable domain of TCR clone 80926 (TRAV26-1, TRAJ40)
CIAGTYEYIF

SEQ ID NO: 161852 - protein, 15 aa, Homo sapiens
  CDR3 for beta chain variable domain of TCR clone 80926 (TRBV19, TRBJ2-1)
CASSSPGVPLDEQFF

SEQ ID NO: 161853 - protein, 16 aa, Homo sapiens
  CDR3 for alpha chain variable domain of TCR clone 80927 (TRAV26-1, TRAJ37)
CIVRGDGSGNTGKLIF

SEQ ID NO: 161854 - protein, 17 aa, Homo sapiens
  CDR3 for beta chain variable domain of TCR clone 80927 (TRBV4-1, TRBJ2-7)
CANSRDPLGVRGGEQYF

SEQ ID NO: 161855 - protein, 13 aa, Homo sapiens
  CDR3 for alpha chain variable domain of TCR clone 80928 (TRAV27, TRAJ3)
ASLRGSSASKIIF

SEQ ID NO: 161856 - protein, 15 aa, Homo sapiens
  CDR3 for beta chain variable domain of TCR clone 80928 (TRBV28, TRBJ1-3)
CASSMGWASENTIYF

SEQ ID NO: 161857 - protein, 17 aa, Homo sapiens
  CDR3 for alpha chain variable domain of TCR clone 80929 (TRAV3, TRAJ6)
CAVRDGPRAGGSYIPTF

SEQ ID NO: 161858 - protein, 15 aa, Homo sapiens
  CDR3 for beta chain variable domain of TCR clone 80929 (TRBV5-1, TRBJ2-1)
CASSPPGAPYNEQFF

SEQ ID NO: 161859 - protein, 14 aa, Homo sapiens
  CDR3 for alpha chain variable domain of TCR clone 80930 (TRAV8-6, TRAJ29)
CAVSRASGNAPLVF

SEQ ID NO: 161860 - protein, 13 aa, Homo sapiens
  CDR3 for beta chain variable domain of TCR clone 80930 (TRBV19, TRBJ1-5)
CASSEGSNQPQHF

SEQ ID NO: 161861 - protein, 16 aa, Homo sapiens
  CDR3 for alpha chain variable domain of TCR clone 80931 (TRAV29/DV5, TRAJ30)
QCTSVQQANRDNKIIF

SEQ ID NO: 161862 - protein, 13 aa, Homo sapiens
  CDR3 for beta chain variable domain of TCR clone 80931 (TRBV12-5, TRBJ2-3)
CASQNRGTDTQYF

SEQ ID NO: 161863 - protein, 15 aa, Homo sapiens
  CDR3 for alpha chain variable domain of TCR clone 80932 (TRAV16, TRAJ16)
CALQGGGSDGQKLIF

SEQ ID NO: 161864 - protein, 15 aa, Homo sapiens
  CDR3 for beta chain variable domain of TCR clone 80932 (TRBV20-1, TRBJ2-7)
CSARDRVSGMDEQYF

SEQ ID NO: 161865 - protein, 14 aa, Homo sapiens
  CDR3 for alpha chain variable domain of TCR clone 80933 (TRAV9-2, TRAJ39)
CALYIYNAGNMLTF

SEQ ID NO: 161866 - protein, 12 aa, Homo sapiens
  CDR3 for beta chain variable domain of TCR clone 80933 (TRBV28, TRBJ2-7)
CASSFSSYEQYF

SEQ ID NO: 161867 - protein, 13 aa, Homo sapiens
  CDR3 for alpha chain variable domain of TCR clone 80934 (TRAV22, TRAJ29)
CAVGGSGNTPLVF

SEQ ID NO: 161868 - protein, 12 aa, Homo sapiens
  CDR3 for beta chain variable domain of TCR clone 80934 (TRBV11-2, TRBJ2-2)
CASSLPTGELFF

SEQ ID NO: 161869 - protein, 14 aa, Homo sapiens
  CDR3 for alpha chain variable domain of TCR clone 80935 (TRAV38-1, TRAJ45)
CAYYSGGGADALTF

SEQ ID NO: 161870 - protein, 20 aa, Homo sapiens
  CDR3 for beta chain variable domain of TCR clone 80935 (TRBV28, TRBJ2-1)
CASTPIGRSPGLAGGNEQFF

SEQ ID NO: 161871 - protein, 11 aa, Homo sapiens
  CDR3 for alpha chain variable domain of TCR clone 80936 (TRAV2, TRAJ33)
CAVDSNYQLIW

SEQ ID NO: 161872 - protein, 13 aa, Homo sapiens
  CDR3 for beta chain variable domain of TCR clone 80936 (TRBV12-5, TRBJ2-3)
CASQNRGTDTQYF

SEQ ID NO: 161873 - protein, 14 aa, Homo sapiens
  CDR3 for alpha chain variable domain of TCR clone 80937 (TRAV29/DV5, TRAJ36)
CAARRKTGANNLFF

SEQ ID NO: 161874 - protein, 14 aa, Homo sapiens
  CDR3 for beta chain variable domain of TCR clone 80937 (TRBV12-5, TRBJ2-5)
CASDSRTHQETQYF

SEQ ID NO: 161875 - protein, 14 aa, Homo sapiens
  CDR3 for alpha chain variable domain of TCR clone 80938 (TRAV26-1, TRAJ34)
CIVRVAYNTDKLSF

SEQ ID NO: 161876 - protein, 15 aa, Homo sapiens
  CDR3 for beta chain variable domain of TCR clone 80938 (TRBV20-1, TRBJ2-7)
CSARVPAAYFYEQYF

SEQ ID NO: 161877 - protein, 17 aa, Homo sapiens
  CDR3 for alpha chain variable domain of TCR clone 80939 (TRAV13-1, TRAJ52)
CAAGRNAGGTIYGKLTF

SEQ ID NO: 161878 - protein, 13 aa, Homo sapiens
  CDR3 for beta chain variable domain of TCR clone 80939 (TRBV7-2, TRBJ1-1)
CASNLKGAKVAFF

SEQ ID NO: 161879 - protein, 12 aa, Homo sapiens
  CDR3 for alpha chain variable domain of TCR clone 80940 (TRAV8-4, TRAJ47)
CAVSEYGNKLVF

SEQ ID NO: 161880 - protein, 15 aa, Homo sapiens
  CDR3 for beta chain variable domain of TCR clone 80940 (TRBV4-1, TRBJ2-5)
CASSQASGEYETQYL

SEQ ID NO: 161881 - protein, 14 aa, Homo sapiens
  CDR3 for alpha chain variable domain of TCR clone 80941 (TRAV30, TRAJ33)
CGTVAPRSNYQLIW

SEQ ID NO: 161882 - protein, 15 aa, Homo sapiens
  CDR3 for beta chain variable domain of TCR clone 80941 (TRBV10-1, TRBJ2-3)
CASSATSGGFDTQYF

SEQ ID NO: 161883 - protein, 11 aa, Homo sapiens
  CDR3 for alpha chain variable domain of TCR clone 80942 (TRAV35, TRAJ30)
CAPGGDDKIIF

SEQ ID NO: 161884 - protein, 14 aa, Homo sapiens
  CDR3 for beta chain variable domain of TCR clone 80942 (TRBV7-6, TRBJ2-1)
CASSWGGGADEQFF

SEQ ID NO: 161885 - protein, 17 aa, Homo sapiens
  CDR3 for alpha chain variable domain of TCR clone 80943 (TRAV38-1, TRAJ45)
CAFKRSHSGGGADGLTF

SEQ ID NO: 161886 - protein, 15 aa, Homo sapiens
  CDR3 for beta chain variable domain of TCR clone 80943 (TRBV7-2, TRBJ2-3)
CASSLVVRGPDTQYF

SEQ ID NO: 161887 - protein, 14 aa, Homo sapiens
  CDR3 for alpha chain variable domain of TCR clone 80944 (TRAV12-2, TRAJ17)
CAVLFKAAGNKLTF

SEQ ID NO: 161888 - protein, 15 aa, Homo sapiens
  CDR3 for beta chain variable domain of TCR clone 80944 (TRBV2, TRBJ2-1)
CASSPGTSPYNEQFF

SEQ ID NO: 161889 - protein, 14 aa, Homo sapiens
  CDR3 for alpha chain variable domain of TCR clone 80945 (TRAV1-2, TRAJ12)
CAVSGTDSSYKLIF

SEQ ID NO: 161890 - protein, 15 aa, Homo sapiens
  CDR3 for beta chain variable domain of TCR clone 80945 (TRBV2, TRBJ2-4)
CASSGTNLAKSIQYF

SEQ ID NO: 161891 - protein, 13 aa, Homo sapiens
  CDR3 for alpha chain variable domain of TCR clone 80946 (TRAV5, TRAJ11)
CAETTSGYSTLTF

SEQ ID NO: 161892 - protein, 15 aa, Homo sapiens
  CDR3 for beta chain variable domain of TCR clone 80946 (TRBV11-1, TRBJ2-7)
CASSLNYGASYEQYF

SEQ ID NO: 161893 - protein, 14 aa, Homo sapiens
  CDR3 for alpha chain variable domain of TCR clone 80947 (TRAV26-1, TRAJ45)
CIEVTGGGADGLTF

SEQ ID NO: 161894 - protein, 15 aa, Homo sapiens
  CDR3 for beta chain variable domain of TCR clone 80947 (TRBV5-1, TRBJ2-7)
CASSLDLTSSYEQYF

SEQ ID NO: 161895 - protein, 13 aa, Homo sapiens
  CDR3 for alpha chain variable domain of TCR clone 80948 (TRAV35, TRAJ42)
CAGFPGSQGNLIF

SEQ ID NO: 161896 - protein, 15 aa, Homo sapiens
  CDR3 for beta chain variable domain of TCR clone 80948 (TRBV5-1, TRBJ2-3)
CASSVTSGSTDTQYF

SEQ ID NO: 161897 - protein, 13 aa, Homo sapiens
  CDR3 for alpha chain variable domain of TCR clone 80949 (TRAV12-3, TRAJ4)
CNEQAGGYNKLIF

SEQ ID NO: 161898 - protein, 15 aa, Homo sapiens
  CDR3 for beta chain variable domain of TCR clone 80949 (TRBV5-1, TRBJ1-1)
CASGLSDLGGTEAFF

SEQ ID NO: 161899 - protein, 14 aa, Homo sapiens
  CDR3 for alpha chain variable domain of TCR clone 80950 (TRAV12-3, TRAJ43)
CAMSLGGAGTRLTA

SEQ ID NO: 161900 - protein, 13 aa, Homo sapiens
  CDR3 for beta chain variable domain of TCR clone 80950 (TRBV7-9, TRBJ1-2)
CASSLKQNYGYTF

SEQ ID NO: 161901 - protein, 14 aa, Homo sapiens
  CDR3 for alpha chain variable domain of TCR clone 80951 (TRAV12-2, TRAJ53)
CAVKGGGSNYKLTF

SEQ ID NO: 161902 - protein, 15 aa, Homo sapiens
  CDR3 for beta chain variable domain of TCR clone 80951 (TRBV11-2, TRBJ2-2)
CASGSDRVNAGELFF

SEQ ID NO: 161903 - protein, 18 aa, Homo sapiens
  CDR3 for alpha chain variable domain of TCR clone 80952 (TRAV21, TRAJ52)
CAVRPSPAGGTSYGKLTF

SEQ ID NO: 161904 - protein, 16 aa, Homo sapiens
  CDR3 for beta chain variable domain of TCR clone 80952 (TRBV7-3, TRBJ2-1)
CASSLVSGSSNNEQFF

SEQ ID NO: 161905 - protein, 15 aa, Homo sapiens
  CDR3 for alpha chain variable domain of TCR clone 80953 (TRAV3, TRAJ4)
CAVRDGTGGYNKLIF

SEQ ID NO: 161906 - protein, 15 aa, Homo sapiens
  CDR3 for beta chain variable domain of TCR clone 80953 (TRBV20-1, TRBJ2-7)
CSARDRVSGMDEQYF

SEQ ID NO: 161907 - protein, 13 aa, Homo sapiens
  CDR3 for alpha chain variable domain of TCR clone 80954 (TRAV17, TRAJ22)
CAHHSGSARQLTF

SEQ ID NO: 161908 - protein, 15 aa, Homo sapiens
  CDR3 for beta chain variable domain of TCR clone 80954 (TRBV11-2, TRBJ2-1)
CASSLGTSGLNEQFF

SEQ ID NO: 161909 - protein, 14 aa, Homo sapiens
  CDR3 for alpha chain variable domain of TCR clone 80955 (TRAV8-2, TRAJ4)
CVVSPSGGYNKLIF

SEQ ID NO: 161910 - protein, 15 aa, Homo sapiens
  CDR3 for beta chain variable domain of TCR clone 80955 (TRBV4-1, TRBJ1-4)
CASSDTRGTNEKLFF

SEQ ID NO: 161911 - protein, 14 aa, Homo sapiens
  CDR3 for alpha chain variable domain of TCR clone 80956 (TRAV27, TRAJ36)
CAGPPKRGANNLFF

SEQ ID NO: 161912 - protein, 15 aa, Homo sapiens
  CDR3 for beta chain variable domain of TCR clone 80956 (TRBV18, TRBJ2-7)
CDSSPASTPNYEQYF

SEQ ID NO: 161913 - protein, 12 aa, Homo sapiens
  CDR3 for alpha chain variable domain of TCR clone 80957 (TRAV8-3, TRAJ43)
CVVGAGNNDMRF

SEQ ID NO: 161914 - protein, 14 aa, Homo sapiens
  CDR3 for beta chain variable domain of TCR clone 80957 (TRBV4-2, TRBJ1-5)
CASSRDRGNQPQHF

SEQ ID NO: 161915 - protein, 13 aa, Homo sapiens
  CDR3 for alpha chain variable domain of TCR clone 80958 (TRAV8-1, TRAJ39)
CAGLNNAGNMLTF

SEQ ID NO: 161916 - protein, 17 aa, Homo sapiens
  CDR3 for beta chain variable domain of TCR clone 80958 (TRBV19, TRBJ2-3)
CASSIDPAGGGTDTQYS

SEQ ID NO: 161917 - protein, 12 aa, Homo sapiens
  CDR3 for alpha chain variable domain of TCR clone 80959 (TRAV13-2, TRAJ23)
CAERHRGGKLIF

SEQ ID NO: 161918 - protein, 15 aa, Homo sapiens
  CDR3 for beta chain variable domain of TCR clone 80959 (TRBV28, TRBJ1-4)
CASSRSGTGNEKLFF

SEQ ID NO: 161919 - protein, 15 aa, Homo sapiens
  CDR3 for alpha chain variable domain of TCR clone 80960 (TRAV21, TRAJ53)
CATLNSGGSNYKLSF

SEQ ID NO: 161920 - protein, 16 aa, Homo sapiens
  CDR3 for beta chain variable domain of TCR clone 80960 (TRBV20-1, TRBJ1-4)
CSAPGQGLLTNEKLFF

SEQ ID NO: 161921 - protein, 14 aa, Homo sapiens
  CDR3 for alpha chain variable domain of TCR clone 80961 (TRAV26-1, TRAJ38)
CIADNAGNNRKLIW

SEQ ID NO: 161922 - protein, 14 aa, Homo sapiens
  CDR3 for beta chain variable domain of TCR clone 80961 (TRBV20-1, TRBJ2-7)
CSAPELAGVGEQYF

SEQ ID NO: 161923 - protein, 18 aa, Homo sapiens
  CDR3 for alpha chain variable domain of TCR clone 80962 (TRAV12-3, TRAJ52)
CAMSVGGAGGTSYGKLTF

SEQ ID NO: 161924 - protein, 16 aa, Homo sapiens
  CDR3 for beta chain variable domain of TCR clone 80962 (TRBV12-5, TRBJ2-5)
CASGPRTSGNQETQYF

SEQ ID NO: 161925 - protein, 11 aa, Homo sapiens
  CDR3 for alpha chain variable domain of TCR clone 80963 (TRAV1-2, TRAJ40)
CAVPGTYKYIF

SEQ ID NO: 161926 - protein, 14 aa, Homo sapiens
  CDR3 for beta chain variable domain of TCR clone 80963 (TRBV7-6, TRBJ2-3)
CASSLGTVTDTQYF

SEQ ID NO: 161927 - protein, 14 aa, Homo sapiens
  CDR3 for alpha chain variable domain of TCR clone 80964 (TRAV38-1, TRAJ40)
CALRPTSGTYKYIF

SEQ ID NO: 161928 - protein, 14 aa, Homo sapiens
  CDR3 for beta chain variable domain of TCR clone 80964 (TRBV4-1, TRBJ2-2)
CASSQAVNTGELFF

SEQ ID NO: 161929 - protein, 14 aa, Homo sapiens
  CDR3 for alpha chain variable domain of TCR clone 80965 (TRAV23/DV6, TRAJ13)
CAASETGGYQKVTF

SEQ ID NO: 161930 - protein, 14 aa, Homo sapiens
  CDR3 for beta chain variable domain of TCR clone 80965 (TRBV7-3, TRBJ1-1)
CASSLKGGNTEAFF

SEQ ID NO: 161931 - protein, 14 aa, Homo sapiens
  CDR3 for alpha chain variable domain of TCR clone 80966 (TRAV38-1, TRAJ40)
CALRPTSGTYKYIF

SEQ ID NO: 161932 - protein, 16 aa, Homo sapiens
  CDR3 for beta chain variable domain of TCR clone 80966 (TRBV7-3, TRBJ2-2)
CASSLKRGTLSGELFF

SEQ ID NO: 161933 - protein, 14 aa, Homo sapiens
  CDR3 for alpha chain variable domain of TCR clone 80967 (TRAV38-1, TRAJ40)
CALRPTSGTYKYIF

SEQ ID NO: 161934 - protein, 15 aa, Homo sapiens
  CDR3 for beta chain variable domain of TCR clone 80967 (TRBV20-1, TRBJ2-3)
CSARVEGTYTDTQYF

SEQ ID NO: 161935 - protein, 17 aa, Homo sapiens
  CDR3 for alpha chain variable domain of TCR clone 80968 (TRAV3, TRAJ42)
CAVRDRDYGGSQGNLIF

SEQ ID NO: 161936 - protein, 14 aa, Homo sapiens
  CDR3 for beta chain variable domain of TCR clone 80968 (TRBV19, TRBJ2-7)
CASSIGGAVAEQYF

SEQ ID NO: 161937 - protein, 15 aa, Homo sapiens
  CDR3 for alpha chain variable domain of TCR clone 80969 (TRAV12-3, TRAJ42)
CAMSGHGGSQGNLIF

SEQ ID NO: 161938 - protein, 17 aa, Homo sapiens
  CDR3 for beta chain variable domain of TCR clone 80969 (TRBV11-2, TRBJ2-1)
CASSLYPPGVEYNEQFF

SEQ ID NO: 161939 - protein, 15 aa, Homo sapiens
  CDR3 for alpha chain variable domain of TCR clone 80970 (TRAV29/DV5, TRAJ24)
FAASGATDSWGKFQF

SEQ ID NO: 161940 - protein, 12 aa, Homo sapiens
  CDR3 for beta chain variable domain of TCR clone 80970 (TRBV11-2, TRBJ2-2)
CASSLPTGELFF

SEQ ID NO: 161941 - protein, 12 aa, Homo sapiens
  CDR3 for alpha chain variable domain of TCR clone 80971 (TRAV8-3, TRAJ20)
CAVGANDYKLSF

SEQ ID NO: 161942 - protein, 17 aa, Homo sapiens
  CDR3 for beta chain variable domain of TCR clone 80971 (TRBV11-2, TRBJ2-1)
CASSLYPPGVEYNEQFF

SEQ ID NO: 161943 - protein, 14 aa, Homo sapiens
  CDR3 for alpha chain variable domain of TCR clone 80972 (TRAV1-2, TRAJ8)
CAVREDTGFQQLVF

SEQ ID NO: 161944 - protein, 12 aa, Homo sapiens
  CDR3 for beta chain variable domain of TCR clone 80972 (TRBV11-2, TRBJ2-1)
CASSPGNNEQFF

SEQ ID NO: 161945 - protein, 15 aa, Homo sapiens
  CDR3 for alpha chain variable domain of TCR clone 80973 (TRAV34, TRAJ38)
CGADFTPGNNRKLIW

SEQ ID NO: 161946 - protein, 17 aa, Homo sapiens
  CDR3 for beta chain variable domain of TCR clone 80973 (TRBV11-2, TRBJ2-1)
CASSLYPPGVEYNEQFF

SEQ ID NO: 161947 - protein, 14 aa, Homo sapiens
  CDR3 for alpha chain variable domain of TCR clone 80974 (TRAV13-2, TRAJ17)
CAENSKAAGNKLIF

SEQ ID NO: 161948 - protein, 16 aa, Homo sapiens
  CDR3 for beta chain variable domain of TCR clone 80974 (TRBV12-4, TRBJ1-5)
CASSRPVGGSNQPQHF

SEQ ID NO: 161949 - protein, 13 aa, Homo sapiens
  CDR3 for alpha chain variable domain of TCR clone 80975 (TRAV2, TRAJ40)
CAVVTSGTYRYIF

SEQ ID NO: 161950 - protein, 16 aa, Homo sapiens
  CDR3 for beta chain variable domain of TCR clone 80975 (TRBV5-1, TRBJ1-1)
CASSSGGNSLNTEAFF

SEQ ID NO: 161951 - protein, 21 aa, Homo sapiens
  CDR3 for alpha chain variable domain of TCR clone 80976 (TRAV8-3, TRAJ6)
CAVGGEEATYLHLEEEPALLF

SEQ ID NO: 161952 - protein, 14 aa, Homo sapiens
  CDR3 for beta chain variable domain of TCR clone 80976 (TRBV5-1, TRBJ2-7)
CASSRGESLHEQYF

SEQ ID NO: 161953 - protein, 14 aa, Homo sapiens
  CDR3 for alpha chain variable domain of TCR clone 80977 (TRAV1-2, TRAJ16)
CAVNRFSDGQKLLF

SEQ ID NO: 161954 - protein, 17 aa, Homo sapiens
  CDR3 for beta chain variable domain of TCR clone 80977 (TRBV10-3, TRBJ2-1)
CAISETGTGGQYNEQFF

SEQ ID NO: 161955 - protein, 16 aa, Homo sapiens
  CDR3 for alpha chain variable domain of TCR clone 80978 (TRAV3, TRAJ37)
CAVRPRGSGNTGKLIF

SEQ ID NO: 161956 - protein, 17 aa, Homo sapiens
  CDR3 for beta chain variable domain of TCR clone 80978 (TRBV20-1, TRBJ2-1)
CSASSSGLAGSYNEQFF

SEQ ID NO: 161957 - protein, 11 aa, Homo sapiens
  CDR3 for alpha chain variable domain of TCR clone 80979 (TRAV2, TRAJ13)
CASGGYQKVTF

SEQ ID NO: 161958 - protein, 14 aa, Homo sapiens
  CDR3 for beta chain variable domain of TCR clone 80979 (TRBV6-1, TRBJ1-3)
CASSEDRGIDTIYF

SEQ ID NO: 161959 - protein, 14 aa, Homo sapiens
  CDR3 for alpha chain variable domain of TCR clone 80980 (TRAV17, TRAJ22)
CATSPSGSAKQLTF

SEQ ID NO: 161960 - protein, 15 aa, Homo sapiens
  CDR3 for beta chain variable domain of TCR clone 80980 (TRBV4-1, TRBJ2-5)
CASSQWDLYQETQYF

SEQ ID NO: 161961 - protein, 15 aa, Homo sapiens
  CDR3 for alpha chain variable domain of TCR clone 80981 (TRAV8-3, TRAJ41)
CAVGSNLNSGYALNF

SEQ ID NO: 161962 - protein, 17 aa, Homo sapiens
  CDR3 for beta chain variable domain of TCR clone 80981 (TRBV25-1, TRBJ2-1)
CASSAYGQGRGVYEQFF

SEQ ID NO: 161963 - protein, 14 aa, Homo sapiens
  CDR3 for alpha chain variable domain of TCR clone 80982 (TRAV26-1, TRAJ45)
CIVRVVGGADGFTF

SEQ ID NO: 161964 - protein, 16 aa, Homo sapiens
  CDR3 for beta chain variable domain of TCR clone 80982 (TRBV7-9, TRBJ1-1)
CASSLTQVRSNTEAFF

SEQ ID NO: 161965 - protein, 12 aa, Homo sapiens
  CDR3 for alpha chain variable domain of TCR clone 80983 (TRAV2, TRAJ10)
CASTGGGNKLTF

SEQ ID NO: 161966 - protein, 17 aa, Homo sapiens
  CDR3 for beta chain variable domain of TCR clone 80983 (TRBV7-3, TRBJ2-3)
CASSLMKRMRGADTQYF

SEQ ID NO: 161967 - protein, 16 aa, Homo sapiens
  CDR3 for alpha chain variable domain of TCR clone 80984 (TRAV12-3, TRAJ53)
CAMSPGSGGSNYKLTF

SEQ ID NO: 161968 - protein, 13 aa, Homo sapiens
  CDR3 for beta chain variable domain of TCR clone 80984 (TRBV10-2, TRBJ2-7)
CASGASGGYEQYF

SEQ ID NO: 161969 - protein, 16 aa, Homo sapiens
  CDR3 for alpha chain variable domain of TCR clone 80985 (TRAV30, TRAJ24)
CGTGIVDADSWGKFQF

SEQ ID NO: 161970 - protein, 13 aa, Homo sapiens
  CDR3 for beta chain variable domain of TCR clone 80985 (TRBV18, TRBJ1-2)
CASSASATEGYTF

SEQ ID NO: 161971 - protein, 13 aa, Homo sapiens
  CDR3 for alpha chain variable domain of TCR clone 80986 (TRAV1-1, TRAJ38)
CASNAGNNRKLIW

SEQ ID NO: 161972 - protein, 15 aa, Homo sapiens
  CDR3 for beta chain variable domain of TCR clone 80986 (TRBV28, TRBJ1-2)
CASIPQGSDDYGYTF

SEQ ID NO: 161973 - protein, 13 aa, Homo sapiens
  CDR3 for alpha chain variable domain of TCR clone 80987 (TRAV8-3, TRAJ6)
CAVGSGGSDIPTF

SEQ ID NO: 161974 - protein, 14 aa, Homo sapiens
  CDR3 for beta chain variable domain of TCR clone 80987 (TRBV11-2, TRBJ1-1)
CASSTQRGRTEAFF

SEQ ID NO: 161975 - protein, 13 aa, Homo sapiens
  CDR3 for alpha chain variable domain of TCR clone 80988 (TRAV17, TRAJ9)
CATDYTGGFKTIF

SEQ ID NO: 161976 - protein, 13 aa, Homo sapiens
  CDR3 for beta chain variable domain of TCR clone 80988 (TRBV7-9, TRBJ1-2)
CASSLKQNYGDTF

SEQ ID NO: 161977 - protein, 15 aa, Homo sapiens
  CDR3 for alpha chain variable domain of TCR clone 80989 (TRAV26-1, TRAJ44)
CIVRANTGTASKLTF

SEQ ID NO: 161978 - protein, 16 aa, Homo sapiens
  CDR3 for beta chain variable domain of TCR clone 80989 (TRBV7-7, TRBJ2-1)
FASSLASGTSYNEQFF

SEQ ID NO: 161979 - protein, 14 aa, Homo sapiens
  CDR3 for alpha chain variable domain of TCR clone 80990 (TRAV17, TRAJ11)
CATDARSGYSTLTF

SEQ ID NO: 161980 - protein, 15 aa, Homo sapiens
  CDR3 for beta chain variable domain of TCR clone 80990 (TRBV7-9, TRBJ1-6)
CASSSPGRGNSPLHF

SEQ ID NO: 161981 - protein, 13 aa, Homo sapiens
  CDR3 for alpha chain variable domain of TCR clone 80991 (TRAV8-3, TRAJ28)
CAVGAVGSYQLTF

SEQ ID NO: 161982 - protein, 15 aa, Homo sapiens
  CDR3 for beta chain variable domain of TCR clone 80991 (TRBV7-8, TRBJ2-7)
CASSLQHFEAYEQYF

SEQ ID NO: 161983 - protein, 12 aa, Homo sapiens
  CDR3 for alpha chain variable domain of TCR clone 80992 (TRAV30, TRAJ43)
CGTEERGNDMRF

SEQ ID NO: 161984 - protein, 13 aa, Homo sapiens
  CDR3 for beta chain variable domain of TCR clone 80992 (TRBV27, TRBJ2-7)
CAGSFSQGYEQYF

SEQ ID NO: 161985 - protein, 14 aa, Homo sapiens
  CDR3 for alpha chain variable domain of TCR clone 80993 (TRAV2, TRAJ9)
CAVEDRSGGFKTIF

SEQ ID NO: 161986 - protein, 14 aa, Homo sapiens
  CDR3 for beta chain variable domain of TCR clone 80993 (TRBV19, TRBJ1-2)
CASSRQGSSIGYTF

SEQ ID NO: 161987 - protein, 14 aa, Homo sapiens
  CDR3 for alpha chain variable domain of TCR clone 80994 (TRAV21, TRAJ15)
CAVSLNQEGTALIF

SEQ ID NO: 161988 - protein, 11 aa, Homo sapiens
  CDR3 for beta chain variable domain of TCR clone 80994 (TRBV20-1, TRBJ2-7)
CSARTSYEQYF

SEQ ID NO: 161989 - protein, 15 aa, Homo sapiens
  CDR3 for alpha chain variable domain of TCR clone 80995 (TRAV8-3, TRAJ11)
CAVGLLNSGYSTLTF

SEQ ID NO: 161990 - protein, 14 aa, Homo sapiens
  CDR3 for beta chain variable domain of TCR clone 80995 (TRBV6-1, TRBJ1-3)
CASVQGGGGNTIYF

SEQ ID NO: 161991 - protein, 12 aa, Homo sapiens
  CDR3 for alpha chain variable domain of TCR clone 80996 (TRAV12-3, TRAJ29)
CAAREGNTPLFF

SEQ ID NO: 161992 - protein, 17 aa, Homo sapiens
  CDR3 for beta chain variable domain of TCR clone 80996 (TRBV18, TRBJ2-1)
CASSPLAAGAGDNEQFF

SEQ ID NO: 161993 - protein, 13 aa, Homo sapiens
  CDR3 for alpha chain variable domain of TCR clone 80997 (TRAV3, TRAJ27)
CAVRPLGAGKSTF

SEQ ID NO: 161994 - protein, 13 aa, Homo sapiens
  CDR3 for beta chain variable domain of TCR clone 80997 (TRBV7-9, TRBJ2-3)
CAGSPGSTDTRYF

SEQ ID NO: 161995 - protein, 13 aa, Homo sapiens
  CDR3 for alpha chain variable domain of TCR clone 80998 (TRAV38-2/DV8, TRAJ57)
CAYAQGGSEKLVF

SEQ ID NO: 161996 - protein, 18 aa, Homo sapiens
  CDR3 for beta chain variable domain of TCR clone 80998 (TRBV5-5, TRBJ1-5)
CASSLRQVKGSSNQPQHF

SEQ ID NO: 161997 - protein, 17 aa, Homo sapiens
  CDR3 for alpha chain variable domain of TCR clone 80999 (TRAV3, TRAJ42)
CAVRDRDYGGSQGNLTF

SEQ ID NO: 161998 - protein, 11 aa, Homo sapiens
  CDR3 for beta chain variable domain of TCR clone 80999 (TRBV11-2, TRBJ2-2)
CASSLPGELFF

SEQ ID NO: 161999 - protein, 13 aa, Homo sapiens
  CDR3 for alpha chain variable domain of TCR clone 81000 (TRAV1-1, TRAJ11)
CAVLNSGYSTLTF

SEQ ID NO: 162000 - protein, 17 aa, Homo sapiens
  CDR3 for beta chain variable domain of TCR clone 81000 (TRBV6-3, TRBJ2-2)
CASSYAGQGIKTGELFF

SEQ ID NO: 162001 - protein, 15 aa, Homo sapiens
  CDR3 for alpha chain variable domain of TCR clone 81001 (TRAV12-1, TRAJ15)
CVVTRANQAGTALIF

SEQ ID NO: 162002 - protein, 14 aa, Homo sapiens
  CDR3 for beta chain variable domain of TCR clone 81001 (TRBV5-1, TRBJ1-1)
CASSLVSINTEAFL

SEQ ID NO: 162003 - protein, 14 aa, Homo sapiens
  CDR3 for alpha chain variable domain of TCR clone 81002 (TRAV8-4, TRAJ40)
CAVIPTPGTYKYIF

SEQ ID NO: 162004 - protein, 15 aa, Homo sapiens
  CDR3 for beta chain variable domain of TCR clone 81002 (TRBV7-2, TRBJ2-1)
CASTSASGDYNEQFF

SEQ ID NO: 162005 - protein, 11 aa, Homo sapiens
  CDR3 for alpha chain variable domain of TCR clone 81003 (TRAV4, TRAJ31)
CLVGFSARLMF

SEQ ID NO: 162006 - protein, 16 aa, Homo sapiens
  CDR3 for beta chain variable domain of TCR clone 81003 (TRBV15, TRBJ2-6)
CATSVNGGFLANVLTF

SEQ ID NO: 162007 - protein, 13 aa, Homo sapiens
  CDR3 for alpha chain variable domain of TCR clone 81004 (TRAV17, TRAJ5)
CAPMYTGRRALTF

SEQ ID NO: 162008 - protein, 15 aa, Homo sapiens
  CDR3 for beta chain variable domain of TCR clone 81004 (TRBV6-6, TRBJ2-5)
CASSPGGGLEETQYF

SEQ ID NO: 162009 - protein, 13 aa, Homo sapiens
  CDR3 for alpha chain variable domain of TCR clone 81005 (TRAV1-1, TRAJ9)
CAAKNTGGFKTIF

SEQ ID NO: 162010 - protein, 14 aa, Homo sapiens
  CDR3 for beta chain variable domain of TCR clone 81005 (TRBV20-1, TRBJ2-1)
CIAQIGGSANEQFF

SEQ ID NO: 162011 - protein, 14 aa, Homo sapiens
  CDR3 for alpha chain variable domain of TCR clone 81006 (TRAV13-1, TRAJ35)
CAASKGGFGNVLHC

SEQ ID NO: 162012 - protein, 15 aa, Homo sapiens
  CDR3 for beta chain variable domain of TCR clone 81006 (TRBV7-3, TRBJ1-6)
CASSSPGRGNSPLHF

SEQ ID NO: 162013 - protein, 13 aa, Homo sapiens
  CDR3 for alpha chain variable domain of TCR clone 81007 (TRAV21, TRAJ27)
CAALNTNAGKSTF

SEQ ID NO: 162014 - protein, 14 aa, Homo sapiens
  CDR3 for beta chain variable domain of TCR clone 81007 (TRBV27, TRBJ1-1)
CASSLLSDLSEAFF

SEQ ID NO: 162015 - protein, 15 aa, Homo sapiens
  CDR3 for alpha chain variable domain of TCR clone 81008 (TRAV12-2, )
CAVASLATTISRTLP

SEQ ID NO: 162016 - protein, 16 aa, Homo sapiens
  CDR3 for beta chain variable domain of TCR clone 81008 (TRBV5-1, TRBJ2-2)
CASSSRTGGRTGELFF

SEQ ID NO: 162017 - protein, 11 aa, Homo sapiens
  CDR3 for alpha chain variable domain of TCR clone 81009 (TRAV12-1, TRAJ34)
CVVNKGRELIF

SEQ ID NO: 162018 - protein, 12 aa, Homo sapiens
  CDR3 for beta chain variable domain of TCR clone 81009 (TRBV11-2, TRBJ2-2)
CASSLGGGELFL

SEQ ID NO: 162019 - protein, 14 aa, Homo sapiens
  CDR3 for alpha chain variable domain of TCR clone 81010 (TRAV13-1, TRAJ35)
CAASKGGFGNVLHC

SEQ ID NO: 162020 - protein, 14 aa, Homo sapiens
  CDR3 for beta chain variable domain of TCR clone 81010 (TRBV11-3, TRBJ2-2)
CASSRDTSTGELFF

SEQ ID NO: 162021 - protein, 13 aa, Homo sapiens
  CDR3 for alpha chain variable domain of TCR clone 81011 (TRAV26-1, TRAJ29)
CIVRRSGNTPLVF

SEQ ID NO: 162022 - protein, 15 aa, Homo sapiens
  CDR3 for beta chain variable domain of TCR clone 81011 (TRBV11-2, TRBJ2-2)
CASSSDRVNAGELFF

SEQ ID NO: 162023 - protein, 16 aa, Homo sapiens
  CDR3 for alpha chain variable domain of TCR clone 81012 (TRAV12-2, TRAJ10)
CAVNRVLTGGGNKLTF

SEQ ID NO: 162024 - protein, 14 aa, Homo sapiens
  CDR3 for beta chain variable domain of TCR clone 81012 (TRBV9, TRBJ2-1)
CASSVALAVNERFF

SEQ ID NO: 162025 - protein, 14 aa, Homo sapiens
  CDR3 for alpha chain variable domain of TCR clone 81013 (TRAV9-2, TRAJ48)
CALSSNFGNEKLTF

SEQ ID NO: 162026 - protein, 13 aa, Homo sapiens
  CDR3 for beta chain variable domain of TCR clone 81013 (TRBV7-2, TRBJ2-4)
CASSREHANMQYF

SEQ ID NO: 162027 - protein, 14 aa, Homo sapiens
  CDR3 for alpha chain variable domain of TCR clone 81014 (TRAV8-4, TRAJ26)
CAVSEDNYGQNFVF

SEQ ID NO: 162028 - protein, 15 aa, Homo sapiens
  CDR3 for beta chain variable domain of TCR clone 81014 (TRBV6-6, TRBJ1-1)
CASSPRGDVETEAFF

SEQ ID NO: 162029 - protein, 22 aa, Homo sapiens
  CDR3 for alpha chain variable domain of TCR clone 81015 (TRAV27, TRAJ38)
CAARRNAGNNHIQNPDPAAYQL

SEQ ID NO: 162030 - protein, 13 aa, Homo sapiens
  CDR3 for beta chain variable domain of TCR clone 81015 (TRBV12-5, TRBJ2-3)
CASGDRQSDTQYF

SEQ ID NO: 162031 - protein, 13 aa, Homo sapiens
  CDR3 for alpha chain variable domain of TCR clone 81016 (TRAV12-2, TRAJ20)
CAVYPSNDYKLSF

SEQ ID NO: 162032 - protein, 17 aa, Homo sapiens
  CDR3 for beta chain variable domain of TCR clone 81016 (TRBV19, TRBJ2-2)
CASSRNPGGFGTGELFF

SEQ ID NO: 162033 - protein, 17 aa, Homo sapiens
  CDR3 for alpha chain variable domain of TCR clone 81017 (TRAV3, TRAJ12)
CAVRDGGSMDSSYKLIF

SEQ ID NO: 162034 - protein, 14 aa, Homo sapiens
  CDR3 for beta chain variable domain of TCR clone 81017 (TRBV7-9, TRBJ1-2)
CASSRQGANYGYTF

SEQ ID NO: 162035 - protein, 16 aa, Homo sapiens
  CDR3 for alpha chain variable domain of TCR clone 81018 (TRAV8-3, TRAJ13)
CAVGAYPSGGYQKVTF

SEQ ID NO: 162036 - protein, 14 aa, Homo sapiens
  CDR3 for beta chain variable domain of TCR clone 81018 (TRBV18, TRBJ2-5)
CASSPRASAETQYF

SEQ ID NO: 162037 - protein, 14 aa, Homo sapiens
  CDR3 for alpha chain variable domain of TCR clone 81019 (TRAV12-2, TRAJ44)
CAVNPAGTASRLTF

SEQ ID NO: 162038 - protein, 15 aa, Homo sapiens
  CDR3 for beta chain variable domain of TCR clone 81019 (TRBV5-1, TRBJ2-1)
CASSPPRAPYNEQFF

SEQ ID NO: 162039 - protein, 13 aa, Homo sapiens
  CDR3 for alpha chain variable domain of TCR clone 81020 (TRAV27, TRAJ6)
CAGGTRGSYIPTF

SEQ ID NO: 162040 - protein, 14 aa, Homo sapiens
  CDR3 for beta chain variable domain of TCR clone 81020 (TRBV7-2, TRBJ1-1)
CASSFLTGTTEAFF

SEQ ID NO: 162041 - protein, 13 aa, Homo sapiens
  CDR3 for alpha chain variable domain of TCR clone 81021 (TRAV12-1, TRAJ6)
CVVFPGGSYIPTF

SEQ ID NO: 162042 - protein, 14 aa, Homo sapiens
  CDR3 for beta chain variable domain of TCR clone 81021 (TRBV20-1, TRBJ1-3)
CSASPTGAGNTLYF

SEQ ID NO: 162043 - protein, 11 aa, Homo sapiens
  CDR3 for alpha chain variable domain of TCR clone 81022 (TRAV3, TRAJ13)
CAVTSYQKVTF

SEQ ID NO: 162044 - protein, 15 aa, Homo sapiens
  CDR3 for beta chain variable domain of TCR clone 81022 (TRBV7-9, TRBJ2-7)
CACSSSGLAVYERYF

SEQ ID NO: 162045 - protein, 15 aa, Homo sapiens
  CDR3 for alpha chain variable domain of TCR clone 81023 (TRAV3, TRAJ22)
CAVRDRGGSARQLPF

SEQ ID NO: 162046 - protein, 15 aa, Homo sapiens
  CDR3 for beta chain variable domain of TCR clone 81023 (TRBV7-3, TRBJ2-2)
CASSETGQGTGELFF

SEQ ID NO: 162047 - protein, 14 aa, Homo sapiens
  CDR3 for alpha chain variable domain of TCR clone 81024 (TRAV1-2, TRAJ16)
CAVNRFSDGQKLLF

SEQ ID NO: 162048 - protein, 14 aa, Homo sapiens
  CDR3 for beta chain variable domain of TCR clone 81024 (TRBV20-1, TRBJ1-5)
CGAPGTGVGQPQHF

SEQ ID NO: 162049 - protein, 14 aa, Homo sapiens
  CDR3 for alpha chain variable domain of TCR clone 81025 (TRAV8-2, TRAJ4)
CVVSPSGGYNKLIF

SEQ ID NO: 162050 - protein, 14 aa, Homo sapiens
  CDR3 for beta chain variable domain of TCR clone 81025 (TRBV7-2, TRBJ2-7)
CASRSQGAAYEQYF

SEQ ID NO: 162051 - protein, 13 aa, Homo sapiens
  CDR3 for alpha chain variable domain of TCR clone 81026 (TRAV21, TRAJ27)
CAARPGNAGKSTF

SEQ ID NO: 162052 - protein, 15 aa, Homo sapiens
  CDR3 for beta chain variable domain of TCR clone 81026 (TRBV7-9, TRBJ1-4)
CASSARTGGNEKLFF

SEQ ID NO: 162053 - protein, 17 aa, Homo sapiens
  CDR3 for alpha chain variable domain of TCR clone 81027 (TRAV13-1, TRAJ31)
CAPRDRLMFGDGTQLVV

SEQ ID NO: 162054 - protein, 13 aa, Homo sapiens
  CDR3 for beta chain variable domain of TCR clone 81027 (TRBV19, TRBJ1-3)
CASRLSLGNTIYF

SEQ ID NO: 162055 - protein, 14 aa, Homo sapiens
  CDR3 for alpha chain variable domain of TCR clone 81028 (TRAV13-1, TRAJ9)
CAASALTGGFNTIF

SEQ ID NO: 162056 - protein, 13 aa, Homo sapiens
  CDR3 for beta chain variable domain of TCR clone 81028 (TRBV20-1, TRBJ1-1)
CSAGTVGNAEAFF

SEQ ID NO: 162057 - protein, 13 aa, Homo sapiens
  CDR3 for alpha chain variable domain of TCR clone 81029 (TRAV13-1, TRAJ6)
CAASSGGSYIPTF

SEQ ID NO: 162058 - protein, 13 aa, Homo sapiens
  CDR3 for beta chain variable domain of TCR clone 81029 (TRBV7-8, TRBJ2-7)
RASSLTGGREQYF

SEQ ID NO: 162059 - protein, 14 aa, Homo sapiens
  CDR3 for alpha chain variable domain of TCR clone 81030 (TRAV3, TRAJ7)
WAVREEEREQQTRF

SEQ ID NO: 162060 - protein, 12 aa, Homo sapiens
  CDR3 for beta chain variable domain of TCR clone 81030 (TRBV7-8, TRBJ2-7)
CASSLGDREQYF

SEQ ID NO: 162061 - protein, 15 aa, Homo sapiens
  CDR3 for alpha chain variable domain of TCR clone 81031 (TRAV3, TRAJ3)
CAVRDMSSRASKIIF

SEQ ID NO: 162062 - protein, 14 aa, Homo sapiens
  CDR3 for beta chain variable domain of TCR clone 81031 (TRBV19, TRBJ2-1)
CASPTFVLSGEQFF

SEQ ID NO: 162063 - protein, 13 aa, Homo sapiens
  CDR3 for alpha chain variable domain of TCR clone 81032 (TRAV8-3, TRAJ44)
CAVVPGTASKLTF

SEQ ID NO: 162064 - protein, 15 aa, Homo sapiens
  CDR3 for beta chain variable domain of TCR clone 81032 (TRBV7-9, TRBJ1-6)
CASSSPGRGNSPLHF

SEQ ID NO: 162065 - protein, 15 aa, Homo sapiens
  CDR3 for alpha chain variable domain of TCR clone 81033 (TRAV17, TRAJ57)
CATGPSQGGSEKLVF

SEQ ID NO: 162066 - protein, 15 aa, Homo sapiens
  CDR3 for beta chain variable domain of TCR clone 81033 (TRBV28, TRBJ2-2)
CASSLPGAGVGELFF

SEQ ID NO: 162067 - protein, 15 aa, Homo sapiens
  CDR3 for alpha chain variable domain of TCR clone 81034 (TRAV38-1, TRAJ45)
CAFMKGGGGAAGLTF

SEQ ID NO: 162068 - protein, 13 aa, Homo sapiens
  CDR3 for beta chain variable domain of TCR clone 81034 (TRBV7-9, TRBJ1-2)
CASSLKQNYGYTF

SEQ ID NO: 162069 - protein, 16 aa, Homo sapiens
  CDR3 for alpha chain variable domain of TCR clone 81035 (TRAV3, TRAJ37)
CAVRGKGSGNTGKIIF

SEQ ID NO: 162070 - protein, 15 aa, Homo sapiens
  CDR3 for beta chain variable domain of TCR clone 81035 (TRBV7-9, TRBJ1-6)
CASSSPGRGNSPLHF

SEQ ID NO: 162071 - protein, 13 aa, Homo sapiens
  CDR3 for alpha chain variable domain of TCR clone 81036 (TRAV3, TRAJ3)
CAVADSSSSKIIF

SEQ ID NO: 162072 - protein, 12 aa, Homo sapiens
  CDR3 for beta chain variable domain of TCR clone 81036 (TRBV7-8, TRBJ2-7)
CASEGGPHGQYF

SEQ ID NO: 162073 - protein, 13 aa, Homo sapiens
  CDR3 for alpha chain variable domain of TCR clone 81037 (TRAV13-1, TRAJ29)
CAASIGLNTPLVF

SEQ ID NO: 162074 - protein, 12 aa, Homo sapiens
  CDR3 for beta chain variable domain of TCR clone 81037 (TRBV7-8, TRBJ2-7)
CASSLGDREQHF

SEQ ID NO: 162075 - protein, 16 aa, Homo sapiens
  CDR3 for alpha chain variable domain of TCR clone 81038 (TRAV12-3, TRAJ53)
CAMSPGSGGSNYKLTF

SEQ ID NO: 162076 - protein, 12 aa, Homo sapiens
  CDR3 for beta chain variable domain of TCR clone 81038 (TRBV7-9, TRBJ2-7)
CASSLEGYEQYF

SEQ ID NO: 162077 - protein, 14 aa, Homo sapiens
  CDR3 for alpha chain variable domain of TCR clone 81039 (TRAV3, TRAJ21)
CAVESQANFNKFYF

SEQ ID NO: 162078 - protein, 18 aa, Homo sapiens
  CDR3 for beta chain variable domain of TCR clone 81039 (TRBV7-9, TRBJ2-1)
CASSLAVSGTSGRSEQFF

SEQ ID NO: 162079 - protein, 16 aa, Homo sapiens
  CDR3 for alpha chain variable domain of TCR clone 81040 (TRAV3, TRAJ37)
CAVRGKGSGNTGKLIF

SEQ ID NO: 162080 - protein, 14 aa, Homo sapiens
  CDR3 for beta chain variable domain of TCR clone 81040 (TRBV7-7, TRBJ2-2)
CASSRDGSTGELFF

SEQ ID NO: 162081 - protein, 13 aa, Homo sapiens
  CDR3 for alpha chain variable domain of TCR clone 81041 (TRAV27, TRAJ11)
CAGGGSGYSTLTF

SEQ ID NO: 162082 - protein, 15 aa, Homo sapiens
  CDR3 for beta chain variable domain of TCR clone 81041 (TRBV5-1, TRBJ1-1)
CASNLGQGRFAEAFF

SEQ ID NO: 162083 - protein, 15 aa, Homo sapiens
  CDR3 for alpha chain variable domain of TCR clone 81042 (TRAV26-1, TRAJ29)
CIARVVPGRNTPLVF

SEQ ID NO: 162084 - protein, 14 aa, Homo sapiens
  CDR3 for beta chain variable domain of TCR clone 81042 (TRBV7-2, TRBJ2-5)
CASSPRGSSETQYF

SEQ ID NO: 162085 - protein, 14 aa, Homo sapiens
  CDR3 for alpha chain variable domain of TCR clone 81043 (TRAV21, TRAJ45)
CAVSSGGGADGLTF

SEQ ID NO: 162086 - protein, 15 aa, Homo sapiens
  CDR3 for beta chain variable domain of TCR clone 81043 (TRBV6-1, TRBJ2-4)
CASSEAAWTINIQYF

SEQ ID NO: 162087 - protein, 11 aa, Homo sapiens
  CDR3 for alpha chain variable domain of TCR clone 81044 (TRAV12-2, TRAJ49)
CAVNTGNQFYF

SEQ ID NO: 162088 - protein, 12 aa, Homo sapiens
  CDR3 for beta chain variable domain of TCR clone 81044 (TRBV2, TRBJ2-3)
CAGSGRFDTQYF

SEQ ID NO: 162089 - protein, 18 aa, Homo sapiens
  CDR3 for alpha chain variable domain of TCR clone 81045 (TRAV26-1, TRAJ52)
CIVRVEGAGGTSYGKLTI

SEQ ID NO: 162090 - protein, 13 aa, Homo sapiens
  CDR3 for beta chain variable domain of TCR clone 81045 (TRBV7-3, TRBJ1-2)
CASSLKRGYGYTF

SEQ ID NO: 162091 - protein, 17 aa, Homo sapiens
  CDR3 for alpha chain variable domain of TCR clone 81046 (TRAV3, TRAJ6)
CAVRDGPGAGGSYIPTF

SEQ ID NO: 162092 - protein, 12 aa, Homo sapiens
  CDR3 for beta chain variable domain of TCR clone 81046 (TRBV11-2, TRBJ2-2)
CASSLGGGELFF

SEQ ID NO: 162093 - protein, 12 aa, Homo sapiens
  CDR3 for alpha chain variable domain of TCR clone 81047 (TRAV10, TRAJ43)
CVVVRVGNDMRF

SEQ ID NO: 162094 - protein, 12 aa, Homo sapiens
  CDR3 for beta chain variable domain of TCR clone 81047 (TRBV7-3, TRBJ2-1)
CASSLGFNEQFF

SEQ ID NO: 162095 - protein, 14 aa, Homo sapiens
  CDR3 for alpha chain variable domain of TCR clone 81048 (TRAV12-1, TRAJ17)
CVVNYKAAGNKLTF

SEQ ID NO: 162096 - protein, 13 aa, Homo sapiens
  CDR3 for beta chain variable domain of TCR clone 81048 (TRBV3-1, TRBJ1-1)
CASSPGVITEAFF

SEQ ID NO: 162097 - protein, 11 aa, Homo sapiens
  CDR3 for alpha chain variable domain of TCR clone 81049 (TRAV1-1, TRAJ23)
CAVRQGGKLIF

SEQ ID NO: 162098 - protein, 16 aa, Homo sapiens
  CDR3 for beta chain variable domain of TCR clone 81049 (TRBV4-1, TRBJ2-1)
CASSQEAGQGSDEQFF

SEQ ID NO: 162099 - protein, 13 aa, Homo sapiens
  CDR3 for alpha chain variable domain of TCR clone 81050 (TRAV8-3, TRAJ28)
CAVGAVGSYQLTF

SEQ ID NO: 162100 - protein, 16 aa, Homo sapiens
  CDR3 for beta chain variable domain of TCR clone 81050 (TRBV2, TRBJ1-3)
CASSRTGGSTGNTIYF

SEQ ID NO: 162101 - protein, 15 aa, Homo sapiens
  CDR3 for alpha chain variable domain of TCR clone 81051 (TRAV3, TRAJ13)
CAVRVYSGGYQKVTF

SEQ ID NO: 162102 - protein, 14 aa, Homo sapiens
  CDR3 for beta chain variable domain of TCR clone 81051 (TRBV12-5, TRBJ2-5)
CASGSRTHQETQYF

SEQ ID NO: 162103 - protein, 14 aa, Homo sapiens
  CDR3 for alpha chain variable domain of TCR clone 81052 (TRAV30, TRAJ33)
CGTVAPRSNYQLIW

SEQ ID NO: 162104 - protein, 13 aa, Homo sapiens
  CDR3 for beta chain variable domain of TCR clone 81052 (TRBV12-4, TRBJ1-2)
CASSSGLTVISTF

SEQ ID NO: 162105 - protein, 13 aa, Homo sapiens
  CDR3 for alpha chain variable domain of TCR clone 81053 (TRAV3, TRAJ27)
CAVRPLGAGKSTF

SEQ ID NO: 162106 - protein, 13 aa, Homo sapiens
  CDR3 for beta chain variable domain of TCR clone 81053 (TRBV7-9, TRBJ2-3)
CASSLGSTDTQYF

SEQ ID NO: 162107 - protein, 14 aa, Homo sapiens
  CDR3 for alpha chain variable domain of TCR clone 81054 (TRAV26-1, TRAJ49)
CIVRLTNPGNQFYF

SEQ ID NO: 162108 - protein, 13 aa, Homo sapiens
  CDR3 for beta chain variable domain of TCR clone 81054 (TRBV4-1, TRBJ2-7)
CASSQGQAYEQYF

SEQ ID NO: 162109 - protein, 11 aa, Homo sapiens
  CDR3 for alpha chain variable domain of TCR clone 81055 (TRAV13-2, TRAJ54)
RAVPGAQKLVF

SEQ ID NO: 162110 - protein, 15 aa, Homo sapiens
  CDR3 for beta chain variable domain of TCR clone 81055 (TRBV20-1, TRBJ2-7)
CSAESGTSGAYEQYF

SEQ ID NO: 162111 - protein, 13 aa, Homo sapiens
  CDR3 for alpha chain variable domain of TCR clone 81056 (TRAV30, TRAJ24)
CGTVTDGWGKLQF

SEQ ID NO: 162112 - protein, 15 aa, Homo sapiens
  CDR3 for beta chain variable domain of TCR clone 81056 (TRBV2, TRBJ2-1)
CASSDRSSGAREQFF

SEQ ID NO: 162113 - protein, 14 aa, Homo sapiens
  CDR3 for alpha chain variable domain of TCR clone 81057 (TRAV12-2, TRAJ36)
CAVDPPTGANNLFF

SEQ ID NO: 162114 - protein, 13 aa, Homo sapiens
  CDR3 for beta chain variable domain of TCR clone 81057 (TRBV20-1, TRBJ1-6)
CSAPTGLGSPLHF

SEQ ID NO: 162115 - protein, 15 aa, Homo sapiens
  CDR3 for alpha chain variable domain of TCR clone 81058 (TRAV3, TRAJ29)
CAVRDINSGNTPLVF

SEQ ID NO: 162116 - protein, 16 aa, Homo sapiens
  CDR3 for beta chain variable domain of TCR clone 81058 (TRBV4-1, TRBJ2-5)
CASSQTCYGDQETQYF

SEQ ID NO: 162117 - protein, 16 aa, Homo sapiens
  CDR3 for alpha chain variable domain of TCR clone 81059 (TRAV26-1, TRAJ37)
CIYARHGSSNTGKLIF

SEQ ID NO: 162118 - protein, 11 aa, Homo sapiens
  CDR3 for beta chain variable domain of TCR clone 81059 (TRBV7-3, TRBJ2-5)
CASSLSETQYF

SEQ ID NO: 162119 - protein, 16 aa, Homo sapiens
  CDR3 for alpha chain variable domain of TCR clone 81060 (TRAV3, TRAJ3)
CAVRYRAKSSASKIIF

SEQ ID NO: 162120 - protein, 16 aa, Homo sapiens
  CDR3 for beta chain variable domain of TCR clone 81060 (TRBV20-1, TRBJ2-4)
CSATSLAELAKNIQYF

SEQ ID NO: 162121 - protein, 10 aa, Homo sapiens
  CDR3 for alpha chain variable domain of TCR clone 81061 (TRAV23/DV6, TRAJ57)
CAGSSTLSQG

SEQ ID NO: 162122 - protein, 14 aa, Homo sapiens
  CDR3 for beta chain variable domain of TCR clone 81061 (TRBV25-1, TRBJ1-1)
CASTHLGGNTEAFF

SEQ ID NO: 162123 - protein, 13 aa, Homo sapiens
  CDR3 for alpha chain variable domain of TCR clone 81062 (TRAV3, TRAJ20)
CCEAFCNDYKLSF

SEQ ID NO: 162124 - protein, 17 aa, Homo sapiens
  CDR3 for beta chain variable domain of TCR clone 81062 (TRBV20-1, TRBJ2-2)
CSASGSGQGGLTGELFF

SEQ ID NO: 162125 - protein, 15 aa, Homo sapiens
  CDR3 for alpha chain variable domain of TCR clone 81063 (TRAV8-3, TRAJ11)
CAVGRLNSGYSTLTF

SEQ ID NO: 162126 - protein, 23 aa, Homo sapiens
  CDR3 for beta chain variable domain of TCR clone 81063 (TRBV7-9, TRBJ1-2)
EAQLEKSRLLSDRFSSGEDGYTF

SEQ ID NO: 162127 - protein, 11 aa, Homo sapiens
  CDR3 for alpha chain variable domain of TCR clone 81064 (TRAV20, TRAJ34)
CRTKGTDKLIF

SEQ ID NO: 162128 - protein, 13 aa, Homo sapiens
  CDR3 for beta chain variable domain of TCR clone 81064 (TRBV7-3, TRBJ1-1)
CASSQDWGAEAFF

SEQ ID NO: 162129 - protein, 15 aa, Homo sapiens
  CDR3 for alpha chain variable domain of TCR clone 81065 (TRAV3, TRAJ22)
CAVRDRGGSARQLTF

SEQ ID NO: 162130 - protein, 16 aa, Homo sapiens
  CDR3 for beta chain variable domain of TCR clone 81065 (TRBV5-4, TRBJ2-3)
CSSQQPGAGGADTQYF

SEQ ID NO: 162131 - protein, 11 aa, Homo sapiens
  CDR3 for alpha chain variable domain of TCR clone 81066 (TRAV35, TRAJ30)
CAPGGDDKIIF

SEQ ID NO: 162132 - protein, 14 aa, Homo sapiens
  CDR3 for beta chain variable domain of TCR clone 81066 (TRBV7-9, TRBJ2-1)
CASSPRDSLYEQFF

SEQ ID NO: 162133 - protein, 15 aa, Homo sapiens
  CDR3 for alpha chain variable domain of TCR clone 81067 (TRAV26-1, TRAJ44)
CIVRIGTGTASKLTF

SEQ ID NO: 162134 - protein, 16 aa, Homo sapiens
  CDR3 for beta chain variable domain of TCR clone 81067 (TRBV11-1, TRBJ1-1)
CATNPRDRAFNTEAFF

SEQ ID NO: 162135 - protein, 19 aa, Homo sapiens
  CDR3 for alpha chain variable domain of TCR clone 81068 (TRAV38-1, TRAJ53)
CAFMKHGLESGGSNYKLTF

SEQ ID NO: 162136 - protein, 11 aa, Homo sapiens
  CDR3 for beta chain variable domain of TCR clone 81068 (TRBV19, TRBJ1-1)
CASSIGSEAFF

SEQ ID NO: 162137 - protein, 14 aa, Homo sapiens
  CDR3 for alpha chain variable domain of TCR clone 81069 (TRAV16, TRAJ33)
CTLSAMDSNYQLIW

SEQ ID NO: 162138 - protein, 16 aa, Homo sapiens
  CDR3 for beta chain variable domain of TCR clone 81069 (TRBV12-4, TRBJ2-3)
CASSFPSNTNTDTQCF

SEQ ID NO: 162139 - protein, 15 aa, Homo sapiens
  CDR3 for alpha chain variable domain of TCR clone 81070 (TRAV23/DV6, TRAJ18)
CAAMYRGSTLGRLYF

SEQ ID NO: 162140 - protein, 13 aa, Homo sapiens
  CDR3 for beta chain variable domain of TCR clone 81070 (TRBV7-2, TRBJ2-7)
CASSSPSGSEQYF

SEQ ID NO: 162141 - protein, 15 aa, Homo sapiens
  CDR3 for alpha chain variable domain of TCR clone 81071 (TRAV21, TRAJ38)
CAVRQDAGNNRKLIW

SEQ ID NO: 162142 - protein, 16 aa, Homo sapiens
  CDR3 for beta chain variable domain of TCR clone 81071 (TRBV4-2, TRBJ1-1)
CDSRPLDGGGDTEAFF

SEQ ID NO: 162143 - protein, 14 aa, Homo sapiens
  CDR3 for alpha chain variable domain of TCR clone 81072 (TRAV10, TRAJ32)
CGEPRGGATNRLIF

SEQ ID NO: 162144 - protein, 14 aa, Homo sapiens
  CDR3 for beta chain variable domain of TCR clone 81072 (TRBV5-4, TRBJ2-2)
CASRLDGGTGELFF

SEQ ID NO: 162145 - protein, 16 aa, Homo sapiens
  CDR3 for alpha chain variable domain of TCR clone 81073 (TRAV30, TRAJ24)
CGTEIVDADSWGKFQV

SEQ ID NO: 162146 - protein, 13 aa, Homo sapiens
  CDR3 for beta chain variable domain of TCR clone 81073 (TRBV20-1, TRBJ1-1)
CSARGGGNTEAFF

SEQ ID NO: 162147 - protein, 11 aa, Homo sapiens
  CDR3 for alpha chain variable domain of TCR clone 81074 (TRAV12-2, TRAJ43)
CAAYNNNGMRF

SEQ ID NO: 162148 - protein, 14 aa, Homo sapiens
  CDR3 for beta chain variable domain of TCR clone 81074 (TRBV7-8, TRBJ1-2)
CASSAGTAIYGYTF

SEQ ID NO: 162149 - protein, 15 aa, Homo sapiens
  CDR3 for alpha chain variable domain of TCR clone 81075 (TRAV3, TRAJ47)
CAVRDIGEYGYKLVF

SEQ ID NO: 162150 - protein, 14 aa, Homo sapiens
  CDR3 for beta chain variable domain of TCR clone 81075 (TRBV13, TRBJ2-5)
CASSLERVGETQYF

SEQ ID NO: 162151 - protein, 12 aa, Homo sapiens
  CDR3 for alpha chain variable domain of TCR clone 81076 (TRAV13-1, TRAJ53)
CAAGGSNYKLTF

SEQ ID NO: 162152 - protein, 12 aa, Homo sapiens
  CDR3 for beta chain variable domain of TCR clone 81076 (TRBV11-2, TRBJ2-2)
CASSLGGGELFF

SEQ ID NO: 162153 - protein, 14 aa, Homo sapiens
  CDR3 for alpha chain variable domain of TCR clone 81077 (TRAV35, TRAJ22)
CAGLRPGSARQLTF

SEQ ID NO: 162154 - protein, 11 aa, Homo sapiens
  CDR3 for beta chain variable domain of TCR clone 81077 (TRBV19, TRBJ1-1)
CASSIGSEAFF

SEQ ID NO: 162155 - protein, 14 aa, Homo sapiens
  CDR3 for alpha chain variable domain of TCR clone 81078 (TRAV39, TRAJ54)
CAVVLIQGAQKLGF

SEQ ID NO: 162156 - protein, 16 aa, Homo sapiens
  CDR3 for beta chain variable domain of TCR clone 81078 (TRBV3-1, TRBJ2-7)
CASSQGATGVAYEQYF

SEQ ID NO: 162157 - protein, 13 aa, Homo sapiens
  CDR3 for alpha chain variable domain of TCR clone 81079 (TRAV12-2, TRAJ10)
CAVPTGGGNKLTF

SEQ ID NO: 162158 - protein, 11 aa, Homo sapiens
  CDR3 for beta chain variable domain of TCR clone 81079 (TRBV6-1, TRBJ2-1)
CASISSDEQFF

SEQ ID NO: 162159 - protein, 11 aa, Homo sapiens
  CDR3 for alpha chain variable domain of TCR clone 81080 (TRAV2, TRAJ23)
CAVETRGKLIF

SEQ ID NO: 162160 - protein, 14 aa, Homo sapiens
  CDR3 for beta chain variable domain of TCR clone 81080 (TRBV2, TRBJ2-3)
CASSEGHNTDTQYF

SEQ ID NO: 162161 - protein, 13 aa, Homo sapiens
  CDR3 for alpha chain variable domain of TCR clone 81081 (TRAV8-4, TRAJ48)
RAVSLFGNEKLTF

SEQ ID NO: 162162 - protein, 15 aa, Homo sapiens
  CDR3 for beta chain variable domain of TCR clone 81081 (TRBV20-1, TRBJ2-7)
CSARKGLAESYEQYF

SEQ ID NO: 162163 - protein, 12 aa, Homo sapiens
  CDR3 for alpha chain variable domain of TCR clone 81082 (TRAV12-3, TRAJ17)
CAMTLTGNKLTF

SEQ ID NO: 162164 - protein, 15 aa, Homo sapiens
  CDR3 for beta chain variable domain of TCR clone 81082 (TRBV20-1, TRBJ2-7)
CSARDWVAGMDEQYF

SEQ ID NO: 162165 - protein, 13 aa, Homo sapiens
  CDR3 for alpha chain variable domain of TCR clone 81083 (TRAV12-1, TRAJ16)
CVVNGPDGQKLLF

SEQ ID NO: 162166 - protein, 13 aa, Homo sapiens
  CDR3 for beta chain variable domain of TCR clone 81083 (TRBV2, TRBJ1-1)
CARNPTGGFHDFF

SEQ ID NO: 162167 - protein, 15 aa, Homo sapiens
  CDR3 for alpha chain variable domain of TCR clone 81084 (TRAV26-1, TRAJ48)
CIVRVGDFGNEKLTS

SEQ ID NO: 162168 - protein, 16 aa, Homo sapiens
  CDR3 for beta chain variable domain of TCR clone 81084 (TRBV4-1, TRBJ2-3)
CASSQRAGGLTDTQYF

SEQ ID NO: 162169 - protein, 16 aa, Homo sapiens
  CDR3 for alpha chain variable domain of TCR clone 81085 (TRAV16, TRAJ52)
RALSAAGGTSYGKLTF

SEQ ID NO: 162170 - protein, 17 aa, Homo sapiens
  CDR3 for beta chain variable domain of TCR clone 81085 (TRBV11-2, TRBJ2-1)
CASSLYPPGVEYNEQFF

SEQ ID NO: 162171 - protein, 16 aa, Homo sapiens
  CDR3 for alpha chain variable domain of TCR clone 81086 (TRAV30, TRAJ24)
CGTEIVDADSWGKFQF

SEQ ID NO: 162172 - protein, 18 aa, Homo sapiens
  CDR3 for beta chain variable domain of TCR clone 81086 (TRBV11-2, TRBJ2-3)
CARSLGGASRGAPNTQYF

SEQ ID NO: 162173 - protein, 18 aa, Homo sapiens
  CDR3 for alpha chain variable domain of TCR clone 81087 (TRAV13-1, TRAJ52)
CAASKRSAGGTSYGQLTF

SEQ ID NO: 162174 - protein, 13 aa, Homo sapiens
  CDR3 for beta chain variable domain of TCR clone 81087 (TRBV12-4, TRBJ1-2)
CASSLRQGKGYTF

SEQ ID NO: 162175 - protein, 13 aa, Homo sapiens
  CDR3 for alpha chain variable domain of TCR clone 81088 (TRAV21, TRAJ27)
CAARPGNAGKSTF

SEQ ID NO: 162176 - protein, 14 aa, Homo sapiens
  CDR3 for beta chain variable domain of TCR clone 81088 (TRBV7-9, TRBJ2-5)
CASSLDTAQGTQYF

SEQ ID NO: 162177 - protein, 12 aa, Homo sapiens
  CDR3 for alpha chain variable domain of TCR clone 81089 (TRAV6, TRAJ37)
CALGSNTGKLIF

SEQ ID NO: 162178 - protein, 14 aa, Homo sapiens
  CDR3 for beta chain variable domain of TCR clone 81089 (TRBV19, TRBJ2-2)
VPSWGTGSPGSCFF

SEQ ID NO: 162179 - protein, 14 aa, Homo sapiens
  CDR3 for alpha chain variable domain of TCR clone 81090 (TRAV8-3, TRAJ4)
CAVGAAGGYNELIF

SEQ ID NO: 162180 - protein, 18 aa, Homo sapiens
  CDR3 for beta chain variable domain of TCR clone 81090 (TRBV6-5, TRBJ1-1)
CASSYSAPGGTGGTEAFF

SEQ ID NO: 162181 - protein, 15 aa, Homo sapiens
  CDR3 for alpha chain variable domain of TCR clone 81091 (TRAV8-1, TRAJ6)
CAVDTPPGGSYIPTF

SEQ ID NO: 162182 - protein, 14 aa, Homo sapiens
  CDR3 for beta chain variable domain of TCR clone 81091 (TRBV12-4, TRBJ2-1)
CASSLGQGASEQFF

SEQ ID NO: 162183 - protein, 14 aa, Homo sapiens
  CDR3 for alpha chain variable domain of TCR clone 81092 (TRAV12-2, TRAJ40)
CAVKIPSGTYKYIF

SEQ ID NO: 162184 - protein, 14 aa, Homo sapiens
  CDR3 for beta chain variable domain of TCR clone 81092 (TRBV20-1, TRBJ1-1)
CSAQKRIGGTEAFF

SEQ ID NO: 162185 - protein, 15 aa, Homo sapiens
  CDR3 for alpha chain variable domain of TCR clone 81093 (TRAV26-1, TRAJ47)
CIVRVGWGYGNKLVF

SEQ ID NO: 162186 - protein, 11 aa, Homo sapiens
  CDR3 for beta chain variable domain of TCR clone 81093 (TRBV7-8, TRBJ2-7)
CASSLSLEQYF

SEQ ID NO: 162187 - protein, 12 aa, Homo sapiens
  CDR3 for alpha chain variable domain of TCR clone 81094 (TRAV12-1, TRAJ40)
CVVYSGTYKYIF

SEQ ID NO: 162188 - protein, 15 aa, Homo sapiens
  CDR3 for beta chain variable domain of TCR clone 81094 (TRBV7-9, TRBJ1-6)
CASSSPGRGNSTLHF

SEQ ID NO: 162189 - protein, 12 aa, Homo sapiens
  CDR3 for alpha chain variable domain of TCR clone 81095 (TRAV16, TRAJ26)
CALRSYGQNFVF

SEQ ID NO: 162190 - protein, 13 aa, Homo sapiens
  CDR3 for beta chain variable domain of TCR clone 81095 (TRBV19, TRBJ1-1)
CASSIGPQAEAFF

SEQ ID NO: 162191 - protein, 14 aa, Homo sapiens
  CDR3 for alpha chain variable domain of TCR clone 81096 (TRAV8-4, TRAJ5)
CAVSTDTGRRALTF

SEQ ID NO: 162192 - protein, 13 aa, Homo sapiens
  CDR3 for beta chain variable domain of TCR clone 81096 (TRBV10-3, TRBJ1-2)
CAISERDSYGYTF

SEQ ID NO: 162193 - protein, 13 aa, Homo sapiens
  CDR3 for alpha chain variable domain of TCR clone 81097 (TRAV1-1, TRAJ9)
CAVKNTGGFKTIF

SEQ ID NO: 162194 - protein, 16 aa, Homo sapiens
  CDR3 for beta chain variable domain of TCR clone 81097 (TRBV12-5, TRBJ2-5)
CASGPRTSGNQETQYF

SEQ ID NO: 162195 - protein, 13 aa, Homo sapiens
  CDR3 for alpha chain variable domain of TCR clone 81098 (TRAV12-2, TRAJ4)
CAGFSGGYNKLLF

SEQ ID NO: 162196 - protein, 14 aa, Homo sapiens
  CDR3 for beta chain variable domain of TCR clone 81098 (TRBV24-1, TRBJ1-1)
CATSIPRGDTEAFF

SEQ ID NO: 162197 - protein, 11 aa, Homo sapiens
  CDR3 for alpha chain variable domain of TCR clone 81099 (TRAV21, TRAJ11)
CAVNGYSTLTF

SEQ ID NO: 162198 - protein, 14 aa, Homo sapiens
  CDR3 for beta chain variable domain of TCR clone 81099 (TRBV7-9, TRBJ2-1)
CASSPRDSLYEQFF

SEQ ID NO: 162199 - protein, 12 aa, Homo sapiens
  CDR3 for alpha chain variable domain of TCR clone 81100 (TRAV1-2, TRAJ33)
CAALDSNYQLIW

SEQ ID NO: 162200 - protein, 12 aa, Homo sapiens
  CDR3 for beta chain variable domain of TCR clone 81100 (TRBV28, TRBJ2-3)
CASSLYRDTQYF

SEQ ID NO: 162201 - protein, 11 aa, Homo sapiens
  CDR3 for alpha chain variable domain of TCR clone 81101 (TRAV12-3, TRAJ27)
CAMANAGKSTF

SEQ ID NO: 162202 - protein, 15 aa, Homo sapiens
  CDR3 for beta chain variable domain of TCR clone 81101 (TRBV7-2, TRBJ2-7)
CASSLGGAKSGEQYF

SEQ ID NO: 162203 - protein, 14 aa, Homo sapiens
  CDR3 for alpha chain variable domain of TCR clone 81102 (TRAV8-4, TRAJ38)
CAVRNAGNNRKLIW

SEQ ID NO: 162204 - protein, 15 aa, Homo sapiens
  CDR3 for beta chain variable domain of TCR clone 81102 (TRBV7-2, TRBJ2-7)
CASSLKGALTYEQYF

SEQ ID NO: 162205 - protein, 13 aa, Homo sapiens
  CDR3 for alpha chain variable domain of TCR clone 81103 (TRAV12-1, TRAJ29)
CVVNGPGNTPLVF

SEQ ID NO: 162206 - protein, 13 aa, Homo sapiens
  CDR3 for beta chain variable domain of TCR clone 81103 (TRBV7-2, TRBJ2-5)
CASSRGGLETRYF

SEQ ID NO: 162207 - protein, 15 aa, Homo sapiens
  CDR3 for alpha chain variable domain of TCR clone 81104 (TRAV17, TRAJ4)
CATGPWSGGYNKLIF

SEQ ID NO: 162208 - protein, 13 aa, Homo sapiens
  CDR3 for beta chain variable domain of TCR clone 81104 (TRBV6-6, TRBJ2-7)
CASSPKHLAEQYF

SEQ ID NO: 162209 - protein, 12 aa, Homo sapiens
  CDR3 for alpha chain variable domain of TCR clone 81105 (TRAV23/DV6, TRAJ24)
CAANDSWGKLPF

SEQ ID NO: 162210 - protein, 16 aa, Homo sapiens
  CDR3 for beta chain variable domain of TCR clone 81105 (TRBV12-4, TRBJ2-5)
CASSLSTSGGKETQYF

SEQ ID NO: 162211 - protein, 14 aa, Homo sapiens
  CDR3 for alpha chain variable domain of TCR clone 81106 (TRAV12-2, TRAJ13)
CAVKKTGGYQKVTF

SEQ ID NO: 162212 - protein, 14 aa, Homo sapiens
  CDR3 for beta chain variable domain of TCR clone 81106 (TRBV5-5, TRBJ2-7)
CASSLGQGTYEQYC

SEQ ID NO: 162213 - protein, 16 aa, Homo sapiens
  CDR3 for alpha chain variable domain of TCR clone 81107 (TRAV38-2/DV8, TRAJ47)
CAYRSAIMEYGNKLVF

SEQ ID NO: 162214 - protein, 13 aa, Homo sapiens
  CDR3 for beta chain variable domain of TCR clone 81107 (TRBV7-3, TRBJ1-1)
CASSQDWGAEAFF

SEQ ID NO: 162215 - protein, 15 aa, Homo sapiens
  CDR3 for alpha chain variable domain of TCR clone 81108 (TRAV3, TRAJ11)
CAVRDRGSGYSTLTF

SEQ ID NO: 162216 - protein, 19 aa, Homo sapiens
  CDR3 for beta chain variable domain of TCR clone 81108 (TRBV25-1, TRBJ2-2)
CAILVYRVDRGRKTGELFF

SEQ ID NO: 162217 - protein, 13 aa, Homo sapiens
  CDR3 for alpha chain variable domain of TCR clone 81109 (TRAV12-1, TRAJ16)
CVVNGPDGQKLLF

SEQ ID NO: 162218 - protein, 15 aa, Homo sapiens
  CDR3 for beta chain variable domain of TCR clone 81109 (TRBV6-3, TRBJ2-7)
FASSSPGTVFYEQYF

SEQ ID NO: 162219 - protein, 13 aa, Homo sapiens
  CDR3 for alpha chain variable domain of TCR clone 81110 (TRAV12-1, TRAJ34)
CVVTGYNPDKLIF

SEQ ID NO: 162220 - protein, 13 aa, Homo sapiens
  CDR3 for beta chain variable domain of TCR clone 81110 (TRBV28, TRBJ2-7)
CASKAGGVYEQYF

SEQ ID NO: 162221 - protein, 16 aa, Homo sapiens
  CDR3 for alpha chain variable domain of TCR clone 81111 (TRAV20, TRAJ10)
CAVLRGLAGGGNKLTF

SEQ ID NO: 162222 - protein, 14 aa, Homo sapiens
  CDR3 for beta chain variable domain of TCR clone 81111 (TRBV19, TRBJ1-5)
CASRAPDSFLSQHF

SEQ ID NO: 162223 - protein, 12 aa, Homo sapiens
  CDR3 for alpha chain variable domain of TCR clone 81112 (TRAV12-3, TRAJ17)
RAMTLTGNKLTF

SEQ ID NO: 162224 - protein, 13 aa, Homo sapiens
  CDR3 for beta chain variable domain of TCR clone 81112 (TRBV20-1, TRBJ2-5)
CSARGDYQETQYF

SEQ ID NO: 162225 - protein, 17 aa, Homo sapiens
  CDR3 for alpha chain variable domain of TCR clone 81113 (TRAV1-1, TRAJ13)
CAVRGNLGVTRKLPLEL

SEQ ID NO: 162226 - protein, 19 aa, Homo sapiens
  CDR3 for beta chain variable domain of TCR clone 81113 (TRBV14, TRBJ2-1)
CASSQDQLWEAPEYNEQFF

SEQ ID NO: 162227 - protein, 12 aa, Homo sapiens
  CDR3 for alpha chain variable domain of TCR clone 81114 (TRAV25, TRAJ33)
CAGPDSNYQLIW

SEQ ID NO: 162228 - protein, 20 aa, Homo sapiens
  CDR3 for beta chain variable domain of TCR clone 81114 (TRBV4-1, TRBJ2-2)
CASSRASPPGLASNTGELFF

SEQ ID NO: 162229 - protein, 13 aa, Homo sapiens
  CDR3 for alpha chain variable domain of TCR clone 81115 (TRAV26-1, TRAJ41)
CIVRINSGYALNF

SEQ ID NO: 162230 - protein, 13 aa, Homo sapiens
  CDR3 for beta chain variable domain of TCR clone 81115 (TRBV20-1, TRBJ1-5)
CSATAAGGQHQHF

SEQ ID NO: 162231 - protein, 18 aa, Homo sapiens
  CDR3 for alpha chain variable domain of TCR clone 81116 (TRAV12-2, )
CAVEDIQNPDPAVYQLRD

SEQ ID NO: 162232 - protein, 15 aa, Homo sapiens
  CDR3 for beta chain variable domain of TCR clone 81116 (TRBV6-5, TRBJ2-7)
CASSRTSGFSYEQHF

SEQ ID NO: 162233 - protein, 15 aa, Homo sapiens
  CDR3 for alpha chain variable domain of TCR clone 81117 (TRAV3, TRAJ5)
CAVRDRKTGWRALTF

SEQ ID NO: 162234 - protein, 15 aa, Homo sapiens
  CDR3 for beta chain variable domain of TCR clone 81117 (TRBV7-8, TRBJ2-1)
CASSLADSLYNEQFF

SEQ ID NO: 162235 - protein, 17 aa, Homo sapiens
  CDR3 for alpha chain variable domain of TCR clone 81118 (TRAV36/DV7, TRAJ42)
CAGGGMNYGGSQGNLIF

SEQ ID NO: 162236 - protein, 14 aa, Homo sapiens
  CDR3 for beta chain variable domain of TCR clone 81118 (TRBV19, TRBJ2-1)
CASPTFVLSGEQFF

SEQ ID NO: 162237 - protein, 11 aa, Homo sapiens
  CDR3 for alpha chain variable domain of TCR clone 81119 (TRAV16, TRAJ42)
CALASQGNLIF

SEQ ID NO: 162238 - protein, 11 aa, Homo sapiens
  CDR3 for beta chain variable domain of TCR clone 81119 (TRBV11-2, TRBJ1-1)
CASSINTEAFF

SEQ ID NO: 162239 - protein, 14 aa, Homo sapiens
  CDR3 for alpha chain variable domain of TCR clone 81120 (TRAV12-3, TRAJ12)
CAMSALDSSYKLIF

SEQ ID NO: 162240 - protein, 16 aa, Homo sapiens
  CDR3 for beta chain variable domain of TCR clone 81120 (TRBV7-9, TRBJ2-3)
CASSWQGNPGTDTQYF

SEQ ID NO: 162241 - protein, 12 aa, Homo sapiens
  CDR3 for alpha chain variable domain of TCR clone 81121 (TRAV13-1, TRAJ21)
CAAFFNFNKFYF

SEQ ID NO: 162242 - protein, 14 aa, Homo sapiens
  CDR3 for beta chain variable domain of TCR clone 81121 (TRBV19, TRBJ2-1)
CASPTFVLSGEQFF

SEQ ID NO: 162243 - protein, 14 aa, Homo sapiens
  CDR3 for alpha chain variable domain of TCR clone 81122 (TRAV4, TRAJ9)
CLVGSGTGGFKTIF

SEQ ID NO: 162244 - protein, 15 aa, Homo sapiens
  CDR3 for beta chain variable domain of TCR clone 81122 (TRBV11-2, TRBJ2-2)
CASSSDRVNAGELFF

SEQ ID NO: 162245 - protein, 11 aa, Homo sapiens
  CDR3 for alpha chain variable domain of TCR clone 81123 (TRAV20, TRAJ21)
CLKGNFNKFYF

SEQ ID NO: 162246 - protein, 13 aa, Homo sapiens
  CDR3 for beta chain variable domain of TCR clone 81123 (TRBV7-9, TRBJ2-7)
CASSFAGAYEQYF

SEQ ID NO: 162247 - protein, 11 aa, Homo sapiens
  CDR3 for alpha chain variable domain of TCR clone 81124 (TRAV3, TRAJ21)
CAVGNSNKFYF

SEQ ID NO: 162248 - protein, 14 aa, Homo sapiens
  CDR3 for beta chain variable domain of TCR clone 81124 (TRBV11-2, TRBJ1-2)
CASSLGTANYGYTF

SEQ ID NO: 162249 - protein, 12 aa, Homo sapiens
  CDR3 for alpha chain variable domain of TCR clone 81125 (TRAV17, TRAJ39)
YATGAAGNMLTF

SEQ ID NO: 162250 - protein, 14 aa, Homo sapiens
  CDR3 for beta chain variable domain of TCR clone 81125 (TRBV7-9, TRBJ1-2)
CASSRQGANYGYTF

SEQ ID NO: 162251 - protein, 12 aa, Homo sapiens
  CDR3 for alpha chain variable domain of TCR clone 81126 (TRAV12-3, TRAJ17)
CAMTLTGNKLTF

SEQ ID NO: 162252 - protein, 16 aa, Homo sapiens
  CDR3 for beta chain variable domain of TCR clone 81126 (TRBV6-5, TRBJ2-1)
CASSYSLAGGYNEQFF

SEQ ID NO: 162253 - protein, 15 aa, Homo sapiens
  CDR3 for alpha chain variable domain of TCR clone 81127 (TRAV2, TRAJ15)
CAVEDREQAGTALIF

SEQ ID NO: 162254 - protein, 13 aa, Homo sapiens
  CDR3 for beta chain variable domain of TCR clone 81127 (TRBV25-1, TRBJ1-1)
CASSGQVRAEAFF

SEQ ID NO: 162255 - protein, 12 aa, Homo sapiens
  CDR3 for alpha chain variable domain of TCR clone 81128 (TRAV35, TRAJ54)
CADLQGAQKLVF

SEQ ID NO: 162256 - protein, 17 aa, Homo sapiens
  CDR3 for beta chain variable domain of TCR clone 81128 (TRBV7-3, TRBJ2-3)
CASSLMKRMRGADTQYF

SEQ ID NO: 162257 - protein, 13 aa, Homo sapiens
  CDR3 for alpha chain variable domain of TCR clone 81129 (TRAV21, TRAJ57)
CAVIEGGSEKLVF

SEQ ID NO: 162258 - protein, 14 aa, Homo sapiens
  CDR3 for beta chain variable domain of TCR clone 81129 (TRBV12-5, TRBJ2-5)
CASGSRIHQETQYF

SEQ ID NO: 162259 - protein, 14 aa, Homo sapiens
  CDR3 for alpha chain variable domain of TCR clone 81130 (TRAV1-2, TRAJ16)
CAVNRFSDGPKLLF

SEQ ID NO: 162260 - protein, 11 aa, Homo sapiens
  CDR3 for beta chain variable domain of TCR clone 81130 (TRBV29-1, TRBJ2-5)
CSEDRTGTQYF

SEQ ID NO: 162261 - protein, 22 aa, Homo sapiens
  CDR3 for alpha chain variable domain of TCR clone 81131 (TRAV8-3, TRAJ38)
CAVGASNAGNNHIQNPDPAVYH

SEQ ID NO: 162262 - protein, 15 aa, Homo sapiens
  CDR3 for beta chain variable domain of TCR clone 81131 (TRBV11-3, TRBJ1-3)
CASSLFGPSGNTIYF

SEQ ID NO: 162263 - protein, 15 aa, Homo sapiens
  CDR3 for alpha chain variable domain of TCR clone 81132 (TRAV8-3, TRAJ11)
CAVGLLISGYSTLTF

SEQ ID NO: 162264 - protein, 16 aa, Homo sapiens
  CDR3 for beta chain variable domain of TCR clone 81132 (TRBV7-9, TRBJ1-2)
CASSLGFSSGEDGYTF

SEQ ID NO: 162265 - protein, 14 aa, Homo sapiens
  CDR3 for alpha chain variable domain of TCR clone 81133 (TRAV1-2, TRAJ8)
CAVREDTGFQKLVF

SEQ ID NO: 162266 - protein, 14 aa, Homo sapiens
  CDR3 for beta chain variable domain of TCR clone 81133 (TRBV6-3, TRBJ1-1)
CASSYQRRDTEAFF

SEQ ID NO: 162267 - protein, 13 aa, Homo sapiens
  CDR3 for alpha chain variable domain of TCR clone 81134 (TRAV26-2, TRAJ54)
CIPRVGGAQKLVF

SEQ ID NO: 162268 - protein, 15 aa, Homo sapiens
  CDR3 for beta chain variable domain of TCR clone 81134 (TRBV4-1, TRBJ1-1)
CASSQEWGHYTEAFF

SEQ ID NO: 162269 - protein, 13 aa, Homo sapiens
  CDR3 for alpha chain variable domain of TCR clone 81135 (TRAV27, TRAJ49)
RAPRPYTGNQFYF

SEQ ID NO: 162270 - protein, 16 aa, Homo sapiens
  CDR3 for beta chain variable domain of TCR clone 81135 (TRBV4-1, TRBJ1-2)
CASSQDAGQVLYGYTF

SEQ ID NO: 162271 - protein, 13 aa, Homo sapiens
  CDR3 for alpha chain variable domain of TCR clone 81136 (TRAV1-2, TRAJ12)
CAVSMDSSSKLIF

SEQ ID NO: 162272 - protein, 15 aa, Homo sapiens
  CDR3 for beta chain variable domain of TCR clone 81136 (TRBV27, TRBJ2-5)
CASSLIPSGGETQYF

SEQ ID NO: 162273 - protein, 12 aa, Homo sapiens
  CDR3 for alpha chain variable domain of TCR clone 81137 (TRAV12-3, TRAJ20)
CAMVRGDYKLSF

SEQ ID NO: 162274 - protein, 15 aa, Homo sapiens
  CDR3 for beta chain variable domain of TCR clone 81137 (TRBV29-1, TRBJ2-7)
CSVEFFDRGSYEQYF

SEQ ID NO: 162275 - protein, 13 aa, Homo sapiens
  CDR3 for alpha chain variable domain of TCR clone 81138 (TRAV3, TRAJ21)
CAGREPDFNKFYF

SEQ ID NO: 162276 - protein, 13 aa, Homo sapiens
  CDR3 for beta chain variable domain of TCR clone 81138 (TRBV9, TRBJ2-1)
CASSPSGGNEQFF

SEQ ID NO: 162277 - protein, 12 aa, Homo sapiens
  CDR3 for alpha chain variable domain of TCR clone 81139 (TRAV8-3, TRAJ34)
WASGYNTDKLIF

SEQ ID NO: 162278 - protein, 13 aa, Homo sapiens
  CDR3 for beta chain variable domain of TCR clone 81139 (TRBV6-4, TRBJ2-3)
CTSSVSWADTQYF

SEQ ID NO: 162279 - protein, 16 aa, Homo sapiens
  CDR3 for alpha chain variable domain of TCR clone 81140 (TRAV3, TRAJ37)
CTVRPHGSGNTGKLIF

SEQ ID NO: 162280 - protein, 13 aa, Homo sapiens
  CDR3 for beta chain variable domain of TCR clone 81140 (TRBV2, TRBJ1-5)
CASGTGGYQPQHF

SEQ ID NO: 162281 - protein, 13 aa, Homo sapiens
  CDR3 for alpha chain variable domain of TCR clone 81141 (TRAV13-1, TRAJ43)
CAASLSNNNDMRF

SEQ ID NO: 162282 - protein, 11 aa, Homo sapiens
  CDR3 for beta chain variable domain of TCR clone 81141 (TRBV5-1, TRBJ2-5)
CWSAGEKTQYF

SEQ ID NO: 162283 - protein, 13 aa, Homo sapiens
  CDR3 for alpha chain variable domain of TCR clone 81142 (TRAV17, TRAJ5)
CALRGTGRRALTF

SEQ ID NO: 162284 - protein, 15 aa, Homo sapiens
  CDR3 for beta chain variable domain of TCR clone 81142 (TRBV11-3, TRBJ2-3)
CASLKDGREGDTQYF

SEQ ID NO: 162285 - protein, 16 aa, Homo sapiens
  CDR3 for alpha chain variable domain of TCR clone 81143 (TRAV3, TRAJ32)
CCERRNYGGATNKLVF

SEQ ID NO: 162286 - protein, 13 aa, Homo sapiens
  CDR3 for beta chain variable domain of TCR clone 81143 (TRBV2, TRBJ1-1)
CASSEGGNTEAFF

SEQ ID NO: 162287 - protein, 11 aa, Homo sapiens
  CDR3 for alpha chain variable domain of TCR clone 81144 (TRAV17, TRAJ9)
CATTGGFKTIF

SEQ ID NO: 162288 - protein, 11 aa, Homo sapiens
  CDR3 for beta chain variable domain of TCR clone 81144 (TRBV19, TRBJ2-2)
CASRYSGELFF

SEQ ID NO: 162289 - protein, 13 aa, Homo sapiens
  CDR3 for alpha chain variable domain of TCR clone 81145 (TRAV3, TRAJ27)
CAVRPLGAGQSTF

SEQ ID NO: 162290 - protein, 12 aa, Homo sapiens
  CDR3 for beta chain variable domain of TCR clone 81145 (TRBV7-9, TRBJ2-7)
CATRTDAYEQYF

SEQ ID NO: 162291 - protein, 12 aa, Homo sapiens
  CDR3 for alpha chain variable domain of TCR clone 81146 (TRAV1-2, TRAJ24)
CAVGGSWGKFQF

SEQ ID NO: 162292 - protein, 15 aa, Homo sapiens
  CDR3 for beta chain variable domain of TCR clone 81146 (TRBV6-1, TRBJ2-7)
CASSERVGNPYEQYF

SEQ ID NO: 162293 - protein, 14 aa, Homo sapiens
  CDR3 for alpha chain variable domain of TCR clone 81147 (TRAV3, TRAJ22)
CAVRDYGSARQLTF

SEQ ID NO: 162294 - protein, 14 aa, Homo sapiens
  CDR3 for beta chain variable domain of TCR clone 81147 (TRBV19, TRBJ2-1)
CASPTFVLSGEQFF

SEQ ID NO: 162295 - protein, 16 aa, Homo sapiens
  CDR3 for alpha chain variable domain of TCR clone 81148 (TRAV3, TRAJ37)
CAVRPHGFGNTGKLIF

SEQ ID NO: 162296 - protein, 16 aa, Homo sapiens
  CDR3 for beta chain variable domain of TCR clone 81148 (TRBV9, TRBJ1-2)
CASSVEEKVSPYGYTF

SEQ ID NO: 162297 - protein, 11 aa, Homo sapiens
  CDR3 for alpha chain variable domain of TCR clone 81149 (TRAV36/DV7, TRAJ54)
CAVEGAQRLVF

SEQ ID NO: 162298 - protein, 13 aa, Homo sapiens
  CDR3 for beta chain variable domain of TCR clone 81149 (TRBV12-4, TRBJ1-5)
CASSSRSYQPQHF

SEQ ID NO: 162299 - protein, 15 aa, Homo sapiens
  CDR3 for alpha chain variable domain of TCR clone 81150 (TRAV12-3, TRAJ6)
CAMSATTGGSYIPTF

SEQ ID NO: 162300 - protein, 15 aa, Homo sapiens
  CDR3 for beta chain variable domain of TCR clone 81150 (TRBV11-2, TRBJ1-2)
CASSLEGVQRNGYTF

SEQ ID NO: 162301 - protein, 16 aa, Homo sapiens
  CDR3 for alpha chain variable domain of TCR clone 81151 (TRAV20, TRAJ22)
CAVQASSSGSARQPTF

SEQ ID NO: 162302 - protein, 13 aa, Homo sapiens
  CDR3 for beta chain variable domain of TCR clone 81151 (TRBV7-2, TRBJ2-5)
CASSQTSVETQYF

SEQ ID NO: 162303 - protein, 13 aa, Homo sapiens
  CDR3 for alpha chain variable domain of TCR clone 81152 (TRAV4, TRAJ42)
CLVGGGSQGNLVF

SEQ ID NO: 162304 - protein, 16 aa, Homo sapiens
  CDR3 for beta chain variable domain of TCR clone 81152 (TRBV5-1, TRBJ2-3)
CASSLQGRVGADTQYF

SEQ ID NO: 162305 - protein, 15 aa, Homo sapiens
  CDR3 for alpha chain variable domain of TCR clone 81153 (TRAV12-2, TRAJ53)
CAVNGGGGSNYNLTF

SEQ ID NO: 162306 - protein, 13 aa, Homo sapiens
  CDR3 for beta chain variable domain of TCR clone 81153 (TRBV3-1, TRBJ1-1)
RASSPGVITEAFF

SEQ ID NO: 162307 - protein, 14 aa, Homo sapiens
  CDR3 for alpha chain variable domain of TCR clone 81154 (TRAV2, TRAJ9)
CAVDPNTGGFKTTF

SEQ ID NO: 162308 - protein, 13 aa, Homo sapiens
  CDR3 for beta chain variable domain of TCR clone 81154 (TRBV20-1, TRBJ2-1)
CSASTGTSNEQFF

SEQ ID NO: 162309 - protein, 17 aa, Homo sapiens
  CDR3 for alpha chain variable domain of TCR clone 81155 (TRAV3, TRAJ6)
CAVRDGPRAGGRYIPPF

SEQ ID NO: 162310 - protein, 14 aa, Homo sapiens
  CDR3 for beta chain variable domain of TCR clone 81155 (TRBV7-2, TRBJ2-7)
CASSPKTSFYEQYF

SEQ ID NO: 162311 - protein, 12 aa, Homo sapiens
  CDR3 for alpha chain variable domain of TCR clone 81156 (TRAV21, TRAJ33)
CAKMDSNYQLIW

SEQ ID NO: 162312 - protein, 11 aa, Homo sapiens
  CDR3 for beta chain variable domain of TCR clone 81156 (TRBV29-1, TRBJ2-5)
CSEDRTGTQYF

SEQ ID NO: 162313 - protein, 13 aa, Homo sapiens
  CDR3 for alpha chain variable domain of TCR clone 81157 (TRAV17, TRAJ9)
CATDYTGGFKTIF

SEQ ID NO: 162314 - protein, 16 aa, Homo sapiens
  CDR3 for beta chain variable domain of TCR clone 81157 (TRBV7-7, TRBJ2-1)
CAISLASGTSYNEQFF

SEQ ID NO: 162315 - protein, 12 aa, Homo sapiens
  CDR3 for alpha chain variable domain of TCR clone 81158 (TRAV1-2, TRAJ29)
CAVPSGNTPLVF

SEQ ID NO: 162316 - protein, 15 aa, Homo sapiens
  CDR3 for beta chain variable domain of TCR clone 81158 (TRBV6-3, TRBJ2-7)
CASSSPGTVFYEQYF

SEQ ID NO: 162317 - protein, 17 aa, Homo sapiens
  CDR3 for alpha chain variable domain of TCR clone 81159 (TRAV23/DV6, TRAJ57)
CAASSTLSQGGSEKLVF

SEQ ID NO: 162318 - protein, 14 aa, Homo sapiens
  CDR3 for beta chain variable domain of TCR clone 81159 (TRBV25-1, TRBJ1-1)
CASTNLGGNTEAFF

SEQ ID NO: 162319 - protein, 14 aa, Homo sapiens
  CDR3 for alpha chain variable domain of TCR clone 81160 (TRAV29/DV5, TRAJ44)
CAAFLVGTASKLTF

SEQ ID NO: 162320 - protein, 16 aa, Homo sapiens
  CDR3 for beta chain variable domain of TCR clone 81160 (TRBV19, TRBJ1-5)
CASSIQGGYSNRPQHF

SEQ ID NO: 162321 - protein, 14 aa, Homo sapiens
  CDR3 for alpha chain variable domain of TCR clone 81161 (TRAV3, TRAJ21)
CAAESQANFNKFYF

SEQ ID NO: 162322 - protein, 18 aa, Homo sapiens
  CDR3 for beta chain variable domain of TCR clone 81161 (TRBV7-9, TRBJ2-1)
CASSLAVSGTSGRNEQFF

SEQ ID NO: 162323 - protein, 17 aa, Homo sapiens
  CDR3 for alpha chain variable domain of TCR clone 81162 (TRAV3, TRAJ6)
CAVRDGPRAGGSYIPTF

SEQ ID NO: 162324 - protein, 13 aa, Homo sapiens
  CDR3 for beta chain variable domain of TCR clone 81162 (TRBV14, TRBJ1-1)
CASSREFGTEAFF

SEQ ID NO: 162325 - protein, 15 aa, Homo sapiens
  CDR3 for alpha chain variable domain of TCR clone 81163 (TRAV3, TRAJ9)
CAVRARTTGGFKTIF

SEQ ID NO: 162326 - protein, 12 aa, Homo sapiens
  CDR3 for beta chain variable domain of TCR clone 81163 (TRBV11-2, TRBJ2-7)
CASSLPTYEQYF

SEQ ID NO: 162327 - protein, 15 aa, Homo sapiens
  CDR3 for alpha chain variable domain of TCR clone 81164 (TRAV23/DV6, TRAJ44)
CAATIRYGTASKLTF

SEQ ID NO: 162328 - protein, 14 aa, Homo sapiens
  CDR3 for beta chain variable domain of TCR clone 81164 (TRBV19, TRBJ2-1)
CASPTFVLSGEQFF

SEQ ID NO: 162329 - protein, 14 aa, Homo sapiens
  CDR3 for alpha chain variable domain of TCR clone 81165 (TRAV12-3, TRAJ57)
CAMSAWGGSEKLVF

SEQ ID NO: 162330 - protein, 20 aa, Homo sapiens
  CDR3 for beta chain variable domain of TCR clone 81165 (TRBV7-8, TRBJ2-2)
CASSHLFPGPTIHITGELFF

SEQ ID NO: 162331 - protein, 13 aa, Homo sapiens
  CDR3 for alpha chain variable domain of TCR clone 81166 (TRAV29/DV5, TRAJ44)
CAARTGTASKLTF

SEQ ID NO: 162332 - protein, 13 aa, Homo sapiens
  CDR3 for beta chain variable domain of TCR clone 81166 (TRBV19, TRBJ2-7)
CASRKAGGSEQYF

SEQ ID NO: 162333 - protein, 13 aa, Homo sapiens
  CDR3 for alpha chain variable domain of TCR clone 81167 (TRAV27, TRAJ6)
CAGGTRGSYIPTF

SEQ ID NO: 162334 - protein, 14 aa, Homo sapiens
  CDR3 for beta chain variable domain of TCR clone 81167 (TRBV7-2, TRBJ2-5)
CASSPRGSSETQYF

SEQ ID NO: 162335 - protein, 13 aa, Homo sapiens
  CDR3 for alpha chain variable domain of TCR clone 81168 (TRAV38-1, TRAJ42)
CARWGGSQGNLIF

SEQ ID NO: 162336 - protein, 12 aa, Homo sapiens
  CDR3 for beta chain variable domain of TCR clone 81168 (TRBV5-1, TRBJ2-7)
CASSLDSYEQYF

SEQ ID NO: 162337 - protein, 13 aa, Homo sapiens
  CDR3 for alpha chain variable domain of TCR clone 81169 (TRAV3, TRAJ21)
CAVGEPDFNKFYF

SEQ ID NO: 162338 - protein, 12 aa, Homo sapiens
  CDR3 for beta chain variable domain of TCR clone 81169 (TRBV7-2, TRBJ1-5)
CASSLWSQPQHF

SEQ ID NO: 162339 - protein, 14 aa, Homo sapiens
  CDR3 for alpha chain variable domain of TCR clone 81170 (TRAV8-1, TRAJ15)
CAVNGQQAGTALIF

SEQ ID NO: 162340 - protein, 14 aa, Homo sapiens
  CDR3 for beta chain variable domain of TCR clone 81170 (TRBV7-2, TRBJ2-7)
CASSPKTSFYEQYF

SEQ ID NO: 162341 - protein, 16 aa, Homo sapiens
  CDR3 for alpha chain variable domain of TCR clone 81171 (TRAV20, TRAJ52)
CAVLPDGGTSYGKLTF

SEQ ID NO: 162342 - protein, 11 aa, Homo sapiens
  CDR3 for beta chain variable domain of TCR clone 81171 (TRBV19, TRBJ1-1)
CASSIGSEAFF

SEQ ID NO: 162343 - protein, 15 aa, Homo sapiens
  CDR3 for alpha chain variable domain of TCR clone 81172 (TRAV13-1, TRAJ17)
CAASIERAAGNKLTF

SEQ ID NO: 162344 - protein, 15 aa, Homo sapiens
  CDR3 for beta chain variable domain of TCR clone 81172 (TRBV4-1, TRBJ1-4)
CASSDTGGTNEKLFF

SEQ ID NO: 162345 - protein, 13 aa, Homo sapiens
  CDR3 for alpha chain variable domain of TCR clone 81173 (TRAV13-2, TRAJ48)
CAEMDFGNEKLTF

SEQ ID NO: 162346 - protein, 18 aa, Homo sapiens
  CDR3 for beta chain variable domain of TCR clone 81173 (TRBV11-2, TRBJ2-3)
CASSLGGASRGAPNTQYF

SEQ ID NO: 162347 - protein, 15 aa, Homo sapiens
  CDR3 for alpha chain variable domain of TCR clone 81174 (TRAV8-3, TRAJ45)
CASSYSGGGADGLTF

SEQ ID NO: 162348 - protein, 16 aa, Homo sapiens
  CDR3 for beta chain variable domain of TCR clone 81174 (TRBV2, TRBJ2-1)
CASSVGGPLSYNEQFF

SEQ ID NO: 162349 - protein, 14 aa, Homo sapiens
  CDR3 for alpha chain variable domain of TCR clone 81175 (TRAV12-3, TRAJ10)
SHLPLTGGGNKLTF

SEQ ID NO: 162350 - protein, 11 aa, Homo sapiens
  CDR3 for beta chain variable domain of TCR clone 81175 (TRBV7-2, TRBJ2-3)
CASSSSDTQYF

SEQ ID NO: 162351 - protein, 16 aa, Homo sapiens
  CDR3 for alpha chain variable domain of TCR clone 81176 (TRAV16, TRAJ4)
CALSRMSSGGYNKLIF

SEQ ID NO: 162352 - protein, 14 aa, Homo sapiens
  CDR3 for beta chain variable domain of TCR clone 81176 (TRBV4-1, TRBJ2-2)
CASSQAVNTGELFF

SEQ ID NO: 162353 - protein, 17 aa, Homo sapiens
  CDR3 for alpha chain variable domain of TCR clone 81177 (TRAV3, TRAJ6)
CAVRDGPRAGGSYIPTF

SEQ ID NO: 162354 - protein, 16 aa, Homo sapiens
  CDR3 for beta chain variable domain of TCR clone 81177 (TRBV4-2, TRBJ2-3)
CASSQELAGDTDTQYF

SEQ ID NO: 162355 - protein, 19 aa, Homo sapiens
  CDR3 for alpha chain variable domain of TCR clone 81178 (TRAV26-1, TRAJ52)
CIVRAHRNAGGTSYGKLTF

SEQ ID NO: 162356 - protein, 15 aa, Homo sapiens
  CDR3 for beta chain variable domain of TCR clone 81178 (TRBV12-4, TRBJ2-5)
CASSPPTGLQETQYC

SEQ ID NO: 162357 - protein, 17 aa, Homo sapiens
  CDR3 for alpha chain variable domain of TCR clone 81179 (TRAV3, TRAJ42)
CAVRDRDYGGSQGNHIF

SEQ ID NO: 162358 - protein, 12 aa, Homo sapiens
  CDR3 for beta chain variable domain of TCR clone 81179 (TRBV11-2, TRBJ2-1)
CASSPGNNEQFF

SEQ ID NO: 162359 - protein, 14 aa, Homo sapiens
  CDR3 for alpha chain variable domain of TCR clone 81180 (TRAV1-2, TRAJ16)
CAVNRFSDGQKLLF

SEQ ID NO: 162360 - protein, 13 aa, Homo sapiens
  CDR3 for beta chain variable domain of TCR clone 81180 (TRBV12-4, TRBJ2-1)
CASRPWAYNEQFF

SEQ ID NO: 162361 - protein, 16 aa, Homo sapiens
  CDR3 for alpha chain variable domain of TCR clone 81181 (TRAV30, TRAJ24)
CGTEIVDADSWRKFQF

SEQ ID NO: 162362 - protein, 14 aa, Homo sapiens
  CDR3 for beta chain variable domain of TCR clone 81181 (TRBV18, TRBJ2-3)
CASSPRTSTDTQYF

SEQ ID NO: 162363 - protein, 11 aa, Homo sapiens
  CDR3 for alpha chain variable domain of TCR clone 81182 (TRAV35, TRAJ30)
CAGPGDDKNIF

SEQ ID NO: 162364 - protein, 14 aa, Homo sapiens
  CDR3 for beta chain variable domain of TCR clone 81182 (TRBV7-6, TRBJ1-6)
CASSQAGGGSPLHF

SEQ ID NO: 162365 - protein, 17 aa, Homo sapiens
  CDR3 for alpha chain variable domain of TCR clone 81183 (TRAV26-2, TRAJ42)
CILRDVGYGGSQGNLIF

SEQ ID NO: 162366 - protein, 16 aa, Homo sapiens
  CDR3 for beta chain variable domain of TCR clone 81183 (TRBV7-9, TRBJ2-1)
CASSDVAGGSYNEQFF

SEQ ID NO: 162367 - protein, 14 aa, Homo sapiens
  CDR3 for alpha chain variable domain of TCR clone 81184 (TRAV12-2, TRAJ40)
CAVKIPSGTYKYIF

SEQ ID NO: 162368 - protein, 15 aa, Homo sapiens
  CDR3 for beta chain variable domain of TCR clone 81184 (TRBV20-1, TRBJ1-4)
CSARREWGVNEKLFL

SEQ ID NO: 162369 - protein, 14 aa, Homo sapiens
  CDR3 for alpha chain variable domain of TCR clone 81185 (TRAV9-2, TRAJ38)
CALSRAGNNRKLIW

SEQ ID NO: 162370 - protein, 15 aa, Homo sapiens
  CDR3 for beta chain variable domain of TCR clone 81185 (TRBV11-3, TRBJ2-3)
CASLKDGREGDTQYF

SEQ ID NO: 162371 - protein, 14 aa, Homo sapiens
  CDR3 for alpha chain variable domain of TCR clone 81186 (TRAV1-2, TRAJ16)
CAVNRFSDGQKLLF

SEQ ID NO: 162372 - protein, 15 aa, Homo sapiens
  CDR3 for beta chain variable domain of TCR clone 81186 (TRBV9, TRBJ1-6)
CPSSVAGTGDSPLHF

SEQ ID NO: 162373 - protein, 12 aa, Homo sapiens
  CDR3 for alpha chain variable domain of TCR clone 81187 (TRAV12-1, TRAJ40)
CVVYSGTYKYIF

SEQ ID NO: 162374 - protein, 15 aa, Homo sapiens
  CDR3 for beta chain variable domain of TCR clone 81187 (TRBV5-1, TRBJ2-1)
CASSLEGLAANEQFF

SEQ ID NO: 162375 - protein, 12 aa, Homo sapiens
  CDR3 for alpha chain variable domain of TCR clone 81188 (TRAV17, TRAJ20)
CATDVDDYKLSF

SEQ ID NO: 162376 - protein, 18 aa, Homo sapiens
  CDR3 for beta chain variable domain of TCR clone 81188 (TRBV6-5, TRBJ2-5)
CASSYSQAGGSYQETQYF

SEQ ID NO: 162377 - protein, 12 aa, Homo sapiens
  CDR3 for alpha chain variable domain of TCR clone 81189 (TRAV13-1, TRAJ36)
WRGGAGANNIFF

SEQ ID NO: 162378 - protein, 16 aa, Homo sapiens
  CDR3 for beta chain variable domain of TCR clone 81189 (TRBV7-9, TRBJ2-5)
CASRLEIGTRKETQYF

SEQ ID NO: 162379 - protein, 14 aa, Homo sapiens
  CDR3 for alpha chain variable domain of TCR clone 81190 (TRAV12-1, TRAJ27)
CGEHIRTNVGKSTF

SEQ ID NO: 162380 - protein, 15 aa, Homo sapiens
  CDR3 for beta chain variable domain of TCR clone 81190 (TRBV19, TRBJ1-1)
CASTSGQIQNTEAFF

SEQ ID NO: 162381 - protein, 14 aa, Homo sapiens
  CDR3 for alpha chain variable domain of TCR clone 81191 (TRAV1-2, TRAJ8)
CAVREDTGFQKLVF

SEQ ID NO: 162382 - protein, 14 aa, Homo sapiens
  CDR3 for beta chain variable domain of TCR clone 81191 (TRBV4-2, TRBJ1-4)
CASSQGATNEKLFF

SEQ ID NO: 162383 - protein, 14 aa, Homo sapiens
  CDR3 for alpha chain variable domain of TCR clone 81192 (TRAV1-2, TRAJ8)
CAVREDTGFQKLVF

SEQ ID NO: 162384 - protein, 12 aa, Homo sapiens
  CDR3 for beta chain variable domain of TCR clone 81192 (TRBV7-8, TRBJ2-7)
CASSLAGYEQYF

SEQ ID NO: 162385 - protein, 12 aa, Homo sapiens
  CDR3 for alpha chain variable domain of TCR clone 81193 (TRAV27, TRAJ42)
CAGGGSQGNLIF

SEQ ID NO: 162386 - protein, 13 aa, Homo sapiens
  CDR3 for beta chain variable domain of TCR clone 81193 (TRBV19, TRBJ2-7)
CASSMRSSYEQYF

SEQ ID NO: 162387 - protein, 13 aa, Homo sapiens
  CDR3 for alpha chain variable domain of TCR clone 81194 (TRAV12-1, TRAJ49)
CVVSKSTGNQFYF

SEQ ID NO: 162388 - protein, 13 aa, Homo sapiens
  CDR3 for beta chain variable domain of TCR clone 81194 (TRBV10-3, TRBJ2-7)
CASKLAVNYEQYF

SEQ ID NO: 162389 - protein, 14 aa, Homo sapiens
  CDR3 for alpha chain variable domain of TCR clone 81195 (TRAV12-1, TRAJ9)
CVVNRRTGGFKTIF

SEQ ID NO: 162390 - protein, 12 aa, Homo sapiens
  CDR3 for beta chain variable domain of TCR clone 81195 (TRBV7-9, TRBJ2-7)
CASSLEGYEQYF

SEQ ID NO: 162391 - protein, 14 aa, Homo sapiens
  CDR3 for alpha chain variable domain of TCR clone 81196 (TRAV12-2, TRAJ44)
CAVNPDGTASKLTF

SEQ ID NO: 162392 - protein, 16 aa, Homo sapiens
  CDR3 for beta chain variable domain of TCR clone 81196 (TRBV2, TRBJ2-6)
CASSEVGGAGANVLTF

SEQ ID NO: 162393 - protein, 16 aa, Homo sapiens
  CDR3 for alpha chain variable domain of TCR clone 81197 (TRAV30, TRAJ24)
CGTEIVDADSWGKFQL

SEQ ID NO: 162394 - protein, 18 aa, Homo sapiens
  CDR3 for beta chain variable domain of TCR clone 81197 (TRBV7-9, TRBJ2-7)
CASSLTTSGSRTWYEQYF

SEQ ID NO: 162395 - protein, 16 aa, Homo sapiens
  CDR3 for alpha chain variable domain of TCR clone 81198 (TRAV4, TRAJ22)
CLVGDLYSGSARQLTF

SEQ ID NO: 162396 - protein, 16 aa, Homo sapiens
  CDR3 for beta chain variable domain of TCR clone 81198 (TRBV7-9, TRBJ2-1)
YASSDVAGGSYNEQFF

SEQ ID NO: 162397 - protein, 14 aa, Homo sapiens
  CDR3 for alpha chain variable domain of TCR clone 81199 (TRAV26-1, TRAJ38)
CIADNAGNNRKLIL

SEQ ID NO: 162398 - protein, 16 aa, Homo sapiens
  CDR3 for beta chain variable domain of TCR clone 81199 (TRBV19, TRBJ2-1)
CASSKAGPSSYNEQFF

SEQ ID NO: 162399 - protein, 14 aa, Homo sapiens
  CDR3 for alpha chain variable domain of TCR clone 81200 (TRAV1-2, TRAJ16)
CAVNRFSDDQKLLF

SEQ ID NO: 162400 - protein, 14 aa, Homo sapiens
  CDR3 for beta chain variable domain of TCR clone 81200 (TRBV7-9, TRBJ2-3)
CASSLEDGTDTQYF

SEQ ID NO: 162401 - protein, 17 aa, Homo sapiens
  CDR3 for alpha chain variable domain of TCR clone 81201 (TRAV2, TRAJ36)
CAVEDRGNWGKHPLLWD

SEQ ID NO: 162402 - protein, 14 aa, Homo sapiens
  CDR3 for beta chain variable domain of TCR clone 81201 (TRBV7-9, TRBJ2-5)
CASSLDTAQETQYF

SEQ ID NO: 162403 - protein, 14 aa, Homo sapiens
  CDR3 for alpha chain variable domain of TCR clone 81202 (TRAV41, TRAJ54)
CAVRSNQGAQKLAF

SEQ ID NO: 162404 - protein, 15 aa, Homo sapiens
  CDR3 for beta chain variable domain of TCR clone 81202 (TRBV20-1, TRBJ2-7)
CSAESGTSGAYEQYF

SEQ ID NO: 162405 - protein, 12 aa, Homo sapiens
  CDR3 for alpha chain variable domain of TCR clone 81203 (TRAV13-1, TRAJ21)
CAAKEGFNKFYF

SEQ ID NO: 162406 - protein, 16 aa, Homo sapiens
  CDR3 for beta chain variable domain of TCR clone 81203 (TRBV7-9, TRBJ2-1)
CASSDVAGGSYNEQFF

SEQ ID NO: 162407 - protein, 12 aa, Homo sapiens
  CDR3 for alpha chain variable domain of TCR clone 81204 (TRAV21, TRAJ27)
CAANTNAGKSTF

SEQ ID NO: 162408 - protein, 13 aa, Homo sapiens
  CDR3 for beta chain variable domain of TCR clone 81204 (TRBV20-1, TRBJ2-3)
CSARAGGRDTQYF

SEQ ID NO: 162409 - protein, 14 aa, Homo sapiens
  CDR3 for alpha chain variable domain of TCR clone 81205 (TRAV30, TRAJ33)
CGTVAPRSNYQLIW

SEQ ID NO: 162410 - protein, 14 aa, Homo sapiens
  CDR3 for beta chain variable domain of TCR clone 81205 (TRBV28, TRBJ2-1)
CASSYYTAYNEQFF

SEQ ID NO: 162411 - protein, 12 aa, Homo sapiens
  CDR3 for alpha chain variable domain of TCR clone 81206 (TRAV12-3, TRAJ17)
CAVTLTGNKLTF

SEQ ID NO: 162412 - protein, 15 aa, Homo sapiens
  CDR3 for beta chain variable domain of TCR clone 81206 (TRBV19, TRBJ2-1)
CASSILGEGRNEQFF

SEQ ID NO: 162413 - protein, 18 aa, Homo sapiens
  CDR3 for alpha chain variable domain of TCR clone 81207 (TRAV21, TRAJ45)
CCGGPQGGSGGGADGLTF

SEQ ID NO: 162414 - protein, 12 aa, Homo sapiens
  CDR3 for beta chain variable domain of TCR clone 81207 (TRBV29-1, TRBJ1-3)
CSTRDSGNTMYF

SEQ ID NO: 162415 - protein, 14 aa, Homo sapiens
  CDR3 for alpha chain variable domain of TCR clone 81208 (TRAV1-2, TRAJ12)
CAVSGTDSSYKLIF

SEQ ID NO: 162416 - protein, 13 aa, Homo sapiens
  CDR3 for beta chain variable domain of TCR clone 81208 (TRBV10-3, TRBJ2-7)
CASKLAVNYEQYF

SEQ ID NO: 162417 - protein, 12 aa, Homo sapiens
  CDR3 for alpha chain variable domain of TCR clone 81209 (TRAV8-3, TRAJ26)
CAGDNYGQNFVF

SEQ ID NO: 162418 - protein, 17 aa, Homo sapiens
  CDR3 for beta chain variable domain of TCR clone 81209 (TRBV6-1, TRBJ1-1)
CASSPGTGGRIGTEAFF

SEQ ID NO: 162419 - protein, 16 aa, Homo sapiens
  CDR3 for alpha chain variable domain of TCR clone 81210 (TRAV23/DV6, TRAJ9)
CAASIGGNTGGFKTIF

SEQ ID NO: 162420 - protein, 14 aa, Homo sapiens
  CDR3 for beta chain variable domain of TCR clone 81210 (TRBV9, TRBJ2-7)
CASSVSVGSYEQYF

SEQ ID NO: 162421 - protein, 11 aa, Homo sapiens
  CDR3 for alpha chain variable domain of TCR clone 81211 (TRAV12-1, TRAJ15)
CVVNAGTALIF

SEQ ID NO: 162422 - protein, 16 aa, Homo sapiens
  CDR3 for beta chain variable domain of TCR clone 81211 (TRBV28, TRBJ2-1)
CASSSRVRDLYNEQFF

SEQ ID NO: 162423 - protein, 15 aa, Homo sapiens
  CDR3 for alpha chain variable domain of TCR clone 81212 (TRAV12-3, TRAJ6)
CAMSPAPGGSYIPTF

SEQ ID NO: 162424 - protein, 15 aa, Homo sapiens
  CDR3 for beta chain variable domain of TCR clone 81212 (TRBV2, TRBJ1-2)
CASSESRTVNYGYTF

SEQ ID NO: 162425 - protein, 14 aa, Homo sapiens
  CDR3 for alpha chain variable domain of TCR clone 81213 (TRAV35, TRAJ22)
CAGLRPGSARQLTF

SEQ ID NO: 162426 - protein, 12 aa, Homo sapiens
  CDR3 for beta chain variable domain of TCR clone 81213 (TRBV6-3, TRBJ2-7)
CASSLTPYEQYF

SEQ ID NO: 162427 - protein, 13 aa, Homo sapiens
  CDR3 for alpha chain variable domain of TCR clone 81214 (TRAV2, TRAJ40)
CAVVTSGTYKYIF

SEQ ID NO: 162428 - protein, 12 aa, Homo sapiens
  CDR3 for beta chain variable domain of TCR clone 81214 (TRBV11-2, TRBJ2-1)
CASSPGNNEQSF

SEQ ID NO: 162429 - protein, 14 aa, Homo sapiens
  CDR3 for alpha chain variable domain of TCR clone 81215 (TRAV12-2, TRAJ48)
CAVNAFFGNEELTF

SEQ ID NO: 162430 - protein, 13 aa, Homo sapiens
  CDR3 for beta chain variable domain of TCR clone 81215 (TRBV28, TRBJ2-7)
CAGAQQGLDEQYF

SEQ ID NO: 162431 - protein, 17 aa, Homo sapiens
  CDR3 for alpha chain variable domain of TCR clone 81216 (TRAV26-1, TRAJ11)
CIVRVGQSNSGYSTLTF

SEQ ID NO: 162432 - protein, 16 aa, Homo sapiens
  CDR3 for beta chain variable domain of TCR clone 81216 (TRBV7-9, TRBJ1-2)
CASSLGFSSGEDGYTF

SEQ ID NO: 162433 - protein, 17 aa, Homo sapiens
  CDR3 for alpha chain variable domain of TCR clone 81217 (TRAV3, TRAJ6)
CAVRDGPRAGGSYIPTF

SEQ ID NO: 162434 - protein, 13 aa, Homo sapiens
  CDR3 for beta chain variable domain of TCR clone 81217 (TRBV27, TRBJ2-1)
CASGTLGVGEQFF

SEQ ID NO: 162435 - protein, 18 aa, Homo sapiens
  CDR3 for alpha chain variable domain of TCR clone 81218 (TRAV16, TRAJ52)
CALSGVDAGGTSYGELTF

SEQ ID NO: 162436 - protein, 15 aa, Homo sapiens
  CDR3 for beta chain variable domain of TCR clone 81218 (TRBV11-3, TRBJ2-3)
CASSAGTVVTNTQYF

SEQ ID NO: 162437 - protein, 13 aa, Homo sapiens
  CDR3 for alpha chain variable domain of TCR clone 81219 (TRAV29/DV5, TRAJ47)
CAASTEYGNKLVF

SEQ ID NO: 162438 - protein, 15 aa, Homo sapiens
  CDR3 for beta chain variable domain of TCR clone 81219 (TRBV5-5, TRBJ2-7)
CASSWEAGGPYEQYF

SEQ ID NO: 162439 - protein, 13 aa, Homo sapiens
  CDR3 for alpha chain variable domain of TCR clone 81220 (TRAV8-3, TRAJ43)
CAVVPYNSNDMRF

SEQ ID NO: 162440 - protein, 17 aa, Homo sapiens
  CDR3 for beta chain variable domain of TCR clone 81220 (TRBV7-7, TRBJ1-1)
CASIGDRPNLGVTEAFF

SEQ ID NO: 162441 - protein, 16 aa, Homo sapiens
  CDR3 for alpha chain variable domain of TCR clone 81221 (TRAV1-2, TRAJ10)
CAVRGVLTGGGNKLTF

SEQ ID NO: 162442 - protein, 17 aa, Homo sapiens
  CDR3 for beta chain variable domain of TCR clone 81221 (TRBV7-8, TRBJ2-6)
CASSAGTGGAGANVLTF

SEQ ID NO: 162443 - protein, 14 aa, Homo sapiens
  CDR3 for alpha chain variable domain of TCR clone 81222 (TRAV8-3, TRAJ44)
CAVEDTGTASKLTF

SEQ ID NO: 162444 - protein, 14 aa, Homo sapiens
  CDR3 for beta chain variable domain of TCR clone 81222 (TRBV19, TRBJ2-1)
CASPTFVLSGEQFF

SEQ ID NO: 162445 - protein, 11 aa, Homo sapiens
  CDR3 for alpha chain variable domain of TCR clone 81223 (TRAV20, TRAJ31)
CAVQMRARLMF

SEQ ID NO: 162446 - protein, 17 aa, Homo sapiens
  CDR3 for beta chain variable domain of TCR clone 81223 (TRBV4-1, TRBJ2-7)
CASSRDPLGVRGGEQYF

SEQ ID NO: 162447 - protein, 11 aa, Homo sapiens
  CDR3 for alpha chain variable domain of TCR clone 81224 (TRAV21, TRAJ34)
CAVTNTDKLIF

SEQ ID NO: 162448 - protein, 11 aa, Homo sapiens
  CDR3 for beta chain variable domain of TCR clone 81224 (TRBV12-4, TRBJ2-1)
CASSRLNEQFF

SEQ ID NO: 162449 - protein, 15 aa, Homo sapiens
  CDR3 for alpha chain variable domain of TCR clone 81225 (TRAV25, TRAJ52)
CAGRPGGTIYGKLTF

SEQ ID NO: 162450 - protein, 17 aa, Homo sapiens
  CDR3 for beta chain variable domain of TCR clone 81225 (TRBV7-8, TRBJ2-6)
CASSAGTGGAGANVLTF

SEQ ID NO: 162451 - protein, 15 aa, Homo sapiens
  CDR3 for alpha chain variable domain of TCR clone 81226 (TRAV21, TRAJ52)
CAVRGGGTSYGKLTF

SEQ ID NO: 162452 - protein, 14 aa, Homo sapiens
  CDR3 for beta chain variable domain of TCR clone 81226 (TRBV6-1, TRBJ1-3)
CASVQGGGGNTIYF

SEQ ID NO: 162453 - protein, 13 aa, Homo sapiens
  CDR3 for alpha chain variable domain of TCR clone 81227 (TRAV4, TRAJ20)
CLVGNPNDYKLSF

SEQ ID NO: 162454 - protein, 14 aa, Homo sapiens
  CDR3 for beta chain variable domain of TCR clone 81227 (TRBV6-1, TRBJ1-3)
CASVQGGGGNTIYF

SEQ ID NO: 162455 - protein, 15 aa, Homo sapiens
  CDR3 for alpha chain variable domain of TCR clone 81228 (TRAV26-1, TRAJ29)
CIVRVEGSGNTPLVF

SEQ ID NO: 162456 - protein, 13 aa, Homo sapiens
  CDR3 for beta chain variable domain of TCR clone 81228 (TRBV11-2, TRBJ2-5)
CASSFSSQETQYF

SEQ ID NO: 162457 - protein, 16 aa, Homo sapiens
  CDR3 for alpha chain variable domain of TCR clone 81229 (TRAV3, TRAJ10)
CAVRDMRAGGGNKLTF

SEQ ID NO: 162458 - protein, 14 aa, Homo sapiens
  CDR3 for beta chain variable domain of TCR clone 81229 (TRBV6-1, TRBJ1-3)
CASVQGEGGNTIYF

SEQ ID NO: 162459 - protein, 13 aa, Homo sapiens
  CDR3 for alpha chain variable domain of TCR clone 81230 (TRAV27, TRAJ29)
CAGAHSGNTPLVF

SEQ ID NO: 162460 - protein, 14 aa, Homo sapiens
  CDR3 for beta chain variable domain of TCR clone 81230 (TRBV7-9, TRBJ2-7)
CASSIGQGAGGQYF

SEQ ID NO: 162461 - protein, 11 aa, Homo sapiens
  CDR3 for alpha chain variable domain of TCR clone 81231 (TRAV26-1, TRAJ37)
CIVRVGRKLIF

SEQ ID NO: 162462 - protein, 14 aa, Homo sapiens
  CDR3 for beta chain variable domain of TCR clone 81231 (TRBV19, TRBJ2-1)
CASPTFVLSGEQFF

SEQ ID NO: 162463 - protein, 12 aa, Homo sapiens
  CDR3 for alpha chain variable domain of TCR clone 81232 (TRAV38-1, TRAJ20)
CAFIWNDYKLSF

SEQ ID NO: 162464 - protein, 16 aa, Homo sapiens
  CDR3 for beta chain variable domain of TCR clone 81232 (TRBV19, TRBJ2-1)
CASSMGGGSSYNEQFF

SEQ ID NO: 162465 - protein, 11 aa, Homo sapiens
  CDR3 for alpha chain variable domain of TCR clone 81233 (TRAV3, TRAJ21)
CAVGNFNKFYF

SEQ ID NO: 162466 - protein, 16 aa, Homo sapiens
  CDR3 for beta chain variable domain of TCR clone 81233 (TRBV19, TRBJ2-1)
CASSRAGPSSYNEQFL

SEQ ID NO: 162467 - protein, 12 aa, Homo sapiens
  CDR3 for alpha chain variable domain of TCR clone 81234 (TRAV27, TRAJ9)
CAGESGGFKTIF

SEQ ID NO: 162468 - protein, 15 aa, Homo sapiens
  CDR3 for beta chain variable domain of TCR clone 81234 (TRBV9, TRBJ1-6)
CASSVAGTGDSPLHF

SEQ ID NO: 162469 - protein, 10 aa, Homo sapiens
  CDR3 for alpha chain variable domain of TCR clone 81235 (TRAV8-4, TRAJ43)
CAVSADDMRF

SEQ ID NO: 162470 - protein, 15 aa, Homo sapiens
  CDR3 for beta chain variable domain of TCR clone 81235 (TRBV5-1, TRBJ2-3)
RASSVTSGSTDTQYF

SEQ ID NO: 162471 - protein, 11 aa, Homo sapiens
  CDR3 for alpha chain variable domain of TCR clone 81236 (TRAV12-3, TRAJ27)
RAMANAGKSTF

SEQ ID NO: 162472 - protein, 13 aa, Homo sapiens
  CDR3 for beta chain variable domain of TCR clone 81236 (TRBV20-1, TRBJ1-1)
CSARVGGNTEAFF

SEQ ID NO: 162473 - protein, 13 aa, Homo sapiens
  CDR3 for alpha chain variable domain of TCR clone 81237 (TRAV27, TRAJ57)
CAGFQGGSEKLGF

SEQ ID NO: 162474 - protein, 14 aa, Homo sapiens
  CDR3 for beta chain variable domain of TCR clone 81237 (TRBV20-1, TRBJ1-2)
CSGRKDGRAYGYTF

SEQ ID NO: 162475 - protein, 14 aa, Homo sapiens
  CDR3 for alpha chain variable domain of TCR clone 81238 (TRAV12-1, TRAJ22)
CVVPYRGSARQLTF

SEQ ID NO: 162476 - protein, 15 aa, Homo sapiens
  CDR3 for beta chain variable domain of TCR clone 81238 (TRBV12-4, TRBJ2-1)
CAGSLGTSAVNEQFF

SEQ ID NO: 162477 - protein, 10 aa, Homo sapiens
  CDR3 for alpha chain variable domain of TCR clone 81239 (TRAV13-1, TRAJ7)
LIGGNNRLAF

SEQ ID NO: 162478 - protein, 16 aa, Homo sapiens
  CDR3 for beta chain variable domain of TCR clone 81239 (TRBV4-1, TRBJ1-2)
CASSHDAGQVLYGYTF

SEQ ID NO: 162479 - protein, 12 aa, Homo sapiens
  CDR3 for alpha chain variable domain of TCR clone 81240 (TRAV13-1, TRAJ9)
CASHTGGFKTIF

SEQ ID NO: 162480 - protein, 13 aa, Homo sapiens
  CDR3 for beta chain variable domain of TCR clone 81240 (TRBV12-4, TRBJ1-2)
CASSSGSKDGYAF

SEQ ID NO: 162481 - protein, 17 aa, Homo sapiens
  CDR3 for alpha chain variable domain of TCR clone 81241 (TRAV26-2, TRAJ42)
CILRDVGYGGSQGNLIF

SEQ ID NO: 162482 - protein, 18 aa, Homo sapiens
  CDR3 for beta chain variable domain of TCR clone 81241 (TRBV12-4, TRBJ2-2)
CASSLVAGTRGRTGELFF

SEQ ID NO: 162483 - protein, 15 aa, Homo sapiens
  CDR3 for alpha chain variable domain of TCR clone 81242 (TRAV3, TRAJ5)
CAVRDLDTGRRAPTF

SEQ ID NO: 162484 - protein, 13 aa, Homo sapiens
  CDR3 for beta chain variable domain of TCR clone 81242 (TRBV12-4, TRBJ2-7)
CASSPTEAYEQYF

SEQ ID NO: 162485 - protein, 15 aa, Homo sapiens
  CDR3 for alpha chain variable domain of TCR clone 81243 (TRAV3, TRAJ20)
CAVRDIKLSDYKLSF

SEQ ID NO: 162486 - protein, 15 aa, Homo sapiens
  CDR3 for beta chain variable domain of TCR clone 81243 (TRBV7-9, TRBJ1-6)
CASSSPGRGNSPLHF

SEQ ID NO: 162487 - protein, 15 aa, Homo sapiens
  CDR3 for alpha chain variable domain of TCR clone 81244 (TRAV3, TRAJ47)
CAVRDIGEYGNKLVF

SEQ ID NO: 162488 - protein, 14 aa, Homo sapiens
  CDR3 for beta chain variable domain of TCR clone 81244 (TRBV13, TRBJ2-5)
CSSSLERVGETQYF

SEQ ID NO: 162489 - protein, 15 aa, Homo sapiens
  CDR3 for alpha chain variable domain of TCR clone 81245 (TRAV27, TRAJ38)
CAARRNAGNNRKLIW

SEQ ID NO: 162490 - protein, 17 aa, Homo sapiens
  CDR3 for beta chain variable domain of TCR clone 81245 (TRBV4-1, TRBJ2-7)
CASSQGRGLQTSYEQYF

SEQ ID NO: 162491 - protein, 15 aa, Homo sapiens
  CDR3 for alpha chain variable domain of TCR clone 81246 (TRAV27, TRAJ38)
CAARRNAGNNRKLIW

SEQ ID NO: 162492 - protein, 14 aa, Homo sapiens
  CDR3 for beta chain variable domain of TCR clone 81246 (TRBV7-8, TRBJ2-3)
CASSLEAGTDTQYL

SEQ ID NO: 162493 - protein, 16 aa, Homo sapiens
  CDR3 for alpha chain variable domain of TCR clone 81247 (TRAV3, )
CAVRDCLNAGDNHIQN

SEQ ID NO: 162494 - protein, 14 aa, Homo sapiens
  CDR3 for beta chain variable domain of TCR clone 81247 (TRBV5-5, TRBJ1-5)
CASSGQGVDQPQHF

SEQ ID NO: 162495 - protein, 16 aa, Homo sapiens
  CDR3 for alpha chain variable domain of TCR clone 81248 (TRAV30, TRAJ24)
CGTEIVDADSWGKFQF

SEQ ID NO: 162496 - protein, 13 aa, Homo sapiens
  CDR3 for beta chain variable domain of TCR clone 81248 (TRBV9, TRBJ2-1)
CASSPSGGNEQFF

SEQ ID NO: 162497 - protein, 13 aa, Homo sapiens
  CDR3 for alpha chain variable domain of TCR clone 81249 (TRAV36/DV7, TRAJ41)
CAVSSNSGYALNF

SEQ ID NO: 162498 - protein, 16 aa, Homo sapiens
  CDR3 for beta chain variable domain of TCR clone 81249 (TRBV6-1, TRBJ1-2)
CASSGAWQGRSHGYTF

SEQ ID NO: 162499 - protein, 19 aa, Homo sapiens
  CDR3 for alpha chain variable domain of TCR clone 81250 (TRAV39, TRAJ43)
PCMTSLPPTSVPWANDMRF

SEQ ID NO: 162500 - protein, 13 aa, Homo sapiens
  CDR3 for beta chain variable domain of TCR clone 81250 (TRBV20-1, TRBJ2-3)
CSADQGVSDTQYF

SEQ ID NO: 162501 - protein, 12 aa, Homo sapiens
  CDR3 for alpha chain variable domain of TCR clone 81251 (TRAV23/DV6, TRAJ58)
CAARLLRGEASG

SEQ ID NO: 162502 - protein, 15 aa, Homo sapiens
  CDR3 for beta chain variable domain of TCR clone 81251 (TRBV7-3, TRBJ2-2)
CASSETGQGTGELFF

SEQ ID NO: 162503 - protein, 13 aa, Homo sapiens
  CDR3 for alpha chain variable domain of TCR clone 81252 (TRAV2, TRAJ40)
CAVVTSGTYKYIF

SEQ ID NO: 162504 - protein, 17 aa, Homo sapiens
  CDR3 for beta chain variable domain of TCR clone 81252 (TRBV20-1, TRBJ2-1)
CSAPPRLAGTRYNEQFF

SEQ ID NO: 162505 - protein, 12 aa, Homo sapiens
  CDR3 for alpha chain variable domain of TCR clone 81253 (TRAV36/DV7, TRAJ54)
CAVVRGAQKLVF

SEQ ID NO: 162506 - protein, 14 aa, Homo sapiens
  CDR3 for beta chain variable domain of TCR clone 81253 (TRBV7-3, TRBJ1-1)
CASSLKGGNTEVFF

SEQ ID NO: 162507 - protein, 16 aa, Homo sapiens
  CDR3 for alpha chain variable domain of TCR clone 81254 (TRAV12-3, TRAJ53)
CAMSPGSGGSNYKLTF

SEQ ID NO: 162508 - protein, 16 aa, Homo sapiens
  CDR3 for beta chain variable domain of TCR clone 81254 (TRBV15, TRBJ1-2)
CATSRGPRTGGGGYTF

SEQ ID NO: 162509 - protein, 19 aa, Homo sapiens
  CDR3 for alpha chain variable domain of TCR clone 81255 (TRAV2, TRAJ20)
ILQVREADAAVYRDCKLSF

SEQ ID NO: 162510 - protein, 13 aa, Homo sapiens
  CDR3 for beta chain variable domain of TCR clone 81255 (TRBV5-5, TRBJ1-2)
CASSFWRGEDYTF

SEQ ID NO: 162511 - protein, 11 aa, Homo sapiens
  CDR3 for alpha chain variable domain of TCR clone 81256 (TRAV1-1, TRAJ23)
CAVRQGGKLIF

SEQ ID NO: 162512 - protein, 13 aa, Homo sapiens
  CDR3 for beta chain variable domain of TCR clone 81256 (TRBV6-4, TRBJ1-5)
CASSADLNQPQHF

SEQ ID NO: 162513 - protein, 14 aa, Homo sapiens
  CDR3 for alpha chain variable domain of TCR clone 81257 (TRAV3, TRAJ9)
CAVRLNTGGFKIIF

SEQ ID NO: 162514 - protein, 15 aa, Homo sapiens
  CDR3 for beta chain variable domain of TCR clone 81257 (TRBV7-2, TRBJ2-1)
CASSLASGRVNEQFF

SEQ ID NO: 162515 - protein, 21 aa, Homo sapiens
  CDR3 for alpha chain variable domain of TCR clone 81258 (TRAV2, TRAJ27)
ILQVREADAAVYSANAGKSTF

SEQ ID NO: 162516 - protein, 15 aa, Homo sapiens
  CDR3 for beta chain variable domain of TCR clone 81258 (TRBV7-7, TRBJ1-3)
CASSRGEHSGNTIYF

SEQ ID NO: 162517 - protein, 16 aa, Homo sapiens
  CDR3 for alpha chain variable domain of TCR clone 81259 (TRAV3, TRAJ18)
CAVRDGRGSTLGRLYF

SEQ ID NO: 162518 - protein, 13 aa, Homo sapiens
  CDR3 for beta chain variable domain of TCR clone 81259 (TRBV7-9, TRBJ1-2)
CASSLKQNYGYTF

SEQ ID NO: 162519 - protein, 14 aa, Homo sapiens
  CDR3 for alpha chain variable domain of TCR clone 81260 (TRAV12-3, TRAJ10)
SYLPLTGGGNKLTF

SEQ ID NO: 162520 - protein, 12 aa, Homo sapiens
  CDR3 for beta chain variable domain of TCR clone 81260 (TRBV7-3, TRBJ2-5)
CASSSPGGTQYF

SEQ ID NO: 162521 - protein, 16 aa, Homo sapiens
  CDR3 for alpha chain variable domain of TCR clone 81261 (TRAV17, TRAJ52)
CATGMIGGTSYGKLTF

SEQ ID NO: 162522 - protein, 12 aa, Homo sapiens
  CDR3 for beta chain variable domain of TCR clone 81261 (TRBV7-3, TRBJ2-1)
CASSFINNEQFF

SEQ ID NO: 162523 - protein, 14 aa, Homo sapiens
  CDR3 for alpha chain variable domain of TCR clone 81262 (TRAV3, TRAJ33)
CAVRDMDSNYQLIW

SEQ ID NO: 162524 - protein, 19 aa, Homo sapiens
  CDR3 for beta chain variable domain of TCR clone 81262 (TRBV7-3, TRBJ1-2)
CASSFPQGNDGELWRHLRF

SEQ ID NO: 162525 - protein, 14 aa, Homo sapiens
  CDR3 for alpha chain variable domain of TCR clone 81263 (TRAV12-1, TRAJ10)
CAAILTGGGNKLTF

SEQ ID NO: 162526 - protein, 15 aa, Homo sapiens
  CDR3 for beta chain variable domain of TCR clone 81263 (TRBV20-1, TRBJ2-7)
CSARGFRPQTYEQYF

SEQ ID NO: 162527 - protein, 14 aa, Homo sapiens
  CDR3 for alpha chain variable domain of TCR clone 81264 (TRAV8-4, TRAJ54)
CAVSEVLGAQKLVF

SEQ ID NO: 162528 - protein, 13 aa, Homo sapiens
  CDR3 for beta chain variable domain of TCR clone 81264 (TRBV27, TRBJ2-7)
CASSFVASYEQYF

SEQ ID NO: 162529 - protein, 13 aa, Homo sapiens
  CDR3 for alpha chain variable domain of TCR clone 81265 (TRAV8-1, TRAJ28)
CAVSGAGSYQLTF

SEQ ID NO: 162530 - protein, 14 aa, Homo sapiens
  CDR3 for beta chain variable domain of TCR clone 81265 (TRBV7-2, TRBJ2-2)
CASRGQGAAGELFC

SEQ ID NO: 162531 - protein, 14 aa, Homo sapiens
  CDR3 for alpha chain variable domain of TCR clone 81266 (TRAV17, TRAJ5)
CATVALTGRRALTF

SEQ ID NO: 162532 - protein, 14 aa, Homo sapiens
  CDR3 for beta chain variable domain of TCR clone 81266 (TRBV28, TRBJ2-7)
RASSPYGMAYEQYF

SEQ ID NO: 162533 - protein, 15 aa, Homo sapiens
  CDR3 for alpha chain variable domain of TCR clone 81267 (TRAV21, TRAJ53)
CATLNSGGSNYKLTF

SEQ ID NO: 162534 - protein, 16 aa, Homo sapiens
  CDR3 for beta chain variable domain of TCR clone 81267 (TRBV3-1, TRBJ2-5)
CASSPGQFNGFGTQYF

SEQ ID NO: 162535 - protein, 14 aa, Homo sapiens
  CDR3 for alpha chain variable domain of TCR clone 81268 (TRAV1-1, TRAJ9)
CAVRGGNGGFKTIF

SEQ ID NO: 162536 - protein, 16 aa, Homo sapiens
  CDR3 for beta chain variable domain of TCR clone 81268 (TRBV24-1, TRBJ2-3)
CATSDPGTGATDTQYF

SEQ ID NO: 162537 - protein, 13 aa, Homo sapiens
  CDR3 for alpha chain variable domain of TCR clone 81269 (TRAV30, TRAJ24)
CGTVTDSWGKSQF

SEQ ID NO: 162538 - protein, 15 aa, Homo sapiens
  CDR3 for beta chain variable domain of TCR clone 81269 (TRBV25-1, TRBJ1-4)
CASSPGDSTNEKLFF

SEQ ID NO: 162539 - protein, 14 aa, Homo sapiens
  CDR3 for alpha chain variable domain of TCR clone 81270 (TRAV17, TRAJ4)
CATAPLGGYNKLIF

SEQ ID NO: 162540 - protein, 15 aa, Homo sapiens
  CDR3 for beta chain variable domain of TCR clone 81270 (TRBV11-3, TRBJ2-5)
CASSDTSGGIETQYF

SEQ ID NO: 162541 - protein, 10 aa, Homo sapiens
  CDR3 for alpha chain variable domain of TCR clone 81271 (TRAV12-3, TRAJ49)
CAVHGNQFYF

SEQ ID NO: 162542 - protein, 12 aa, Homo sapiens
  CDR3 for beta chain variable domain of TCR clone 81271 (TRBV24-1, TRBJ2-7)
CATSDPGYERYF

SEQ ID NO: 162543 - protein, 15 aa, Homo sapiens
  CDR3 for alpha chain variable domain of TCR clone 81272 (TRAV26-2, TRAJ21)
CILSNTTSTNFTLDL

SEQ ID NO: 162544 - protein, 16 aa, Homo sapiens
  CDR3 for beta chain variable domain of TCR clone 81272 (TRBV4-2, TRBJ2-6)
CASSQARSSRANVLTF

SEQ ID NO: 162545 - protein, 16 aa, Homo sapiens
  CDR3 for alpha chain variable domain of TCR clone 81273 (TRAV17, TRAJ36)
CATVSLNWGKQPLLWD

SEQ ID NO: 162546 - protein, 13 aa, Homo sapiens
  CDR3 for beta chain variable domain of TCR clone 81273 (TRBV4-1, TRBJ1-1)
CASSRLGTGEAFF

SEQ ID NO: 162547 - protein, 17 aa, Homo sapiens
  CDR3 for alpha chain variable domain of TCR clone 81274 (TRAV23/DV6, TRAJ57)
CAASSTLSQGGSEKLVF

SEQ ID NO: 162548 - protein, 14 aa, Homo sapiens
  CDR3 for beta chain variable domain of TCR clone 81274 (TRBV25-1, TRBJ1-1)
CASTHLGGNTEVFF

SEQ ID NO: 162549 - protein, 14 aa, Homo sapiens
  CDR3 for alpha chain variable domain of TCR clone 81275 (TRAV26-1, TRAJ38)
CIADNAGNNRKLIW

SEQ ID NO: 162550 - protein, 15 aa, Homo sapiens
  CDR3 for beta chain variable domain of TCR clone 81275 (TRBV9, TRBJ2-1)
CASSLAGSAYNEQFF

SEQ ID NO: 162551 - protein, 14 aa, Homo sapiens
  CDR3 for alpha chain variable domain of TCR clone 81276 (TRAV12-3, TRAJ54)
YAMRGIQGAQKLVF

SEQ ID NO: 162552 - protein, 13 aa, Homo sapiens
  CDR3 for beta chain variable domain of TCR clone 81276 (TRBV19, TRBJ1-1)
CASSPSNGGEAFF

SEQ ID NO: 162553 - protein, 12 aa, Homo sapiens
  CDR3 for alpha chain variable domain of TCR clone 81277 (TRAV13-1, TRAJ9)
CASHTGGFKTIF

SEQ ID NO: 162554 - protein, 18 aa, Homo sapiens
  CDR3 for beta chain variable domain of TCR clone 81277 (TRBV11-2, TRBJ2-3)
CAGSLGGASRGAPNTQYF

SEQ ID NO: 162555 - protein, 15 aa, Homo sapiens
  CDR3 for alpha chain variable domain of TCR clone 81278 (TRAV8-3, TRAJ27)
CAVGPSKPNAGKSTF

SEQ ID NO: 162556 - protein, 12 aa, Homo sapiens
  CDR3 for beta chain variable domain of TCR clone 81278 (TRBV11-2, TRBJ2-2)
CASSLGGGELFF

SEQ ID NO: 162557 - protein, 12 aa, Homo sapiens
  CDR3 for alpha chain variable domain of TCR clone 81279 (TRAV1-1, TRAJ39)
CAVPVVGNMLTF

SEQ ID NO: 162558 - protein, 17 aa, Homo sapiens
  CDR3 for beta chain variable domain of TCR clone 81279 (TRBV28, TRBJ2-5)
CASSTPEGDALKETQYF

SEQ ID NO: 162559 - protein, 13 aa, Homo sapiens
  CDR3 for alpha chain variable domain of TCR clone 81280 (TRAV27, TRAJ29)
CAGAHSGNTPPVF

SEQ ID NO: 162560 - protein, 18 aa, Homo sapiens
  CDR3 for beta chain variable domain of TCR clone 81280 (TRBV6-6, TRBJ1-3)
CASSYSKWDSISGNTIYF

SEQ ID NO: 162561 - protein, 15 aa, Homo sapiens
  CDR3 for alpha chain variable domain of TCR clone 81281 (TRAV12-3, TRAJ6)
CAMSATTGGSYIPTF

SEQ ID NO: 162562 - protein, 16 aa, Homo sapiens
  CDR3 for beta chain variable domain of TCR clone 81281 (TRBV20-1, TRBJ1-2)
CSASMGQGVVNYGYTF

SEQ ID NO: 162563 - protein, 13 aa, Homo sapiens
  CDR3 for alpha chain variable domain of TCR clone 81282 (TRAV8-6, TRAJ41)
CAVSENSGDALNF

SEQ ID NO: 162564 - protein, 17 aa, Homo sapiens
  CDR3 for beta chain variable domain of TCR clone 81282 (TRBV7-2, TRBJ2-3)
CASSLEARGTSTDTQYF

SEQ ID NO: 162565 - protein, 11 aa, Homo sapiens
  CDR3 for alpha chain variable domain of TCR clone 81283 (TRAV23/DV6, TRAJ48)
RAPRWGEKLTF

SEQ ID NO: 162566 - protein, 14 aa, Homo sapiens
  CDR3 for beta chain variable domain of TCR clone 81283 (TRBV29-1, TRBJ1-3)
CSVADRVVGNTIYF

SEQ ID NO: 162567 - protein, 14 aa, Homo sapiens
  CDR3 for alpha chain variable domain of TCR clone 81284 (TRAV12-2, TRAJ13)
CAVKKTGGYQKVTF

SEQ ID NO: 162568 - protein, 13 aa, Homo sapiens
  CDR3 for beta chain variable domain of TCR clone 81284 (TRBV27, TRBJ1-4)
CASSLMGDEKLFF

SEQ ID NO: 162569 - protein, 17 aa, Homo sapiens
  CDR3 for alpha chain variable domain of TCR clone 81285 (TRAV3, TRAJ38)
CAVRDCLNAGNNRKLVW

SEQ ID NO: 162570 - protein, 14 aa, Homo sapiens
  CDR3 for beta chain variable domain of TCR clone 81285 (TRBV5-5, TRBJ1-5)
CASSGQGVDQPQHF

SEQ ID NO: 162571 - protein, 11 aa, Homo sapiens
  CDR3 for alpha chain variable domain of TCR clone 81286 (TRAV13-1, TRAJ9)
YAASEGWRLQN

SEQ ID NO: 162572 - protein, 16 aa, Homo sapiens
  CDR3 for beta chain variable domain of TCR clone 81286 (TRBV27, TRBJ2-2)
CASSFRGLVRTGELFF

SEQ ID NO: 162573 - protein, 14 aa, Homo sapiens
  CDR3 for alpha chain variable domain of TCR clone 81287 (TRAV26-1, TRAJ57)
CIRAGQGGSEKLVF

SEQ ID NO: 162574 - protein, 13 aa, Homo sapiens
  CDR3 for beta chain variable domain of TCR clone 81287 (TRBV19, TRBJ2-7)
CASSLTTSYEQCF

SEQ ID NO: 162575 - protein, 15 aa, Homo sapiens
  CDR3 for alpha chain variable domain of TCR clone 81288 (TRAV26-1, TRAJ22)
CIVRVSFWFCKATDL

SEQ ID NO: 162576 - protein, 13 aa, Homo sapiens
  CDR3 for beta chain variable domain of TCR clone 81288 (TRBV7-9, TRBJ1-2)
CASSLKQNYCYTF

SEQ ID NO: 162577 - protein, 16 aa, Homo sapiens
  CDR3 for alpha chain variable domain of TCR clone 81289 (TRAV1-2, TRAJ10)
CAVRGVLTGGRNKLTF

SEQ ID NO: 162578 - protein, 12 aa, Homo sapiens
  CDR3 for beta chain variable domain of TCR clone 81289 (TRBV7-8, TRBJ2-7)
CASSLGDREQYF

SEQ ID NO: 162579 - protein, 11 aa, Homo sapiens
  CDR3 for alpha chain variable domain of TCR clone 81290 (TRAV2, TRAJ13)
CASGGYQKVTF

SEQ ID NO: 162580 - protein, 14 aa, Homo sapiens
  CDR3 for beta chain variable domain of TCR clone 81290 (TRBV19, TRBJ2-1)
CASSRLASINEQFF

SEQ ID NO: 162581 - protein, 11 aa, Homo sapiens
  CDR3 for alpha chain variable domain of TCR clone 81291 (TRAV13-1, TRAJ30)
CAASRDDKIIF

SEQ ID NO: 162582 - protein, 22 aa, Homo sapiens
  CDR3 for beta chain variable domain of TCR clone 81291 (TRBV6-1, TRBJ1-3)
CASVQGGGWKHHIFWRGKLAHC

SEQ ID NO: 162583 - protein, 13 aa, Homo sapiens
  CDR3 for alpha chain variable domain of TCR clone 81292 (TRAV12-3, TRAJ9)
CAMRNAGGFKTIF

SEQ ID NO: 162584 - protein, 15 aa, Homo sapiens
  CDR3 for beta chain variable domain of TCR clone 81292 (TRBV20-1, TRBJ2-7)
CSARDRVSGMDEQYF

SEQ ID NO: 162585 - protein, 15 aa, Homo sapiens
  CDR3 for alpha chain variable domain of TCR clone 81293 (TRAV8-6, TRAJ38)
CAVSSNAGNNRKLIG

SEQ ID NO: 162586 - protein, 14 aa, Homo sapiens
  CDR3 for beta chain variable domain of TCR clone 81293 (TRBV14, TRBJ2-1)
CASSQVQGRGEQFF

SEQ ID NO: 162587 - protein, 15 aa, Homo sapiens
  CDR3 for alpha chain variable domain of TCR clone 81294 (TRAV3, TRAJ47)
CAVRDIGEYGNKLVF

SEQ ID NO: 162588 - protein, 14 aa, Homo sapiens
  CDR3 for beta chain variable domain of TCR clone 81294 (TRBV7-6, TRBJ2-3)
CASSLGTVTDTQYF

SEQ ID NO: 162589 - protein, 14 aa, Homo sapiens
  CDR3 for alpha chain variable domain of TCR clone 81295 (TRAV35, TRAJ50)
CAGHRKTSYDKVIF

SEQ ID NO: 162590 - protein, 16 aa, Homo sapiens
  CDR3 for beta chain variable domain of TCR clone 81295 (TRBV7-2, TRBJ1-2)
CASSSNQDRRGHGYTF

SEQ ID NO: 162591 - protein, 13 aa, Homo sapiens
  CDR3 for alpha chain variable domain of TCR clone 81296 (TRAV17, TRAJ13)
CATDSGGYQKVTF

SEQ ID NO: 162592 - protein, 14 aa, Homo sapiens
  CDR3 for beta chain variable domain of TCR clone 81296 (TRBV6-1, TRBJ1-1)
CASTPLQMDTEAFF

SEQ ID NO: 162593 - protein, 14 aa, Homo sapiens
  CDR3 for alpha chain variable domain of TCR clone 81297 (TRAV12-3, TRAJ10)
SHLPLTGGGDKLTF

SEQ ID NO: 162594 - protein, 17 aa, Homo sapiens
  CDR3 for beta chain variable domain of TCR clone 81297 (TRBV20-1, TRBJ2-1)
CSASSSGLAGSYNEQFF

SEQ ID NO: 162595 - protein, 15 aa, Homo sapiens
  CDR3 for alpha chain variable domain of TCR clone 81298 (TRAV3, TRAJ22)
CAVRDRGGSARQLTF

SEQ ID NO: 162596 - protein, 15 aa, Homo sapiens
  CDR3 for beta chain variable domain of TCR clone 81298 (TRBV7-2, TRBJ2-1)
CASTHGTGIYNEQFF

SEQ ID NO: 162597 - protein, 12 aa, Homo sapiens
  CDR3 for alpha chain variable domain of TCR clone 81299 (TRAV27, TRAJ35)
CAGADFWNVLHC

SEQ ID NO: 162598 - protein, 16 aa, Homo sapiens
  CDR3 for beta chain variable domain of TCR clone 81299 (TRBV6-1, TRBJ2-1)
CASILRQGSSYNEQFF

SEQ ID NO: 162599 - protein, 16 aa, Homo sapiens
  CDR3 for alpha chain variable domain of TCR clone 81300 (TRAV12-2, TRAJ32)
CAVNLGQGGAINKLIF

SEQ ID NO: 162600 - protein, 15 aa, Homo sapiens
  CDR3 for beta chain variable domain of TCR clone 81300 (TRBV20-1, TRBJ2-7)
CSARGPLAGVREQYF

SEQ ID NO: 162601 - protein, 11 aa, Homo sapiens
  CDR3 for alpha chain variable domain of TCR clone 81301 (TRAV2, TRAJ13)
CASGGYQKVTF

SEQ ID NO: 162602 - protein, 20 aa, Homo sapiens
  CDR3 for beta chain variable domain of TCR clone 81301 (TRBV20-1, TRBJ2-1)
CSARPYSVAGGPSYYNEQFF

SEQ ID NO: 162603 - protein, 17 aa, Homo sapiens
  CDR3 for alpha chain variable domain of TCR clone 81302 (TRAV23/DV6, TRAJ57)
CAASSTLSQGVSEKLVF

SEQ ID NO: 162604 - protein, 14 aa, Homo sapiens
  CDR3 for beta chain variable domain of TCR clone 81302 (TRBV25-1, TRBJ1-1)
CASTHLGGNTEAFF

SEQ ID NO: 162605 - protein, 14 aa, Homo sapiens
  CDR3 for alpha chain variable domain of TCR clone 81303 (TRAV1-2, TRAJ16)
CAVNRFPDGQKLLF

SEQ ID NO: 162606 - protein, 14 aa, Homo sapiens
  CDR3 for beta chain variable domain of TCR clone 81303 (TRBV25-1, TRBJ1-1)
CASTHLGGNTEAFF

SEQ ID NO: 162607 - protein, 14 aa, Homo sapiens
  CDR3 for alpha chain variable domain of TCR clone 81304 (TRAV38-1, TRAJ45)
CAYYSGGSADGLTF

SEQ ID NO: 162608 - protein, 20 aa, Homo sapiens
  CDR3 for beta chain variable domain of TCR clone 81304 (TRBV28, TRBJ2-1)
CASTPIGRSPGLAGGNEQFF

SEQ ID NO: 162609 - protein, 16 aa, Homo sapiens
  CDR3 for alpha chain variable domain of TCR clone 81305 (TRAV35, TRAJ28)
CAGQKYSGAGSYQLTF

SEQ ID NO: 162610 - protein, 15 aa, Homo sapiens
  CDR3 for beta chain variable domain of TCR clone 81305 (TRBV7-3, TRBJ2-2)
CQQLKAGTLSGELFF

SEQ ID NO: 162611 - protein, 14 aa, Homo sapiens
  CDR3 for alpha chain variable domain of TCR clone 81306 (TRAV26-1, TRAJ34)
CIVRESYNTDKLIF

SEQ ID NO: 162612 - protein, 13 aa, Homo sapiens
  CDR3 for beta chain variable domain of TCR clone 81306 (TRBV19, TRBJ2-1)
CATYRGVYNEQFF

SEQ ID NO: 162613 - protein, 15 aa, Homo sapiens
  CDR3 for alpha chain variable domain of TCR clone 81307 (TRAV2, TRAJ15)
CAVEDREQAGTALIF

SEQ ID NO: 162614 - protein, 15 aa, Homo sapiens
  CDR3 for beta chain variable domain of TCR clone 81307 (TRBV10-2, TRBJ2-3)
CASSESGTIRSILAQ

SEQ ID NO: 162615 - protein, 15 aa, Homo sapiens
  CDR3 for alpha chain variable domain of TCR clone 81308 (TRAV3, TRAJ3)
CAVRDISSSASKIIF

SEQ ID NO: 162616 - protein, 14 aa, Homo sapiens
  CDR3 for beta chain variable domain of TCR clone 81308 (TRBV19, TRBJ2-1)
CASPTFVLSGEQFF

SEQ ID NO: 162617 - protein, 15 aa, Homo sapiens
  CDR3 for alpha chain variable domain of TCR clone 81309 (TRAV26-1, TRAJ29)
CIVRVEGSGNTPLVF

SEQ ID NO: 162618 - protein, 18 aa, Homo sapiens
  CDR3 for beta chain variable domain of TCR clone 81309 (TRBV7-8, TRBJ2-1)
CASSPAEGLAGGLNEQFF

SEQ ID NO: 162619 - protein, 15 aa, Homo sapiens
  CDR3 for alpha chain variable domain of TCR clone 81310 (TRAV12-3, TRAJ6)
CAMSATSGGSYIPPF

SEQ ID NO: 162620 - protein, 11 aa, Homo sapiens
  CDR3 for beta chain variable domain of TCR clone 81310 (TRBV20-1, TRBJ1-5)
CSAQGDQPQHF

SEQ ID NO: 162621 - protein, 16 aa, Homo sapiens
  CDR3 for alpha chain variable domain of TCR clone 81311 (TRAV3, TRAJ21)
CAGRDIERGNFNKFYF

SEQ ID NO: 162622 - protein, 13 aa, Homo sapiens
  CDR3 for beta chain variable domain of TCR clone 81311 (TRBV27, TRBJ2-7)
CASSLTTGYEQYF

SEQ ID NO: 162623 - protein, 15 aa, Homo sapiens
  CDR3 for alpha chain variable domain of TCR clone 81312 (TRAV12-2, TRAJ43)
CAFDMRFGAGTRLTV

SEQ ID NO: 162624 - protein, 18 aa, Homo sapiens
  CDR3 for beta chain variable domain of TCR clone 81312 (TRBV20-1, TRBJ2-3)
CSASGLAGGPGTTDTQYC

SEQ ID NO: 162625 - protein, 15 aa, Homo sapiens
  CDR3 for alpha chain variable domain of TCR clone 81313 (TRAV8-3, TRAJ11)
CAVGLLNSGYSTLTF

SEQ ID NO: 162626 - protein, 16 aa, Homo sapiens
  CDR3 for beta chain variable domain of TCR clone 81313 (TRBV28, TRBJ2-1)
CASSLWGRTSGTRQFF

SEQ ID NO: 162627 - protein, 13 aa, Homo sapiens
  CDR3 for alpha chain variable domain of TCR clone 81314 (TRAV20, TRAJ31)
CAVQAIGGARLMF

SEQ ID NO: 162628 - protein, 14 aa, Homo sapiens
  CDR3 for beta chain variable domain of TCR clone 81314 (TRBV2, TRBJ1-5)
CASSGTVSNQHQHF

SEQ ID NO: 162629 - protein, 13 aa, Homo sapiens
  CDR3 for alpha chain variable domain of TCR clone 81315 (TRAV25, TRAJ10)
CAGRTGGGNKLTF

SEQ ID NO: 162630 - protein, 15 aa, Homo sapiens
  CDR3 for beta chain variable domain of TCR clone 81315 (TRBV19, TRBJ2-1)
CASGSPGVPLDEQFF

SEQ ID NO: 162631 - protein, 14 aa, Homo sapiens
  CDR3 for alpha chain variable domain of TCR clone 81316 (TRAV3, TRAJ7)
CAVREEDREQQTRF

SEQ ID NO: 162632 - protein, 12 aa, Homo sapiens
  CDR3 for beta chain variable domain of TCR clone 81316 (TRBV7-8, TRBJ2-7)
CASSLGDREQYF

SEQ ID NO: 162633 - protein, 15 aa, Homo sapiens
  CDR3 for alpha chain variable domain of TCR clone 81317 (TRAV13-1, TRAJ45)
CAASGSGGGADGLTF

SEQ ID NO: 162634 - protein, 12 aa, Homo sapiens
  CDR3 for beta chain variable domain of TCR clone 81317 (TRBV11-2, TRBJ2-2)
CASSIGGGELFF

SEQ ID NO: 162635 - protein, 15 aa, Homo sapiens
  CDR3 for alpha chain variable domain of TCR clone 81318 (TRAV8-4, TRAJ3)
CAVTGENLVQQRFQD

SEQ ID NO: 162636 - protein, 16 aa, Homo sapiens
  CDR3 for beta chain variable domain of TCR clone 81318 (TRBV4-2, TRBJ1-1)
CASSQAGFGMNTEAFF

SEQ ID NO: 162637 - protein, 12 aa, Homo sapiens
  CDR3 for alpha chain variable domain of TCR clone 81319 (TRAV1-2, TRAJ26)
CAVRYYGQNFVS

SEQ ID NO: 162638 - protein, 14 aa, Homo sapiens
  CDR3 for beta chain variable domain of TCR clone 81319 (TRBV11-1, TRBJ2-7)
CASSFRQGSYEQYF

SEQ ID NO: 162639 - protein, 14 aa, Homo sapiens
  CDR3 for alpha chain variable domain of TCR clone 81320 (TRAV29/DV5, TRAJ36)
CAARRITGANNLFF

SEQ ID NO: 162640 - protein, 14 aa, Homo sapiens
  CDR3 for beta chain variable domain of TCR clone 81320 (TRBV12-5, TRBJ2-5)
CASGSRTHQETQYF

SEQ ID NO: 162641 - protein, 23 aa, Homo sapiens
  CDR3 for alpha chain variable domain of TCR clone 81321 (TRAV12-1, TRAJ26)
CVVNSWVTMVRILSLVPEPDCPF

SEQ ID NO: 162642 - protein, 13 aa, Homo sapiens
  CDR3 for beta chain variable domain of TCR clone 81321 (TRBV10-3, TRBJ2-7)
CASKLAVNYEQYF

SEQ ID NO: 162643 - protein, 13 aa, Homo sapiens
  CDR3 for alpha chain variable domain of TCR clone 81322 (TRAV8-3, TRAJ48)
CGVVPFGNEKLTF

SEQ ID NO: 162644 - protein, 15 aa, Homo sapiens
  CDR3 for beta chain variable domain of TCR clone 81322 (TRBV11-2, TRBJ2-1)
CASSSPSTRYNEQFF

SEQ ID NO: 162645 - protein, 17 aa, Homo sapiens
  CDR3 for alpha chain variable domain of TCR clone 81323 (TRAV3, TRAJ6)
CAVRDGPRAGGSSIPTF

SEQ ID NO: 162646 - protein, 14 aa, Homo sapiens
  CDR3 for beta chain variable domain of TCR clone 81323 (TRBV7-2, TRBJ2-7)
CASSPKTSFYEQYF

SEQ ID NO: 162647 - protein, 14 aa, Homo sapiens
  CDR3 for alpha chain variable domain of TCR clone 81324 (TRAV1-2, TRAJ8)
CAVREDTGFQKLVF

SEQ ID NO: 162648 - protein, 16 aa, Homo sapiens
  CDR3 for beta chain variable domain of TCR clone 81324 (TRBV4-1, TRBJ1-5)
CASSQGGHTTNQPQHF

SEQ ID NO: 162649 - protein, 16 aa, Homo sapiens
  CDR3 for alpha chain variable domain of TCR clone 81325 (TRAV4, TRAJ8)
CLVGDSGNTGFKKLVF

SEQ ID NO: 162650 - protein, 15 aa, Homo sapiens
  CDR3 for beta chain variable domain of TCR clone 81325 (TRBV15, TRBJ1-2)
CATSRVRASGSGYTF

SEQ ID NO: 162651 - protein, 12 aa, Homo sapiens
  CDR3 for alpha chain variable domain of TCR clone 81326 (TRAV13-1, TRAJ21)
CEAKEGFNKFYF

SEQ ID NO: 162652 - protein, 20 aa, Homo sapiens
  CDR3 for beta chain variable domain of TCR clone 81326 (TRBV7-8, TRBJ2-2)
CASSHLFPGPTIHITGELFF

SEQ ID NO: 162653 - protein, 13 aa, Homo sapiens
  CDR3 for alpha chain variable domain of TCR clone 81327 (TRAV21, TRAJ45)
CAVMGGGADGLTF

SEQ ID NO: 162654 - protein, 16 aa, Homo sapiens
  CDR3 for beta chain variable domain of TCR clone 81327 (TRBV20-1, TRBJ2-1)
CSARDHLAGGWGEQFF

SEQ ID NO: 162655 - protein, 13 aa, Homo sapiens
  CDR3 for alpha chain variable domain of TCR clone 81328 (TRAV8-3, TRAJ4)
WVFYSGVYNKLIF

SEQ ID NO: 162656 - protein, 14 aa, Homo sapiens
  CDR3 for beta chain variable domain of TCR clone 81328 (TRBV7-9, TRBJ2-3)
CASSLEDGTDTQYF

SEQ ID NO: 162657 - protein, 14 aa, Homo sapiens
  CDR3 for alpha chain variable domain of TCR clone 81329 (TRAV12-3, TRAJ10)
SHLHLTGGGNKLTF

SEQ ID NO: 162658 - protein, 17 aa, Homo sapiens
  CDR3 for beta chain variable domain of TCR clone 81329 (TRBV20-1, TRBJ2-1)
CSASSSGLAGSYNEQFF

SEQ ID NO: 162659 - protein, 13 aa, Homo sapiens
  CDR3 for alpha chain variable domain of TCR clone 81330 (TRAV27, TRAJ49)
CAPRPYTGNQFYF

SEQ ID NO: 162660 - protein, 18 aa, Homo sapiens
  CDR3 for beta chain variable domain of TCR clone 81330 (TRBV7-3, TRBJ2-5)
CASSLGVAAQGRWETQYF

SEQ ID NO: 162661 - protein, 14 aa, Homo sapiens
  CDR3 for alpha chain variable domain of TCR clone 81331 (TRAV13-1, TRAJ9)
CAASALTGGFKTIF

SEQ ID NO: 162662 - protein, 15 aa, Homo sapiens
  CDR3 for beta chain variable domain of TCR clone 81331 (TRBV7-9, TRBJ1-5)
CASSQGHQPNQPQHF

SEQ ID NO: 162663 - protein, 14 aa, Homo sapiens
  CDR3 for alpha chain variable domain of TCR clone 81332 (TRAV1-2, TRAJ16)
CAVNRFSDVQKLLF

SEQ ID NO: 162664 - protein, 15 aa, Homo sapiens
  CDR3 for beta chain variable domain of TCR clone 81332 (TRBV7-9, TRBJ1-4)
CASSARTGGNEKLFF

SEQ ID NO: 162665 - protein, 14 aa, Homo sapiens
  CDR3 for alpha chain variable domain of TCR clone 81333 (TRAV12-2, TRAJ13)
CAVKNTGGYQKVTF

SEQ ID NO: 162666 - protein, 15 aa, Homo sapiens
  CDR3 for beta chain variable domain of TCR clone 81333 (TRBV7-2, TRBJ2-1)
CASSSGLAGGNEQFF

SEQ ID NO: 162667 - protein, 13 aa, Homo sapiens
  CDR3 for alpha chain variable domain of TCR clone 81334 (TRAV26-1, TRAJ33)
CIVRVEGNYQLIR

SEQ ID NO: 162668 - protein, 16 aa, Homo sapiens
  CDR3 for beta chain variable domain of TCR clone 81334 (TRBV15, TRBJ2-7)
CATSRDRGRRRGEQYF

SEQ ID NO: 162669 - protein, 14 aa, Homo sapiens
  CDR3 for alpha chain variable domain of TCR clone 81335 (TRAV26-1, TRAJ38)
CIAANAGNNRKLIW

SEQ ID NO: 162670 - protein, 13 aa, Homo sapiens
  CDR3 for beta chain variable domain of TCR clone 81335 (TRBV7-9, TRBJ1-2)
CASSLKQNYGYTF

SEQ ID NO: 162671 - protein, 14 aa, Homo sapiens
  CDR3 for alpha chain variable domain of TCR clone 81336 (TRAV1-1, TRAJ23)
CAVKAYNQGGKLIF

SEQ ID NO: 162672 - protein, 15 aa, Homo sapiens
  CDR3 for beta chain variable domain of TCR clone 81336 (TRBV20-1, TRBJ2-7)
CSARDRVSGMDEQYF

SEQ ID NO: 162673 - protein, 12 aa, Homo sapiens
  CDR3 for alpha chain variable domain of TCR clone 81337 (TRAV8-4, TRAJ34)
CAVSENTDKLIF

SEQ ID NO: 162674 - protein, 16 aa, Homo sapiens
  CDR3 for beta chain variable domain of TCR clone 81337 (TRBV12-4, TRBJ2-5)
CASSFFVRGRQETQYF

SEQ ID NO: 162675 - protein, 12 aa, Homo sapiens
  CDR3 for alpha chain variable domain of TCR clone 81338 (TRAV13-1, TRAJ21)
CAAKEGFNKFYF

SEQ ID NO: 162676 - protein, 12 aa, Homo sapiens
  CDR3 for beta chain variable domain of TCR clone 81338 (TRBV11-2, TRBJ2-2)
CAGSLGGGELFF

SEQ ID NO: 162677 - protein, 17 aa, Homo sapiens
  CDR3 for alpha chain variable domain of TCR clone 81339 (TRAV3, TRAJ6)
CAVRDGPRAGGSYIPTF

SEQ ID NO: 162678 - protein, 15 aa, Homo sapiens
  CDR3 for beta chain variable domain of TCR clone 81339 (TRBV19, TRBJ2-4)
CASRGPRRGENIQYF

SEQ ID NO: 162679 - protein, 12 aa, Homo sapiens
  CDR3 for alpha chain variable domain of TCR clone 81340 (TRAV12-3, TRAJ17)
CAMTLTGNKLTL

SEQ ID NO: 162680 - protein, 18 aa, Homo sapiens
  CDR3 for beta chain variable domain of TCR clone 81340 (TRBV4-3, TRBJ1-6)
CASSQETPASSYNSPLHF

SEQ ID NO: 162681 - protein, 13 aa, Homo sapiens
  CDR3 for alpha chain variable domain of TCR clone 81341 (TRAV26-1, TRAJ48)
CIVRVVGDETLTF

SEQ ID NO: 162682 - protein, 19 aa, Homo sapiens
  CDR3 for beta chain variable domain of TCR clone 81341 (TRBV11-3, TRBJ2-2)
CASSTRPGAKTTNTGELFF

SEQ ID NO: 162683 - protein, 14 aa, Homo sapiens
  CDR3 for alpha chain variable domain of TCR clone 81342 (TRAV9-2, TRAJ39)
CALYIYNAGNMLTL

SEQ ID NO: 162684 - protein, 13 aa, Homo sapiens
  CDR3 for beta chain variable domain of TCR clone 81342 (TRBV11-3, TRBJ1-1)
CASSRQPNTEAFF

SEQ ID NO: 162685 - protein, 14 aa, Homo sapiens
  CDR3 for alpha chain variable domain of TCR clone 81343 (TRAV12-2, TRAJ13)
CAVKKTGGYQKVTF

SEQ ID NO: 162686 - protein, 13 aa, Homo sapiens
  CDR3 for beta chain variable domain of TCR clone 81343 (TRBV7-3, TRBJ1-2)
CASSLKRGYGYTF

SEQ ID NO: 162687 - protein, 13 aa, Homo sapiens
  CDR3 for alpha chain variable domain of TCR clone 81344 (TRAV3, TRAJ29)
CAVIDIIDTPLVF

SEQ ID NO: 162688 - protein, 14 aa, Homo sapiens
  CDR3 for beta chain variable domain of TCR clone 81344 (TRBV27, TRBJ2-1)
CASSATGGYNEQFF

SEQ ID NO: 162689 - protein, 16 aa, Homo sapiens
  CDR3 for alpha chain variable domain of TCR clone 81345 (TRAV2, TRAJ4)
CAVDDRFSGGYNKLIF

SEQ ID NO: 162690 - protein, 13 aa, Homo sapiens
  CDR3 for beta chain variable domain of TCR clone 81345 (TRBV7-7, TRBJ2-5)
CASSRSGQETQYF

SEQ ID NO: 162691 - protein, 11 aa, Homo sapiens
  CDR3 for alpha chain variable domain of TCR clone 81346 (TRAV1-2, TRAJ40)
CAVLGTYKYIF

SEQ ID NO: 162692 - protein, 16 aa, Homo sapiens
  CDR3 for beta chain variable domain of TCR clone 81346 (TRBV7-3, TRBJ2-2)
CASSLKRGTLSGELFF

SEQ ID NO: 162693 - protein, 15 aa, Homo sapiens
  CDR3 for alpha chain variable domain of TCR clone 81347 (TRAV3, TRAJ3)
CAVRDRDSSASKIIF

SEQ ID NO: 162694 - protein, 15 aa, Homo sapiens
  CDR3 for beta chain variable domain of TCR clone 81347 (TRBV5-1, TRBJ2-1)
CASSPPRAPYNEQFF

SEQ ID NO: 162695 - protein, 12 aa, Homo sapiens
  CDR3 for alpha chain variable domain of TCR clone 81348 (TRAV4, TRAJ26)
CLVGDYGQNFVF

SEQ ID NO: 162696 - protein, 15 aa, Homo sapiens
  CDR3 for beta chain variable domain of TCR clone 81348 (TRBV7-9, TRBJ1-5)
CASSQGHQPNQPQHF

SEQ ID NO: 162697 - protein, 15 aa, Homo sapiens
  CDR3 for alpha chain variable domain of TCR clone 81349 (TRAV3, TRAJ22)
CAVRDRGGSARQLPF

SEQ ID NO: 162698 - protein, 13 aa, Homo sapiens
  CDR3 for beta chain variable domain of TCR clone 81349 (TRBV20-1, TRBJ1-1)
CSARVGGNTEAFF

SEQ ID NO: 162699 - protein, 13 aa, Homo sapiens
  CDR3 for alpha chain variable domain of TCR clone 81350 (TRAV36/DV7, TRAJ37)
CAAFSSNTGKLIF

SEQ ID NO: 162700 - protein, 15 aa, Homo sapiens
  CDR3 for beta chain variable domain of TCR clone 81350 (TRBV12-4, TRBJ2-5)
CQQFFVRGRQETQYF

SEQ ID NO: 162701 - protein, 17 aa, Homo sapiens
  CDR3 for alpha chain variable domain of TCR clone 81351 (TRAV3, TRAJ6)
CAVRDGPRAGGSYIPTF

SEQ ID NO: 162702 - protein, 13 aa, Homo sapiens
  CDR3 for beta chain variable domain of TCR clone 81351 (TRBV7-2, TRBJ2-5)
CASSQTSVETQYF

SEQ ID NO: 162703 - protein, 14 aa, Homo sapiens
  CDR3 for alpha chain variable domain of TCR clone 81352 (TRAV26-1, TRAJ26)
CIVRATFLGQNFAF

SEQ ID NO: 162704 - protein, 16 aa, Homo sapiens
  CDR3 for beta chain variable domain of TCR clone 81352 (TRBV12-4, TRBJ2-7)
CASRSTGTGPSYEQYF

SEQ ID NO: 162705 - protein, 16 aa, Homo sapiens
  CDR3 for alpha chain variable domain of TCR clone 81353 (TRAV12-2, TRAJ10)
CAVNRVLTGGGNKHTF

SEQ ID NO: 162706 - protein, 12 aa, Homo sapiens
  CDR3 for beta chain variable domain of TCR clone 81353 (TRBV28, TRBJ2-7)
CASSFSSYEQYF

SEQ ID NO: 162707 - protein, 13 aa, Homo sapiens
  CDR3 for alpha chain variable domain of TCR clone 81354 (TRAV27, TRAJ45)
CRSSGGGADGLTF

SEQ ID NO: 162708 - protein, 15 aa, Homo sapiens
  CDR3 for beta chain variable domain of TCR clone 81354 (TRBV11-3, TRBJ2-3)
CASLKDGREGDTQYF

SEQ ID NO: 162709 - protein, 19 aa, Homo sapiens
  CDR3 for alpha chain variable domain of TCR clone 81355 (TRAV20, TRAJ32)
CAVDGMVVLQTSSSLELTL

SEQ ID NO: 162710 - protein, 16 aa, Homo sapiens
  CDR3 for beta chain variable domain of TCR clone 81355 (TRBV19, TRBJ2-2)
CASRSPGTGATGELFF

SEQ ID NO: 162711 - protein, 16 aa, Homo sapiens
  CDR3 for alpha chain variable domain of TCR clone 81356 (TRAV3, TRAJ10)
CAVRDMRAGGGNKLTF

SEQ ID NO: 162712 - protein, 16 aa, Homo sapiens
  CDR3 for beta chain variable domain of TCR clone 81356 (TRBV7-8, TRBJ2-4)
CASSAERTLAKNIQYF

SEQ ID NO: 162713 - protein, 13 aa, Homo sapiens
  CDR3 for alpha chain variable domain of TCR clone 81357 (TRAV2, TRAJ40)
CAVVTSGTYKYIF

SEQ ID NO: 162714 - protein, 14 aa, Homo sapiens
  CDR3 for beta chain variable domain of TCR clone 81357 (TRBV19, TRBJ2-1)
CASPTSVLSGEQFI

SEQ ID NO: 162715 - protein, 16 aa, Homo sapiens
  CDR3 for alpha chain variable domain of TCR clone 81358 (TRAV30, TRAJ24)
CGTEIVDADSWGKFQF

SEQ ID NO: 162716 - protein, 13 aa, Homo sapiens
  CDR3 for beta chain variable domain of TCR clone 81358 (TRBV11-2, TRBJ1-3)
CASRLSERNTIYF

SEQ ID NO: 162717 - protein, 16 aa, Homo sapiens
  CDR3 for alpha chain variable domain of TCR clone 81359 (TRAV2, TRAJ20)
TTVLWSFRSNDYKLSF

SEQ ID NO: 162718 - protein, 12 aa, Homo sapiens
  CDR3 for beta chain variable domain of TCR clone 81359 (TRBV7-6, TRBJ2-3)
CASRTGTDTQYF

SEQ ID NO: 162719 - protein, 15 aa, Homo sapiens
  CDR3 for alpha chain variable domain of TCR clone 81360 (TRAV25, TRAJ53)
CPTSNSGGSNYKLTF

SEQ ID NO: 162720 - protein, 16 aa, Homo sapiens
  CDR3 for beta chain variable domain of TCR clone 81360 (TRBV5-1, TRBJ1-1)
CASSSGGNSLNTEAFF

SEQ ID NO: 162721 - protein, 14 aa, Homo sapiens
  CDR3 for alpha chain variable domain of TCR clone 81361 (TRAV26-1, TRAJ38)
CIADNAGNNRKLIW

SEQ ID NO: 162722 - protein, 16 aa, Homo sapiens
  CDR3 for beta chain variable domain of TCR clone 81361 (TRBV20-1, TRBJ1-4)
CSAPGQGLLTNEKLFF

SEQ ID NO: 162723 - protein, 15 aa, Homo sapiens
  CDR3 for alpha chain variable domain of TCR clone 81362 (TRAV17, TRAJ57)
CATGPSQGGSEKLVF

SEQ ID NO: 162724 - protein, 14 aa, Homo sapiens
  CDR3 for beta chain variable domain of TCR clone 81362 (TRBV4-1, TRBJ2-5)
CASSRSGSGETQYF

SEQ ID NO: 162725 - protein, 13 aa, Homo sapiens
  CDR3 for alpha chain variable domain of TCR clone 81363 (TRAV21, TRAJ3)
CAVTGSSASKIIF

SEQ ID NO: 162726 - protein, 16 aa, Homo sapiens
  CDR3 for beta chain variable domain of TCR clone 81363 (TRBV2, TRBJ1-4)
CASNLLQGATNEKLFF

SEQ ID NO: 162727 - protein, 16 aa, Homo sapiens
  CDR3 for alpha chain variable domain of TCR clone 81364 (TRAV8-3, TRAJ28)
CAVGTTLGLGVTNSLS

SEQ ID NO: 162728 - protein, 14 aa, Homo sapiens
  CDR3 for beta chain variable domain of TCR clone 81364 (TRBV7-2, TRBJ2-1)
CASSLGVGYNEQFF

SEQ ID NO: 162729 - protein, 23 aa, Homo sapiens
  CDR3 for alpha chain variable domain of TCR clone 81365 (TRAV26-1, TRAJ38)
CIADNAGNNHIQNPDPAVYQLRN

SEQ ID NO: 162730 - protein, 15 aa, Homo sapiens
  CDR3 for beta chain variable domain of TCR clone 81365 (TRBV27, TRBJ2-1)
CASSNGGGSSNEQFF

SEQ ID NO: 162731 - protein, 15 aa, Homo sapiens
  CDR3 for alpha chain variable domain of TCR clone 81366 (TRAV3, TRAJ22)
CAVRDRGGSSRQLTF

SEQ ID NO: 162732 - protein, 13 aa, Homo sapiens
  CDR3 for beta chain variable domain of TCR clone 81366 (TRBV7-9, TRBJ1-2)
CASSLKQNYGYTF

SEQ ID NO: 162733 - protein, 13 aa, Homo sapiens
  CDR3 for alpha chain variable domain of TCR clone 81367 (TRAV21, TRAJ27)
CAARPGNAGKSTF

SEQ ID NO: 162734 - protein, 11 aa, Homo sapiens
  CDR3 for beta chain variable domain of TCR clone 81367 (TRBV29-1, TRBJ2-5)
CSEDRTGTQYF

SEQ ID NO: 162735 - protein, 17 aa, Homo sapiens
  CDR3 for alpha chain variable domain of TCR clone 81368 (TRAV17, TRAJ7)
CATLGRLAFGKGNQVLV

SEQ ID NO: 162736 - protein, 13 aa, Homo sapiens
  CDR3 for beta chain variable domain of TCR clone 81368 (TRBV12-4, TRBJ2-7)
CASSLERVREQYF

SEQ ID NO: 162737 - protein, 14 aa, Homo sapiens
  CDR3 for alpha chain variable domain of TCR clone 81369 (TRAV1-2, TRAJ16)
CAVNRFSDGQKLLF

SEQ ID NO: 162738 - protein, 14 aa, Homo sapiens
  CDR3 for beta chain variable domain of TCR clone 81369 (TRBV13, TRBJ2-5)
CASSLGGGQETQYF

SEQ ID NO: 162739 - protein, 15 aa, Homo sapiens
  CDR3 for alpha chain variable domain of TCR clone 81370 (TRAV8-2, TRAJ16)
CVVSDGSSDGQKLLF

SEQ ID NO: 162740 - protein, 14 aa, Homo sapiens
  CDR3 for beta chain variable domain of TCR clone 81370 (TRBV7-3, TRBJ1-1)
CASSLGTGYTEAFF

SEQ ID NO: 162741 - protein, 15 aa, Homo sapiens
  CDR3 for alpha chain variable domain of TCR clone 81371 (TRAV26-1, TRAJ42)
FIVRVKGGSQGNLIF

SEQ ID NO: 162742 - protein, 14 aa, Homo sapiens
  CDR3 for beta chain variable domain of TCR clone 81371 (TRBV19, TRBJ2-2)
RATTGHANTGELFF

SEQ ID NO: 162743 - protein, 11 aa, Homo sapiens
  CDR3 for alpha chain variable domain of TCR clone 81372 (TRAV12-3, TRAJ27)
CATANAGKSTF

SEQ ID NO: 162744 - protein, 17 aa, Homo sapiens
  CDR3 for beta chain variable domain of TCR clone 81372 (TRBV13, TRBJ2-3)
CASSLSRVAGGRNTQYF

SEQ ID NO: 162745 - protein, 14 aa, Homo sapiens
  CDR3 for alpha chain variable domain of TCR clone 81373 (TRAV16, TRAJ32)
FSKRYGGATNKLIF

SEQ ID NO: 162746 - protein, 12 aa, Homo sapiens
  CDR3 for beta chain variable domain of TCR clone 81373 (TRBV7-9, TRBJ2-7)
CATRTDAYEQYF

SEQ ID NO: 162747 - protein, 13 aa, Homo sapiens
  CDR3 for alpha chain variable domain of TCR clone 81374 (TRAV2, TRAJ40)
CAVVTSGTYKYIF

SEQ ID NO: 162748 - protein, 16 aa, Homo sapiens
  CDR3 for beta chain variable domain of TCR clone 81374 (TRBV28, TRBJ2-7)
CASSLFFETGGPEQYF

SEQ ID NO: 162749 - protein, 15 aa, Homo sapiens
  CDR3 for alpha chain variable domain of TCR clone 81375 (TRAV3, TRAJ52)
CAGRPGGTSYGKLTF

SEQ ID NO: 162750 - protein, 17 aa, Homo sapiens
  CDR3 for beta chain variable domain of TCR clone 81375 (TRBV7-8, TRBJ2-6)
CASSAGTGGAGANVLTF

SEQ ID NO: 162751 - protein, 16 aa, Homo sapiens
  CDR3 for alpha chain variable domain of TCR clone 81376 (TRAV26-1, TRAJ52)
CIVSNAGGTSYGKLTF

SEQ ID NO: 162752 - protein, 15 aa, Homo sapiens
  CDR3 for beta chain variable domain of TCR clone 81376 (TRBV7-3, TRBJ2-1)
CASSPTRGGEVEQFF

SEQ ID NO: 162753 - protein, 12 aa, Homo sapiens
  CDR3 for alpha chain variable domain of TCR clone 81377 (TRAV8-3, TRAJ20)
CAVGASGYELSF

SEQ ID NO: 162754 - protein, 16 aa, Homo sapiens
  CDR3 for beta chain variable domain of TCR clone 81377 (TRBV19, TRBJ2-2)
CASRSPGTGATGELFF

SEQ ID NO: 162755 - protein, 16 aa, Homo sapiens
  CDR3 for alpha chain variable domain of TCR clone 81378 (TRAV12-1, TRAJ43)
CVVNPHRFGAGTRLTV

SEQ ID NO: 162756 - protein, 13 aa, Homo sapiens
  CDR3 for beta chain variable domain of TCR clone 81378 (TRBV7-9, TRBJ1-2)
CASSLKQNYGYTF

SEQ ID NO: 162757 - protein, 19 aa, Homo sapiens
  CDR3 for alpha chain variable domain of TCR clone 81379 (TRAV2, TRAJ20)
ILQVREADAAVYRDCKLSF

SEQ ID NO: 162758 - protein, 13 aa, Homo sapiens
  CDR3 for beta chain variable domain of TCR clone 81379 (TRBV11-2, TRBJ2-5)
CASSSTGEETQYF

SEQ ID NO: 162759 - protein, 14 aa, Homo sapiens
  CDR3 for alpha chain variable domain of TCR clone 81380 (TRAV12-2, TRAJ45)
CAVNIGGGADGLTF

SEQ ID NO: 162760 - protein, 13 aa, Homo sapiens
  CDR3 for beta chain variable domain of TCR clone 81380 (TRBV19, TRBJ2-2)
CASSIWSTGGLFF

SEQ ID NO: 162761 - protein, 11 aa, Homo sapiens
  CDR3 for alpha chain variable domain of TCR clone 81381 (TRAV1-2, TRAJ20)
CAVANDYKLSF

SEQ ID NO: 162762 - protein, 13 aa, Homo sapiens
  CDR3 for beta chain variable domain of TCR clone 81381 (TRBV10-3, TRBJ2-7)
CASKLAVNYEQYF

SEQ ID NO: 162763 - protein, 14 aa, Homo sapiens
  CDR3 for alpha chain variable domain of TCR clone 81382 (TRAV12-3, TRAJ10)
GHLPLTGGGNKLTF

SEQ ID NO: 162764 - protein, 16 aa, Homo sapiens
  CDR3 for beta chain variable domain of TCR clone 81382 (TRBV29-1, TRBJ2-7)
CSVEVVGTSGSYEQYF

SEQ ID NO: 162765 - protein, 12 aa, Homo sapiens
  CDR3 for alpha chain variable domain of TCR clone 81383 (TRAV12-3, TRAJ17)
CAMTLTGNKLTF

SEQ ID NO: 162766 - protein, 17 aa, Homo sapiens
  CDR3 for beta chain variable domain of TCR clone 81383 (TRBV25-1, TRBJ1-1)
CASSEYSRTGSNTEAFF

SEQ ID NO: 162767 - protein, 17 aa, Homo sapiens
  CDR3 for alpha chain variable domain of TCR clone 81384 (TRAV1-1, TRAJ11)
CAGYSTPTFGKGTMLLV

SEQ ID NO: 162768 - protein, 15 aa, Homo sapiens
  CDR3 for beta chain variable domain of TCR clone 81384 (TRBV6-5, TRBJ2-1)
CASRGDFDSYNEQFF

SEQ ID NO: 162769 - protein, 15 aa, Homo sapiens
  CDR3 for alpha chain variable domain of TCR clone 81385 (TRAV12-3, TRAJ6)
CAMSATTGGSYIPTF

SEQ ID NO: 162770 - protein, 16 aa, Homo sapiens
  CDR3 for beta chain variable domain of TCR clone 81385 (TRBV20-1, TRBJ1-2)
CSASMGLGVANYGYTF

SEQ ID NO: 162771 - protein, 15 aa, Homo sapiens
  CDR3 for alpha chain variable domain of TCR clone 81386 (TRAV12-3, TRAJ48)
CAMNAKNLGNEKLTF

SEQ ID NO: 162772 - protein, 14 aa, Homo sapiens
  CDR3 for beta chain variable domain of TCR clone 81386 (TRBV2, TRBJ1-6)
CASSESRNNSPLHF

SEQ ID NO: 162773 - protein, 13 aa, Homo sapiens
  CDR3 for alpha chain variable domain of TCR clone 81387 (TRAV29/DV5, TRAJ44)
CAAGTGTASKLTF

SEQ ID NO: 162774 - protein, 13 aa, Homo sapiens
  CDR3 for beta chain variable domain of TCR clone 81387 (TRBV19, TRBJ2-7)
CASRKAGGSEQYF

SEQ ID NO: 162775 - protein, 14 aa, Homo sapiens
  CDR3 for alpha chain variable domain of TCR clone 81388 (TRAV1-2, TRAJ16)
CAVNRFSDVQKLLF

SEQ ID NO: 162776 - protein, 12 aa, Homo sapiens
  CDR3 for beta chain variable domain of TCR clone 81388 (TRBV20-1, TRBJ1-5)
CSAAGWDQPQHF

SEQ ID NO: 162777 - protein, 13 aa, Homo sapiens
  CDR3 for alpha chain variable domain of TCR clone 81389 (TRAV2, TRAJ40)
CAVVTSGTYKYIF

SEQ ID NO: 162778 - protein, 15 aa, Homo sapiens
  CDR3 for beta chain variable domain of TCR clone 81389 (TRBV11-3, TRBJ2-3)
CASQKDGREGDTQYF

SEQ ID NO: 162779 - protein, 12 aa, Homo sapiens
  CDR3 for alpha chain variable domain of TCR clone 81390 (TRAV12-3, TRAJ41)
CAMSYSGYALNF

SEQ ID NO: 162780 - protein, 13 aa, Homo sapiens
  CDR3 for beta chain variable domain of TCR clone 81390 (TRBV7-3, TRBJ2-1)
CASSLVSYNEQFF

SEQ ID NO: 162781 - protein, 15 aa, Homo sapiens
  CDR3 for alpha chain variable domain of TCR clone 81391 (TRAV3, TRAJ17)
CAVSPKEAAGNKLTF

SEQ ID NO: 162782 - protein, 12 aa, Homo sapiens
  CDR3 for beta chain variable domain of TCR clone 81391 (TRBV7-9, TRBJ1-6)
CASILMTSPLHF

SEQ ID NO: 162783 - protein, 14 aa, Homo sapiens
  CDR3 for alpha chain variable domain of TCR clone 81392 (TRAV2, TRAJ3)
CAVEDNSSASKIIF

SEQ ID NO: 162784 - protein, 16 aa, Homo sapiens
  CDR3 for beta chain variable domain of TCR clone 81392 (TRBV12-4, TRBJ2-5)
CASSFFVRGRQETQYF

SEQ ID NO: 162785 - protein, 12 aa, Homo sapiens
  CDR3 for alpha chain variable domain of TCR clone 81393 (TRAV25, TRAJ38)
CAGTGNNRRLIW

SEQ ID NO: 162786 - protein, 14 aa, Homo sapiens
  CDR3 for beta chain variable domain of TCR clone 81393 (TRBV5-4, TRBJ1-1)
CASSLDSRRDEAFF

SEQ ID NO: 162787 - protein, 15 aa, Homo sapiens
  CDR3 for alpha chain variable domain of TCR clone 81394 (TRAV12-1, TRAJ44)
CVADLPTGTASKLTF

SEQ ID NO: 162788 - protein, 13 aa, Homo sapiens
  CDR3 for beta chain variable domain of TCR clone 81394 (TRBV6-5, TRBJ2-5)
CASSPPGGETQYF

SEQ ID NO: 162789 - protein, 12 aa, Homo sapiens
  CDR3 for alpha chain variable domain of TCR clone 81395 (TRAV17, TRAJ12)
CAMLRSSYKLIF

SEQ ID NO: 162790 - protein, 16 aa, Homo sapiens
  CDR3 for beta chain variable domain of TCR clone 81395 (TRBV28, TRBJ2-7)
CASSLFFETGGPEQYF

SEQ ID NO: 162791 - protein, 14 aa, Homo sapiens
  CDR3 for alpha chain variable domain of TCR clone 81396 (TRAV23/DV6, TRAJ24)
CAASLSDSWGKLQF

SEQ ID NO: 162792 - protein, 17 aa, Homo sapiens
  CDR3 for beta chain variable domain of TCR clone 81396 (TRBV4-3, TRBJ2-1)
CASSQFSSGRASGEQFF

SEQ ID NO: 162793 - protein, 16 aa, Homo sapiens
  CDR3 for alpha chain variable domain of TCR clone 81397 (TRAV23/DV6, TRAJ9)
CAASIGGNTGGFKTIF

SEQ ID NO: 162794 - protein, 14 aa, Homo sapiens
  CDR3 for beta chain variable domain of TCR clone 81397 (TRBV9, TRBJ2-7)
CASSVGGGSYEQYF

SEQ ID NO: 162795 - protein, 16 aa, Homo sapiens
  CDR3 for alpha chain variable domain of TCR clone 81398 (TRAV30, TRAJ24)
CGTEIVDADSWGKFKF

SEQ ID NO: 162796 - protein, 12 aa, Homo sapiens
  CDR3 for beta chain variable domain of TCR clone 81398 (TRBV12-4, TRBJ2-3)
CASSSTTDTQYF

SEQ ID NO: 162797 - protein, 11 aa, Homo sapiens
  CDR3 for alpha chain variable domain of TCR clone 81399 (TRAV17, TRAJ9)
CGFTGGFKTIF

SEQ ID NO: 162798 - protein, 16 aa, Homo sapiens
  CDR3 for beta chain variable domain of TCR clone 81399 (TRBV12-5, TRBJ2-5)
CASGPRTSGNQETQYF

SEQ ID NO: 162799 - protein, 15 aa, Homo sapiens
  CDR3 for alpha chain variable domain of TCR clone 81400 (TRAV35, TRAJ58)
CAGRRQETSGSRLTF

SEQ ID NO: 162800 - protein, 19 aa, Homo sapiens
  CDR3 for beta chain variable domain of TCR clone 81400 (TRBV7-2, TRBJ2-3)
CASSFLSRNWGGGTDTQYF

SEQ ID NO: 162801 - protein, 14 aa, Homo sapiens
  CDR3 for alpha chain variable domain of TCR clone 81401 (TRAV12-3, TRAJ10)
SHLPLTGGGNKLTF

SEQ ID NO: 162802 - protein, 15 aa, Homo sapiens
  CDR3 for beta chain variable domain of TCR clone 81401 (TRBV29-1, TRBJ2-7)
CSVEFFDRWSYEQYF

SEQ ID NO: 162803 - protein, 12 aa, Homo sapiens
  CDR3 for alpha chain variable domain of TCR clone 81402 (TRAV1-2, TRAJ26)
CAVRYYGQNFVF

SEQ ID NO: 162804 - protein, 14 aa, Homo sapiens
  CDR3 for beta chain variable domain of TCR clone 81402 (TRBV11-1, TRBJ2-7)
CASSFRQGSYGQYF

SEQ ID NO: 162805 - protein, 13 aa, Homo sapiens
  CDR3 for alpha chain variable domain of TCR clone 81403 (TRAV17, TRAJ15)
CATDARAGTVLIF

SEQ ID NO: 162806 - protein, 14 aa, Homo sapiens
  CDR3 for beta chain variable domain of TCR clone 81403 (TRBV7-2, TRBJ2-5)
CASSIRLTQETQYF

SEQ ID NO: 162807 - protein, 17 aa, Homo sapiens
  CDR3 for alpha chain variable domain of TCR clone 81404 (TRAV9-2, TRAJ45)
CALSGYYSGGGADGLTF

SEQ ID NO: 162808 - protein, 14 aa, Homo sapiens
  CDR3 for beta chain variable domain of TCR clone 81404 (TRBV29-1, TRBJ2-2)
CSVLAETNTGELFF

SEQ ID NO: 162809 - protein, 15 aa, Homo sapiens
  CDR3 for alpha chain variable domain of TCR clone 81405 (TRAV21, TRAJ24)
CAARSSTDSWGKLQF

SEQ ID NO: 162810 - protein, 12 aa, Homo sapiens
  CDR3 for beta chain variable domain of TCR clone 81405 (TRBV11-2, TRBJ2-1)
CASSPGNNEQFF

SEQ ID NO: 162811 - protein, 19 aa, Homo sapiens
  CDR3 for alpha chain variable domain of TCR clone 81406 (TRAV21, TRAJ45)
CAVEAPRGDQEEVLTDSPF

SEQ ID NO: 162812 - protein, 12 aa, Homo sapiens
  CDR3 for beta chain variable domain of TCR clone 81406 (TRBV29-1, TRBJ1-3)
CSTRDSGNTVYF

SEQ ID NO: 162813 - protein, 15 aa, Homo sapiens
  CDR3 for alpha chain variable domain of TCR clone 81407 (TRAV4, TRAJ39)
CLVGPNNNAGNMLTF

SEQ ID NO: 162814 - protein, 15 aa, Homo sapiens
  CDR3 for beta chain variable domain of TCR clone 81407 (TRBV7-9, TRBJ1-6)
RASSSPGRGNSPLHF

SEQ ID NO: 162815 - protein, 12 aa, Homo sapiens
  CDR3 for alpha chain variable domain of TCR clone 81408 (TRAV27, TRAJ13)
CAGAGGYQKVTF

SEQ ID NO: 162816 - protein, 14 aa, Homo sapiens
  CDR3 for beta chain variable domain of TCR clone 81408 (TRBV19, TRBJ2-2)
CASSTLHRSGELFF

SEQ ID NO: 162817 - protein, 14 aa, Homo sapiens
  CDR3 for alpha chain variable domain of TCR clone 81409 (TRAV12-3, TRAJ10)
SHLPLTGGGNKLTF

SEQ ID NO: 162818 - protein, 15 aa, Homo sapiens
  CDR3 for beta chain variable domain of TCR clone 81409 (TRBV7-2, TRBJ2-7)
CASSWGQGAIYEQYF

SEQ ID NO: 162819 - protein, 15 aa, Homo sapiens
  CDR3 for alpha chain variable domain of TCR clone 81410 (TRAV13-1, TRAJ32)
CAASIYGGATNKLIF

SEQ ID NO: 162820 - protein, 17 aa, Homo sapiens
  CDR3 for beta chain variable domain of TCR clone 81410 (TRBV7-3, TRBJ2-5)
CASSLGSGRSGSVTQYF

SEQ ID NO: 162821 - protein, 12 aa, Homo sapiens
  CDR3 for alpha chain variable domain of TCR clone 81411 (TRAV36/DV7, TRAJ26)
CAVDNYGQNFVF

SEQ ID NO: 162822 - protein, 16 aa, Homo sapiens
  CDR3 for beta chain variable domain of TCR clone 81411 (TRBV7-3, TRBJ2-2)
CASSLTGTGTTGELFS

SEQ ID NO: 162823 - protein, 13 aa, Homo sapiens
  CDR3 for alpha chain variable domain of TCR clone 81412 (TRAV21, TRAJ27)
CAARPGNAGKSTF

SEQ ID NO: 162824 - protein, 14 aa, Homo sapiens
  CDR3 for beta chain variable domain of TCR clone 81412 (TRBV7-6, TRBJ2-3)
CPSSLGTVTDTQYF

SEQ ID NO: 162825 - protein, 14 aa, Homo sapiens
  CDR3 for alpha chain variable domain of TCR clone 81413 (TRAV26-1, TRAJ34)
CIVRVAYNADKLIF

SEQ ID NO: 162826 - protein, 15 aa, Homo sapiens
  CDR3 for beta chain variable domain of TCR clone 81413 (TRBV20-1, TRBJ2-7)
CSARVPAAYFYEQYF

SEQ ID NO: 162827 - protein, 11 aa, Homo sapiens
  CDR3 for alpha chain variable domain of TCR clone 81414 (TRAV35, TRAJ39)
GLNNAGNMLTF

SEQ ID NO: 162828 - protein, 16 aa, Homo sapiens
  CDR3 for beta chain variable domain of TCR clone 81414 (TRBV27, TRBJ2-2)
CASSFRGLVRTGELFF

SEQ ID NO: 162829 - protein, 13 aa, Homo sapiens
  CDR3 for alpha chain variable domain of TCR clone 81415 (TRAV35, TRAJ49)
CAGRLNTGNQFYF

SEQ ID NO: 162830 - protein, 17 aa, Homo sapiens
  CDR3 for beta chain variable domain of TCR clone 81415 (TRBV6-1, TRBJ2-1)
CASSEGGWGQFYNEKFF

SEQ ID NO: 162831 - protein, 14 aa, Homo sapiens
  CDR3 for alpha chain variable domain of TCR clone 81416 (TRAV26-1, TRAJ26)
CIVRATFLGQNFVF

SEQ ID NO: 162832 - protein, 16 aa, Homo sapiens
  CDR3 for beta chain variable domain of TCR clone 81416 (TRBV12-4, TRBJ2-7)
CASRSTGTGPAYEQYF

SEQ ID NO: 162833 - protein, 16 aa, Homo sapiens
  CDR3 for alpha chain variable domain of TCR clone 81417 (TRAV26-1, TRAJ38)
CIVRPPNAGNNRKLIW

SEQ ID NO: 162834 - protein, 13 aa, Homo sapiens
  CDR3 for beta chain variable domain of TCR clone 81417 (TRBV18, TRBJ1-1)
CASSPNGDTEAFF

SEQ ID NO: 162835 - protein, 15 aa, Homo sapiens
  CDR3 for alpha chain variable domain of TCR clone 81418 (TRAV12-2, TRAJ52)
CAGTSGGTSYGKLTF

SEQ ID NO: 162836 - protein, 15 aa, Homo sapiens
  CDR3 for beta chain variable domain of TCR clone 81418 (TRBV7-2, TRBJ2-1)
CASSPGFISGNEQFF

SEQ ID NO: 162837 - protein, 15 aa, Homo sapiens
  CDR3 for alpha chain variable domain of TCR clone 81419 (TRAV12-3, TRAJ11)
CAMSEENSGYSTLTF

SEQ ID NO: 162838 - protein, 14 aa, Homo sapiens
  CDR3 for beta chain variable domain of TCR clone 81419 (TRBV7-2, TRBJ2-7)
CASSPKTSFYEQYF

SEQ ID NO: 162839 - protein, 12 aa, Homo sapiens
  CDR3 for alpha chain variable domain of TCR clone 81420 (TRAV12-2, TRAJ9)
CAVNTGGFKTIF

SEQ ID NO: 162840 - protein, 13 aa, Homo sapiens
  CDR3 for beta chain variable domain of TCR clone 81420 (TRBV7-9, TRBJ1-2)
CASSLKQNYGYTF

SEQ ID NO: 162841 - protein, 14 aa, Homo sapiens
  CDR3 for alpha chain variable domain of TCR clone 81421 (TRAV17, TRAJ12)
CATDEKDSSYKLIF

SEQ ID NO: 162842 - protein, 16 aa, Homo sapiens
  CDR3 for beta chain variable domain of TCR clone 81421 (TRBV11-2, TRBJ2-1)
CASSPRLAGVYSEQFF

SEQ ID NO: 162843 - protein, 14 aa, Homo sapiens
  CDR3 for alpha chain variable domain of TCR clone 81422 (TRAV12-2, TRAJ13)
CAVKKTGGYQKVTF

SEQ ID NO: 162844 - protein, 16 aa, Homo sapiens
  CDR3 for beta chain variable domain of TCR clone 81422 (TRBV24-1, TRBJ2-6)
CATSDRRASGANVLTF

SEQ ID NO: 162845 - protein, 11 aa, Homo sapiens
  CDR3 for alpha chain variable domain of TCR clone 81423 (TRAV3, TRAJ17)
PRGAAGNKLTF

SEQ ID NO: 162846 - protein, 16 aa, Homo sapiens
  CDR3 for beta chain variable domain of TCR clone 81423 (TRBV7-6, TRBJ2-1)
CASSAPGPSSYNKQFF

SEQ ID NO: 162847 - protein, 13 aa, Homo sapiens
  CDR3 for alpha chain variable domain of TCR clone 81424 (TRAV8-2, TRAJ26)
CVVSLGYGQNFVF

SEQ ID NO: 162848 - protein, 12 aa, Homo sapiens
  CDR3 for beta chain variable domain of TCR clone 81424 (TRBV12-4, TRBJ2-3)
CASSTLPDTQYF

SEQ ID NO: 162849 - protein, 15 aa, Homo sapiens
  CDR3 for alpha chain variable domain of TCR clone 81425 (TRAV8-3, TRAJ27)
CAVGPSKTNAGKSTF

SEQ ID NO: 162850 - protein, 15 aa, Homo sapiens
  CDR3 for beta chain variable domain of TCR clone 81425 (TRBV7-2, TRBJ2-1)
CASSSGVAGGNEQFF

SEQ ID NO: 162851 - protein, 14 aa, Homo sapiens
  CDR3 for alpha chain variable domain of TCR clone 81426 (TRAV17, TRAJ31)
CATVLQNNNARLMF

SEQ ID NO: 162852 - protein, 14 aa, Homo sapiens
  CDR3 for beta chain variable domain of TCR clone 81426 (TRBV12-4, TRBJ2-5)
CASSLWQKQETQYF

SEQ ID NO: 162853 - protein, 14 aa, Homo sapiens
  CDR3 for alpha chain variable domain of TCR clone 81427 (TRAV12-3, TRAJ15)
CAMIPPQAGTALIF

SEQ ID NO: 162854 - protein, 14 aa, Homo sapiens
  CDR3 for beta chain variable domain of TCR clone 81427 (TRBV20-1, TRBJ2-2)
CSARRRLATGGLFF

SEQ ID NO: 162855 - protein, 14 aa, Homo sapiens
  CDR3 for alpha chain variable domain of TCR clone 81428 (TRAV1-1, TRAJ27)
CAVFYNTNAGKSTF

SEQ ID NO: 162856 - protein, 15 aa, Homo sapiens
  CDR3 for beta chain variable domain of TCR clone 81428 (TRBV6-3, TRBJ2-7)
CASSSPGTVFYEQYF

SEQ ID NO: 162857 - protein, 15 aa, Homo sapiens
  CDR3 for alpha chain variable domain of TCR clone 81429 (TRAV8-4, TRAJ37)
CAVSRGSGNTGKLIF

SEQ ID NO: 162858 - protein, 15 aa, Homo sapiens
  CDR3 for beta chain variable domain of TCR clone 81429 (TRBV5-1, TRBJ2-7)
CASSLGLTSSYEQYF

SEQ ID NO: 162859 - protein, 14 aa, Homo sapiens
  CDR3 for alpha chain variable domain of TCR clone 81430 (TRAV17, TRAJ37)
CATDPSGNTGKLIF

SEQ ID NO: 162860 - protein, 13 aa, Homo sapiens
  CDR3 for beta chain variable domain of TCR clone 81430 (TRBV4-1, TRBJ2-3)
CASSQPPTDTQYF

SEQ ID NO: 162861 - protein, 16 aa, Homo sapiens
  CDR3 for alpha chain variable domain of TCR clone 81431 (TRAV30, TRAJ24)
CGTEIVDADSWGKFQF

SEQ ID NO: 162862 - protein, 15 aa, Homo sapiens
  CDR3 for beta chain variable domain of TCR clone 81431 (TRBV11-2, TRBJ2-1)
CASSRNRGLMYEQFF

SEQ ID NO: 162863 - protein, 11 aa, Homo sapiens
  CDR3 for alpha chain variable domain of TCR clone 81432 (TRAV17, TRAJ39)
CATDPYNMLTF

SEQ ID NO: 162864 - protein, 13 aa, Homo sapiens
  CDR3 for beta chain variable domain of TCR clone 81432 (TRBV7-8, TRBJ2-1)
CASTRDAVDEQFF

SEQ ID NO: 162865 - protein, 14 aa, Homo sapiens
  CDR3 for alpha chain variable domain of TCR clone 81433 (TRAV9-2, TRAJ39)
CALYIYNAGNMLTF

SEQ ID NO: 162866 - protein, 13 aa, Homo sapiens
  CDR3 for beta chain variable domain of TCR clone 81433 (TRBV27, TRBJ2-7)
CASSLTTGYEQYF

SEQ ID NO: 162867 - protein, 14 aa, Homo sapiens
  CDR3 for alpha chain variable domain of TCR clone 81434 (TRAV1-1, TRAJ27)
CAVIYNTNAGKSTF

SEQ ID NO: 162868 - protein, 13 aa, Homo sapiens
  CDR3 for beta chain variable domain of TCR clone 81434 (TRBV7-9, TRBJ1-2)
RASSLKQNYGYTF

SEQ ID NO: 162869 - protein, 11 aa, Homo sapiens
  CDR3 for alpha chain variable domain of TCR clone 81435 (TRAV8-3, TRAJ15)
CAVGPGTALIF

SEQ ID NO: 162870 - protein, 18 aa, Homo sapiens
  CDR3 for beta chain variable domain of TCR clone 81435 (TRBV18, TRBJ2-3)
WASSYTSGAAGGTDTQYF

SEQ ID NO: 162871 - protein, 22 aa, Homo sapiens
  CDR3 for alpha chain variable domain of TCR clone 81436 (TRAV17, TRAJ32)
CFLLLCYGRRNPYGGATNKLIF

SEQ ID NO: 162872 - protein, 11 aa, Homo sapiens
  CDR3 for beta chain variable domain of TCR clone 81436 (TRBV20-1, TRBJ1-1)
CSARVRVGAFF

SEQ ID NO: 162873 - protein, 10 aa, Homo sapiens
  CDR3 for alpha chain variable domain of TCR clone 81437 (TRAV1-2, TRAJ18)
CAVRGEAQPW

SEQ ID NO: 162874 - protein, 14 aa, Homo sapiens
  CDR3 for beta chain variable domain of TCR clone 81437 (TRBV7-2, TRBJ2-7)
CASSPKTSFYEQYF

SEQ ID NO: 162875 - protein, 16 aa, Homo sapiens
  CDR3 for alpha chain variable domain of TCR clone 81438 (TRAV20, TRAJ10)
CAVLRGLTGGGNKLTF

SEQ ID NO: 162876 - protein, 14 aa, Homo sapiens
  CDR3 for beta chain variable domain of TCR clone 81438 (TRBV19, TRBJ1-5)
WASIAPDSFLSQHF

SEQ ID NO: 162877 - protein, 15 aa, Homo sapiens
  CDR3 for alpha chain variable domain of TCR clone 81439 (TRAV12-3, TRAJ6)
CAMSATSGGSYIPTF

SEQ ID NO: 162878 - protein, 11 aa, Homo sapiens
  CDR3 for beta chain variable domain of TCR clone 81439 (TRBV20-1, TRBJ1-5)
CSAQGDQPQHF

SEQ ID NO: 162879 - protein, 17 aa, Homo sapiens
  CDR3 for alpha chain variable domain of TCR clone 81440 (TRAV8-6, TRAJ58)
CAVSTWVGETSGSRLTF

SEQ ID NO: 162880 - protein, 14 aa, Homo sapiens
  CDR3 for beta chain variable domain of TCR clone 81440 (TRBV4-2, TRBJ2-1)
CASGLDRAYNEQFF

SEQ ID NO: 162881 - protein, 10 aa, Homo sapiens
  CDR3 for alpha chain variable domain of TCR clone 81441 (TRAV23/DV6, TRAJ57)
CAPSSTLSQG

SEQ ID NO: 162882 - protein, 14 aa, Homo sapiens
  CDR3 for beta chain variable domain of TCR clone 81441 (TRBV25-1, TRBJ1-1)
CASTHLGGNTEAFF

SEQ ID NO: 162883 - protein, 13 aa, Homo sapiens
  CDR3 for alpha chain variable domain of TCR clone 81442 (TRAV8-3, TRAJ36)
CAVGATGANNLFF

SEQ ID NO: 162884 - protein, 15 aa, Homo sapiens
  CDR3 for beta chain variable domain of TCR clone 81442 (TRBV7-2, TRBJ1-2)
CDSSPRAGWNYGYTF

SEQ ID NO: 162885 - protein, 14 aa, Homo sapiens
  CDR3 for alpha chain variable domain of TCR clone 81443 (TRAV35, TRAJ33)
CAGSSQDSNYQLIW

SEQ ID NO: 162886 - protein, 15 aa, Homo sapiens
  CDR3 for beta chain variable domain of TCR clone 81443 (TRBV20-1, TRBJ2-7)
CSAESGTSGAYEQSF

SEQ ID NO: 162887 - protein, 12 aa, Homo sapiens
  CDR3 for alpha chain variable domain of TCR clone 81444 (TRAV3, TRAJ31)
CAVRDGNARLMF

SEQ ID NO: 162888 - protein, 14 aa, Homo sapiens
  CDR3 for beta chain variable domain of TCR clone 81444 (TRBV12-5, TRBJ2-5)
CASGSRTHQETQYF

SEQ ID NO: 162889 - protein, 11 aa, Homo sapiens
  CDR3 for alpha chain variable domain of TCR clone 81445 (TRAV4, TRAJ23)
CLVAPGGKLIF

SEQ ID NO: 162890 - protein, 13 aa, Homo sapiens
  CDR3 for beta chain variable domain of TCR clone 81445 (TRBV7-3, TRBJ1-1)
CASSQDWGAEAFF

SEQ ID NO: 162891 - protein, 10 aa, Homo sapiens
  CDR3 for alpha chain variable domain of TCR clone 81446 (TRAV5, TRAJ34)
CAEDTDKLIF

SEQ ID NO: 162892 - protein, 16 aa, Homo sapiens
  CDR3 for beta chain variable domain of TCR clone 81446 (TRBV7-3, TRBJ2-2)
CASSLKRGTSSGELFF

SEQ ID NO: 162893 - protein, 18 aa, Homo sapiens
  CDR3 for alpha chain variable domain of TCR clone 81447 (TRAV26-2, TRAJ45)
RILRLWGYSGGGADGLTF

SEQ ID NO: 162894 - protein, 17 aa, Homo sapiens
  CDR3 for beta chain variable domain of TCR clone 81447 (TRBV28, TRBJ2-3)
CASSPTPAGGRVDTQYF

SEQ ID NO: 162895 - protein, 14 aa, Homo sapiens
  CDR3 for alpha chain variable domain of TCR clone 81448 (TRAV2, TRAJ37)
CAVDFTSNTGKLIS

SEQ ID NO: 162896 - protein, 13 aa, Homo sapiens
  CDR3 for beta chain variable domain of TCR clone 81448 (TRBV20-1, TRBJ1-1)
CSAPLGGGTEAFF

SEQ ID NO: 162897 - protein, 17 aa, Homo sapiens
  CDR3 for alpha chain variable domain of TCR clone 81449 (TRAV4, TRAJ13)
CLVGVQGSSGGYQKVTF

SEQ ID NO: 162898 - protein, 18 aa, Homo sapiens
  CDR3 for beta chain variable domain of TCR clone 81449 (TRBV15, TRBJ2-3)
CATSRDGARSWDTDTQYL

SEQ ID NO: 162899 - protein, 15 aa, Homo sapiens
  CDR3 for alpha chain variable domain of TCR clone 81450 (TRAV25, TRAJ52)
CAGRPGGTSYGKLTF

SEQ ID NO: 162900 - protein, 14 aa, Homo sapiens
  CDR3 for beta chain variable domain of TCR clone 81450 (TRBV2, TRBJ2-7)
CASSLTSGGYEQYF

SEQ ID NO: 162901 - protein, 16 aa, Homo sapiens
  CDR3 for alpha chain variable domain of TCR clone 81451 (TRAV16, TRAJ52)
CALSAAGGTSYGRLTF

SEQ ID NO: 162902 - protein, 12 aa, Homo sapiens
  CDR3 for beta chain variable domain of TCR clone 81451 (TRBV12-4, TRBJ1-3)
CASSFSGNTIYF

SEQ ID NO: 162903 - protein, 13 aa, Homo sapiens
  CDR3 for alpha chain variable domain of TCR clone 81452 (TRAV27, TRAJ42)
CAGARGSQGNLIF

SEQ ID NO: 162904 - protein, 14 aa, Homo sapiens
  CDR3 for beta chain variable domain of TCR clone 81452 (TRBV20-1, TRBJ1-1)
CSARTRIGGTEAFF

SEQ ID NO: 162905 - protein, 14 aa, Homo sapiens
  CDR3 for alpha chain variable domain of TCR clone 81453 (TRAV13-1, TRAJ35)
CAASKGGFGKVLHC

SEQ ID NO: 162906 - protein, 13 aa, Homo sapiens
  CDR3 for beta chain variable domain of TCR clone 81453 (TRBV7-3, TRBJ1-1)
CASSQDWGAEAFF

SEQ ID NO: 162907 - protein, 11 aa, Homo sapiens
  CDR3 for alpha chain variable domain of TCR clone 81454 (TRAV12-1, TRAJ26)
CVVAYGQNFVS

SEQ ID NO: 162908 - protein, 15 aa, Homo sapiens
  CDR3 for beta chain variable domain of TCR clone 81454 (TRBV12-4, TRBJ2-5)
CASSGTGQAQETQYF

SEQ ID NO: 162909 - protein, 11 aa, Homo sapiens
  CDR3 for alpha chain variable domain of TCR clone 81455 (TRAV26-1, TRAJ37)
CIVRVGRKPIF

SEQ ID NO: 162910 - protein, 13 aa, Homo sapiens
  CDR3 for beta chain variable domain of TCR clone 81455 (TRBV14, TRBJ1-2)
CASSEDRRYGYTF

SEQ ID NO: 162911 - protein, 16 aa, Homo sapiens
  CDR3 for alpha chain variable domain of TCR clone 81456 (TRAV1-2, TRAJ16)
CAVNRFSLARSCSLQG

SEQ ID NO: 162912 - protein, 11 aa, Homo sapiens
  CDR3 for beta chain variable domain of TCR clone 81456 (TRBV29-1, TRBJ2-5)
CSEDRTGTQYF

SEQ ID NO: 162913 - protein, 12 aa, Homo sapiens
  CDR3 for alpha chain variable domain of TCR clone 81457 (TRAV26-2, TRAJ21)
CILKGNFNKFYF

SEQ ID NO: 162914 - protein, 14 aa, Homo sapiens
  CDR3 for beta chain variable domain of TCR clone 81457 (TRBV12-4, TRBJ1-1)
CASSLGTGGTEALF

SEQ ID NO: 162915 - protein, 13 aa, Homo sapiens
  CDR3 for alpha chain variable domain of TCR clone 81458 (TRAV16, TRAJ26)
CITVLCLGQNFVF

SEQ ID NO: 162916 - protein, 12 aa, Homo sapiens
  CDR3 for beta chain variable domain of TCR clone 81458 (TRBV11-2, TRBJ2-1)
CASSPGNSEQFF

SEQ ID NO: 162917 - protein, 12 aa, Homo sapiens
  CDR3 for alpha chain variable domain of TCR clone 81459 (TRAV3, TRAJ27)
CAVIDGAGKSTF

SEQ ID NO: 162918 - protein, 13 aa, Homo sapiens
  CDR3 for beta chain variable domain of TCR clone 81459 (TRBV10-3, TRBJ1-2)
CAINADLNYGYTF

SEQ ID NO: 162919 - protein, 12 aa, Homo sapiens
  CDR3 for alpha chain variable domain of TCR clone 81460 (TRAV12-1, TRAJ40)
CVVYSGTYKYIF

SEQ ID NO: 162920 - protein, 15 aa, Homo sapiens
  CDR3 for beta chain variable domain of TCR clone 81460 (TRBV7-9, TRBJ1-6)
CASSSPGRGNSPLLF

SEQ ID NO: 162921 - protein, 17 aa, Homo sapiens
  CDR3 for alpha chain variable domain of TCR clone 81461 (TRAV3, TRAJ6)
CAVRDGPRAGGSYIPTF

SEQ ID NO: 162922 - protein, 15 aa, Homo sapiens
  CDR3 for beta chain variable domain of TCR clone 81461 (TRBV7-8, TRBJ1-1)
CASSLGDSRNTEAFF

SEQ ID NO: 162923 - protein, 16 aa, Homo sapiens
  CDR3 for alpha chain variable domain of TCR clone 81462 (TRAV14/DV4, TRAJ15)
CAMREGPAQAGTALTF

SEQ ID NO: 162924 - protein, 12 aa, Homo sapiens
  CDR3 for beta chain variable domain of TCR clone 81462 (TRBV28, TRBJ2-6)
CAIQAGANVLTF

SEQ ID NO: 162925 - protein, 14 aa, Homo sapiens
  CDR3 for alpha chain variable domain of TCR clone 81463 (TRAV35, TRAJ22)
CAGLRPGSARQLTF

SEQ ID NO: 162926 - protein, 15 aa, Homo sapiens
  CDR3 for beta chain variable domain of TCR clone 81463 (TRBV12-4, TRBJ2-5)
CASSPPTDLQETQYF

SEQ ID NO: 162927 - protein, 17 aa, Homo sapiens
  CDR3 for alpha chain variable domain of TCR clone 81464 (TRAV23/DV6, TRAJ57)
CAASFTLSQGGSEKLVF

SEQ ID NO: 162928 - protein, 14 aa, Homo sapiens
  CDR3 for beta chain variable domain of TCR clone 81464 (TRBV25-1, TRBJ1-1)
CASTHLGGNTEAFF

SEQ ID NO: 162929 - protein, 11 aa, Homo sapiens
  CDR3 for alpha chain variable domain of TCR clone 81465 (TRAV17, TRAJ9)
CGFTGGFKTIF

SEQ ID NO: 162930 - protein, 16 aa, Homo sapiens
  CDR3 for beta chain variable domain of TCR clone 81465 (TRBV7-3, TRBJ2-2)
CASSLKRGTLSGELFF

SEQ ID NO: 162931 - protein, 13 aa, Homo sapiens
  CDR3 for alpha chain variable domain of TCR clone 81466 (TRAV27, TRAJ56)
CAGKPGANSKLTF

SEQ ID NO: 162932 - protein, 19 aa, Homo sapiens
  CDR3 for beta chain variable domain of TCR clone 81466 (TRBV6-1, TRBJ1-1)
CASLARGGGDLTLKLSLDK

SEQ ID NO: 162933 - protein, 16 aa, Homo sapiens
  CDR3 for alpha chain variable domain of TCR clone 81467 (TRAV3, TRAJ4)
CAVSPSPSGGYNKLIF

SEQ ID NO: 162934 - protein, 12 aa, Homo sapiens
  CDR3 for beta chain variable domain of TCR clone 81467 (TRBV7-9, TRBJ2-7)
CASSQGVYEQYF

SEQ ID NO: 162935 - protein, 17 aa, Homo sapiens
  CDR3 for alpha chain variable domain of TCR clone 81468 (TRAV3, TRAJ6)
CAVRDGPRVGGSYIPTF

SEQ ID NO: 162936 - protein, 12 aa, Homo sapiens
  CDR3 for beta chain variable domain of TCR clone 81468 (TRBV11-2, TRBJ2-2)
CASSLGGGELFF

SEQ ID NO: 162937 - protein, 11 aa, Homo sapiens
  CDR3 for alpha chain variable domain of TCR clone 81469 (TRAV2, TRAJ13)
CASGGYQKVTF

SEQ ID NO: 162938 - protein, 14 aa, Homo sapiens
  CDR3 for beta chain variable domain of TCR clone 81469 (TRBV13, TRBJ2-7)
CASSLKGASYEQYF

SEQ ID NO: 162939 - protein, 15 aa, Homo sapiens
  CDR3 for alpha chain variable domain of TCR clone 81470 (TRAV10, TRAJ6)
CVVRPRTGGSYIPTF

SEQ ID NO: 162940 - protein, 13 aa, Homo sapiens
  CDR3 for beta chain variable domain of TCR clone 81470 (TRBV7-9, TRBJ1-2)
CASSLKQNCGYTF

SEQ ID NO: 162941 - protein, 16 aa, Homo sapiens
  CDR3 for alpha chain variable domain of TCR clone 81471 (TRAV21, TRAJ37)
CAVRTAGSSNTGKLIF

SEQ ID NO: 162942 - protein, 13 aa, Homo sapiens
  CDR3 for beta chain variable domain of TCR clone 81471 (TRBV7-9, TRBJ2-5)
CASLPSVRETQYF

SEQ ID NO: 162943 - protein, 13 aa, Homo sapiens
  CDR3 for alpha chain variable domain of TCR clone 81472 (TRAV2, TRAJ12)
CAVGAGSSYKLIF

SEQ ID NO: 162944 - protein, 14 aa, Homo sapiens
  CDR3 for beta chain variable domain of TCR clone 81472 (TRBV7-2, TRBJ1-5)
CASSTQGAGQPQHF

SEQ ID NO: 162945 - protein, 13 aa, Homo sapiens
  CDR3 for alpha chain variable domain of TCR clone 81473 (TRAV27, TRAJ37)
CAGGPSNTGKLIF

SEQ ID NO: 162946 - protein, 16 aa, Homo sapiens
  CDR3 for beta chain variable domain of TCR clone 81473 (TRBV20-1, TRBJ1-2)
CSASMGQGVANYGYTF

SEQ ID NO: 162947 - protein, 13 aa, Homo sapiens
  CDR3 for alpha chain variable domain of TCR clone 81474 (TRAV8-3, TRAJ43)
CAVVSYNNNDMRF

SEQ ID NO: 162948 - protein, 17 aa, Homo sapiens
  CDR3 for beta chain variable domain of TCR clone 81474 (TRBV7-7, TRBJ1-1)
CASIGDRPNLGVTEAFF

SEQ ID NO: 162949 - protein, 12 aa, Homo sapiens
  CDR3 for alpha chain variable domain of TCR clone 81475 (TRAV1-2, TRAJ29)
CAVRNLNTPLVF

SEQ ID NO: 162950 - protein, 16 aa, Homo sapiens
  CDR3 for beta chain variable domain of TCR clone 81475 (TRBV27, TRBJ2-2)
CASSFRGLARTGELFF

SEQ ID NO: 162951 - protein, 16 aa, Homo sapiens
  CDR3 for alpha chain variable domain of TCR clone 81476 (TRAV14/DV4, TRAJ54)
CAMREGRIQGAQKLVF

SEQ ID NO: 162952 - protein, 14 aa, Homo sapiens
  CDR3 for beta chain variable domain of TCR clone 81476 (TRBV11-2, TRBJ2-3)
CASRRLARTDTQYF

SEQ ID NO: 162953 - protein, 13 aa, Homo sapiens
  CDR3 for alpha chain variable domain of TCR clone 81477 (TRAV17, TRAJ15)
CATDARAGTDLIF

SEQ ID NO: 162954 - protein, 15 aa, Homo sapiens
  CDR3 for beta chain variable domain of TCR clone 81477 (TRBV20-1, TRBJ2-7)
CSARDRVSGMDEQYF

SEQ ID NO: 162955 - protein, 13 aa, Homo sapiens
  CDR3 for alpha chain variable domain of TCR clone 81478 (TRAV12-2, TRAJ4)
CAVFFGGYNKLIF

SEQ ID NO: 162956 - protein, 14 aa, Homo sapiens
  CDR3 for beta chain variable domain of TCR clone 81478 (TRBV7-9, TRBJ2-1)
CASSPRDSLYEQFF

SEQ ID NO: 162957 - protein, 13 aa, Homo sapiens
  CDR3 for alpha chain variable domain of TCR clone 81479 (TRAV13-2, TRAJ48)
CAEMDFGNEKLTF

SEQ ID NO: 162958 - protein, 17 aa, Homo sapiens
  CDR3 for beta chain variable domain of TCR clone 81479 (TRBV7-9, TRBJ1-6)
CASSSPGRGNSPLHLGT

SEQ ID NO: 162959 - protein, 20 aa, Homo sapiens
  CDR3 for alpha chain variable domain of TCR clone 81480 (TRAV14/DV4, TRAJ22)
CAMREGPFSISSGSARQLTF

SEQ ID NO: 162960 - protein, 15 aa, Homo sapiens
  CDR3 for beta chain variable domain of TCR clone 81480 (TRBV19, TRBJ2-1)
CASSIGLAGWDEQFF

SEQ ID NO: 162961 - protein, 15 aa, Homo sapiens
  CDR3 for alpha chain variable domain of TCR clone 81481 (TRAV21, TRAJ40)
CAVRPQTSGTYKYIF

SEQ ID NO: 162962 - protein, 13 aa, Homo sapiens
  CDR3 for beta chain variable domain of TCR clone 81481 (TRBV7-2, TRBJ2-2)
CDSSSVRAGELFF

SEQ ID NO: 162963 - protein, 13 aa, Homo sapiens
  CDR3 for alpha chain variable domain of TCR clone 81482 (TRAV3, TRAJ20)
CAVRDTPRYKLSF

SEQ ID NO: 162964 - protein, 15 aa, Homo sapiens
  CDR3 for beta chain variable domain of TCR clone 81482 (TRBV5-1, TRBJ2-2)
CASSSQGGNTGELFF

SEQ ID NO: 162965 - protein, 17 aa, Homo sapiens
  CDR3 for alpha chain variable domain of TCR clone 81483 (TRAV3, TRAJ13)
CAVRDMRRTGCYQKVTF

SEQ ID NO: 162966 - protein, 14 aa, Homo sapiens
  CDR3 for beta chain variable domain of TCR clone 81483 (TRBV5-1, TRBJ2-7)
CASSLTGSGYEQYF

SEQ ID NO: 162967 - protein, 12 aa, Homo sapiens
  CDR3 for alpha chain variable domain of TCR clone 81484 (TRAV3, TRAJ31)
CAAQRANARLMF

SEQ ID NO: 162968 - protein, 14 aa, Homo sapiens
  CDR3 for beta chain variable domain of TCR clone 81484 (TRBV5-5, TRBJ1-5)
CASSGQGADQPQHF

SEQ ID NO: 162969 - protein, 14 aa, Homo sapiens
  CDR3 for alpha chain variable domain of TCR clone 81485 (TRAV26-1, TRAJ38)
CIAANAGNNRKLTW

SEQ ID NO: 162970 - protein, 13 aa, Homo sapiens
  CDR3 for beta chain variable domain of TCR clone 81485 (TRBV20-1, TRBJ1-1)
CSARGGGNTEAFF

SEQ ID NO: 162971 - protein, 14 aa, Homo sapiens
  CDR3 for alpha chain variable domain of TCR clone 81486 (TRAV13-1, TRAJ6)
CAASGPGGSYIPTL

SEQ ID NO: 162972 - protein, 15 aa, Homo sapiens
  CDR3 for beta chain variable domain of TCR clone 81486 (TRBV27, TRBJ2-1)
CASSPLAGGANEQFF

SEQ ID NO: 162973 - protein, 14 aa, Homo sapiens
  CDR3 for alpha chain variable domain of TCR clone 81487 (TRAV20, TRAJ56)
CAVQFGGANSKLIF

SEQ ID NO: 162974 - protein, 14 aa, Homo sapiens
  CDR3 for beta chain variable domain of TCR clone 81487 (TRBV20-1, TRBJ2-7)
CSAKRGRSSYEQYF

SEQ ID NO: 162975 - protein, 12 aa, Homo sapiens
  CDR3 for alpha chain variable domain of TCR clone 81488 (TRAV3, TRAJ20)
CAVRDGDYKLSF

SEQ ID NO: 162976 - protein, 13 aa, Homo sapiens
  CDR3 for beta chain variable domain of TCR clone 81488 (TRBV9, TRBJ2-1)
CASSVGQGGGQFF

SEQ ID NO: 162977 - protein, 15 aa, Homo sapiens
  CDR3 for alpha chain variable domain of TCR clone 81489 (TRAV13-1, TRAJ11)
CAASNRNPGYSTLTF

SEQ ID NO: 162978 - protein, 11 aa, Homo sapiens
  CDR3 for beta chain variable domain of TCR clone 81489 (TRBV20-1, TRBJ2-7)
CSARLSYEQYF

SEQ ID NO: 162979 - protein, 20 aa, Homo sapiens
  CDR3 for alpha chain variable domain of TCR clone 81490 (TRAV1-2, TRAJ8)
CAVREDTGFQKLVLELAPDF

SEQ ID NO: 162980 - protein, 16 aa, Homo sapiens
  CDR3 for beta chain variable domain of TCR clone 81490 (TRBV28, TRBJ1-4)
CASSPPYRGRSEKLFF

SEQ ID NO: 162981 - protein, 12 aa, Homo sapiens
  CDR3 for alpha chain variable domain of TCR clone 81491 (TRAV4, TRAJ26)
CLVGDYGQNFVF

SEQ ID NO: 162982 - protein, 14 aa, Homo sapiens
  CDR3 for beta chain variable domain of TCR clone 81491 (TRBV12-5, TRBJ2-5)
CASGSRTHQETQYF

SEQ ID NO: 162983 - protein, 16 aa, Homo sapiens
  CDR3 for alpha chain variable domain of TCR clone 81492 (TRAV21, TRAJ52)
CAVTNAGGTSYGKLTF

SEQ ID NO: 162984 - protein, 11 aa, Homo sapiens
  CDR3 for beta chain variable domain of TCR clone 81492 (TRBV2, TRBJ1-1)
CASREGTEASL

SEQ ID NO: 162985 - protein, 12 aa, Homo sapiens
  CDR3 for alpha chain variable domain of TCR clone 81493 (TRAV23/DV6, TRAJ49)
CAAEAPGNQFYF

SEQ ID NO: 162986 - protein, 14 aa, Homo sapiens
  CDR3 for beta chain variable domain of TCR clone 81493 (TRBV25-1, TRBJ1-1)
CASTHLGGNTEAFF

SEQ ID NO: 162987 - protein, 14 aa, Homo sapiens
  CDR3 for alpha chain variable domain of TCR clone 81494 (TRAV26-1, TRAJ34)
CIVRVAYNTDKLIF

SEQ ID NO: 162988 - protein, 15 aa, Homo sapiens
  CDR3 for beta chain variable domain of TCR clone 81494 (TRBV20-1, TRBJ2-7)
CSARVPAAYFYDQYF

SEQ ID NO: 162989 - protein, 12 aa, Homo sapiens
  CDR3 for alpha chain variable domain of TCR clone 81495 (TRAV1-1, TRAJ39)
CAVPAVGNMLTF

SEQ ID NO: 162990 - protein, 15 aa, Homo sapiens
  CDR3 for beta chain variable domain of TCR clone 81495 (TRBV19, TRBJ1-6)
CASSTQGAVGSPLHF

SEQ ID NO: 162991 - protein, 13 aa, Homo sapiens
  CDR3 for alpha chain variable domain of TCR clone 81496 (TRAV12-3, TRAJ43)
CAMIQPNNNDMRF

SEQ ID NO: 162992 - protein, 12 aa, Homo sapiens
  CDR3 for beta chain variable domain of TCR clone 81496 (TRBV11-2, TRBJ2-5)
CASSLGQETQYF

SEQ ID NO: 162993 - protein, 15 aa, Homo sapiens
  CDR3 for alpha chain variable domain of TCR clone 81497 (TRAV3, TRAJ17)
CAVSTKEAAGNKLTF

SEQ ID NO: 162994 - protein, 12 aa, Homo sapiens
  CDR3 for beta chain variable domain of TCR clone 81497 (TRBV7-9, TRBJ1-6)
CASSLMTSPLHF

SEQ ID NO: 162995 - protein, 13 aa, Homo sapiens
  CDR3 for alpha chain variable domain of TCR clone 81498 (TRAV21, TRAJ27)
CAARPGNAGKSTF

SEQ ID NO: 162996 - protein, 12 aa, Homo sapiens
  CDR3 for beta chain variable domain of TCR clone 81498 (TRBV5-5, TRBJ2-5)
CASSYFGETQYF

SEQ ID NO: 162997 - protein, 15 aa, Homo sapiens
  CDR3 for alpha chain variable domain of TCR clone 81499 (TRAV12-2, TRAJ53)
CAVNGGGGSNYKLTF

SEQ ID NO: 162998 - protein, 17 aa, Homo sapiens
  CDR3 for beta chain variable domain of TCR clone 81499 (TRBV7-7, TRBJ2-2)
CASSSVPAGGEIGELFF

SEQ ID NO: 162999 - protein, 10 aa, Homo sapiens
  CDR3 for alpha chain variable domain of TCR clone 81500 (TRAV16, TRAJ22)
SAMYLRQLTF

SEQ ID NO: 163000 - protein, 15 aa, Homo sapiens
  CDR3 for beta chain variable domain of TCR clone 81500 (TRBV7-9, TRBJ1-6)
CDSSSPGRGNSPLHF

SEQ ID NO: 163001 - protein, 14 aa, Homo sapiens
  CDR3 for alpha chain variable domain of TCR clone 81501 (TRAV26-1, TRAJ45)
CIEVTGGGADGLTF

SEQ ID NO: 163002 - protein, 14 aa, Homo sapiens
  CDR3 for beta chain variable domain of TCR clone 81501 (TRBV4-2, TRBJ2-1)
CASGLDRAYNEQFF

SEQ ID NO: 163003 - protein, 16 aa, Homo sapiens
  CDR3 for alpha chain variable domain of TCR clone 81502 (TRAV3, TRAJ6)
CCERRPQGRRKLHTTF

SEQ ID NO: 163004 - protein, 14 aa, Homo sapiens
  CDR3 for beta chain variable domain of TCR clone 81502 (TRBV7-2, TRBJ2-7)
CASSPKTSFYEQYF

SEQ ID NO: 163005 - protein, 16 aa, Homo sapiens
  CDR3 for alpha chain variable domain of TCR clone 81503 (TRAV12-3, TRAJ10)
CAMKKGNTGGGNKLTF

SEQ ID NO: 163006 - protein, 12 aa, Homo sapiens
  CDR3 for beta chain variable domain of TCR clone 81503 (TRBV20-1, TRBJ2-7)
CSAITPTKEQYF

SEQ ID NO: 163007 - protein, 13 aa, Homo sapiens
  CDR3 for alpha chain variable domain of TCR clone 81504 (TRAV12-3, TRAJ43)
CAMIRPNNNDMRF

SEQ ID NO: 163008 - protein, 12 aa, Homo sapiens
  CDR3 for beta chain variable domain of TCR clone 81504 (TRBV11-2, TRBJ2-5)
CASSLGQDTQYF

SEQ ID NO: 163009 - protein, 13 aa, Homo sapiens
  CDR3 for alpha chain variable domain of TCR clone 81505 (TRAV17, TRAJ9)
CATDYTGGFKTIF

SEQ ID NO: 163010 - protein, 14 aa, Homo sapiens
  CDR3 for beta chain variable domain of TCR clone 81505 (TRBV19, TRBJ2-5)
CVSSMTGQQETQYF

SEQ ID NO: 163011 - protein, 14 aa, Homo sapiens
  CDR3 for alpha chain variable domain of TCR clone 81506 (TRAV12-2, TRAJ9)
CAVNMEGGGFKTIL

SEQ ID NO: 163012 - protein, 14 aa, Homo sapiens
  CDR3 for beta chain variable domain of TCR clone 81506 (TRBV27, TRBJ2-3)
CASRKGGRTDTQYF

SEQ ID NO: 163013 - protein, 12 aa, Homo sapiens
  CDR3 for alpha chain variable domain of TCR clone 81507 (TRAV9-2, TRAJ26)
CALRGYGRNFVF

SEQ ID NO: 163014 - protein, 12 aa, Homo sapiens
  CDR3 for beta chain variable domain of TCR clone 81507 (TRBV29-1, TRBJ2-3)
CSVTGGADTQYF

SEQ ID NO: 163015 - protein, 23 aa, Homo sapiens
  CDR3 for alpha chain variable domain of TCR clone 81508 (TRAV26-1, TRAJ38)
CIADNAGNNHIQNPDPAVYQLRD

SEQ ID NO: 163016 - protein, 16 aa, Homo sapiens
  CDR3 for beta chain variable domain of TCR clone 81508 (TRBV19, TRBJ2-2)
CASRSPGTGATGELFF

SEQ ID NO: 163017 - protein, 12 aa, Homo sapiens
  CDR3 for alpha chain variable domain of TCR clone 81509 (TRAV8-3, TRAJ32)
CCGGGATNKLIF

SEQ ID NO: 163018 - protein, 15 aa, Homo sapiens
  CDR3 for beta chain variable domain of TCR clone 81509 (TRBV7-2, TRBJ2-1)
CASSSRTSREDEQFF

SEQ ID NO: 163019 - protein, 12 aa, Homo sapiens
  CDR3 for alpha chain variable domain of TCR clone 81510 (TRAV21, TRAJ23)
CAVMLQGGKLIF

SEQ ID NO: 163020 - protein, 14 aa, Homo sapiens
  CDR3 for beta chain variable domain of TCR clone 81510 (TRBV7-9, TRBJ1-4)
RAITEGEANEKLFF

SEQ ID NO: 163021 - protein, 15 aa, Homo sapiens
  CDR3 for alpha chain variable domain of TCR clone 81511 (TRAV3, TRAJ7)
CAVRDKDNGNNRLAF

SEQ ID NO: 163022 - protein, 19 aa, Homo sapiens
  CDR3 for beta chain variable domain of TCR clone 81511 (TRBV5-8, TRBJ2-3)
CASSSLGTSGSHRTDTQYF

SEQ ID NO: 163023 - protein, 15 aa, Homo sapiens
  CDR3 for alpha chain variable domain of TCR clone 81512 (TRAV25, TRAJ52)
CAGRPGGTNYGKLTF

SEQ ID NO: 163024 - protein, 15 aa, Homo sapiens
  CDR3 for beta chain variable domain of TCR clone 81512 (TRBV11-2, TRBJ1-6)
CASSLDPWAVSPLHF

SEQ ID NO: 163025 - protein, 16 aa, Homo sapiens
  CDR3 for alpha chain variable domain of TCR clone 81513 (TRAV30, TRAJ24)
CGTEIVDADSWGKFKF

SEQ ID NO: 163026 - protein, 15 aa, Homo sapiens
  CDR3 for beta chain variable domain of TCR clone 81513 (TRBV20-1, TRBJ2-6)
CSARDRGPGANVLTF

SEQ ID NO: 163027 - protein, 14 aa, Homo sapiens
  CDR3 for alpha chain variable domain of TCR clone 81514 (TRAV26-1, TRAJ45)
CIEVTGGGADGLTF

SEQ ID NO: 163028 - protein, 12 aa, Homo sapiens
  CDR3 for beta chain variable domain of TCR clone 81514 (TRBV12-4, TRBJ2-7)
CASSLGGYERYF

SEQ ID NO: 163029 - protein, 16 aa, Homo sapiens
  CDR3 for alpha chain variable domain of TCR clone 81515 (TRAV3, TRAJ23)
CAVKIGIYSQGGKLIF

SEQ ID NO: 163030 - protein, 17 aa, Homo sapiens
  CDR3 for beta chain variable domain of TCR clone 81515 (TRBV10-3, TRBJ2-6)
CAISESTAPSGANVLTF

SEQ ID NO: 163031 - protein, 14 aa, Homo sapiens
  CDR3 for alpha chain variable domain of TCR clone 81516 (TRAV12-2, TRAJ40)
CAVKIPSGTYKYIF

SEQ ID NO: 163032 - protein, 16 aa, Homo sapiens
  CDR3 for beta chain variable domain of TCR clone 81516 (TRBV19, TRBJ2-1)
CASSIKLAGSYNEQFF

SEQ ID NO: 163033 - protein, 14 aa, Homo sapiens
  CDR3 for alpha chain variable domain of TCR clone 81517 (TRAV12-2, TRAJ17)
CAVLFKATGNKLTF

SEQ ID NO: 163034 - protein, 17 aa, Homo sapiens
  CDR3 for beta chain variable domain of TCR clone 81517 (TRBV11-2, TRBJ2-1)
CASSLYPPGVEYNEQFF

SEQ ID NO: 163035 - protein, 13 aa, Homo sapiens
  CDR3 for alpha chain variable domain of TCR clone 81518 (TRAV8-1, TRAJ28)
CAVPGAGSYQLTF

SEQ ID NO: 163036 - protein, 14 aa, Homo sapiens
  CDR3 for beta chain variable domain of TCR clone 81518 (TRBV7-2, TRBJ2-2)
CASRGQGAAGELFF

SEQ ID NO: 163037 - protein, 14 aa, Homo sapiens
  CDR3 for alpha chain variable domain of TCR clone 81519 (TRAV1-2, TRAJ16)
CAVNRSSDGQKLLF

SEQ ID NO: 163038 - protein, 14 aa, Homo sapiens
  CDR3 for beta chain variable domain of TCR clone 81519 (TRBV19, TRBJ2-7)
CASSVDSESYEQYF

SEQ ID NO: 163039 - protein, 14 aa, Homo sapiens
  CDR3 for alpha chain variable domain of TCR clone 81520 (TRAV12-1, TRAJ9)
CVVTGDTGGFNTIF

SEQ ID NO: 163040 - protein, 16 aa, Homo sapiens
  CDR3 for beta chain variable domain of TCR clone 81520 (TRBV29-1, TRBJ1-2)
CSVEANRDIANYGYTF

SEQ ID NO: 163041 - protein, 15 aa, Homo sapiens
  CDR3 for alpha chain variable domain of TCR clone 81521 (TRAV8-3, TRAJ11)
CAVGLLNSGYSTLTF

SEQ ID NO: 163042 - protein, 16 aa, Homo sapiens
  CDR3 for beta chain variable domain of TCR clone 81521 (TRBV7-9, TRBJ1-2)
CASSLGCSSGEDGYTF

SEQ ID NO: 163043 - protein, 14 aa, Homo sapiens
  CDR3 for alpha chain variable domain of TCR clone 81522 (TRAV3, TRAJ21)
CAVESQANFTKFYF

SEQ ID NO: 163044 - protein, 18 aa, Homo sapiens
  CDR3 for beta chain variable domain of TCR clone 81522 (TRBV7-9, TRBJ2-1)
CASSLAVSGTSGRNEQFF

SEQ ID NO: 163045 - protein, 13 aa, Homo sapiens
  CDR3 for alpha chain variable domain of TCR clone 81523 (TRAV1-2, TRAJ7)
CAGPYYGNNRLAF

SEQ ID NO: 163046 - protein, 14 aa, Homo sapiens
  CDR3 for beta chain variable domain of TCR clone 81523 (TRBV7-2, TRBJ2-7)
CASRSQGAAYEQYF

SEQ ID NO: 163047 - protein, 17 aa, Homo sapiens
  CDR3 for alpha chain variable domain of TCR clone 81524 (TRAV13-1, TRAJ5)
CSNPSLSRDTGRRALTF

SEQ ID NO: 163048 - protein, 17 aa, Homo sapiens
  CDR3 for beta chain variable domain of TCR clone 81524 (TRBV24-1, TRBJ2-1)
CATSDVSTSGTYDEQFF

SEQ ID NO: 163049 - protein, 14 aa, Homo sapiens
  CDR3 for alpha chain variable domain of TCR clone 81525 (TRAV25, TRAJ22)
CAVRSSGSARQLTF

SEQ ID NO: 163050 - protein, 14 aa, Homo sapiens
  CDR3 for beta chain variable domain of TCR clone 81525 (TRBV7-6, TRBJ2-3)
CASSLGTVTDTQYF

SEQ ID NO: 163051 - protein, 16 aa, Homo sapiens
  CDR3 for alpha chain variable domain of TCR clone 81526 (TRAV3, TRAJ40)
CAVRDRIASGTYKYIF

SEQ ID NO: 163052 - protein, 14 aa, Homo sapiens
  CDR3 for beta chain variable domain of TCR clone 81526 (TRBV20-1, TRBJ2-7)
CSAKRGRSSYEQYF

SEQ ID NO: 163053 - protein, 13 aa, Homo sapiens
  CDR3 for alpha chain variable domain of TCR clone 81527 (TRAV38-1, TRAJ42)
CARWGGSQGNFIF

SEQ ID NO: 163054 - protein, 17 aa, Homo sapiens
  CDR3 for beta chain variable domain of TCR clone 81527 (TRBV20-1, TRBJ2-1)
CSARDPLAGVWDNEQFF

SEQ ID NO: 163055 - protein, 13 aa, Homo sapiens
  CDR3 for alpha chain variable domain of TCR clone 81528 (TRAV8-3, TRAJ43)
CAVVPYNNNDMRF

SEQ ID NO: 163056 - protein, 16 aa, Homo sapiens
  CDR3 for beta chain variable domain of TCR clone 81528 (TRBV7-2, TRBJ2-5)
CASSPLPTGGEETQYF

SEQ ID NO: 163057 - protein, 13 aa, Homo sapiens
  CDR3 for alpha chain variable domain of TCR clone 81529 (TRAV20, TRAJ37)
CAGCSSNTGKLIF

SEQ ID NO: 163058 - protein, 21 aa, Homo sapiens
  CDR3 for beta chain variable domain of TCR clone 81529 (TRBV4-2, TRBJ2-3)
PCSQKTRPCSSVPAAPDTQYF

SEQ ID NO: 163059 - protein, 14 aa, Homo sapiens
  CDR3 for alpha chain variable domain of TCR clone 81530 (TRAV16, TRAJ15)
CALSGPQSGTALIF

SEQ ID NO: 163060 - protein, 12 aa, Homo sapiens
  CDR3 for beta chain variable domain of TCR clone 81530 (TRBV18, TRBJ2-5)
CASSPSKETQYF

SEQ ID NO: 163061 - protein, 16 aa, Homo sapiens
  CDR3 for alpha chain variable domain of TCR clone 81531 (TRAV35, TRAJ28)
CAGYLYSGAGSYQFTF

SEQ ID NO: 163062 - protein, 16 aa, Homo sapiens
  CDR3 for beta chain variable domain of TCR clone 81531 (TRBV5-1, TRBJ2-1)
CASSHGLAGPQNEQFF

SEQ ID NO: 163063 - protein, 14 aa, Homo sapiens
  CDR3 for alpha chain variable domain of TCR clone 81532 (TRAV3, TRAJ7)
CAVREEEREQQTLF

SEQ ID NO: 163064 - protein, 12 aa, Homo sapiens
  CDR3 for beta chain variable domain of TCR clone 81532 (TRBV7-8, TRBJ2-7)
CASSLGDREQYF

SEQ ID NO: 163065 - protein, 13 aa, Homo sapiens
  CDR3 for alpha chain variable domain of TCR clone 81533 (TRAV17, TRAJ9)
CATDYTGGFKTIF

SEQ ID NO: 163066 - protein, 13 aa, Homo sapiens
  CDR3 for beta chain variable domain of TCR clone 81533 (TRBV7-9, TRBJ1-2)
CASSLKQSYGYTF

SEQ ID NO: 163067 - protein, 15 aa, Homo sapiens
  CDR3 for alpha chain variable domain of TCR clone 81534 (TRAV21, TRAJ40)
CAVRPQTSGTYKYIF

SEQ ID NO: 163068 - protein, 15 aa, Homo sapiens
  CDR3 for beta chain variable domain of TCR clone 81534 (TRBV5-1, TRBJ2-1)
CASSPPRAPYNEQLF

SEQ ID NO: 163069 - protein, 14 aa, Homo sapiens
  CDR3 for alpha chain variable domain of TCR clone 81535 (TRAV1-2, TRAJ8)
CAVREDTGFQKLVF

SEQ ID NO: 163070 - protein, 14 aa, Homo sapiens
  CDR3 for beta chain variable domain of TCR clone 81535 (TRBV19, TRBJ2-1)
CASPTVVLSGEQFF

SEQ ID NO: 163071 - protein, 14 aa, Homo sapiens
  CDR3 for alpha chain variable domain of TCR clone 81536 (TRAV16, TRAJ39)
CALSKNNAGNMLTF

SEQ ID NO: 163072 - protein, 16 aa, Homo sapiens
  CDR3 for beta chain variable domain of TCR clone 81536 (TRBV6-6, TRBJ2-1)
CASSCSFSGSYNEQFF

SEQ ID NO: 163073 - protein, 14 aa, Homo sapiens
  CDR3 for alpha chain variable domain of TCR clone 81537 (TRAV22, TRAJ6)
CAGVGPGGSYIPTF

SEQ ID NO: 163074 - protein, 15 aa, Homo sapiens
  CDR3 for beta chain variable domain of TCR clone 81537 (TRBV9, TRBJ1-6)
CASSVAGTGDSPLHF

SEQ ID NO: 163075 - protein, 13 aa, Homo sapiens
  CDR3 for alpha chain variable domain of TCR clone 81538 (TRAV21, TRAJ57)
CAVTQGGSEKLVF

SEQ ID NO: 163076 - protein, 12 aa, Homo sapiens
  CDR3 for beta chain variable domain of TCR clone 81538 (TRBV7-9, TRBJ2-7)
CASRTGFDEQYF

SEQ ID NO: 163077 - protein, 13 aa, Homo sapiens
  CDR3 for alpha chain variable domain of TCR clone 81539 (TRAV17, TRAJ9)
CATDDTGGFKTIF

SEQ ID NO: 163078 - protein, 14 aa, Homo sapiens
  CDR3 for beta chain variable domain of TCR clone 81539 (TRBV19, TRBJ2-5)
CASSMTGQQETQYF

SEQ ID NO: 163079 - protein, 14 aa, Homo sapiens
  CDR3 for alpha chain variable domain of TCR clone 81540 (TRAV1-2, TRAJ8)
CAVREDTGFQKLVF

SEQ ID NO: 163080 - protein, 15 aa, Homo sapiens
  CDR3 for beta chain variable domain of TCR clone 81540 (TRBV12-3, TRBJ2-5)
CASSPPPGLQETQCF

SEQ ID NO: 163081 - protein, 16 aa, Homo sapiens
  CDR3 for alpha chain variable domain of TCR clone 81541 (TRAV29/DV5, TRAJ54)
CAARAPLIQGAQKLVF

SEQ ID NO: 163082 - protein, 12 aa, Homo sapiens
  CDR3 for beta chain variable domain of TCR clone 81541 (TRBV11-2, TRBJ2-2)
CASSLGGGELFF

SEQ ID NO: 163083 - protein, 14 aa, Homo sapiens
  CDR3 for alpha chain variable domain of TCR clone 81542 (TRAV1-2, TRAJ8)
CAVREGTGFQKLVF

SEQ ID NO: 163084 - protein, 12 aa, Homo sapiens
  CDR3 for beta chain variable domain of TCR clone 81542 (TRBV27, TRBJ2-2)
CASKLFTGELFF

SEQ ID NO: 163085 - protein, 15 aa, Homo sapiens
  CDR3 for alpha chain variable domain of TCR clone 81543 (TRAV21, TRAJ53)
CATLNSGGSNYKLTF

SEQ ID NO: 163086 - protein, 14 aa, Homo sapiens
  CDR3 for beta chain variable domain of TCR clone 81543 (TRBV18, TRBJ1-2)
CASSPDRVVYGYTF

SEQ ID NO: 163087 - protein, 18 aa, Homo sapiens
  CDR3 for alpha chain variable domain of TCR clone 81544 (TRAV13-1, TRAJ52)
CAAQNPNAGGTSYGKLTF

SEQ ID NO: 163088 - protein, 15 aa, Homo sapiens
  CDR3 for beta chain variable domain of TCR clone 81544 (TRBV6-1, TRBJ2-3)
CASSERGGITDTQYF

SEQ ID NO: 163089 - protein, 15 aa, Homo sapiens
  CDR3 for alpha chain variable domain of TCR clone 81545 (TRAV8-4, TRAJ37)
CAVSRGPGNTGKLIF

SEQ ID NO: 163090 - protein, 16 aa, Homo sapiens
  CDR3 for beta chain variable domain of TCR clone 81545 (TRBV7-3, TRBJ2-3)
CASSLSGYRPEDTQYF

SEQ ID NO: 163091 - protein, 14 aa, Homo sapiens
  CDR3 for alpha chain variable domain of TCR clone 81546 (TRAV12-2, TRAJ13)
CAVKKTGGYQNVTF

SEQ ID NO: 163092 - protein, 13 aa, Homo sapiens
  CDR3 for beta chain variable domain of TCR clone 81546 (TRBV28, TRBJ2-7)
CASKAGGVYEQYF

SEQ ID NO: 163093 - protein, 14 aa, Homo sapiens
  CDR3 for alpha chain variable domain of TCR clone 81547 (TRAV1-2, TRAJ16)
CAVNRFSDGQKLLF

SEQ ID NO: 163094 - protein, 16 aa, Homo sapiens
  CDR3 for beta chain variable domain of TCR clone 81547 (TRBV6-5, TRBJ2-1)
CASSYSLSGGYNEQFF

SEQ ID NO: 163095 - protein, 12 aa, Homo sapiens
  CDR3 for alpha chain variable domain of TCR clone 81548 (TRAV27, TRAJ35)
CAGADFGNVLHC

SEQ ID NO: 163096 - protein, 13 aa, Homo sapiens
  CDR3 for beta chain variable domain of TCR clone 81548 (TRBV2, TRBJ2-7)
CASTGGSSYEQYF

SEQ ID NO: 163097 - protein, 16 aa, Homo sapiens
  CDR3 for alpha chain variable domain of TCR clone 81549 (TRAV3, TRAJ32)
CCERRNYGGATKKLIF

SEQ ID NO: 163098 - protein, 13 aa, Homo sapiens
  CDR3 for beta chain variable domain of TCR clone 81549 (TRBV2, TRBJ1-1)
CASSEGGNTEAFF

SEQ ID NO: 163099 - protein, 15 aa, Homo sapiens
  CDR3 for alpha chain variable domain of TCR clone 81550 (TRAV21, TRAJ40)
CAVRPQTSGTYKYIF

SEQ ID NO: 163100 - protein, 16 aa, Homo sapiens
  CDR3 for beta chain variable domain of TCR clone 81550 (TRBV24-1, TRBJ2-3)
CATSDPGTGATDTQYF

SEQ ID NO: 163101 - protein, 14 aa, Homo sapiens
  CDR3 for alpha chain variable domain of TCR clone 81551 (TRAV1-2, TRAJ16)
CAVRSASDGQKLLF

SEQ ID NO: 163102 - protein, 17 aa, Homo sapiens
  CDR3 for beta chain variable domain of TCR clone 81551 (TRBV7-3, TRBJ2-3)
CASSLMKGMRGADTQYF

SEQ ID NO: 163103 - protein, 14 aa, Homo sapiens
  CDR3 for alpha chain variable domain of TCR clone 81552 (TRAV26-1, TRAJ40)
CIVRLLSGTYKYIF

SEQ ID NO: 163104 - protein, 13 aa, Homo sapiens
  CDR3 for beta chain variable domain of TCR clone 81552 (TRBV12-4, TRBJ1-1)
CASSPGTGFEAFF

SEQ ID NO: 163105 - protein, 14 aa, Homo sapiens
  CDR3 for alpha chain variable domain of TCR clone 81553 (TRAV17, TRAJ6)
CATDASGGSYIPAF

SEQ ID NO: 163106 - protein, 19 aa, Homo sapiens
  CDR3 for beta chain variable domain of TCR clone 81553 (TRBV4-3, TRBJ2-7)
CASSQEFIGWQVTPYEQYF

SEQ ID NO: 163107 - protein, 14 aa, Homo sapiens
  CDR3 for alpha chain variable domain of TCR clone 81554 (TRAV3, TRAJ22)
CAVRDCGSARQLTF

SEQ ID NO: 163108 - protein, 13 aa, Homo sapiens
  CDR3 for beta chain variable domain of TCR clone 81554 (TRBV11-2, TRBJ2-5)
CASGHGAKETQYF

SEQ ID NO: 163109 - protein, 14 aa, Homo sapiens
  CDR3 for alpha chain variable domain of TCR clone 81555 (TRAV12-3, TRAJ9)
CAMSPNTGGFKTLF

SEQ ID NO: 163110 - protein, 12 aa, Homo sapiens
  CDR3 for beta chain variable domain of TCR clone 81555 (TRBV19, TRBJ1-5)
CASSIAQQPQHF

SEQ ID NO: 163111 - protein, 14 aa, Homo sapiens
  CDR3 for alpha chain variable domain of TCR clone 81556 (TRAV23/DV6, TRAJ8)
CAASKNKGFQKLVF

SEQ ID NO: 163112 - protein, 16 aa, Homo sapiens
  CDR3 for beta chain variable domain of TCR clone 81556 (TRBV4-1, TRBJ2-6)
CASSQVGDPGANVLTF

SEQ ID NO: 163113 - protein, 16 aa, Homo sapiens
  CDR3 for alpha chain variable domain of TCR clone 81557 (TRAV8-6, TRAJ28)
CAVTSKPGAGSYQLTL

SEQ ID NO: 163114 - protein, 16 aa, Homo sapiens
  CDR3 for beta chain variable domain of TCR clone 81557 (TRBV12-4, TRBJ2-5)
CASSWRPSGDLETQYF

SEQ ID NO: 163115 - protein, 13 aa, Homo sapiens
  CDR3 for alpha chain variable domain of TCR clone 81558 (TRAV26-1, TRAJ34)
CIVRGHNTDKLIF

SEQ ID NO: 163116 - protein, 15 aa, Homo sapiens
  CDR3 for beta chain variable domain of TCR clone 81558 (TRBV4-1, TRBJ2-7)
CASSQEWGPSYEQCF

SEQ ID NO: 163117 - protein, 12 aa, Homo sapiens
  CDR3 for alpha chain variable domain of TCR clone 81559 (TRAV35, TRAJ30)
CAGRLADDKIIF

SEQ ID NO: 163118 - protein, 17 aa, Homo sapiens
  CDR3 for beta chain variable domain of TCR clone 81559 (TRBV4-2, TRBJ2-5)
CASSPGRWRNFQETQCF

SEQ ID NO: 163119 - protein, 14 aa, Homo sapiens
  CDR3 for alpha chain variable domain of TCR clone 81560 (TRAV8-3, TRAJ44)
CAVGNTGTASKLNF

SEQ ID NO: 163120 - protein, 15 aa, Homo sapiens
  CDR3 for beta chain variable domain of TCR clone 81560 (TRBV28, TRBJ2-7)
CASSFRGQGRYEQYF

SEQ ID NO: 163121 - protein, 16 aa, Homo sapiens
  CDR3 for alpha chain variable domain of TCR clone 81561 (TRAV3, TRAJ6)
CAVSDGMGRRKLHTYI

SEQ ID NO: 163122 - protein, 15 aa, Homo sapiens
  CDR3 for beta chain variable domain of TCR clone 81561 (TRBV9, TRBJ2-1)
CASSLAGSSYNEQFF

SEQ ID NO: 163123 - protein, 13 aa, Homo sapiens
  CDR3 for alpha chain variable domain of TCR clone 81562 (TRAV12-3, TRAJ33)
CAMSVNSNYQLIW

SEQ ID NO: 163124 - protein, 12 aa, Homo sapiens
  CDR3 for beta chain variable domain of TCR clone 81562 (TRBV11-2, TRBJ2-2)
CASSLGGGELFF

SEQ ID NO: 163125 - protein, 16 aa, Homo sapiens
  CDR3 for alpha chain variable domain of TCR clone 81563 (TRAV3, TRAJ10)
CAVRDMRAGGGNRLTF

SEQ ID NO: 163126 - protein, 13 aa, Homo sapiens
  CDR3 for beta chain variable domain of TCR clone 81563 (TRBV20-1, TRBJ1-1)
CNARGGGNTEAFF

SEQ ID NO: 163127 - protein, 14 aa, Homo sapiens
  CDR3 for alpha chain variable domain of TCR clone 81564 (TRAV35, TRAJ50)
CAGHRKTSYDKVIF

SEQ ID NO: 163128 - protein, 13 aa, Homo sapiens
  CDR3 for beta chain variable domain of TCR clone 81564 (TRBV7-7, TRBJ2-3)
CASGLSRADTQDF

SEQ ID NO: 163129 - protein, 12 aa, Homo sapiens
  CDR3 for alpha chain variable domain of TCR clone 81565 (TRAV17, TRAJ39)
CATGAAGNMLTF

SEQ ID NO: 163130 - protein, 14 aa, Homo sapiens
  CDR3 for beta chain variable domain of TCR clone 81565 (TRBV7-9, TRBJ1-2)
CARSRQGANYGYTF

SEQ ID NO: 163131 - protein, 12 aa, Homo sapiens
  CDR3 for alpha chain variable domain of TCR clone 81566 (TRAV12-3, TRAJ42)
CAPGGSHGNLIF

SEQ ID NO: 163132 - protein, 13 aa, Homo sapiens
  CDR3 for beta chain variable domain of TCR clone 81566 (TRBV5-7, TRBJ2-6)
CASTSSGANVLTF

SEQ ID NO: 163133 - protein, 19 aa, Homo sapiens
  CDR3 for alpha chain variable domain of TCR clone 81567 (TRAV1-2, TRAJ26)
CLLPLCCERPDNYGQNFVF

SEQ ID NO: 163134 - protein, 15 aa, Homo sapiens
  CDR3 for beta chain variable domain of TCR clone 81567 (TRBV9, TRBJ1-6)
CASGVAGTGDSPLHF

SEQ ID NO: 163135 - protein, 11 aa, Homo sapiens
  CDR3 for alpha chain variable domain of TCR clone 81568 (TRAV1-2, TRAJ20)
CAVANDYKLNF

SEQ ID NO: 163136 - protein, 15 aa, Homo sapiens
  CDR3 for beta chain variable domain of TCR clone 81568 (TRBV2, TRBJ2-1)
CASSELAGSYNEQFF

SEQ ID NO: 163137 - protein, 14 aa, Homo sapiens
  CDR3 for alpha chain variable domain of TCR clone 81569 (TRAV12-1, TRAJ30)
CVVNIGNRDDKIIF

SEQ ID NO: 163138 - protein, 14 aa, Homo sapiens
  CDR3 for beta chain variable domain of TCR clone 81569 (TRBV7-9, TRBJ2-5)
CASSPRPGGETQYF

SEQ ID NO: 163139 - protein, 16 aa, Homo sapiens
  CDR3 for alpha chain variable domain of TCR clone 81570 (TRAV1-2, TRAJ10)
CAVRGVLTGGGNKLTF

SEQ ID NO: 163140 - protein, 16 aa, Homo sapiens
  CDR3 for beta chain variable domain of TCR clone 81570 (TRBV27, TRBJ2-2)
CASSFRGLVRTGELFF

SEQ ID NO: 163141 - protein, 15 aa, Homo sapiens
  CDR3 for alpha chain variable domain of TCR clone 81571 (TRAV21, TRAJ24)
CAARSSTDSWGKLQF

SEQ ID NO: 163142 - protein, 13 aa, Homo sapiens
  CDR3 for beta chain variable domain of TCR clone 81571 (TRBV11-2, TRBJ2-5)
CASSSSGEETQYF

SEQ ID NO: 163143 - protein, 13 aa, Homo sapiens
  CDR3 for alpha chain variable domain of TCR clone 81572 (TRAV2, TRAJ40)
CAVVTSGTYKYVF

SEQ ID NO: 163144 - protein, 15 aa, Homo sapiens
  CDR3 for beta chain variable domain of TCR clone 81572 (TRBV18, TRBJ1-1)
CASSPRQGENTEAFF

SEQ ID NO: 163145 - protein, 15 aa, Homo sapiens
  CDR3 for alpha chain variable domain of TCR clone 81573 (TRAV3, TRAJ5)
GAVRDLDTGRRALTF

SEQ ID NO: 163146 - protein, 13 aa, Homo sapiens
  CDR3 for beta chain variable domain of TCR clone 81573 (TRBV12-4, TRBJ2-7)
CASSPTETYEQYF

SEQ ID NO: 163147 - protein, 13 aa, Homo sapiens
  CDR3 for alpha chain variable domain of TCR clone 81574 (TRAV2, TRAJ40)
CAVVTSGTYKYIF

SEQ ID NO: 163148 - protein, 14 aa, Homo sapiens
  CDR3 for beta chain variable domain of TCR clone 81574 (TRBV28, TRBJ2-7)
CASSLLRISYEQYF

SEQ ID NO: 163149 - protein, 11 aa, Homo sapiens
  CDR3 for alpha chain variable domain of TCR clone 81575 (TRAV3, TRAJ21)
YAVGNFNKFYF

SEQ ID NO: 163150 - protein, 15 aa, Homo sapiens
  CDR3 for beta chain variable domain of TCR clone 81575 (TRBV5-1, TRBJ2-1)
CASSLVANSYNEQFF

SEQ ID NO: 163151 - protein, 14 aa, Homo sapiens
  CDR3 for alpha chain variable domain of TCR clone 81576 (TRAV1-2, TRAJ16)
CAVNRFSDGQKLLS

SEQ ID NO: 163152 - protein, 12 aa, Homo sapiens
  CDR3 for beta chain variable domain of TCR clone 81576 (TRBV7-6, TRBJ2-7)
CASSLADSEQYF

SEQ ID NO: 163153 - protein, 13 aa, Homo sapiens
  CDR3 for alpha chain variable domain of TCR clone 81577 (TRAV38-2/DV8, TRAJ29)
CAYRIPGNTPLVF

SEQ ID NO: 163154 - protein, 15 aa, Homo sapiens
  CDR3 for beta chain variable domain of TCR clone 81577 (TRBV28, TRBJ2-2)
CASTVAGANTGELFF

SEQ ID NO: 163155 - protein, 14 aa, Homo sapiens
  CDR3 for alpha chain variable domain of TCR clone 81578 (TRAV13-1, TRAJ10)
CAAKEPGGGNKLTF

SEQ ID NO: 163156 - protein, 17 aa, Homo sapiens
  CDR3 for beta chain variable domain of TCR clone 81578 (TRBV7-8, TRBJ2-6)
CASSAGTGGAGANVLTF

SEQ ID NO: 163157 - protein, 13 aa, Homo sapiens
  CDR3 for alpha chain variable domain of TCR clone 81579 (TRAV17, TRAJ29)
CATGPSGNTPLVF

SEQ ID NO: 163158 - protein, 14 aa, Homo sapiens
  CDR3 for beta chain variable domain of TCR clone 81579 (TRBV2, TRBJ1-6)
CASEVSSYKSPLHF

SEQ ID NO: 163159 - protein, 17 aa, Homo sapiens
  CDR3 for alpha chain variable domain of TCR clone 81580 (TRAV3, TRAJ6)
CAVRDGPRAGGSYIPTF

SEQ ID NO: 163160 - protein, 14 aa, Homo sapiens
  CDR3 for beta chain variable domain of TCR clone 81580 (TRBV9, TRBJ1-2)
CASSVSGTLYGYTF

SEQ ID NO: 163161 - protein, 16 aa, Homo sapiens
  CDR3 for alpha chain variable domain of TCR clone 81581 (TRAV30, TRAJ26)
CGPESVGDNYGQNFVF

SEQ ID NO: 163162 - protein, 13 aa, Homo sapiens
  CDR3 for beta chain variable domain of TCR clone 81581 (TRBV19, TRBJ1-2)
CASSISEDYGYTF

SEQ ID NO: 163163 - protein, 15 aa, Homo sapiens
  CDR3 for alpha chain variable domain of TCR clone 81582 (TRAV16, TRAJ16)
CALQGGGSDGQKLLF

SEQ ID NO: 163164 - protein, 15 aa, Homo sapiens
  CDR3 for beta chain variable domain of TCR clone 81582 (TRBV20-1, TRBJ2-7)
CSASDRVSGMDEQYF

SEQ ID NO: 163165 - protein, 15 aa, Homo sapiens
  CDR3 for alpha chain variable domain of TCR clone 81583 (TRAV27, TRAJ38)
CAARRNARNNRKLIW

SEQ ID NO: 163166 - protein, 13 aa, Homo sapiens
  CDR3 for beta chain variable domain of TCR clone 81583 (TRBV12-5, TRBJ2-3)
CASGDRQSDTQYF

SEQ ID NO: 163167 - protein, 14 aa, Homo sapiens
  CDR3 for alpha chain variable domain of TCR clone 81584 (TRAV35, TRAJ33)
CAGSSQDSHYQLIW

SEQ ID NO: 163168 - protein, 15 aa, Homo sapiens
  CDR3 for beta chain variable domain of TCR clone 81584 (TRBV20-1, TRBJ2-7)
CSAESGTSGAYEQYF

SEQ ID NO: 163169 - protein, 12 aa, Homo sapiens
  CDR3 for alpha chain variable domain of TCR clone 81585 (TRAV16, TRAJ56)
CAPTGADSKLTF

SEQ ID NO: 163170 - protein, 17 aa, Homo sapiens
  CDR3 for beta chain variable domain of TCR clone 81585 (TRBV27, TRBJ2-6)
CASSLTGFASGANVLTF

SEQ ID NO: 163171 - protein, 13 aa, Homo sapiens
  CDR3 for alpha chain variable domain of TCR clone 81586 (TRAV3, TRAJ27)
CAVRPLGAGKSTF

SEQ ID NO: 163172 - protein, 13 aa, Homo sapiens
  CDR3 for beta chain variable domain of TCR clone 81586 (TRBV20-1, TRBJ1-1)
CSAGGGGNTEAFF

SEQ ID NO: 163173 - protein, 13 aa, Homo sapiens
  CDR3 for alpha chain variable domain of TCR clone 81587 (TRAV8-2, TRAJ8)
CVVSDLSFQKLVF

SEQ ID NO: 163174 - protein, 16 aa, Homo sapiens
  CDR3 for beta chain variable domain of TCR clone 81587 (TRBV13, TRBJ2-2)
CASSPRTGEHTGELFF

SEQ ID NO: 163175 - protein, 16 aa, Homo sapiens
  CDR3 for alpha chain variable domain of TCR clone 81588 (TRAV12-1, TRAJ43)
CVVNPHRFGAGTRLTV

SEQ ID NO: 163176 - protein, 13 aa, Homo sapiens
  CDR3 for beta chain variable domain of TCR clone 81588 (TRBV20-1, TRBJ1-1)
CSARGGGNTKAFF

SEQ ID NO: 163177 - protein, 13 aa, Homo sapiens
  CDR3 for alpha chain variable domain of TCR clone 81589 (TRAV3, TRAJ27)
CAERPLGAGKSTF

SEQ ID NO: 163178 - protein, 13 aa, Homo sapiens
  CDR3 for beta chain variable domain of TCR clone 81589 (TRBV7-9, TRBJ2-3)
CASSPGSTDTQYF

SEQ ID NO: 163179 - protein, 11 aa, Homo sapiens
  CDR3 for alpha chain variable domain of TCR clone 81590 (TRAV8-3, TRAJ36)
CAVVQLGQTTS

SEQ ID NO: 163180 - protein, 13 aa, Homo sapiens
  CDR3 for beta chain variable domain of TCR clone 81590 (TRBV12-4, TRBJ1-2)
CASSLRQGKGYTF

SEQ ID NO: 163181 - protein, 14 aa, Homo sapiens
  CDR3 for alpha chain variable domain of TCR clone 81591 (TRAV2, TRAJ9)
CAVEDRSGGFKTIF

SEQ ID NO: 163182 - protein, 15 aa, Homo sapiens
  CDR3 for beta chain variable domain of TCR clone 81591 (TRBV7-9, TRBJ1-4)
CASSARTGGNEKLFF

SEQ ID NO: 163183 - protein, 13 aa, Homo sapiens
  CDR3 for alpha chain variable domain of TCR clone 81592 (TRAV29/DV5, TRAJ31)
CAASRNNNARLMF

SEQ ID NO: 163184 - protein, 15 aa, Homo sapiens
  CDR3 for beta chain variable domain of TCR clone 81592 (TRBV6-1, TRBJ2-1)
CASSEAAYSYNEQFF

SEQ ID NO: 163185 - protein, 13 aa, Homo sapiens
  CDR3 for alpha chain variable domain of TCR clone 81593 (TRAV13-1, TRAJ5)
CAASDTGWRALTF

SEQ ID NO: 163186 - protein, 12 aa, Homo sapiens
  CDR3 for beta chain variable domain of TCR clone 81593 (TRBV28, TRBJ2-3)
CASSLYRDTQYF

SEQ ID NO: 163187 - protein, 22 aa, Homo sapiens
  CDR3 for alpha chain variable domain of TCR clone 81594 (TRAV27, )
CAARRNAGNNHIQNPDPAVYQL

SEQ ID NO: 163188 - protein, 13 aa, Homo sapiens
  CDR3 for beta chain variable domain of TCR clone 81594 (TRBV12-5, TRBJ2-3)
CASGDRQSDTQYF

SEQ ID NO: 163189 - protein, 13 aa, Homo sapiens
  CDR3 for alpha chain variable domain of TCR clone 81595 (TRAV35, TRAJ58)
CAGLETSGSRLTF

SEQ ID NO: 163190 - protein, 15 aa, Homo sapiens
  CDR3 for beta chain variable domain of TCR clone 81595 (TRBV20-1, TRBJ2-1)
CSAGFSAGGLNEQFF

SEQ ID NO: 163191 - protein, 11 aa, Homo sapiens
  CDR3 for alpha chain variable domain of TCR clone 81596 (TRAV3, TRAJ21)
CAVGNFNKFYF

SEQ ID NO: 163192 - protein, 14 aa, Homo sapiens
  CDR3 for beta chain variable domain of TCR clone 81596 (TRBV13, TRBJ2-7)
CASSLKGASYEQYF

SEQ ID NO: 163193 - protein, 14 aa, Homo sapiens
  CDR3 for alpha chain variable domain of TCR clone 81597 (TRAV3, TRAJ36)
CAVRDGTGANNLFF

SEQ ID NO: 163194 - protein, 16 aa, Homo sapiens
  CDR3 for beta chain variable domain of TCR clone 81597 (TRBV20-1, TRBJ2-6)
CSAREGPGVGANVMTF

SEQ ID NO: 163195 - protein, 16 aa, Homo sapiens
  CDR3 for alpha chain variable domain of TCR clone 81598 (TRAV26-1, TRAJ23)
CIVRVHPNNQGGKLIF

SEQ ID NO: 163196 - protein, 15 aa, Homo sapiens
  CDR3 for beta chain variable domain of TCR clone 81598 (TRBV5-7, TRBJ2-7)
CASSPYFEGSYEQYF

SEQ ID NO: 163197 - protein, 16 aa, Homo sapiens
  CDR3 for alpha chain variable domain of TCR clone 81599 (TRAV23/DV6, TRAJ9)
CAASIGGNTGGLKTIF

SEQ ID NO: 163198 - protein, 14 aa, Homo sapiens
  CDR3 for beta chain variable domain of TCR clone 81599 (TRBV9, TRBJ2-7)
RASSVGVGSCEQYF

SEQ ID NO: 163199 - protein, 16 aa, Homo sapiens
  CDR3 for alpha chain variable domain of TCR clone 81600 (TRAV20, TRAJ28)
CAVRDPSGAGSYQLTF

SEQ ID NO: 163200 - protein, 12 aa, Homo sapiens
  CDR3 for beta chain variable domain of TCR clone 81600 (TRBV28, TRBJ2-3)
CASSLYRDTQYF

SEQ ID NO: 163201 - protein, 17 aa, Homo sapiens
  CDR3 for alpha chain variable domain of TCR clone 81601 (TRAV3, TRAJ6)
CAVRDGPRAGGSYIPTF

SEQ ID NO: 163202 - protein, 12 aa, Homo sapiens
  CDR3 for beta chain variable domain of TCR clone 81601 (TRBV11-2, TRBJ2-1)
CASSPGNHEQFF

SEQ ID NO: 163203 - protein, 14 aa, Homo sapiens
  CDR3 for alpha chain variable domain of TCR clone 81602 (TRAV1-1, TRAJ23)
CAVSIYNQGGKLIF

SEQ ID NO: 163204 - protein, 14 aa, Homo sapiens
  CDR3 for beta chain variable domain of TCR clone 81602 (TRBV28, TRBJ2-1)
CASSLNGRNNEQFF

SEQ ID NO: 163205 - protein, 14 aa, Homo sapiens
  CDR3 for alpha chain variable domain of TCR clone 81603 (TRAV21, TRAJ52)
CGRAGGTSYGKLTF

SEQ ID NO: 163206 - protein, 14 aa, Homo sapiens
  CDR3 for beta chain variable domain of TCR clone 81603 (TRBV19, TRBJ1-2)
CASSVVGYNYGYTF

SEQ ID NO: 163207 - protein, 11 aa, Homo sapiens
  CDR3 for alpha chain variable domain of TCR clone 81604 (TRAV5, TRAJ3)
CAPGSASKIIF

SEQ ID NO: 163208 - protein, 16 aa, Homo sapiens
  CDR3 for beta chain variable domain of TCR clone 81604 (TRBV7-9, TRBJ1-2)
CASSLGFSSGEDGYTF

SEQ ID NO: 163209 - protein, 14 aa, Homo sapiens
  CDR3 for alpha chain variable domain of TCR clone 81605 (TRAV17, TRAJ34)
CATDSLEGTDKLIF

SEQ ID NO: 163210 - protein, 16 aa, Homo sapiens
  CDR3 for beta chain variable domain of TCR clone 81605 (TRBV28, TRBJ1-4)
CASSPPYRGRSEKLFF

SEQ ID NO: 163211 - protein, 15 aa, Homo sapiens
  CDR3 for alpha chain variable domain of TCR clone 81606 (TRAV27, TRAJ38)
CAARRNAGNNRKLIW

SEQ ID NO: 163212 - protein, 15 aa, Homo sapiens
  CDR3 for beta chain variable domain of TCR clone 81606 (TRBV19, TRBJ1-2)
CASSVGQVLNYGYTF

SEQ ID NO: 163213 - protein, 14 aa, Homo sapiens
  CDR3 for alpha chain variable domain of TCR clone 81607 (TRAV12-2, TRAJ13)
CAVKKTGGYQEVTF

SEQ ID NO: 163214 - protein, 16 aa, Homo sapiens
  CDR3 for beta chain variable domain of TCR clone 81607 (TRBV4-1, TRBJ2-3)
CASSQSTSGAEDTQYF

SEQ ID NO: 163215 - protein, 13 aa, Homo sapiens
  CDR3 for alpha chain variable domain of TCR clone 81608 (TRAV27, TRAJ56)
CAGKPGAYSKLTF

SEQ ID NO: 163216 - protein, 18 aa, Homo sapiens
  CDR3 for beta chain variable domain of TCR clone 81608 (TRBV11-2, TRBJ2-3)
CASSLGGASRGAPNTQYF

SEQ ID NO: 163217 - protein, 16 aa, Homo sapiens
  CDR3 for alpha chain variable domain of TCR clone 81609 (TRAV12-3, TRAJ50)
CAMRDPMKTSYDKGIF

SEQ ID NO: 163218 - protein, 13 aa, Homo sapiens
  CDR3 for beta chain variable domain of TCR clone 81609 (TRBV4-1, TRBJ2-3)
CASSLDFTDTQYF

SEQ ID NO: 163219 - protein, 18 aa, Homo sapiens
  CDR3 for alpha chain variable domain of TCR clone 81610 (TRAV12-3, TRAJ52)
CAMSALNAGGTSCGKLTF

SEQ ID NO: 163220 - protein, 13 aa, Homo sapiens
  CDR3 for beta chain variable domain of TCR clone 81610 (TRBV27, TRBJ1-1)
CASSLSIGAEAFF

SEQ ID NO: 163221 - protein, 20 aa, Homo sapiens
  CDR3 for alpha chain variable domain of TCR clone 81611 (TRAV4, TRAJ29)
CCVLLPRGCVPFSGNTPLVF

SEQ ID NO: 163222 - protein, 17 aa, Homo sapiens
  CDR3 for beta chain variable domain of TCR clone 81611 (TRBV25-1, TRBJ2-7)
CASSDARVVLSSYEQYF

SEQ ID NO: 163223 - protein, 12 aa, Homo sapiens
  CDR3 for alpha chain variable domain of TCR clone 81612 (TRAV24, TRAJ26)
CALDNYGQNFVF

SEQ ID NO: 163224 - protein, 15 aa, Homo sapiens
  CDR3 for beta chain variable domain of TCR clone 81612 (TRBV7-2, TRBJ1-1)
CASNFAGDRDTEAFF

SEQ ID NO: 163225 - protein, 13 aa, Homo sapiens
  CDR3 for alpha chain variable domain of TCR clone 81613 (TRAV20, TRAJ37)
CAGWSSNTGKLIF

SEQ ID NO: 163226 - protein, 11 aa, Homo sapiens
  CDR3 for beta chain variable domain of TCR clone 81613 (TRBV12-4, TRBJ2-3)
CASTATDTQYF

SEQ ID NO: 163227 - protein, 14 aa, Homo sapiens
  CDR3 for alpha chain variable domain of TCR clone 81614 (TRAV1-1, TRAJ30)
CAVRSLNRDDKIIF

SEQ ID NO: 163228 - protein, 15 aa, Homo sapiens
  CDR3 for beta chain variable domain of TCR clone 81614 (TRBV19, TRBJ2-1)
CASSSPGVPLDEQFF

SEQ ID NO: 163229 - protein, 14 aa, Homo sapiens
  CDR3 for alpha chain variable domain of TCR clone 81615 (TRAV1-2, TRAJ8)
CAGREDTGFQKLVF

SEQ ID NO: 163230 - protein, 13 aa, Homo sapiens
  CDR3 for beta chain variable domain of TCR clone 81615 (TRBV7-3, TRBJ2-1)
CASSLDSYNEQFF

SEQ ID NO: 163231 - protein, 14 aa, Homo sapiens
  CDR3 for alpha chain variable domain of TCR clone 81616 (TRAV12-3, TRAJ10)
SHLPLTGGGNKLTF

SEQ ID NO: 163232 - protein, 14 aa, Homo sapiens
  CDR3 for beta chain variable domain of TCR clone 81616 (TRBV5-1, TRBJ2-3)
CASSRGQGGGTQYF

SEQ ID NO: 163233 - protein, 15 aa, Homo sapiens
  CDR3 for alpha chain variable domain of TCR clone 81617 (TRAV20, TRAJ41)
CAVQANSNSGNALNF

SEQ ID NO: 163234 - protein, 18 aa, Homo sapiens
  CDR3 for beta chain variable domain of TCR clone 81617 (TRBV7-9, TRBJ2-7)
CASSLTTSGSRTWYEQYF

SEQ ID NO: 163235 - protein, 23 aa, Homo sapiens
  CDR3 for alpha chain variable domain of TCR clone 81618 (TRAV26-1, )
CIADNAGNNHIQNPDPAVYQLRD

SEQ ID NO: 163236 - protein, 12 aa, Homo sapiens
  CDR3 for beta chain variable domain of TCR clone 81618 (TRBV11-2, TRBJ2-2)
CASNLGGGELFF

SEQ ID NO: 163237 - protein, 17 aa, Homo sapiens
  CDR3 for alpha chain variable domain of TCR clone 81619 (TRAV27, TRAJ18)
CAGLHRGIGSTLGRLYF

SEQ ID NO: 163238 - protein, 14 aa, Homo sapiens
  CDR3 for beta chain variable domain of TCR clone 81619 (TRBV20-1, TRBJ1-5)
CSARGRGSNQPQHF

SEQ ID NO: 163239 - protein, 15 aa, Homo sapiens
  CDR3 for alpha chain variable domain of TCR clone 81620 (TRAV8-2, TRAJ13)
CVVSDLSGGYQKVTF

SEQ ID NO: 163240 - protein, 14 aa, Homo sapiens
  CDR3 for beta chain variable domain of TCR clone 81620 (TRBV4-1, TRBJ1-6)
CASSPGSDSSPLHF

SEQ ID NO: 163241 - protein, 13 aa, Homo sapiens
  CDR3 for alpha chain variable domain of TCR clone 81621 (TRAV2, TRAJ40)
CAVVTSGTYKYIF

SEQ ID NO: 163242 - protein, 15 aa, Homo sapiens
  CDR3 for beta chain variable domain of TCR clone 81621 (TRBV11-3, TRBJ2-3)
CASLKDGREGDTQYY

SEQ ID NO: 163243 - protein, 12 aa, Homo sapiens
  CDR3 for alpha chain variable domain of TCR clone 81622 (TRAV12-3, TRAJ17)
CAMTLTGNRLTF

SEQ ID NO: 163244 - protein, 13 aa, Homo sapiens
  CDR3 for beta chain variable domain of TCR clone 81622 (TRBV10-3, TRBJ2-7)
CASKLAVNYEQYF

SEQ ID NO: 163245 - protein, 15 aa, Homo sapiens
  CDR3 for alpha chain variable domain of TCR clone 81623 (TRAV4, TRAJ26)
CLVGDMNNYGQNFVF

SEQ ID NO: 163246 - protein, 16 aa, Homo sapiens
  CDR3 for beta chain variable domain of TCR clone 81623 (TRBV28, TRBJ1-4)
CASSSRTGVANEKLFF

SEQ ID NO: 163247 - protein, 14 aa, Homo sapiens
  CDR3 for alpha chain variable domain of TCR clone 81624 (TRAV1-2, TRAJ8)
CAVREDTGFQKLVF

SEQ ID NO: 163248 - protein, 14 aa, Homo sapiens
  CDR3 for beta chain variable domain of TCR clone 81624 (TRBV7-2, TRBJ2-5)
CASSPRGSSETQYF

SEQ ID NO: 163249 - protein, 13 aa, Homo sapiens
  CDR3 for alpha chain variable domain of TCR clone 81625 (TRAV12-3, TRAJ40)
CAMSARGTYKYIF

SEQ ID NO: 163250 - protein, 16 aa, Homo sapiens
  CDR3 for beta chain variable domain of TCR clone 81625 (TRBV20-1, TRBJ2-3)
CSGEAGLVGGQDTQYF

SEQ ID NO: 163251 - protein, 12 aa, Homo sapiens
  CDR3 for alpha chain variable domain of TCR clone 81626 (TRAV1-1, TRAJ43)
CAPRVSSNDMRF

SEQ ID NO: 163252 - protein, 15 aa, Homo sapiens
  CDR3 for beta chain variable domain of TCR clone 81626 (TRBV11-2, TRBJ2-1)
CASSLGTSGLNEQFF

SEQ ID NO: 163253 - protein, 11 aa, Homo sapiens
  CDR3 for alpha chain variable domain of TCR clone 81627 (TRAV2, TRAJ33)
CDVDSNYQLIW

SEQ ID NO: 163254 - protein, 13 aa, Homo sapiens
  CDR3 for beta chain variable domain of TCR clone 81627 (TRBV7-2, TRBJ2-7)
CASSSPSGSEQYF

SEQ ID NO: 163255 - protein, 13 aa, Homo sapiens
  CDR3 for alpha chain variable domain of TCR clone 81628 (TRAV12-2, TRAJ37)
CAGGSGNTGKLIF

SEQ ID NO: 163256 - protein, 17 aa, Homo sapiens
  CDR3 for beta chain variable domain of TCR clone 81628 (TRBV11-2, TRBJ2-1)
CASSLCPPGVEYNEQFF

SEQ ID NO: 163257 - protein, 15 aa, Homo sapiens
  CDR3 for alpha chain variable domain of TCR clone 81629 (TRAV3, TRAJ5)
CAVRDRKTGRRALTF

SEQ ID NO: 163258 - protein, 11 aa, Homo sapiens
  CDR3 for beta chain variable domain of TCR clone 81629 (TRBV7-3, TRBJ2-5)
CVSSLSETQYF

SEQ ID NO: 163259 - protein, 14 aa, Homo sapiens
  CDR3 for alpha chain variable domain of TCR clone 81630 (TRAV12-2, TRAJ17)
CAVLFKAAGNKLTF

SEQ ID NO: 163260 - protein, 16 aa, Homo sapiens
  CDR3 for beta chain variable domain of TCR clone 81630 (TRBV4-3, TRBJ2-1)
CASSPALDRGVNEQFF

SEQ ID NO: 163261 - protein, 16 aa, Homo sapiens
  CDR3 for alpha chain variable domain of TCR clone 81631 (TRAV8-1, TRAJ39)
CAVNVPSYNASNMLTF

SEQ ID NO: 163262 - protein, 15 aa, Homo sapiens
  CDR3 for beta chain variable domain of TCR clone 81631 (TRBV4-1, TRBJ2-3)
CASRSTRAGTDTQYF

SEQ ID NO: 163263 - protein, 12 aa, Homo sapiens
  CDR3 for alpha chain variable domain of TCR clone 81632 (TRAV8-4, TRAJ43)
CAVSVNNNDMRL

SEQ ID NO: 163264 - protein, 18 aa, Homo sapiens
  CDR3 for beta chain variable domain of TCR clone 81632 (TRBV5-7, TRBJ2-2)
CASSLGASGGLNTGELFF

SEQ ID NO: 163265 - protein, 14 aa, Homo sapiens
  CDR3 for alpha chain variable domain of TCR clone 81633 (TRAV1-2, TRAJ16)
CAVNRFSDVQKLLF

SEQ ID NO: 163266 - protein, 15 aa, Homo sapiens
  CDR3 for beta chain variable domain of TCR clone 81633 (TRBV6-3, TRBJ2-7)
CASSSPGTVFYEQYF

SEQ ID NO: 163267 - protein, 12 aa, Homo sapiens
  CDR3 for alpha chain variable domain of TCR clone 81634 (TRAV21, TRAJ33)
CAKMDSNYQLIW

SEQ ID NO: 163268 - protein, 14 aa, Homo sapiens
  CDR3 for beta chain variable domain of TCR clone 81634 (TRBV2, TRBJ2-7)
FASSLTSGGYEQYF

SEQ ID NO: 163269 - protein, 16 aa, Homo sapiens
  CDR3 for alpha chain variable domain of TCR clone 81635 (TRAV23/DV6, TRAJ9)
CSASIGGNTGGFKTIF

SEQ ID NO: 163270 - protein, 15 aa, Homo sapiens
  CDR3 for beta chain variable domain of TCR clone 81635 (TRBV6-3, TRBJ2-7)
CASSSPGTVLYEQYF

SEQ ID NO: 163271 - protein, 13 aa, Homo sapiens
  CDR3 for alpha chain variable domain of TCR clone 81636 (TRAV13-1, TRAJ37)
CAAVPGNTGKLIF

SEQ ID NO: 163272 - protein, 17 aa, Homo sapiens
  CDR3 for beta chain variable domain of TCR clone 81636 (TRBV10-2, TRBJ1-6)
CASSENRGSSYNSPLHF

SEQ ID NO: 163273 - protein, 17 aa, Homo sapiens
  CDR3 for alpha chain variable domain of TCR clone 81637 (TRAV3, TRAJ6)
CAVSRRTDTGGSYIPTF

SEQ ID NO: 163274 - protein, 18 aa, Homo sapiens
  CDR3 for beta chain variable domain of TCR clone 81637 (TRBV7-2, TRBJ2-3)
CASSSETSRGRKADTQYF

SEQ ID NO: 163275 - protein, 13 aa, Homo sapiens
  CDR3 for alpha chain variable domain of TCR clone 81638 (TRAV2, TRAJ15)
CAVASQAGAALIF

SEQ ID NO: 163276 - protein, 16 aa, Homo sapiens
  CDR3 for beta chain variable domain of TCR clone 81638 (TRBV5-1, TRBJ1-1)
CASSSGGNSLDTEAFF

SEQ ID NO: 163277 - protein, 15 aa, Homo sapiens
  CDR3 for alpha chain variable domain of TCR clone 81639 (TRAV20, TRAJ23)
CAVPAVRNQGGKLIF

SEQ ID NO: 163278 - protein, 16 aa, Homo sapiens
  CDR3 for beta chain variable domain of TCR clone 81639 (TRBV27, TRBJ2-7)
CASSKQGRGWAYEQYF

SEQ ID NO: 163279 - protein, 18 aa, Homo sapiens
  CDR3 for alpha chain variable domain of TCR clone 81640 (TRAV13-1, TRAJ52)
CAAKNPNAGGTSYGKLTF

SEQ ID NO: 163280 - protein, 14 aa, Homo sapiens
  CDR3 for beta chain variable domain of TCR clone 81640 (TRBV7-9, TRBJ2-1)
CASSPRDSLYEQFF

SEQ ID NO: 163281 - protein, 14 aa, Homo sapiens
  CDR3 for alpha chain variable domain of TCR clone 81641 (TRAV12-1, TRAJ13)
CVVIDSGGYQKVTF

SEQ ID NO: 163282 - protein, 12 aa, Homo sapiens
  CDR3 for beta chain variable domain of TCR clone 81641 (TRBV7-8, TRBJ2-7)
CASSLGDREQYF

SEQ ID NO: 163283 - protein, 15 aa, Homo sapiens
  CDR3 for alpha chain variable domain of TCR clone 81642 (TRAV8-1, TRAJ6)
CAVNAGAGGSYIPTF

SEQ ID NO: 163284 - protein, 14 aa, Homo sapiens
  CDR3 for beta chain variable domain of TCR clone 81642 (TRBV25-1, TRBJ1-6)
CASSLSADISPLHC

SEQ ID NO: 163285 - protein, 13 aa, Homo sapiens
  CDR3 for alpha chain variable domain of TCR clone 81643 (TRAV17, TRAJ5)
CAHMDTGRRALTF

SEQ ID NO: 163286 - protein, 15 aa, Homo sapiens
  CDR3 for beta chain variable domain of TCR clone 81643 (TRBV6-6, TRBJ2-5)
CASSPGGGLEETQYF

SEQ ID NO: 163287 - protein, 14 aa, Homo sapiens
  CDR3 for alpha chain variable domain of TCR clone 81644 (TRAV3, TRAJ27)
CAVRDDTNAGKSTF

SEQ ID NO: 163288 - protein, 15 aa, Homo sapiens
  CDR3 for beta chain variable domain of TCR clone 81644 (TRBV7-7, TRBJ2-2)
CATSKLAKNTGELFS

SEQ ID NO: 163289 - protein, 18 aa, Homo sapiens
  CDR3 for alpha chain variable domain of TCR clone 81645 (TRAV26-1, TRAJ27)
CIVRPSFNYNTNAGKSTF

SEQ ID NO: 163290 - protein, 14 aa, Homo sapiens
  CDR3 for beta chain variable domain of TCR clone 81645 (TRBV10-3, TRBJ1-6)
CAISVDGDESTLHF

SEQ ID NO: 163291 - protein, 15 aa, Homo sapiens
  CDR3 for alpha chain variable domain of TCR clone 81646 (TRAV3, TRAJ3)
CAVRDRDSSASRIIF

SEQ ID NO: 163292 - protein, 18 aa, Homo sapiens
  CDR3 for beta chain variable domain of TCR clone 81646 (TRBV25-1, TRBJ1-2)
CASSGLQNGQGLIFGYTF

SEQ ID NO: 163293 - protein, 13 aa, Homo sapiens
  CDR3 for alpha chain variable domain of TCR clone 81647 (TRAV1-2, TRAJ12)
CAVSMDGSYKLIF

SEQ ID NO: 163294 - protein, 15 aa, Homo sapiens
  CDR3 for beta chain variable domain of TCR clone 81647 (TRBV27, TRBJ2-5)
CASSLIPSGGETQYF

SEQ ID NO: 163295 - protein, 12 aa, Homo sapiens
  CDR3 for alpha chain variable domain of TCR clone 81648 (TRAV36/DV7, TRAJ54)
WAVVRGAQKLVF

SEQ ID NO: 163296 - protein, 14 aa, Homo sapiens
  CDR3 for beta chain variable domain of TCR clone 81648 (TRBV7-3, TRBJ1-1)
CASSLKGGNTEAFF

SEQ ID NO: 163297 - protein, 15 aa, Homo sapiens
  CDR3 for alpha chain variable domain of TCR clone 81649 (TRAV8-4, TRAJ47)
CAVSDPEEYGNKLVF

SEQ ID NO: 163298 - protein, 15 aa, Homo sapiens
  CDR3 for beta chain variable domain of TCR clone 81649 (TRBV11-3, TRBJ2-1)
CASSLGPDSYNEQFF

SEQ ID NO: 163299 - protein, 13 aa, Homo sapiens
  CDR3 for alpha chain variable domain of TCR clone 81650 (TRAV8-3, TRAJ28)
CAVGAVGSYQLTF

SEQ ID NO: 163300 - protein, 15 aa, Homo sapiens
  CDR3 for beta chain variable domain of TCR clone 81650 (TRBV7-3, TRBJ2-2)
CASSETGQGTGELFF

SEQ ID NO: 163301 - protein, 12 aa, Homo sapiens
  CDR3 for alpha chain variable domain of TCR clone 81651 (TRAV12-3, TRAJ17)
CAMTLTGNKLTF

SEQ ID NO: 163302 - protein, 15 aa, Homo sapiens
  CDR3 for beta chain variable domain of TCR clone 81651 (TRBV7-3, TRBJ1-1)
CASSQDWGLKLSLDK

SEQ ID NO: 163303 - protein, 14 aa, Homo sapiens
  CDR3 for alpha chain variable domain of TCR clone 81652 (TRAV14/DV4, TRAJ54)
CAMREAPGAQKLVF

SEQ ID NO: 163304 - protein, 15 aa, Homo sapiens
  CDR3 for beta chain variable domain of TCR clone 81652 (TRBV5-1, TRBJ2-7)
CASSWNGGPAREQYF

SEQ ID NO: 163305 - protein, 14 aa, Homo sapiens
  CDR3 for alpha chain variable domain of TCR clone 81653 (TRAV29/DV5, TRAJ49)
CAASLSNTGNQFYF

SEQ ID NO: 163306 - protein, 15 aa, Homo sapiens
  CDR3 for beta chain variable domain of TCR clone 81653 (TRBV20-1, TRBJ2-1)
CSARGIGGIYNEQFF

SEQ ID NO: 163307 - protein, 17 aa, Homo sapiens
  CDR3 for alpha chain variable domain of TCR clone 81654 (TRAV3, TRAJ6)
CAVRDGPRAGGSYIPTF

SEQ ID NO: 163308 - protein, 13 aa, Homo sapiens
  CDR3 for beta chain variable domain of TCR clone 81654 (TRBV18, TRBJ2-5)
CASSLQGQETQYF

SEQ ID NO: 163309 - protein, 17 aa, Homo sapiens
  CDR3 for alpha chain variable domain of TCR clone 81655 (TRAV3, TRAJ42)
CAVRDRDYGGSQGHLIF

SEQ ID NO: 163310 - protein, 15 aa, Homo sapiens
  CDR3 for beta chain variable domain of TCR clone 81655 (TRBV6-6, TRBJ2-7)
CASSYSYGGSYEQYF

SEQ ID NO: 163311 - protein, 18 aa, Homo sapiens
  CDR3 for alpha chain variable domain of TCR clone 81656 (TRAV21, TRAJ52)
CAVGPSPAGGTSYGKLTF

SEQ ID NO: 163312 - protein, 11 aa, Homo sapiens
  CDR3 for beta chain variable domain of TCR clone 81656 (TRBV12-4, TRBJ2-3)
CASTATDTQYF

SEQ ID NO: 163313 - protein, 17 aa, Homo sapiens
  CDR3 for alpha chain variable domain of TCR clone 81657 (TRAV23/DV6, TRAJ57)
CAASSTLSQGGSEKLVF

SEQ ID NO: 163314 - protein, 14 aa, Homo sapiens
  CDR3 for beta chain variable domain of TCR clone 81657 (TRBV25-1, TRBJ1-1)
CASTHLGGNTEDFF

SEQ ID NO: 163315 - protein, 14 aa, Homo sapiens
  CDR3 for alpha chain variable domain of TCR clone 81658 (TRAV1-2, TRAJ8)
CAVREDTGFQKLVF

SEQ ID NO: 163316 - protein, 14 aa, Homo sapiens
  CDR3 for beta chain variable domain of TCR clone 81658 (TRBV18, TRBJ2-1)
CASSPQGRFNEQFF

SEQ ID NO: 163317 - protein, 11 aa, Homo sapiens
  CDR3 for alpha chain variable domain of TCR clone 81659 (TRAV27, TRAJ20)
CAGADDYKPSF

SEQ ID NO: 163318 - protein, 13 aa, Homo sapiens
  CDR3 for beta chain variable domain of TCR clone 81659 (TRBV11-3, TRBJ1-2)
CASSQRTSRGYTF

SEQ ID NO: 163319 - protein, 14 aa, Homo sapiens
  CDR3 for alpha chain variable domain of TCR clone 81660 (TRAV13-2, TRAJ17)
CAENGKAAGNKLTF

SEQ ID NO: 163320 - protein, 13 aa, Homo sapiens
  CDR3 for beta chain variable domain of TCR clone 81660 (TRBV7-2, TRBJ2-2)
CASSSVRAGELFF

SEQ ID NO: 163321 - protein, 14 aa, Homo sapiens
  CDR3 for alpha chain variable domain of TCR clone 81661 (TRAV12-2, TRAJ45)
CALPERGGADGLTF

SEQ ID NO: 163322 - protein, 14 aa, Homo sapiens
  CDR3 for beta chain variable domain of TCR clone 81661 (TRBV18, TRBJ1-5)
CASSPGNSNQPQHL

SEQ ID NO: 163323 - protein, 14 aa, Homo sapiens
  CDR3 for alpha chain variable domain of TCR clone 81662 (TRAV26-1, TRAJ38)
CIADNAGNSRKLIW

SEQ ID NO: 163324 - protein, 13 aa, Homo sapiens
  CDR3 for beta chain variable domain of TCR clone 81662 (TRBV4-1, TRBJ2-7)
CASSQGQAHEQYF

SEQ ID NO: 163325 - protein, 14 aa, Homo sapiens
  CDR3 for alpha chain variable domain of TCR clone 81663 (TRAV21, TRAJ21)
CAVKGLGNFNKFYF

SEQ ID NO: 163326 - protein, 13 aa, Homo sapiens
  CDR3 for beta chain variable domain of TCR clone 81663 (TRBV18, TRBJ1-1)
CASSPETKPEAFF

SEQ ID NO: 163327 - protein, 13 aa, Homo sapiens
  CDR3 for alpha chain variable domain of TCR clone 81664 (TRAV38-1, TRAJ42)
CARWGGSQGNLSF

SEQ ID NO: 163328 - protein, 10 aa, Homo sapiens
  CDR3 for beta chain variable domain of TCR clone 81664 (TRBV2, TRBJ2-5)
CASSAATQYF

SEQ ID NO: 163329 - protein, 16 aa, Homo sapiens
  CDR3 for alpha chain variable domain of TCR clone 81665 (TRAV30, TRAJ24)
CGTEIVYADSWGKFQF

SEQ ID NO: 163330 - protein, 14 aa, Homo sapiens
  CDR3 for beta chain variable domain of TCR clone 81665 (TRBV12-5, TRBJ2-5)
CASGSRTHQGTQYF

SEQ ID NO: 163331 - protein, 11 aa, Homo sapiens
  CDR3 for alpha chain variable domain of TCR clone 81666 (TRAV12-2, TRAJ49)
CALQGGNPFYF

SEQ ID NO: 163332 - protein, 13 aa, Homo sapiens
  CDR3 for beta chain variable domain of TCR clone 81666 (TRBV4-1, TRBJ1-1)
CASSQLGTGEAFF

SEQ ID NO: 163333 - protein, 13 aa, Homo sapiens
  CDR3 for alpha chain variable domain of TCR clone 81667 (TRAV12-1, TRAJ40)
CVVPTSGTYKYIF

SEQ ID NO: 163334 - protein, 15 aa, Homo sapiens
  CDR3 for beta chain variable domain of TCR clone 81667 (TRBV5-1, TRBJ2-2)
CASSSQGGNTGELFF

SEQ ID NO: 163335 - protein, 20 aa, Homo sapiens
  CDR3 for alpha chain variable domain of TCR clone 81668 (TRAV12-1, TRAJ42)
SSVIQPPTSVKGVSQGNLIF

SEQ ID NO: 163336 - protein, 18 aa, Homo sapiens
  CDR3 for beta chain variable domain of TCR clone 81668 (TRBV11-2, TRBJ2-3)
CASSLGGASRGAPNTQYF

SEQ ID NO: 163337 - protein, 11 aa, Homo sapiens
  CDR3 for alpha chain variable domain of TCR clone 81669 (TRAV21, TRAJ34)
CAHYNTDKLIF

SEQ ID NO: 163338 - protein, 15 aa, Homo sapiens
  CDR3 for beta chain variable domain of TCR clone 81669 (TRBV9, TRBJ1-6)
CASSVAGTGDSPLHF

SEQ ID NO: 163339 - protein, 14 aa, Homo sapiens
  CDR3 for alpha chain variable domain of TCR clone 81670 (TRAV2, TRAJ22)
CVVGRGGSARQLTF

SEQ ID NO: 163340 - protein, 12 aa, Homo sapiens
  CDR3 for beta chain variable domain of TCR clone 81670 (TRBV19, TRBJ2-1)
CASSMQDTEQFF

SEQ ID NO: 163341 - protein, 11 aa, Homo sapiens
  CDR3 for alpha chain variable domain of TCR clone 81671 (TRAV21, TRAJ9)
CAVPGGFKTIS

SEQ ID NO: 163342 - protein, 17 aa, Homo sapiens
  CDR3 for beta chain variable domain of TCR clone 81671 (TRBV7-9, TRBJ2-5)
CATSGGARDPVLRARHA

SEQ ID NO: 163343 - protein, 16 aa, Homo sapiens
  CDR3 for alpha chain variable domain of TCR clone 81672 (TRAV3, TRAJ40)
CAVRDRIASGTYKYIF

SEQ ID NO: 163344 - protein, 16 aa, Homo sapiens
  CDR3 for beta chain variable domain of TCR clone 81672 (TRBV2, TRBJ2-1)
CASRSPAGGNYNEQFF

SEQ ID NO: 163345 - protein, 11 aa, Homo sapiens
  CDR3 for alpha chain variable domain of TCR clone 81673 (TRAV13-1, TRAJ6)
CATLGSYIPTF

SEQ ID NO: 163346 - protein, 12 aa, Homo sapiens
  CDR3 for beta chain variable domain of TCR clone 81673 (TRBV11-2, TRBJ2-1)
CASSSGNNEQFF

SEQ ID NO: 163347 - protein, 14 aa, Homo sapiens
  CDR3 for alpha chain variable domain of TCR clone 81674 (TRAV38-1, TRAJ45)
CASHSGVGADGLTF

SEQ ID NO: 163348 - protein, 13 aa, Homo sapiens
  CDR3 for beta chain variable domain of TCR clone 81674 (TRBV10-3, TRBJ1-2)
CAISERDSYGYTF

SEQ ID NO: 163349 - protein, 15 aa, Homo sapiens
  CDR3 for alpha chain variable domain of TCR clone 81675 (TRAV36/DV7, TRAJ53)
CAVEGGGGSNYKLTF

SEQ ID NO: 163350 - protein, 16 aa, Homo sapiens
  CDR3 for beta chain variable domain of TCR clone 81675 (TRBV27, TRBJ2-2)
CASSLSGFWVTGELFF

SEQ ID NO: 163351 - protein, 13 aa, Homo sapiens
  CDR3 for alpha chain variable domain of TCR clone 81676 (TRAV3, TRAJ21)
CAVREPDFNKFYF

SEQ ID NO: 163352 - protein, 15 aa, Homo sapiens
  CDR3 for beta chain variable domain of TCR clone 81676 (TRBV6-5, TRBJ1-2)
CASSYSQAFNYGYTF

SEQ ID NO: 163353 - protein, 14 aa, Homo sapiens
  CDR3 for alpha chain variable domain of TCR clone 81677 (TRAV8-2, TRAJ4)
CVVSPSGGYNKLIF

SEQ ID NO: 163354 - protein, 16 aa, Homo sapiens
  CDR3 for beta chain variable domain of TCR clone 81677 (TRBV15, TRBJ2-7)
CATSAWQARSSYEQYF

SEQ ID NO: 163355 - protein, 14 aa, Homo sapiens
  CDR3 for alpha chain variable domain of TCR clone 81678 (TRAV3, TRAJ9)
CAVRLNTGGFKTIF

SEQ ID NO: 163356 - protein, 16 aa, Homo sapiens
  CDR3 for beta chain variable domain of TCR clone 81678 (TRBV7-3, TRBJ2-1)
CASSLEGYRSYNEQFF

SEQ ID NO: 163357 - protein, 12 aa, Homo sapiens
  CDR3 for alpha chain variable domain of TCR clone 81679 (TRAV21, TRAJ11)
CAVTSEYSTLTF

SEQ ID NO: 163358 - protein, 16 aa, Homo sapiens
  CDR3 for beta chain variable domain of TCR clone 81679 (TRBV20-1, TRBJ2-7)
CSAQSWRESASSTSGR

SEQ ID NO: 163359 - protein, 13 aa, Homo sapiens
  CDR3 for alpha chain variable domain of TCR clone 81680 (TRAV12-3, TRAJ33)
CAMSVNSNYQLIW

SEQ ID NO: 163360 - protein, 13 aa, Homo sapiens
  CDR3 for beta chain variable domain of TCR clone 81680 (TRBV12-4, TRBJ1-2)
CASSLRQGKGYTF

SEQ ID NO: 163361 - protein, 15 aa, Homo sapiens
  CDR3 for alpha chain variable domain of TCR clone 81681 (TRAV27, TRAJ38)
CAARRNAGHNRKLLW

SEQ ID NO: 163362 - protein, 13 aa, Homo sapiens
  CDR3 for beta chain variable domain of TCR clone 81681 (TRBV12-5, TRBJ2-3)
CASGDRQSDTQYF

SEQ ID NO: 163363 - protein, 14 aa, Homo sapiens
  CDR3 for alpha chain variable domain of TCR clone 81682 (TRAV2, TRAJ8)
CAVEDYTGFQKLVF

SEQ ID NO: 163364 - protein, 20 aa, Homo sapiens
  CDR3 for beta chain variable domain of TCR clone 81682 (TRBV28, TRBJ2-1)
CASTPIGRSPGLAGGNEQFF

SEQ ID NO: 163365 - protein, 16 aa, Homo sapiens
  CDR3 for alpha chain variable domain of TCR clone 81683 (TRAV30, TRAJ24)
CGPEIVDADSWGKFQF

SEQ ID NO: 163366 - protein, 18 aa, Homo sapiens
  CDR3 for beta chain variable domain of TCR clone 81683 (TRBV7-9, TRBJ2-7)
CASSLTTSGSRTWYEQYF

SEQ ID NO: 163367 - protein, 15 aa, Homo sapiens
  CDR3 for alpha chain variable domain of TCR clone 81684 (TRAV13-1, TRAJ5)
CAASKADTGRRAFTF

SEQ ID NO: 163368 - protein, 16 aa, Homo sapiens
  CDR3 for beta chain variable domain of TCR clone 81684 (TRBV7-2, TRBJ2-1)
CASSLGRTSGDNEQFF

SEQ ID NO: 163369 - protein, 12 aa, Homo sapiens
  CDR3 for alpha chain variable domain of TCR clone 81685 (TRAV26-2, TRAJ21)
CILKGNFNKFYF

SEQ ID NO: 163370 - protein, 14 aa, Homo sapiens
  CDR3 for beta chain variable domain of TCR clone 81685 (TRBV7-2, TRBJ1-2)
CASSQTGSTYGYTF

SEQ ID NO: 163371 - protein, 13 aa, Homo sapiens
  CDR3 for alpha chain variable domain of TCR clone 81686 (TRAV27, TRAJ6)
CAGGTRGGYIPTF

SEQ ID NO: 163372 - protein, 15 aa, Homo sapiens
  CDR3 for beta chain variable domain of TCR clone 81686 (TRBV5-5, TRBJ2-7)
CASSLAAPLSYEQYF

SEQ ID NO: 163373 - protein, 14 aa, Homo sapiens
  CDR3 for alpha chain variable domain of TCR clone 81687 (TRAV12-3, TRAJ10)
SHLPLTGGGNKLTF

SEQ ID NO: 163374 - protein, 12 aa, Homo sapiens
  CDR3 for beta chain variable domain of TCR clone 81687 (TRBV7-9, TRBJ2-7)
CATRTDAYEQCF

SEQ ID NO: 163375 - protein, 15 aa, Homo sapiens
  CDR3 for alpha chain variable domain of TCR clone 81688 (TRAV2, TRAJ22)
CAVGFFSGSARQLTF

SEQ ID NO: 163376 - protein, 15 aa, Homo sapiens
  CDR3 for beta chain variable domain of TCR clone 81688 (TRBV2, TRBJ2-1)
CAGSELAGGYNEQFF

SEQ ID NO: 163377 - protein, 14 aa, Homo sapiens
  CDR3 for alpha chain variable domain of TCR clone 81689 (TRAV12-1, TRAJ9)
CVVTLNTGDFKTIF

SEQ ID NO: 163378 - protein, 11 aa, Homo sapiens
  CDR3 for beta chain variable domain of TCR clone 81689 (TRBV29-1, TRBJ2-5)
CSEDRTGTQYF

SEQ ID NO: 163379 - protein, 19 aa, Homo sapiens
  CDR3 for alpha chain variable domain of TCR clone 81690 (TRAV2, TRAJ20)
ILQVQEADAAVYRDCKLSF

SEQ ID NO: 163380 - protein, 13 aa, Homo sapiens
  CDR3 for beta chain variable domain of TCR clone 81690 (TRBV15, TRBJ1-6)
CATSGGLNSPLHF

SEQ ID NO: 163381 - protein, 11 aa, Homo sapiens
  CDR3 for alpha chain variable domain of TCR clone 81691 (TRAV17, TRAJ9)
CGFTGGFKTIF

SEQ ID NO: 163382 - protein, 17 aa, Homo sapiens
  CDR3 for beta chain variable domain of TCR clone 81691 (TRBV11-2, TRBJ2-1)
CASSLYPPGVEYNEQFF

SEQ ID NO: 163383 - protein, 11 aa, Homo sapiens
  CDR3 for alpha chain variable domain of TCR clone 81692 (TRAV25, TRAJ5)
CRGGGRRALTF

SEQ ID NO: 163384 - protein, 15 aa, Homo sapiens
  CDR3 for beta chain variable domain of TCR clone 81692 (TRBV20-1, TRBJ2-7)
CSAGDRVSGMDEQYF

SEQ ID NO: 163385 - protein, 17 aa, Homo sapiens
  CDR3 for alpha chain variable domain of TCR clone 81693 (TRAV27, TRAJ42)
CAERVIYYGGSQGNLIF

SEQ ID NO: 163386 - protein, 14 aa, Homo sapiens
  CDR3 for beta chain variable domain of TCR clone 81693 (TRBV20-1, TRBJ2-1)
CSAQRGGSANEQFF

SEQ ID NO: 163387 - protein, 15 aa, Homo sapiens
  CDR3 for alpha chain variable domain of TCR clone 81694 (TRAV12-2, TRAJ53)
CAVNGGGGSNYKLTF

SEQ ID NO: 163388 - protein, 15 aa, Homo sapiens
  CDR3 for beta chain variable domain of TCR clone 81694 (TRBV7-2, TRBJ2-2)
CASRRPGQNTGELFF

SEQ ID NO: 163389 - protein, 11 aa, Homo sapiens
  CDR3 for alpha chain variable domain of TCR clone 81695 (TRAV2, TRAJ13)
CASGGYQKVIF

SEQ ID NO: 163390 - protein, 14 aa, Homo sapiens
  CDR3 for beta chain variable domain of TCR clone 81695 (TRBV4-2, TRBJ2-3)
CASSQERGTDTQYF

SEQ ID NO: 163391 - protein, 12 aa, Homo sapiens
  CDR3 for alpha chain variable domain of TCR clone 81696 (TRAV12-1, TRAJ34)
CVVAGATDKLIF

SEQ ID NO: 163392 - protein, 12 aa, Homo sapiens
  CDR3 for beta chain variable domain of TCR clone 81696 (TRBV2, TRBJ2-1)
GRGLPSYNEQFF

SEQ ID NO: 163393 - protein, 13 aa, Homo sapiens
  CDR3 for alpha chain variable domain of TCR clone 81697 (TRAV21, TRAJ36)
CAVIKTGANNRFF

SEQ ID NO: 163394 - protein, 13 aa, Homo sapiens
  CDR3 for beta chain variable domain of TCR clone 81697 (TRBV29-1, TRBJ2-3)
CSATRGGRDTQYF

SEQ ID NO: 163395 - protein, 14 aa, Homo sapiens
  CDR3 for alpha chain variable domain of TCR clone 81698 (TRAV1-2, TRAJ16)
CAVNRFSDGQELLF

SEQ ID NO: 163396 - protein, 11 aa, Homo sapiens
  CDR3 for beta chain variable domain of TCR clone 81698 (TRBV4-1, TRBJ2-2)
CASEHTGELFF

SEQ ID NO: 163397 - protein, 14 aa, Homo sapiens
  CDR3 for alpha chain variable domain of TCR clone 81699 (TRAV12-3, TRAJ10)
SHLPLTGGGSKLTF

SEQ ID NO: 163398 - protein, 15 aa, Homo sapiens
  CDR3 for beta chain variable domain of TCR clone 81699 (TRBV25-1, TRBJ2-4)
CASSETESAKNIQYF

SEQ ID NO: 163399 - protein, 18 aa, Homo sapiens
  CDR3 for alpha chain variable domain of TCR clone 81700 (TRAV12-3, TRAJ52)
CAMSVGGAGGTSYGKLTF

SEQ ID NO: 163400 - protein, 13 aa, Homo sapiens
  CDR3 for beta chain variable domain of TCR clone 81700 (TRBV7-2, TRBJ2-2)
CASSLAVTGELFF

SEQ ID NO: 163401 - protein, 17 aa, Homo sapiens
  CDR3 for alpha chain variable domain of TCR clone 81701 (TRAV13-1, TRAJ31)
CAPRDRLMFGDGTQLVV

SEQ ID NO: 163402 - protein, 11 aa, Homo sapiens
  CDR3 for beta chain variable domain of TCR clone 81701 (TRBV19, TRBJ2-7)
CASSILGEQYF

SEQ ID NO: 163403 - protein, 13 aa, Homo sapiens
  CDR3 for alpha chain variable domain of TCR clone 81702 (TRAV21, TRAJ27)
CAARPDNAGKSTF

SEQ ID NO: 163404 - protein, 15 aa, Homo sapiens
  CDR3 for beta chain variable domain of TCR clone 81702 (TRBV10-2, TRBJ2-6)
CASSEQGTGANVLTF

SEQ ID NO: 163405 - protein, 13 aa, Homo sapiens
  CDR3 for alpha chain variable domain of TCR clone 81703 (TRAV26-2, TRAJ43)
CILRAVNNTDMRF

SEQ ID NO: 163406 - protein, 15 aa, Homo sapiens
  CDR3 for beta chain variable domain of TCR clone 81703 (TRBV7-2, TRBJ2-1)
CASTHGTGIYNEQFF

SEQ ID NO: 163407 - protein, 16 aa, Homo sapiens
  CDR3 for alpha chain variable domain of TCR clone 81704 (TRAV3, TRAJ21)
CAVRDIERGNFNKFYF

SEQ ID NO: 163408 - protein, 13 aa, Homo sapiens
  CDR3 for beta chain variable domain of TCR clone 81704 (TRBV4-2, TRBJ1-1)
CASSQAGNTEAFL

SEQ ID NO: 163409 - protein, 14 aa, Homo sapiens
  CDR3 for alpha chain variable domain of TCR clone 81705 (TRAV12-2, TRAJ13)
CAVKRTGGYQKVTF

SEQ ID NO: 163410 - protein, 13 aa, Homo sapiens
  CDR3 for beta chain variable domain of TCR clone 81705 (TRBV19, TRBJ2-2)
CASSIWSTGELFF

SEQ ID NO: 163411 - protein, 13 aa, Homo sapiens
  CDR3 for alpha chain variable domain of TCR clone 81706 (TRAV29/DV5, TRAJ44)
CAASTGTASKLTF

SEQ ID NO: 163412 - protein, 12 aa, Homo sapiens
  CDR3 for beta chain variable domain of TCR clone 81706 (TRBV19, TRBJ1-5)
CASSIAQQPQHF

SEQ ID NO: 163413 - protein, 12 aa, Homo sapiens
  CDR3 for alpha chain variable domain of TCR clone 81707 (TRAV17, TRAJ57)
CATEGGSEKLVF

SEQ ID NO: 163414 - protein, 12 aa, Homo sapiens
  CDR3 for beta chain variable domain of TCR clone 81707 (TRBV29-1, TRBJ2-2)
CSVDKYTGELFF

SEQ ID NO: 163415 - protein, 14 aa, Homo sapiens
  CDR3 for alpha chain variable domain of TCR clone 81708 (TRAV12-2, TRAJ5)
CAVNRSSGRRALTF

SEQ ID NO: 163416 - protein, 12 aa, Homo sapiens
  CDR3 for beta chain variable domain of TCR clone 81708 (TRBV19, TRBJ1-5)
CASSIAQQPQHF

SEQ ID NO: 163417 - protein, 18 aa, Homo sapiens
  CDR3 for alpha chain variable domain of TCR clone 81709 (TRAV13-1, TRAJ52)
CAASKRSAGGTSYGKLTF

SEQ ID NO: 163418 - protein, 11 aa, Homo sapiens
  CDR3 for beta chain variable domain of TCR clone 81709 (TRBV11-2, TRBJ2-2)
CASSLPGELFF

SEQ ID NO: 163419 - protein, 15 aa, Homo sapiens
  CDR3 for alpha chain variable domain of TCR clone 81710 (TRAV26-1, TRAJ22)
CIVRVSFWFCKATAL

SEQ ID NO: 163420 - protein, 12 aa, Homo sapiens
  CDR3 for beta chain variable domain of TCR clone 81710 (TRBV11-2, TRBJ2-2)
CASSLGGGELFF

SEQ ID NO: 163421 - protein, 16 aa, Homo sapiens
  CDR3 for alpha chain variable domain of TCR clone 81711 (TRAV8-3, TRAJ8)
CAVPRDGNTGFQRLVF

SEQ ID NO: 163422 - protein, 15 aa, Homo sapiens
  CDR3 for beta chain variable domain of TCR clone 81711 (TRBV6-1, TRBJ2-6)
CASSSRPSGANVLTF

SEQ ID NO: 163423 - protein, 11 aa, Homo sapiens
  CDR3 for alpha chain variable domain of TCR clone 81712 (TRAV2, TRAJ33)
CAVDSNYQLIW

SEQ ID NO: 163424 - protein, 14 aa, Homo sapiens
  CDR3 for beta chain variable domain of TCR clone 81712 (TRBV11-2, TRBJ2-3)
CASSRRARTDTQYF

SEQ ID NO: 163425 - protein, 14 aa, Homo sapiens
  CDR3 for alpha chain variable domain of TCR clone 81713 (TRAV12-2, TRAJ40)
CAVKIPSGTYKYIF

SEQ ID NO: 163426 - protein, 17 aa, Homo sapiens
  CDR3 for beta chain variable domain of TCR clone 81713 (TRBV20-1, TRBJ2-1)
CSARDPLAGVWDNEQFF

SEQ ID NO: 163427 - protein, 13 aa, Homo sapiens
  CDR3 for alpha chain variable domain of TCR clone 81714 (TRAV26-1, TRAJ34)
CIVRPWITDKLIF

SEQ ID NO: 163428 - protein, 14 aa, Homo sapiens
  CDR3 for beta chain variable domain of TCR clone 81714 (TRBV7-2, TRBJ2-7)
CASGSQGAAYEQYF

SEQ ID NO: 163429 - protein, 14 aa, Homo sapiens
  CDR3 for alpha chain variable domain of TCR clone 81715 (TRAV21, TRAJ21)
CAVGVEDNFNKFYF

SEQ ID NO: 163430 - protein, 14 aa, Homo sapiens
  CDR3 for beta chain variable domain of TCR clone 81715 (TRBV5-1, TRBJ2-7)
CASSRGESLYEQYF

SEQ ID NO: 163431 - protein, 14 aa, Homo sapiens
  CDR3 for alpha chain variable domain of TCR clone 81716 (TRAV16, TRAJ17)
CAPRIKAAGNKLTF

SEQ ID NO: 163432 - protein, 13 aa, Homo sapiens
  CDR3 for beta chain variable domain of TCR clone 81716 (TRBV24-1, TRBJ2-1)
CATSAGPYNEQFF

SEQ ID NO: 163433 - protein, 12 aa, Homo sapiens
  CDR3 for alpha chain variable domain of TCR clone 81717 (TRAV17, TRAJ20)
CATDSNDYKLSF

SEQ ID NO: 163434 - protein, 15 aa, Homo sapiens
  CDR3 for beta chain variable domain of TCR clone 81717 (TRBV11-3, TRBJ2-3)
CASLKDGREGDTQYF

SEQ ID NO: 163435 - protein, 12 aa, Homo sapiens
  CDR3 for alpha chain variable domain of TCR clone 81718 (TRAV20, TRAJ13)
CCVKRGYQKVTF

SEQ ID NO: 163436 - protein, 13 aa, Homo sapiens
  CDR3 for beta chain variable domain of TCR clone 81718 (TRBV12-5, TRBJ2-1)
CASGVGRGNEQFF

SEQ ID NO: 163437 - protein, 10 aa, Homo sapiens
  CDR3 for alpha chain variable domain of TCR clone 81719 (TRAV12-3, TRAJ49)
CAMNDDQFYF

SEQ ID NO: 163438 - protein, 11 aa, Homo sapiens
  CDR3 for beta chain variable domain of TCR clone 81719 (TRBV11-2, TRBJ1-1)
CASSINTEAFF

SEQ ID NO: 163439 - protein, 12 aa, Homo sapiens
  CDR3 for alpha chain variable domain of TCR clone 81720 (TRAV12-3, TRAJ17)
CAMTLTGNKLTF

SEQ ID NO: 163440 - protein, 16 aa, Homo sapiens
  CDR3 for beta chain variable domain of TCR clone 81720 (TRBV19, TRBJ2-1)
CASSKAGPSSYNEQFL

SEQ ID NO: 163441 - protein, 13 aa, Homo sapiens
  CDR3 for alpha chain variable domain of TCR clone 81721 (TRAV8-3, TRAJ43)
CAVGPDNNNDMRF

SEQ ID NO: 163442 - protein, 13 aa, Homo sapiens
  CDR3 for beta chain variable domain of TCR clone 81721 (TRBV7-9, TRBJ1-2)
CASSLKQNYGYTF

SEQ ID NO: 163443 - protein, 14 aa, Homo sapiens
  CDR3 for alpha chain variable domain of TCR clone 81722 (TRAV12-1, TRAJ9)
CVVNRRTGGFKTIF

SEQ ID NO: 163444 - protein, 13 aa, Homo sapiens
  CDR3 for beta chain variable domain of TCR clone 81722 (TRBV10-3, TRBJ2-7)
CASKLAVNYEQYF

SEQ ID NO: 163445 - protein, 14 aa, Homo sapiens
  CDR3 for alpha chain variable domain of TCR clone 81723 (TRAV26-1, TRAJ38)
CIADNAGDNRKLIW

SEQ ID NO: 163446 - protein, 13 aa, Homo sapiens
  CDR3 for beta chain variable domain of TCR clone 81723 (TRBV15, TRBJ1-6)
CATSGGLNSPLHF

SEQ ID NO: 163447 - protein, 13 aa, Homo sapiens
  CDR3 for alpha chain variable domain of TCR clone 81724 (TRAV3, TRAJ20)
CAVRDTPRYKLSF

SEQ ID NO: 163448 - protein, 15 aa, Homo sapiens
  CDR3 for beta chain variable domain of TCR clone 81724 (TRBV5-1, TRBJ2-7)
CASSLNGGPAREQYF

SEQ ID NO: 163449 - protein, 14 aa, Homo sapiens
  CDR3 for alpha chain variable domain of TCR clone 81725 (TRAV1-2, TRAJ16)
CAVNRFSDGQKLLF

SEQ ID NO: 163450 - protein, 14 aa, Homo sapiens
  CDR3 for beta chain variable domain of TCR clone 81725 (TRBV19, TRBJ2-7)
CASSTSQLAYEQYF

SEQ ID NO: 163451 - protein, 14 aa, Homo sapiens
  CDR3 for alpha chain variable domain of TCR clone 81726 (TRAV16, TRAJ33)
CALSAMDSNYQLIW

SEQ ID NO: 163452 - protein, 15 aa, Homo sapiens
  CDR3 for beta chain variable domain of TCR clone 81726 (TRBV27, TRBJ2-5)
CASSLYPRGGETQYF

SEQ ID NO: 163453 - protein, 16 aa, Homo sapiens
  CDR3 for alpha chain variable domain of TCR clone 81727 (TRAV4, TRAJ22)
CLVGDLYSGSARQLTF

SEQ ID NO: 163454 - protein, 12 aa, Homo sapiens
  CDR3 for beta chain variable domain of TCR clone 81727 (TRBV11-2, TRBJ2-2)
CASSLGGGELFF

SEQ ID NO: 163455 - protein, 14 aa, Homo sapiens
  CDR3 for alpha chain variable domain of TCR clone 81728 (TRAV14/DV4, TRAJ15)
CAMRRDQAGTALIF

SEQ ID NO: 163456 - protein, 16 aa, Homo sapiens
  CDR3 for beta chain variable domain of TCR clone 81728 (TRBV4-3, TRBJ2-1)
CASSPALDRGVNEQFF

SEQ ID NO: 163457 - protein, 14 aa, Homo sapiens
  CDR3 for alpha chain variable domain of TCR clone 81729 (TRAV38-1, TRAJ45)
CDSHSGGGADGLTF

SEQ ID NO: 163458 - protein, 13 aa, Homo sapiens
  CDR3 for beta chain variable domain of TCR clone 81729 (TRBV7-9, TRBJ2-2)
CASSSAGTGELFF

SEQ ID NO: 163459 - protein, 10 aa, Homo sapiens
  CDR3 for alpha chain variable domain of TCR clone 81730 (TRAV25, TRAJ17)
CQAAGNKLPF

SEQ ID NO: 163460 - protein, 13 aa, Homo sapiens
  CDR3 for beta chain variable domain of TCR clone 81730 (TRBV6-5, TRBJ2-2)
CASSLPGVGELFF

SEQ ID NO: 163461 - protein, 15 aa, Homo sapiens
  CDR3 for alpha chain variable domain of TCR clone 81731 (TRAV8-2, TRAJ15)
CVVTMGNQAGTALIF

SEQ ID NO: 163462 - protein, 20 aa, Homo sapiens
  CDR3 for beta chain variable domain of TCR clone 81731 (TRBV7-8, TRBJ2-2)
CASSHLFPGPTIHITGELFF

SEQ ID NO: 163463 - protein, 14 aa, Homo sapiens
  CDR3 for alpha chain variable domain of TCR clone 81732 (TRAV13-1, TRAJ44)
CAAKATGTASKLTF

SEQ ID NO: 163464 - protein, 17 aa, Homo sapiens
  CDR3 for beta chain variable domain of TCR clone 81732 (TRBV7-3, TRBJ2-3)
RASSLMKRMRGADTQYC

SEQ ID NO: 163465 - protein, 14 aa, Homo sapiens
  CDR3 for alpha chain variable domain of TCR clone 81733 (TRAV35, TRAJ50)
CAGHRKTSYDKVIF

SEQ ID NO: 163466 - protein, 13 aa, Homo sapiens
  CDR3 for beta chain variable domain of TCR clone 81733 (TRBV7-7, TRBJ2-3)
CASSLSSADTQDF

SEQ ID NO: 163467 - protein, 15 aa, Homo sapiens
  CDR3 for alpha chain variable domain of TCR clone 81734 (TRAV26-1, TRAJ29)
CIVRVEGSGNTPLVF

SEQ ID NO: 163468 - protein, 16 aa, Homo sapiens
  CDR3 for beta chain variable domain of TCR clone 81734 (TRBV19, TRBJ2-2)
CASRSPGTGATGELFF

SEQ ID NO: 163469 - protein, 14 aa, Homo sapiens
  CDR3 for alpha chain variable domain of TCR clone 81735 (TRAV2, TRAJ9)
CAVEDRSGGFKTIF

SEQ ID NO: 163470 - protein, 15 aa, Homo sapiens
  CDR3 for beta chain variable domain of TCR clone 81735 (TRBV7-2, TRBJ2-7)
CASSSGLAGRREQYF

SEQ ID NO: 163471 - protein, 16 aa, Homo sapiens
  CDR3 for alpha chain variable domain of TCR clone 81736 (TRAV30, TRAJ24)
CGTEIVDADSWGKFQF

SEQ ID NO: 163472 - protein, 13 aa, Homo sapiens
  CDR3 for beta chain variable domain of TCR clone 81736 (TRBV11-2, TRBJ2-5)
RASSSTGEETQYF

SEQ ID NO: 163473 - protein, 14 aa, Homo sapiens
  CDR3 for alpha chain variable domain of TCR clone 81737 (TRAV12-2, TRAJ13)
CAAKKTGGYQKVTF

SEQ ID NO: 163474 - protein, 17 aa, Homo sapiens
  CDR3 for beta chain variable domain of TCR clone 81737 (TRBV20-1, TRBJ2-2)
CSASGSGQGGLTGELFF

SEQ ID NO: 163475 - protein, 12 aa, Homo sapiens
  CDR3 for alpha chain variable domain of TCR clone 81738 (TRAV12-2, TRAJ10)
WGVTGGGNKLTF

SEQ ID NO: 163476 - protein, 16 aa, Homo sapiens
  CDR3 for beta chain variable domain of TCR clone 81738 (TRBV6-4, TRBJ1-2)
CASSEAAGDPNYGYTF

SEQ ID NO: 163477 - protein, 12 aa, Homo sapiens
  CDR3 for alpha chain variable domain of TCR clone 81739 (TRAV17, TRAJ49)
CATVTTGNQFYF

SEQ ID NO: 163478 - protein, 13 aa, Homo sapiens
  CDR3 for beta chain variable domain of TCR clone 81739 (TRBV5-5, TRBJ2-7)
CASSSQTRQRQYF

SEQ ID NO: 163479 - protein, 13 aa, Homo sapiens
  CDR3 for alpha chain variable domain of TCR clone 81740 (TRAV21, TRAJ56)
CAVRLGANSKLTF

SEQ ID NO: 163480 - protein, 19 aa, Homo sapiens
  CDR3 for beta chain variable domain of TCR clone 81740 (TRBV2, TRBJ2-7)
CASSDDETSGRANDYEQYF

SEQ ID NO: 163481 - protein, 13 aa, Homo sapiens
  CDR3 for alpha chain variable domain of TCR clone 81741 (TRAV29/DV5, TRAJ31)
CAASRNNNARLMF

SEQ ID NO: 163482 - protein, 18 aa, Homo sapiens
  CDR3 for beta chain variable domain of TCR clone 81741 (TRBV4-1, TRBJ1-5)
CASSQDPRGQGLNQPQHF

SEQ ID NO: 163483 - protein, 15 aa, Homo sapiens
  CDR3 for alpha chain variable domain of TCR clone 81742 (TRAV26-1, TRAJ29)
CIVRVQGSGNTPLVF

SEQ ID NO: 163484 - protein, 15 aa, Homo sapiens
  CDR3 for beta chain variable domain of TCR clone 81742 (TRBV28, TRBJ2-5)
CASSPGQGSIETQYF

SEQ ID NO: 163485 - protein, 12 aa, Homo sapiens
  CDR3 for alpha chain variable domain of TCR clone 81743 (TRAV21, TRAJ11)
CAATSGYSTLTF

SEQ ID NO: 163486 - protein, 13 aa, Homo sapiens
  CDR3 for beta chain variable domain of TCR clone 81743 (TRBV12-4, TRBJ1-2)
CASSSGPNYGYTF

SEQ ID NO: 163487 - protein, 14 aa, Homo sapiens
  CDR3 for alpha chain variable domain of TCR clone 81744 (TRAV12-1, TRAJ17)
CVVNYKAAGNKLTF

SEQ ID NO: 163488 - protein, 14 aa, Homo sapiens
  CDR3 for beta chain variable domain of TCR clone 81744 (TRBV7-2, TRBJ2-5)
CASSPRGSSETQYF

SEQ ID NO: 163489 - protein, 14 aa, Homo sapiens
  CDR3 for alpha chain variable domain of TCR clone 81745 (TRAV12-3, TRAJ10)
SNLPLTGGGNKLTF

SEQ ID NO: 163490 - protein, 12 aa, Homo sapiens
  CDR3 for beta chain variable domain of TCR clone 81745 (TRBV7-9, TRBJ2-7)
CASSIKREEQYF

SEQ ID NO: 163491 - protein, 13 aa, Homo sapiens
  CDR3 for alpha chain variable domain of TCR clone 81746 (TRAV2, TRAJ29)
CAAQNPGNTPLVF

SEQ ID NO: 163492 - protein, 14 aa, Homo sapiens
  CDR3 for beta chain variable domain of TCR clone 81746 (TRBV7-9, TRBJ2-4)
CASSLAMGGNIQYF

SEQ ID NO: 163493 - protein, 16 aa, Homo sapiens
  CDR3 for alpha chain variable domain of TCR clone 81747 (TRAV2, TRAJ10)
CCGGSTVTGGGNKLTF

SEQ ID NO: 163494 - protein, 16 aa, Homo sapiens
  CDR3 for beta chain variable domain of TCR clone 81747 (TRBV18, TRBJ1-5)
CASLPSTGNSNQPQHF

SEQ ID NO: 163495 - protein, 12 aa, Homo sapiens
  CDR3 for alpha chain variable domain of TCR clone 81748 (TRAV6, TRAJ9)
CALHTGCFKTIF

SEQ ID NO: 163496 - protein, 14 aa, Homo sapiens
  CDR3 for beta chain variable domain of TCR clone 81748 (TRBV7-9, TRBJ2-1)
CASSQGQAEAERFF

SEQ ID NO: 163497 - protein, 14 aa, Homo sapiens
  CDR3 for alpha chain variable domain of TCR clone 81749 (TRAV17, TRAJ34)
CATDSLEGTDKLIF

SEQ ID NO: 163498 - protein, 13 aa, Homo sapiens
  CDR3 for beta chain variable domain of TCR clone 81749 (TRBV11-2, TRBJ2-7)
CASSGTRPDEQYF

SEQ ID NO: 163499 - protein, 12 aa, Homo sapiens
  CDR3 for alpha chain variable domain of TCR clone 81750 (TRAV3, TRAJ31)
CAVRDGNARLMF

SEQ ID NO: 163500 - protein, 13 aa, Homo sapiens
  CDR3 for beta chain variable domain of TCR clone 81750 (TRBV4-2, TRBJ1-1)
CASSQAGNTEAFF

SEQ ID NO: 163501 - protein, 16 aa, Homo sapiens
  CDR3 for alpha chain variable domain of TCR clone 81751 (TRAV30, TRAJ24)
CGTEIVDADSWGKFQF

SEQ ID NO: 163502 - protein, 13 aa, Homo sapiens
  CDR3 for beta chain variable domain of TCR clone 81751 (TRBV12-4, TRBJ2-2)
CASSPLPPGELFF

SEQ ID NO: 163503 - protein, 10 aa, Homo sapiens
  CDR3 for alpha chain variable domain of TCR clone 81752 (TRAV1-2, TRAJ34)
CAVNTDKLIF

SEQ ID NO: 163504 - protein, 14 aa, Homo sapiens
  CDR3 for beta chain variable domain of TCR clone 81752 (TRBV7-3, TRBJ1-1)
CASSLKGGNTEAFF

SEQ ID NO: 163505 - protein, 15 aa, Homo sapiens
  CDR3 for alpha chain variable domain of TCR clone 81753 (TRAV16, TRAJ17)
CALSGQEAAGNKLTF

SEQ ID NO: 163506 - protein, 15 aa, Homo sapiens
  CDR3 for beta chain variable domain of TCR clone 81753 (TRBV12-4, TRBJ1-5)
CASTQGTGPPQPQHF

SEQ ID NO: 163507 - protein, 15 aa, Homo sapiens
  CDR3 for alpha chain variable domain of TCR clone 81754 (TRAV12-1, TRAJ45)
CVVLSGGGGADGLTF

SEQ ID NO: 163508 - protein, 15 aa, Homo sapiens
  CDR3 for beta chain variable domain of TCR clone 81754 (TRBV19, TRBJ1-1)
CASTSGQIQNTEAFF

SEQ ID NO: 163509 - protein, 12 aa, Homo sapiens
  CDR3 for alpha chain variable domain of TCR clone 81755 (TRAV12-3, TRAJ17)
CAMTLRGNKLTF

SEQ ID NO: 163510 - protein, 13 aa, Homo sapiens
  CDR3 for beta chain variable domain of TCR clone 81755 (TRBV9, TRBJ2-2)
CASSPRPAGELFF

SEQ ID NO: 163511 - protein, 16 aa, Homo sapiens
  CDR3 for alpha chain variable domain of TCR clone 81756 (TRAV3, TRAJ10)
CAVRDMRAGGGNKLTF

SEQ ID NO: 163512 - protein, 15 aa, Homo sapiens
  CDR3 for beta chain variable domain of TCR clone 81756 (TRBV4-1, TRBJ2-5)
CASSQWDLYQETQYF

SEQ ID NO: 163513 - protein, 10 aa, Homo sapiens
  CDR3 for alpha chain variable domain of TCR clone 81757 (TRAV12-3, TRAJ49)
CAMNDDQFYF

SEQ ID NO: 163514 - protein, 16 aa, Homo sapiens
  CDR3 for beta chain variable domain of TCR clone 81757 (TRBV19, TRBJ2-1)
CASSKAGPSSYNEQFF

SEQ ID NO: 163515 - protein, 12 aa, Homo sapiens
  CDR3 for alpha chain variable domain of TCR clone 81758 (TRAV12-3, TRAJ17)
CAMTLTGNKLTF

SEQ ID NO: 163516 - protein, 20 aa, Homo sapiens
  CDR3 for beta chain variable domain of TCR clone 81758 (TRBV7-8, TRBJ2-2)
CASSRLFPGPTIHITGELFF

SEQ ID NO: 163517 - protein, 12 aa, Homo sapiens
  CDR3 for alpha chain variable domain of TCR clone 81759 (TRAV12-1, )
CMVNSWISRTLT

SEQ ID NO: 163518 - protein, 11 aa, Homo sapiens
  CDR3 for beta chain variable domain of TCR clone 81759 (TRBV6-3, TRBJ2-3)
CATGQADTQYF

SEQ ID NO: 163519 - protein, 14 aa, Homo sapiens
  CDR3 for alpha chain variable domain of TCR clone 81760 (TRAV3, TRAJ9)
CAVRGNTGGFKTIF

SEQ ID NO: 163520 - protein, 14 aa, Homo sapiens
  CDR3 for beta chain variable domain of TCR clone 81760 (TRBV15, TRBJ2-1)
CATSGVEDYNEHFF

SEQ ID NO: 163521 - protein, 13 aa, Homo sapiens
  CDR3 for alpha chain variable domain of TCR clone 81761 (TRAV2, TRAJ21)
CAVEDLNFNKFYF

SEQ ID NO: 163522 - protein, 15 aa, Homo sapiens
  CDR3 for beta chain variable domain of TCR clone 81761 (TRBV28, TRBJ2-5)
CASGPGQGSIETQYF

SEQ ID NO: 163523 - protein, 15 aa, Homo sapiens
  CDR3 for alpha chain variable domain of TCR clone 81762 (TRAV21, TRAJ53)
CATLSSGGSNYKLTF

SEQ ID NO: 163524 - protein, 15 aa, Homo sapiens
  CDR3 for beta chain variable domain of TCR clone 81762 (TRBV18, TRBJ2-1)
CASSPPSASYNEQFF

SEQ ID NO: 163525 - protein, 16 aa, Homo sapiens
  CDR3 for alpha chain variable domain of TCR clone 81763 (TRAV30, TRAJ24)
CGTEIVDADSWGKFQF

SEQ ID NO: 163526 - protein, 18 aa, Homo sapiens
  CDR3 for beta chain variable domain of TCR clone 81763 (TRBV11-2, TRBJ2-6)
CASSLSPFLGTGANVLTF

SEQ ID NO: 163527 - protein, 16 aa, Homo sapiens
  CDR3 for alpha chain variable domain of TCR clone 81764 (TRAV3, TRAJ10)
CAVRDMRAGGGNKLTF

SEQ ID NO: 163528 - protein, 13 aa, Homo sapiens
  CDR3 for beta chain variable domain of TCR clone 81764 (TRBV5-5, TRBJ1-2)
CASSFWRGEDYTF

SEQ ID NO: 163529 - protein, 13 aa, Homo sapiens
  CDR3 for alpha chain variable domain of TCR clone 81765 (TRAV27, TRAJ16)
CAGACSDGQKLLF

SEQ ID NO: 163530 - protein, 14 aa, Homo sapiens
  CDR3 for beta chain variable domain of TCR clone 81765 (TRBV11-2, TRBJ1-3)
CASSLAVPGNTMYF

SEQ ID NO: 163531 - protein, 14 aa, Homo sapiens
  CDR3 for alpha chain variable domain of TCR clone 81766 (TRAV17, TRAJ57)
CATDPQGGSEKLVF

SEQ ID NO: 163532 - protein, 17 aa, Homo sapiens
  CDR3 for beta chain variable domain of TCR clone 81766 (TRBV5-1, TRBJ2-2)
CASSLAGLSGGTGELLF

SEQ ID NO: 163533 - protein, 14 aa, Homo sapiens
  CDR3 for alpha chain variable domain of TCR clone 81767 (TRAV1-1, TRAJ27)
CAVIYNTNAGKSTF

SEQ ID NO: 163534 - protein, 15 aa, Homo sapiens
  CDR3 for beta chain variable domain of TCR clone 81767 (TRBV12-4, TRBJ2-5)
CASSPPTGLQETQYF

SEQ ID NO: 163535 - protein, 13 aa, Homo sapiens
  CDR3 for alpha chain variable domain of TCR clone 81768 (TRAV20, TRAJ37)
CAGCSSNTGKLIF

SEQ ID NO: 163536 - protein, 15 aa, Homo sapiens
  CDR3 for beta chain variable domain of TCR clone 81768 (TRBV7-2, TRBJ2-1)
CASSFQADEYNGQFF

SEQ ID NO: 163537 - protein, 12 aa, Homo sapiens
  CDR3 for alpha chain variable domain of TCR clone 81769 (TRAV10, TRAJ31)
CVVRANRARLMF

SEQ ID NO: 163538 - protein, 17 aa, Homo sapiens
  CDR3 for beta chain variable domain of TCR clone 81769 (TRBV14, TRBJ2-1)
CASSQDRRDSIYNEQFF

SEQ ID NO: 163539 - protein, 11 aa, Homo sapiens
  CDR3 for alpha chain variable domain of TCR clone 81770 (TRAV1-2, TRAJ40)
CAVPGTYKYIF

SEQ ID NO: 163540 - protein, 16 aa, Homo sapiens
  CDR3 for beta chain variable domain of TCR clone 81770 (TRBV29-1, TRBJ2-7)
GSVEVVGTSGSYEQYF

SEQ ID NO: 163541 - protein, 13 aa, Homo sapiens
  CDR3 for alpha chain variable domain of TCR clone 81771 (TRAV30, TRAJ24)
CGTVTDSWGKLQF

SEQ ID NO: 163542 - protein, 15 aa, Homo sapiens
  CDR3 for beta chain variable domain of TCR clone 81771 (TRBV4-1, TRBJ2-1)
CASSQDHGNYNEQFF

SEQ ID NO: 163543 - protein, 17 aa, Homo sapiens
  CDR3 for alpha chain variable domain of TCR clone 81772 (TRAV3, TRAJ28)
CAVREAYSGAGRYQLTF

SEQ ID NO: 163544 - protein, 17 aa, Homo sapiens
  CDR3 for beta chain variable domain of TCR clone 81772 (TRBV20-1, TRBJ2-1)
CSASSSGLAGSYNEQFF

SEQ ID NO: 163545 - protein, 13 aa, Homo sapiens
  CDR3 for alpha chain variable domain of TCR clone 81773 (TRAV13-1, TRAJ21)
CAASIYNFNKFYF

SEQ ID NO: 163546 - protein, 17 aa, Homo sapiens
  CDR3 for beta chain variable domain of TCR clone 81773 (TRBV11-2, TRBJ2-1)
CASSLYPPGVEYNEQFF

SEQ ID NO: 163547 - protein, 21 aa, Homo sapiens
  CDR3 for alpha chain variable domain of TCR clone 81774 (TRAV1-1, TRAJ6)
CLLLLRCERLDRTGGSYIPTF

SEQ ID NO: 163548 - protein, 13 aa, Homo sapiens
  CDR3 for beta chain variable domain of TCR clone 81774 (TRBV10-2, TRBJ2-7)
CASGASGGYEQYF

SEQ ID NO: 163549 - protein, 13 aa, Homo sapiens
  CDR3 for alpha chain variable domain of TCR clone 81775 (TRAV13-2, TRAJ48)
CAEMDFGNEKLTF

SEQ ID NO: 163550 - protein, 15 aa, Homo sapiens
  CDR3 for beta chain variable domain of TCR clone 81775 (TRBV7-9, TRBJ1-6)
CASSSPGRGNSSLHF

SEQ ID NO: 163551 - protein, 16 aa, Homo sapiens
  CDR3 for alpha chain variable domain of TCR clone 81776 (TRAV17, TRAJ52)
CATGIIGGTSYGKLAF

SEQ ID NO: 163552 - protein, 14 aa, Homo sapiens
  CDR3 for beta chain variable domain of TCR clone 81776 (TRBV7-3, TRBJ2-2)
CASSSGGYTGELFF

SEQ ID NO: 163553 - protein, 19 aa, Homo sapiens
  CDR3 for alpha chain variable domain of TCR clone 81777 (TRAV2, TRAJ20)
IPQVREADAAVYRDCKLSF

SEQ ID NO: 163554 - protein, 12 aa, Homo sapiens
  CDR3 for beta chain variable domain of TCR clone 81777 (TRBV11-2, TRBJ2-2)
CASSLGGGELFF

SEQ ID NO: 163555 - protein, 12 aa, Homo sapiens
  CDR3 for alpha chain variable domain of TCR clone 81778 (TRAV1-1, TRAJ8)
CAGGTGLQKLVF

SEQ ID NO: 163556 - protein, 15 aa, Homo sapiens
  CDR3 for beta chain variable domain of TCR clone 81778 (TRBV7-9, TRBJ1-4)
CASSRTGGFNEKLSF

SEQ ID NO: 163557 - protein, 13 aa, Homo sapiens
  CDR3 for alpha chain variable domain of TCR clone 81779 (TRAV27, TRAJ49)
CAPRPYTGNQCYF

SEQ ID NO: 163558 - protein, 16 aa, Homo sapiens
  CDR3 for beta chain variable domain of TCR clone 81779 (TRBV4-1, TRBJ1-2)
CASSQDAGQVLYGYTF

SEQ ID NO: 163559 - protein, 13 aa, Homo sapiens
  CDR3 for alpha chain variable domain of TCR clone 81780 (TRAV29/DV5, TRAJ36)
CAASETGANNLFF

SEQ ID NO: 163560 - protein, 13 aa, Homo sapiens
  CDR3 for beta chain variable domain of TCR clone 81780 (TRBV25-1, TRBJ2-6)
CASRGPGANVLTF

SEQ ID NO: 163561 - protein, 19 aa, Homo sapiens
  CDR3 for alpha chain variable domain of TCR clone 81781 (TRAV29/DV5, TRAJ49)
CSVLLCSKLTGDTGNQFYF

SEQ ID NO: 163562 - protein, 17 aa, Homo sapiens
  CDR3 for beta chain variable domain of TCR clone 81781 (TRBV13, TRBJ2-3)
CASSLSRVAGGRNTQYF

SEQ ID NO: 163563 - protein, 13 aa, Homo sapiens
  CDR3 for alpha chain variable domain of TCR clone 81782 (TRAV8-1, TRAJ30)
CAVIMNRDDKIIF

SEQ ID NO: 163564 - protein, 14 aa, Homo sapiens
  CDR3 for beta chain variable domain of TCR clone 81782 (TRBV7-2, TRBJ1-6)
CASSLQGANSPLYF

SEQ ID NO: 163565 - protein, 11 aa, Homo sapiens
  CDR3 for alpha chain variable domain of TCR clone 81783 (TRAV2, TRAJ33)
CAVESNYQLIW

SEQ ID NO: 163566 - protein, 15 aa, Homo sapiens
  CDR3 for beta chain variable domain of TCR clone 81783 (TRBV7-9, TRBJ2-7)
CASSLALAEAYEQYF

SEQ ID NO: 163567 - protein, 13 aa, Homo sapiens
  CDR3 for alpha chain variable domain of TCR clone 81784 (TRAV8-3, TRAJ48)
CAVVPFGNEKLTF

SEQ ID NO: 163568 - protein, 15 aa, Homo sapiens
  CDR3 for beta chain variable domain of TCR clone 81784 (TRBV11-2, TRBJ2-1)
CASSSSSTRYNEQFF

SEQ ID NO: 163569 - protein, 16 aa, Homo sapiens
  CDR3 for alpha chain variable domain of TCR clone 81785 (TRAV3, TRAJ37)
CAVRPHGSGNTGKLIF

SEQ ID NO: 163570 - protein, 17 aa, Homo sapiens
  CDR3 for beta chain variable domain of TCR clone 81785 (TRBV7-2, TRBJ2-7)
CASCFETSGSTSSTSGR

SEQ ID NO: 163571 - protein, 13 aa, Homo sapiens
  CDR3 for alpha chain variable domain of TCR clone 81786 (TRAV26-2, TRAJ37)
CIRGSSNTGKLIF

SEQ ID NO: 163572 - protein, 16 aa, Homo sapiens
  CDR3 for beta chain variable domain of TCR clone 81786 (TRBV7-8, TRBJ2-5)
CASSPGGARRGETQYF

SEQ ID NO: 163573 - protein, 14 aa, Homo sapiens
  CDR3 for alpha chain variable domain of TCR clone 81787 (TRAV26-2, TRAJ23)
CSRTLYNQGGKLIF

SEQ ID NO: 163574 - protein, 15 aa, Homo sapiens
  CDR3 for beta chain variable domain of TCR clone 81787 (TRBV20-1, TRBJ2-7)
CSARDRVSGTDEQYF

SEQ ID NO: 163575 - protein, 20 aa, Homo sapiens
  CDR3 for alpha chain variable domain of TCR clone 81788 (TRAV26-1, TRAJ42)
CCVLLHRQTYYGGSQGNLIF

SEQ ID NO: 163576 - protein, 16 aa, Homo sapiens
  CDR3 for beta chain variable domain of TCR clone 81788 (TRBV7-3, TRBJ2-2)
CARSLKRGTLSGELFF

SEQ ID NO: 163577 - protein, 15 aa, Homo sapiens
  CDR3 for alpha chain variable domain of TCR clone 81789 (TRAV35, TRAJ23)
CAWPLGNNQGGKLIF

SEQ ID NO: 163578 - protein, 14 aa, Homo sapiens
  CDR3 for beta chain variable domain of TCR clone 81789 (TRBV7-9, TRBJ1-1)
CASTPLQSYTEAFF

SEQ ID NO: 163579 - protein, 10 aa, Homo sapiens
  CDR3 for alpha chain variable domain of TCR clone 81790 (TRAV13-1, TRAJ41)
CAASGPRRTQ

SEQ ID NO: 163580 - protein, 21 aa, Homo sapiens
  CDR3 for beta chain variable domain of TCR clone 81790 (TRBV18, TRBJ2-3)
CASSPPAGGPRKYAVFWHRHP

SEQ ID NO: 163581 - protein, 16 aa, Homo sapiens
  CDR3 for alpha chain variable domain of TCR clone 81791 (TRAV26-1, TRAJ31)
CIVRPPVLNNNARLMF

SEQ ID NO: 163582 - protein, 12 aa, Homo sapiens
  CDR3 for beta chain variable domain of TCR clone 81791 (TRBV12-4, TRBJ2-1)
CASRQTENEQFF

SEQ ID NO: 163583 - protein, 15 aa, Homo sapiens
  CDR3 for alpha chain variable domain of TCR clone 81792 (TRAV5, TRAJ33)
CAEAPAMDSDYQLIW

SEQ ID NO: 163584 - protein, 12 aa, Homo sapiens
  CDR3 for beta chain variable domain of TCR clone 81792 (TRBV6-3, TRBJ2-7)
CASSLTPYEQYF

SEQ ID NO: 163585 - protein, 15 aa, Homo sapiens
  CDR3 for alpha chain variable domain of TCR clone 81793 (TRAV25, TRAJ16)
CAGIIQMARSCSLQG

SEQ ID NO: 163586 - protein, 14 aa, Homo sapiens
  CDR3 for beta chain variable domain of TCR clone 81793 (TRBV2, TRBJ1-5)
CASSGTVSNQPQHF

SEQ ID NO: 163587 - protein, 15 aa, Homo sapiens
  CDR3 for alpha chain variable domain of TCR clone 81794 (TRAV17, TRAJ29)
CATDAFRKHTSCLLK

SEQ ID NO: 163588 - protein, 13 aa, Homo sapiens
  CDR3 for beta chain variable domain of TCR clone 81794 (TRBV5-7, TRBJ2-6)
CASTSSGANVLTF

SEQ ID NO: 163589 - protein, 13 aa, Homo sapiens
  CDR3 for alpha chain variable domain of TCR clone 81795 (TRAV13-2, TRAJ48)
CAEMDFGNEKLTF

SEQ ID NO: 163590 - protein, 14 aa, Homo sapiens
  CDR3 for beta chain variable domain of TCR clone 81795 (TRBV7-3, TRBJ1-1)
CASSLKGGNTEAFF

SEQ ID NO: 163591 - protein, 16 aa, Homo sapiens
  CDR3 for alpha chain variable domain of TCR clone 81796 (TRAV12-1, TRAJ4)
CLVNPGISGGYNKLIF

SEQ ID NO: 163592 - protein, 14 aa, Homo sapiens
  CDR3 for beta chain variable domain of TCR clone 81796 (TRBV5-7, TRBJ2-3)
CDSRTSGGTDTQYF

SEQ ID NO: 163593 - protein, 16 aa, Homo sapiens
  CDR3 for alpha chain variable domain of TCR clone 81797 (TRAV3, TRAJ37)
CAVRVRGSGNTGKLIF

SEQ ID NO: 163594 - protein, 13 aa, Homo sapiens
  CDR3 for beta chain variable domain of TCR clone 81797 (TRBV7-9, TRBJ1-2)
CASSLKQNYGYAF

SEQ ID NO: 163595 - protein, 11 aa, Homo sapiens
  CDR3 for alpha chain variable domain of TCR clone 81798 (TRAV21, TRAJ34)
CAVTNTDKLIF

SEQ ID NO: 163596 - protein, 16 aa, Homo sapiens
  CDR3 for beta chain variable domain of TCR clone 81798 (TRBV18, TRBJ1-1)
CASSPGVGGRGGEDFF

SEQ ID NO: 163597 - protein, 12 aa, Homo sapiens
  CDR3 for alpha chain variable domain of TCR clone 81799 (TRAV2, TRAJ9)
CAVGDGGFKTIF

SEQ ID NO: 163598 - protein, 16 aa, Homo sapiens
  CDR3 for beta chain variable domain of TCR clone 81799 (TRBV13, TRBJ2-2)
CASSPRTGEHTGELFF

SEQ ID NO: 163599 - protein, 12 aa, Homo sapiens
  CDR3 for alpha chain variable domain of TCR clone 81800 (TRAV1-1, TRAJ39)
CAVPVVGNMPTF

SEQ ID NO: 163600 - protein, 17 aa, Homo sapiens
  CDR3 for beta chain variable domain of TCR clone 81800 (TRBV28, TRBJ2-5)
CASSTPEGDALQETQYF

SEQ ID NO: 163601 - protein, 10 aa, Homo sapiens
  CDR3 for alpha chain variable domain of TCR clone 81801 (TRAV30, TRAJ48)
CGIGNEKLTF

SEQ ID NO: 163602 - protein, 15 aa, Homo sapiens
  CDR3 for beta chain variable domain of TCR clone 81801 (TRBV28, TRBJ2-1)
CASRKTGTAYNEQFF

SEQ ID NO: 163603 - protein, 16 aa, Homo sapiens
  CDR3 for alpha chain variable domain of TCR clone 81802 (TRAV3, TRAJ10)
CAVRDMRAGGGNKLTF

SEQ ID NO: 163604 - protein, 14 aa, Homo sapiens
  CDR3 for beta chain variable domain of TCR clone 81802 (TRBV4-1, TRBJ2-2)
RASSQAVNTGELFF

SEQ ID NO: 163605 - protein, 11 aa, Homo sapiens
  CDR3 for alpha chain variable domain of TCR clone 81803 (TRAV21, TRAJ34)
CAVTNTDKLIF

SEQ ID NO: 163606 - protein, 12 aa, Homo sapiens
  CDR3 for beta chain variable domain of TCR clone 81803 (TRBV14, TRBJ1-1)
CASSQLKGLAFF

SEQ ID NO: 163607 - protein, 14 aa, Homo sapiens
  CDR3 for alpha chain variable domain of TCR clone 81804 (TRAV17, TRAJ4)
CATAPLGGYNKLIF

SEQ ID NO: 163608 - protein, 13 aa, Homo sapiens
  CDR3 for beta chain variable domain of TCR clone 81804 (TRBV12-4, TRBJ1-3)
CACSLASGNTIYF

SEQ ID NO: 163609 - protein, 17 aa, Homo sapiens
  CDR3 for alpha chain variable domain of TCR clone 81805 (TRAV26-2, TRAJ42)
CILRDVGYGGSQGNLIF

SEQ ID NO: 163610 - protein, 12 aa, Homo sapiens
  CDR3 for beta chain variable domain of TCR clone 81805 (TRBV7-2, TRBJ1-6)
CASSLSSSPLHF

SEQ ID NO: 163611 - protein, 12 aa, Homo sapiens
  CDR3 for alpha chain variable domain of TCR clone 81806 (TRAV21, TRAJ33)
CAEMDSNYQLIW

SEQ ID NO: 163612 - protein, 13 aa, Homo sapiens
  CDR3 for beta chain variable domain of TCR clone 81806 (TRBV11-3, TRBJ2-5)
CASSVGSQETQYF

SEQ ID NO: 163613 - protein, 14 aa, Homo sapiens
  CDR3 for alpha chain variable domain of TCR clone 81807 (TRAV3, TRAJ34)
CAVRAPGNTDKLIF

SEQ ID NO: 163614 - protein, 14 aa, Homo sapiens
  CDR3 for beta chain variable domain of TCR clone 81807 (TRBV7-2, TRBJ2-7)
CASSPKTSFYEQYF

SEQ ID NO: 163615 - protein, 14 aa, Homo sapiens
  CDR3 for alpha chain variable domain of TCR clone 81808 (TRAV21, TRAJ23)
CAIMIYNQGGKLIF

SEQ ID NO: 163616 - protein, 18 aa, Homo sapiens
  CDR3 for beta chain variable domain of TCR clone 81808 (TRBV20-1, TRBJ2-6)
CSAETTPTHGYGANVLTF

SEQ ID NO: 163617 - protein, 12 aa, Homo sapiens
  CDR3 for alpha chain variable domain of TCR clone 81809 (TRAV21, TRAJ11)
CAVRGGNSTLTF

SEQ ID NO: 163618 - protein, 17 aa, Homo sapiens
  CDR3 for beta chain variable domain of TCR clone 81809 (TRBV13, TRBJ2-3)
CASSLSRVAGGRNTQYF

SEQ ID NO: 163619 - protein, 13 aa, Homo sapiens
  CDR3 for alpha chain variable domain of TCR clone 81810 (TRAV27, TRAJ57)
CGSAQGGSEKLVF

SEQ ID NO: 163620 - protein, 11 aa, Homo sapiens
  CDR3 for beta chain variable domain of TCR clone 81810 (TRBV11-2, TRBJ1-1)
CASSINTEAFF

SEQ ID NO: 163621 - protein, 12 aa, Homo sapiens
  CDR3 for alpha chain variable domain of TCR clone 81811 (TRAV21, TRAJ33)
CAKMDSNYQLIW

SEQ ID NO: 163622 - protein, 12 aa, Homo sapiens
  CDR3 for beta chain variable domain of TCR clone 81811 (TRBV12-4, TRBJ1-1)
CASSLVDTEAFF

SEQ ID NO: 163623 - protein, 12 aa, Homo sapiens
  CDR3 for alpha chain variable domain of TCR clone 81812 (TRAV6, TRAJ4)
NMFSGGCNKLIF

SEQ ID NO: 163624 - protein, 13 aa, Homo sapiens
  CDR3 for beta chain variable domain of TCR clone 81812 (TRBV4-1, TRBJ2-1)
CASSQEVQYEQFF

SEQ ID NO: 163625 - protein, 19 aa, Homo sapiens
  CDR3 for alpha chain variable domain of TCR clone 81813 (TRAV1-2, TRAJ26)
CLLPLCCERPDNYGQNFVF

SEQ ID NO: 163626 - protein, 17 aa, Homo sapiens
  CDR3 for beta chain variable domain of TCR clone 81813 (TRBV5-3, TRBJ1-5)
CARSPRRDRRCTQPQHF

SEQ ID NO: 163627 - protein, 14 aa, Homo sapiens
  CDR3 for alpha chain variable domain of TCR clone 81814 (TRAV21, TRAJ37)
CAVKGPSNTGKLIF

SEQ ID NO: 163628 - protein, 13 aa, Homo sapiens
  CDR3 for beta chain variable domain of TCR clone 81814 (TRBV7-2, TRBJ2-5)
CASSQTSVETQYF

SEQ ID NO: 163629 - protein, 14 aa, Homo sapiens
  CDR3 for alpha chain variable domain of TCR clone 81815 (TRAV26-1, TRAJ17)
CIVRVEAAGNKLTF

SEQ ID NO: 163630 - protein, 13 aa, Homo sapiens
  CDR3 for beta chain variable domain of TCR clone 81815 (TRBV19, TRBJ2-7)
CASSTSGSYEQYF

SEQ ID NO: 163631 - protein, 14 aa, Homo sapiens
  CDR3 for alpha chain variable domain of TCR clone 81816 (TRAV12-1, TRAJ17)
CVVNYKAAGNKLTF

SEQ ID NO: 163632 - protein, 17 aa, Homo sapiens
  CDR3 for beta chain variable domain of TCR clone 81816 (TRBV20-1, TRBJ2-1)
CSASSSGLAGLYNEQFF

SEQ ID NO: 163633 - protein, 17 aa, Homo sapiens
  CDR3 for alpha chain variable domain of TCR clone 81817 (TRAV29/DV5, TRAJ40)
CAASVIYTTSGTYKYIS

SEQ ID NO: 163634 - protein, 13 aa, Homo sapiens
  CDR3 for beta chain variable domain of TCR clone 81817 (TRBV6-1, TRBJ2-1)
CASSHDRNNEQFF

SEQ ID NO: 163635 - protein, 14 aa, Homo sapiens
  CDR3 for alpha chain variable domain of TCR clone 81818 (TRAV8-4, TRAJ17)
RAVSEGAAGNKLTF

SEQ ID NO: 163636 - protein, 13 aa, Homo sapiens
  CDR3 for beta chain variable domain of TCR clone 81818 (TRBV19, TRBJ2-1)
CASSMYRVNEQFF

SEQ ID NO: 163637 - protein, 13 aa, Homo sapiens
  CDR3 for alpha chain variable domain of TCR clone 81819 (TRAV8-1, TRAJ23)
CAWRDNQGGKLIF

SEQ ID NO: 163638 - protein, 14 aa, Homo sapiens
  CDR3 for beta chain variable domain of TCR clone 81819 (TRBV12-5, TRBJ2-5)
CASGSRTHQETQYF

SEQ ID NO: 163639 - protein, 14 aa, Homo sapiens
  CDR3 for alpha chain variable domain of TCR clone 81820 (TRAV20, TRAJ40)
CAVQAVPGTYKYIF

SEQ ID NO: 163640 - protein, 11 aa, Homo sapiens
  CDR3 for beta chain variable domain of TCR clone 81820 (TRBV12-4, TRBJ2-3)
CASTATDTQYF

SEQ ID NO: 163641 - protein, 15 aa, Homo sapiens
  CDR3 for alpha chain variable domain of TCR clone 81821 (TRAV26-1, TRAJ29)
CIVRVEGSGNTPLVF

SEQ ID NO: 163642 - protein, 15 aa, Homo sapiens
  CDR3 for beta chain variable domain of TCR clone 81821 (TRBV7-9, TRBJ1-5)
CASSQGHQANQPQHF

SEQ ID NO: 163643 - protein, 18 aa, Homo sapiens
  CDR3 for alpha chain variable domain of TCR clone 81822 (TRAV13-1, TRAJ52)
CAANNPNAGGTSYGKLTF

SEQ ID NO: 163644 - protein, 15 aa, Homo sapiens
  CDR3 for beta chain variable domain of TCR clone 81822 (TRBV6-1, TRBJ2-3)
CASSERGGITDTQYF

SEQ ID NO: 163645 - protein, 16 aa, Homo sapiens
  CDR3 for alpha chain variable domain of TCR clone 81823 (TRAV12-3, TRAJ58)
CAMTDTEETSGSRLTF

SEQ ID NO: 163646 - protein, 22 aa, Homo sapiens
  CDR3 for beta chain variable domain of TCR clone 81823 (TRBV23-1, TRBJ2-7)
GASSRRLDSGQGYVGGGYEQYF

SEQ ID NO: 163647 - protein, 12 aa, Homo sapiens
  CDR3 for alpha chain variable domain of TCR clone 81824 (TRAV13-1, TRAJ21)
CAAKEGYNKFYF

SEQ ID NO: 163648 - protein, 14 aa, Homo sapiens
  CDR3 for beta chain variable domain of TCR clone 81824 (TRBV5-4, TRBJ1-1)
CASSLDSRRDEAFF

SEQ ID NO: 163649 - protein, 14 aa, Homo sapiens
  CDR3 for alpha chain variable domain of TCR clone 81825 (TRAV13-2, TRAJ10)
CAETFTGGGNNLTF

SEQ ID NO: 163650 - protein, 16 aa, Homo sapiens
  CDR3 for beta chain variable domain of TCR clone 81825 (TRBV18, TRBJ2-7)
CASSPRSQGISYEQYF

SEQ ID NO: 163651 - protein, 12 aa, Homo sapiens
  CDR3 for alpha chain variable domain of TCR clone 81826 (TRAV13-1, TRAJ49)
CAASPMGHQFYF

SEQ ID NO: 163652 - protein, 13 aa, Homo sapiens
  CDR3 for beta chain variable domain of TCR clone 81826 (TRBV20-1, TRBJ2-2)
CSASAAGTGELFF

SEQ ID NO: 163653 - protein, 16 aa, Homo sapiens
  CDR3 for alpha chain variable domain of TCR clone 81827 (TRAV3, TRAJ10)
CAVRDMRAGGGNKLTF

SEQ ID NO: 163654 - protein, 13 aa, Homo sapiens
  CDR3 for beta chain variable domain of TCR clone 81827 (TRBV27, TRBJ1-1)
CASSLSIGAEAFF

SEQ ID NO: 163655 - protein, 14 aa, Homo sapiens
  CDR3 for alpha chain variable domain of TCR clone 81828 (TRAV13-1, TRAJ44)
CAAKATGTASKLTF

SEQ ID NO: 163656 - protein, 16 aa, Homo sapiens
  CDR3 for beta chain variable domain of TCR clone 81828 (TRBV15, TRBJ1-2)
CATSRGPRTGGGGYTL

SEQ ID NO: 163657 - protein, 16 aa, Homo sapiens
  CDR3 for alpha chain variable domain of TCR clone 81829 (TRAV23/DV6, TRAJ9)
CAASIGGSTGGFKTIF

SEQ ID NO: 163658 - protein, 13 aa, Homo sapiens
  CDR3 for beta chain variable domain of TCR clone 81829 (TRBV12-4, TRBJ1-1)
CVSSPGTGFEAFF

SEQ ID NO: 163659 - protein, 15 aa, Homo sapiens
  CDR3 for alpha chain variable domain of TCR clone 81830 (TRAV29/DV5, TRAJ29)
CAASERSSGNTPRVF

SEQ ID NO: 163660 - protein, 17 aa, Homo sapiens
  CDR3 for beta chain variable domain of TCR clone 81830 (TRBV4-1, TRBJ1-4)
CASSQEGPRGVEEKLFF

SEQ ID NO: 163661 - protein, 14 aa, Homo sapiens
  CDR3 for alpha chain variable domain of TCR clone 81831 (TRAV30, TRAJ39)
CGTEKVNAGNMLTF

SEQ ID NO: 163662 - protein, 13 aa, Homo sapiens
  CDR3 for beta chain variable domain of TCR clone 81831 (TRBV19, TRBJ1-2)
CASSQGQVYGYTF

SEQ ID NO: 163663 - protein, 12 aa, Homo sapiens
  CDR3 for alpha chain variable domain of TCR clone 81832 (TRAV2, TRAJ9)
SAVGAGGFKTIF

SEQ ID NO: 163664 - protein, 16 aa, Homo sapiens
  CDR3 for beta chain variable domain of TCR clone 81832 (TRBV13, TRBJ2-2)
CASSPRTGEHTGELFF

SEQ ID NO: 163665 - protein, 14 aa, Homo sapiens
  CDR3 for alpha chain variable domain of TCR clone 81833 (TRAV8-3, TRAJ4)
CAVVASGGYNKLIF

SEQ ID NO: 163666 - protein, 16 aa, Homo sapiens
  CDR3 for beta chain variable domain of TCR clone 81833 (TRBV4-3, TRBJ2-2)
CASSHLQGSGTGELFF

SEQ ID NO: 163667 - protein, 15 aa, Homo sapiens
  CDR3 for alpha chain variable domain of TCR clone 81834 (TRAV26-1, TRAJ42)
CIFRVKGGSQGNLIF

SEQ ID NO: 163668 - protein, 14 aa, Homo sapiens
  CDR3 for beta chain variable domain of TCR clone 81834 (TRBV19, TRBJ2-2)
CATTGHANTGELFF

SEQ ID NO: 163669 - protein, 16 aa, Homo sapiens
  CDR3 for alpha chain variable domain of TCR clone 81835 (TRAV3, TRAJ5)
CAVRNLMDTGRRALTF

SEQ ID NO: 163670 - protein, 13 aa, Homo sapiens
  CDR3 for beta chain variable domain of TCR clone 81835 (TRBV19, TRBJ1-2)
CASSVPGQDGYTF

SEQ ID NO: 163671 - protein, 14 aa, Homo sapiens
  CDR3 for alpha chain variable domain of TCR clone 81836 (TRAV17, TRAJ31)
CATGLRNNNARLMF

SEQ ID NO: 163672 - protein, 14 aa, Homo sapiens
  CDR3 for beta chain variable domain of TCR clone 81836 (TRBV12-4, TRBJ2-5)
CASSLWQKQETQYF

SEQ ID NO: 163673 - protein, 12 aa, Homo sapiens
  CDR3 for alpha chain variable domain of TCR clone 81837 (TRAV21, TRAJ11)
CAATSGYSTLTF

SEQ ID NO: 163674 - protein, 14 aa, Homo sapiens
  CDR3 for beta chain variable domain of TCR clone 81837 (TRBV20-1, TRBJ2-7)
CSARELAGVGEQYF

SEQ ID NO: 163675 - protein, 11 aa, Homo sapiens
  CDR3 for alpha chain variable domain of TCR clone 81838 (TRAV13-2, TRAJ23)
CAESPRGKLIF

SEQ ID NO: 163676 - protein, 14 aa, Homo sapiens
  CDR3 for beta chain variable domain of TCR clone 81838 (TRBV7-9, TRBJ2-5)
CASSLAPDQETQYF

SEQ ID NO: 163677 - protein, 11 aa, Homo sapiens
  CDR3 for alpha chain variable domain of TCR clone 81839 (TRAV21, TRAJ11)
CAVNGYSTLTF

SEQ ID NO: 163678 - protein, 16 aa, Homo sapiens
  CDR3 for beta chain variable domain of TCR clone 81839 (TRBV4-3, TRBJ2-2)
CASSHPQGSGTGELFF

SEQ ID NO: 163679 - protein, 15 aa, Homo sapiens
  CDR3 for alpha chain variable domain of TCR clone 81840 (TRAV25, TRAJ52)
CAGRPGGTSYGKLTF

SEQ ID NO: 163680 - protein, 17 aa, Homo sapiens
  CDR3 for beta chain variable domain of TCR clone 81840 (TRBV7-8, TRBJ2-6)
CASSAGTGGAGANDLSF

SEQ ID NO: 163681 - protein, 18 aa, Homo sapiens
  CDR3 for alpha chain variable domain of TCR clone 81841 (TRAV9-2, TRAJ52)
CALSRHNAGGTSYGKLTF

SEQ ID NO: 163682 - protein, 15 aa, Homo sapiens
  CDR3 for beta chain variable domain of TCR clone 81841 (TRBV7-2, TRBJ2-6)
CACSSGHSGANVLTF

SEQ ID NO: 163683 - protein, 13 aa, Homo sapiens
  CDR3 for alpha chain variable domain of TCR clone 81842 (TRAV8-4, TRAJ31)
CAVSDSGNARLMF

SEQ ID NO: 163684 - protein, 16 aa, Homo sapiens
  CDR3 for beta chain variable domain of TCR clone 81842 (TRBV4-1, TRBJ2-5)
CASSHYPPGTEETQYF

SEQ ID NO: 163685 - protein, 12 aa, Homo sapiens
  CDR3 for alpha chain variable domain of TCR clone 81843 (TRAV21, TRAJ49)
CAVRNTGNQFYF

SEQ ID NO: 163686 - protein, 13 aa, Homo sapiens
  CDR3 for beta chain variable domain of TCR clone 81843 (TRBV7-9, TRBJ1-2)
CASSLKQNYGYTF

SEQ ID NO: 163687 - protein, 13 aa, Homo sapiens
  CDR3 for alpha chain variable domain of TCR clone 81844 (TRAV36/DV7, TRAJ37)
CAVFSSNTGKLIF

SEQ ID NO: 163688 - protein, 15 aa, Homo sapiens
  CDR3 for beta chain variable domain of TCR clone 81844 (TRBV28, TRBJ2-1)
CASSIIAGGRSEQFF

SEQ ID NO: 163689 - protein, 10 aa, Homo sapiens
  CDR3 for alpha chain variable domain of TCR clone 81845 (TRAV1-2, TRAJ23)
CAGQGGKLIF

SEQ ID NO: 163690 - protein, 16 aa, Homo sapiens
  CDR3 for beta chain variable domain of TCR clone 81845 (TRBV11-2, TRBJ1-1)
CASSLRRGGEHSKAFF

SEQ ID NO: 163691 - protein, 13 aa, Homo sapiens
  CDR3 for alpha chain variable domain of TCR clone 81846 (TRAV30, TRAJ49)
CGTESQPVTSSIL

SEQ ID NO: 163692 - protein, 11 aa, Homo sapiens
  CDR3 for beta chain variable domain of TCR clone 81846 (TRBV7-8, TRBJ2-7)
CASSLSLEQYF

SEQ ID NO: 163693 - protein, 15 aa, Homo sapiens
  CDR3 for alpha chain variable domain of TCR clone 81847 (TRAV3, TRAJ3)
CAVRDGHSSASKIIF

SEQ ID NO: 163694 - protein, 15 aa, Homo sapiens
  CDR3 for beta chain variable domain of TCR clone 81847 (TRBV20-1, TRBJ2-7)
CSARDRVSGMDEQYF

SEQ ID NO: 163695 - protein, 15 aa, Homo sapiens
  CDR3 for alpha chain variable domain of TCR clone 81848 (TRAV3, TRAJ5)
CAVRDRKTVRRALTF

SEQ ID NO: 163696 - protein, 15 aa, Homo sapiens
  CDR3 for beta chain variable domain of TCR clone 81848 (TRBV7-8, TRBJ2-1)
CASSLADSLYNEQFF

SEQ ID NO: 163697 - protein, 13 aa, Homo sapiens
  CDR3 for alpha chain variable domain of TCR clone 81849 (TRAV12-1, TRAJ6)
CVVFPGGSYIPTF

SEQ ID NO: 163698 - protein, 14 aa, Homo sapiens
  CDR3 for beta chain variable domain of TCR clone 81849 (TRBV20-1, TRBJ1-3)
CGASPTGAGNTIYF

SEQ ID NO: 163699 - protein, 12 aa, Homo sapiens
  CDR3 for alpha chain variable domain of TCR clone 81850 (TRAV3, TRAJ20)
CAVRDPDYKLSF

SEQ ID NO: 163700 - protein, 15 aa, Homo sapiens
  CDR3 for beta chain variable domain of TCR clone 81850 (TRBV2, TRBJ2-2)
CASSRGTVGTGELFF

SEQ ID NO: 163701 - protein, 12 aa, Homo sapiens
  CDR3 for alpha chain variable domain of TCR clone 81851 (TRAV12-1, TRAJ23)
CVVNSCGGKLIF

SEQ ID NO: 163702 - protein, 15 aa, Homo sapiens
  CDR3 for beta chain variable domain of TCR clone 81851 (TRBV19, TRBJ1-6)
CASSTQGAVGSPLHF

SEQ ID NO: 163703 - protein, 14 aa, Homo sapiens
  CDR3 for alpha chain variable domain of TCR clone 81852 (TRAV1-2, TRAJ16)
CAANRFSDGQKLLF

SEQ ID NO: 163704 - protein, 13 aa, Homo sapiens
  CDR3 for beta chain variable domain of TCR clone 81852 (TRBV7-3, TRBJ1-1)
CASSQDWGAEAFF

SEQ ID NO: 163705 - protein, 17 aa, Homo sapiens
  CDR3 for alpha chain variable domain of TCR clone 81853 (TRAV4, TRAJ13)
CLVGVQGSSGGYQKVTF

SEQ ID NO: 163706 - protein, 18 aa, Homo sapiens
  CDR3 for beta chain variable domain of TCR clone 81853 (TRBV15, TRBJ2-3)
CATSRDGARSWDTDTQCF

SEQ ID NO: 163707 - protein, 14 aa, Homo sapiens
  CDR3 for alpha chain variable domain of TCR clone 81854 (TRAV8-3, TRAJ4)
CAVGAPGGYNKLIF

SEQ ID NO: 163708 - protein, 15 aa, Homo sapiens
  CDR3 for beta chain variable domain of TCR clone 81854 (TRBV6-5, TRBJ2-1)
CASSYDAGAGNEQFF

SEQ ID NO: 163709 - protein, 12 aa, Homo sapiens
  CDR3 for alpha chain variable domain of TCR clone 81855 (TRAV27, TRAJ13)
CAGAGGYQKVTF

SEQ ID NO: 163710 - protein, 16 aa, Homo sapiens
  CDR3 for beta chain variable domain of TCR clone 81855 (TRBV7-3, TRBJ2-2)
CASSLKRGTLSGELFF

SEQ ID NO: 163711 - protein, 14 aa, Homo sapiens
  CDR3 for alpha chain variable domain of TCR clone 81856 (TRAV13-2, TRAJ17)
CAENGKAAGNKLTF

SEQ ID NO: 163712 - protein, 13 aa, Homo sapiens
  CDR3 for beta chain variable domain of TCR clone 81856 (TRBV7-3, TRBJ1-2)
CASSLKRGYGYTF

SEQ ID NO: 163713 - protein, 14 aa, Homo sapiens
  CDR3 for alpha chain variable domain of TCR clone 81857 (TRAV35, TRAJ13)
CAGSPSGGYQKVTF

SEQ ID NO: 163714 - protein, 16 aa, Homo sapiens
  CDR3 for beta chain variable domain of TCR clone 81857 (TRBV7-6, TRBJ2-5)
CQQPRTSGSLGETQYF

SEQ ID NO: 163715 - protein, 14 aa, Homo sapiens
  CDR3 for alpha chain variable domain of TCR clone 81858 (TRAV1-2, TRAJ8)
CAVRGDTGFQKLVF

SEQ ID NO: 163716 - protein, 12 aa, Homo sapiens
  CDR3 for beta chain variable domain of TCR clone 81858 (TRBV2, TRBJ2-1)
CAYGPPGNEQFF

SEQ ID NO: 163717 - protein, 15 aa, Homo sapiens
  CDR3 for alpha chain variable domain of TCR clone 81859 (TRAV35, TRAJ23)
CAGHLGNNQGGKLIF

SEQ ID NO: 163718 - protein, 14 aa, Homo sapiens
  CDR3 for beta chain variable domain of TCR clone 81859 (TRBV7-9, TRBJ1-1)
CASTPLQSYTEAFF

SEQ ID NO: 163719 - protein, 13 aa, Homo sapiens
  CDR3 for alpha chain variable domain of TCR clone 81860 (TRAV2, TRAJ24)
CAVTTDSWGKLQF

SEQ ID NO: 163720 - protein, 14 aa, Homo sapiens
  CDR3 for beta chain variable domain of TCR clone 81860 (TRBV13, TRBJ2-5)
CASSLGRGQETPYF

SEQ ID NO: 163721 - protein, 12 aa, Homo sapiens
  CDR3 for alpha chain variable domain of TCR clone 81861 (TRAV20, TRAJ56)
CAVTGANSKLTF

SEQ ID NO: 163722 - protein, 13 aa, Homo sapiens
  CDR3 for beta chain variable domain of TCR clone 81861 (TRBV2, TRBJ1-1)
CASSVLMNTEAFF

SEQ ID NO: 163723 - protein, 16 aa, Homo sapiens
  CDR3 for alpha chain variable domain of TCR clone 81862 (TRAV1-2, TRAJ10)
CAVRGVLTGGGNKLTF

SEQ ID NO: 163724 - protein, 14 aa, Homo sapiens
  CDR3 for beta chain variable domain of TCR clone 81862 (TRBV11-2, TRBJ2-5)
CASSRTGGIETQYF

SEQ ID NO: 163725 - protein, 11 aa, Homo sapiens
  CDR3 for alpha chain variable domain of TCR clone 81863 (TRAV16, TRAJ31)
CALFNNARLMF

SEQ ID NO: 163726 - protein, 15 aa, Homo sapiens
  CDR3 for beta chain variable domain of TCR clone 81863 (TRBV7-2, TRBJ1-2)
CASSPRAGWNYGYTF

SEQ ID NO: 163727 - protein, 14 aa, Homo sapiens
  CDR3 for alpha chain variable domain of TCR clone 81864 (TRAV12-3, TRAJ21)
CAATDLYNFNKFYF

SEQ ID NO: 163728 - protein, 14 aa, Homo sapiens
  CDR3 for beta chain variable domain of TCR clone 81864 (TRBV7-2, TRBJ2-7)
CASRSQGAAYEQYF

SEQ ID NO: 163729 - protein, 14 aa, Homo sapiens
  CDR3 for alpha chain variable domain of TCR clone 81865 (TRAV8-6, TRAJ40)
CAVSVSSGTYKYIF

SEQ ID NO: 163730 - protein, 13 aa, Homo sapiens
  CDR3 for beta chain variable domain of TCR clone 81865 (TRBV7-8, TRBJ2-7)
CASSLTGGREQYF

SEQ ID NO: 163731 - protein, 12 aa, Homo sapiens
  CDR3 for alpha chain variable domain of TCR clone 81866 (TRAV12-3, TRAJ17)
CAMTLTGNKLTF

SEQ ID NO: 163732 - protein, 13 aa, Homo sapiens
  CDR3 for beta chain variable domain of TCR clone 81866 (TRBV19, TRBJ2-5)
CASSETAPETQYF

SEQ ID NO: 163733 - protein, 14 aa, Homo sapiens
  CDR3 for alpha chain variable domain of TCR clone 81867 (TRAV12-2, TRAJ17)
CAVLFKAAGNKLTF

SEQ ID NO: 163734 - protein, 14 aa, Homo sapiens
  CDR3 for beta chain variable domain of TCR clone 81867 (TRBV12-5, TRBJ2-5)
CASGSRTHRETQYF

SEQ ID NO: 163735 - protein, 14 aa, Homo sapiens
  CDR3 for alpha chain variable domain of TCR clone 81868 (TRAV35, TRAJ13)
CAGSPSGGYQKVTF

SEQ ID NO: 163736 - protein, 16 aa, Homo sapiens
  CDR3 for beta chain variable domain of TCR clone 81868 (TRBV2, TRBJ2-1)
CASSVGGSLSYNEQFF

SEQ ID NO: 163737 - protein, 10 aa, Homo sapiens
  CDR3 for alpha chain variable domain of TCR clone 81869 (TRAV12-3, TRAJ43)
CNERLNDMRF

SEQ ID NO: 163738 - protein, 13 aa, Homo sapiens
  CDR3 for beta chain variable domain of TCR clone 81869 (TRBV20-1, TRBJ1-1)
CSAPLGGGTEAFF

SEQ ID NO: 163739 - protein, 12 aa, Homo sapiens
  CDR3 for alpha chain variable domain of TCR clone 81870 (TRAV16, TRAJ49)
CSLNEGGNQFYF

SEQ ID NO: 163740 - protein, 14 aa, Homo sapiens
  CDR3 for beta chain variable domain of TCR clone 81870 (TRBV7-9, TRBJ2-1)
CASRPTGLRNEQFF

SEQ ID NO: 163741 - protein, 15 aa, Homo sapiens
  CDR3 for alpha chain variable domain of TCR clone 81871 (TRAV26-2, TRAJ57)
CILRDIRGGSKKLVF

SEQ ID NO: 163742 - protein, 15 aa, Homo sapiens
  CDR3 for beta chain variable domain of TCR clone 81871 (TRBV2, TRBJ2-1)
CASDIGQAGEGEQFF

SEQ ID NO: 163743 - protein, 14 aa, Homo sapiens
  CDR3 for alpha chain variable domain of TCR clone 81872 (TRAV12-3, TRAJ10)
SHLPLTGGGNKLTF

SEQ ID NO: 163744 - protein, 15 aa, Homo sapiens
  CDR3 for beta chain variable domain of TCR clone 81872 (TRBV6-6, TRBJ1-5)
CASSSIQVTNQPQHF

SEQ ID NO: 163745 - protein, 13 aa, Homo sapiens
  CDR3 for alpha chain variable domain of TCR clone 81873 (TRAV35, TRAJ43)
CAGYPYNNNDMRF

SEQ ID NO: 163746 - protein, 15 aa, Homo sapiens
  CDR3 for beta chain variable domain of TCR clone 81873 (TRBV25-1, TRBJ1-4)
CASSKRIATNEKMFF

SEQ ID NO: 163747 - protein, 10 aa, Homo sapiens
  CDR3 for alpha chain variable domain of TCR clone 81874 (TRAV38-2/DV8, TRAJ40)
CASGTNKYIF

SEQ ID NO: 163748 - protein, 14 aa, Homo sapiens
  CDR3 for beta chain variable domain of TCR clone 81874 (TRBV7-9, TRBJ2-1)
CASSPRDSLYEQFF

SEQ ID NO: 163749 - protein, 17 aa, Homo sapiens
  CDR3 for alpha chain variable domain of TCR clone 81875 (TRAV3, TRAJ6)
CAVRDGPRPGGSYIPTF

SEQ ID NO: 163750 - protein, 20 aa, Homo sapiens
  CDR3 for beta chain variable domain of TCR clone 81875 (TRBV28, TRBJ2-1)
CASTPIGRSPGLAGGNEQFF

SEQ ID NO: 163751 - protein, 13 aa, Homo sapiens
  CDR3 for alpha chain variable domain of TCR clone 81876 (TRAV16, TRAJ20)
CALSEGFKAALEP

SEQ ID NO: 163752 - protein, 13 aa, Homo sapiens
  CDR3 for beta chain variable domain of TCR clone 81876 (TRBV7-3, TRBJ2-1)
CASSLDSYNEQFF

SEQ ID NO: 163753 - protein, 13 aa, Homo sapiens
  CDR3 for alpha chain variable domain of TCR clone 81877 (TRAV29/DV5, TRAJ40)
CAASEAGTYKYIS

SEQ ID NO: 163754 - protein, 18 aa, Homo sapiens
  CDR3 for beta chain variable domain of TCR clone 81877 (TRBV14, TRBJ2-1)
CASSQEYGGAYLRGEQFF

SEQ ID NO: 163755 - protein, 12 aa, Homo sapiens
  CDR3 for alpha chain variable domain of TCR clone 81878 (TRAV13-1, TRAJ49)
CAASIISNQFYF

SEQ ID NO: 163756 - protein, 14 aa, Homo sapiens
  CDR3 for beta chain variable domain of TCR clone 81878 (TRBV7-2, TRBJ2-1)
CASSPGLAGNEQFF

SEQ ID NO: 163757 - protein, 16 aa, Homo sapiens
  CDR3 for alpha chain variable domain of TCR clone 81879 (TRAV30, TRAJ24)
CGTEIVDADSWGKFQF

SEQ ID NO: 163758 - protein, 14 aa, Homo sapiens
  CDR3 for beta chain variable domain of TCR clone 81879 (TRBV7-9, TRBJ1-2)
CASSFPLREYGYTF

SEQ ID NO: 163759 - protein, 18 aa, Homo sapiens
  CDR3 for alpha chain variable domain of TCR clone 81880 (TRAV29/DV5, TRAJ52)
CAEGFRGAGGTSYGKLTF

SEQ ID NO: 163760 - protein, 16 aa, Homo sapiens
  CDR3 for beta chain variable domain of TCR clone 81880 (TRBV7-3, TRBJ2-2)
CASSLKRGTLSGELFF

SEQ ID NO: 163761 - protein, 12 aa, Homo sapiens
  CDR3 for alpha chain variable domain of TCR clone 81881 (TRAV30, TRAJ43)
CGTEERGNDMRF

SEQ ID NO: 163762 - protein, 15 aa, Homo sapiens
  CDR3 for beta chain variable domain of TCR clone 81881 (TRBV10-2, TRBJ2-6)
CASSEQGTGANVLNF

SEQ ID NO: 163763 - protein, 15 aa, Homo sapiens
  CDR3 for alpha chain variable domain of TCR clone 81882 (TRAV3, TRAJ13)
CAVRVYSGGYQKVTF

SEQ ID NO: 163764 - protein, 15 aa, Homo sapiens
  CDR3 for beta chain variable domain of TCR clone 81882 (TRBV7-2, TRBJ2-1)
CASSSGLSGGNEQFF

SEQ ID NO: 163765 - protein, 14 aa, Homo sapiens
  CDR3 for alpha chain variable domain of TCR clone 81883 (TRAV1-2, TRAJ16)
CAVNRFSDGQQLLF

SEQ ID NO: 163766 - protein, 13 aa, Homo sapiens
  CDR3 for beta chain variable domain of TCR clone 81883 (TRBV19, TRBJ1-2)
CASSVPGQDGYTF

SEQ ID NO: 163767 - protein, 19 aa, Homo sapiens
  CDR3 for alpha chain variable domain of TCR clone 81884 (TRAV4, TRAJ41)
PRVSLSDTAVYYWGYALNF

SEQ ID NO: 163768 - protein, 14 aa, Homo sapiens
  CDR3 for beta chain variable domain of TCR clone 81884 (TRBV19, TRBJ2-1)
CASPTFVLSGEQFF

SEQ ID NO: 163769 - protein, 12 aa, Homo sapiens
  CDR3 for alpha chain variable domain of TCR clone 81885 (TRAV1-1, TRAJ9)
CAVDTGGFKTIF

SEQ ID NO: 163770 - protein, 13 aa, Homo sapiens
  CDR3 for beta chain variable domain of TCR clone 81885 (TRBV4-1, TRBJ1-1)
CASSRKMNTEAFF

SEQ ID NO: 163771 - protein, 14 aa, Homo sapiens
  CDR3 for alpha chain variable domain of TCR clone 81886 (TRAV1-2, TRAJ16)
CAVNRFSDGQKLLF

SEQ ID NO: 163772 - protein, 16 aa, Homo sapiens
  CDR3 for beta chain variable domain of TCR clone 81886 (TRBV20-1, TRBJ1-4)
YSAPGQGLLTNEKLFF

SEQ ID NO: 163773 - protein, 14 aa, Homo sapiens
  CDR3 for alpha chain variable domain of TCR clone 81887 (TRAV1-2, TRAJ16)
WAVNRFSDGQKLLF

SEQ ID NO: 163774 - protein, 15 aa, Homo sapiens
  CDR3 for beta chain variable domain of TCR clone 81887 (TRBV7-9, TRBJ1-6)
CASSSPGRGNSPLHF

SEQ ID NO: 163775 - protein, 12 aa, Homo sapiens
  CDR3 for alpha chain variable domain of TCR clone 81888 (TRAV25, TRAJ11)
CAGASGYRTLTF

SEQ ID NO: 163776 - protein, 14 aa, Homo sapiens
  CDR3 for beta chain variable domain of TCR clone 81888 (TRBV5-8, TRBJ2-3)
CASSLGQGTDTQYF

SEQ ID NO: 163777 - protein, 15 aa, Homo sapiens
  CDR3 for alpha chain variable domain of TCR clone 81889 (TRAV25, TRAJ10)
CAGPLLTGGGNKLTF

SEQ ID NO: 163778 - protein, 15 aa, Homo sapiens
  CDR3 for beta chain variable domain of TCR clone 81889 (TRBV12-5, TRBJ2-2)
CASGRLGGNTVELFF

SEQ ID NO: 163779 - protein, 13 aa, Homo sapiens
  CDR3 for alpha chain variable domain of TCR clone 81890 (TRAV29/DV5, TRAJ31)
CAASRNKNARLMF

SEQ ID NO: 163780 - protein, 12 aa, Homo sapiens
  CDR3 for beta chain variable domain of TCR clone 81890 (TRBV14, TRBJ2-5)
CASSQLKETQYF

SEQ ID NO: 163781 - protein, 13 aa, Homo sapiens
  CDR3 for alpha chain variable domain of TCR clone 81891 (TRAV1-1, TRAJ13)
RAVNSGGYRKVTF

SEQ ID NO: 163782 - protein, 12 aa, Homo sapiens
  CDR3 for beta chain variable domain of TCR clone 81891 (TRBV28, TRBJ2-1)
CASSVQINEQFF

SEQ ID NO: 163783 - protein, 14 aa, Homo sapiens
  CDR3 for alpha chain variable domain of TCR clone 81892 (TRAV26-1, TRAJ21)
CIVRPPYNFNKFYF

SEQ ID NO: 163784 - protein, 13 aa, Homo sapiens
  CDR3 for beta chain variable domain of TCR clone 81892 (TRBV7-3, TRBJ2-1)
CASSLDSYNEQFF

SEQ ID NO: 163785 - protein, 14 aa, Homo sapiens
  CDR3 for alpha chain variable domain of TCR clone 81893 (TRAV12-1, TRAJ3)
CVVILYSSASKIIF

SEQ ID NO: 163786 - protein, 14 aa, Homo sapiens
  CDR3 for beta chain variable domain of TCR clone 81893 (TRBV7-2, TRBJ1-1)
CASSFLTGATEAFF

SEQ ID NO: 163787 - protein, 12 aa, Homo sapiens
  CDR3 for alpha chain variable domain of TCR clone 81894 (TRAV21, TRAJ11)
CAAISGYSTLTF

SEQ ID NO: 163788 - protein, 14 aa, Homo sapiens
  CDR3 for beta chain variable domain of TCR clone 81894 (TRBV20-1, TRBJ2-7)
CSAPELAGVGEQYF

SEQ ID NO: 163789 - protein, 13 aa, Homo sapiens
  CDR3 for alpha chain variable domain of TCR clone 81895 (TRAV20, TRAJ37)
CAGCSSHTGKLIF

SEQ ID NO: 163790 - protein, 11 aa, Homo sapiens
  CDR3 for beta chain variable domain of TCR clone 81895 (TRBV12-4, TRBJ2-3)
CASTATDTQYF

SEQ ID NO: 163791 - protein, 17 aa, Homo sapiens
  CDR3 for alpha chain variable domain of TCR clone 81896 (TRAV3, TRAJ6)
CAVRDGPRAGGSYIPTF

SEQ ID NO: 163792 - protein, 16 aa, Homo sapiens
  CDR3 for beta chain variable domain of TCR clone 81896 (TRBV7-9, TRBJ2-1)
CASSDVAGGSYNEQFF

SEQ ID NO: 163793 - protein, 17 aa, Homo sapiens
  CDR3 for alpha chain variable domain of TCR clone 81897 (TRAV3, TRAJ6)
CAVRDGPRAGGSYIPTF

SEQ ID NO: 163794 - protein, 13 aa, Homo sapiens
  CDR3 for beta chain variable domain of TCR clone 81897 (TRBV7-6, TRBJ1-2)
CASSLVADYGYTF

SEQ ID NO: 163795 - protein, 12 aa, Homo sapiens
  CDR3 for alpha chain variable domain of TCR clone 81898 (TRAV13-1, TRAJ27)
CAAHTNAGKSTF

SEQ ID NO: 163796 - protein, 14 aa, Homo sapiens
  CDR3 for beta chain variable domain of TCR clone 81898 (TRBV19, TRBJ2-2)
CASSGQGIAGELFC

SEQ ID NO: 163797 - protein, 18 aa, Homo sapiens
  CDR3 for alpha chain variable domain of TCR clone 81899 (TRAV21, TRAJ52)
CAVRPSPAGGTSYGKLTF

SEQ ID NO: 163798 - protein, 13 aa, Homo sapiens
  CDR3 for beta chain variable domain of TCR clone 81899 (TRBV2, TRBJ1-5)
YATAGPGNQPQHF

SEQ ID NO: 163799 - protein, 11 aa, Homo sapiens
  CDR3 for alpha chain variable domain of TCR clone 81900 (TRAV12-1, TRAJ33)
CVVNMNYQLIW

SEQ ID NO: 163800 - protein, 11 aa, Homo sapiens
  CDR3 for beta chain variable domain of TCR clone 81900 (TRBV10-1, TRBJ2-3)
CASSDSDTRYF

SEQ ID NO: 163801 - protein, 15 aa, Homo sapiens
  CDR3 for alpha chain variable domain of TCR clone 81901 (TRAV26-1, TRAJ28)
CIVRVAGAGSYQLTF

SEQ ID NO: 163802 - protein, 19 aa, Homo sapiens
  CDR3 for beta chain variable domain of TCR clone 81901 (TRBV7-3, TRBJ2-7)
CARSLTGVAGGWPSYEQYF

SEQ ID NO: 163803 - protein, 15 aa, Homo sapiens
  CDR3 for alpha chain variable domain of TCR clone 81902 (TRAV8-4, TRAJ7)
CAVSGGNYGKNRLAF

SEQ ID NO: 163804 - protein, 11 aa, Homo sapiens
  CDR3 for beta chain variable domain of TCR clone 81902 (TRBV20-1, TRBJ2-1)
CSLSSGSEQFF

SEQ ID NO: 163805 - protein, 12 aa, Homo sapiens
  CDR3 for alpha chain variable domain of TCR clone 81903 (TRAV12-1, TRAJ40)
WVFYSGTYKYIF

SEQ ID NO: 163806 - protein, 18 aa, Homo sapiens
  CDR3 for beta chain variable domain of TCR clone 81903 (TRBV12-4, TRBJ2-2)
CASSLVAGTRGRTGELFF

SEQ ID NO: 163807 - protein, 14 aa, Homo sapiens
  CDR3 for alpha chain variable domain of TCR clone 81904 (TRAV3, TRAJ7)
CAVREEEREQQTRF

SEQ ID NO: 163808 - protein, 14 aa, Homo sapiens
  CDR3 for beta chain variable domain of TCR clone 81904 (TRBV7-2, TRBJ2-7)
CASRSQGAAYEQYF

SEQ ID NO: 163809 - protein, 12 aa, Homo sapiens
  CDR3 for alpha chain variable domain of TCR clone 81905 (TRAV1-1, TRAJ39)
CAVPVVGNMLTF

SEQ ID NO: 163810 - protein, 15 aa, Homo sapiens
  CDR3 for beta chain variable domain of TCR clone 81905 (TRBV19, TRBJ1-6)
CASSTQGAVSSPLHF

SEQ ID NO: 163811 - protein, 13 aa, Homo sapiens
  CDR3 for alpha chain variable domain of TCR clone 81906 (TRAV35, TRAJ32)
CAGVGGATNKLIF

SEQ ID NO: 163812 - protein, 17 aa, Homo sapiens
  CDR3 for beta chain variable domain of TCR clone 81906 (TRBV4-3, TRBJ2-1)
CASSQVSSGRASGEQFF

SEQ ID NO: 163813 - protein, 14 aa, Homo sapiens
  CDR3 for alpha chain variable domain of TCR clone 81907 (TRAV4, TRAJ30)
RLVGDMNRDDKIIF

SEQ ID NO: 163814 - protein, 14 aa, Homo sapiens
  CDR3 for beta chain variable domain of TCR clone 81907 (TRBV19, TRBJ2-7)
CASSIQEWSYEQYF

SEQ ID NO: 163815 - protein, 15 aa, Homo sapiens
  CDR3 for alpha chain variable domain of TCR clone 81908 (TRAV12-3, TRAJ6)
CAMSATTGGSYIPTF

SEQ ID NO: 163816 - protein, 16 aa, Homo sapiens
  CDR3 for beta chain variable domain of TCR clone 81908 (TRBV20-1, TRBJ1-2)
CSASMGQGFANYGYTF

SEQ ID NO: 163817 - protein, 15 aa, Homo sapiens
  CDR3 for alpha chain variable domain of TCR clone 81909 (TRAV12-3, TRAJ6)
CAMSATSGGSYIPTF

SEQ ID NO: 163818 - protein, 10 aa, Homo sapiens
  CDR3 for beta chain variable domain of TCR clone 81909 (TRBV28, TRBJ1-2)
CASSSDRAVF

SEQ ID NO: 163819 - protein, 15 aa, Homo sapiens
  CDR3 for alpha chain variable domain of TCR clone 81910 (TRAV26-1, TRAJ53)
CIVRVEGGSNYKLAF

SEQ ID NO: 163820 - protein, 14 aa, Homo sapiens
  CDR3 for beta chain variable domain of TCR clone 81910 (TRBV4-3, TRBJ2-1)
CASSQDRWRGEQFF

SEQ ID NO: 163821 - protein, 16 aa, Homo sapiens
  CDR3 for alpha chain variable domain of TCR clone 81911 (TRAV12-3, TRAJ53)
CAMSPGSGGSNYKLTF

SEQ ID NO: 163822 - protein, 15 aa, Homo sapiens
  CDR3 for beta chain variable domain of TCR clone 81911 (TRBV7-2, TRBJ2-3)
CASSLNLRDTDTQYF

SEQ ID NO: 163823 - protein, 11 aa, Homo sapiens
  CDR3 for alpha chain variable domain of TCR clone 81912 (TRAV13-2, TRAJ31)
CAENMDARLML

SEQ ID NO: 163824 - protein, 15 aa, Homo sapiens
  CDR3 for beta chain variable domain of TCR clone 81912 (TRBV7-8, TRBJ1-2)
CASSLVRDGGLGYTF

SEQ ID NO: 163825 - protein, 18 aa, Homo sapiens
  CDR3 for alpha chain variable domain of TCR clone 81913 (TRAV8-3, TRAJ4)
WVRDPTSNDPGGYNKLIF

SEQ ID NO: 163826 - protein, 13 aa, Homo sapiens
  CDR3 for beta chain variable domain of TCR clone 81913 (TRBV20-1, TRBJ1-2)
CSATGIQGSGYSF

SEQ ID NO: 163827 - protein, 12 aa, Homo sapiens
  CDR3 for alpha chain variable domain of TCR clone 81914 (TRAV1-1, TRAJ9)
CAVDTGGCKTIF

SEQ ID NO: 163828 - protein, 14 aa, Homo sapiens
  CDR3 for beta chain variable domain of TCR clone 81914 (TRBV7-8, TRBJ2-5)
CASSATGGQETQYF

SEQ ID NO: 163829 - protein, 15 aa, Homo sapiens
  CDR3 for alpha chain variable domain of TCR clone 81915 (TRAV26-1, TRAJ17)
CIARVVKAAGNKLTF

SEQ ID NO: 163830 - protein, 16 aa, Homo sapiens
  CDR3 for beta chain variable domain of TCR clone 81915 (TRBV7-9, TRBJ2-1)
CASSLVSGPSYNEQFF

SEQ ID NO: 163831 - protein, 15 aa, Homo sapiens
  CDR3 for alpha chain variable domain of TCR clone 81916 (TRAV2, TRAJ22)
CAVPSRGGSARQLTF

SEQ ID NO: 163832 - protein, 15 aa, Homo sapiens
  CDR3 for beta chain variable domain of TCR clone 81916 (TRBV20-1, TRBJ2-7)
CSARDRVSGMDEQYF

SEQ ID NO: 163833 - protein, 12 aa, Homo sapiens
  CDR3 for alpha chain variable domain of TCR clone 81917 (TRAV17, TRAJ39)
CATGSAGNMLTF

SEQ ID NO: 163834 - protein, 14 aa, Homo sapiens
  CDR3 for beta chain variable domain of TCR clone 81917 (TRBV7-9, TRBJ1-2)
CASSRQGANYGYTF

SEQ ID NO: 163835 - protein, 12 aa, Homo sapiens
  CDR3 for alpha chain variable domain of TCR clone 81918 (TRAV21, TRAJ31)
CAVSPARGRPMF

SEQ ID NO: 163836 - protein, 14 aa, Homo sapiens
  CDR3 for beta chain variable domain of TCR clone 81918 (TRBV28, TRBJ2-7)
CASSLLRISYEQYF

SEQ ID NO: 163837 - protein, 11 aa, Homo sapiens
  CDR3 for alpha chain variable domain of TCR clone 81919 (TRAV16, TRAJ33)
CALHSNYQLIW

SEQ ID NO: 163838 - protein, 15 aa, Homo sapiens
  CDR3 for beta chain variable domain of TCR clone 81919 (TRBV4-1, TRBJ2-7)
CASSRQGQGFDEQYF

SEQ ID NO: 163839 - protein, 12 aa, Homo sapiens
  CDR3 for alpha chain variable domain of TCR clone 81920 (TRAV20, TRAJ56)
CAVTGANSKLTF

SEQ ID NO: 163840 - protein, 14 aa, Homo sapiens
  CDR3 for beta chain variable domain of TCR clone 81920 (TRBV20-1, TRBJ2-5)
CSARVPGYQETQYF

SEQ ID NO: 163841 - protein, 14 aa, Homo sapiens
  CDR3 for alpha chain variable domain of TCR clone 81921 (TRAV9-2, TRAJ15)
CALSESQAGTALIF

SEQ ID NO: 163842 - protein, 16 aa, Homo sapiens
  CDR3 for beta chain variable domain of TCR clone 81921 (TRBV19, TRBJ2-1)
CASSKAGPSSYNEQFF

SEQ ID NO: 163843 - protein, 14 aa, Homo sapiens
  CDR3 for alpha chain variable domain of TCR clone 81922 (TRAV12-3, TRAJ10)
SHLPLTGGGNKLTF

SEQ ID NO: 163844 - protein, 16 aa, Homo sapiens
  CDR3 for beta chain variable domain of TCR clone 81922 (TRBV4-1, TRBJ2-1)
CASSQEAGQGSDEQFF

SEQ ID NO: 163845 - protein, 13 aa, Homo sapiens
  CDR3 for alpha chain variable domain of TCR clone 81923 (TRAV12-1, TRAJ16)
CVVSTRNGQKLLV

SEQ ID NO: 163846 - protein, 19 aa, Homo sapiens
  CDR3 for beta chain variable domain of TCR clone 81923 (TRBV6-1, TRBJ2-5)
CASSRFGAGGPGLEETQYF

SEQ ID NO: 163847 - protein, 14 aa, Homo sapiens
  CDR3 for alpha chain variable domain of TCR clone 81924 (TRAV16, TRAJ39)
FALSKNNAGNMLTF

SEQ ID NO: 163848 - protein, 19 aa, Homo sapiens
  CDR3 for beta chain variable domain of TCR clone 81924 (TRBV6-6, TRBJ2-1)
AAPSQTSVYFCASSYEQFF

SEQ ID NO: 163849 - protein, 10 aa, Homo sapiens
  CDR3 for alpha chain variable domain of TCR clone 81925 (TRAV26-1, TRAJ22)
CIVSLNFFWF

SEQ ID NO: 163850 - protein, 12 aa, Homo sapiens
  CDR3 for beta chain variable domain of TCR clone 81925 (TRBV4-2, TRBJ1-2)
CASSQRTGEGMA

SEQ ID NO: 163851 - protein, 15 aa, Homo sapiens
  CDR3 for alpha chain variable domain of TCR clone 81926 (TRAV17, TRAJ4)
CAAGTWSGGYNKLIF

SEQ ID NO: 163852 - protein, 13 aa, Homo sapiens
  CDR3 for beta chain variable domain of TCR clone 81926 (TRBV6-6, TRBJ2-7)
CASSPKHLAEQYF

SEQ ID NO: 163853 - protein, 15 aa, Homo sapiens
  CDR3 for alpha chain variable domain of TCR clone 81927 (TRAV17, TRAJ10)
CATVLLTGGGNKLTF

SEQ ID NO: 163854 - protein, 16 aa, Homo sapiens
  CDR3 for beta chain variable domain of TCR clone 81927 (TRBV11-2, TRBJ2-1)
CASSDVAGGSYNEQFF

SEQ ID NO: 163855 - protein, 15 aa, Homo sapiens
  CDR3 for alpha chain variable domain of TCR clone 81928 (TRAV3, TRAJ22)
CAVRDRGGSARQLTF

SEQ ID NO: 163856 - protein, 13 aa, Homo sapiens
  CDR3 for beta chain variable domain of TCR clone 81928 (TRBV20-1, TRBJ1-1)
CSARGGGNTEAFF

SEQ ID NO: 163857 - protein, 15 aa, Homo sapiens
  CDR3 for alpha chain variable domain of TCR clone 81929 (TRAV4, TRAJ10)
CLVGDGAGGGNKLTF

SEQ ID NO: 163858 - protein, 15 aa, Homo sapiens
  CDR3 for beta chain variable domain of TCR clone 81929 (TRBV27, TRBJ2-3)
CASSSLAGVIDTQYF

SEQ ID NO: 163859 - protein, 13 aa, Homo sapiens
  CDR3 for alpha chain variable domain of TCR clone 81930 (TRAV8-6, TRAJ8)
CAVSNTGLQKLVF

SEQ ID NO: 163860 - protein, 15 aa, Homo sapiens
  CDR3 for beta chain variable domain of TCR clone 81930 (TRBV28, TRBJ2-5)
CASSSGRTIQETQYF

SEQ ID NO: 163861 - protein, 18 aa, Homo sapiens
  CDR3 for alpha chain variable domain of TCR clone 81931 (TRAV13-1, TRAJ52)
CAASKRSAGGTSYGKLTF

SEQ ID NO: 163862 - protein, 16 aa, Homo sapiens
  CDR3 for beta chain variable domain of TCR clone 81931 (TRBV28, TRBJ2-7)
CASSSSGTSGSYEQYF

SEQ ID NO: 163863 - protein, 14 aa, Homo sapiens
  CDR3 for alpha chain variable domain of TCR clone 81932 (TRAV12-2, TRAJ17)
CAALFKAAGNKLTF

SEQ ID NO: 163864 - protein, 13 aa, Homo sapiens
  CDR3 for beta chain variable domain of TCR clone 81932 (TRBV12-4, TRBJ2-7)
CASSPTETYERYF

SEQ ID NO: 163865 - protein, 16 aa, Homo sapiens
  CDR3 for alpha chain variable domain of TCR clone 81933 (TRAV20, TRAJ22)
CAVQASSSGSTRQLTF

SEQ ID NO: 163866 - protein, 13 aa, Homo sapiens
  CDR3 for beta chain variable domain of TCR clone 81933 (TRBV7-2, TRBJ2-5)
CASSQTSVETQYF

SEQ ID NO: 163867 - protein, 14 aa, Homo sapiens
  CDR3 for alpha chain variable domain of TCR clone 81934 (TRAV20, TRAJ42)
CAVQAAGSQGNLIF

SEQ ID NO: 163868 - protein, 14 aa, Homo sapiens
  CDR3 for beta chain variable domain of TCR clone 81934 (TRBV28, TRBJ1-2)
CASRIQGANYGYTF

SEQ ID NO: 163869 - protein, 14 aa, Homo sapiens
  CDR3 for alpha chain variable domain of TCR clone 81935 (TRAV13-1, TRAJ40)
CAAADLPGTYKYIF

SEQ ID NO: 163870 - protein, 11 aa, Homo sapiens
  CDR3 for beta chain variable domain of TCR clone 81935 (TRBV19, TRBJ1-2)
CASRSGLRYTF

SEQ ID NO: 163871 - protein, 14 aa, Homo sapiens
  CDR3 for alpha chain variable domain of TCR clone 81936 (TRAV9-2, TRAJ39)
CALYIYNAGNMLTF

SEQ ID NO: 163872 - protein, 12 aa, Homo sapiens
  CDR3 for beta chain variable domain of TCR clone 81936 (TRBV2, TRBJ2-1)
CAKREGYNEQFF

SEQ ID NO: 163873 - protein, 13 aa, Homo sapiens
  CDR3 for alpha chain variable domain of TCR clone 81937 (TRAV2, TRAJ10)
CAVETGGGNKLTF

SEQ ID NO: 163874 - protein, 15 aa, Homo sapiens
  CDR3 for beta chain variable domain of TCR clone 81937 (TRBV20-1, TRBJ2-7)
CSARDRVSGMDEQYF

SEQ ID NO: 163875 - protein, 16 aa, Homo sapiens
  CDR3 for alpha chain variable domain of TCR clone 81938 (TRAV8-3, TRAJ13)
CAVGAYPSGGYQKVTF

SEQ ID NO: 163876 - protein, 15 aa, Homo sapiens
  CDR3 for beta chain variable domain of TCR clone 81938 (TRBV19, TRBJ1-5)
CASSIVWADNQSQHF

SEQ ID NO: 163877 - protein, 17 aa, Homo sapiens
  CDR3 for alpha chain variable domain of TCR clone 81939 (TRAV23/DV6, TRAJ12)
CAAIDLGAMDSSYKLIL

SEQ ID NO: 163878 - protein, 12 aa, Homo sapiens
  CDR3 for beta chain variable domain of TCR clone 81939 (TRBV10-3, TRBJ2-2)
CAIRENTGELFF

SEQ ID NO: 163879 - protein, 12 aa, Homo sapiens
  CDR3 for alpha chain variable domain of TCR clone 81940 (TRAV12-3, TRAJ17)
CAMTLTGNKLTF

SEQ ID NO: 163880 - protein, 13 aa, Homo sapiens
  CDR3 for beta chain variable domain of TCR clone 81940 (TRBV5-1, TRBJ2-1)
CASSLGSYNEQFF

SEQ ID NO: 163881 - protein, 15 aa, Homo sapiens
  CDR3 for alpha chain variable domain of TCR clone 81941 (TRAV23/DV6, TRAJ57)
CAASSTLSQGGSEKL

SEQ ID NO: 163882 - protein, 14 aa, Homo sapiens
  CDR3 for beta chain variable domain of TCR clone 81941 (TRBV7-8, TRBJ2-5)
CASSATGGQETQYF

SEQ ID NO: 163883 - protein, 15 aa, Homo sapiens
  CDR3 for alpha chain variable domain of TCR clone 81942 (TRAV13-1, TRAJ17)
CAASIERAAGNKLTF

SEQ ID NO: 163884 - protein, 12 aa, Homo sapiens
  CDR3 for beta chain variable domain of TCR clone 81942 (TRBV5-7, TRBJ1-1)
RASSSGRGKAFF

SEQ ID NO: 163885 - protein, 14 aa, Homo sapiens
  CDR3 for alpha chain variable domain of TCR clone 81943 (TRAV1-2, TRAJ16)
CAVNRFSDGQKLLF

SEQ ID NO: 163886 - protein, 13 aa, Homo sapiens
  CDR3 for beta chain variable domain of TCR clone 81943 (TRBV24-1, TRBJ2-2)
CATSDWSPGELVF

SEQ ID NO: 163887 - protein, 13 aa, Homo sapiens
  CDR3 for alpha chain variable domain of TCR clone 81944 (TRAV8-4, TRAJ10)
CAAFTGGGNKLAF

SEQ ID NO: 163888 - protein, 15 aa, Homo sapiens
  CDR3 for beta chain variable domain of TCR clone 81944 (TRBV2, TRBJ2-3)
CASSDFEKATDTQYF

SEQ ID NO: 163889 - protein, 14 aa, Homo sapiens
  CDR3 for alpha chain variable domain of TCR clone 81945 (TRAV13-1, TRAJ45)
VSVPEGGGADGLTF

SEQ ID NO: 163890 - protein, 14 aa, Homo sapiens
  CDR3 for beta chain variable domain of TCR clone 81945 (TRBV11-2, TRBJ2-3)
CASSRLARTDTQYF

SEQ ID NO: 163891 - protein, 14 aa, Homo sapiens
  CDR3 for alpha chain variable domain of TCR clone 81946 (TRAV12-3, TRAJ10)
SHLPLTGGGNKLTF

SEQ ID NO: 163892 - protein, 18 aa, Homo sapiens
  CDR3 for beta chain variable domain of TCR clone 81946 (TRBV7-8, TRBJ2-1)
CASSPAEGLAGGLNEQFF

SEQ ID NO: 163893 - protein, 15 aa, Homo sapiens
  CDR3 for alpha chain variable domain of TCR clone 81947 (TRAV3, TRAJ22)
CAVRYRGGSARQLTF

SEQ ID NO: 163894 - protein, 16 aa, Homo sapiens
  CDR3 for beta chain variable domain of TCR clone 81947 (TRBV5-4, TRBJ2-3)
CASQQPGAGGADTQYF

SEQ ID NO: 163895 - protein, 15 aa, Homo sapiens
  CDR3 for alpha chain variable domain of TCR clone 81948 (TRAV27, TRAJ38)
CAARRNAGNNRTLLW

SEQ ID NO: 163896 - protein, 13 aa, Homo sapiens
  CDR3 for beta chain variable domain of TCR clone 81948 (TRBV12-5, TRBJ2-3)
CASGDRQSDTQYF

SEQ ID NO: 163897 - protein, 11 aa, Homo sapiens
  CDR3 for alpha chain variable domain of TCR clone 81949 (TRAV12-1, TRAJ34)
CVVNKGRELIF

SEQ ID NO: 163898 - protein, 14 aa, Homo sapiens
  CDR3 for beta chain variable domain of TCR clone 81949 (TRBV7-2, TRBJ2-7)
CASRSQGAAYEQYF

SEQ ID NO: 163899 - protein, 14 aa, Homo sapiens
  CDR3 for alpha chain variable domain of TCR clone 81950 (TRAV2, TRAJ9)
CAVEDRSGGFKTIF

SEQ ID NO: 163900 - protein, 19 aa, Homo sapiens
  CDR3 for beta chain variable domain of TCR clone 81950 (TRBV19, TRBJ2-5)
CASSIGQVTDFFLGETQYF

SEQ ID NO: 163901 - protein, 16 aa, Homo sapiens
  CDR3 for alpha chain variable domain of TCR clone 81951 (TRAV21, TRAJ52)
RAVTNAGGTSYGKLTF

SEQ ID NO: 163902 - protein, 11 aa, Homo sapiens
  CDR3 for beta chain variable domain of TCR clone 81951 (TRBV2, TRBJ1-1)
CASREGTEAFF

SEQ ID NO: 163903 - protein, 14 aa, Homo sapiens
  CDR3 for alpha chain variable domain of TCR clone 81952 (TRAV16, TRAJ44)
CALSTTGTASKLTF

SEQ ID NO: 163904 - protein, 14 aa, Homo sapiens
  CDR3 for beta chain variable domain of TCR clone 81952 (TRBV20-1, TRBJ2-7)
SAVPSPEASYEQYF

SEQ ID NO: 163905 - protein, 15 aa, Homo sapiens
  CDR3 for alpha chain variable domain of TCR clone 81953 (TRAV17, TRAJ23)
CATDAEGNQGGKLIF

SEQ ID NO: 163906 - protein, 12 aa, Homo sapiens
  CDR3 for beta chain variable domain of TCR clone 81953 (TRBV2, TRBJ2-1)
CAKRGGYNEQFF

SEQ ID NO: 163907 - protein, 14 aa, Homo sapiens
  CDR3 for alpha chain variable domain of TCR clone 81954 (TRAV2, TRAJ9)
CAVEDRSGGFKTIF

SEQ ID NO: 163908 - protein, 13 aa, Homo sapiens
  CDR3 for beta chain variable domain of TCR clone 81954 (TRBV27, TRBJ1-4)
CASSLMGDEKLFF

SEQ ID NO: 163909 - protein, 14 aa, Homo sapiens
  CDR3 for alpha chain variable domain of TCR clone 81955 (TRAV8-4, TRAJ54)
CAVSEVLGAQKLVF

SEQ ID NO: 163910 - protein, 15 aa, Homo sapiens
  CDR3 for beta chain variable domain of TCR clone 81955 (TRBV10-2, TRBJ2-6)
CASSEQGTGANVLTF

SEQ ID NO: 163911 - protein, 15 aa, Homo sapiens
  CDR3 for alpha chain variable domain of TCR clone 81956 (TRAV3, TRAJ5)
CAVRDLDTGRRALTF

SEQ ID NO: 163912 - protein, 13 aa, Homo sapiens
  CDR3 for beta chain variable domain of TCR clone 81956 (TRBV12-4, TRBJ2-7)
WASSPTETYEQYF

SEQ ID NO: 163913 - protein, 14 aa, Homo sapiens
  CDR3 for alpha chain variable domain of TCR clone 81957 (TRAV1-2, TRAJ16)
CAVNRFSDGQKLLF

SEQ ID NO: 163914 - protein, 12 aa, Homo sapiens
  CDR3 for beta chain variable domain of TCR clone 81957 (TRBV7-3, TRBJ2-1)
CASSFQSGPQFF

SEQ ID NO: 163915 - protein, 14 aa, Homo sapiens
  CDR3 for alpha chain variable domain of TCR clone 81958 (TRAV38-1, TRAJ45)
CASHSGGGVDGLTF

SEQ ID NO: 163916 - protein, 14 aa, Homo sapiens
  CDR3 for beta chain variable domain of TCR clone 81958 (TRBV20-1, TRBJ1-1)
CSAQTRIGGTEAFF

SEQ ID NO: 163917 - protein, 14 aa, Homo sapiens
  CDR3 for alpha chain variable domain of TCR clone 81959 (TRAV1-2, TRAJ8)
CAVREDTGFQKLVF

SEQ ID NO: 163918 - protein, 16 aa, Homo sapiens
  CDR3 for beta chain variable domain of TCR clone 81959 (TRBV19, TRBJ2-1)
CASSKAGPISYNEQFF

SEQ ID NO: 163919 - protein, 19 aa, Homo sapiens
  CDR3 for alpha chain variable domain of TCR clone 81960 (TRAV1-2, TRAJ26)
CLLPLCCERPDNYGQNFVF

SEQ ID NO: 163920 - protein, 14 aa, Homo sapiens
  CDR3 for beta chain variable domain of TCR clone 81960 (TRBV7-6, TRBJ2-3)
CASSLGTVTDTQYF

SEQ ID NO: 163921 - protein, 13 aa, Homo sapiens
  CDR3 for alpha chain variable domain of TCR clone 81961 (TRAV12-2, TRAJ47)
CAVFMEYGNKLVL

SEQ ID NO: 163922 - protein, 14 aa, Homo sapiens
  CDR3 for beta chain variable domain of TCR clone 81961 (TRBV4-1, TRBJ1-5)
CASSQGPTNQPQHF

SEQ ID NO: 163923 - protein, 12 aa, Homo sapiens
  CDR3 for alpha chain variable domain of TCR clone 81962 (TRAV38-2/DV8, TRAJ48)
CALLSGNEKLTF

SEQ ID NO: 163924 - protein, 13 aa, Homo sapiens
  CDR3 for beta chain variable domain of TCR clone 81962 (TRBV19, TRBJ1-2)
CASSQGQVYGYTF

SEQ ID NO: 163925 - protein, 13 aa, Homo sapiens
  CDR3 for alpha chain variable domain of TCR clone 81963 (TRAV2, TRAJ12)
CAVGADSNYKLIF

SEQ ID NO: 163926 - protein, 13 aa, Homo sapiens
  CDR3 for beta chain variable domain of TCR clone 81963 (TRBV20-1, TRBJ2-1)
CSARSSPRDEQFF

SEQ ID NO: 163927 - protein, 14 aa, Homo sapiens
  CDR3 for alpha chain variable domain of TCR clone 81964 (TRAV8-3, TRAJ39)
CAVGANNAGNMLTF

SEQ ID NO: 163928 - protein, 14 aa, Homo sapiens
  CDR3 for beta chain variable domain of TCR clone 81964 (TRBV2, TRBJ1-5)
CASSGTVSNQPQHF

SEQ ID NO: 163929 - protein, 15 aa, Homo sapiens
  CDR3 for alpha chain variable domain of TCR clone 81965 (TRAV8-1, TRAJ6)
CAVNTPPGGSYLPTF

SEQ ID NO: 163930 - protein, 14 aa, Homo sapiens
  CDR3 for beta chain variable domain of TCR clone 81965 (TRBV12-4, TRBJ2-1)
CASSLGQGASEQFF

SEQ ID NO: 163931 - protein, 14 aa, Homo sapiens
  CDR3 for alpha chain variable domain of TCR clone 81966 (TRAV20, TRAJ32)
CCGRYGGATNKLIF

SEQ ID NO: 163932 - protein, 16 aa, Homo sapiens
  CDR3 for beta chain variable domain of TCR clone 81966 (TRBV19, TRBJ2-2)
CASRSPGTGATGELSF

SEQ ID NO: 163933 - protein, 16 aa, Homo sapiens
  CDR3 for alpha chain variable domain of TCR clone 81967 (TRAV17, TRAJ36)
CATVSLNWGKQPLLWA

SEQ ID NO: 163934 - protein, 13 aa, Homo sapiens
  CDR3 for beta chain variable domain of TCR clone 81967 (TRBV4-1, TRBJ1-1)
CASSQLGTGEAFF

SEQ ID NO: 163935 - protein, 15 aa, Homo sapiens
  CDR3 for alpha chain variable domain of TCR clone 81968 (TRAV12-1, TRAJ44)
CVVYEYTGTASKLTF

SEQ ID NO: 163936 - protein, 14 aa, Homo sapiens
  CDR3 for beta chain variable domain of TCR clone 81968 (TRBV5-1, TRBJ1-2)
CASSLEPVNYGYTF

SEQ ID NO: 163937 - protein, 17 aa, Homo sapiens
  CDR3 for alpha chain variable domain of TCR clone 81969 (TRAV17, TRAJ52)
CATERPSGGTSYGKLTF

SEQ ID NO: 163938 - protein, 14 aa, Homo sapiens
  CDR3 for beta chain variable domain of TCR clone 81969 (TRBV19, TRBJ2-1)
CASPTFVLSGEQFF

SEQ ID NO: 163939 - protein, 11 aa, Homo sapiens
  CDR3 for alpha chain variable domain of TCR clone 81970 (TRAV21, TRAJ39)
LLVNAGNMLTF

SEQ ID NO: 163940 - protein, 15 aa, Homo sapiens
  CDR3 for beta chain variable domain of TCR clone 81970 (TRBV11-3, TRBJ2-3)
CASLRDGREGDTQYF

SEQ ID NO: 163941 - protein, 16 aa, Homo sapiens
  CDR3 for alpha chain variable domain of TCR clone 81971 (TRAV3, TRAJ21)
CAVRDIERGNFNKFYF

SEQ ID NO: 163942 - protein, 13 aa, Homo sapiens
  CDR3 for beta chain variable domain of TCR clone 81971 (TRBV4-2, TRBJ1-1)
CASGQAGNTEAFF

SEQ ID NO: 163943 - protein, 13 aa, Homo sapiens
  CDR3 for alpha chain variable domain of TCR clone 81972 (TRAV35, TRAJ44)
CAGRDGTASKLTF

SEQ ID NO: 163944 - protein, 14 aa, Homo sapiens
  CDR3 for beta chain variable domain of TCR clone 81972 (TRBV4-1, TRBJ2-2)
CASSQAVNTGELFF

SEQ ID NO: 163945 - protein, 17 aa, Homo sapiens
  CDR3 for alpha chain variable domain of TCR clone 81973 (TRAV3, TRAJ6)
CAVRDGPRAEGSYIPTF

SEQ ID NO: 163946 - protein, 14 aa, Homo sapiens
  CDR3 for beta chain variable domain of TCR clone 81973 (TRBV20-1, TRBJ2-2)
CSAPDTANTGELFF

SEQ ID NO: 163947 - protein, 11 aa, Homo sapiens
  CDR3 for alpha chain variable domain of TCR clone 81974 (TRAV21, TRAJ9)
RAVPGGFKTIF

SEQ ID NO: 163948 - protein, 12 aa, Homo sapiens
  CDR3 for beta chain variable domain of TCR clone 81974 (TRBV20-1, TRBJ2-3)
CSARVGTDTQYF

SEQ ID NO: 163949 - protein, 17 aa, Homo sapiens
  CDR3 for alpha chain variable domain of TCR clone 81975 (TRAV3, TRAJ6)
CAVRDGPRAGGSHIPTL

SEQ ID NO: 163950 - protein, 14 aa, Homo sapiens
  CDR3 for beta chain variable domain of TCR clone 81975 (TRBV7-2, TRBJ2-7)
CASSPKTSFYEQYF

SEQ ID NO: 163951 - protein, 12 aa, Homo sapiens
  CDR3 for alpha chain variable domain of TCR clone 81976 (TRAV12-1, TRAJ40)
CVFYSGTYKYIF

SEQ ID NO: 163952 - protein, 18 aa, Homo sapiens
  CDR3 for beta chain variable domain of TCR clone 81976 (TRBV12-4, TRBJ2-2)
CASSLVVGTRGRTGELFF

SEQ ID NO: 163953 - protein, 12 aa, Homo sapiens
  CDR3 for alpha chain variable domain of TCR clone 81977 (TRAV12-3, TRAJ17)
CAMTLTGNKLTF

SEQ ID NO: 163954 - protein, 13 aa, Homo sapiens
  CDR3 for beta chain variable domain of TCR clone 81977 (TRBV11-2, TRBJ2-1)
CASSSRPNNEQFF

SEQ ID NO: 163955 - protein, 14 aa, Homo sapiens
  CDR3 for alpha chain variable domain of TCR clone 81978 (TRAV26-1, TRAJ38)
CIADNAGNNRKLIW

SEQ ID NO: 163956 - protein, 18 aa, Homo sapiens
  CDR3 for beta chain variable domain of TCR clone 81978 (TRBV7-9, TRBJ2-7)
CASSLTTSGSRTWYEQYF

SEQ ID NO: 163957 - protein, 15 aa, Homo sapiens
  CDR3 for alpha chain variable domain of TCR clone 81979 (TRAV17, TRAJ4)
CATGTWSGCYNKLIF

SEQ ID NO: 163958 - protein, 13 aa, Homo sapiens
  CDR3 for beta chain variable domain of TCR clone 81979 (TRBV6-6, TRBJ2-7)
CASSPKHLAEQYF

SEQ ID NO: 163959 - protein, 14 aa, Homo sapiens
  CDR3 for alpha chain variable domain of TCR clone 81980 (TRAV12-2, TRAJ17)
CAVLFKAAGNRLTF

SEQ ID NO: 163960 - protein, 14 aa, Homo sapiens
  CDR3 for beta chain variable domain of TCR clone 81980 (TRBV7-2, TRBJ2-7)
CASRSQGAAYEQYF

SEQ ID NO: 163961 - protein, 13 aa, Homo sapiens
  CDR3 for alpha chain variable domain of TCR clone 81981 (TRAV2, TRAJ40)
CAVVTSGTYNYIF

SEQ ID NO: 163962 - protein, 16 aa, Homo sapiens
  CDR3 for beta chain variable domain of TCR clone 81981 (TRBV19, TRBJ2-2)
CASRSPGTGATGELFF

SEQ ID NO: 163963 - protein, 16 aa, Homo sapiens
  CDR3 for alpha chain variable domain of TCR clone 81982 (TRAV4, TRAJ9)
CLVCDPNRPGGFKTIF

SEQ ID NO: 163964 - protein, 16 aa, Homo sapiens
  CDR3 for beta chain variable domain of TCR clone 81982 (TRBV28, TRBJ1-4)
CASSPPYRGRSEKLFF

SEQ ID NO: 163965 - protein, 14 aa, Homo sapiens
  CDR3 for alpha chain variable domain of TCR clone 81983 (TRAV16, TRAJ44)
CALSTTGTDSKLTF

SEQ ID NO: 163966 - protein, 14 aa, Homo sapiens
  CDR3 for beta chain variable domain of TCR clone 81983 (TRBV20-1, TRBJ2-7)
CSAISREASYEQYF

SEQ ID NO: 163967 - protein, 13 aa, Homo sapiens
  CDR3 for alpha chain variable domain of TCR clone 81984 (TRAV27, TRAJ8)
CAGGPTGCQKLVF

SEQ ID NO: 163968 - protein, 15 aa, Homo sapiens
  CDR3 for beta chain variable domain of TCR clone 81984 (TRBV6-1, TRBJ2-7)
CASSESMGDFYEQYF

SEQ ID NO: 163969 - protein, 19 aa, Homo sapiens
  CDR3 for alpha chain variable domain of TCR clone 81985 (TRAV26-1, TRAJ52)
CIVRAHRNAGGTSYGKLTF

SEQ ID NO: 163970 - protein, 13 aa, Homo sapiens
  CDR3 for beta chain variable domain of TCR clone 81985 (TRBV7-3, TRBJ1-1)
CASSQDWGAEAFF

SEQ ID NO: 163971 - protein, 16 aa, Homo sapiens
  CDR3 for alpha chain variable domain of TCR clone 81986 (TRAV27, TRAJ53)
CAAPEGSGGSNYKLTL

SEQ ID NO: 163972 - protein, 14 aa, Homo sapiens
  CDR3 for beta chain variable domain of TCR clone 81986 (TRBV4-3, TRBJ1-5)
CASSQGGQGWPQHF

SEQ ID NO: 163973 - protein, 12 aa, Homo sapiens
  CDR3 for alpha chain variable domain of TCR clone 81987 (TRAV8-3, TRAJ20)
CSLGANDYKLSF

SEQ ID NO: 163974 - protein, 16 aa, Homo sapiens
  CDR3 for beta chain variable domain of TCR clone 81987 (TRBV19, TRBJ2-2)
CASRSPGTGATGELFF

SEQ ID NO: 163975 - protein, 12 aa, Homo sapiens
  CDR3 for alpha chain variable domain of TCR clone 81988 (TRAV27, TRAJ9)
CAGESGGFKTIF

SEQ ID NO: 163976 - protein, 18 aa, Homo sapiens
  CDR3 for beta chain variable domain of TCR clone 81988 (TRBV10-2, TRBJ2-2)
CISAPTVHRQADAGELFF

SEQ ID NO: 163977 - protein, 15 aa, Homo sapiens
  CDR3 for alpha chain variable domain of TCR clone 81989 (TRAV20, TRAJ53)
CAVQASGGSNYKLTF

SEQ ID NO: 163978 - protein, 12 aa, Homo sapiens
  CDR3 for beta chain variable domain of TCR clone 81989 (TRBV7-6, TRBJ2-5)
CASSLSQETQYS

SEQ ID NO: 163979 - protein, 12 aa, Homo sapiens
  CDR3 for alpha chain variable domain of TCR clone 81990 (TRAV1-1, TRAJ30)
CAVRGRDDKIIF

SEQ ID NO: 163980 - protein, 13 aa, Homo sapiens
  CDR3 for beta chain variable domain of TCR clone 81990 (TRBV4-1, TRBJ2-2)
CASSQENTGELFF

SEQ ID NO: 163981 - protein, 14 aa, Homo sapiens
  CDR3 for alpha chain variable domain of TCR clone 81991 (TRAV12-2, TRAJ40)
CAVKIPSGTYKYIF

SEQ ID NO: 163982 - protein, 16 aa, Homo sapiens
  CDR3 for beta chain variable domain of TCR clone 81991 (TRBV12-4, TRBJ2-7)
CASSLIGGTGTYEQYF

SEQ ID NO: 163983 - protein, 11 aa, Homo sapiens
  CDR3 for alpha chain variable domain of TCR clone 81992 (TRAV23/DV6, TRAJ48)
CAPRWGEELTL

SEQ ID NO: 163984 - protein, 13 aa, Homo sapiens
  CDR3 for beta chain variable domain of TCR clone 81992 (TRBV12-4, TRBJ2-5)
CASSPGTEETQYF

SEQ ID NO: 163985 - protein, 14 aa, Homo sapiens
  CDR3 for alpha chain variable domain of TCR clone 81993 (TRAV23/DV6, TRAJ13)
CAAMYSGGYQKVTF

SEQ ID NO: 163986 - protein, 14 aa, Homo sapiens
  CDR3 for beta chain variable domain of TCR clone 81993 (TRBV7-9, TRBJ2-1)
CASGPRDSLYEQFF

SEQ ID NO: 163987 - protein, 12 aa, Homo sapiens
  CDR3 for alpha chain variable domain of TCR clone 81994 (TRAV13-2, TRAJ8)
CAPWLGFQKLVF

SEQ ID NO: 163988 - protein, 13 aa, Homo sapiens
  CDR3 for beta chain variable domain of TCR clone 81994 (TRBV5-1, TRBJ2-5)
CASSWEGEETQYF

SEQ ID NO: 163989 - protein, 15 aa, Homo sapiens
  CDR3 for alpha chain variable domain of TCR clone 81995 (TRAV26-2, TRAJ50)
CILRDEETSYDKVIF

SEQ ID NO: 163990 - protein, 16 aa, Homo sapiens
  CDR3 for beta chain variable domain of TCR clone 81995 (TRBV9, TRBJ2-1)
CASSVGGGRNYNEQFF

SEQ ID NO: 163991 - protein, 13 aa, Homo sapiens
  CDR3 for alpha chain variable domain of TCR clone 81996 (TRAV13-1, TRAJ40)
CAAISPGTYKYIF

SEQ ID NO: 163992 - protein, 13 aa, Homo sapiens
  CDR3 for beta chain variable domain of TCR clone 81996 (TRBV10-3, TRBJ2-7)
CAIRAGGPNEQYF

SEQ ID NO: 163993 - protein, 12 aa, Homo sapiens
  CDR3 for alpha chain variable domain of TCR clone 81997 (TRAV4, TRAJ26)
CLVGDYGQNFVF

SEQ ID NO: 163994 - protein, 16 aa, Homo sapiens
  CDR3 for beta chain variable domain of TCR clone 81997 (TRBV19, TRBJ2-1)
CASSKAGPSSYNEQFF

SEQ ID NO: 163995 - protein, 10 aa, Homo sapiens
  CDR3 for alpha chain variable domain of TCR clone 81998 (TRAV26-1, TRAJ40)
CIAGTYKYIF

SEQ ID NO: 163996 - protein, 15 aa, Homo sapiens
  CDR3 for beta chain variable domain of TCR clone 81998 (TRBV19, TRBJ2-1)
CASSSPGVPLNEQFF

SEQ ID NO: 163997 - protein, 12 aa, Homo sapiens
  CDR3 for alpha chain variable domain of TCR clone 81999 (TRAV2, TRAJ24)
CAATDSWGKFQF

SEQ ID NO: 163998 - protein, 15 aa, Homo sapiens
  CDR3 for beta chain variable domain of TCR clone 81999 (TRBV20-1, TRBJ2-7)
CSARDRVSGMDEQYF

SEQ ID NO: 163999 - protein, 13 aa, Homo sapiens
  CDR3 for alpha chain variable domain of TCR clone 82000 (TRAV27, TRAJ45)
CRSSGGGADGLTF

SEQ ID NO: 164000 - protein, 17 aa, Homo sapiens
  CDR3 for beta chain variable domain of TCR clone 82000 (TRBV23-1, TRBJ1-2)
CASSNTGGGLLWLHLRF

SEQ ID NO: 164001 - protein, 13 aa, Homo sapiens
  CDR3 for alpha chain variable domain of TCR clone 82001 (TRAV1-2, TRAJ9)
CAALNTGGFKTIF

SEQ ID NO: 164002 - protein, 19 aa, Homo sapiens
  CDR3 for beta chain variable domain of TCR clone 82001 (TRBV28, TRBJ2-4)
CASSFQPGGPAHSKNIQYF

SEQ ID NO: 164003 - protein, 11 aa, Homo sapiens
  CDR3 for alpha chain variable domain of TCR clone 82002 (TRAV12-3, TRAJ27)
CAMADAGKSTF

SEQ ID NO: 164004 - protein, 15 aa, Homo sapiens
  CDR3 for beta chain variable domain of TCR clone 82002 (TRBV6-3, TRBJ2-7)
CASSSPGTVFYEQYF

SEQ ID NO: 164005 - protein, 14 aa, Homo sapiens
  CDR3 for alpha chain variable domain of TCR clone 82003 (TRAV12-3, TRAJ10)
SHLPLTGGGNKLTF

SEQ ID NO: 164006 - protein, 15 aa, Homo sapiens
  CDR3 for beta chain variable domain of TCR clone 82003 (TRBV7-9, TRBJ1-4)
CASSRTGGVNEKLFF

SEQ ID NO: 164007 - protein, 13 aa, Homo sapiens
  CDR3 for alpha chain variable domain of TCR clone 82004 (TRAV5, TRAJ40)
CAEKETGTYKYIF

SEQ ID NO: 164008 - protein, 15 aa, Homo sapiens
  CDR3 for beta chain variable domain of TCR clone 82004 (TRBV28, TRBJ2-5)
CASSSGRTIQETQYF

SEQ ID NO: 164009 - protein, 14 aa, Homo sapiens
  CDR3 for alpha chain variable domain of TCR clone 82005 (TRAV1-2, TRAJ16)
CAVNRFSDVQKLLF

SEQ ID NO: 164010 - protein, 12 aa, Homo sapiens
  CDR3 for beta chain variable domain of TCR clone 82005 (TRBV12-4, TRBJ2-7)
CASSLGGYEQYF

SEQ ID NO: 164011 - protein, 12 aa, Homo sapiens
  CDR3 for alpha chain variable domain of TCR clone 82006 (TRAV20, TRAJ56)
CAITGANSKLTF

SEQ ID NO: 164012 - protein, 14 aa, Homo sapiens
  CDR3 for beta chain variable domain of TCR clone 82006 (TRBV20-1, TRBJ2-5)
CSALVPGYQETQYF

SEQ ID NO: 164013 - protein, 14 aa, Homo sapiens
  CDR3 for alpha chain variable domain of TCR clone 82007 (TRAV1-1, TRAJ28)
CAAPSGAGSYQLTF

SEQ ID NO: 164014 - protein, 15 aa, Homo sapiens
  CDR3 for beta chain variable domain of TCR clone 82007 (TRBV7-9, TRBJ2-7)
CASSSSGLAVYEQYF

SEQ ID NO: 164015 - protein, 15 aa, Homo sapiens
  CDR3 for alpha chain variable domain of TCR clone 82008 (TRAV35, TRAJ50)
CAGQLRKTSYDKVIF

SEQ ID NO: 164016 - protein, 12 aa, Homo sapiens
  CDR3 for beta chain variable domain of TCR clone 82008 (TRBV5-1, TRBJ2-5)
CASSLGLETRYF

SEQ ID NO: 164017 - protein, 11 aa, Homo sapiens
  CDR3 for alpha chain variable domain of TCR clone 82009 (TRAV2, TRAJ33)
CAVDSNYQLIW

SEQ ID NO: 164018 - protein, 18 aa, Homo sapiens
  CDR3 for beta chain variable domain of TCR clone 82009 (TRBV25-1, TRBJ1-2)
CASSGLQNGQGLIFGYTF

SEQ ID NO: 164019 - protein, 12 aa, Homo sapiens
  CDR3 for alpha chain variable domain of TCR clone 82010 (TRAV12-1, TRAJ40)
CVVNGETYKYIF

SEQ ID NO: 164020 - protein, 18 aa, Homo sapiens
  CDR3 for beta chain variable domain of TCR clone 82010 (TRBV11-2, TRBJ2-3)
CASSLGGASRGAPNTQYF

SEQ ID NO: 164021 - protein, 10 aa, Homo sapiens
  CDR3 for alpha chain variable domain of TCR clone 82011 (TRAV3, TRAJ30)
CAVREIEIIF

SEQ ID NO: 164022 - protein, 13 aa, Homo sapiens
  CDR3 for beta chain variable domain of TCR clone 82011 (TRBV2, TRBJ2-3)
CASGRGRTDTQYF

SEQ ID NO: 164023 - protein, 10 aa, Homo sapiens
  CDR3 for alpha chain variable domain of TCR clone 82012 (TRAV2, TRAJ34)
CTVVNDKLIF

SEQ ID NO: 164024 - protein, 14 aa, Homo sapiens
  CDR3 for beta chain variable domain of TCR clone 82012 (TRBV20-1, TRBJ2-3)
CSARGGTSTDTQYF

SEQ ID NO: 164025 - protein, 15 aa, Homo sapiens
  CDR3 for alpha chain variable domain of TCR clone 82013 (TRAV17, TRAJ57)
CATGPSQGGSEKLVF

SEQ ID NO: 164026 - protein, 15 aa, Homo sapiens
  CDR3 for beta chain variable domain of TCR clone 82013 (TRBV12-4, TRBJ2-5)
CASSPPTGLQETQYF

SEQ ID NO: 164027 - protein, 11 aa, Homo sapiens
  CDR3 for alpha chain variable domain of TCR clone 82014 (TRAV8-4, TRAJ34)
CAVSWTDKLIF

SEQ ID NO: 164028 - protein, 16 aa, Homo sapiens
  CDR3 for beta chain variable domain of TCR clone 82014 (TRBV19, TRBJ2-1)
CASSKAGPSSYNEQFF

SEQ ID NO: 164029 - protein, 14 aa, Homo sapiens
  CDR3 for alpha chain variable domain of TCR clone 82015 (TRAV12-3, TRAJ10)
SHLPLTGGGNKLTF

SEQ ID NO: 164030 - protein, 11 aa, Homo sapiens
  CDR3 for beta chain variable domain of TCR clone 82015 (TRBV29-1, TRBJ2-5)
CSEDRTGTQYL

SEQ ID NO: 164031 - protein, 12 aa, Homo sapiens
  CDR3 for alpha chain variable domain of TCR clone 82016 (TRAV1-1, TRAJ8)
CAGGTGFQQLVF

SEQ ID NO: 164032 - protein, 15 aa, Homo sapiens
  CDR3 for beta chain variable domain of TCR clone 82016 (TRBV7-9, TRBJ1-4)
CASSRTGGFNEKLFF

SEQ ID NO: 164033 - protein, 14 aa, Homo sapiens
  CDR3 for alpha chain variable domain of TCR clone 82017 (TRAV3, TRAJ9)
CAVRGNTGGFKTIL

SEQ ID NO: 164034 - protein, 13 aa, Homo sapiens
  CDR3 for beta chain variable domain of TCR clone 82017 (TRBV7-2, TRBJ1-2)
CASSFLGSYGYTF

SEQ ID NO: 164035 - protein, 16 aa, Homo sapiens
  CDR3 for alpha chain variable domain of TCR clone 82018 (TRAV1-2, TRAJ10)
CAVRGVLTGGGNKLTF

SEQ ID NO: 164036 - protein, 12 aa, Homo sapiens
  CDR3 for beta chain variable domain of TCR clone 82018 (TRBV11-2, TRBJ2-2)
CASSLPTGELFF

SEQ ID NO: 164037 - protein, 14 aa, Homo sapiens
  CDR3 for alpha chain variable domain of TCR clone 82019 (TRAV38-1, TRAJ34)
CALRPTSGTYKYIF

SEQ ID NO: 164038 - protein, 14 aa, Homo sapiens
  CDR3 for beta chain variable domain of TCR clone 82019 (TRBV12-4, TRBJ1-4)
CASSRQGANEKLFF

SEQ ID NO: 164039 - protein, 12 aa, Homo sapiens
  CDR3 for alpha chain variable domain of TCR clone 82020 (TRAV3, TRAJ26)
CAVRYYGQNFVF

SEQ ID NO: 164040 - protein, 16 aa, Homo sapiens
  CDR3 for beta chain variable domain of TCR clone 82020 (TRBV11-2, TRBJ1-2)
CASSPSGREANYGYTF

SEQ ID NO: 164041 - protein, 14 aa, Homo sapiens
  CDR3 for alpha chain variable domain of TCR clone 82021 (TRAV12-2, TRAJ40)
CAVKIPSGTYKCIF

SEQ ID NO: 164042 - protein, 17 aa, Homo sapiens
  CDR3 for beta chain variable domain of TCR clone 82021 (TRBV20-1, TRBJ2-1)
CSAFSGTSGSLYNEQFF

SEQ ID NO: 164043 - protein, 12 aa, Homo sapiens
  CDR3 for alpha chain variable domain of TCR clone 82022 (TRAV35, TRAJ43)
CAGAYNNNDKRF

SEQ ID NO: 164044 - protein, 14 aa, Homo sapiens
  CDR3 for beta chain variable domain of TCR clone 82022 (TRBV2, TRBJ2-2)
CASSWQGATGELFF

SEQ ID NO: 164045 - protein, 13 aa, Homo sapiens
  CDR3 for alpha chain variable domain of TCR clone 82023 (TRAV21, TRAJ27)
CAARPGNAGKSTF

SEQ ID NO: 164046 - protein, 14 aa, Homo sapiens
  CDR3 for beta chain variable domain of TCR clone 82023 (TRBV4-1, TRBJ1-1)
CASSRSGQSFEAFF

SEQ ID NO: 164047 - protein, 12 aa, Homo sapiens
  CDR3 for alpha chain variable domain of TCR clone 82024 (TRAV12-1, TRAJ31)
CVSWNNNARLMF

SEQ ID NO: 164048 - protein, 14 aa, Homo sapiens
  CDR3 for beta chain variable domain of TCR clone 82024 (TRBV7-2, TRBJ1-5)
CQQPRQGQDQPQHF

SEQ ID NO: 164049 - protein, 13 aa, Homo sapiens
  CDR3 for alpha chain variable domain of TCR clone 82025 (TRAV12-1, TRAJ29)
CVVVVSGNTPLVF

SEQ ID NO: 164050 - protein, 17 aa, Homo sapiens
  CDR3 for beta chain variable domain of TCR clone 82025 (TRBV15, TRBJ1-4)
CATSRYGTGDPNEKLFF

SEQ ID NO: 164051 - protein, 12 aa, Homo sapiens
  CDR3 for alpha chain variable domain of TCR clone 82026 (TRAV12-2, TRAJ10)
WGVTGGGNKLTF

SEQ ID NO: 164052 - protein, 15 aa, Homo sapiens
  CDR3 for beta chain variable domain of TCR clone 82026 (TRBV6-6, TRBJ2-5)
CASSPGGGLEETQYF

SEQ ID NO: 164053 - protein, 16 aa, Homo sapiens
  CDR3 for alpha chain variable domain of TCR clone 82027 (TRAV14/DV4, TRAJ34)
CAMREGRPHRQAHLWD

SEQ ID NO: 164054 - protein, 14 aa, Homo sapiens
  CDR3 for beta chain variable domain of TCR clone 82027 (TRBV19, TRBJ2-1)
CASPTFVLSGEQFF

SEQ ID NO: 164055 - protein, 19 aa, Homo sapiens
  CDR3 for alpha chain variable domain of TCR clone 82028 (TRAV3, TRAJ6)
CAVRDRNPSRSGGSYRPTF

SEQ ID NO: 164056 - protein, 15 aa, Homo sapiens
  CDR3 for beta chain variable domain of TCR clone 82028 (TRBV18, TRBJ2-7)
CASSPTFMDSYEQYF

SEQ ID NO: 164057 - protein, 10 aa, Homo sapiens
  CDR3 for alpha chain variable domain of TCR clone 82029 (TRAV12-1, TRAJ37)
ARGNTGELIF

SEQ ID NO: 164058 - protein, 15 aa, Homo sapiens
  CDR3 for beta chain variable domain of TCR clone 82029 (TRBV7-2, TRBJ2-3)
CASSLEQGGTDTQYF

SEQ ID NO: 164059 - protein, 15 aa, Homo sapiens
  CDR3 for alpha chain variable domain of TCR clone 82030 (TRAV26-1, TRAJ40)
CIVSVTTSGTYKYIF

SEQ ID NO: 164060 - protein, 12 aa, Homo sapiens
  CDR3 for beta chain variable domain of TCR clone 82030 (TRBV7-9, TRBJ1-4)
CASSTDREKLFF

SEQ ID NO: 164061 - protein, 14 aa, Homo sapiens
  CDR3 for alpha chain variable domain of TCR clone 82031 (TRAV3, TRAJ32)
CCERRAGATNKLIF

SEQ ID NO: 164062 - protein, 14 aa, Homo sapiens
  CDR3 for beta chain variable domain of TCR clone 82031 (TRBV7-8, TRBJ2-3)
CASSFPDGQDTQYF

SEQ ID NO: 164063 - protein, 14 aa, Homo sapiens
  CDR3 for alpha chain variable domain of TCR clone 82032 (TRAV16, TRAJ32)
CALKSGGATNKLIF

SEQ ID NO: 164064 - protein, 12 aa, Homo sapiens
  CDR3 for beta chain variable domain of TCR clone 82032 (TRBV2, TRBJ2-1)
CAYGPPGNEQFF

SEQ ID NO: 164065 - protein, 16 aa, Homo sapiens
  CDR3 for alpha chain variable domain of TCR clone 82033 (TRAV3, TRAJ21)
CAVRDIERGNFNKFYF

SEQ ID NO: 164066 - protein, 17 aa, Homo sapiens
  CDR3 for beta chain variable domain of TCR clone 82033 (TRBV28, TRBJ2-7)
CASSPGLAGGDSSEQYF

SEQ ID NO: 164067 - protein, 13 aa, Homo sapiens
  CDR3 for alpha chain variable domain of TCR clone 82034 (TRAV12-1, TRAJ40)
CVVPTSGTYKYIF

SEQ ID NO: 164068 - protein, 18 aa, Homo sapiens
  CDR3 for beta chain variable domain of TCR clone 82034 (TRBV25-1, TRBJ1-2)
CASSGLQNGQGLIFGYTF

SEQ ID NO: 164069 - protein, 16 aa, Homo sapiens
  CDR3 for alpha chain variable domain of TCR clone 82035 (TRAV27, TRAJ52)
CAGAPAGGTSYGKLTF

SEQ ID NO: 164070 - protein, 12 aa, Homo sapiens
  CDR3 for beta chain variable domain of TCR clone 82035 (TRBV27, TRBJ2-1)
CASRGFYNEQFL

SEQ ID NO: 164071 - protein, 14 aa, Homo sapiens
  CDR3 for alpha chain variable domain of TCR clone 82036 (TRAV12-2, TRAJ40)
CAVKIPSGTYKYIF

SEQ ID NO: 164072 - protein, 13 aa, Homo sapiens
  CDR3 for beta chain variable domain of TCR clone 82036 (TRBV7-3, TRBJ1-1)
CASSLTQGTEAFF

SEQ ID NO: 164073 - protein, 15 aa, Homo sapiens
  CDR3 for alpha chain variable domain of TCR clone 82037 (TRAV13-1, TRAJ11)
SAASNRNSGYSTLTF

SEQ ID NO: 164074 - protein, 11 aa, Homo sapiens
  CDR3 for beta chain variable domain of TCR clone 82037 (TRBV20-1, TRBJ2-7)
CSARLSYEQYF

SEQ ID NO: 164075 - protein, 15 aa, Homo sapiens
  CDR3 for alpha chain variable domain of TCR clone 82038 (TRAV8-6, TRAJ28)
CAVTRSGAGSHQLTF

SEQ ID NO: 164076 - protein, 11 aa, Homo sapiens
  CDR3 for beta chain variable domain of TCR clone 82038 (TRBV7-9, TRBJ2-3)
CASSGPDTQYF

SEQ ID NO: 164077 - protein, 12 aa, Homo sapiens
  CDR3 for alpha chain variable domain of TCR clone 82039 (TRAV3, TRAJ20)
CAVRDPDYNLSF

SEQ ID NO: 164078 - protein, 13 aa, Homo sapiens
  CDR3 for beta chain variable domain of TCR clone 82039 (TRBV9, TRBJ2-1)
CASSVGQGGEQFF

SEQ ID NO: 164079 - protein, 17 aa, Homo sapiens
  CDR3 for alpha chain variable domain of TCR clone 82040 (TRAV3, TRAJ6)
CAVRDGPRAGGSYIPTF

SEQ ID NO: 164080 - protein, 16 aa, Homo sapiens
  CDR3 for beta chain variable domain of TCR clone 82040 (TRBV5-4, TRBJ2-3)
CASQQPGAGGADTQYF

SEQ ID NO: 164081 - protein, 17 aa, Homo sapiens
  CDR3 for alpha chain variable domain of TCR clone 82041 (TRAV8-6, TRAJ58)
CAVSSWVGETSGSRLTF

SEQ ID NO: 164082 - protein, 17 aa, Homo sapiens
  CDR3 for beta chain variable domain of TCR clone 82041 (TRBV7-8, TRBJ2-6)
CASSAGTGGAGANVLTF

SEQ ID NO: 164083 - protein, 14 aa, Homo sapiens
  CDR3 for alpha chain variable domain of TCR clone 82042 (TRAV26-1, TRAJ38)
CIADNAGNNSKLIW

SEQ ID NO: 164084 - protein, 14 aa, Homo sapiens
  CDR3 for beta chain variable domain of TCR clone 82042 (TRBV4-1, TRBJ2-2)
CASSQAVNTGELFF

SEQ ID NO: 164085 - protein, 14 aa, Homo sapiens
  CDR3 for alpha chain variable domain of TCR clone 82043 (TRAV17, TRAJ35)
CATDRPGFGNVLHC

SEQ ID NO: 164086 - protein, 15 aa, Homo sapiens
  CDR3 for beta chain variable domain of TCR clone 82043 (TRBV9, TRBJ1-6)
CASSVAGTGDSPLHF

SEQ ID NO: 164087 - protein, 12 aa, Homo sapiens
  CDR3 for alpha chain variable domain of TCR clone 82044 (TRAV3, TRAJ43)
CAVRDPNNDMRF

SEQ ID NO: 164088 - protein, 15 aa, Homo sapiens
  CDR3 for beta chain variable domain of TCR clone 82044 (TRBV7-9, TRBJ1-5)
CASSQGHQPNQPQHF

SEQ ID NO: 164089 - protein, 16 aa, Homo sapiens
  CDR3 for alpha chain variable domain of TCR clone 82045 (TRAV35, TRAJ28)
CAGQRYSGAGSYHLTF

SEQ ID NO: 164090 - protein, 13 aa, Homo sapiens
  CDR3 for beta chain variable domain of TCR clone 82045 (TRBV19, TRBJ1-2)
CASSQGQVYGYTF

SEQ ID NO: 164091 - protein, 14 aa, Homo sapiens
  CDR3 for alpha chain variable domain of TCR clone 82046 (TRAV8-1, TRAJ36)
CAVNSPTGANNLLF

SEQ ID NO: 164092 - protein, 15 aa, Homo sapiens
  CDR3 for beta chain variable domain of TCR clone 82046 (TRBV7-2, TRBJ2-3)
CASSLEQGGTDTQYF

SEQ ID NO: 164093 - protein, 14 aa, Homo sapiens
  CDR3 for alpha chain variable domain of TCR clone 82047 (TRAV8-4, TRAJ9)
CAVRINTGGFKTIF

SEQ ID NO: 164094 - protein, 15 aa, Homo sapiens
  CDR3 for beta chain variable domain of TCR clone 82047 (TRBV5-1, TRBJ2-5)
CASSFKGGDQETQYF

SEQ ID NO: 164095 - protein, 19 aa, Homo sapiens
  CDR3 for alpha chain variable domain of TCR clone 82048 (TRAV26-1, TRAJ52)
CIVRAHRNAGGTSYGQLTF

SEQ ID NO: 164096 - protein, 15 aa, Homo sapiens
  CDR3 for beta chain variable domain of TCR clone 82048 (TRBV29-1, TRBJ2-1)
CSGRDRKSSYNEQFF

SEQ ID NO: 164097 - protein, 15 aa, Homo sapiens
  CDR3 for alpha chain variable domain of TCR clone 82049 (TRAV2, TRAJ9)
CAVAALNTGGFKTIF

SEQ ID NO: 164098 - protein, 14 aa, Homo sapiens
  CDR3 for beta chain variable domain of TCR clone 82049 (TRBV12-5, TRBJ2-5)
CASGSRTHQETQYF

SEQ ID NO: 164099 - protein, 17 aa, Homo sapiens
  CDR3 for alpha chain variable domain of TCR clone 82050 (TRAV26-2, TRAJ42)
CILRDVGYGGSEGNLIF

SEQ ID NO: 164100 - protein, 16 aa, Homo sapiens
  CDR3 for beta chain variable domain of TCR clone 82050 (TRBV12-4, TRBJ2-7)
CASSLIGGTGTYEQYF

SEQ ID NO: 164101 - protein, 15 aa, Homo sapiens
  CDR3 for alpha chain variable domain of TCR clone 82051 (TRAV3, TRAJ29)
CAVRAPLSGNTPLVF

SEQ ID NO: 164102 - protein, 15 aa, Homo sapiens
  CDR3 for beta chain variable domain of TCR clone 82051 (TRBV28, TRBJ1-1)
CASKIKGGLNTEAFF

SEQ ID NO: 164103 - protein, 14 aa, Homo sapiens
  CDR3 for alpha chain variable domain of TCR clone 82052 (TRAV1-2, TRAJ8)
CAVREDTGFQKLVF

SEQ ID NO: 164104 - protein, 11 aa, Homo sapiens
  CDR3 for beta chain variable domain of TCR clone 82052 (TRBV7-2, TRBJ2-7)
CASSSGLWQYF

SEQ ID NO: 164105 - protein, 10 aa, Homo sapiens
  CDR3 for alpha chain variable domain of TCR clone 82053 (TRAV3, TRAJ32)
CAVREGIMVL

SEQ ID NO: 164106 - protein, 13 aa, Homo sapiens
  CDR3 for beta chain variable domain of TCR clone 82053 (TRBV2, TRBJ1-1)
CASSEGGNTEAFF

SEQ ID NO: 164107 - protein, 14 aa, Homo sapiens
  CDR3 for alpha chain variable domain of TCR clone 82054 (TRAV13-1, TRAJ44)
CAAKATGTASKLTF

SEQ ID NO: 164108 - protein, 16 aa, Homo sapiens
  CDR3 for beta chain variable domain of TCR clone 82054 (TRBV7-9, TRBJ2-1)
CASSDVAGGSYNEQFF

SEQ ID NO: 164109 - protein, 13 aa, Homo sapiens
  CDR3 for alpha chain variable domain of TCR clone 82055 (TRAV17, TRAJ9)
CATDYTGGFKTIF

SEQ ID NO: 164110 - protein, 19 aa, Homo sapiens
  CDR3 for beta chain variable domain of TCR clone 82055 (TRBV7-2, TRBJ2-3)
CASSFLSRNWGGGTDTQYF

SEQ ID NO: 164111 - protein, 11 aa, Homo sapiens
  CDR3 for alpha chain variable domain of TCR clone 82056 (TRAV21, TRAJ11)
CAVYGYSTLTF

SEQ ID NO: 164112 - protein, 11 aa, Homo sapiens
  CDR3 for beta chain variable domain of TCR clone 82056 (TRBV19, TRBJ1-1)
CASSIGSEAFF

SEQ ID NO: 164113 - protein, 13 aa, Homo sapiens
  CDR3 for alpha chain variable domain of TCR clone 82057 (TRAV8-1, TRAJ28)
CTVSGAGSYQLTF

SEQ ID NO: 164114 - protein, 14 aa, Homo sapiens
  CDR3 for beta chain variable domain of TCR clone 82057 (TRBV7-2, TRBJ2-2)
CASRGQGAAGELFF

SEQ ID NO: 164115 - protein, 16 aa, Homo sapiens
  CDR3 for alpha chain variable domain of TCR clone 82058 (TRAV16, TRAJ52)
CALSGVGGTSYGELTF

SEQ ID NO: 164116 - protein, 14 aa, Homo sapiens
  CDR3 for beta chain variable domain of TCR clone 82058 (TRBV19, TRBJ1-2)
CASSLQGQAYGYTF

SEQ ID NO: 164117 - protein, 15 aa, Homo sapiens
  CDR3 for alpha chain variable domain of TCR clone 82059 (TRAV2, TRAJ15)
CAVEDLGQAGTALIF

SEQ ID NO: 164118 - protein, 13 aa, Homo sapiens
  CDR3 for beta chain variable domain of TCR clone 82059 (TRBV10-2, TRBJ2-7)
CASGASGGYEQYF

SEQ ID NO: 164119 - protein, 14 aa, Homo sapiens
  CDR3 for alpha chain variable domain of TCR clone 82060 (TRAV35, TRAJ22)
CAGLRPGSARQLTF

SEQ ID NO: 164120 - protein, 15 aa, Homo sapiens
  CDR3 for beta chain variable domain of TCR clone 82060 (TRBV7-2, TRBJ2-3)
CASSLAGAFIDTQYF

SEQ ID NO: 164121 - protein, 10 aa, Homo sapiens
  CDR3 for alpha chain variable domain of TCR clone 82061 (TRAV25, TRAJ20)
CAVNDYKLSF

SEQ ID NO: 164122 - protein, 13 aa, Homo sapiens
  CDR3 for beta chain variable domain of TCR clone 82061 (TRBV6-3, TRBJ2-7)
CASSFIGGYEQYF

SEQ ID NO: 164123 - protein, 15 aa, Homo sapiens
  CDR3 for alpha chain variable domain of TCR clone 82062 (TRAV17, TRAJ6)
CATDLPSGGSYIPTF

SEQ ID NO: 164124 - protein, 16 aa, Homo sapiens
  CDR3 for beta chain variable domain of TCR clone 82062 (TRBV4-1, TRBJ2-7)
CASSQGPTGYSYEQYF

SEQ ID NO: 164125 - protein, 14 aa, Homo sapiens
  CDR3 for alpha chain variable domain of TCR clone 82063 (TRAV26-1, TRAJ21)
CIVRVVYNFNKFYF

SEQ ID NO: 164126 - protein, 11 aa, Homo sapiens
  CDR3 for beta chain variable domain of TCR clone 82063 (TRBV5-6, TRBJ2-5)
CASSLERTQYL

SEQ ID NO: 164127 - protein, 11 aa, Homo sapiens
  CDR3 for alpha chain variable domain of TCR clone 82064 (TRAV12-1, TRAJ43)
CVEYDNNDMRF

SEQ ID NO: 164128 - protein, 14 aa, Homo sapiens
  CDR3 for beta chain variable domain of TCR clone 82064 (TRBV19, TRBJ2-1)
CASPTFVLSGEQFF

SEQ ID NO: 164129 - protein, 14 aa, Homo sapiens
  CDR3 for alpha chain variable domain of TCR clone 82065 (TRAV20, TRAJ22)
CAVALGGSARQLTF

SEQ ID NO: 164130 - protein, 12 aa, Homo sapiens
  CDR3 for beta chain variable domain of TCR clone 82065 (TRBV7-3, TRBJ2-1)
CASSFINNEQFF

SEQ ID NO: 164131 - protein, 12 aa, Homo sapiens
  CDR3 for alpha chain variable domain of TCR clone 82066 (TRAV13-1, TRAJ48)
CAANFGNAKLTF

SEQ ID NO: 164132 - protein, 13 aa, Homo sapiens
  CDR3 for beta chain variable domain of TCR clone 82066 (TRBV7-3, TRBJ1-1)
CASSQDWGAEAFF

SEQ ID NO: 164133 - protein, 15 aa, Homo sapiens
  CDR3 for alpha chain variable domain of TCR clone 82067 (TRAV8-2, TRAJ40)
WVVLGTTSGTYKYIF

SEQ ID NO: 164134 - protein, 16 aa, Homo sapiens
  CDR3 for beta chain variable domain of TCR clone 82067 (TRBV7-3, TRBJ2-1)
CASSLEGYRSYNEQFF

SEQ ID NO: 164135 - protein, 15 aa, Homo sapiens
  CDR3 for alpha chain variable domain of TCR clone 82068 (TRAV8-3, TRAJ23)
CAVGDRYNQGGKLIF

SEQ ID NO: 164136 - protein, 16 aa, Homo sapiens
  CDR3 for beta chain variable domain of TCR clone 82068 (TRBV24-1, TRBJ2-3)
CATSDPGTGATDTQYF

SEQ ID NO: 164137 - protein, 14 aa, Homo sapiens
  CDR3 for alpha chain variable domain of TCR clone 82069 (TRAV26-1, TRAJ34)
CIVRVAYNTDKLIF

SEQ ID NO: 164138 - protein, 15 aa, Homo sapiens
  CDR3 for beta chain variable domain of TCR clone 82069 (TRBV20-1, TRBJ2-7)
CSARVQAAYFYEQYF

SEQ ID NO: 164139 - protein, 11 aa, Homo sapiens
  CDR3 for alpha chain variable domain of TCR clone 82070 (TRAV13-1, TRAJ43)
CAAHNNNDMRF

SEQ ID NO: 164140 - protein, 14 aa, Homo sapiens
  CDR3 for beta chain variable domain of TCR clone 82070 (TRBV7-8, TRBJ2-3)
CASSLEAGTDTQYF

SEQ ID NO: 164141 - protein, 17 aa, Homo sapiens
  CDR3 for alpha chain variable domain of TCR clone 82071 (TRAV38-1, TRAJ45)
CAFMKHYMGGGADGLTF

SEQ ID NO: 164142 - protein, 13 aa, Homo sapiens
  CDR3 for beta chain variable domain of TCR clone 82071 (TRBV2, TRBJ1-4)
CASSERAGERLFF

SEQ ID NO: 164143 - protein, 11 aa, Homo sapiens
  CDR3 for alpha chain variable domain of TCR clone 82072 (TRAV3, TRAJ21)
CAVGNFDKFYF

SEQ ID NO: 164144 - protein, 14 aa, Homo sapiens
  CDR3 for beta chain variable domain of TCR clone 82072 (TRBV29-1, TRBJ2-2)
CSGRGSGNTGELFF

SEQ ID NO: 164145 - protein, 15 aa, Homo sapiens
  CDR3 for alpha chain variable domain of TCR clone 82073 (TRAV38-1, TRAJ30)
CAFMMSYGGDDKTIF

SEQ ID NO: 164146 - protein, 16 aa, Homo sapiens
  CDR3 for beta chain variable domain of TCR clone 82073 (TRBV7-9, TRBJ2-7)
CASSFGLAGPSYEQYF

SEQ ID NO: 164147 - protein, 14 aa, Homo sapiens
  CDR3 for alpha chain variable domain of TCR clone 82074 (TRAV35, TRAJ41)
CAGKTSNSGYALNF

SEQ ID NO: 164148 - protein, 12 aa, Homo sapiens
  CDR3 for beta chain variable domain of TCR clone 82074 (TRBV11-2, TRBJ2-2)
CASSLGGGELFF

SEQ ID NO: 164149 - protein, 22 aa, Homo sapiens
  CDR3 for alpha chain variable domain of TCR clone 82075 (TRAV39, TRAJ49)
PCMTSLPPTSVPWTNTGNQFYF

SEQ ID NO: 164150 - protein, 17 aa, Homo sapiens
  CDR3 for beta chain variable domain of TCR clone 82075 (TRBV20-1, TRBJ2-1)
CSARDRRRASSYNERFF

SEQ ID NO: 164151 - protein, 13 aa, Homo sapiens
  CDR3 for alpha chain variable domain of TCR clone 82076 (TRAV2, TRAJ29)
CAAGNSGNTPLVF

SEQ ID NO: 164152 - protein, 16 aa, Homo sapiens
  CDR3 for beta chain variable domain of TCR clone 82076 (TRBV7-9, TRBJ1-2)
CASGPGGGAINYGYTF

SEQ ID NO: 164153 - protein, 12 aa, Homo sapiens
  CDR3 for alpha chain variable domain of TCR clone 82077 (TRAV8-1, TRAJ6)
CASSGGNYIPTF

SEQ ID NO: 164154 - protein, 12 aa, Homo sapiens
  CDR3 for beta chain variable domain of TCR clone 82077 (TRBV19, TRBJ1-1)
CASMNRYTEAFF

SEQ ID NO: 164155 - protein, 15 aa, Homo sapiens
  CDR3 for alpha chain variable domain of TCR clone 82078 (TRAV17, TRAJ4)
CATGTGSGGYNKLIF

SEQ ID NO: 164156 - protein, 13 aa, Homo sapiens
  CDR3 for beta chain variable domain of TCR clone 82078 (TRBV6-6, TRBJ2-7)
CASSPKHLAEQYF

SEQ ID NO: 164157 - protein, 13 aa, Homo sapiens
  CDR3 for alpha chain variable domain of TCR clone 82079 (TRAV29/DV5, TRAJ31)
CAARRNNNARLMF

SEQ ID NO: 164158 - protein, 12 aa, Homo sapiens
  CDR3 for beta chain variable domain of TCR clone 82079 (TRBV11-2, TRBJ2-1)
CASSPGNNEQFF

SEQ ID NO: 164159 - protein, 14 aa, Homo sapiens
  CDR3 for alpha chain variable domain of TCR clone 82080 (TRAV12-2, TRAJ13)
CAVKKTGGHQKVTF

SEQ ID NO: 164160 - protein, 16 aa, Homo sapiens
  CDR3 for beta chain variable domain of TCR clone 82080 (TRBV2, TRBJ2-1)
CASRSPAGGKYNEQFF

SEQ ID NO: 164161 - protein, 13 aa, Homo sapiens
  CDR3 for alpha chain variable domain of TCR clone 82081 (TRAV27, TRAJ41)
CSGEGNSGYALNF

SEQ ID NO: 164162 - protein, 14 aa, Homo sapiens
  CDR3 for beta chain variable domain of TCR clone 82081 (TRBV25-1, TRBJ1-1)
CASTHLGGNTEAFF

SEQ ID NO: 164163 - protein, 13 aa, Homo sapiens
  CDR3 for alpha chain variable domain of TCR clone 82082 (TRAV1-2, TRAJ9)
CAALNTGGFKTIF

SEQ ID NO: 164164 - protein, 14 aa, Homo sapiens
  CDR3 for beta chain variable domain of TCR clone 82082 (TRBV4-1, TRBJ2-7)
CASSPVAGGDEQYF

SEQ ID NO: 164165 - protein, 16 aa, Homo sapiens
  CDR3 for alpha chain variable domain of TCR clone 82083 (TRAV12-3, TRAJ9)
CAASIGGNTGGFKTIF

SEQ ID NO: 164166 - protein, 12 aa, Homo sapiens
  CDR3 for beta chain variable domain of TCR clone 82083 (TRBV6-3, TRBJ2-7)
CASSEPGFEQYF

SEQ ID NO: 164167 - protein, 12 aa, Homo sapiens
  CDR3 for alpha chain variable domain of TCR clone 82084 (TRAV8-4, TRAJ43)
CAVSVNNNDMRF

SEQ ID NO: 164168 - protein, 14 aa, Homo sapiens
  CDR3 for beta chain variable domain of TCR clone 82084 (TRBV11-2, TRBJ1-2)
CASSLGKANYGYTF

SEQ ID NO: 164169 - protein, 14 aa, Homo sapiens
  CDR3 for alpha chain variable domain of TCR clone 82085 (TRAV17, TRAJ57)
CATDPHGGSEKLVF

SEQ ID NO: 164170 - protein, 18 aa, Homo sapiens
  CDR3 for beta chain variable domain of TCR clone 82085 (TRBV6-6, TRBJ1-3)
CASSYSKWDSISGNTIYF

SEQ ID NO: 164171 - protein, 14 aa, Homo sapiens
  CDR3 for alpha chain variable domain of TCR clone 82086 (TRAV12-3, TRAJ7)
CAMSEIGGNNRLAF

SEQ ID NO: 164172 - protein, 14 aa, Homo sapiens
  CDR3 for beta chain variable domain of TCR clone 82086 (TRBV7-2, TRBJ2-7)
CASSPKTSFYEQYF

SEQ ID NO: 164173 - protein, 13 aa, Homo sapiens
  CDR3 for alpha chain variable domain of TCR clone 82087 (TRAV27, TRAJ3)
ASLRGSSASRIIF

SEQ ID NO: 164174 - protein, 15 aa, Homo sapiens
  CDR3 for beta chain variable domain of TCR clone 82087 (TRBV28, TRBJ1-3)
CASSMGWASGNTIYF

SEQ ID NO: 164175 - protein, 16 aa, Homo sapiens
  CDR3 for alpha chain variable domain of TCR clone 82088 (TRAV12-3, TRAJ53)
CAMSPGSGGSNYKLTF

SEQ ID NO: 164176 - protein, 13 aa, Homo sapiens
  CDR3 for beta chain variable domain of TCR clone 82088 (TRBV15, TRBJ1-6)
CATSGGLNSPLHF

SEQ ID NO: 164177 - protein, 14 aa, Homo sapiens
  CDR3 for alpha chain variable domain of TCR clone 82089 (TRAV1-2, TRAJ16)
CAVNRFSDGQKLLF

SEQ ID NO: 164178 - protein, 17 aa, Homo sapiens
  CDR3 for beta chain variable domain of TCR clone 82089 (TRBV20-1, TRBJ2-1)
CGASSSGLAGSYNEQFF

SEQ ID NO: 164179 - protein, 13 aa, Homo sapiens
  CDR3 for alpha chain variable domain of TCR clone 82090 (TRAV13-1, TRAJ5)
CGASDTGRRALTF

SEQ ID NO: 164180 - protein, 12 aa, Homo sapiens
  CDR3 for beta chain variable domain of TCR clone 82090 (TRBV28, TRBJ2-3)
CASSLYRDTQYF

SEQ ID NO: 164181 - protein, 17 aa, Homo sapiens
  CDR3 for alpha chain variable domain of TCR clone 82091 (TRAV26-1, TRAJ58)
CIVRVGAEETRGSRLTF

SEQ ID NO: 164182 - protein, 18 aa, Homo sapiens
  CDR3 for beta chain variable domain of TCR clone 82091 (TRBV7-9, TRBJ2-7)
CASSLTTSGSRTWYEQYF

SEQ ID NO: 164183 - protein, 10 aa, Homo sapiens
  CDR3 for alpha chain variable domain of TCR clone 82092 (TRAV23/DV6, TRAJ57)
CAASSTLSQG

SEQ ID NO: 164184 - protein, 14 aa, Homo sapiens
  CDR3 for beta chain variable domain of TCR clone 82092 (TRBV25-1, TRBJ1-1)
CASTHLGGNTEAFF

SEQ ID NO: 164185 - protein, 10 aa, Homo sapiens
  CDR3 for alpha chain variable domain of TCR clone 82093 (TRAV26-1, TRAJ22)
CTVSLNFFWF

SEQ ID NO: 164186 - protein, 15 aa, Homo sapiens
  CDR3 for beta chain variable domain of TCR clone 82093 (TRBV4-2, TRBJ1-2)
CASSQRTGGRDGYTF

SEQ ID NO: 164187 - protein, 15 aa, Homo sapiens
  CDR3 for alpha chain variable domain of TCR clone 82094 (TRAV13-2, TRAJ5)
CAENPHWTGRRALTF

SEQ ID NO: 164188 - protein, 14 aa, Homo sapiens
  CDR3 for beta chain variable domain of TCR clone 82094 (TRBV28, TRBJ1-2)
CASSFGTEAYGYTF

SEQ ID NO: 164189 - protein, 14 aa, Homo sapiens
  CDR3 for alpha chain variable domain of TCR clone 82095 (TRAV12-3, TRAJ42)
CAMNYGGSQGNLIF

SEQ ID NO: 164190 - protein, 15 aa, Homo sapiens
  CDR3 for beta chain variable domain of TCR clone 82095 (TRBV7-8, TRBJ1-5)
CASSLERRGLEPQHF

SEQ ID NO: 164191 - protein, 12 aa, Homo sapiens
  CDR3 for alpha chain variable domain of TCR clone 82096 (TRAV12-3, TRAJ17)
CAMTLTGNELTF

SEQ ID NO: 164192 - protein, 15 aa, Homo sapiens
  CDR3 for beta chain variable domain of TCR clone 82096 (TRBV5-1, TRBJ2-5)
CASSRLGTVQETQYF

SEQ ID NO: 164193 - protein, 15 aa, Homo sapiens
  CDR3 for alpha chain variable domain of TCR clone 82097 (TRAV26-1, TRAJ29)
CIVRVEGSGNTPLVF

SEQ ID NO: 164194 - protein, 13 aa, Homo sapiens
  CDR3 for beta chain variable domain of TCR clone 82097 (TRBV7-6, TRBJ2-3)
CASSLRSDNTQYF

SEQ ID NO: 164195 - protein, 22 aa, Homo sapiens
  CDR3 for alpha chain variable domain of TCR clone 82098 (TRAV8-2, TRAJ45)
HLTKPSAHMSDAAEYSADGLTF

SEQ ID NO: 164196 - protein, 13 aa, Homo sapiens
  CDR3 for beta chain variable domain of TCR clone 82098 (TRBV7-3, TRBJ2-1)
CASSPVAYSEQFF

SEQ ID NO: 164197 - protein, 12 aa, Homo sapiens
  CDR3 for alpha chain variable domain of TCR clone 82099 (TRAV21, TRAJ3)
CCFYSSASQIIF

SEQ ID NO: 164198 - protein, 16 aa, Homo sapiens
  CDR3 for beta chain variable domain of TCR clone 82099 (TRBV19, TRBJ2-1)
CASSKAGPSSYNEQFF

SEQ ID NO: 164199 - protein, 12 aa, Homo sapiens
  CDR3 for alpha chain variable domain of TCR clone 82100 (TRAV12-3, TRAJ17)
RAMTLTGNKLTF

SEQ ID NO: 164200 - protein, 15 aa, Homo sapiens
  CDR3 for beta chain variable domain of TCR clone 82100 (TRBV20-1, TRBJ2-7)
CSARDRVFGMDEQYF

SEQ ID NO: 164201 - protein, 15 aa, Homo sapiens
  CDR3 for alpha chain variable domain of TCR clone 82101 (TRAV27, TRAJ38)
CAGRFNAGNNRKLIW

SEQ ID NO: 164202 - protein, 13 aa, Homo sapiens
  CDR3 for beta chain variable domain of TCR clone 82101 (TRBV7-9, TRBJ1-2)
CASSLKQNYGYTF

SEQ ID NO: 164203 - protein, 15 aa, Homo sapiens
  CDR3 for alpha chain variable domain of TCR clone 82102 (TRAV12-3, TRAJ42)
CAMSGHGGSQGNLIF

SEQ ID NO: 164204 - protein, 15 aa, Homo sapiens
  CDR3 for beta chain variable domain of TCR clone 82102 (TRBV2, TRBJ2-1)
CASSEARSAYNEQFF

SEQ ID NO: 164205 - protein, 13 aa, Homo sapiens
  CDR3 for alpha chain variable domain of TCR clone 82103 (TRAV3, TRAJ27)
CAVRPLGAGKSTF

SEQ ID NO: 164206 - protein, 13 aa, Homo sapiens
  CDR3 for beta chain variable domain of TCR clone 82103 (TRBV12-4, TRBJ1-2)
CASSLRQGKGYTF

SEQ ID NO: 164207 - protein, 13 aa, Homo sapiens
  CDR3 for alpha chain variable domain of TCR clone 82104 (TRAV2, TRAJ15)
CAVASQAGTALIF

SEQ ID NO: 164208 - protein, 16 aa, Homo sapiens
  CDR3 for beta chain variable domain of TCR clone 82104 (TRBV13, TRBJ2-2)
CASSPRTGEHTGELFF

SEQ ID NO: 164209 - protein, 11 aa, Homo sapiens
  CDR3 for alpha chain variable domain of TCR clone 82105 (TRAV2, TRAJ13)
CASGGYQKVTF

SEQ ID NO: 164210 - protein, 15 aa, Homo sapiens
  CDR3 for beta chain variable domain of TCR clone 82105 (TRBV5-1, TRBJ2-2)
CASSSQGGNTGELFF

SEQ ID NO: 164211 - protein, 17 aa, Homo sapiens
  CDR3 for alpha chain variable domain of TCR clone 82106 (TRAV23/DV6, TRAJ57)
CAASSTLSQSGSEKLVF

SEQ ID NO: 164212 - protein, 14 aa, Homo sapiens
  CDR3 for beta chain variable domain of TCR clone 82106 (TRBV25-1, TRBJ1-1)
CASTHLGGNTEAFF

SEQ ID NO: 164213 - protein, 14 aa, Homo sapiens
  CDR3 for alpha chain variable domain of TCR clone 82107 (TRAV1-1, TRAJ27)
CAVIYNTNAGKSTF

SEQ ID NO: 164214 - protein, 16 aa, Homo sapiens
  CDR3 for beta chain variable domain of TCR clone 82107 (TRBV19, TRBJ2-1)
CASSKAGPSSYNEQFF

SEQ ID NO: 164215 - protein, 15 aa, Homo sapiens
  CDR3 for alpha chain variable domain of TCR clone 82108 (TRAV12-1, TRAJ44)
CVADLLTGTASKLTF

SEQ ID NO: 164216 - protein, 13 aa, Homo sapiens
  CDR3 for beta chain variable domain of TCR clone 82108 (TRBV6-5, TRBJ2-5)
CASSPQGGETQYF

SEQ ID NO: 164217 - protein, 12 aa, Homo sapiens
  CDR3 for alpha chain variable domain of TCR clone 82109 (TRAV26-1, TRAJ43)
CIVRPRGDDIRF

SEQ ID NO: 164218 - protein, 16 aa, Homo sapiens
  CDR3 for beta chain variable domain of TCR clone 82109 (TRBV3-1, TRBJ2-1)
CASSQGGRRSFDEQFF

SEQ ID NO: 164219 - protein, 16 aa, Homo sapiens
  CDR3 for alpha chain variable domain of TCR clone 82110 (TRAV23/DV6, TRAJ9)
CAASIGGNTGGFKTIF

SEQ ID NO: 164220 - protein, 13 aa, Homo sapiens
  CDR3 for beta chain variable domain of TCR clone 82110 (TRBV7-9, TRBJ1-2)
CASSLKQNYGCTF

SEQ ID NO: 164221 - protein, 17 aa, Homo sapiens
  CDR3 for alpha chain variable domain of TCR clone 82111 (TRAV23/DV6, TRAJ28)
CAALLAYSGAGSYQLTF

SEQ ID NO: 164222 - protein, 13 aa, Homo sapiens
  CDR3 for beta chain variable domain of TCR clone 82111 (TRBV4-2, TRBJ2-3)
FASSQGNTDTQYF

SEQ ID NO: 164223 - protein, 15 aa, Homo sapiens
  CDR3 for alpha chain variable domain of TCR clone 82112 (TRAV8-3, TRAJ27)
CAVGPSKTNAGKSTF

SEQ ID NO: 164224 - protein, 15 aa, Homo sapiens
  CDR3 for beta chain variable domain of TCR clone 82112 (TRBV7-2, TRBJ2-1)
CASSSGPAGGNEQFF

SEQ ID NO: 164225 - protein, 13 aa, Homo sapiens
  CDR3 for alpha chain variable domain of TCR clone 82113 (TRAV30, TRAJ43)
CGTEIKDGGDMRF

SEQ ID NO: 164226 - protein, 13 aa, Homo sapiens
  CDR3 for beta chain variable domain of TCR clone 82113 (TRBV19, TRBJ1-5)
CASSIEPVQPQHF

SEQ ID NO: 164227 - protein, 14 aa, Homo sapiens
  CDR3 for alpha chain variable domain of TCR clone 82114 (TRAV35, TRAJ24)
CAGPRRDSWGKLQF

SEQ ID NO: 164228 - protein, 12 aa, Homo sapiens
  CDR3 for beta chain variable domain of TCR clone 82114 (TRBV12-4, TRBJ2-3)
CASSLGQDTHYF

SEQ ID NO: 164229 - protein, 13 aa, Homo sapiens
  CDR3 for alpha chain variable domain of TCR clone 82115 (TRAV2, TRAJ15)
CAVASQAGAALIF

SEQ ID NO: 164230 - protein, 16 aa, Homo sapiens
  CDR3 for beta chain variable domain of TCR clone 82115 (TRBV5-1, TRBJ1-1)
CASSSGGNSLNTEAFF

SEQ ID NO: 164231 - protein, 13 aa, Homo sapiens
  CDR3 for alpha chain variable domain of TCR clone 82116 (TRAV27, TRAJ6)
CAGGTRGSYIPTF

SEQ ID NO: 164232 - protein, 18 aa, Homo sapiens
  CDR3 for beta chain variable domain of TCR clone 82116 (TRBV20-1, TRBJ2-6)
CSAETTPTHGSGANVLTF

SEQ ID NO: 164233 - protein, 14 aa, Homo sapiens
  CDR3 for alpha chain variable domain of TCR clone 82117 (TRAV12-2, TRAJ13)
CAVKKTGGYQEVTF

SEQ ID NO: 164234 - protein, 15 aa, Homo sapiens
  CDR3 for beta chain variable domain of TCR clone 82117 (TRBV28, TRBJ1-2)
CASSLWQPTNYGYTF

SEQ ID NO: 164235 - protein, 11 aa, Homo sapiens
  CDR3 for alpha chain variable domain of TCR clone 82118 (TRAV12-1, TRAJ34)
CVVNKGRELIF

SEQ ID NO: 164236 - protein, 13 aa, Homo sapiens
  CDR3 for beta chain variable domain of TCR clone 82118 (TRBV2, TRBJ1-1)
CASNLLRNTEAFF

SEQ ID NO: 164237 - protein, 15 aa, Homo sapiens
  CDR3 for alpha chain variable domain of TCR clone 82119 (TRAV25, TRAJ53)
CAATGGGGSNYKLTF

SEQ ID NO: 164238 - protein, 19 aa, Homo sapiens
  CDR3 for beta chain variable domain of TCR clone 82119 (TRBV7-2, TRBJ2-3)
CASSFLSRNWGGGTDTHYF

SEQ ID NO: 164239 - protein, 17 aa, Homo sapiens
  CDR3 for alpha chain variable domain of TCR clone 82120 (TRAV26-2, TRAJ40)
DAAVSRGSDGGTYKYIF

SEQ ID NO: 164240 - protein, 14 aa, Homo sapiens
  CDR3 for beta chain variable domain of TCR clone 82120 (TRBV5-1, TRBJ1-1)
CASRAQGAMTEAFF

SEQ ID NO: 164241 - protein, 12 aa, Homo sapiens
  CDR3 for alpha chain variable domain of TCR clone 82121 (TRAV16, TRAJ12)
CSHGDSSYKLIF

SEQ ID NO: 164242 - protein, 12 aa, Homo sapiens
  CDR3 for beta chain variable domain of TCR clone 82121 (TRBV28, TRBJ2-1)
CASSRLVGEQFF

SEQ ID NO: 164243 - protein, 14 aa, Homo sapiens
  CDR3 for alpha chain variable domain of TCR clone 82122 (TRAV23/DV6, TRAJ8)
CAASKATGFRKLVF

SEQ ID NO: 164244 - protein, 15 aa, Homo sapiens
  CDR3 for beta chain variable domain of TCR clone 82122 (TRBV28, TRBJ2-3)
CASSPDRQGANTQYF

SEQ ID NO: 164245 - protein, 12 aa, Homo sapiens
  CDR3 for alpha chain variable domain of TCR clone 82123 (TRAV13-1, TRAJ17)
CAAPRCRQQANF

SEQ ID NO: 164246 - protein, 13 aa, Homo sapiens
  CDR3 for beta chain variable domain of TCR clone 82123 (TRBV20-1, TRBJ2-5)
CSARYTGEEAQYF

SEQ ID NO: 164247 - protein, 14 aa, Homo sapiens
  CDR3 for alpha chain variable domain of TCR clone 82124 (TRAV13-1, TRAJ35)
CAASKGGFGNVLHC

SEQ ID NO: 164248 - protein, 16 aa, Homo sapiens
  CDR3 for beta chain variable domain of TCR clone 82124 (TRBV12-4, TRBJ2-5)
CASSFFVRGRQETQYF

SEQ ID NO: 164249 - protein, 12 aa, Homo sapiens
  CDR3 for alpha chain variable domain of TCR clone 82125 (TRAV12-3, TRAJ17)
CAMTPTGNKLTF

SEQ ID NO: 164250 - protein, 16 aa, Homo sapiens
  CDR3 for beta chain variable domain of TCR clone 82125 (TRBV15, TRBJ2-3)
CATSRDLGIVTDTQYF

SEQ ID NO: 164251 - protein, 14 aa, Homo sapiens
  CDR3 for alpha chain variable domain of TCR clone 82126 (TRAV26-1, TRAJ38)
CIADNAGNNRKLIW

SEQ ID NO: 164252 - protein, 15 aa, Homo sapiens
  CDR3 for beta chain variable domain of TCR clone 82126 (TRBV6-1, TRBJ2-3)
CASSERGGITDTQYF

SEQ ID NO: 164253 - protein, 12 aa, Homo sapiens
  CDR3 for alpha chain variable domain of TCR clone 82127 (TRAV17, TRAJ39)
CATGAAGNMLTF

SEQ ID NO: 164254 - protein, 13 aa, Homo sapiens
  CDR3 for beta chain variable domain of TCR clone 82127 (TRBV12-4, TRBJ1-1)
CASSPGTGFEAFF

SEQ ID NO: 164255 - protein, 14 aa, Homo sapiens
  CDR3 for alpha chain variable domain of TCR clone 82128 (TRAV3, TRAJ17)
CAVRDAAAGNKLTF

SEQ ID NO: 164256 - protein, 11 aa, Homo sapiens
  CDR3 for beta chain variable domain of TCR clone 82128 (TRBV19, TRBJ1-1)
CASSIGSEAFF

SEQ ID NO: 164257 - protein, 12 aa, Homo sapiens
  CDR3 for alpha chain variable domain of TCR clone 82129 (TRAV8-3, TRAJ20)
CAVGANDYKLSF

SEQ ID NO: 164258 - protein, 16 aa, Homo sapiens
  CDR3 for beta chain variable domain of TCR clone 82129 (TRBV19, TRBJ2-2)
CASRSPGSGATGELFF

SEQ ID NO: 164259 - protein, 13 aa, Homo sapiens
  CDR3 for alpha chain variable domain of TCR clone 82130 (TRAV8-1, TRAJ28)
CAVSGAGSYQLTF

SEQ ID NO: 164260 - protein, 14 aa, Homo sapiens
  CDR3 for beta chain variable domain of TCR clone 82130 (TRBV7-8, TRBJ2-2)
CASRGQGAAGELFF

SEQ ID NO: 164261 - protein, 12 aa, Homo sapiens
  CDR3 for alpha chain variable domain of TCR clone 82131 (TRAV17, TRAJ53)
CAGGGSDYKLTF

SEQ ID NO: 164262 - protein, 16 aa, Homo sapiens
  CDR3 for beta chain variable domain of TCR clone 82131 (TRBV11-2, TRBJ2-3)
CASSFQGRGALDTQYF

SEQ ID NO: 164263 - protein, 12 aa, Homo sapiens
  CDR3 for alpha chain variable domain of TCR clone 82132 (TRAV1-2, TRAJ29)
CAVPSGNTPLVF

SEQ ID NO: 164264 - protein, 15 aa, Homo sapiens
  CDR3 for beta chain variable domain of TCR clone 82132 (TRBV7-8, TRBJ2-1)
CASSLAGGLYNEQFF

SEQ ID NO: 164265 - protein, 15 aa, Homo sapiens
  CDR3 for alpha chain variable domain of TCR clone 82133 (TRAV21, TRAJ24)
CAARSSTDSWGKLQI

SEQ ID NO: 164266 - protein, 13 aa, Homo sapiens
  CDR3 for beta chain variable domain of TCR clone 82133 (TRBV11-2, TRBJ2-5)
CASSSTGEETQYF

SEQ ID NO: 164267 - protein, 11 aa, Homo sapiens
  CDR3 for alpha chain variable domain of TCR clone 82134 (TRAV23/DV6, TRAJ48)
CAPRWGETLTF

SEQ ID NO: 164268 - protein, 14 aa, Homo sapiens
  CDR3 for beta chain variable domain of TCR clone 82134 (TRBV29-1, TRBJ1-3)
CSVADRVVGNTIYF

SEQ ID NO: 164269 - protein, 14 aa, Homo sapiens
  CDR3 for alpha chain variable domain of TCR clone 82135 (TRAV36/DV7, TRAJ40)
CAGETTSGTYKYIF

SEQ ID NO: 164270 - protein, 13 aa, Homo sapiens
  CDR3 for beta chain variable domain of TCR clone 82135 (TRBV10-3, TRBJ2-5)
CAMTSGAGETQYF

SEQ ID NO: 164271 - protein, 13 aa, Homo sapiens
  CDR3 for alpha chain variable domain of TCR clone 82136 (TRAV20, TRAJ9)
CAVPDTGGFKTIF

SEQ ID NO: 164272 - protein, 15 aa, Homo sapiens
  CDR3 for beta chain variable domain of TCR clone 82136 (TRBV27, TRBJ2-7)
CASSKAGRGGYEQYL

SEQ ID NO: 164273 - protein, 15 aa, Homo sapiens
  CDR3 for alpha chain variable domain of TCR clone 82137 (TRAV3, TRAJ17)
CAVRDTGAAGNKLTF

SEQ ID NO: 164274 - protein, 14 aa, Homo sapiens
  CDR3 for beta chain variable domain of TCR clone 82137 (TRBV20-1, TRBJ2-1)
CSAQIGGSANEQFF

SEQ ID NO: 164275 - protein, 15 aa, Homo sapiens
  CDR3 for alpha chain variable domain of TCR clone 82138 (TRAV2, TRAJ22)
CAVPSRGGSARQLTF

SEQ ID NO: 164276 - protein, 14 aa, Homo sapiens
  CDR3 for beta chain variable domain of TCR clone 82138 (TRBV7-2, TRBJ2-7)
CASSPKTSFYEQYF

SEQ ID NO: 164277 - protein, 15 aa, Homo sapiens
  CDR3 for alpha chain variable domain of TCR clone 82139 (TRAV34, TRAJ38)
CGADFTPGNNRKLIW

SEQ ID NO: 164278 - protein, 13 aa, Homo sapiens
  CDR3 for beta chain variable domain of TCR clone 82139 (TRBV10-3, TRBJ2-7)
CASKLAVNYEQYF

SEQ ID NO: 164279 - protein, 13 aa, Homo sapiens
  CDR3 for alpha chain variable domain of TCR clone 82140 (TRAV1-1, TRAJ31)
CASYLNNNARLMF

SEQ ID NO: 164280 - protein, 15 aa, Homo sapiens
  CDR3 for beta chain variable domain of TCR clone 82140 (TRBV15, TRBJ1-6)
CATSGALIHPSTLGT

SEQ ID NO: 164281 - protein, 17 aa, Homo sapiens
  CDR3 for alpha chain variable domain of TCR clone 82141 (TRAV3, TRAJ42)
CAVRDRDYGGSQGNLIF

SEQ ID NO: 164282 - protein, 15 aa, Homo sapiens
  CDR3 for beta chain variable domain of TCR clone 82141 (TRBV15, TRBJ1-1)
CATSLQGGRNTEAFF

SEQ ID NO: 164283 - protein, 15 aa, Homo sapiens
  CDR3 for alpha chain variable domain of TCR clone 82142 (TRAV12-2, TRAJ43)
CAFDMRFGAGTRLTV

SEQ ID NO: 164284 - protein, 18 aa, Homo sapiens
  CDR3 for beta chain variable domain of TCR clone 82142 (TRBV20-1, TRBJ2-3)
CSASGLAGGPGTKDTQYF

SEQ ID NO: 164285 - protein, 14 aa, Homo sapiens
  CDR3 for alpha chain variable domain of TCR clone 82143 (TRAV8-3, TRAJ10)
CAVGNAGGGNKLTF

SEQ ID NO: 164286 - protein, 16 aa, Homo sapiens
  CDR3 for beta chain variable domain of TCR clone 82143 (TRBV7-3, TRBJ2-2)
CASSLKRGTLSGELFF

SEQ ID NO: 164287 - protein, 15 aa, Homo sapiens
  CDR3 for alpha chain variable domain of TCR clone 82144 (TRAV8-3, TRAJ45)
CASSYSGGGADGPTF

SEQ ID NO: 164288 - protein, 17 aa, Homo sapiens
  CDR3 for beta chain variable domain of TCR clone 82144 (TRBV7-8, TRBJ1-2)
CASSLRPLQGHLYGYTF

SEQ ID NO: 164289 - protein, 15 aa, Homo sapiens
  CDR3 for alpha chain variable domain of TCR clone 82145 (TRAV17, TRAJ57)
CDTGPSQGGSEKLVF

SEQ ID NO: 164290 - protein, 14 aa, Homo sapiens
  CDR3 for beta chain variable domain of TCR clone 82145 (TRBV12-5, TRBJ2-5)
CASGSRTHQETQYF

SEQ ID NO: 164291 - protein, 12 aa, Homo sapiens
  CDR3 for alpha chain variable domain of TCR clone 82146 (TRAV12-3, TRAJ17)
CAMTLTGNKLTF

SEQ ID NO: 164292 - protein, 15 aa, Homo sapiens
  CDR3 for beta chain variable domain of TCR clone 82146 (TRBV19, TRBJ2-1)
CASSILGEGRNKQFF

SEQ ID NO: 164293 - protein, 12 aa, Homo sapiens
  CDR3 for alpha chain variable domain of TCR clone 82147 (TRAV12-3, TRAJ17)
CAMTLTGNKLIF

SEQ ID NO: 164294 - protein, 17 aa, Homo sapiens
  CDR3 for beta chain variable domain of TCR clone 82147 (TRBV11-2, TRBJ2-1)
CASSLYPPGVEYNEQFF

SEQ ID NO: 164295 - protein, 16 aa, Homo sapiens
  CDR3 for alpha chain variable domain of TCR clone 82148 (TRAV3, TRAJ18)
CAVRDGRGSTLGRLYF

SEQ ID NO: 164296 - protein, 15 aa, Homo sapiens
  CDR3 for beta chain variable domain of TCR clone 82148 (TRBV7-9, TRBJ1-6)
FASSSPGRGNSPLHF

SEQ ID NO: 164297 - protein, 15 aa, Homo sapiens
  CDR3 for alpha chain variable domain of TCR clone 82149 (TRAV3, TRAJ3)
CAVRDRDSSASKIIF

SEQ ID NO: 164298 - protein, 16 aa, Homo sapiens
  CDR3 for beta chain variable domain of TCR clone 82149 (TRBV7-3, TRBJ2-2)
CASSLKRGTLSGELFF

SEQ ID NO: 164299 - protein, 15 aa, Homo sapiens
  CDR3 for alpha chain variable domain of TCR clone 82150 (TRAV8-6, TRAJ23)
CAVRLIYNQGGKLIF

SEQ ID NO: 164300 - protein, 13 aa, Homo sapiens
  CDR3 for beta chain variable domain of TCR clone 82150 (TRBV11-2, TRBJ2-2)
CASSLQNTGELLF

SEQ ID NO: 164301 - protein, 14 aa, Homo sapiens
  CDR3 for alpha chain variable domain of TCR clone 82151 (TRAV38-1, TRAJ40)
CALRPTSGTYKYIS

SEQ ID NO: 164302 - protein, 16 aa, Homo sapiens
  CDR3 for beta chain variable domain of TCR clone 82151 (TRBV6-1, TRBJ1-2)
CASSGAWQGRSHGYTF

SEQ ID NO: 164303 - protein, 16 aa, Homo sapiens
  CDR3 for alpha chain variable domain of TCR clone 82152 (TRAV20, TRAJ53)
CAVQDQPRGSNYKLTF

SEQ ID NO: 164304 - protein, 13 aa, Homo sapiens
  CDR3 for beta chain variable domain of TCR clone 82152 (TRBV7-9, TRBJ1-2)
CASSLKQNYGYTF

SEQ ID NO: 164305 - protein, 13 aa, Homo sapiens
  CDR3 for alpha chain variable domain of TCR clone 82153 (TRAV12-3, TRAJ13)
CAMTSGCYQKVTF

SEQ ID NO: 164306 - protein, 13 aa, Homo sapiens
  CDR3 for beta chain variable domain of TCR clone 82153 (TRBV20-1, TRBJ2-2)
CSALSGGAGELFF

SEQ ID NO: 164307 - protein, 15 aa, Homo sapiens
  CDR3 for alpha chain variable domain of TCR clone 82154 (TRAV8-3, TRAJ41)
CAVGSNSNSGYVLNF

SEQ ID NO: 164308 - protein, 17 aa, Homo sapiens
  CDR3 for beta chain variable domain of TCR clone 82154 (TRBV25-1, TRBJ2-1)
CASSAYGQGRGVYEQFF

SEQ ID NO: 164309 - protein, 19 aa, Homo sapiens
  CDR3 for alpha chain variable domain of TCR clone 82155 (TRAV3, TRAJ6)
CAVRDRNPSRSGGSYIPTF

SEQ ID NO: 164310 - protein, 15 aa, Homo sapiens
  CDR3 for beta chain variable domain of TCR clone 82155 (TRBV18, TRBJ2-7)
CASSPTFMDSYERYF

SEQ ID NO: 164311 - protein, 15 aa, Homo sapiens
  CDR3 for alpha chain variable domain of TCR clone 82156 (TRAV8-3, TRAJ37)
CAVGARASNTGNLIF

SEQ ID NO: 164312 - protein, 15 aa, Homo sapiens
  CDR3 for beta chain variable domain of TCR clone 82156 (TRBV5-4, TRBJ2-3)
CASSLAGRVTDTQYF

SEQ ID NO: 164313 - protein, 16 aa, Homo sapiens
  CDR3 for alpha chain variable domain of TCR clone 82157 (TRAV3, TRAJ18)
CAVRDGRGSTLGMLYF

SEQ ID NO: 164314 - protein, 15 aa, Homo sapiens
  CDR3 for beta chain variable domain of TCR clone 82157 (TRBV7-9, TRBJ1-6)
CASSSPGRGNSPLHF

SEQ ID NO: 164315 - protein, 13 aa, Homo sapiens
  CDR3 for alpha chain variable domain of TCR clone 82158 (TRAV1-2, TRAJ9)
CAALNTGGFKTIF

SEQ ID NO: 164316 - protein, 13 aa, Homo sapiens
  CDR3 for beta chain variable domain of TCR clone 82158 (TRBV19, TRBJ1-2)
CASSVPGQDDYTF

SEQ ID NO: 164317 - protein, 16 aa, Homo sapiens
  CDR3 for alpha chain variable domain of TCR clone 82159 (TRAV3, TRAJ10)
CAVRDMRAGGGNRLTF

SEQ ID NO: 164318 - protein, 14 aa, Homo sapiens
  CDR3 for beta chain variable domain of TCR clone 82159 (TRBV28, TRBJ2-2)
CASTRRSGDGELFF

SEQ ID NO: 164319 - protein, 12 aa, Homo sapiens
  CDR3 for alpha chain variable domain of TCR clone 82160 (TRAV30, TRAJ15)
CGTNQAGTALIS

SEQ ID NO: 164320 - protein, 13 aa, Homo sapiens
  CDR3 for beta chain variable domain of TCR clone 82160 (TRBV24-1, TRBJ2-7)
CATSDLGPYEQYF

SEQ ID NO: 164321 - protein, 21 aa, Homo sapiens
  CDR3 for alpha chain variable domain of TCR clone 82161 (TRAV29/DV5, TRAJ52)
CSVLLCSKREAGGTSYGKLTF

SEQ ID NO: 164322 - protein, 13 aa, Homo sapiens
  CDR3 for beta chain variable domain of TCR clone 82161 (TRBV27, TRBJ1-4)
CASSLMGDEKLFF

SEQ ID NO: 164323 - protein, 11 aa, Homo sapiens
  CDR3 for alpha chain variable domain of TCR clone 82162 (TRAV2, TRAJ13)
CASGGYQKVTF

SEQ ID NO: 164324 - protein, 13 aa, Homo sapiens
  CDR3 for beta chain variable domain of TCR clone 82162 (TRBV20-1, TRBJ2-2)
CSASASGTGELFF

SEQ ID NO: 164325 - protein, 15 aa, Homo sapiens
  CDR3 for alpha chain variable domain of TCR clone 82163 (TRAV8-4, TRAJ39)
CAVSRHRGAGNMLTF

SEQ ID NO: 164326 - protein, 15 aa, Homo sapiens
  CDR3 for beta chain variable domain of TCR clone 82163 (TRBV20-1, TRBJ1-1)
CSARPRQGAPTEAFF

SEQ ID NO: 164327 - protein, 14 aa, Homo sapiens
  CDR3 for alpha chain variable domain of TCR clone 82164 (TRAV13-1, TRAJ35)
CAASKGGFGSVLHC

SEQ ID NO: 164328 - protein, 13 aa, Homo sapiens
  CDR3 for beta chain variable domain of TCR clone 82164 (TRBV7-3, TRBJ1-1)
CASSQDWGAEAFF

SEQ ID NO: 164329 - protein, 13 aa, Homo sapiens
  CDR3 for alpha chain variable domain of TCR clone 82165 (TRAV12-3, TRAJ5)
CAMIYTGRRALTF

SEQ ID NO: 164330 - protein, 12 aa, Homo sapiens
  CDR3 for beta chain variable domain of TCR clone 82165 (TRBV18, TRBJ1-4)
CASSPSREKPFF

SEQ ID NO: 164331 - protein, 15 aa, Homo sapiens
  CDR3 for alpha chain variable domain of TCR clone 82166 (TRAV8-3, TRAJ11)
CVVGLLNSGYSTLTF

SEQ ID NO: 164332 - protein, 16 aa, Homo sapiens
  CDR3 for beta chain variable domain of TCR clone 82166 (TRBV7-9, TRBJ1-2)
CASSLGFSSGEDGYTF

SEQ ID NO: 164333 - protein, 14 aa, Homo sapiens
  CDR3 for alpha chain variable domain of TCR clone 82167 (TRAV12-2, TRAJ13)
CSVKKTGGYQKVTF

SEQ ID NO: 164334 - protein, 15 aa, Homo sapiens
  CDR3 for beta chain variable domain of TCR clone 82167 (TRBV20-1, TRBJ2-1)
CSARGIGGTYNEQFF

SEQ ID NO: 164335 - protein, 15 aa, Homo sapiens
  CDR3 for alpha chain variable domain of TCR clone 82168 (TRAV8-3, TRAJ27)
CAAGPSKTNAGKSTL

SEQ ID NO: 164336 - protein, 15 aa, Homo sapiens
  CDR3 for beta chain variable domain of TCR clone 82168 (TRBV7-2, TRBJ2-1)
CASSSGLAGGNEQFF

SEQ ID NO: 164337 - protein, 13 aa, Homo sapiens
  CDR3 for alpha chain variable domain of TCR clone 82169 (TRAV12-3, TRAJ33)
CAMSVNSNYQLIW

SEQ ID NO: 164338 - protein, 12 aa, Homo sapiens
  CDR3 for beta chain variable domain of TCR clone 82169 (TRBV6-3, TRBJ2-7)
CASSLTPYEQYF

SEQ ID NO: 164339 - protein, 20 aa, Homo sapiens
  CDR3 for alpha chain variable domain of TCR clone 82170 (TRAV25, TRAJ21)
TATQTTDVGTYPLSFNKFYF

SEQ ID NO: 164340 - protein, 12 aa, Homo sapiens
  CDR3 for beta chain variable domain of TCR clone 82170 (TRBV11-2, TRBJ2-2)
CASSLGGGELFF

SEQ ID NO: 164341 - protein, 12 aa, Homo sapiens
  CDR3 for alpha chain variable domain of TCR clone 82171 (TRAV1-1, TRAJ20)
CAVRDRTTSAAL

SEQ ID NO: 164342 - protein, 18 aa, Homo sapiens
  CDR3 for beta chain variable domain of TCR clone 82171 (TRBV20-1, TRBJ2-6)
CSAETTPTHGSGANVLTF

SEQ ID NO: 164343 - protein, 17 aa, Homo sapiens
  CDR3 for alpha chain variable domain of TCR clone 82172 (TRAV8-6, TRAJ58)
CAVSSWVGGTSGSRLTF

SEQ ID NO: 164344 - protein, 17 aa, Homo sapiens
  CDR3 for beta chain variable domain of TCR clone 82172 (TRBV11-2, TRBJ2-1)
CASSLYPPGVEYNEQFF

SEQ ID NO: 164345 - protein, 13 aa, Homo sapiens
  CDR3 for alpha chain variable domain of TCR clone 82173 (TRAV8-4, TRAJ47)
CAVTALYGNKLVF

SEQ ID NO: 164346 - protein, 14 aa, Homo sapiens
  CDR3 for beta chain variable domain of TCR clone 82173 (TRBV19, TRBJ2-7)
CASGIGGAVAEQYF

SEQ ID NO: 164347 - protein, 14 aa, Homo sapiens
  CDR3 for alpha chain variable domain of TCR clone 82174 (TRAV2, TRAJ15)
CAVTVNQAGTALIF

SEQ ID NO: 164348 - protein, 13 aa, Homo sapiens
  CDR3 for beta chain variable domain of TCR clone 82174 (TRBV20-1, TRBJ1-1)
CSARGGGNTEAFF

SEQ ID NO: 164349 - protein, 13 aa, Homo sapiens
  CDR3 for alpha chain variable domain of TCR clone 82175 (TRAV27, TRAJ41)
SAGEGNSGYALNF

SEQ ID NO: 164350 - protein, 14 aa, Homo sapiens
  CDR3 for beta chain variable domain of TCR clone 82175 (TRBV7-2, TRBJ1-1)
CASSFLTGTTEAFF

SEQ ID NO: 164351 - protein, 12 aa, Homo sapiens
  CDR3 for alpha chain variable domain of TCR clone 82176 (TRAV12-2, TRAJ10)
WGVTGGGNKLTF

SEQ ID NO: 164352 - protein, 18 aa, Homo sapiens
  CDR3 for beta chain variable domain of TCR clone 82176 (TRBV11-2, TRBJ2-3)
CASSLGGASRGAPNTQYF

SEQ ID NO: 164353 - protein, 15 aa, Homo sapiens
  CDR3 for alpha chain variable domain of TCR clone 82177 (TRAV16, TRAJ12)
CSKWPLRDSSYKLIL

SEQ ID NO: 164354 - protein, 13 aa, Homo sapiens
  CDR3 for beta chain variable domain of TCR clone 82177 (TRBV4-2, TRBJ1-1)
CASSQAGNTEAFF

SEQ ID NO: 164355 - protein, 11 aa, Homo sapiens
  CDR3 for alpha chain variable domain of TCR clone 82178 (TRAV4, TRAJ31)
CLVGDNARLMF

SEQ ID NO: 164356 - protein, 16 aa, Homo sapiens
  CDR3 for beta chain variable domain of TCR clone 82178 (TRBV7-2, TRBJ2-5)
CASSSKWLRGQETQYF

SEQ ID NO: 164357 - protein, 12 aa, Homo sapiens
  CDR3 for alpha chain variable domain of TCR clone 82179 (TRAV16, TRAJ10)
CSRTGGGNKLTF

SEQ ID NO: 164358 - protein, 13 aa, Homo sapiens
  CDR3 for beta chain variable domain of TCR clone 82179 (TRBV7-2, TRBJ2-2)
CASSLAVTGELFF

SEQ ID NO: 164359 - protein, 11 aa, Homo sapiens
  CDR3 for alpha chain variable domain of TCR clone 82180 (TRAV1-1, TRAJ23)
CAVRQGGKLIF

SEQ ID NO: 164360 - protein, 20 aa, Homo sapiens
  CDR3 for beta chain variable domain of TCR clone 82180 (TRBV7-8, TRBJ2-2)
CASSNLFPGPTIHITGELFF

SEQ ID NO: 164361 - protein, 17 aa, Homo sapiens
  CDR3 for alpha chain variable domain of TCR clone 82181 (TRAV26-1, TRAJ37)
CIVRVITVSSNTGKLIF

SEQ ID NO: 164362 - protein, 13 aa, Homo sapiens
  CDR3 for beta chain variable domain of TCR clone 82181 (TRBV20-1, TRBJ1-1)
CSARGGGNTEAFF

SEQ ID NO: 164363 - protein, 11 aa, Homo sapiens
  CDR3 for alpha chain variable domain of TCR clone 82182 (TRAV26-1, TRAJ27)
CIDPNAGKSTF

SEQ ID NO: 164364 - protein, 18 aa, Homo sapiens
  CDR3 for beta chain variable domain of TCR clone 82182 (TRBV7-9, TRBJ2-6)
CASSFPGAGISGANVLTL

SEQ ID NO: 164365 - protein, 15 aa, Homo sapiens
  CDR3 for alpha chain variable domain of TCR clone 82183 (TRAV12-3, TRAJ48)
CAMNAKNFGNEKLTF

SEQ ID NO: 164366 - protein, 14 aa, Homo sapiens
  CDR3 for beta chain variable domain of TCR clone 82183 (TRBV2, TRBJ1-6)
CSSSESRNNSPLHF

SEQ ID NO: 164367 - protein, 14 aa, Homo sapiens
  CDR3 for alpha chain variable domain of TCR clone 82184 (TRAV3, TRAJ7)
CAGREEEREQQTRF

SEQ ID NO: 164368 - protein, 12 aa, Homo sapiens
  CDR3 for beta chain variable domain of TCR clone 82184 (TRBV7-8, TRBJ2-7)
CASSLGDREQYF

SEQ ID NO: 164369 - protein, 14 aa, Homo sapiens
  CDR3 for alpha chain variable domain of TCR clone 82185 (TRAV9-2, TRAJ39)
CALYIYNAGNMLTF

SEQ ID NO: 164370 - protein, 14 aa, Homo sapiens
  CDR3 for beta chain variable domain of TCR clone 82185 (TRBV5-4, TRBJ2-5)
CASSQGAGKETQYF

SEQ ID NO: 164371 - protein, 15 aa, Homo sapiens
  CDR3 for alpha chain variable domain of TCR clone 82186 (TRAV12-1, TRAJ21)
CVVIGDNFNKFTLDL

SEQ ID NO: 164372 - protein, 14 aa, Homo sapiens
  CDR3 for beta chain variable domain of TCR clone 82186 (TRBV7-3, TRBJ2-2)
CASSLYPLTGELFF

SEQ ID NO: 164373 - protein, 13 aa, Homo sapiens
  CDR3 for alpha chain variable domain of TCR clone 82187 (TRAV17, TRAJ26)
CATVDNYGQNFVF

SEQ ID NO: 164374 - protein, 16 aa, Homo sapiens
  CDR3 for beta chain variable domain of TCR clone 82187 (TRBV2, TRBJ2-1)
CASSVGGSLSYNEQSF

SEQ ID NO: 164375 - protein, 10 aa, Homo sapiens
  CDR3 for alpha chain variable domain of TCR clone 82188 (TRAV12-1, TRAJ31)
CVVNYARLMF

SEQ ID NO: 164376 - protein, 15 aa, Homo sapiens
  CDR3 for beta chain variable domain of TCR clone 82188 (TRBV11-3, TRBJ2-3)
CASLKDGREGDTQYF

SEQ ID NO: 164377 - protein, 14 aa, Homo sapiens
  CDR3 for alpha chain variable domain of TCR clone 82189 (TRAV25, TRAJ22)
CAVRSSGSARQLTF

SEQ ID NO: 164378 - protein, 15 aa, Homo sapiens
  CDR3 for beta chain variable domain of TCR clone 82189 (TRBV4-3, TRBJ1-4)
CASSDTGGTNEKLFF

SEQ ID NO: 164379 - protein, 18 aa, Homo sapiens
  CDR3 for alpha chain variable domain of TCR clone 82190 (TRAV13-1, TRAJ52)
CAAKNTNAGGTSYGKLTF

SEQ ID NO: 164380 - protein, 15 aa, Homo sapiens
  CDR3 for beta chain variable domain of TCR clone 82190 (TRBV2, TRBJ2-2)
CASSRETVGTGELFF

SEQ ID NO: 164381 - protein, 11 aa, Homo sapiens
  CDR3 for alpha chain variable domain of TCR clone 82191 (TRAV2, TRAJ13)
CASGGYQKVTF

SEQ ID NO: 164382 - protein, 14 aa, Homo sapiens
  CDR3 for beta chain variable domain of TCR clone 82191 (TRBV7-9, TRBJ2-5)
CASSLDTAQETQYF

SEQ ID NO: 164383 - protein, 13 aa, Homo sapiens
  CDR3 for alpha chain variable domain of TCR clone 82192 (TRAV29/DV5, TRAJ29)
CAASAAGKTPLVF

SEQ ID NO: 164384 - protein, 14 aa, Homo sapiens
  CDR3 for beta chain variable domain of TCR clone 82192 (TRBV19, TRBJ2-3)
CASSAPRGTDTQYF

SEQ ID NO: 164385 - protein, 11 aa, Homo sapiens
  CDR3 for alpha chain variable domain of TCR clone 82193 (TRAV12-2, TRAJ49)
CALQGGNQFYF

SEQ ID NO: 164386 - protein, 14 aa, Homo sapiens
  CDR3 for beta chain variable domain of TCR clone 82193 (TRBV7-2, TRBJ2-7)
CASSPKTSFYEQYS

SEQ ID NO: 164387 - protein, 11 aa, Homo sapiens
  CDR3 for alpha chain variable domain of TCR clone 82194 (TRAV35, TRAJ12)
RRMDSSYKLIF

SEQ ID NO: 164388 - protein, 14 aa, Homo sapiens
  CDR3 for beta chain variable domain of TCR clone 82194 (TRBV19, TRBJ1-1)
CASSPNRGDTEAVF

SEQ ID NO: 164389 - protein, 14 aa, Homo sapiens
  CDR3 for alpha chain variable domain of TCR clone 82195 (TRAV13-1, TRAJ9)
CAASALTGGFKTIF

SEQ ID NO: 164390 - protein, 15 aa, Homo sapiens
  CDR3 for beta chain variable domain of TCR clone 82195 (TRBV6-3, TRBJ2-7)
CASSSPGTVFYEQYF

SEQ ID NO: 164391 - protein, 14 aa, Homo sapiens
  CDR3 for alpha chain variable domain of TCR clone 82196 (TRAV16, TRAJ15)
CALSGPQAGTAMIF

SEQ ID NO: 164392 - protein, 12 aa, Homo sapiens
  CDR3 for beta chain variable domain of TCR clone 82196 (TRBV18, TRBJ2-5)
CASSPSKETQYF

SEQ ID NO: 164393 - protein, 20 aa, Homo sapiens
  CDR3 for alpha chain variable domain of TCR clone 82197 (TRAV12-3, TRAJ41)
SLFIRDSQPSDSATPEALNF

SEQ ID NO: 164394 - protein, 15 aa, Homo sapiens
  CDR3 for beta chain variable domain of TCR clone 82197 (TRBV5-1, TRBJ2-7)
CASGLDLTSSYEQYF

SEQ ID NO: 164395 - protein, 16 aa, Homo sapiens
  CDR3 for alpha chain variable domain of TCR clone 82198 (TRAV12-3, TRAJ53)
CAMSPGSGGSNYKLTF

SEQ ID NO: 164396 - protein, 16 aa, Homo sapiens
  CDR3 for beta chain variable domain of TCR clone 82198 (TRBV20-1, TRBJ2-1)
CSASASGYSSYNEQFF

SEQ ID NO: 164397 - protein, 15 aa, Homo sapiens
  CDR3 for alpha chain variable domain of TCR clone 82199 (TRAV26-1, TRAJ17)
CIVRVVKAAGNELTF

SEQ ID NO: 164398 - protein, 16 aa, Homo sapiens
  CDR3 for beta chain variable domain of TCR clone 82199 (TRBV7-9, TRBJ2-1)
CASSLVSGPSYNEQFF

SEQ ID NO: 164399 - protein, 13 aa, Homo sapiens
  CDR3 for alpha chain variable domain of TCR clone 82200 (TRAV2, TRAJ40)
CAVVTSGAYKYIF

SEQ ID NO: 164400 - protein, 16 aa, Homo sapiens
  CDR3 for beta chain variable domain of TCR clone 82200 (TRBV7-3, TRBJ2-1)
CASSLEGYRSYNEQFF

SEQ ID NO: 164401 - protein, 13 aa, Homo sapiens
  CDR3 for alpha chain variable domain of TCR clone 82201 (TRAV17, TRAJ6)
CATGLGGSYIPTF

SEQ ID NO: 164402 - protein, 14 aa, Homo sapiens
  CDR3 for beta chain variable domain of TCR clone 82201 (TRBV5-1, TRBJ2-5)
CASSFGGSQETQYF

SEQ ID NO: 164403 - protein, 15 aa, Homo sapiens
  CDR3 for alpha chain variable domain of TCR clone 82202 (TRAV38-1, TRAJ37)
CAFIFGSGNTGKLIF

SEQ ID NO: 164404 - protein, 12 aa, Homo sapiens
  CDR3 for beta chain variable domain of TCR clone 82202 (TRBV7-9, TRBJ2-7)
YASSLEGYEQYF

SEQ ID NO: 164405 - protein, 14 aa, Homo sapiens
  CDR3 for alpha chain variable domain of TCR clone 82203 (TRAV1-2, TRAJ8)
CAVREDTGFQKLVF

SEQ ID NO: 164406 - protein, 15 aa, Homo sapiens
  CDR3 for beta chain variable domain of TCR clone 82203 (TRBV20-1, TRBJ1-5)
CSAFKNGQRNQPQHF

SEQ ID NO: 164407 - protein, 14 aa, Homo sapiens
  CDR3 for alpha chain variable domain of TCR clone 82204 (TRAV30, TRAJ26)
CGTEIVSYGQNFVF

SEQ ID NO: 164408 - protein, 14 aa, Homo sapiens
  CDR3 for beta chain variable domain of TCR clone 82204 (TRBV19, TRBJ2-1)
CASGKSTQYNEQFF

SEQ ID NO: 164409 - protein, 13 aa, Homo sapiens
  CDR3 for alpha chain variable domain of TCR clone 82205 (TRAV13-1, TRAJ39)
CAASIWAGNMLTF

SEQ ID NO: 164410 - protein, 15 aa, Homo sapiens
  CDR3 for beta chain variable domain of TCR clone 82205 (TRBV7-9, TRBJ1-1)
CASSLLEQGGTEALF

SEQ ID NO: 164411 - protein, 12 aa, Homo sapiens
  CDR3 for alpha chain variable domain of TCR clone 82206 (TRAV26-2, TRAJ21)
CTLKGNFNKFYF

SEQ ID NO: 164412 - protein, 14 aa, Homo sapiens
  CDR3 for beta chain variable domain of TCR clone 82206 (TRBV7-9, TRBJ1-1)
CASTPLQSYTEAFF

SEQ ID NO: 164413 - protein, 13 aa, Homo sapiens
  CDR3 for alpha chain variable domain of TCR clone 82207 (TRAV29/DV5, TRAJ31)
CAASRNNNARLMF

SEQ ID NO: 164414 - protein, 16 aa, Homo sapiens
  CDR3 for beta chain variable domain of TCR clone 82207 (TRBV2, TRBJ2-1)
CASSVGGSLSYNEQFF

SEQ ID NO: 164415 - protein, 14 aa, Homo sapiens
  CDR3 for alpha chain variable domain of TCR clone 82208 (TRAV9-2, TRAJ39)
CALYIYNAGNMLTF

SEQ ID NO: 164416 - protein, 17 aa, Homo sapiens
  CDR3 for beta chain variable domain of TCR clone 82208 (TRBV28, TRBJ2-5)
CASGTPEGDALQETQYF

SEQ ID NO: 164417 - protein, 11 aa, Homo sapiens
  CDR3 for alpha chain variable domain of TCR clone 82209 (TRAV12-3, TRAJ43)
CAMSVSNDMRF

SEQ ID NO: 164418 - protein, 15 aa, Homo sapiens
  CDR3 for beta chain variable domain of TCR clone 82209 (TRBV7-9, TRBJ1-5)
CASSQGHQPNQPQHF

SEQ ID NO: 164419 - protein, 13 aa, Homo sapiens
  CDR3 for alpha chain variable domain of TCR clone 82210 (TRAV12-3, TRAJ7)
CAMSASGNNRLAF

SEQ ID NO: 164420 - protein, 15 aa, Homo sapiens
  CDR3 for beta chain variable domain of TCR clone 82210 (TRBV9, TRBJ1-6)
CASSVAGTGDSPLHF

SEQ ID NO: 164421 - protein, 14 aa, Homo sapiens
  CDR3 for alpha chain variable domain of TCR clone 82211 (TRAV1-2, TRAJ16)
CAVNRFSDGQKLLF

SEQ ID NO: 164422 - protein, 17 aa, Homo sapiens
  CDR3 for beta chain variable domain of TCR clone 82211 (TRBV5-1, TRBJ1-5)
CASSLVGREEGNQPQHF

SEQ ID NO: 164423 - protein, 13 aa, Homo sapiens
  CDR3 for alpha chain variable domain of TCR clone 82212 (TRAV26-2, TRAJ54)
CIPRVGGAQKLVF

SEQ ID NO: 164424 - protein, 16 aa, Homo sapiens
  CDR3 for beta chain variable domain of TCR clone 82212 (TRBV4-1, TRBJ1-1)
CASGSMSERPNTEAFF

SEQ ID NO: 164425 - protein, 14 aa, Homo sapiens
  CDR3 for alpha chain variable domain of TCR clone 82213 (TRAV1-2, TRAJ16)
CAVNRFSDGQKLLF

SEQ ID NO: 164426 - protein, 15 aa, Homo sapiens
  CDR3 for beta chain variable domain of TCR clone 82213 (TRBV10-1, TRBJ2-3)
CASSATSGGFDTQYF

SEQ ID NO: 164427 - protein, 16 aa, Homo sapiens
  CDR3 for alpha chain variable domain of TCR clone 82214 (TRAV30, TRAJ24)
CGTEIVDADSWGKFQF

SEQ ID NO: 164428 - protein, 13 aa, Homo sapiens
  CDR3 for beta chain variable domain of TCR clone 82214 (TRBV7-2, TRBJ2-5)
CASSQTSVETQYF

SEQ ID NO: 164429 - protein, 13 aa, Homo sapiens
  CDR3 for alpha chain variable domain of TCR clone 82215 (TRAV10, TRAJ24)
CVVSEDSWGKLQF

SEQ ID NO: 164430 - protein, 12 aa, Homo sapiens
  CDR3 for beta chain variable domain of TCR clone 82215 (TRBV7-2, TRBJ1-5)
CASSLWSQLQHF

SEQ ID NO: 164431 - protein, 14 aa, Homo sapiens
  CDR3 for alpha chain variable domain of TCR clone 82216 (TRAV26-1, TRAJ34)
CIVRESCNTDKLIF

SEQ ID NO: 164432 - protein, 16 aa, Homo sapiens
  CDR3 for beta chain variable domain of TCR clone 82216 (TRBV10-3, TRBJ2-1)
CAISGVGDGGGGEQFF

SEQ ID NO: 164433 - protein, 10 aa, Homo sapiens
  CDR3 for alpha chain variable domain of TCR clone 82217 (TRAV23/DV6, TRAJ57)
CAASSTLSQG

SEQ ID NO: 164434 - protein, 16 aa, Homo sapiens
  CDR3 for beta chain variable domain of TCR clone 82217 (TRBV4-2, TRBJ1-1)
CASRPLDGGGDTEAFF

SEQ ID NO: 164435 - protein, 18 aa, Homo sapiens
  CDR3 for alpha chain variable domain of TCR clone 82218 (TRAV26-2, TRAJ54)
CILRDVEVGIQGAQKLVF

SEQ ID NO: 164436 - protein, 16 aa, Homo sapiens
  CDR3 for beta chain variable domain of TCR clone 82218 (TRBV7-3, TRBJ2-1)
CASSLEGYRSYNEQFF

SEQ ID NO: 164437 - protein, 12 aa, Homo sapiens
  CDR3 for alpha chain variable domain of TCR clone 82219 (TRAV8-3, TRAJ26)
CAGDNYGQNLVF

SEQ ID NO: 164438 - protein, 15 aa, Homo sapiens
  CDR3 for beta chain variable domain of TCR clone 82219 (TRBV5-1, TRBJ2-3)
CASSVTSGSTDTQYF

SEQ ID NO: 164439 - protein, 14 aa, Homo sapiens
  CDR3 for alpha chain variable domain of TCR clone 82220 (TRAV17, TRAJ57)
CATDPQGGSEKLVF

SEQ ID NO: 164440 - protein, 18 aa, Homo sapiens
  CDR3 for beta chain variable domain of TCR clone 82220 (TRBV6-5, TRBJ2-6)
CASSYSGNMESGANDLTF

SEQ ID NO: 164441 - protein, 15 aa, Homo sapiens
  CDR3 for alpha chain variable domain of TCR clone 82221 (TRAV25, TRAJ52)
CAGTSGGTSYGKLTF

SEQ ID NO: 164442 - protein, 17 aa, Homo sapiens
  CDR3 for beta chain variable domain of TCR clone 82221 (TRBV11-2, TRBJ2-1)
CASSLYPPGVEYNEQFF

SEQ ID NO: 164443 - protein, 11 aa, Homo sapiens
  CDR3 for alpha chain variable domain of TCR clone 82222 (TRAV12-2, TRAJ31)
CAILNNARLMF

SEQ ID NO: 164444 - protein, 16 aa, Homo sapiens
  CDR3 for beta chain variable domain of TCR clone 82222 (TRBV13, TRBJ2-2)
CASSPRTGEHPGELFF

SEQ ID NO: 164445 - protein, 15 aa, Homo sapiens
  CDR3 for alpha chain variable domain of TCR clone 82223 (TRAV12-1, TRAJ42)
CVVTRDGGSQGNLNF

SEQ ID NO: 164446 - protein, 14 aa, Homo sapiens
  CDR3 for beta chain variable domain of TCR clone 82223 (TRBV11-2, TRBJ2-3)
CASSLGGGANTQYF

SEQ ID NO: 164447 - protein, 12 aa, Homo sapiens
  CDR3 for alpha chain variable domain of TCR clone 82224 (TRAV13-1, TRAJ27)
CAAHTNAGKSTF

SEQ ID NO: 164448 - protein, 14 aa, Homo sapiens
  CDR3 for beta chain variable domain of TCR clone 82224 (TRBV19, TRBJ2-2)
CGSSGQGIAGELFF

SEQ ID NO: 164449 - protein, 13 aa, Homo sapiens
  CDR3 for alpha chain variable domain of TCR clone 82225 (TRAV21, TRAJ20)
CAVGLRVDYKLGF

SEQ ID NO: 164450 - protein, 13 aa, Homo sapiens
  CDR3 for beta chain variable domain of TCR clone 82225 (TRBV29-1, TRBJ2-1)
CSVEGGRVNEQFF

SEQ ID NO: 164451 - protein, 13 aa, Homo sapiens
  CDR3 for alpha chain variable domain of TCR clone 82226 (TRAV21, TRAJ27)
CAARPGNAGKSTL

SEQ ID NO: 164452 - protein, 20 aa, Homo sapiens
  CDR3 for beta chain variable domain of TCR clone 82226 (TRBV7-8, TRBJ2-2)
CASSHLFPRPTIHITGELFF

SEQ ID NO: 164453 - protein, 14 aa, Homo sapiens
  CDR3 for alpha chain variable domain of TCR clone 82227 (TRAV12-1, TRAJ30)
CVVNIGGRDDKIIF

SEQ ID NO: 164454 - protein, 15 aa, Homo sapiens
  CDR3 for beta chain variable domain of TCR clone 82227 (TRBV6-3, TRBJ2-7)
CASSSPGTVFYEQYF

SEQ ID NO: 164455 - protein, 15 aa, Homo sapiens
  CDR3 for alpha chain variable domain of TCR clone 82228 (TRAV12-2, TRAJ9)
CAVNNERTGGFKTIF

SEQ ID NO: 164456 - protein, 16 aa, Homo sapiens
  CDR3 for beta chain variable domain of TCR clone 82228 (TRBV4-1, TRBJ1-4)
CASSQERKNEKLFLAV

SEQ ID NO: 164457 - protein, 11 aa, Homo sapiens
  CDR3 for alpha chain variable domain of TCR clone 82229 (TRAV12-2, TRAJ31)
CAMTRWARLMF

SEQ ID NO: 164458 - protein, 15 aa, Homo sapiens
  CDR3 for beta chain variable domain of TCR clone 82229 (TRBV19, TRBJ2-7)
CASSIGGGLVNEQYF

SEQ ID NO: 164459 - protein, 17 aa, Homo sapiens
  CDR3 for alpha chain variable domain of TCR clone 82230 (TRAV26-1, TRAJ46)
IASSESEKKSSGDKLTF

SEQ ID NO: 164460 - protein, 16 aa, Homo sapiens
  CDR3 for beta chain variable domain of TCR clone 82230 (TRBV29-1, TRBJ2-7)
CSVEVVGTSGSYEQYF

SEQ ID NO: 164461 - protein, 14 aa, Homo sapiens
  CDR3 for alpha chain variable domain of TCR clone 82231 (TRAV13-1, TRAJ35)
CAASKGGFGNVLHC

SEQ ID NO: 164462 - protein, 15 aa, Homo sapiens
  CDR3 for beta chain variable domain of TCR clone 82231 (TRBV4-1, TRBJ1-4)
CASSDTGGTNEKLFF

SEQ ID NO: 164463 - protein, 10 aa, Homo sapiens
  CDR3 for alpha chain variable domain of TCR clone 82232 (TRAV30, TRAJ16)
CGTGGQKLLF

SEQ ID NO: 164464 - protein, 14 aa, Homo sapiens
  CDR3 for beta chain variable domain of TCR clone 82232 (TRBV7-2, TRBJ2-7)
CASRSQGATYEQYF

SEQ ID NO: 164465 - protein, 14 aa, Homo sapiens
  CDR3 for alpha chain variable domain of TCR clone 82233 (TRAV1-2, TRAJ16)
CAVYRFSDGQKLLF

SEQ ID NO: 164466 - protein, 15 aa, Homo sapiens
  CDR3 for beta chain variable domain of TCR clone 82233 (TRBV2, TRBJ2-1)
CASSELAGSYNEQFF

SEQ ID NO: 164467 - protein, 17 aa, Homo sapiens
  CDR3 for alpha chain variable domain of TCR clone 82234 (TRAV4, TRAJ18)
CLVGERSVGSTLGRLYF

SEQ ID NO: 164468 - protein, 15 aa, Homo sapiens
  CDR3 for beta chain variable domain of TCR clone 82234 (TRBV12-4, TRBJ2-5)
CASSPPTGLQETQYF

SEQ ID NO: 164469 - protein, 14 aa, Homo sapiens
  CDR3 for alpha chain variable domain of TCR clone 82235 (TRAV12-2, TRAJ5)
RAVNRSTGRRALTF

SEQ ID NO: 164470 - protein, 12 aa, Homo sapiens
  CDR3 for beta chain variable domain of TCR clone 82235 (TRBV19, TRBJ1-5)
CASSIAQQPQHF

SEQ ID NO: 164471 - protein, 16 aa, Homo sapiens
  CDR3 for alpha chain variable domain of TCR clone 82236 (TRAV16, TRAJ42)
CARKMNYGGSQGNPIF

SEQ ID NO: 164472 - protein, 14 aa, Homo sapiens
  CDR3 for beta chain variable domain of TCR clone 82236 (TRBV14, TRBJ2-3)
CQQPDDRDTDTQYF

SEQ ID NO: 164473 - protein, 16 aa, Homo sapiens
  CDR3 for alpha chain variable domain of TCR clone 82237 (TRAV4, TRAJ5)
CLVGPDHGHGQESTYF

SEQ ID NO: 164474 - protein, 15 aa, Homo sapiens
  CDR3 for beta chain variable domain of TCR clone 82237 (TRBV6-1, TRBJ2-4)
CASSEAVWTINIQYF

SEQ ID NO: 164475 - protein, 11 aa, Homo sapiens
  CDR3 for alpha chain variable domain of TCR clone 82238 (TRAV21, TRAJ11)
CAVNGYSTRTF

SEQ ID NO: 164476 - protein, 11 aa, Homo sapiens
  CDR3 for beta chain variable domain of TCR clone 82238 (TRBV19, TRBJ1-1)
CASSIGSEAFF

SEQ ID NO: 164477 - protein, 13 aa, Homo sapiens
  CDR3 for alpha chain variable domain of TCR clone 82239 (TRAV12-3, TRAJ5)
CAMRPTGRRALNF

SEQ ID NO: 164478 - protein, 13 aa, Homo sapiens
  CDR3 for beta chain variable domain of TCR clone 82239 (TRBV2, TRBJ2-7)
CASSVVEAYEQYF

SEQ ID NO: 164479 - protein, 13 aa, Homo sapiens
  CDR3 for alpha chain variable domain of TCR clone 82240 (TRAV12-3, TRAJ43)
CAMIRPNNNDMLF

SEQ ID NO: 164480 - protein, 12 aa, Homo sapiens
  CDR3 for beta chain variable domain of TCR clone 82240 (TRBV11-2, TRBJ2-5)
CASSLGQETQYF

SEQ ID NO: 164481 - protein, 15 aa, Homo sapiens
  CDR3 for alpha chain variable domain of TCR clone 82241 (TRAV27, TRAJ38)
CAARRNAGNNRKRIW

SEQ ID NO: 164482 - protein, 13 aa, Homo sapiens
  CDR3 for beta chain variable domain of TCR clone 82241 (TRBV20-1, TRBJ1-1)
CSARAGGNTEAFF

SEQ ID NO: 164483 - protein, 11 aa, Homo sapiens
  CDR3 for alpha chain variable domain of TCR clone 82242 (TRAV13-1, TRAJ6)
CATLGSYIPTF

SEQ ID NO: 164484 - protein, 13 aa, Homo sapiens
  CDR3 for beta chain variable domain of TCR clone 82242 (TRBV6-6, TRBJ2-1)
CASSLHQGDEKFF

SEQ ID NO: 164485 - protein, 12 aa, Homo sapiens
  CDR3 for alpha chain variable domain of TCR clone 82243 (TRAV2, TRAJ30)
CAVGPRDDKIIF

SEQ ID NO: 164486 - protein, 17 aa, Homo sapiens
  CDR3 for beta chain variable domain of TCR clone 82243 (TRBV20-1, TRBJ2-2)
CSASGSGQGGLTGELFF

SEQ ID NO: 164487 - protein, 15 aa, Homo sapiens
  CDR3 for alpha chain variable domain of TCR clone 82244 (TRAV8-3, TRAJ11)
CAVGLLNSGYSTLTF

SEQ ID NO: 164488 - protein, 14 aa, Homo sapiens
  CDR3 for beta chain variable domain of TCR clone 82244 (TRBV4-1, TRBJ2-5)
CASSRSGSGETQHF

SEQ ID NO: 164489 - protein, 14 aa, Homo sapiens
  CDR3 for alpha chain variable domain of TCR clone 82245 (TRAV12-3, TRAJ10)
SHLPLTGGGNKLTF

SEQ ID NO: 164490 - protein, 13 aa, Homo sapiens
  CDR3 for beta chain variable domain of TCR clone 82245 (TRBV20-1, TRBJ2-5)
CSAREAFQETQYF

SEQ ID NO: 164491 - protein, 13 aa, Homo sapiens
  CDR3 for alpha chain variable domain of TCR clone 82246 (TRAV36/DV7, TRAJ37)
CAVFSSNTGKLIF

SEQ ID NO: 164492 - protein, 15 aa, Homo sapiens
  CDR3 for beta chain variable domain of TCR clone 82246 (TRBV5-5, TRBJ1-5)
CASSSTPGSNQPQHF

SEQ ID NO: 164493 - protein, 12 aa, Homo sapiens
  CDR3 for alpha chain variable domain of TCR clone 82247 (TRAV12-2, TRAJ52)
IGGGTSYGKLTF

SEQ ID NO: 164494 - protein, 14 aa, Homo sapiens
  CDR3 for beta chain variable domain of TCR clone 82247 (TRBV19, TRBJ2-1)
CASPTFVLSGEQFF

SEQ ID NO: 164495 - protein, 15 aa, Homo sapiens
  CDR3 for alpha chain variable domain of TCR clone 82248 (TRAV26-1, TRAJ44)
CIVRIGTGTASKLTF

SEQ ID NO: 164496 - protein, 15 aa, Homo sapiens
  CDR3 for beta chain variable domain of TCR clone 82248 (TRBV7-6, TRBJ2-1)
CASSSLAGEGSEQFF

SEQ ID NO: 164497 - protein, 12 aa, Homo sapiens
  CDR3 for alpha chain variable domain of TCR clone 82249 (TRAV12-2, TRAJ21)
CAVRYNFNKFYF

SEQ ID NO: 164498 - protein, 14 aa, Homo sapiens
  CDR3 for beta chain variable domain of TCR clone 82249 (TRBV28, TRBJ2-1)
CASSYDTAYNEQFF

SEQ ID NO: 164499 - protein, 14 aa, Homo sapiens
  CDR3 for alpha chain variable domain of TCR clone 82250 (TRAV20, TRAJ29)
CAVKAWVGNTPLVF

SEQ ID NO: 164500 - protein, 15 aa, Homo sapiens
  CDR3 for beta chain variable domain of TCR clone 82250 (TRBV29-1, TRBJ2-7)
CSVEFFDRGSYEQYF

SEQ ID NO: 164501 - protein, 16 aa, Homo sapiens
  CDR3 for alpha chain variable domain of TCR clone 82251 (TRAV12-3, TRAJ53)
CAMSPGSGGSNYKLTF

SEQ ID NO: 164502 - protein, 13 aa, Homo sapiens
  CDR3 for beta chain variable domain of TCR clone 82251 (TRBV12-5, TRBJ2-3)
CASGDRQSGTQYF

SEQ ID NO: 164503 - protein, 14 aa, Homo sapiens
  CDR3 for alpha chain variable domain of TCR clone 82252 (TRAV27, TRAJ21)
CAGVRQLQQILLWF

SEQ ID NO: 164504 - protein, 14 aa, Homo sapiens
  CDR3 for beta chain variable domain of TCR clone 82252 (TRBV7-9, TRBJ1-4)
CASSLEGQSEKLFF

SEQ ID NO: 164505 - protein, 13 aa, Homo sapiens
  CDR3 for alpha chain variable domain of TCR clone 82253 (TRAV27, TRAJ39)
CAGDTPAGNMLTF

SEQ ID NO: 164506 - protein, 13 aa, Homo sapiens
  CDR3 for beta chain variable domain of TCR clone 82253 (TRBV4-1, TRBJ2-4)
CAGSQVGIDIQYF

SEQ ID NO: 164507 - protein, 13 aa, Homo sapiens
  CDR3 for alpha chain variable domain of TCR clone 82254 (TRAV1-2, TRAJ9)
CAALNTGGFKTIF

SEQ ID NO: 164508 - protein, 13 aa, Homo sapiens
  CDR3 for beta chain variable domain of TCR clone 82254 (TRBV10-2, TRBJ2-7)
CASGASGGYEQYF

SEQ ID NO: 164509 - protein, 13 aa, Homo sapiens
  CDR3 for alpha chain variable domain of TCR clone 82255 (TRAV12-2, TRAJ20)
CAVYPSNGYKLSF

SEQ ID NO: 164510 - protein, 15 aa, Homo sapiens
  CDR3 for beta chain variable domain of TCR clone 82255 (TRBV27, TRBJ2-5)
CASSLYPRGGETQYF

SEQ ID NO: 164511 - protein, 10 aa, Homo sapiens
  CDR3 for alpha chain variable domain of TCR clone 82256 (TRAV12-1, TRAJ37)
ARGNTGKLIF

SEQ ID NO: 164512 - protein, 15 aa, Homo sapiens
  CDR3 for beta chain variable domain of TCR clone 82256 (TRBV7-2, TRBJ2-3)
CASSLEQGDTDTQYF

SEQ ID NO: 164513 - protein, 12 aa, Homo sapiens
  CDR3 for alpha chain variable domain of TCR clone 82257 (TRAV9-2, TRAJ53)
CALRGSNYKLTF

SEQ ID NO: 164514 - protein, 15 aa, Homo sapiens
  CDR3 for beta chain variable domain of TCR clone 82257 (TRBV27, TRBJ2-5)
CASSLYPRGGETQYF

SEQ ID NO: 164515 - protein, 14 aa, Homo sapiens
  CDR3 for alpha chain variable domain of TCR clone 82258 (TRAV38-2/DV8, TRAJ54)
AAMYQIQGAQKLVF

SEQ ID NO: 164516 - protein, 17 aa, Homo sapiens
  CDR3 for beta chain variable domain of TCR clone 82258 (TRBV6-1, TRBJ2-3)
CASSEALRLISTETQYF

SEQ ID NO: 164517 - protein, 15 aa, Homo sapiens
  CDR3 for alpha chain variable domain of TCR clone 82259 (TRAV12-2, TRAJ50)
CAVNGLENSYDKVIF

SEQ ID NO: 164518 - protein, 16 aa, Homo sapiens
  CDR3 for beta chain variable domain of TCR clone 82259 (TRBV5-4, TRBJ2-3)
CASQQPGAGGADTQYF

SEQ ID NO: 164519 - protein, 15 aa, Homo sapiens
  CDR3 for alpha chain variable domain of TCR clone 82260 (TRAV26-1, TRAJ15)
CIVRAANQAGTVLIF

SEQ ID NO: 164520 - protein, 15 aa, Homo sapiens
  CDR3 for beta chain variable domain of TCR clone 82260 (TRBV20-1, TRBJ1-1)
CSARSAATSNTEAFF

SEQ ID NO: 164521 - protein, 13 aa, Homo sapiens
  CDR3 for alpha chain variable domain of TCR clone 82261 (TRAV13-1, TRAJ6)
CAARRGGSDIPTF

SEQ ID NO: 164522 - protein, 16 aa, Homo sapiens
  CDR3 for beta chain variable domain of TCR clone 82261 (TRBV7-9, TRBJ2-2)
CASSLATGVGTGELFF

SEQ ID NO: 164523 - protein, 13 aa, Homo sapiens
  CDR3 for alpha chain variable domain of TCR clone 82262 (TRAV8-3, TRAJ48)
CAVVPFGNEKLNF

SEQ ID NO: 164524 - protein, 19 aa, Homo sapiens
  CDR3 for beta chain variable domain of TCR clone 82262 (TRBV25-1, TRBJ2-2)
CAILVYRVDRGRKTGELFF

SEQ ID NO: 164525 - protein, 15 aa, Homo sapiens
  CDR3 for alpha chain variable domain of TCR clone 82263 (TRAV17, TRAJ57)
CATGPSQAGSEKLVF

SEQ ID NO: 164526 - protein, 14 aa, Homo sapiens
  CDR3 for beta chain variable domain of TCR clone 82263 (TRBV12-5, TRBJ2-5)
CASGSRTHQETQYF

SEQ ID NO: 164527 - protein, 17 aa, Homo sapiens
  CDR3 for alpha chain variable domain of TCR clone 82264 (TRAV13-1, TRAJ52)
CAAGRNAGGTSYGKLTF

SEQ ID NO: 164528 - protein, 13 aa, Homo sapiens
  CDR3 for beta chain variable domain of TCR clone 82264 (TRBV7-9, TRBJ1-2)
CASSLKQNYGYTF

SEQ ID NO: 164529 - protein, 14 aa, Homo sapiens
  CDR3 for alpha chain variable domain of TCR clone 82265 (TRAV8-4, TRAJ9)
CAVRINTGGFKTIF

SEQ ID NO: 164530 - protein, 20 aa, Homo sapiens
  CDR3 for beta chain variable domain of TCR clone 82265 (TRBV7-8, TRBJ2-2)
CASSHLFPGPTIHITGELFF

SEQ ID NO: 164531 - protein, 11 aa, Homo sapiens
  CDR3 for alpha chain variable domain of TCR clone 82266 (TRAV3, TRAJ21)
CAVGNFNKFYL

SEQ ID NO: 164532 - protein, 16 aa, Homo sapiens
  CDR3 for beta chain variable domain of TCR clone 82266 (TRBV19, TRBJ2-1)
CASSKAGPSSYNGQFF

SEQ ID NO: 164533 - protein, 12 aa, Homo sapiens
  CDR3 for alpha chain variable domain of TCR clone 82267 (TRAV13-2, TRAJ23)
CAERHRGVKLIF

SEQ ID NO: 164534 - protein, 16 aa, Homo sapiens
  CDR3 for beta chain variable domain of TCR clone 82267 (TRBV7-2, TRBJ2-6)
CAILSGVSSGANVLTF

SEQ ID NO: 164535 - protein, 13 aa, Homo sapiens
  CDR3 for alpha chain variable domain of TCR clone 82268 (TRAV2, TRAJ40)
CAVVTSGTYKYIF

SEQ ID NO: 164536 - protein, 13 aa, Homo sapiens
  CDR3 for beta chain variable domain of TCR clone 82268 (TRBV12-4, TRBJ2-7)
CASSFVPTAEQYF

SEQ ID NO: 164537 - protein, 15 aa, Homo sapiens
  CDR3 for alpha chain variable domain of TCR clone 82269 (TRAV13-1, TRAJ17)
CAASIERAAGNKLTF

SEQ ID NO: 164538 - protein, 14 aa, Homo sapiens
  CDR3 for beta chain variable domain of TCR clone 82269 (TRBV7-2, TRBJ2-7)
CASRSQGAAYEQYF

SEQ ID NO: 164539 - protein, 19 aa, Homo sapiens
  CDR3 for alpha chain variable domain of TCR clone 82270 (TRAV2, TRAJ20)
ILQAREADAAVYRDCKLSF

SEQ ID NO: 164540 - protein, 12 aa, Homo sapiens
  CDR3 for beta chain variable domain of TCR clone 82270 (TRBV11-2, TRBJ2-2)
CASSLGGGELFF

SEQ ID NO: 164541 - protein, 14 aa, Homo sapiens
  CDR3 for alpha chain variable domain of TCR clone 82271 (TRAV1-2, TRAJ16)
CAVNRFSEGQKLLF

SEQ ID NO: 164542 - protein, 15 aa, Homo sapiens
  CDR3 for beta chain variable domain of TCR clone 82271 (TRBV6-3, TRBJ2-7)
CASSSPGTVFYEQYF

SEQ ID NO: 164543 - protein, 14 aa, Homo sapiens
  CDR3 for alpha chain variable domain of TCR clone 82272 (TRAV16, TRAJ33)
FALSAMDSNYQLIW

SEQ ID NO: 164544 - protein, 16 aa, Homo sapiens
  CDR3 for beta chain variable domain of TCR clone 82272 (TRBV12-4, TRBJ2-3)
CASSFPSNTNTDTQYF

SEQ ID NO: 164545 - protein, 15 aa, Homo sapiens
  CDR3 for alpha chain variable domain of TCR clone 82273 (TRAV17, TRAJ56)
RATDANTGANSKLTF

SEQ ID NO: 164546 - protein, 14 aa, Homo sapiens
  CDR3 for beta chain variable domain of TCR clone 82273 (TRBV19, TRBJ1-5)
CASSLGTGGQPQHF

SEQ ID NO: 164547 - protein, 11 aa, Homo sapiens
  CDR3 for alpha chain variable domain of TCR clone 82274 (TRAV4, TRAJ31)
CLVGDNARLMF

SEQ ID NO: 164548 - protein, 14 aa, Homo sapiens
  CDR3 for beta chain variable domain of TCR clone 82274 (TRBV7-2, TRBJ2-7)
CASRSQGAAYEQYF

SEQ ID NO: 164549 - protein, 15 aa, Homo sapiens
  CDR3 for alpha chain variable domain of TCR clone 82275 (TRAV8-3, TRAJ27)
CAVGPSKTNAGKSTF

SEQ ID NO: 164550 - protein, 15 aa, Homo sapiens
  CDR3 for beta chain variable domain of TCR clone 82275 (TRBV28, TRBJ2-7)
CASSPGGRGFYEQYF

SEQ ID NO: 164551 - protein, 17 aa, Homo sapiens
  CDR3 for alpha chain variable domain of TCR clone 82276 (TRAV12-2, TRAJ52)
CAVNPYAGGTSYGKPTF

SEQ ID NO: 164552 - protein, 16 aa, Homo sapiens
  CDR3 for beta chain variable domain of TCR clone 82276 (TRBV5-5, TRBJ2-2)
CASSGRREGATGELFF

SEQ ID NO: 164553 - protein, 18 aa, Homo sapiens
  CDR3 for alpha chain variable domain of TCR clone 82277 (TRAV13-1, TRAJ52)
CAAKNPNAGGTSYGKLTF

SEQ ID NO: 164554 - protein, 15 aa, Homo sapiens
  CDR3 for beta chain variable domain of TCR clone 82277 (TRBV28, TRBJ2-1)
CASSIIAGGRSEQFL

SEQ ID NO: 164555 - protein, 14 aa, Homo sapiens
  CDR3 for alpha chain variable domain of TCR clone 82278 (TRAV20, TRAJ42)
CAVQAGGSQGNLIF

SEQ ID NO: 164556 - protein, 14 aa, Homo sapiens
  CDR3 for beta chain variable domain of TCR clone 82278 (TRBV28, TRBJ1-2)
CASRILGANYGYTF

SEQ ID NO: 164557 - protein, 11 aa, Homo sapiens
  CDR3 for alpha chain variable domain of TCR clone 82279 (TRAV1-1, TRAJ23)
CAVRQGGRLIF

SEQ ID NO: 164558 - protein, 20 aa, Homo sapiens
  CDR3 for beta chain variable domain of TCR clone 82279 (TRBV7-8, TRBJ2-2)
CASSHLFPGPTIHITGELFL

SEQ ID NO: 164559 - protein, 14 aa, Homo sapiens
  CDR3 for alpha chain variable domain of TCR clone 82280 (TRAV2, TRAJ9)
CAVEDRSGGFKTIF

SEQ ID NO: 164560 - protein, 17 aa, Homo sapiens
  CDR3 for beta chain variable domain of TCR clone 82280 (TRBV11-2, TRBJ2-6)
CASSQRDIFSGANVLTF

SEQ ID NO: 164561 - protein, 14 aa, Homo sapiens
  CDR3 for alpha chain variable domain of TCR clone 82281 (TRAV12-2, TRAJ53)
CAVKGGGSNYKLTF

SEQ ID NO: 164562 - protein, 16 aa, Homo sapiens
  CDR3 for beta chain variable domain of TCR clone 82281 (TRBV7-3, TRBJ2-2)
CASSLKRGTLSGELFF

SEQ ID NO: 164563 - protein, 13 aa, Homo sapiens
  CDR3 for alpha chain variable domain of TCR clone 82282 (TRAV13-1, TRAJ43)
CAASLSNNNDMRL

SEQ ID NO: 164564 - protein, 14 aa, Homo sapiens
  CDR3 for beta chain variable domain of TCR clone 82282 (TRBV5-1, TRBJ2-5)
CASSLAGKQETQYF

SEQ ID NO: 164565 - protein, 12 aa, Homo sapiens
  CDR3 for alpha chain variable domain of TCR clone 82283 (TRAV16, TRAJ26)
CALRSYGQNFVF

SEQ ID NO: 164566 - protein, 14 aa, Homo sapiens
  CDR3 for beta chain variable domain of TCR clone 82283 (TRBV10-3, TRBJ2-1)
CAISSDLAYNDQFF

SEQ ID NO: 164567 - protein, 13 aa, Homo sapiens
  CDR3 for alpha chain variable domain of TCR clone 82284 (TRAV27, TRAJ3)
ASLRGSSASKIIF

SEQ ID NO: 164568 - protein, 15 aa, Homo sapiens
  CDR3 for beta chain variable domain of TCR clone 82284 (TRBV28, TRBJ1-3)
CASSMGWASGNTICF

SEQ ID NO: 164569 - protein, 13 aa, Homo sapiens
  CDR3 for alpha chain variable domain of TCR clone 82285 (TRAV22, TRAJ29)
CAVGGSGNTPLVF

SEQ ID NO: 164570 - protein, 13 aa, Homo sapiens
  CDR3 for beta chain variable domain of TCR clone 82285 (TRBV19, TRBJ2-7)
CASRKAGGSERYF

SEQ ID NO: 164571 - protein, 17 aa, Homo sapiens
  CDR3 for alpha chain variable domain of TCR clone 82286 (TRAV13-1, TRAJ28)
CAASPPYSGAGSYQLTF

SEQ ID NO: 164572 - protein, 12 aa, Homo sapiens
  CDR3 for beta chain variable domain of TCR clone 82286 (TRBV11-2, TRBJ2-2)
CARSLPTGELFF

SEQ ID NO: 164573 - protein, 11 aa, Homo sapiens
  CDR3 for alpha chain variable domain of TCR clone 82287 (TRAV3, TRAJ33)
CAVRRNYQLIW

SEQ ID NO: 164574 - protein, 15 aa, Homo sapiens
  CDR3 for beta chain variable domain of TCR clone 82287 (TRBV28, TRBJ1-5)
CASSDQVYSDQPQHF

SEQ ID NO: 164575 - protein, 14 aa, Homo sapiens
  CDR3 for alpha chain variable domain of TCR clone 82288 (TRAV12-1, TRAJ17)
CVVNYKAAGNKLTI

SEQ ID NO: 164576 - protein, 17 aa, Homo sapiens
  CDR3 for beta chain variable domain of TCR clone 82288 (TRBV20-1, TRBJ2-1)
CSASSSGLAGSYNEQFF

SEQ ID NO: 164577 - protein, 15 aa, Homo sapiens
  CDR3 for alpha chain variable domain of TCR clone 82289 (TRAV21, TRAJ24)
CAARSSTDSWGKLQF

SEQ ID NO: 164578 - protein, 11 aa, Homo sapiens
  CDR3 for beta chain variable domain of TCR clone 82289 (TRBV29-1, TRBJ2-5)
CSEDRTGTQYF

SEQ ID NO: 164579 - protein, 17 aa, Homo sapiens
  CDR3 for alpha chain variable domain of TCR clone 82290 (TRAV3, TRAJ38)
CAVRDCLNAGNNRKLIW

SEQ ID NO: 164580 - protein, 14 aa, Homo sapiens
  CDR3 for beta chain variable domain of TCR clone 82290 (TRBV5-5, TRBJ1-5)
CARSGQGVDQPQHF

SEQ ID NO: 164581 - protein, 11 aa, Homo sapiens
  CDR3 for alpha chain variable domain of TCR clone 82291 (TRAV12-3, TRAJ27)
CAMANAGKTTF

SEQ ID NO: 164582 - protein, 13 aa, Homo sapiens
  CDR3 for beta chain variable domain of TCR clone 82291 (TRBV20-1, TRBJ1-1)
CSARVGGNTEAFF

SEQ ID NO: 164583 - protein, 14 aa, Homo sapiens
  CDR3 for alpha chain variable domain of TCR clone 82292 (TRAV3, TRAJ21)
CAVRDAYNFNKFYF

SEQ ID NO: 164584 - protein, 17 aa, Homo sapiens
  CDR3 for beta chain variable domain of TCR clone 82292 (TRBV20-1, TRBJ1-6)
CSSRGGYTFSYSSPLHF

SEQ ID NO: 164585 - protein, 12 aa, Homo sapiens
  CDR3 for alpha chain variable domain of TCR clone 82293 (TRAV2, TRAJ33)
CAVPDSNYQLIC

SEQ ID NO: 164586 - protein, 15 aa, Homo sapiens
  CDR3 for beta chain variable domain of TCR clone 82293 (TRBV15, TRBJ1-5)
CATSRDPVSNQPQHF

SEQ ID NO: 164587 - protein, 13 aa, Homo sapiens
  CDR3 for alpha chain variable domain of TCR clone 82294 (TRAV13-2, TRAJ13)
CAERPGGYQKVTF

SEQ ID NO: 164588 - protein, 14 aa, Homo sapiens
  CDR3 for beta chain variable domain of TCR clone 82294 (TRBV28, TRBJ2-5)
CASTGAGGVETQYF

SEQ ID NO: 164589 - protein, 11 aa, Homo sapiens
  CDR3 for alpha chain variable domain of TCR clone 82295 (TRAV1-1, TRAJ23)
CAVRQGGKLIF

SEQ ID NO: 164590 - protein, 14 aa, Homo sapiens
  CDR3 for beta chain variable domain of TCR clone 82295 (TRBV19, TRBJ2-1)
CASPAFVLSGEQFF

SEQ ID NO: 164591 - protein, 14 aa, Homo sapiens
  CDR3 for alpha chain variable domain of TCR clone 82296 (TRAV12-3, TRAJ10)
SHLPLTGGGNKLTF

SEQ ID NO: 164592 - protein, 15 aa, Homo sapiens
  CDR3 for beta chain variable domain of TCR clone 82296 (TRBV5-1, TRBJ2-1)
CASTGSGRTYNEQFF

SEQ ID NO: 164593 - protein, 11 aa, Homo sapiens
  CDR3 for alpha chain variable domain of TCR clone 82297 (TRAV17, TRAJ9)
CGFTRGFKTIF

SEQ ID NO: 164594 - protein, 14 aa, Homo sapiens
  CDR3 for beta chain variable domain of TCR clone 82297 (TRBV7-9, TRBJ2-2)
CASSLVQDTGELFF

SEQ ID NO: 164595 - protein, 14 aa, Homo sapiens
  CDR3 for alpha chain variable domain of TCR clone 82298 (TRAV1-2, TRAJ16)
CAVNRFSDGQKLLL

SEQ ID NO: 164596 - protein, 15 aa, Homo sapiens
  CDR3 for beta chain variable domain of TCR clone 82298 (TRBV9, TRBJ1-6)
CASSVSGTGDSPLHF

SEQ ID NO: 164597 - protein, 12 aa, Homo sapiens
  CDR3 for alpha chain variable domain of TCR clone 82299 (TRAV8-3, TRAJ26)
CAGDNYGQNFVF

SEQ ID NO: 164598 - protein, 14 aa, Homo sapiens
  CDR3 for beta chain variable domain of TCR clone 82299 (TRBV2, TRBJ2-3)
CASSEGQNTDTQYF

SEQ ID NO: 164599 - protein, 15 aa, Homo sapiens
  CDR3 for alpha chain variable domain of TCR clone 82300 (TRAV12-3, TRAJ27)
CAMRAYNTNAGKSTF

SEQ ID NO: 164600 - protein, 13 aa, Homo sapiens
  CDR3 for beta chain variable domain of TCR clone 82300 (TRBV11-3, TRBJ2-5)
CASSRGPSETQYF

SEQ ID NO: 164601 - protein, 11 aa, Homo sapiens
  CDR3 for alpha chain variable domain of TCR clone 82301 (TRAV12-1, TRAJ30)
CVVNGQDKIIF

SEQ ID NO: 164602 - protein, 14 aa, Homo sapiens
  CDR3 for beta chain variable domain of TCR clone 82301 (TRBV7-2, TRBJ1-2)
CASSQTGSTYGYTF

SEQ ID NO: 164603 - protein, 14 aa, Homo sapiens
  CDR3 for alpha chain variable domain of TCR clone 82302 (TRAV12-2, TRAJ44)
CAVNPAGTASNLTF

SEQ ID NO: 164604 - protein, 15 aa, Homo sapiens
  CDR3 for beta chain variable domain of TCR clone 82302 (TRBV28, TRBJ2-7)
CASSVRQVSSYEQYF

SEQ ID NO: 164605 - protein, 12 aa, Homo sapiens
  CDR3 for alpha chain variable domain of TCR clone 82303 (TRAV13-2, TRAJ32)
RVYGGATDKLIF

SEQ ID NO: 164606 - protein, 16 aa, Homo sapiens
  CDR3 for beta chain variable domain of TCR clone 82303 (TRBV7-9, TRBJ1-2)
CASSISLDRGGYGYTF

SEQ ID NO: 164607 - protein, 13 aa, Homo sapiens
  CDR3 for alpha chain variable domain of TCR clone 82304 (TRAV12-2, TRAJ20)
CAVYPSNDYKLSF

SEQ ID NO: 164608 - protein, 16 aa, Homo sapiens
  CDR3 for beta chain variable domain of TCR clone 82304 (TRBV12-5, TRBJ2-5)
CASGPRTSGNQETQYF

SEQ ID NO: 164609 - protein, 11 aa, Homo sapiens
  CDR3 for alpha chain variable domain of TCR clone 82305 (TRAV35, TRAJ30)
CAGEIDDKIIF

SEQ ID NO: 164610 - protein, 14 aa, Homo sapiens
  CDR3 for beta chain variable domain of TCR clone 82305 (TRBV15, TRBJ2-5)
CATSGDRGQETQYF

SEQ ID NO: 164611 - protein, 13 aa, Homo sapiens
  CDR3 for alpha chain variable domain of TCR clone 82306 (TRAV12-1, TRAJ39)
CVVPQRAGNMLTF

SEQ ID NO: 164612 - protein, 17 aa, Homo sapiens
  CDR3 for beta chain variable domain of TCR clone 82306 (TRBV4-1, TRBJ2-5)
CASSQGLTGGPIETQYF

SEQ ID NO: 164613 - protein, 12 aa, Homo sapiens
  CDR3 for alpha chain variable domain of TCR clone 82307 (TRAV12-2, TRAJ31)
CAVNTPDASLMF

SEQ ID NO: 164614 - protein, 12 aa, Homo sapiens
  CDR3 for beta chain variable domain of TCR clone 82307 (TRBV7-8, TRBJ2-7)
CASSLGDREQYF

SEQ ID NO: 164615 - protein, 13 aa, Homo sapiens
  CDR3 for alpha chain variable domain of TCR clone 82308 (TRAV27, TRAJ45)
CRSSGGGADGLTF

SEQ ID NO: 164616 - protein, 15 aa, Homo sapiens
  CDR3 for beta chain variable domain of TCR clone 82308 (TRBV7-2, TRBJ2-6)
CASSREGSGANVLTF

SEQ ID NO: 164617 - protein, 15 aa, Homo sapiens
  CDR3 for alpha chain variable domain of TCR clone 82309 (TRAV3, TRAJ29)
CAVRPGNSGNKPLVF

SEQ ID NO: 164618 - protein, 16 aa, Homo sapiens
  CDR3 for beta chain variable domain of TCR clone 82309 (TRBV24-1, TRBJ2-2)
CATSDPGTANTGELFF

SEQ ID NO: 164619 - protein, 11 aa, Homo sapiens
  CDR3 for alpha chain variable domain of TCR clone 82310 (TRAV1-2, TRAJ31)
CAVNNNARLMF

SEQ ID NO: 164620 - protein, 15 aa, Homo sapiens
  CDR3 for beta chain variable domain of TCR clone 82310 (TRBV28, TRBJ2-1)
CASSIIAGGRSEQFC

SEQ ID NO: 164621 - protein, 15 aa, Homo sapiens
  CDR3 for alpha chain variable domain of TCR clone 82311 (TRAV26-1, TRAJ12)
IASSELMDSRYKLIF

SEQ ID NO: 164622 - protein, 11 aa, Homo sapiens
  CDR3 for beta chain variable domain of TCR clone 82311 (TRBV7-9, TRBJ2-3)
CASSPPDTQYF

SEQ ID NO: 164623 - protein, 14 aa, Homo sapiens
  CDR3 for alpha chain variable domain of TCR clone 82312 (TRAV2, TRAJ37)
CAVDFTSNTGKLIF

SEQ ID NO: 164624 - protein, 14 aa, Homo sapiens
  CDR3 for beta chain variable domain of TCR clone 82312 (TRBV5-1, TRBJ2-3)
CASSFPGNTDTQYF

SEQ ID NO: 164625 - protein, 13 aa, Homo sapiens
  CDR3 for alpha chain variable domain of TCR clone 82313 (TRAV16, TRAJ31)
CALSAHNNARLMF

SEQ ID NO: 164626 - protein, 14 aa, Homo sapiens
  CDR3 for beta chain variable domain of TCR clone 82313 (TRBV7-2, TRBJ2-5)
CVSSFTQGQETQYF

SEQ ID NO: 164627 - protein, 10 aa, Homo sapiens
  CDR3 for alpha chain variable domain of TCR clone 82314 (TRAV36/DV7, TRAJ48)
CAVGNEKLTF

SEQ ID NO: 164628 - protein, 13 aa, Homo sapiens
  CDR3 for beta chain variable domain of TCR clone 82314 (TRBV10-3, TRBJ2-7)
CASKLAVNYEQYF

SEQ ID NO: 164629 - protein, 10 aa, Homo sapiens
  CDR3 for alpha chain variable domain of TCR clone 82315 (TRAV1-2, TRAJ31)
CVSGDARLMF

SEQ ID NO: 164630 - protein, 14 aa, Homo sapiens
  CDR3 for beta chain variable domain of TCR clone 82315 (TRBV19, TRBJ2-1)
CASPTFVLSGEQFF

SEQ ID NO: 164631 - protein, 13 aa, Homo sapiens
  CDR3 for alpha chain variable domain of TCR clone 82316 (TRAV8-6, TRAJ33)
CAVREGSNYQLIW

SEQ ID NO: 164632 - protein, 13 aa, Homo sapiens
  CDR3 for beta chain variable domain of TCR clone 82316 (TRBV5-7, TRBJ2-3)
CASSLGRTDTQYF

SEQ ID NO: 164633 - protein, 14 aa, Homo sapiens
  CDR3 for alpha chain variable domain of TCR clone 82317 (TRAV2, TRAJ22)
CAVGRGGSARQLTF

SEQ ID NO: 164634 - protein, 12 aa, Homo sapiens
  CDR3 for beta chain variable domain of TCR clone 82317 (TRBV19, TRBJ2-1)
CASSMQDTEQSF

SEQ ID NO: 164635 - protein, 17 aa, Homo sapiens
  CDR3 for alpha chain variable domain of TCR clone 82318 (TRAV8-6, TRAJ58)
CAVSSWVGETSGSRLTF

SEQ ID NO: 164636 - protein, 14 aa, Homo sapiens
  CDR3 for beta chain variable domain of TCR clone 82318 (TRBV4-2, TRBJ2-1)
CASGLDRAYNEQFS

SEQ ID NO: 164637 - protein, 11 aa, Homo sapiens
  CDR3 for alpha chain variable domain of TCR clone 82319 (TRAV12-3, TRAJ41)
CAMNAREALNF

SEQ ID NO: 164638 - protein, 13 aa, Homo sapiens
  CDR3 for beta chain variable domain of TCR clone 82319 (TRBV6-3, TRBJ2-3)
CASEGELKDTQYF

SEQ ID NO: 164639 - protein, 12 aa, Homo sapiens
  CDR3 for alpha chain variable domain of TCR clone 82320 (TRAV16, TRAJ9)
CALSSGGFKTIF

SEQ ID NO: 164640 - protein, 14 aa, Homo sapiens
  CDR3 for beta chain variable domain of TCR clone 82320 (TRBV7-9, TRBJ2-1)
CASSLAGPCNEQFF

SEQ ID NO: 164641 - protein, 14 aa, Homo sapiens
  CDR3 for alpha chain variable domain of TCR clone 82321 (TRAV12-3, TRAJ6)
CAMSATGGSYIPTF

SEQ ID NO: 164642 - protein, 16 aa, Homo sapiens
  CDR3 for beta chain variable domain of TCR clone 82321 (TRBV4-3, TRBJ2-1)
WASSPRAGQGANEQFF

SEQ ID NO: 164643 - protein, 14 aa, Homo sapiens
  CDR3 for alpha chain variable domain of TCR clone 82322 (TRAV1-2, TRAJ12)
CAVGGTDSSYKLIF

SEQ ID NO: 164644 - protein, 15 aa, Homo sapiens
  CDR3 for beta chain variable domain of TCR clone 82322 (TRBV2, TRBJ2-4)
CASSGTNLAKNIQYF

SEQ ID NO: 164645 - protein, 14 aa, Homo sapiens
  CDR3 for alpha chain variable domain of TCR clone 82323 (TRAV8-6, TRAJ36)
CAVSEKDGANNLFF

SEQ ID NO: 164646 - protein, 14 aa, Homo sapiens
  CDR3 for beta chain variable domain of TCR clone 82323 (TRBV4-1, TRBJ2-2)
CASSQAVNTGELFF

SEQ ID NO: 164647 - protein, 13 aa, Homo sapiens
  CDR3 for alpha chain variable domain of TCR clone 82324 (TRAV35, TRAJ42)
CAGFPGSQGNLIF

SEQ ID NO: 164648 - protein, 13 aa, Homo sapiens
  CDR3 for beta chain variable domain of TCR clone 82324 (TRBV29-1, TRBJ2-1)
CSVEGGRVNKQFF

SEQ ID NO: 164649 - protein, 15 aa, Homo sapiens
  CDR3 for alpha chain variable domain of TCR clone 82325 (TRAV12-1, TRAJ44)
CVADLPTGTASKLTF

SEQ ID NO: 164650 - protein, 13 aa, Homo sapiens
  CDR3 for beta chain variable domain of TCR clone 82325 (TRBV6-5, TRBJ2-5)
CASSPQGCETQYF

SEQ ID NO: 164651 - protein, 14 aa, Homo sapiens
  CDR3 for alpha chain variable domain of TCR clone 82326 (TRAV17, TRAJ12)
CATDGVDSSYKLIF

SEQ ID NO: 164652 - protein, 14 aa, Homo sapiens
  CDR3 for beta chain variable domain of TCR clone 82326 (TRBV7-2, TRBJ1-5)
CASSRDGSNQPQHF

SEQ ID NO: 164653 - protein, 15 aa, Homo sapiens
  CDR3 for alpha chain variable domain of TCR clone 82327 (TRAV3, TRAJ5)
CAVRDRKTGRRAVTF

SEQ ID NO: 164654 - protein, 15 aa, Homo sapiens
  CDR3 for beta chain variable domain of TCR clone 82327 (TRBV7-8, TRBJ2-1)
CASSLADSLYNEQFF

SEQ ID NO: 164655 - protein, 18 aa, Homo sapiens
  CDR3 for alpha chain variable domain of TCR clone 82328 (TRAV12-3, TRAJ52)
CAMSRTNASGTSYGKLTF

SEQ ID NO: 164656 - protein, 15 aa, Homo sapiens
  CDR3 for beta chain variable domain of TCR clone 82328 (TRBV7-2, TRBJ2-1)
CASSLVAGGHNEQFF

SEQ ID NO: 164657 - protein, 13 aa, Homo sapiens
  CDR3 for alpha chain variable domain of TCR clone 82329 (TRAV3, TRAJ30)
CAVRDRGDDRIIF

SEQ ID NO: 164658 - protein, 14 aa, Homo sapiens
  CDR3 for beta chain variable domain of TCR clone 82329 (TRBV5-1, TRBJ1-1)
CASSRTTGDTEAFF

SEQ ID NO: 164659 - protein, 16 aa, Homo sapiens
  CDR3 for alpha chain variable domain of TCR clone 82330 (TRAV1-2, TRAJ10)
CAVRGVLTGGGNKLTF

SEQ ID NO: 164660 - protein, 13 aa, Homo sapiens
  CDR3 for beta chain variable domain of TCR clone 82330 (TRBV20-1, TRBJ1-6)
CSAPVGVGSPLHF

SEQ ID NO: 164661 - protein, 12 aa, Homo sapiens
  CDR3 for alpha chain variable domain of TCR clone 82331 (TRAV8-3, TRAJ26)
CAGDNYGQNFVF

SEQ ID NO: 164662 - protein, 16 aa, Homo sapiens
  CDR3 for beta chain variable domain of TCR clone 82331 (TRBV20-1, TRBJ1-4)
CSAPGQGLLTNEKLVF

SEQ ID NO: 164663 - protein, 12 aa, Homo sapiens
  CDR3 for alpha chain variable domain of TCR clone 82332 (TRAV13-1, TRAJ27)
CAAHTNAGKSTF

SEQ ID NO: 164664 - protein, 14 aa, Homo sapiens
  CDR3 for beta chain variable domain of TCR clone 82332 (TRBV19, TRBJ2-2)
CASSGQGIDGELFF

SEQ ID NO: 164665 - protein, 15 aa, Homo sapiens
  CDR3 for alpha chain variable domain of TCR clone 82333 (TRAV2, TRAJ9)
CAVEDRGTGGFKTIL

SEQ ID NO: 164666 - protein, 13 aa, Homo sapiens
  CDR3 for beta chain variable domain of TCR clone 82333 (TRBV19, TRBJ1-2)
CASSVPGQDGYTF

SEQ ID NO: 164667 - protein, 16 aa, Homo sapiens
  CDR3 for alpha chain variable domain of TCR clone 82334 (TRAV26-1, TRAJ53)
CIVRVAMGGINYKLTF

SEQ ID NO: 164668 - protein, 12 aa, Homo sapiens
  CDR3 for beta chain variable domain of TCR clone 82334 (TRBV7-9, TRBJ1-5)
CASSPQGQPQHF

SEQ ID NO: 164669 - protein, 13 aa, Homo sapiens
  CDR3 for alpha chain variable domain of TCR clone 82335 (TRAV8-3, TRAJ48)
CAVVPFGNEKLTF

SEQ ID NO: 164670 - protein, 17 aa, Homo sapiens
  CDR3 for beta chain variable domain of TCR clone 82335 (TRBV13, TRBJ2-3)
CASSLSRVAGGRNTQYF

SEQ ID NO: 164671 - protein, 16 aa, Homo sapiens
  CDR3 for alpha chain variable domain of TCR clone 82336 (TRAV8-4, TRAJ9)
CAVTFNTGGFKNYLWR

SEQ ID NO: 164672 - protein, 15 aa, Homo sapiens
  CDR3 for beta chain variable domain of TCR clone 82336 (TRBV7-9, TRBJ2-2)
CASSPETGAGGELFF

SEQ ID NO: 164673 - protein, 11 aa, Homo sapiens
  CDR3 for alpha chain variable domain of TCR clone 82337 (TRAV22, TRAJ27)
CSVLNAGKSTF

SEQ ID NO: 164674 - protein, 11 aa, Homo sapiens
  CDR3 for beta chain variable domain of TCR clone 82337 (TRBV19, TRBJ2-2)
CASRYSGELFF

SEQ ID NO: 164675 - protein, 14 aa, Homo sapiens
  CDR3 for alpha chain variable domain of TCR clone 82338 (TRAV1-1, TRAJ28)
CAAPSGAGSYQLTF

SEQ ID NO: 164676 - protein, 13 aa, Homo sapiens
  CDR3 for beta chain variable domain of TCR clone 82338 (TRBV10-3, TRBJ2-7)
CASKLAVNYEQYF

SEQ ID NO: 164677 - protein, 15 aa, Homo sapiens
  CDR3 for alpha chain variable domain of TCR clone 82339 (TRAV21, TRAJ37)
CAVRPTLSNTGKLIF

SEQ ID NO: 164678 - protein, 16 aa, Homo sapiens
  CDR3 for beta chain variable domain of TCR clone 82339 (TRBV24-1, TRBJ2-3)
CATSDRRQDLTDKQYF

SEQ ID NO: 164679 - protein, 10 aa, Homo sapiens
  CDR3 for alpha chain variable domain of TCR clone 82340 (TRAV1-2, TRAJ23)
CACQGGKLIF

SEQ ID NO: 164680 - protein, 16 aa, Homo sapiens
  CDR3 for beta chain variable domain of TCR clone 82340 (TRBV11-2, TRBJ1-1)
CASSLRQGGEHSKAFF

SEQ ID NO: 164681 - protein, 16 aa, Homo sapiens
  CDR3 for alpha chain variable domain of TCR clone 82341 (TRAV20, TRAJ10)
CAVLRGLTGGGNKLTF

SEQ ID NO: 164682 - protein, 15 aa, Homo sapiens
  CDR3 for beta chain variable domain of TCR clone 82341 (TRBV6-3, TRBJ2-7)
CASSSPGTVFYEQYF

SEQ ID NO: 164683 - protein, 15 aa, Homo sapiens
  CDR3 for alpha chain variable domain of TCR clone 82342 (TRAV3, TRAJ22)
CAVRDRGGSARQLTF

SEQ ID NO: 164684 - protein, 15 aa, Homo sapiens
  CDR3 for beta chain variable domain of TCR clone 82342 (TRBV11-3, TRBJ2-2)
CASSLGGRPTGELFF

SEQ ID NO: 164685 - protein, 17 aa, Homo sapiens
  CDR3 for alpha chain variable domain of TCR clone 82343 (TRAV4, TRAJ20)
CTTASWVKGNNDYKLRF

SEQ ID NO: 164686 - protein, 17 aa, Homo sapiens
  CDR3 for beta chain variable domain of TCR clone 82343 (TRBV11-2, TRBJ2-1)
CASSLYPPGVEYNEQFF

SEQ ID NO: 164687 - protein, 23 aa, Homo sapiens
  CDR3 for alpha chain variable domain of TCR clone 82344 (TRAV26-1, TRAJ38)
CIADNAGNNHIQNPDSAVYQLRD

SEQ ID NO: 164688 - protein, 13 aa, Homo sapiens
  CDR3 for beta chain variable domain of TCR clone 82344 (TRBV20-1, TRBJ1-1)
CSARGGGNTEAFF

SEQ ID NO: 164689 - protein, 13 aa, Homo sapiens
  CDR3 for alpha chain variable domain of TCR clone 82345 (TRAV23/DV6, TRAJ27)
CAASKPMQANKPL

SEQ ID NO: 164690 - protein, 14 aa, Homo sapiens
  CDR3 for beta chain variable domain of TCR clone 82345 (TRBV5-4, TRBJ1-1)
CASSLDSRRDEAFF

SEQ ID NO: 164691 - protein, 15 aa, Homo sapiens
  CDR3 for alpha chain variable domain of TCR clone 82346 (TRAV35, TRAJ40)
CAGQLGTSETYKYIF

SEQ ID NO: 164692 - protein, 14 aa, Homo sapiens
  CDR3 for beta chain variable domain of TCR clone 82346 (TRBV7-3, TRBJ2-1)
CASSLAGGTNEQFF

SEQ ID NO: 164693 - protein, 11 aa, Homo sapiens
  CDR3 for alpha chain variable domain of TCR clone 82347 (TRAV4, TRAJ28)
CLVGDNRAEPL

SEQ ID NO: 164694 - protein, 13 aa, Homo sapiens
  CDR3 for beta chain variable domain of TCR clone 82347 (TRBV20-1, TRBJ2-7)
CSATHTSGYEQYF

SEQ ID NO: 164695 - protein, 14 aa, Homo sapiens
  CDR3 for alpha chain variable domain of TCR clone 82348 (TRAV20, TRAJ22)
CAVALCGSARQLTF

SEQ ID NO: 164696 - protein, 15 aa, Homo sapiens
  CDR3 for beta chain variable domain of TCR clone 82348 (TRBV7-2, TRBJ1-1)
CASSFAGDRDTEAFF

SEQ ID NO: 164697 - protein, 12 aa, Homo sapiens
  CDR3 for alpha chain variable domain of TCR clone 82349 (TRAV12-3, TRAJ17)
CAMTLTGNKLTF

SEQ ID NO: 164698 - protein, 16 aa, Homo sapiens
  CDR3 for beta chain variable domain of TCR clone 82349 (TRBV7-9, TRBJ2-5)
CASSPSGQGVKGTQYF

SEQ ID NO: 164699 - protein, 15 aa, Homo sapiens
  CDR3 for alpha chain variable domain of TCR clone 82350 (TRAV26-1, TRAJ29)
CIVRVEGSGNTPLVL

SEQ ID NO: 164700 - protein, 13 aa, Homo sapiens
  CDR3 for beta chain variable domain of TCR clone 82350 (TRBV19, TRBJ1-2)
CASSQGQVYGYTF

SEQ ID NO: 164701 - protein, 11 aa, Homo sapiens
  CDR3 for alpha chain variable domain of TCR clone 82351 (TRAV17, TRAJ9)
CGFIGGFKTIF

SEQ ID NO: 164702 - protein, 14 aa, Homo sapiens
  CDR3 for beta chain variable domain of TCR clone 82351 (TRBV7-9, TRBJ2-2)
CASSLVQDTGELFF

SEQ ID NO: 164703 - protein, 14 aa, Homo sapiens
  CDR3 for alpha chain variable domain of TCR clone 82352 (TRAV38-1, TRAJ27)
CAFIHNTNAGKSTF

SEQ ID NO: 164704 - protein, 12 aa, Homo sapiens
  CDR3 for beta chain variable domain of TCR clone 82352 (TRBV7-8, TRBJ2-7)
CASSLGDREQYL

SEQ ID NO: 164705 - protein, 14 aa, Homo sapiens
  CDR3 for alpha chain variable domain of TCR clone 82353 (TRAV29/DV5, TRAJ45)
CAARFRGGADGLTF

SEQ ID NO: 164706 - protein, 11 aa, Homo sapiens
  CDR3 for beta chain variable domain of TCR clone 82353 (TRBV11-2, TRBJ2-2)
CASSLTRELFF

SEQ ID NO: 164707 - protein, 10 aa, Homo sapiens
  CDR3 for alpha chain variable domain of TCR clone 82354 (TRAV30, TRAJ48)
CGIGNEKLTF

SEQ ID NO: 164708 - protein, 16 aa, Homo sapiens
  CDR3 for beta chain variable domain of TCR clone 82354 (TRBV5-4, TRBJ2-3)
CASQQPGAGGADTQYF

SEQ ID NO: 164709 - protein, 13 aa, Homo sapiens
  CDR3 for alpha chain variable domain of TCR clone 82355 (TRAV8-3, TRAJ28)
CAVGAVGSYQLTF

SEQ ID NO: 164710 - protein, 15 aa, Homo sapiens
  CDR3 for beta chain variable domain of TCR clone 82355 (TRBV18, TRBJ1-1)
CASSPRQGENTEAFF

SEQ ID NO: 164711 - protein, 11 aa, Homo sapiens
  CDR3 for alpha chain variable domain of TCR clone 82356 (TRAV2, TRAJ33)
CAVDSNYQLIW

SEQ ID NO: 164712 - protein, 15 aa, Homo sapiens
  CDR3 for beta chain variable domain of TCR clone 82356 (TRBV19, TRBJ1-2)
CASSVGQVLNYGYTC

SEQ ID NO: 164713 - protein, 15 aa, Homo sapiens
  CDR3 for alpha chain variable domain of TCR clone 82357 (TRAV26-1, TRAJ29)
CIVRVEGSGNTPLVF

SEQ ID NO: 164714 - protein, 14 aa, Homo sapiens
  CDR3 for beta chain variable domain of TCR clone 82357 (TRBV7-9, TRBJ1-1)
CASTPLQSYTEAFF

SEQ ID NO: 164715 - protein, 16 aa, Homo sapiens
  CDR3 for alpha chain variable domain of TCR clone 82358 (TRAV3, TRAJ5)
CAVRNLMDTGRRALTF

SEQ ID NO: 164716 - protein, 16 aa, Homo sapiens
  CDR3 for beta chain variable domain of TCR clone 82358 (TRBV4-2, TRBJ2-7)
CASGQEGLANSYEQYF

SEQ ID NO: 164717 - protein, 13 aa, Homo sapiens
  CDR3 for alpha chain variable domain of TCR clone 82359 (TRAV8-3, TRAJ44)
CAVVPGTASKLTF

SEQ ID NO: 164718 - protein, 13 aa, Homo sapiens
  CDR3 for beta chain variable domain of TCR clone 82359 (TRBV10-3, TRBJ1-2)
CAISERDSYGDTF

SEQ ID NO: 164719 - protein, 16 aa, Homo sapiens
  CDR3 for alpha chain variable domain of TCR clone 82360 (TRAV30, TRAJ24)
CGTEIVDADSWGKFQF

SEQ ID NO: 164720 - protein, 15 aa, Homo sapiens
  CDR3 for beta chain variable domain of TCR clone 82360 (TRBV6-5, TRBJ2-1)
CASTLTSGSSNEQFF

SEQ ID NO: 164721 - protein, 14 aa, Homo sapiens
  CDR3 for alpha chain variable domain of TCR clone 82361 (TRAV13-2, TRAJ17)
CAENSKAAGNKLTF

SEQ ID NO: 164722 - protein, 11 aa, Homo sapiens
  CDR3 for beta chain variable domain of TCR clone 82361 (TRBV6-3, TRBJ2-3)
CATGQADTQCF

SEQ ID NO: 164723 - protein, 16 aa, Homo sapiens
  CDR3 for alpha chain variable domain of TCR clone 82362 (TRAV30, TRAJ24)
CGTEIVDADSWGKFQV

SEQ ID NO: 164724 - protein, 16 aa, Homo sapiens
  CDR3 for beta chain variable domain of TCR clone 82362 (TRBV7-3, TRBJ2-2)
CASSLKRGTLSGELFF

SEQ ID NO: 164725 - protein, 15 aa, Homo sapiens
  CDR3 for alpha chain variable domain of TCR clone 82363 (TRAV26-1, TRAJ29)
CIVRVEGSGNTPLVF

SEQ ID NO: 164726 - protein, 15 aa, Homo sapiens
  CDR3 for beta chain variable domain of TCR clone 82363 (TRBV7-9, TRBJ1-5)
CASSQGHQPNQPQHL

SEQ ID NO: 164727 - protein, 13 aa, Homo sapiens
  CDR3 for alpha chain variable domain of TCR clone 82364 (TRAV3, TRAJ36)
CAVKRTGANNLFF

SEQ ID NO: 164728 - protein, 15 aa, Homo sapiens
  CDR3 for beta chain variable domain of TCR clone 82364 (TRBV19, TRBJ2-1)
CASIKGRGPYNEQFF

SEQ ID NO: 164729 - protein, 13 aa, Homo sapiens
  CDR3 for alpha chain variable domain of TCR clone 82365 (TRAV17, TRAJ9)
CATDYTGGFKTIF

SEQ ID NO: 164730 - protein, 13 aa, Homo sapiens
  CDR3 for beta chain variable domain of TCR clone 82365 (TRBV19, TRBJ1-2)
CASSVPGQDGYTF

SEQ ID NO: 164731 - protein, 14 aa, Homo sapiens
  CDR3 for alpha chain variable domain of TCR clone 82366 (TRAV12-3, TRAJ42)
CAMNYGGSQGNLIL

SEQ ID NO: 164732 - protein, 12 aa, Homo sapiens
  CDR3 for beta chain variable domain of TCR clone 82366 (TRBV7-8, TRBJ2-7)
CASSLGDREQYF

SEQ ID NO: 164733 - protein, 14 aa, Homo sapiens
  CDR3 for alpha chain variable domain of TCR clone 82367 (TRAV8-2, TRAJ37)
CVVSISGNTGKLIF

SEQ ID NO: 164734 - protein, 17 aa, Homo sapiens
  CDR3 for beta chain variable domain of TCR clone 82367 (TRBV20-1, TRBJ2-2)
CSASGSGQGGLTGELFF

SEQ ID NO: 164735 - protein, 11 aa, Homo sapiens
  CDR3 for alpha chain variable domain of TCR clone 82368 (TRAV35, TRAJ30)
CAGERDDKIIF

SEQ ID NO: 164736 - protein, 14 aa, Homo sapiens
  CDR3 for beta chain variable domain of TCR clone 82368 (TRBV15, TRBJ2-5)
CASSGDRGQETQYF

SEQ ID NO: 164737 - protein, 14 aa, Homo sapiens
  CDR3 for alpha chain variable domain of TCR clone 82369 (TRAV12-1, TRAJ54)
CVVDIYQGAQKLVF

SEQ ID NO: 164738 - protein, 15 aa, Homo sapiens
  CDR3 for beta chain variable domain of TCR clone 82369 (TRBV20-1, TRBJ2-7)
CSARDRVSGMDEQYF

SEQ ID NO: 164739 - protein, 14 aa, Homo sapiens
  CDR3 for alpha chain variable domain of TCR clone 82370 (TRAV16, TRAJ33)
RALSAMDSNYQLIW

SEQ ID NO: 164740 - protein, 14 aa, Homo sapiens
  CDR3 for beta chain variable domain of TCR clone 82370 (TRBV25-1, TRBJ1-1)
CASTHLGGNTEAFF

SEQ ID NO: 164741 - protein, 13 aa, Homo sapiens
  CDR3 for alpha chain variable domain of TCR clone 82371 (TRAV13-2, TRAJ48)
CAEMDFGNEKLTF

SEQ ID NO: 164742 - protein, 13 aa, Homo sapiens
  CDR3 for beta chain variable domain of TCR clone 82371 (TRBV7-9, TRBJ1-2)
CASSLRQNYGYTF

SEQ ID NO: 164743 - protein, 14 aa, Homo sapiens
  CDR3 for alpha chain variable domain of TCR clone 82372 (TRAV26-1, TRAJ39)
CIVRGSRSVNMLTF

SEQ ID NO: 164744 - protein, 15 aa, Homo sapiens
  CDR3 for beta chain variable domain of TCR clone 82372 (TRBV7-9, TRBJ1-5)
CASSQGHQPNQPQHF

SEQ ID NO: 164745 - protein, 12 aa, Homo sapiens
  CDR3 for alpha chain variable domain of TCR clone 82373 (TRAV13-1, TRAJ21)
CAAKEGFNKFYF

SEQ ID NO: 164746 - protein, 12 aa, Homo sapiens
  CDR3 for beta chain variable domain of TCR clone 82373 (TRBV28, TRBJ2-1)
CASKTSGNEQFF

SEQ ID NO: 164747 - protein, 14 aa, Homo sapiens
  CDR3 for alpha chain variable domain of TCR clone 82374 (TRAV23/DV6, )
CAEPDIQNPDPAVY

SEQ ID NO: 164748 - protein, 15 aa, Homo sapiens
  CDR3 for beta chain variable domain of TCR clone 82374 (TRBV12-4, TRBJ2-5)
CASTLNSGRGETQYF

SEQ ID NO: 164749 - protein, 14 aa, Homo sapiens
  CDR3 for alpha chain variable domain of TCR clone 82375 (TRAV12-2, TRAJ17)
CAVLFKAAGNKLTF

SEQ ID NO: 164750 - protein, 16 aa, Homo sapiens
  CDR3 for beta chain variable domain of TCR clone 82375 (TRBV15, TRBJ1-2)
CATSRGPRTGGGGYTS

SEQ ID NO: 164751 - protein, 14 aa, Homo sapiens
  CDR3 for alpha chain variable domain of TCR clone 82376 (TRAV1-2, TRAJ16)
CAVNRFSDCQKLLF

SEQ ID NO: 164752 - protein, 13 aa, Homo sapiens
  CDR3 for beta chain variable domain of TCR clone 82376 (TRBV20-1, TRBJ1-1)
CSARGGGNTEAFF

SEQ ID NO: 164753 - protein, 15 aa, Homo sapiens
  CDR3 for alpha chain variable domain of TCR clone 82377 (TRAV12-1, TRAJ4)
CVVNPFSGGYNKLIF

SEQ ID NO: 164754 - protein, 13 aa, Homo sapiens
  CDR3 for beta chain variable domain of TCR clone 82377 (TRBV20-1, TRBJ1-2)
CSARGTADYGYSF

SEQ ID NO: 164755 - protein, 12 aa, Homo sapiens
  CDR3 for alpha chain variable domain of TCR clone 82378 (TRAV16, TRAJ26)
CALRSYGQNFVF

SEQ ID NO: 164756 - protein, 20 aa, Homo sapiens
  CDR3 for beta chain variable domain of TCR clone 82378 (TRBV28, TRBJ2-1)
CASTPIGRSPGLAGGNEQFF

SEQ ID NO: 164757 - protein, 13 aa, Homo sapiens
  CDR3 for alpha chain variable domain of TCR clone 82379 (TRAV27, TRAJ41)
CAGEGNSGYALNF

SEQ ID NO: 164758 - protein, 14 aa, Homo sapiens
  CDR3 for beta chain variable domain of TCR clone 82379 (TRBV7-2, TRBJ1-1)
CASSFLTGTTDAFF

SEQ ID NO: 164759 - protein, 12 aa, Homo sapiens
  CDR3 for alpha chain variable domain of TCR clone 82380 (TRAV13-2, TRAJ23)
CAERHRGGKLIF

SEQ ID NO: 164760 - protein, 14 aa, Homo sapiens
  CDR3 for beta chain variable domain of TCR clone 82380 (TRBV10-3, TRBJ2-7)
CHQCGTSETYEQYF

SEQ ID NO: 164761 - protein, 11 aa, Homo sapiens
  CDR3 for alpha chain variable domain of TCR clone 82381 (TRAV1-2, TRAJ20)
RAVANDYKLSF

SEQ ID NO: 164762 - protein, 16 aa, Homo sapiens
  CDR3 for beta chain variable domain of TCR clone 82381 (TRBV4-3, TRBJ1-6)
CASSQDPGVYNSPLHF

SEQ ID NO: 164763 - protein, 13 aa, Homo sapiens
  CDR3 for alpha chain variable domain of TCR clone 82382 (TRAV21, TRAJ27)
CAARPGNAGKSTF

SEQ ID NO: 164764 - protein, 14 aa, Homo sapiens
  CDR3 for beta chain variable domain of TCR clone 82382 (TRBV4-2, TRBJ1-4)
CASSPSSGNEKLFF

SEQ ID NO: 164765 - protein, 12 aa, Homo sapiens
  CDR3 for alpha chain variable domain of TCR clone 82383 (TRAV2, TRAJ36)
CAELTGANNLFF

SEQ ID NO: 164766 - protein, 18 aa, Homo sapiens
  CDR3 for beta chain variable domain of TCR clone 82383 (TRBV19, TRBJ1-1)
CASIIDGGDYTGNTEASF

SEQ ID NO: 164767 - protein, 16 aa, Homo sapiens
  CDR3 for alpha chain variable domain of TCR clone 82384 (TRAV16, TRAJ52)
CALSAAGGTSYGKLTF

SEQ ID NO: 164768 - protein, 13 aa, Homo sapiens
  CDR3 for beta chain variable domain of TCR clone 82384 (TRBV9, TRBJ2-1)
CASSPSGGNEQFF

SEQ ID NO: 164769 - protein, 13 aa, Homo sapiens
  CDR3 for alpha chain variable domain of TCR clone 82385 (TRAV13-1, TRAJ39)
CAASIWAGNMLTF

SEQ ID NO: 164770 - protein, 14 aa, Homo sapiens
  CDR3 for beta chain variable domain of TCR clone 82385 (TRBV7-9, TRBJ1-1)
CASTPLQSYTEAFF

SEQ ID NO: 164771 - protein, 10 aa, Homo sapiens
  CDR3 for alpha chain variable domain of TCR clone 82386 (TRAV12-1, TRAJ37)
ARGNKGELIF

SEQ ID NO: 164772 - protein, 15 aa, Homo sapiens
  CDR3 for beta chain variable domain of TCR clone 82386 (TRBV7-2, TRBJ2-3)
CASGLEQGGTDTQYF

SEQ ID NO: 164773 - protein, 16 aa, Homo sapiens
  CDR3 for alpha chain variable domain of TCR clone 82387 (TRAV8-6, TRAJ28)
CAVTSKPGAGSYKLTF

SEQ ID NO: 164774 - protein, 16 aa, Homo sapiens
  CDR3 for beta chain variable domain of TCR clone 82387 (TRBV12-4, TRBJ2-5)
CASSWRPSGDLETQYF

SEQ ID NO: 164775 - protein, 13 aa, Homo sapiens
  CDR3 for alpha chain variable domain of TCR clone 82388 (TRAV17, TRAJ13)
CATDSGGYQKVTF

SEQ ID NO: 164776 - protein, 14 aa, Homo sapiens
  CDR3 for beta chain variable domain of TCR clone 82388 (TRBV11-2, TRBJ2-5)
CASSRTGGIETQYF

SEQ ID NO: 164777 - protein, 13 aa, Homo sapiens
  CDR3 for alpha chain variable domain of TCR clone 82389 (TRAV1-2, TRAJ31)
CAVRGYNNARLMF

SEQ ID NO: 164778 - protein, 14 aa, Homo sapiens
  CDR3 for beta chain variable domain of TCR clone 82389 (TRBV12-4, TRBJ1-3)
CASTLTGAGNTMYF

SEQ ID NO: 164779 - protein, 14 aa, Homo sapiens
  CDR3 for alpha chain variable domain of TCR clone 82390 (TRAV26-1, TRAJ38)
CIADNAGNNRKLLW

SEQ ID NO: 164780 - protein, 17 aa, Homo sapiens
  CDR3 for beta chain variable domain of TCR clone 82390 (TRBV15, TRBJ1-1)
CATSRVGGADGDTEAFF

SEQ ID NO: 164781 - protein, 13 aa, Homo sapiens
  CDR3 for alpha chain variable domain of TCR clone 82391 (TRAV8-3, TRAJ36)
CAVGATGANNLFF

SEQ ID NO: 164782 - protein, 19 aa, Homo sapiens
  CDR3 for beta chain variable domain of TCR clone 82391 (TRBV25-1, TRBJ2-2)
CAILVYRVDRGRKTGELFF

SEQ ID NO: 164783 - protein, 12 aa, Homo sapiens
  CDR3 for alpha chain variable domain of TCR clone 82392 (TRAV12-3, TRAJ17)
CAMTLTGNKLTF

SEQ ID NO: 164784 - protein, 15 aa, Homo sapiens
  CDR3 for beta chain variable domain of TCR clone 82392 (TRBV5-7, TRBJ2-7)
CASSPYLEGSYEQYF

SEQ ID NO: 164785 - protein, 13 aa, Homo sapiens
  CDR3 for alpha chain variable domain of TCR clone 82393 (TRAV21, TRAJ15)
CAVANQAGTALIS

SEQ ID NO: 164786 - protein, 14 aa, Homo sapiens
  CDR3 for beta chain variable domain of TCR clone 82393 (TRBV27, TRBJ2-2)
CASSLGAATGELFF

SEQ ID NO: 164787 - protein, 13 aa, Homo sapiens
  CDR3 for alpha chain variable domain of TCR clone 82394 (TRAV12-2, TRAJ10)
CAVPTGGGNKLTF

SEQ ID NO: 164788 - protein, 17 aa, Homo sapiens
  CDR3 for beta chain variable domain of TCR clone 82394 (TRBV20-1, TRBJ2-1)
CSAPPRLAGTRYNEQFF

SEQ ID NO: 164789 - protein, 16 aa, Homo sapiens
  CDR3 for alpha chain variable domain of TCR clone 82395 (TRAV3, TRAJ3)
CAVRDRAKSSASKTIF

SEQ ID NO: 164790 - protein, 16 aa, Homo sapiens
  CDR3 for beta chain variable domain of TCR clone 82395 (TRBV20-1, TRBJ2-4)
CSATSLAELAKNIQYF

SEQ ID NO: 164791 - protein, 12 aa, Homo sapiens
  CDR3 for alpha chain variable domain of TCR clone 82396 (TRAV12-3, TRAJ17)
CAMTLTGNKLTF

SEQ ID NO: 164792 - protein, 13 aa, Homo sapiens
  CDR3 for beta chain variable domain of TCR clone 82396 (TRBV11-2, TRBJ2-5)
CASSFSSQETQYF

SEQ ID NO: 164793 - protein, 18 aa, Homo sapiens
  CDR3 for alpha chain variable domain of TCR clone 82397 (TRAV21, TRAJ52)
CAVRPSPAGGTSYGKLTF

SEQ ID NO: 164794 - protein, 13 aa, Homo sapiens
  CDR3 for beta chain variable domain of TCR clone 82397 (TRBV20-1, TRBJ1-6)
CSAPLGVGSPLHF

SEQ ID NO: 164795 - protein, 16 aa, Homo sapiens
  CDR3 for alpha chain variable domain of TCR clone 82398 (TRAV12-2, TRAJ32)
CAVNLGQGGATNKLIF

SEQ ID NO: 164796 - protein, 12 aa, Homo sapiens
  CDR3 for beta chain variable domain of TCR clone 82398 (TRBV11-2, TRBJ2-1)
CASSPGNNEQFF

SEQ ID NO: 164797 - protein, 16 aa, Homo sapiens
  CDR3 for alpha chain variable domain of TCR clone 82399 (TRAV16, TRAJ52)
CALSGVGDTSCGKLTF

SEQ ID NO: 164798 - protein, 14 aa, Homo sapiens
  CDR3 for beta chain variable domain of TCR clone 82399 (TRBV19, TRBJ1-2)
CASSLQGQAYGYTF

SEQ ID NO: 164799 - protein, 13 aa, Homo sapiens
  CDR3 for alpha chain variable domain of TCR clone 82400 (TRAV13-2, TRAJ48)
CAEMDLGNEKLTF

SEQ ID NO: 164800 - protein, 13 aa, Homo sapiens
  CDR3 for beta chain variable domain of TCR clone 82400 (TRBV7-9, TRBJ1-2)
CASSLKQNYGYTF

SEQ ID NO: 164801 - protein, 19 aa, Homo sapiens
  CDR3 for alpha chain variable domain of TCR clone 82401 (TRAV3, TRAJ6)
CAVSDRNPSRSGGSYIPTF

SEQ ID NO: 164802 - protein, 15 aa, Homo sapiens
  CDR3 for beta chain variable domain of TCR clone 82401 (TRBV18, TRBJ2-7)
CASSPTFMDSYEQYF

SEQ ID NO: 164803 - protein, 12 aa, Homo sapiens
  CDR3 for alpha chain variable domain of TCR clone 82402 (TRAV13-1, TRAJ21)
CAALFNFNKFYF

SEQ ID NO: 164804 - protein, 14 aa, Homo sapiens
  CDR3 for beta chain variable domain of TCR clone 82402 (TRBV4-1, TRBJ2-7)
CASRLTSGSYEQYF

SEQ ID NO: 164805 - protein, 12 aa, Homo sapiens
  CDR3 for alpha chain variable domain of TCR clone 82403 (TRAV1-1, TRAJ9)
CDVDTGGFKTIF

SEQ ID NO: 164806 - protein, 14 aa, Homo sapiens
  CDR3 for beta chain variable domain of TCR clone 82403 (TRBV7-8, TRBJ2-5)
CASSATGGQETQYF

SEQ ID NO: 164807 - protein, 13 aa, Homo sapiens
  CDR3 for alpha chain variable domain of TCR clone 82404 (TRAV21, TRAJ27)
CAARPGNAGKSTF

SEQ ID NO: 164808 - protein, 11 aa, Homo sapiens
  CDR3 for beta chain variable domain of TCR clone 82404 (TRBV11-3, TRBJ2-2)
CASSLPGELFF

SEQ ID NO: 164809 - protein, 16 aa, Homo sapiens
  CDR3 for alpha chain variable domain of TCR clone 82405 (TRAV3, TRAJ5)
CAVRNLMDPGRRALTF

SEQ ID NO: 164810 - protein, 16 aa, Homo sapiens
  CDR3 for beta chain variable domain of TCR clone 82405 (TRBV4-2, TRBJ2-7)
CASSQEGLANSYEQYF

SEQ ID NO: 164811 - protein, 15 aa, Homo sapiens
  CDR3 for alpha chain variable domain of TCR clone 82406 (TRAV13-1, TRAJ52)
CAASSPSTSYGKLTF

SEQ ID NO: 164812 - protein, 15 aa, Homo sapiens
  CDR3 for beta chain variable domain of TCR clone 82406 (TRBV27, TRBJ1-6)
CASSFDRGLGSPLHF

SEQ ID NO: 164813 - protein, 12 aa, Homo sapiens
  CDR3 for alpha chain variable domain of TCR clone 82407 (TRAV13-1, TRAJ21)
CAAKEGFNKFYF

SEQ ID NO: 164814 - protein, 12 aa, Homo sapiens
  CDR3 for beta chain variable domain of TCR clone 82407 (TRBV24-1, TRBJ1-1)
CATLYPDTEAFF

SEQ ID NO: 164815 - protein, 15 aa, Homo sapiens
  CDR3 for alpha chain variable domain of TCR clone 82408 (TRAV27, TRAJ50)
CAGVGRGTSYEKVIF

SEQ ID NO: 164816 - protein, 14 aa, Homo sapiens
  CDR3 for beta chain variable domain of TCR clone 82408 (TRBV7-2, TRBJ1-1)
CASSFYDLNTEAFF

SEQ ID NO: 164817 - protein, 15 aa, Homo sapiens
  CDR3 for alpha chain variable domain of TCR clone 82409 (TRAV26-1, TRAJ22)
CIVRVSFWFCKATDL

SEQ ID NO: 164818 - protein, 13 aa, Homo sapiens
  CDR3 for beta chain variable domain of TCR clone 82409 (TRBV19, TRBJ1-2)
CASSVPGQDGYTF

SEQ ID NO: 164819 - protein, 11 aa, Homo sapiens
  CDR3 for alpha chain variable domain of TCR clone 82410 (TRAV2, TRAJ23)
CAVETRGKLIF

SEQ ID NO: 164820 - protein, 14 aa, Homo sapiens
  CDR3 for beta chain variable domain of TCR clone 82410 (TRBV2, TRBJ2-3)
CVSSEGQNTDTQYF

SEQ ID NO: 164821 - protein, 14 aa, Homo sapiens
  CDR3 for alpha chain variable domain of TCR clone 82411 (TRAV8-4, TRAJ9)
CVVRINTGGFKTIF

SEQ ID NO: 164822 - protein, 15 aa, Homo sapiens
  CDR3 for beta chain variable domain of TCR clone 82411 (TRBV10-2, TRBJ2-6)
CASSEQGTGANVLTF

SEQ ID NO: 164823 - protein, 13 aa, Homo sapiens
  CDR3 for alpha chain variable domain of TCR clone 82412 (TRAV1-2, TRAJ20)
CAVRDGNDYKLSF

SEQ ID NO: 164824 - protein, 15 aa, Homo sapiens
  CDR3 for beta chain variable domain of TCR clone 82412 (TRBV19, TRBJ1-1)
CASSIRRQMNTEAFF

SEQ ID NO: 164825 - protein, 13 aa, Homo sapiens
  CDR3 for alpha chain variable domain of TCR clone 82413 (TRAV20, TRAJ20)
CAVRDFNDYKLSF

SEQ ID NO: 164826 - protein, 12 aa, Homo sapiens
  CDR3 for beta chain variable domain of TCR clone 82413 (TRBV9, TRBJ2-1)
CASSITHNEQSF

SEQ ID NO: 164827 - protein, 12 aa, Homo sapiens
  CDR3 for alpha chain variable domain of TCR clone 82414 (TRAV35, TRAJ49)
CAGWNTGNQFYF

SEQ ID NO: 164828 - protein, 17 aa, Homo sapiens
  CDR3 for beta chain variable domain of TCR clone 82414 (TRBV13, TRBJ2-3)
CASSLSRVAGGRNTQYF

SEQ ID NO: 164829 - protein, 14 aa, Homo sapiens
  CDR3 for alpha chain variable domain of TCR clone 82415 (TRAV22, TRAJ28)
FAVYSGAGSYQLTF

SEQ ID NO: 164830 - protein, 16 aa, Homo sapiens
  CDR3 for beta chain variable domain of TCR clone 82415 (TRBV24-1, TRBJ2-3)
CATSDPGTGATDTQYF

SEQ ID NO: 164831 - protein, 13 aa, Homo sapiens
  CDR3 for alpha chain variable domain of TCR clone 82416 (TRAV3, TRAJ15)
GAVRDQAGTALIF

SEQ ID NO: 164832 - protein, 15 aa, Homo sapiens
  CDR3 for beta chain variable domain of TCR clone 82416 (TRBV11-1, TRBJ2-7)
CASSLNYGASYEQYF

SEQ ID NO: 164833 - protein, 17 aa, Homo sapiens
  CDR3 for alpha chain variable domain of TCR clone 82417 (TRAV13-1, TRAJ31)
CAPRDRLMFGDGTQLVV

SEQ ID NO: 164834 - protein, 12 aa, Homo sapiens
  CDR3 for beta chain variable domain of TCR clone 82417 (TRBV11-2, TRBJ2-2)
CASSLPTGELFF

SEQ ID NO: 164835 - protein, 14 aa, Homo sapiens
  CDR3 for alpha chain variable domain of TCR clone 82418 (TRAV16, TRAJ15)
CALSFNQAGTALTF

SEQ ID NO: 164836 - protein, 16 aa, Homo sapiens
  CDR3 for beta chain variable domain of TCR clone 82418 (TRBV9, TRBJ2-7)
CASSAGPDRSPYEQYF

SEQ ID NO: 164837 - protein, 15 aa, Homo sapiens
  CDR3 for alpha chain variable domain of TCR clone 82419 (TRAV2, TRAJ24)
CAVEVLTDSWGKFQF

SEQ ID NO: 164838 - protein, 16 aa, Homo sapiens
  CDR3 for beta chain variable domain of TCR clone 82419 (TRBV27, TRBJ2-2)
CASSSSGVSNTGELFF

SEQ ID NO: 164839 - protein, 12 aa, Homo sapiens
  CDR3 for alpha chain variable domain of TCR clone 82420 (TRAV13-2, TRAJ23)
CAERHRGGKLIF

SEQ ID NO: 164840 - protein, 16 aa, Homo sapiens
  CDR3 for beta chain variable domain of TCR clone 82420 (TRBV29-1, TRBJ2-7)
CSVEDAEDGTAYEQYF

SEQ ID NO: 164841 - protein, 16 aa, Homo sapiens
  CDR3 for alpha chain variable domain of TCR clone 82421 (TRAV12-3, TRAJ53)
CAMSPGSGGSHYKLTF

SEQ ID NO: 164842 - protein, 12 aa, Homo sapiens
  CDR3 for beta chain variable domain of TCR clone 82421 (TRBV7-8, TRBJ2-7)
CASSLGDREQYF

SEQ ID NO: 164843 - protein, 11 aa, Homo sapiens
  CDR3 for alpha chain variable domain of TCR clone 82422 (TRAV13-1, TRAJ15)
CAATPGTALIL

SEQ ID NO: 164844 - protein, 13 aa, Homo sapiens
  CDR3 for beta chain variable domain of TCR clone 82422 (TRBV7-2, TRBJ2-1)
CASSLGVYNEQFF

SEQ ID NO: 164845 - protein, 11 aa, Homo sapiens
  CDR3 for alpha chain variable domain of TCR clone 82423 (TRAV1-1, TRAJ23)
CAVRQGGKLIF

SEQ ID NO: 164846 - protein, 15 aa, Homo sapiens
  CDR3 for beta chain variable domain of TCR clone 82423 (TRBV28, TRBJ2-5)
CASSPPWSYQETQYF

SEQ ID NO: 164847 - protein, 13 aa, Homo sapiens
  CDR3 for alpha chain variable domain of TCR clone 82424 (TRAV21, TRAJ45)
CAVMGGGADGLNF

SEQ ID NO: 164848 - protein, 14 aa, Homo sapiens
  CDR3 for beta chain variable domain of TCR clone 82424 (TRBV4-3, TRBJ1-4)
CASSPLQRNEKLFF

SEQ ID NO: 164849 - protein, 14 aa, Homo sapiens
  CDR3 for alpha chain variable domain of TCR clone 82425 (TRAV12-3, TRAJ22)
CAMGLFGSARQLTF

SEQ ID NO: 164850 - protein, 11 aa, Homo sapiens
  CDR3 for beta chain variable domain of TCR clone 82425 (TRBV12-4, TRBJ2-2)
CASSYAGELFF

SEQ ID NO: 164851 - protein, 13 aa, Homo sapiens
  CDR3 for alpha chain variable domain of TCR clone 82426 (TRAV13-1, TRAJ40)
CAASKGGTYKYIF

SEQ ID NO: 164852 - protein, 13 aa, Homo sapiens
  CDR3 for beta chain variable domain of TCR clone 82426 (TRBV7-6, TRBJ1-2)
CASSLVADYGDTF

SEQ ID NO: 164853 - protein, 14 aa, Homo sapiens
  CDR3 for alpha chain variable domain of TCR clone 82427 (TRAV26-2, TRAJ32)
CCVGYGGATNKLIF

SEQ ID NO: 164854 - protein, 14 aa, Homo sapiens
  CDR3 for beta chain variable domain of TCR clone 82427 (TRBV4-2, TRBJ2-1)
CASGLDRAYNEQLF

SEQ ID NO: 164855 - protein, 13 aa, Homo sapiens
  CDR3 for alpha chain variable domain of TCR clone 82428 (TRAV27, TRAJ45)
CRSSGGGADGLTF

SEQ ID NO: 164856 - protein, 16 aa, Homo sapiens
  CDR3 for beta chain variable domain of TCR clone 82428 (TRBV7-3, TRBJ2-1)
CASSLEGYRSYNEQFF

SEQ ID NO: 164857 - protein, 14 aa, Homo sapiens
  CDR3 for alpha chain variable domain of TCR clone 82429 (TRAV17, TRAJ16)
CATADFSDGQKLLF

SEQ ID NO: 164858 - protein, 12 aa, Homo sapiens
  CDR3 for beta chain variable domain of TCR clone 82429 (TRBV24-1, TRBJ1-1)
CATLYPHTEAFF

SEQ ID NO: 164859 - protein, 12 aa, Homo sapiens
  CDR3 for alpha chain variable domain of TCR clone 82430 (TRAV12-3, TRAJ42)
CAPGGSQGNLTF

SEQ ID NO: 164860 - protein, 13 aa, Homo sapiens
  CDR3 for beta chain variable domain of TCR clone 82430 (TRBV5-7, TRBJ2-6)
CASTSSGANVLTF

SEQ ID NO: 164861 - protein, 15 aa, Homo sapiens
  CDR3 for alpha chain variable domain of TCR clone 82431 (TRAV12-3, TRAJ22)
CAMRSSSGSARQLTF

SEQ ID NO: 164862 - protein, 18 aa, Homo sapiens
  CDR3 for beta chain variable domain of TCR clone 82431 (TRBV27, TRBJ2-1)
CASRRSGRGESAGNEQFF

SEQ ID NO: 164863 - protein, 18 aa, Homo sapiens
  CDR3 for alpha chain variable domain of TCR clone 82432 (TRAV21, TRAJ52)
CAVRPSPAGGTSYGKLTF

SEQ ID NO: 164864 - protein, 15 aa, Homo sapiens
  CDR3 for beta chain variable domain of TCR clone 82432 (TRBV4-2, TRBJ1-2)
CASSQRTGGRDGYTF

SEQ ID NO: 164865 - protein, 17 aa, Homo sapiens
  CDR3 for alpha chain variable domain of TCR clone 82433 (TRAV4, TRAJ13)
CLVGVQGSSGGYPKVTF

SEQ ID NO: 164866 - protein, 18 aa, Homo sapiens
  CDR3 for beta chain variable domain of TCR clone 82433 (TRBV15, TRBJ2-3)
CATSRDGARSWDTDTQYF

SEQ ID NO: 164867 - protein, 15 aa, Homo sapiens
  CDR3 for alpha chain variable domain of TCR clone 82434 (TRAV3, TRAJ22)
CAVRDRGGSARQLTF

SEQ ID NO: 164868 - protein, 14 aa, Homo sapiens
  CDR3 for beta chain variable domain of TCR clone 82434 (TRBV20-1, TRBJ2-3)
CSARGGTSTDTQYF

SEQ ID NO: 164869 - protein, 12 aa, Homo sapiens
  CDR3 for alpha chain variable domain of TCR clone 82435 (TRAV21, TRAJ31)
RAVWGNNARLMF

SEQ ID NO: 164870 - protein, 16 aa, Homo sapiens
  CDR3 for beta chain variable domain of TCR clone 82435 (TRBV27, TRBJ2-5)
CASSYGPGGQKETQYF

SEQ ID NO: 164871 - protein, 15 aa, Homo sapiens
  CDR3 for alpha chain variable domain of TCR clone 82436 (TRAV12-2, TRAJ43)
CAFDMRFGAVTRLTV

SEQ ID NO: 164872 - protein, 18 aa, Homo sapiens
  CDR3 for beta chain variable domain of TCR clone 82436 (TRBV20-1, TRBJ2-3)
CSASGLAGGPGTTDTQYF

SEQ ID NO: 164873 - protein, 12 aa, Homo sapiens
  CDR3 for alpha chain variable domain of TCR clone 82437 (TRAV12-3, TRAJ17)
CAMTLTGNKLTF

SEQ ID NO: 164874 - protein, 15 aa, Homo sapiens
  CDR3 for beta chain variable domain of TCR clone 82437 (TRBV20-1, TRBJ2-7)
CSACDRVSGMDEQYF

SEQ ID NO: 164875 - protein, 13 aa, Homo sapiens
  CDR3 for alpha chain variable domain of TCR clone 82438 (TRAV12-1, TRAJ33)
CGDAPVSNYQLIW

SEQ ID NO: 164876 - protein, 15 aa, Homo sapiens
  CDR3 for beta chain variable domain of TCR clone 82438 (TRBV27, TRBJ2-1)
CASSNGGGSSNEQFF

SEQ ID NO: 164877 - protein, 13 aa, Homo sapiens
  CDR3 for alpha chain variable domain of TCR clone 82439 (TRAV35, TRAJ22)
CAGFSGSARQLTF

SEQ ID NO: 164878 - protein, 16 aa, Homo sapiens
  CDR3 for beta chain variable domain of TCR clone 82439 (TRBV7-9, TRBJ2-1)
CASSLVLTGQGNEQFF

SEQ ID NO: 164879 - protein, 16 aa, Homo sapiens
  CDR3 for alpha chain variable domain of TCR clone 82440 (TRAV21, TRAJ17)
CAARPGEEAAGNKLTF

SEQ ID NO: 164880 - protein, 16 aa, Homo sapiens
  CDR3 for beta chain variable domain of TCR clone 82440 (TRBV2, TRBJ2-7)
CASSEPWTGPSYEQYF

SEQ ID NO: 164881 - protein, 13 aa, Homo sapiens
  CDR3 for alpha chain variable domain of TCR clone 82441 (TRAV27, TRAJ3)
ASLRGSSAPKIIF

SEQ ID NO: 164882 - protein, 15 aa, Homo sapiens
  CDR3 for beta chain variable domain of TCR clone 82441 (TRBV28, TRBJ1-3)
CASSMGWASGNTIYF

SEQ ID NO: 164883 - protein, 14 aa, Homo sapiens
  CDR3 for alpha chain variable domain of TCR clone 82442 (TRAV8-2, TRAJ4)
CVVSPSGGYNKLIF

SEQ ID NO: 164884 - protein, 15 aa, Homo sapiens
  CDR3 for beta chain variable domain of TCR clone 82442 (TRBV4-1, TRBJ1-4)
CASSDTGGTNEKLFS

SEQ ID NO: 164885 - protein, 18 aa, Homo sapiens
  CDR3 for alpha chain variable domain of TCR clone 82443 (TRAV12-2, )
CAVEDIQSPDPAVYQLRD

SEQ ID NO: 164886 - protein, 18 aa, Homo sapiens
  CDR3 for beta chain variable domain of TCR clone 82443 (TRBV11-2, TRBJ2-3)
CASSLGGASRGAPNTQYF

SEQ ID NO: 164887 - protein, 12 aa, Homo sapiens
  CDR3 for alpha chain variable domain of TCR clone 82444 (TRAV26-1, TRAJ36)
CIVRVRADNLFF

SEQ ID NO: 164888 - protein, 13 aa, Homo sapiens
  CDR3 for beta chain variable domain of TCR clone 82444 (TRBV11-2, TRBJ2-5)
CASSRGPSETQYF

SEQ ID NO: 164889 - protein, 14 aa, Homo sapiens
  CDR3 for alpha chain variable domain of TCR clone 82445 (TRAV12-2, TRAJ13)
CAVKKTGGYQKVTF

SEQ ID NO: 164890 - protein, 15 aa, Homo sapiens
  CDR3 for beta chain variable domain of TCR clone 82445 (TRBV27, TRBJ2-5)
CASSLYPRGGETQYF

SEQ ID NO: 164891 - protein, 12 aa, Homo sapiens
  CDR3 for alpha chain variable domain of TCR clone 82446 (TRAV25, TRAJ11)
CAGYSGYSTLTF

SEQ ID NO: 164892 - protein, 13 aa, Homo sapiens
  CDR3 for beta chain variable domain of TCR clone 82446 (TRBV7-9, TRBJ1-2)
CASSLKQYYGYTF

SEQ ID NO: 164893 - protein, 19 aa, Homo sapiens
  CDR3 for alpha chain variable domain of TCR clone 82447 (TRAV3, TRAJ6)
CAVRDRDPSRSGGSYIPTF

SEQ ID NO: 164894 - protein, 15 aa, Homo sapiens
  CDR3 for beta chain variable domain of TCR clone 82447 (TRBV18, TRBJ2-7)
CASSPTFMDSYEQYF

SEQ ID NO: 164895 - protein, 15 aa, Homo sapiens
  CDR3 for alpha chain variable domain of TCR clone 82448 (TRAV3, TRAJ9)
CAVRDSNTGGFKTIF

SEQ ID NO: 164896 - protein, 16 aa, Homo sapiens
  CDR3 for beta chain variable domain of TCR clone 82448 (TRBV15, TRBJ2-5)
CATSPTTGQGMGTQYF

SEQ ID NO: 164897 - protein, 12 aa, Homo sapiens
  CDR3 for alpha chain variable domain of TCR clone 82449 (TRAV1-1, TRAJ20)
CAVREDDYKLSF

SEQ ID NO: 164898 - protein, 15 aa, Homo sapiens
  CDR3 for beta chain variable domain of TCR clone 82449 (TRBV5-7, TRBJ2-7)
CDSSLPGQVFYEQYF

SEQ ID NO: 164899 - protein, 14 aa, Homo sapiens
  CDR3 for alpha chain variable domain of TCR clone 82450 (TRAV12-2, TRAJ6)
CASKWGGGSYIPTF

SEQ ID NO: 164900 - protein, 13 aa, Homo sapiens
  CDR3 for beta chain variable domain of TCR clone 82450 (TRBV2, TRBJ1-1)
CASSEGGNTEAFF

SEQ ID NO: 164901 - protein, 17 aa, Homo sapiens
  CDR3 for alpha chain variable domain of TCR clone 82451 (TRAV13-2, TRAJ10)
EASNTVILTGGGNKLTF

SEQ ID NO: 164902 - protein, 16 aa, Homo sapiens
  CDR3 for beta chain variable domain of TCR clone 82451 (TRBV19, TRBJ1-1)
CASRFGGPVTGTEAFF

SEQ ID NO: 164903 - protein, 16 aa, Homo sapiens
  CDR3 for alpha chain variable domain of TCR clone 82452 (TRAV13-1, TRAJ48)
CAASIFGNFGNEKLTF

SEQ ID NO: 164904 - protein, 16 aa, Homo sapiens
  CDR3 for beta chain variable domain of TCR clone 82452 (TRBV18, TRBJ1-5)
CASSPYRVEGNQTQHF

SEQ ID NO: 164905 - protein, 16 aa, Homo sapiens
  CDR3 for alpha chain variable domain of TCR clone 82453 (TRAV12-3, TRAJ53)
CAMSPGSGGSNYKLTF

SEQ ID NO: 164906 - protein, 20 aa, Homo sapiens
  CDR3 for beta chain variable domain of TCR clone 82453 (TRBV7-8, TRBJ2-2)
CANSHLFPGPTIHITGELFF

SEQ ID NO: 164907 - protein, 13 aa, Homo sapiens
  CDR3 for alpha chain variable domain of TCR clone 82454 (TRAV38-1, TRAJ42)
CARWGGSQGNLFF

SEQ ID NO: 164908 - protein, 17 aa, Homo sapiens
  CDR3 for beta chain variable domain of TCR clone 82454 (TRBV20-1, TRBJ2-1)
CSARDPLAGVWDNEQFF

SEQ ID NO: 164909 - protein, 15 aa, Homo sapiens
  CDR3 for alpha chain variable domain of TCR clone 82455 (TRAV17, TRAJ52)
CATEAGGTSYGKLTF

SEQ ID NO: 164910 - protein, 14 aa, Homo sapiens
  CDR3 for beta chain variable domain of TCR clone 82455 (TRBV28, TRBJ1-5)
CASSVGVLVKPQHF

SEQ ID NO: 164911 - protein, 12 aa, Homo sapiens
  CDR3 for alpha chain variable domain of TCR clone 82456 (TRAV38-1, TRAJ42)
CSVGGSQGNLIF

SEQ ID NO: 164912 - protein, 17 aa, Homo sapiens
  CDR3 for beta chain variable domain of TCR clone 82456 (TRBV20-1, TRBJ2-1)
CSARDPLAGVWDNEQFF

SEQ ID NO: 164913 - protein, 14 aa, Homo sapiens
  CDR3 for alpha chain variable domain of TCR clone 82457 (TRAV26-1, TRAJ49)
CIVRPSNTGNQLYF

SEQ ID NO: 164914 - protein, 15 aa, Homo sapiens
  CDR3 for beta chain variable domain of TCR clone 82457 (TRBV19, TRBJ1-1)
CASMGFRDVNTEAFF

SEQ ID NO: 164915 - protein, 12 aa, Homo sapiens
  CDR3 for alpha chain variable domain of TCR clone 82458 (TRAV12-2, TRAJ5)
CAVMRGNNRLAF

SEQ ID NO: 164916 - protein, 13 aa, Homo sapiens
  CDR3 for beta chain variable domain of TCR clone 82458 (TRBV12-4, TRBJ2-7)
CASSPTETYEQYF

SEQ ID NO: 164917 - protein, 13 aa, Homo sapiens
  CDR3 for alpha chain variable domain of TCR clone 82459 (TRAV25, TRAJ10)
CAGRTGGGNKLTF

SEQ ID NO: 164918 - protein, 17 aa, Homo sapiens
  CDR3 for beta chain variable domain of TCR clone 82459 (TRBV7-8, TRBJ2-6)
CASSAGTGGAGANVLTF

SEQ ID NO: 164919 - protein, 13 aa, Homo sapiens
  CDR3 for alpha chain variable domain of TCR clone 82460 (TRAV27, TRAJ45)
CRSSGGGADGLTF

SEQ ID NO: 164920 - protein, 17 aa, Homo sapiens
  CDR3 for beta chain variable domain of TCR clone 82460 (TRBV10-3, TRBJ2-4)
CTSVPSVNKGSKNSQYF

SEQ ID NO: 164921 - protein, 15 aa, Homo sapiens
  CDR3 for alpha chain variable domain of TCR clone 82461 (TRAV26-1, TRAJ22)
CIVRVSFWFCKATDL

SEQ ID NO: 164922 - protein, 12 aa, Homo sapiens
  CDR3 for beta chain variable domain of TCR clone 82461 (TRBV11-2, TRBJ2-1)
CASSPGNNEQFF

SEQ ID NO: 164923 - protein, 14 aa, Homo sapiens
  CDR3 for alpha chain variable domain of TCR clone 82462 (TRAV12-2, TRAJ13)
CAVKKTGGYQKVTF

SEQ ID NO: 164924 - protein, 15 aa, Homo sapiens
  CDR3 for beta chain variable domain of TCR clone 82462 (TRBV7-2, TRBJ2-1)
CASTHGTGIYNEQFF

SEQ ID NO: 164925 - protein, 16 aa, Homo sapiens
  CDR3 for alpha chain variable domain of TCR clone 82463 (TRAV17, TRAJ52)
CATSNAGGTGYGKLTF

SEQ ID NO: 164926 - protein, 13 aa, Homo sapiens
  CDR3 for beta chain variable domain of TCR clone 82463 (TRBV27, TRBJ1-6)
CASSLVLVSPLHF

SEQ ID NO: 164927 - protein, 17 aa, Homo sapiens
  CDR3 for alpha chain variable domain of TCR clone 82464 (TRAV13-1, TRAJ31)
CASRDRLMFGDGTQLVV

SEQ ID NO: 164928 - protein, 12 aa, Homo sapiens
  CDR3 for beta chain variable domain of TCR clone 82464 (TRBV7-9, TRBJ2-7)
CASSLEGYEQYF

SEQ ID NO: 164929 - protein, 14 aa, Homo sapiens
  CDR3 for alpha chain variable domain of TCR clone 82465 (TRAV12-2, TRAJ13)
CAVKKTGGYQKATF

SEQ ID NO: 164930 - protein, 15 aa, Homo sapiens
  CDR3 for beta chain variable domain of TCR clone 82465 (TRBV12-4, TRBJ2-5)
CASSPPTGLQETQYF

SEQ ID NO: 164931 - protein, 12 aa, Homo sapiens
  CDR3 for alpha chain variable domain of TCR clone 82466 (TRAV27, TRAJ9)
CAGESGGFKTIF

SEQ ID NO: 164932 - protein, 14 aa, Homo sapiens
  CDR3 for beta chain variable domain of TCR clone 82466 (TRBV13, TRBJ2-7)
CASSLKGASYEQYF

SEQ ID NO: 164933 - protein, 13 aa, Homo sapiens
  CDR3 for alpha chain variable domain of TCR clone 82467 (TRAV2, TRAJ15)
CAVASQAGTALIF

SEQ ID NO: 164934 - protein, 16 aa, Homo sapiens
  CDR3 for beta chain variable domain of TCR clone 82467 (TRBV7-3, TRBJ2-1)
CASSLEGYRSYNEQFF

SEQ ID NO: 164935 - protein, 16 aa, Homo sapiens
  CDR3 for alpha chain variable domain of TCR clone 82468 (TRAV8-3, TRAJ4)
CAVGAAGGYNKLILEQ

SEQ ID NO: 164936 - protein, 15 aa, Homo sapiens
  CDR3 for beta chain variable domain of TCR clone 82468 (TRBV6-5, TRBJ2-1)
CASSYDAGAGNEQFF

SEQ ID NO: 164937 - protein, 15 aa, Homo sapiens
  CDR3 for alpha chain variable domain of TCR clone 82469 (TRAV3, TRAJ3)
CAVRDRDSSASKIIF

SEQ ID NO: 164938 - protein, 18 aa, Homo sapiens
  CDR3 for beta chain variable domain of TCR clone 82469 (TRBV25-1, TRBJ1-2)
CASSGLQNGQGLIFGYTC

SEQ ID NO: 164939 - protein, 21 aa, Homo sapiens
  CDR3 for alpha chain variable domain of TCR clone 82470 (TRAV1-1, TRAJ6)
CLLLLRCERLERTGGSYIPTF

SEQ ID NO: 164940 - protein, 13 aa, Homo sapiens
  CDR3 for beta chain variable domain of TCR clone 82470 (TRBV10-2, TRBJ2-7)
SASGASGGYEQYF

SEQ ID NO: 164941 - protein, 12 aa, Homo sapiens
  CDR3 for alpha chain variable domain of TCR clone 82471 (TRAV12-2, TRAJ10)
WGVTGGGNKLTF

SEQ ID NO: 164942 - protein, 13 aa, Homo sapiens
  CDR3 for beta chain variable domain of TCR clone 82471 (TRBV27, TRBJ1-1)
CASSLSIGAEAFF

SEQ ID NO: 164943 - protein, 15 aa, Homo sapiens
  CDR3 for alpha chain variable domain of TCR clone 82472 (TRAV12-3, TRAJ48)
CAMSAKKFGNEKLTF

SEQ ID NO: 164944 - protein, 14 aa, Homo sapiens
  CDR3 for beta chain variable domain of TCR clone 82472 (TRBV2, TRBJ1-6)
CASSESRNNSPLHF

SEQ ID NO: 164945 - protein, 14 aa, Homo sapiens
  CDR3 for alpha chain variable domain of TCR clone 82473 (TRAV12-2, TRAJ17)
CAVLFKAAGNKLTF

SEQ ID NO: 164946 - protein, 13 aa, Homo sapiens
  CDR3 for beta chain variable domain of TCR clone 82473 (TRBV19, TRBJ1-2)
CASSQGRVYGYTF

SEQ ID NO: 164947 - protein, 17 aa, Homo sapiens
  CDR3 for alpha chain variable domain of TCR clone 82474 (TRAV3, TRAJ6)
CAVRDGPRAGGSYTPTF

SEQ ID NO: 164948 - protein, 20 aa, Homo sapiens
  CDR3 for beta chain variable domain of TCR clone 82474 (TRBV28, TRBJ2-1)
CASTPIGRSPGLAGGNEQFF

SEQ ID NO: 164949 - protein, 11 aa, Homo sapiens
  CDR3 for alpha chain variable domain of TCR clone 82475 (TRAV12-3, TRAJ43)
CAMSVSNDMRF

SEQ ID NO: 164950 - protein, 14 aa, Homo sapiens
  CDR3 for beta chain variable domain of TCR clone 82475 (TRBV20-1, TRBJ2-2)
CSALYRGGTGELFF

SEQ ID NO: 164951 - protein, 14 aa, Homo sapiens
  CDR3 for alpha chain variable domain of TCR clone 82476 (TRAV1-2, TRAJ6)
CAVSLSGGSYIPTF

SEQ ID NO: 164952 - protein, 15 aa, Homo sapiens
  CDR3 for beta chain variable domain of TCR clone 82476 (TRBV28, TRBJ2-7)
CASSPGGRGSYEQYF

SEQ ID NO: 164953 - protein, 14 aa, Homo sapiens
  CDR3 for alpha chain variable domain of TCR clone 82477 (TRAV8-3, TRAJ13)
CAVGAQEGYQKVTF

SEQ ID NO: 164954 - protein, 15 aa, Homo sapiens
  CDR3 for beta chain variable domain of TCR clone 82477 (TRBV15, TRBJ2-2)
RATSGTGGRVGELFF

SEQ ID NO: 164955 - protein, 23 aa, Homo sapiens
  CDR3 for alpha chain variable domain of TCR clone 82478 (TRAV26-1, TRAJ38)
CIADNAGNNHTQNPDPAVYQLRD

SEQ ID NO: 164956 - protein, 12 aa, Homo sapiens
  CDR3 for beta chain variable domain of TCR clone 82478 (TRBV11-2, TRBJ2-2)
CASSLGGGELFF

SEQ ID NO: 164957 - protein, 16 aa, Homo sapiens
  CDR3 for alpha chain variable domain of TCR clone 82479 (TRAV30, TRAJ24)
CGTEIVDADSWGKFKF

SEQ ID NO: 164958 - protein, 16 aa, Homo sapiens
  CDR3 for beta chain variable domain of TCR clone 82479 (TRBV7-3, TRBJ2-2)
CASSLKRGTLSGELFF

SEQ ID NO: 164959 - protein, 10 aa, Homo sapiens
  CDR3 for alpha chain variable domain of TCR clone 82480 (TRAV12-3, TRAJ18)
CAMSAEAQPW

SEQ ID NO: 164960 - protein, 15 aa, Homo sapiens
  CDR3 for beta chain variable domain of TCR clone 82480 (TRBV18, TRBJ2-1)
CASSPPSASYNEQFF

SEQ ID NO: 164961 - protein, 14 aa, Homo sapiens
  CDR3 for alpha chain variable domain of TCR clone 82481 (TRAV2, TRAJ9)
CAVEDRSGGFKTIF

SEQ ID NO: 164962 - protein, 22 aa, Homo sapiens
  CDR3 for beta chain variable domain of TCR clone 82481 (TRBV4-1, TRBJ2-7)
CASSRDPLGVRGGGAVLRAGHQ

SEQ ID NO: 164963 - protein, 13 aa, Homo sapiens
  CDR3 for alpha chain variable domain of TCR clone 82482 (TRAV12-1, TRAJ31)
CVVNMSNNARLMF

SEQ ID NO: 164964 - protein, 15 aa, Homo sapiens
  CDR3 for beta chain variable domain of TCR clone 82482 (TRBV4-1, TRBJ1-2)
CASSQGQGAAYGYTF

SEQ ID NO: 164965 - protein, 14 aa, Homo sapiens
  CDR3 for alpha chain variable domain of TCR clone 82483 (TRAV12-2, TRAJ24)
CAVTPADSWGKLQF

SEQ ID NO: 164966 - protein, 14 aa, Homo sapiens
  CDR3 for beta chain variable domain of TCR clone 82483 (TRBV7-2, TRBJ2-7)
CASRSQGAAYEQYF

SEQ ID NO: 164967 - protein, 12 aa, Homo sapiens
  CDR3 for alpha chain variable domain of TCR clone 82484 (TRAV3, TRAJ20)
CAVRDPGYKLSF

SEQ ID NO: 164968 - protein, 14 aa, Homo sapiens
  CDR3 for beta chain variable domain of TCR clone 82484 (TRBV4-2, TRBJ2-1)
CASGPDRAYNEQFF

SEQ ID NO: 164969 - protein, 14 aa, Homo sapiens
  CDR3 for alpha chain variable domain of TCR clone 82485 (TRAV8-2, TRAJ11)
CDVSEKSGYSTLTF

SEQ ID NO: 164970 - protein, 16 aa, Homo sapiens
  CDR3 for beta chain variable domain of TCR clone 82485 (TRBV28, TRBJ2-1)
CASSSPEYPRDNEQFF

SEQ ID NO: 164971 - protein, 12 aa, Homo sapiens
  CDR3 for alpha chain variable domain of TCR clone 82486 (TRAV2, TRAJ31)
CAVEDNNARLMF

SEQ ID NO: 164972 - protein, 14 aa, Homo sapiens
  CDR3 for beta chain variable domain of TCR clone 82486 (TRBV19, TRBJ2-5)
CASGMTGQQETQYF

SEQ ID NO: 164973 - protein, 18 aa, Homo sapiens
  CDR3 for alpha chain variable domain of TCR clone 82487 (TRAV20, TRAJ4)
CAVQPYYMFSGGYNKLIF

SEQ ID NO: 164974 - protein, 14 aa, Homo sapiens
  CDR3 for beta chain variable domain of TCR clone 82487 (TRBV19, TRBJ2-1)
CASPTFVLSGEQFF

SEQ ID NO: 164975 - protein, 14 aa, Homo sapiens
  CDR3 for alpha chain variable domain of TCR clone 82488 (TRAV8-1, TRAJ5)
CAVRTDTGRRALTF

SEQ ID NO: 164976 - protein, 14 aa, Homo sapiens
  CDR3 for beta chain variable domain of TCR clone 82488 (TRBV5-5, TRBJ1-2)
CASSLDPYNYGCTF

SEQ ID NO: 164977 - protein, 16 aa, Homo sapiens
  CDR3 for alpha chain variable domain of TCR clone 82489 (TRAV23/DV6, TRAJ9)
CAASIGGNTGGFKNIF

SEQ ID NO: 164978 - protein, 17 aa, Homo sapiens
  CDR3 for beta chain variable domain of TCR clone 82489 (TRBV13, TRBJ2-3)
CASSLSRVAGGRNTQYF

SEQ ID NO: 164979 - protein, 14 aa, Homo sapiens
  CDR3 for alpha chain variable domain of TCR clone 82490 (TRAV26-1, TRAJ22)
CTVRVYGSARQLTF

SEQ ID NO: 164980 - protein, 17 aa, Homo sapiens
  CDR3 for beta chain variable domain of TCR clone 82490 (TRBV7-3, TRBJ2-3)
CASSPGGLAGFGDTQYF

SEQ ID NO: 164981 - protein, 11 aa, Homo sapiens
  CDR3 for alpha chain variable domain of TCR clone 82491 (TRAV2, TRAJ13)
CATGGYQKVTF

SEQ ID NO: 164982 - protein, 16 aa, Homo sapiens
  CDR3 for beta chain variable domain of TCR clone 82491 (TRBV12-5, TRBJ2-5)
CASGPRTSGNQETQYF

SEQ ID NO: 164983 - protein, 13 aa, Homo sapiens
  CDR3 for alpha chain variable domain of TCR clone 82492 (TRAV35, TRAJ42)
CAGFPGSQGNLIF

SEQ ID NO: 164984 - protein, 13 aa, Homo sapiens
  CDR3 for beta chain variable domain of TCR clone 82492 (TRBV29-1, TRBJ2-1)
CSVEGGRVNEKFF

SEQ ID NO: 164985 - protein, 13 aa, Homo sapiens
  CDR3 for alpha chain variable domain of TCR clone 82493 (TRAV1-2, TRAJ9)
CAALNTGGFKTIF

SEQ ID NO: 164986 - protein, 13 aa, Homo sapiens
  CDR3 for beta chain variable domain of TCR clone 82493 (TRBV7-3, TRBJ1-2)
CASSLKRGYGYTF

SEQ ID NO: 164987 - protein, 15 aa, Homo sapiens
  CDR3 for alpha chain variable domain of TCR clone 82494 (TRAV21, TRAJ24)
SAARSSTDSWGKLQF

SEQ ID NO: 164988 - protein, 14 aa, Homo sapiens
  CDR3 for beta chain variable domain of TCR clone 82494 (TRBV11-2, TRBJ2-5)
CASSRTGGIETQYL

SEQ ID NO: 164989 - protein, 14 aa, Homo sapiens
  CDR3 for alpha chain variable domain of TCR clone 82495 (TRAV1-2, TRAJ16)
CAVNRFSDGQKLLF

SEQ ID NO: 164990 - protein, 13 aa, Homo sapiens
  CDR3 for beta chain variable domain of TCR clone 82495 (TRBV7-9, TRBJ2-2)
CASSLDPTGELFF

SEQ ID NO: 164991 - protein, 14 aa, Homo sapiens
  CDR3 for alpha chain variable domain of TCR clone 82496 (TRAV4, TRAJ9)
CLVGSGTGGFNTIF

SEQ ID NO: 164992 - protein, 14 aa, Homo sapiens
  CDR3 for beta chain variable domain of TCR clone 82496 (TRBV7-9, TRBJ2-4)
CASSLAMGGNIQYF

SEQ ID NO: 164993 - protein, 13 aa, Homo sapiens
  CDR3 for alpha chain variable domain of TCR clone 82497 (TRAV12-3, TRAJ54)
CAMTLQGAQKPVF

SEQ ID NO: 164994 - protein, 14 aa, Homo sapiens
  CDR3 for beta chain variable domain of TCR clone 82497 (TRBV4-1, TRBJ2-2)
CASSQAVNTGELFF

SEQ ID NO: 164995 - protein, 13 aa, Homo sapiens
  CDR3 for alpha chain variable domain of TCR clone 82498 (TRAV2, TRAJ40)
CAVVTSGTYQYIF

SEQ ID NO: 164996 - protein, 15 aa, Homo sapiens
  CDR3 for beta chain variable domain of TCR clone 82498 (TRBV11-3, TRBJ2-3)
CASLKDGREGDTQYF

SEQ ID NO: 164997 - protein, 10 aa, Homo sapiens
  CDR3 for alpha chain variable domain of TCR clone 82499 (TRAV17, TRAJ36)
CAAVAGNFFF

SEQ ID NO: 164998 - protein, 12 aa, Homo sapiens
  CDR3 for beta chain variable domain of TCR clone 82499 (TRBV11-2, TRBJ2-4)
CASSSASGSEYF

SEQ ID NO: 164999 - protein, 14 aa, Homo sapiens
  CDR3 for alpha chain variable domain of TCR clone 82500 (TRAV3, TRAJ33)
CAVRDMGSNYQLIW

SEQ ID NO: 165000 - protein, 17 aa, Homo sapiens
  CDR3 for beta chain variable domain of TCR clone 82500 (TRBV19, TRBJ2-1)
CASSIWSAQPTHNEQFL

SEQ ID NO: 165001 - protein, 14 aa, Homo sapiens
  CDR3 for alpha chain variable domain of TCR clone 82501 (TRAV35, TRAJ10)
CAGILTGGGNKLTF

SEQ ID NO: 165002 - protein, 16 aa, Homo sapiens
  CDR3 for beta chain variable domain of TCR clone 82501 (TRBV19, TRBJ2-1)
CASSKAGPSSYNEQFF

SEQ ID NO: 165003 - protein, 16 aa, Homo sapiens
  CDR3 for alpha chain variable domain of TCR clone 82502 (TRAV3, TRAJ37)
CAVRVRGSGNTGKLIV

SEQ ID NO: 165004 - protein, 11 aa, Homo sapiens
  CDR3 for beta chain variable domain of TCR clone 82502 (TRBV11-2, TRBJ2-2)
CASSLPGELFF

SEQ ID NO: 165005 - protein, 14 aa, Homo sapiens
  CDR3 for alpha chain variable domain of TCR clone 82503 (TRAV2, TRAJ37)
CAVDFTSNTGKLMF

SEQ ID NO: 165006 - protein, 15 aa, Homo sapiens
  CDR3 for beta chain variable domain of TCR clone 82503 (TRBV20-1, TRBJ1-1)
CSASRGVTGNTEAFF

SEQ ID NO: 165007 - protein, 15 aa, Homo sapiens
  CDR3 for alpha chain variable domain of TCR clone 82504 (TRAV2, TRAJ15)
CAVEDWGQAGTALIF

SEQ ID NO: 165008 - protein, 13 aa, Homo sapiens
  CDR3 for beta chain variable domain of TCR clone 82504 (TRBV10-2, TRBJ2-7)
CASGASGGYEQYL

SEQ ID NO: 165009 - protein, 14 aa, Homo sapiens
  CDR3 for alpha chain variable domain of TCR clone 82505 (TRAV9-2, TRAJ39)
CALYIYNAGNMLTF

SEQ ID NO: 165010 - protein, 17 aa, Homo sapiens
  CDR3 for beta chain variable domain of TCR clone 82505 (TRBV7-3, TRBJ2-3)
CASSLMKRMRGADTQYF

SEQ ID NO: 165011 - protein, 14 aa, Homo sapiens
  CDR3 for alpha chain variable domain of TCR clone 82506 (TRAV12-2, TRAJ5)
CAVNRSTGRRALTV

SEQ ID NO: 165012 - protein, 12 aa, Homo sapiens
  CDR3 for beta chain variable domain of TCR clone 82506 (TRBV19, TRBJ1-5)
CASSIAQQPQHF

SEQ ID NO: 165013 - protein, 16 aa, Homo sapiens
  CDR3 for alpha chain variable domain of TCR clone 82507 (TRAV12-3, TRAJ10)
CAMKKGITGGGNKLTF

SEQ ID NO: 165014 - protein, 13 aa, Homo sapiens
  CDR3 for beta chain variable domain of TCR clone 82507 (TRBV7-9, TRBJ2-5)
CASLPSGRETQYF

SEQ ID NO: 165015 - protein, 12 aa, Homo sapiens
  CDR3 for alpha chain variable domain of TCR clone 82508 (TRAV1-1, TRAJ8)
CAGGTGFQKLVF

SEQ ID NO: 165016 - protein, 16 aa, Homo sapiens
  CDR3 for beta chain variable domain of TCR clone 82508 (TRBV7-3, TRBJ2-2)
CASSLKRGTLSGELFF

SEQ ID NO: 165017 - protein, 14 aa, Homo sapiens
  CDR3 for alpha chain variable domain of TCR clone 82509 (TRAV12-3, TRAJ21)
CAATDLYNFNKFYF

SEQ ID NO: 165018 - protein, 14 aa, Homo sapiens
  CDR3 for beta chain variable domain of TCR clone 82509 (TRBV25-1, TRBJ1-4)
CASSGGGQPEKLFF

SEQ ID NO: 165019 - protein, 14 aa, Homo sapiens
  CDR3 for alpha chain variable domain of TCR clone 82510 (TRAV36/DV7, TRAJ50)
CAVEPENLLRQGDL

SEQ ID NO: 165020 - protein, 13 aa, Homo sapiens
  CDR3 for beta chain variable domain of TCR clone 82510 (TRBV7-2, TRBJ2-7)
CASSSPSGSEQYF

SEQ ID NO: 165021 - protein, 14 aa, Homo sapiens
  CDR3 for alpha chain variable domain of TCR clone 82511 (TRAV2, TRAJ9)
CAVEDRSGGFKTIF

SEQ ID NO: 165022 - protein, 16 aa, Homo sapiens
  CDR3 for beta chain variable domain of TCR clone 82511 (TRBV5-4, TRBJ2-3)
CASQQPGAGGADTQYF

SEQ ID NO: 165023 - protein, 12 aa, Homo sapiens
  CDR3 for alpha chain variable domain of TCR clone 82512 (TRAV16, TRAJ10)
CSRTGGGNKLTF

SEQ ID NO: 165024 - protein, 15 aa, Homo sapiens
  CDR3 for beta chain variable domain of TCR clone 82512 (TRBV6-3, TRBJ2-7)
CASSSPGTVFCEQYF

SEQ ID NO: 165025 - protein, 13 aa, Homo sapiens
  CDR3 for alpha chain variable domain of TCR clone 82513 (TRAV23/DV6, TRAJ22)
CAASGGSARQLTF

SEQ ID NO: 165026 - protein, 15 aa, Homo sapiens
  CDR3 for beta chain variable domain of TCR clone 82513 (TRBV9, TRBJ1-6)
CASSVAGTGDSPLHF

SEQ ID NO: 165027 - protein, 14 aa, Homo sapiens
  CDR3 for alpha chain variable domain of TCR clone 82514 (TRAV1-2, TRAJ8)
CAVREDTGFQKLVF

SEQ ID NO: 165028 - protein, 16 aa, Homo sapiens
  CDR3 for beta chain variable domain of TCR clone 82514 (TRBV19, TRBJ1-1)
CASRVDVTGAAWGAFF

SEQ ID NO: 165029 - protein, 13 aa, Homo sapiens
  CDR3 for alpha chain variable domain of TCR clone 82515 (TRAV9-2, TRAJ53)
CALSGGSNYKLTF

SEQ ID NO: 165030 - protein, 17 aa, Homo sapiens
  CDR3 for beta chain variable domain of TCR clone 82515 (TRBV11-2, TRBJ2-1)
RASSLYPPGVEYNEQFF

SEQ ID NO: 165031 - protein, 16 aa, Homo sapiens
  CDR3 for alpha chain variable domain of TCR clone 82516 (TRAV26-1, TRAJ38)
CIVRVELGGNNRKLIW

SEQ ID NO: 165032 - protein, 17 aa, Homo sapiens
  CDR3 for beta chain variable domain of TCR clone 82516 (TRBV4-1, TRBJ2-3)
CASSQSATGGPVDTQYF

SEQ ID NO: 165033 - protein, 14 aa, Homo sapiens
  CDR3 for alpha chain variable domain of TCR clone 82517 (TRAV13-1, TRAJ35)
CAASKGGFGNVLHC

SEQ ID NO: 165034 - protein, 15 aa, Homo sapiens
  CDR3 for beta chain variable domain of TCR clone 82517 (TRBV12-4, TRBJ1-2)
CARSFVDRGNYGYTF

SEQ ID NO: 165035 - protein, 14 aa, Homo sapiens
  CDR3 for alpha chain variable domain of TCR clone 82518 (TRAV1-2, TRAJ16)
CAVNRFSDCQKLLF

SEQ ID NO: 165036 - protein, 16 aa, Homo sapiens
  CDR3 for beta chain variable domain of TCR clone 82518 (TRBV7-3, TRBJ2-2)
CASSLKRGTLSGELFF

SEQ ID NO: 165037 - protein, 10 aa, Homo sapiens
  CDR3 for alpha chain variable domain of TCR clone 82519 (TRAV5, TRAJ34)
CAEDTDKLIF

SEQ ID NO: 165038 - protein, 12 aa, Homo sapiens
  CDR3 for beta chain variable domain of TCR clone 82519 (TRBV11-2, TRBJ2-2)
CASSIGGGELFF

SEQ ID NO: 165039 - protein, 12 aa, Homo sapiens
  CDR3 for alpha chain variable domain of TCR clone 82520 (TRAV2, TRAJ33)
CAVEDSNYQLIW

SEQ ID NO: 165040 - protein, 16 aa, Homo sapiens
  CDR3 for beta chain variable domain of TCR clone 82520 (TRBV19, TRBJ1-4)
CASSINRGAKNCFLAV

SEQ ID NO: 165041 - protein, 14 aa, Homo sapiens
  CDR3 for alpha chain variable domain of TCR clone 82521 (TRAV16, TRAJ48)
CALTPGFGNEKLTF

SEQ ID NO: 165042 - protein, 13 aa, Homo sapiens
  CDR3 for beta chain variable domain of TCR clone 82521 (TRBV5-5, TRBJ1-2)
CASSFWRGEDYTF

SEQ ID NO: 165043 - protein, 15 aa, Homo sapiens
  CDR3 for alpha chain variable domain of TCR clone 82522 (TRAV13-2, TRAJ45)
CAEHHSGGGADGLTF

SEQ ID NO: 165044 - protein, 15 aa, Homo sapiens
  CDR3 for beta chain variable domain of TCR clone 82522 (TRBV7-2, TRBJ2-7)
CASSLALGSAYEQHF

SEQ ID NO: 165045 - protein, 13 aa, Homo sapiens
  CDR3 for alpha chain variable domain of TCR clone 82523 (TRAV1-1, TRAJ31)
CASYLNNNARLMF

SEQ ID NO: 165046 - protein, 13 aa, Homo sapiens
  CDR3 for beta chain variable domain of TCR clone 82523 (TRBV15, TRBJ1-6)
RATSGGLNSPLHF

SEQ ID NO: 165047 - protein, 15 aa, Homo sapiens
  CDR3 for alpha chain variable domain of TCR clone 82524 (TRAV13-1, TRAJ44)
CAASRGGGTASKLTY

SEQ ID NO: 165048 - protein, 14 aa, Homo sapiens
  CDR3 for beta chain variable domain of TCR clone 82524 (TRBV7-2, TRBJ2-5)
CASSPRGSSETQYF

SEQ ID NO: 165049 - protein, 13 aa, Homo sapiens
  CDR3 for alpha chain variable domain of TCR clone 82525 (TRAV21, TRAJ33)
CDVAGDSNYQLIW

SEQ ID NO: 165050 - protein, 13 aa, Homo sapiens
  CDR3 for beta chain variable domain of TCR clone 82525 (TRBV10-3, TRBJ2-7)
CASKLAVNYEQYF

SEQ ID NO: 165051 - protein, 14 aa, Homo sapiens
  CDR3 for alpha chain variable domain of TCR clone 82526 (TRAV12-2, TRAJ13)
CAVKKTGGYQKVTF

SEQ ID NO: 165052 - protein, 17 aa, Homo sapiens
  CDR3 for beta chain variable domain of TCR clone 82526 (TRBV20-1, TRBJ2-2)
CSASGSGQGGVTGELFF

SEQ ID NO: 165053 - protein, 14 aa, Homo sapiens
  CDR3 for alpha chain variable domain of TCR clone 82527 (TRAV1-2, TRAJ16)
CAVKRFSDGQKLLF

SEQ ID NO: 165054 - protein, 13 aa, Homo sapiens
  CDR3 for beta chain variable domain of TCR clone 82527 (TRBV4-1, TRBJ2-1)
CASSQAGGDEQFF

SEQ ID NO: 165055 - protein, 14 aa, Homo sapiens
  CDR3 for alpha chain variable domain of TCR clone 82528 (TRAV30, TRAJ50)
CGTALKTSYDKVIF

SEQ ID NO: 165056 - protein, 12 aa, Homo sapiens
  CDR3 for beta chain variable domain of TCR clone 82528 (TRBV6-3, TRBJ2-1)
CASSGSYNEQFF

SEQ ID NO: 165057 - protein, 11 aa, Homo sapiens
  CDR3 for alpha chain variable domain of TCR clone 82529 (TRAV3, TRAJ17)
PRGAAGNKLTF

SEQ ID NO: 165058 - protein, 16 aa, Homo sapiens
  CDR3 for beta chain variable domain of TCR clone 82529 (TRBV7-6, TRBJ2-1)
CASSAPGPSSYNDQFF

SEQ ID NO: 165059 - protein, 16 aa, Homo sapiens
  CDR3 for alpha chain variable domain of TCR clone 82530 (TRAV21, TRAJ52)
CAVTNAGVTSYGKLTF

SEQ ID NO: 165060 - protein, 11 aa, Homo sapiens
  CDR3 for beta chain variable domain of TCR clone 82530 (TRBV2, TRBJ1-1)
CASREGTEAFF

SEQ ID NO: 165061 - protein, 13 aa, Homo sapiens
  CDR3 for alpha chain variable domain of TCR clone 82531 (TRAV35, TRAJ36)
CAGPRIGANNLFF

SEQ ID NO: 165062 - protein, 13 aa, Homo sapiens
  CDR3 for beta chain variable domain of TCR clone 82531 (TRBV7-9, TRBJ2-7)
CASSFWSSYEQYF

SEQ ID NO: 165063 - protein, 14 aa, Homo sapiens
  CDR3 for alpha chain variable domain of TCR clone 82532 (TRAV27, TRAJ15)
CAGFDNQAGTALIF

SEQ ID NO: 165064 - protein, 11 aa, Homo sapiens
  CDR3 for beta chain variable domain of TCR clone 82532 (TRBV29-1, TRBJ1-1)
CSVEVGARTFF

SEQ ID NO: 165065 - protein, 14 aa, Homo sapiens
  CDR3 for alpha chain variable domain of TCR clone 82533 (TRAV8-3, TRAJ36)
CSVGPITGANNLFF

SEQ ID NO: 165066 - protein, 15 aa, Homo sapiens
  CDR3 for beta chain variable domain of TCR clone 82533 (TRBV4-1, TRBJ2-1)
CASSQDPGNYNEQFF

SEQ ID NO: 165067 - protein, 14 aa, Homo sapiens
  CDR3 for alpha chain variable domain of TCR clone 82534 (TRAV1-2, TRAJ16)
CAVNRFSDGQKLLF

SEQ ID NO: 165068 - protein, 15 aa, Homo sapiens
  CDR3 for beta chain variable domain of TCR clone 82534 (TRBV3-1, TRBJ2-1)
CASSQQPSGGNEQFF

SEQ ID NO: 165069 - protein, 16 aa, Homo sapiens
  CDR3 for alpha chain variable domain of TCR clone 82535 (TRAV20, TRAJ22)
CAVQASSPGSARQLTF

SEQ ID NO: 165070 - protein, 12 aa, Homo sapiens
  CDR3 for beta chain variable domain of TCR clone 82535 (TRBV11-2, TRBJ2-7)
CASSLPTYEQYF

SEQ ID NO: 165071 - protein, 13 aa, Homo sapiens
  CDR3 for alpha chain variable domain of TCR clone 82536 (TRAV2, TRAJ40)
CAVVTSGTYKYIF

SEQ ID NO: 165072 - protein, 15 aa, Homo sapiens
  CDR3 for beta chain variable domain of TCR clone 82536 (TRBV11-2, TRBJ2-1)
CASSKNRGLIYEQFF

SEQ ID NO: 165073 - protein, 11 aa, Homo sapiens
  CDR3 for alpha chain variable domain of TCR clone 82537 (TRAV2, TRAJ13)
CASGGYQKVTF

SEQ ID NO: 165074 - protein, 14 aa, Homo sapiens
  CDR3 for beta chain variable domain of TCR clone 82537 (TRBV28, TRBJ2-1)
CASSLNGRNNEQFF

SEQ ID NO: 165075 - protein, 12 aa, Homo sapiens
  CDR3 for alpha chain variable domain of TCR clone 82538 (TRAV3, TRAJ26)
CAVRDYGQNFVV

SEQ ID NO: 165076 - protein, 16 aa, Homo sapiens
  CDR3 for beta chain variable domain of TCR clone 82538 (TRBV11-2, TRBJ1-2)
CASSPSGREANYGYTF

SEQ ID NO: 165077 - protein, 14 aa, Homo sapiens
  CDR3 for alpha chain variable domain of TCR clone 82539 (TRAV29/DV5, TRAJ36)
CAARRKTGANNLFF

SEQ ID NO: 165078 - protein, 15 aa, Homo sapiens
  CDR3 for beta chain variable domain of TCR clone 82539 (TRBV7-2, TRBJ2-1)
CASSSGLAGGNEQFF

SEQ ID NO: 165079 - protein, 15 aa, Homo sapiens
  CDR3 for alpha chain variable domain of TCR clone 82540 (TRAV29/DV5, TRAJ29)
CAASERSSGNTPIVF

SEQ ID NO: 165080 - protein, 17 aa, Homo sapiens
  CDR3 for beta chain variable domain of TCR clone 82540 (TRBV4-1, TRBJ1-4)
CASSQEGPRGVEEKLFF

SEQ ID NO: 165081 - protein, 15 aa, Homo sapiens
  CDR3 for alpha chain variable domain of TCR clone 82541 (TRAV26-1, TRAJ48)
CIVRVGDFGNEKLTF

SEQ ID NO: 165082 - protein, 16 aa, Homo sapiens
  CDR3 for beta chain variable domain of TCR clone 82541 (TRBV4-1, TRBJ2-3)
CASSQRAGGLTGTQYF

SEQ ID NO: 165083 - protein, 14 aa, Homo sapiens
  CDR3 for alpha chain variable domain of TCR clone 82542 (TRAV8-3, TRAJ6)
CAVGASGGSYIPTF

SEQ ID NO: 165084 - protein, 16 aa, Homo sapiens
  CDR3 for beta chain variable domain of TCR clone 82542 (TRBV18, TRBJ2-2)
CQLTIGSLAEHRGAVF

SEQ ID NO: 165085 - protein, 16 aa, Homo sapiens
  CDR3 for alpha chain variable domain of TCR clone 82543 (TRAV30, TRAJ24)
CGTEIVDADSWGKFQF

SEQ ID NO: 165086 - protein, 14 aa, Homo sapiens
  CDR3 for beta chain variable domain of TCR clone 82543 (TRBV20-1, TRBJ1-1)
CSAMGGTANTEAFF

SEQ ID NO: 165087 - protein, 13 aa, Homo sapiens
  CDR3 for alpha chain variable domain of TCR clone 82544 (TRAV29/DV5, TRAJ47)
CAASAEYGTKLVF

SEQ ID NO: 165088 - protein, 15 aa, Homo sapiens
  CDR3 for beta chain variable domain of TCR clone 82544 (TRBV7-9, TRBJ1-4)
CASSARTGGNEKLFF

SEQ ID NO: 165089 - protein, 15 aa, Homo sapiens
  CDR3 for alpha chain variable domain of TCR clone 82545 (TRAV17, TRAJ57)
CATGPSQGGSEKLVF

SEQ ID NO: 165090 - protein, 14 aa, Homo sapiens
  CDR3 for beta chain variable domain of TCR clone 82545 (TRBV11-2, TRBJ2-3)
CASSRLARTDTQYF

SEQ ID NO: 165091 - protein, 14 aa, Homo sapiens
  CDR3 for alpha chain variable domain of TCR clone 82546 (TRAV8-6, TRAJ39)
CAVSERDAGNMLTF

SEQ ID NO: 165092 - protein, 14 aa, Homo sapiens
  CDR3 for beta chain variable domain of TCR clone 82546 (TRBV7-6, TRBJ2-3)
CASSVAGGTDTQYF

SEQ ID NO: 165093 - protein, 12 aa, Homo sapiens
  CDR3 for alpha chain variable domain of TCR clone 82547 (TRAV27, TRAJ35)
CAGADFGNVLHC

SEQ ID NO: 165094 - protein, 16 aa, Homo sapiens
  CDR3 for beta chain variable domain of TCR clone 82547 (TRBV6-1, TRBJ2-1)
CASSLRQGSSYNEQFF

SEQ ID NO: 165095 - protein, 14 aa, Homo sapiens
  CDR3 for alpha chain variable domain of TCR clone 82548 (TRAV12-2, TRAJ40)
CAVKIPPGTYKYTF

SEQ ID NO: 165096 - protein, 14 aa, Homo sapiens
  CDR3 for beta chain variable domain of TCR clone 82548 (TRBV20-1, TRBJ1-1)
CSAQTRIGGTEAFF

SEQ ID NO: 165097 - protein, 14 aa, Homo sapiens
  CDR3 for alpha chain variable domain of TCR clone 82549 (TRAV17, TRAJ22)
CATSPSGSARQLTF

SEQ ID NO: 165098 - protein, 14 aa, Homo sapiens
  CDR3 for beta chain variable domain of TCR clone 82549 (TRBV12-4, TRBJ2-5)
CQQSPTGLQETQYF

SEQ ID NO: 165099 - protein, 13 aa, Homo sapiens
  CDR3 for alpha chain variable domain of TCR clone 82550 (TRAV21, TRAJ20)
CAVGLRVDYQLSF

SEQ ID NO: 165100 - protein, 13 aa, Homo sapiens
  CDR3 for beta chain variable domain of TCR clone 82550 (TRBV6-1, TRBJ1-1)
CASSRQGNTEAFF

SEQ ID NO: 165101 - protein, 13 aa, Homo sapiens
  CDR3 for alpha chain variable domain of TCR clone 82551 (TRAV1-2, TRAJ17)
CAVGKAAGNKPTF

SEQ ID NO: 165102 - protein, 15 aa, Homo sapiens
  CDR3 for beta chain variable domain of TCR clone 82551 (TRBV7-9, TRBJ2-1)
CASSGTGGDYNEQFF

SEQ ID NO: 165103 - protein, 12 aa, Homo sapiens
  CDR3 for alpha chain variable domain of TCR clone 82552 (TRAV26-1, TRAJ43)
CIIRVYNNDMRF

SEQ ID NO: 165104 - protein, 14 aa, Homo sapiens
  CDR3 for beta chain variable domain of TCR clone 82552 (TRBV25-1, TRBJ1-4)
CASSYSGGQEKLFF

SEQ ID NO: 165105 - protein, 14 aa, Homo sapiens
  CDR3 for alpha chain variable domain of TCR clone 82553 (TRAV26-1, TRAJ38)
RIADNAGNNRKLIW

SEQ ID NO: 165106 - protein, 13 aa, Homo sapiens
  CDR3 for beta chain variable domain of TCR clone 82553 (TRBV19, TRBJ1-2)
CASSVPGQDGYTF

SEQ ID NO: 165107 - protein, 13 aa, Homo sapiens
  CDR3 for alpha chain variable domain of TCR clone 82554 (TRAV12-3, TRAJ43)
CAMIRPNNNNMRF

SEQ ID NO: 165108 - protein, 12 aa, Homo sapiens
  CDR3 for beta chain variable domain of TCR clone 82554 (TRBV11-2, TRBJ2-5)
CASSLGQETQYF

SEQ ID NO: 165109 - protein, 17 aa, Homo sapiens
  CDR3 for alpha chain variable domain of TCR clone 82555 (TRAV4, TRAJ13)
CLVGVQGSSGGYQKVTF

SEQ ID NO: 165110 - protein, 18 aa, Homo sapiens
  CDR3 for beta chain variable domain of TCR clone 82555 (TRBV15, TRBJ2-3)
CATSRAGARSWDTDTQYF

SEQ ID NO: 165111 - protein, 14 aa, Homo sapiens
  CDR3 for alpha chain variable domain of TCR clone 82556 (TRAV12-2, TRAJ36)
CAVKISTGANNLFL

SEQ ID NO: 165112 - protein, 14 aa, Homo sapiens
  CDR3 for beta chain variable domain of TCR clone 82556 (TRBV20-1, TRBJ2-3)
CSARGGTSTDTQYF

SEQ ID NO: 165113 - protein, 14 aa, Homo sapiens
  CDR3 for alpha chain variable domain of TCR clone 82557 (TRAV1-2, TRAJ16)
CAVNRFSDGHKLLF

SEQ ID NO: 165114 - protein, 11 aa, Homo sapiens
  CDR3 for beta chain variable domain of TCR clone 82557 (TRBV29-1, TRBJ2-5)
CSEDRTGTQYF

SEQ ID NO: 165115 - protein, 16 aa, Homo sapiens
  CDR3 for alpha chain variable domain of TCR clone 82558 (TRAV30, TRAJ24)
CGTEIVDADSWGKFQF

SEQ ID NO: 165116 - protein, 15 aa, Homo sapiens
  CDR3 for beta chain variable domain of TCR clone 82558 (TRBV15, TRBJ1-5)
CATSRDPVNNQPQHF

SEQ ID NO: 165117 - protein, 13 aa, Homo sapiens
  CDR3 for alpha chain variable domain of TCR clone 82559 (TRAV8-3, TRAJ15)
CAVGIQAGTAPIF

SEQ ID NO: 165118 - protein, 17 aa, Homo sapiens
  CDR3 for beta chain variable domain of TCR clone 82559 (TRBV20-1, TRBJ2-1)
CSARDPLAGVSYNEQFF

SEQ ID NO: 165119 - protein, 15 aa, Homo sapiens
  CDR3 for alpha chain variable domain of TCR clone 82560 (TRAV2, TRAJ9)
CAVEYRGTGGFKTIF

SEQ ID NO: 165120 - protein, 16 aa, Homo sapiens
  CDR3 for beta chain variable domain of TCR clone 82560 (TRBV24-1, TRBJ2-3)
CATSDPGTGATDTQYF

SEQ ID NO: 165121 - protein, 12 aa, Homo sapiens
  CDR3 for alpha chain variable domain of TCR clone 82561 (TRAV1-1, TRAJ8)
CAGGAGFQKLVF

SEQ ID NO: 165122 - protein, 16 aa, Homo sapiens
  CDR3 for beta chain variable domain of TCR clone 82561 (TRBV12-5, TRBJ2-5)
CASGPRTSGNQETQYF

SEQ ID NO: 165123 - protein, 10 aa, Homo sapiens
  CDR3 for alpha chain variable domain of TCR clone 82562 (TRAV36/DV7, TRAJ48)
CAVGNEKLTF

SEQ ID NO: 165124 - protein, 14 aa, Homo sapiens
  CDR3 for beta chain variable domain of TCR clone 82562 (TRBV4-2, TRBJ2-1)
CASGLDRAYNEQFF

SEQ ID NO: 165125 - protein, 14 aa, Homo sapiens
  CDR3 for alpha chain variable domain of TCR clone 82563 (TRAV26-1, TRAJ48)
CIVRVGFGNEKLTF

SEQ ID NO: 165126 - protein, 13 aa, Homo sapiens
  CDR3 for beta chain variable domain of TCR clone 82563 (TRBV19, TRBJ1-2)
CASSVPGQDGYTF

SEQ ID NO: 165127 - protein, 12 aa, Homo sapiens
  CDR3 for alpha chain variable domain of TCR clone 82564 (TRAV12-2, TRAJ16)
CVVNLDGQKLLF

SEQ ID NO: 165128 - protein, 12 aa, Homo sapiens
  CDR3 for beta chain variable domain of TCR clone 82564 (TRBV5-7, TRBJ2-7)
CASSVQGGEQYF

SEQ ID NO: 165129 - protein, 14 aa, Homo sapiens
  CDR3 for alpha chain variable domain of TCR clone 82565 (TRAV1-2, TRAJ16)
CAVNRFSDGQKLLF

SEQ ID NO: 165130 - protein, 14 aa, Homo sapiens
  CDR3 for beta chain variable domain of TCR clone 82565 (TRBV19, TRBJ2-2)
CASSTLHRSGELVF

SEQ ID NO: 165131 - protein, 16 aa, Homo sapiens
  CDR3 for alpha chain variable domain of TCR clone 82566 (TRAV14/DV4, TRAJ54)
CAMREGRIQGAQKLVF

SEQ ID NO: 165132 - protein, 14 aa, Homo sapiens
  CDR3 for beta chain variable domain of TCR clone 82566 (TRBV4-1, TRBJ2-2)
CASSQAVNTGELFF

SEQ ID NO: 165133 - protein, 17 aa, Homo sapiens
  CDR3 for alpha chain variable domain of TCR clone 82567 (TRAV35, TRAJ47)
GLLDCRTHTEYGNKLVF

SEQ ID NO: 165134 - protein, 11 aa, Homo sapiens
  CDR3 for beta chain variable domain of TCR clone 82567 (TRBV29-1, TRBJ1-1)
CSVEVGTRNFF

SEQ ID NO: 165135 - protein, 12 aa, Homo sapiens
  CDR3 for alpha chain variable domain of TCR clone 82568 (TRAV27, TRAJ20)
CAVRDPDYKLSF

SEQ ID NO: 165136 - protein, 15 aa, Homo sapiens
  CDR3 for beta chain variable domain of TCR clone 82568 (TRBV9, TRBJ1-6)
CASSVAGTGDSPLHF

SEQ ID NO: 165137 - protein, 17 aa, Homo sapiens
  CDR3 for alpha chain variable domain of TCR clone 82569 (TRAV14/DV4, TRAJ4)
CAMREASGRGGYNKLIF

SEQ ID NO: 165138 - protein, 14 aa, Homo sapiens
  CDR3 for beta chain variable domain of TCR clone 82569 (TRBV19, TRBJ2-7)
CASSMGQRAIEQYF

SEQ ID NO: 165139 - protein, 15 aa, Homo sapiens
  CDR3 for alpha chain variable domain of TCR clone 82570 (TRAV2, TRAJ9)
CAVAALNTGGFKTIS

SEQ ID NO: 165140 - protein, 14 aa, Homo sapiens
  CDR3 for beta chain variable domain of TCR clone 82570 (TRBV7-8, TRBJ2-5)
CASSATGGQETQYF

SEQ ID NO: 165141 - protein, 12 aa, Homo sapiens
  CDR3 for alpha chain variable domain of TCR clone 82571 (TRAV3, TRAJ31)
CAVRDGNARLMF

SEQ ID NO: 165142 - protein, 14 aa, Homo sapiens
  CDR3 for beta chain variable domain of TCR clone 82571 (TRBV11-2, TRBJ2-3)
CASSRLARTDTQYF

SEQ ID NO: 165143 - protein, 15 aa, Homo sapiens
  CDR3 for alpha chain variable domain of TCR clone 82572 (TRAV26-1, TRAJ48)
CIVRVGDLGNEKLTF

SEQ ID NO: 165144 - protein, 16 aa, Homo sapiens
  CDR3 for beta chain variable domain of TCR clone 82572 (TRBV4-1, TRBJ2-3)
CASSQRAGGLTDTQYF

SEQ ID NO: 165145 - protein, 14 aa, Homo sapiens
  CDR3 for alpha chain variable domain of TCR clone 82573 (TRAV13-1, TRAJ23)
CAARRLGRGGKLIF

SEQ ID NO: 165146 - protein, 15 aa, Homo sapiens
  CDR3 for beta chain variable domain of TCR clone 82573 (TRBV7-2, TRBJ2-1)
CASSLVAGRYNEQFF

SEQ ID NO: 165147 - protein, 14 aa, Homo sapiens
  CDR3 for alpha chain variable domain of TCR clone 82574 (TRAV8-2, TRAJ11)
CVVSEKSGYSTLTF

SEQ ID NO: 165148 - protein, 16 aa, Homo sapiens
  CDR3 for beta chain variable domain of TCR clone 82574 (TRBV28, TRBJ2-1)
RASSSPEYPRDNEQFF

SEQ ID NO: 165149 - protein, 12 aa, Homo sapiens
  CDR3 for alpha chain variable domain of TCR clone 82575 (TRAV27, TRAJ35)
CAGADFGNVLHC

SEQ ID NO: 165150 - protein, 14 aa, Homo sapiens
  CDR3 for beta chain variable domain of TCR clone 82575 (TRBV28, TRBJ1-5)
CASSLGVLVKPQHF

SEQ ID NO: 165151 - protein, 18 aa, Homo sapiens
  CDR3 for alpha chain variable domain of TCR clone 82576 (TRAV21, TRAJ52)
CAVRPSPAGGTSYGKLTF

SEQ ID NO: 165152 - protein, 18 aa, Homo sapiens
  CDR3 for beta chain variable domain of TCR clone 82576 (TRBV2, TRBJ2-1)
CASRGLAGGPRTYNEQFF

SEQ ID NO: 165153 - protein, 14 aa, Homo sapiens
  CDR3 for alpha chain variable domain of TCR clone 82577 (TRAV14/DV4, TRAJ54)
CAMREAPGAQKLVF

SEQ ID NO: 165154 - protein, 13 aa, Homo sapiens
  CDR3 for beta chain variable domain of TCR clone 82577 (TRBV7-9, TRBJ1-2)
CASSLKQNYGYTF

SEQ ID NO: 165155 - protein, 16 aa, Homo sapiens
  CDR3 for alpha chain variable domain of TCR clone 82578 (TRAV12-3, TRAJ10)
CAMKKGITGGGNKLTF

SEQ ID NO: 165156 - protein, 17 aa, Homo sapiens
  CDR3 for beta chain variable domain of TCR clone 82578 (TRBV13, TRBJ2-3)
CASSLSRVAGGRNTQYF

SEQ ID NO: 165157 - protein, 14 aa, Homo sapiens
  CDR3 for alpha chain variable domain of TCR clone 82579 (TRAV8-3, TRAJ30)
CAVWDMNRDDKIIF

SEQ ID NO: 165158 - protein, 17 aa, Homo sapiens
  CDR3 for beta chain variable domain of TCR clone 82579 (TRBV19, TRBJ2-2)
CASSRNPGGFGTGELFF

SEQ ID NO: 165159 - protein, 10 aa, Homo sapiens
  CDR3 for alpha chain variable domain of TCR clone 82580 (TRAV3, TRAJ30)
CAVREIEIIF

SEQ ID NO: 165160 - protein, 12 aa, Homo sapiens
  CDR3 for beta chain variable domain of TCR clone 82580 (TRBV20-1, TRBJ2-3)
CSADGAGDTQCF

SEQ ID NO: 165161 - protein, 18 aa, Homo sapiens
  CDR3 for alpha chain variable domain of TCR clone 82581 (TRAV21, TRAJ52)
CAVRPSPAGGTSYGKLTF

SEQ ID NO: 165162 - protein, 16 aa, Homo sapiens
  CDR3 for beta chain variable domain of TCR clone 82581 (TRBV5-1, TRBJ2-2)
CASSSRTGGRTGELFF

SEQ ID NO: 165163 - protein, 18 aa, Homo sapiens
  CDR3 for alpha chain variable domain of TCR clone 82582 (TRAV21, TRAJ52)
CAVRPSPAGGTSYGKLTF

SEQ ID NO: 165164 - protein, 14 aa, Homo sapiens
  CDR3 for beta chain variable domain of TCR clone 82582 (TRBV18, TRBJ1-5)
CASSPGNSNQPQHF

SEQ ID NO: 165165 - protein, 14 aa, Homo sapiens
  CDR3 for alpha chain variable domain of TCR clone 82583 (TRAV12-1, TRAJ12)
CVVTRMDSSYKLIF

SEQ ID NO: 165166 - protein, 14 aa, Homo sapiens
  CDR3 for beta chain variable domain of TCR clone 82583 (TRBV4-1, TRBJ2-7)
CASSPVAGGGEQYF

SEQ ID NO: 165167 - protein, 16 aa, Homo sapiens
  CDR3 for alpha chain variable domain of TCR clone 82584 (TRAV12-3, TRAJ53)
CAMSPGSGGSNYKLTF

SEQ ID NO: 165168 - protein, 17 aa, Homo sapiens
  CDR3 for beta chain variable domain of TCR clone 82584 (TRBV25-1, TRBJ1-4)
CASSKRIATNEKLFLAV

SEQ ID NO: 165169 - protein, 13 aa, Homo sapiens
  CDR3 for alpha chain variable domain of TCR clone 82585 (TRAV12-2, TRAJ10)
CAVPTGGGNKLTF

SEQ ID NO: 165170 - protein, 22 aa, Homo sapiens
  CDR3 for beta chain variable domain of TCR clone 82585 (TRBV6-1, TRBJ1-3)
CASVQGGGWKHHIFWRGKLAHC

SEQ ID NO: 165171 - protein, 13 aa, Homo sapiens
  CDR3 for alpha chain variable domain of TCR clone 82586 (TRAV8-3, TRAJ44)
CAVVPGTASKLTF

SEQ ID NO: 165172 - protein, 13 aa, Homo sapiens
  CDR3 for beta chain variable domain of TCR clone 82586 (TRBV24-1, TRBJ2-1)
CATHPGAGGHQFF

SEQ ID NO: 165173 - protein, 14 aa, Homo sapiens
  CDR3 for alpha chain variable domain of TCR clone 82587 (TRAV29/DV5, TRAJ36)
CAERRKTGANNLFF

SEQ ID NO: 165174 - protein, 14 aa, Homo sapiens
  CDR3 for beta chain variable domain of TCR clone 82587 (TRBV12-5, TRBJ2-5)
CASGSRTHQETQYF

SEQ ID NO: 165175 - protein, 16 aa, Homo sapiens
  CDR3 for alpha chain variable domain of TCR clone 82588 (TRAV30, TRAJ24)
CGTEIVDADSWGKFQF

SEQ ID NO: 165176 - protein, 14 aa, Homo sapiens
  CDR3 for beta chain variable domain of TCR clone 82588 (TRBV12-5, TRBJ2-5)
CASGSRTHQEPQYF

SEQ ID NO: 165177 - protein, 16 aa, Homo sapiens
  CDR3 for alpha chain variable domain of TCR clone 82589 (TRAV1-2, TRAJ10)
CAVRGVLTGGGNKLTF

SEQ ID NO: 165178 - protein, 12 aa, Homo sapiens
  CDR3 for beta chain variable domain of TCR clone 82589 (TRBV7-8, TRBJ2-7)
CASSLGNREQYF

SEQ ID NO: 165179 - protein, 14 aa, Homo sapiens
  CDR3 for alpha chain variable domain of TCR clone 82590 (TRAV13-1, TRAJ20)
CAARPGSNDYKLRF

SEQ ID NO: 165180 - protein, 13 aa, Homo sapiens
  CDR3 for beta chain variable domain of TCR clone 82590 (TRBV20-1, TRBJ1-1)
CSAPPGGHTEAFF

SEQ ID NO: 165181 - protein, 14 aa, Homo sapiens
  CDR3 for alpha chain variable domain of TCR clone 82591 (TRAV24, TRAJ42)
CAQNYGGSQGNLIF

SEQ ID NO: 165182 - protein, 15 aa, Homo sapiens
  CDR3 for beta chain variable domain of TCR clone 82591 (TRBV19, TRBJ1-5)
CASSIPGGAGQTQHF

SEQ ID NO: 165183 - protein, 12 aa, Homo sapiens
  CDR3 for alpha chain variable domain of TCR clone 82592 (TRAV13-1, TRAJ53)
AASGGSNYKLTF

SEQ ID NO: 165184 - protein, 18 aa, Homo sapiens
  CDR3 for beta chain variable domain of TCR clone 82592 (TRBV11-2, TRBJ2-3)
CASSLGGASRGAPNTQYF

SEQ ID NO: 165185 - protein, 11 aa, Homo sapiens
  CDR3 for alpha chain variable domain of TCR clone 82593 (TRAV3, TRAJ13)
CAVTSYQNVTF

SEQ ID NO: 165186 - protein, 15 aa, Homo sapiens
  CDR3 for beta chain variable domain of TCR clone 82593 (TRBV7-9, TRBJ2-7)
CASSSSGLAVYEQYF

SEQ ID NO: 165187 - protein, 17 aa, Homo sapiens
  CDR3 for alpha chain variable domain of TCR clone 82594 (TRAV38-2/DV8, TRAJ45)
CAYRRRYSGGGADGLTF

SEQ ID NO: 165188 - protein, 15 aa, Homo sapiens
  CDR3 for beta chain variable domain of TCR clone 82594 (TRBV19, TRBJ2-1)
CASIKGRGPYNEQFF

SEQ ID NO: 165189 - protein, 14 aa, Homo sapiens
  CDR3 for alpha chain variable domain of TCR clone 82595 (TRAV1-2, TRAJ16)
CAVNRFSDGQKLPF

SEQ ID NO: 165190 - protein, 15 aa, Homo sapiens
  CDR3 for beta chain variable domain of TCR clone 82595 (TRBV9, TRBJ1-6)
CASSVVGTGDSPLHF

SEQ ID NO: 165191 - protein, 10 aa, Homo sapiens
  CDR3 for alpha chain variable domain of TCR clone 82596 (TRAV12-3, TRAJ43)
CAMNDDQFYF

SEQ ID NO: 165192 - protein, 14 aa, Homo sapiens
  CDR3 for beta chain variable domain of TCR clone 82596 (TRBV19, TRBJ2-1)
CASPTFVLSGEQFF

SEQ ID NO: 165193 - protein, 12 aa, Homo sapiens
  CDR3 for alpha chain variable domain of TCR clone 82597 (TRAV35, TRAJ28)
GVEGAGSYQLTF

SEQ ID NO: 165194 - protein, 14 aa, Homo sapiens
  CDR3 for beta chain variable domain of TCR clone 82597 (TRBV11-2, TRBJ2-5)
CASRPLAGRETQYF

SEQ ID NO: 165195 - protein, 15 aa, Homo sapiens
  CDR3 for alpha chain variable domain of TCR clone 82598 (TRAV13-1, TRAJ27)
CAASGGNTNAGKSTF

SEQ ID NO: 165196 - protein, 15 aa, Homo sapiens
  CDR3 for beta chain variable domain of TCR clone 82598 (TRBV12-4, TRBJ1-5)
CASTRQGSGNQTQHF

SEQ ID NO: 165197 - protein, 14 aa, Homo sapiens
  CDR3 for alpha chain variable domain of TCR clone 82599 (TRAV12-2, TRAJ13)
WAVKKTGGYQKVTF

SEQ ID NO: 165198 - protein, 17 aa, Homo sapiens
  CDR3 for beta chain variable domain of TCR clone 82599 (TRBV20-1, TRBJ2-2)
CSASGSGQGGLTGELFF

SEQ ID NO: 165199 - protein, 13 aa, Homo sapiens
  CDR3 for alpha chain variable domain of TCR clone 82600 (TRAV1-1, TRAJ30)
CAVRDHRWQDHLW

SEQ ID NO: 165200 - protein, 16 aa, Homo sapiens
  CDR3 for beta chain variable domain of TCR clone 82600 (TRBV19, TRBJ2-1)
CASSMGGGSSYNEQFF

SEQ ID NO: 165201 - protein, 15 aa, Homo sapiens
  CDR3 for alpha chain variable domain of TCR clone 82601 (TRAV26-1, TRAJ29)
CIVRVEGSGNKPLVF

SEQ ID NO: 165202 - protein, 15 aa, Homo sapiens
  CDR3 for beta chain variable domain of TCR clone 82601 (TRBV28, TRBJ2-5)
CASSPGQGSIETQYF

SEQ ID NO: 165203 - protein, 12 aa, Homo sapiens
  CDR3 for alpha chain variable domain of TCR clone 82602 (TRAV12-3, TRAJ39)
CAMTQAGNMLTF

SEQ ID NO: 165204 - protein, 14 aa, Homo sapiens
  CDR3 for beta chain variable domain of TCR clone 82602 (TRBV7-2, TRBJ1-1)
CASSFLTGTTEAFF

SEQ ID NO: 165205 - protein, 14 aa, Homo sapiens
  CDR3 for alpha chain variable domain of TCR clone 82603 (TRAV16, TRAJ17)
CALSGRAAGNKLTF

SEQ ID NO: 165206 - protein, 17 aa, Homo sapiens
  CDR3 for beta chain variable domain of TCR clone 82603 (TRBV18, TRBJ2-6)
CASSPRQGAVRANVLTF

SEQ ID NO: 165207 - protein, 15 aa, Homo sapiens
  CDR3 for alpha chain variable domain of TCR clone 82604 (TRAV8-2, TRAJ8)
CVVTDFPTGFQELVF

SEQ ID NO: 165208 - protein, 16 aa, Homo sapiens
  CDR3 for beta chain variable domain of TCR clone 82604 (TRBV7-3, TRBJ2-1)
CASSKPLAGGYNEQFF

SEQ ID NO: 165209 - protein, 13 aa, Homo sapiens
  CDR3 for alpha chain variable domain of TCR clone 82605 (TRAV13-1, TRAJ20)
CAARVTNDYKLSF

SEQ ID NO: 165210 - protein, 12 aa, Homo sapiens
  CDR3 for beta chain variable domain of TCR clone 82605 (TRBV20-1, TRBJ2-1)
CSARLGTDEQFF

SEQ ID NO: 165211 - protein, 13 aa, Homo sapiens
  CDR3 for alpha chain variable domain of TCR clone 82606 (TRAV13-2, TRAJ13)
CAEGPGGYQKVTF

SEQ ID NO: 165212 - protein, 17 aa, Homo sapiens
  CDR3 for beta chain variable domain of TCR clone 82606 (TRBV11-2, TRBJ2-1)
CASSLYPPGVEYNEQFF

SEQ ID NO: 165213 - protein, 15 aa, Homo sapiens
  CDR3 for alpha chain variable domain of TCR clone 82607 (TRAV26-1, TRAJ37)
CIVRLGPGNTGKLIF

SEQ ID NO: 165214 - protein, 13 aa, Homo sapiens
  CDR3 for beta chain variable domain of TCR clone 82607 (TRBV6-6, TRBJ2-7)
CASSSSGSYEQYF

SEQ ID NO: 165215 - protein, 15 aa, Homo sapiens
  CDR3 for alpha chain variable domain of TCR clone 82608 (TRAV8-3, TRAJ40)
CAAPSLGSGTYKYIF

SEQ ID NO: 165216 - protein, 13 aa, Homo sapiens
  CDR3 for beta chain variable domain of TCR clone 82608 (TRBV12-4, TRBJ1-1)
CASSPGTGFEAFF

SEQ ID NO: 165217 - protein, 13 aa, Homo sapiens
  CDR3 for alpha chain variable domain of TCR clone 82609 (TRAV12-1, TRAJ38)
CVVPAGNNRKLIW

SEQ ID NO: 165218 - protein, 14 aa, Homo sapiens
  CDR3 for beta chain variable domain of TCR clone 82609 (TRBV19, TRBJ2-1)
CASPTFVLSGEQFF

SEQ ID NO: 165219 - protein, 14 aa, Homo sapiens
  CDR3 for alpha chain variable domain of TCR clone 82610 (TRAV8-4, TRAJ54)
CAVSEVLGAQKLVF

SEQ ID NO: 165220 - protein, 13 aa, Homo sapiens
  CDR3 for beta chain variable domain of TCR clone 82610 (TRBV7-2, TRBJ2-7)
CASSSPSGSEQYF

SEQ ID NO: 165221 - protein, 12 aa, Homo sapiens
  CDR3 for alpha chain variable domain of TCR clone 82611 (TRAV12-3, TRAJ17)
CAMTLTGNKLTF

SEQ ID NO: 165222 - protein, 13 aa, Homo sapiens
  CDR3 for beta chain variable domain of TCR clone 82611 (TRBV7-7, TRBJ1-1)
CASSLGANTEAFF

SEQ ID NO: 165223 - protein, 13 aa, Homo sapiens
  CDR3 for alpha chain variable domain of TCR clone 82612 (TRAV3, TRAJ8)
CAVRFTGFQKLVF

SEQ ID NO: 165224 - protein, 12 aa, Homo sapiens
  CDR3 for beta chain variable domain of TCR clone 82612 (TRBV2, TRBJ1-2)
CASSGQTYGYAF

SEQ ID NO: 165225 - protein, 15 aa, Homo sapiens
  CDR3 for alpha chain variable domain of TCR clone 82613 (TRAV3, TRAJ9)
CAVRARNTGGFKTIF

SEQ ID NO: 165226 - protein, 15 aa, Homo sapiens
  CDR3 for beta chain variable domain of TCR clone 82613 (TRBV5-1, TRBJ2-5)
CASSRLGTVQETQYF

SEQ ID NO: 165227 - protein, 19 aa, Homo sapiens
  CDR3 for alpha chain variable domain of TCR clone 82614 (TRAV3, TRAJ6)
CAVRDRNPSRSRGSYIPTF

SEQ ID NO: 165228 - protein, 15 aa, Homo sapiens
  CDR3 for beta chain variable domain of TCR clone 82614 (TRBV18, TRBJ2-7)
CASSPTFMDSYEQYF

SEQ ID NO: 165229 - protein, 14 aa, Homo sapiens
  CDR3 for alpha chain variable domain of TCR clone 82615 (TRAV3, TRAJ37)
CAVKESGNTGKLIF

SEQ ID NO: 165230 - protein, 15 aa, Homo sapiens
  CDR3 for beta chain variable domain of TCR clone 82615 (TRBV11-3, TRBJ2-3)
CASLKDGREGDTQYF

SEQ ID NO: 165231 - protein, 12 aa, Homo sapiens
  CDR3 for alpha chain variable domain of TCR clone 82616 (TRAV12-3, TRAJ17)
CAMTLTGNKLTF

SEQ ID NO: 165232 - protein, 19 aa, Homo sapiens
  CDR3 for beta chain variable domain of TCR clone 82616 (TRBV2, TRBJ2-7)
CASSDDETSGRANDYEQYF

SEQ ID NO: 165233 - protein, 17 aa, Homo sapiens
  CDR3 for alpha chain variable domain of TCR clone 82617 (TRAV26-1, TRAJ36)
CIVRPPGDQTGANNLFF

SEQ ID NO: 165234 - protein, 13 aa, Homo sapiens
  CDR3 for beta chain variable domain of TCR clone 82617 (TRBV7-9, TRBJ2-3)
CASSPGSTDTQYF

SEQ ID NO: 165235 - protein, 11 aa, Homo sapiens
  CDR3 for alpha chain variable domain of TCR clone 82618 (TRAV21, TRAJ41)
CAVRSGYALNF

SEQ ID NO: 165236 - protein, 13 aa, Homo sapiens
  CDR3 for beta chain variable domain of TCR clone 82618 (TRBV7-9, TRBJ1-2)
CASGLKQNYGYTF

SEQ ID NO: 165237 - protein, 12 aa, Homo sapiens
  CDR3 for alpha chain variable domain of TCR clone 82619 (TRAV17, TRAJ4)
CATDGGYNKLIF

SEQ ID NO: 165238 - protein, 13 aa, Homo sapiens
  CDR3 for beta chain variable domain of TCR clone 82619 (TRBV29-1, TRBJ2-2)
CSTTGVNTGELFS

SEQ ID NO: 165239 - protein, 11 aa, Homo sapiens
  CDR3 for alpha chain variable domain of TCR clone 82620 (TRAV12-3, TRAJ43)
CAMSVSNDMRF

SEQ ID NO: 165240 - protein, 16 aa, Homo sapiens
  CDR3 for beta chain variable domain of TCR clone 82620 (TRBV20-1, TRBJ2-1)
GSARDSLGAVYNEQFF

SEQ ID NO: 165241 - protein, 14 aa, Homo sapiens
  CDR3 for alpha chain variable domain of TCR clone 82621 (TRAV8-6, TRAJ12)
CAVKAADSSYKLIF

SEQ ID NO: 165242 - protein, 15 aa, Homo sapiens
  CDR3 for beta chain variable domain of TCR clone 82621 (TRBV5-1, TRBJ2-5)
CASSLGPAEQETQYF

SEQ ID NO: 165243 - protein, 11 aa, Homo sapiens
  CDR3 for alpha chain variable domain of TCR clone 82622 (TRAV8-3, TRAJ49)
CAVNTGNQFYF

SEQ ID NO: 165244 - protein, 14 aa, Homo sapiens
  CDR3 for beta chain variable domain of TCR clone 82622 (TRBV7-3, TRBJ1-1)
CASSPTGGVSEAFF

SEQ ID NO: 165245 - protein, 11 aa, Homo sapiens
  CDR3 for alpha chain variable domain of TCR clone 82623 (TRAV2, TRAJ13)
CASVGYQKVTF

SEQ ID NO: 165246 - protein, 12 aa, Homo sapiens
  CDR3 for beta chain variable domain of TCR clone 82623 (TRBV7-8, TRBJ2-7)
CASSLGDREQYF

SEQ ID NO: 165247 - protein, 14 aa, Homo sapiens
  CDR3 for alpha chain variable domain of TCR clone 82624 (TRAV1-2, TRAJ8)
CAVREDTGFQKLVF

SEQ ID NO: 165248 - protein, 15 aa, Homo sapiens
  CDR3 for beta chain variable domain of TCR clone 82624 (TRBV24-1, TRBJ2-1)
CATRASGGQYNEQFF

SEQ ID NO: 165249 - protein, 13 aa, Homo sapiens
  CDR3 for alpha chain variable domain of TCR clone 82625 (TRAV29/DV5, TRAJ47)
CAASAEYGNKLVF

SEQ ID NO: 165250 - protein, 12 aa, Homo sapiens
  CDR3 for beta chain variable domain of TCR clone 82625 (TRBV29-1, TRBJ2-3)
CSVTGGADTQYF

SEQ ID NO: 165251 - protein, 12 aa, Homo sapiens
  CDR3 for alpha chain variable domain of TCR clone 82626 (TRAV20, TRAJ56)
CAVTGANSKLTF

SEQ ID NO: 165252 - protein, 14 aa, Homo sapiens
  CDR3 for beta chain variable domain of TCR clone 82626 (TRBV20-1, TRBJ2-5)
CSALVPGCQETQYF

SEQ ID NO: 165253 - protein, 15 aa, Homo sapiens
  CDR3 for alpha chain variable domain of TCR clone 82627 (TRAV3, TRAJ17)
CAVRDTGAAGNKLTF

SEQ ID NO: 165254 - protein, 12 aa, Homo sapiens
  CDR3 for beta chain variable domain of TCR clone 82627 (TRBV7-9, TRBJ1-5)
CASSPQGQPQHF

SEQ ID NO: 165255 - protein, 15 aa, Homo sapiens
  CDR3 for alpha chain variable domain of TCR clone 82628 (TRAV3, TRAJ22)
CAVRDRGGSARQLTF

SEQ ID NO: 165256 - protein, 15 aa, Homo sapiens
  CDR3 for beta chain variable domain of TCR clone 82628 (TRBV27, TRBJ2-5)
CASSLIPSGGETQYF

SEQ ID NO: 165257 - protein, 12 aa, Homo sapiens
  CDR3 for alpha chain variable domain of TCR clone 82629 (TRAV13-1, TRAJ27)
CAAHTNAGKSTF

SEQ ID NO: 165258 - protein, 13 aa, Homo sapiens
  CDR3 for beta chain variable domain of TCR clone 82629 (TRBV9, TRBJ2-1)
CASSPSGGSEQFF

SEQ ID NO: 165259 - protein, 14 aa, Homo sapiens
  CDR3 for alpha chain variable domain of TCR clone 82630 (TRAV8-4, TRAJ9)
CAVRINTGGFKTIF

SEQ ID NO: 165260 - protein, 15 aa, Homo sapiens
  CDR3 for beta chain variable domain of TCR clone 82630 (TRBV10-2, TRBJ2-6)
CASSEQGTGANVLTS

SEQ ID NO: 165261 - protein, 18 aa, Homo sapiens
  CDR3 for alpha chain variable domain of TCR clone 82631 (TRAV3, TRAJ17)
CAVRARRGGRSCRQQDNF

SEQ ID NO: 165262 - protein, 14 aa, Homo sapiens
  CDR3 for beta chain variable domain of TCR clone 82631 (TRBV4-1, TRBJ2-2)
CASSQAVNTGELFF

SEQ ID NO: 165263 - protein, 15 aa, Homo sapiens
  CDR3 for alpha chain variable domain of TCR clone 82632 (TRAV23/DV6, TRAJ38)
CAARSNAGNNRKLSW

SEQ ID NO: 165264 - protein, 16 aa, Homo sapiens
  CDR3 for beta chain variable domain of TCR clone 82632 (TRBV10-2, TRBJ1-5)
CASSRDRDYSNQPQHF

SEQ ID NO: 165265 - protein, 12 aa, Homo sapiens
  CDR3 for alpha chain variable domain of TCR clone 82633 (TRAV3, TRAJ20)
CAVRDPDYKLSF

SEQ ID NO: 165266 - protein, 13 aa, Homo sapiens
  CDR3 for beta chain variable domain of TCR clone 82633 (TRBV10-3, TRBJ2-7)
CASKLAVNYEQYF

SEQ ID NO: 165267 - protein, 16 aa, Homo sapiens
  CDR3 for alpha chain variable domain of TCR clone 82634 (TRAV12-3, TRAJ3)
CASRGPLYSSASKIIF

SEQ ID NO: 165268 - protein, 17 aa, Homo sapiens
  CDR3 for beta chain variable domain of TCR clone 82634 (TRBV11-2, TRBJ2-1)
CASSLYPPGVEYNEQFF

SEQ ID NO: 165269 - protein, 12 aa, Homo sapiens
  CDR3 for alpha chain variable domain of TCR clone 82635 (TRAV13-1, TRAJ15)
CAASQAGTALIF

SEQ ID NO: 165270 - protein, 13 aa, Homo sapiens
  CDR3 for beta chain variable domain of TCR clone 82635 (TRBV4-1, TRBJ2-3)
CASSQPPTDTQYF

SEQ ID NO: 165271 - protein, 14 aa, Homo sapiens
  CDR3 for alpha chain variable domain of TCR clone 82636 (TRAV1-2, TRAJ16)
CAVNRFSDGQKLLF

SEQ ID NO: 165272 - protein, 15 aa, Homo sapiens
  CDR3 for beta chain variable domain of TCR clone 82636 (TRBV7-9, TRBJ2-2)
CASGPLDTLPGELFF

SEQ ID NO: 165273 - protein, 14 aa, Homo sapiens
  CDR3 for alpha chain variable domain of TCR clone 82637 (TRAV1-2, TRAJ8)
CAVREDTGFQKLVF

SEQ ID NO: 165274 - protein, 14 aa, Homo sapiens
  CDR3 for beta chain variable domain of TCR clone 82637 (TRBV28, TRBJ1-5)
CASSRTGLNQPQHF

SEQ ID NO: 165275 - protein, 11 aa, Homo sapiens
  CDR3 for alpha chain variable domain of TCR clone 82638 (TRAV12-2, TRAJ49)
CAVNTGNKFYF

SEQ ID NO: 165276 - protein, 12 aa, Homo sapiens
  CDR3 for beta chain variable domain of TCR clone 82638 (TRBV2, TRBJ2-3)
CASSGRFDTQYF

SEQ ID NO: 165277 - protein, 13 aa, Homo sapiens
  CDR3 for alpha chain variable domain of TCR clone 82639 (TRAV2, TRAJ40)
CAVVTSGTYKYIF

SEQ ID NO: 165278 - protein, 14 aa, Homo sapiens
  CDR3 for beta chain variable domain of TCR clone 82639 (TRBV7-6, TRBJ2-3)
CASSVAGGTDTQYF

SEQ ID NO: 165279 - protein, 11 aa, Homo sapiens
  CDR3 for alpha chain variable domain of TCR clone 82640 (TRAV1-1, TRAJ23)
CAVRQGGKLIF

SEQ ID NO: 165280 - protein, 12 aa, Homo sapiens
  CDR3 for beta chain variable domain of TCR clone 82640 (TRBV11-2, TRBJ2-2)
CASSLPTGELFF

SEQ ID NO: 165281 - protein, 14 aa, Homo sapiens
  CDR3 for alpha chain variable domain of TCR clone 82641 (TRAV12-2, TRAJ15)
CAPHTGQAGTALIF

SEQ ID NO: 165282 - protein, 17 aa, Homo sapiens
  CDR3 for beta chain variable domain of TCR clone 82641 (TRBV5-5, TRBJ1-2)
CASSLGSLDGQSEGYAF

SEQ ID NO: 165283 - protein, 15 aa, Homo sapiens
  CDR3 for alpha chain variable domain of TCR clone 82642 (TRAV8-3, TRAJ45)
CASSYSGGGADGLTF

SEQ ID NO: 165284 - protein, 14 aa, Homo sapiens
  CDR3 for beta chain variable domain of TCR clone 82642 (TRBV11-2, TRBJ2-7)
CASSLGAGAYEQYF

SEQ ID NO: 165285 - protein, 15 aa, Homo sapiens
  CDR3 for alpha chain variable domain of TCR clone 82643 (TRAV34, TRAJ38)
CGADFTPGNNRKLIW

SEQ ID NO: 165286 - protein, 12 aa, Homo sapiens
  CDR3 for beta chain variable domain of TCR clone 82643 (TRBV5-5, TRBJ2-5)
CASSYFGETQYF

SEQ ID NO: 165287 - protein, 13 aa, Homo sapiens
  CDR3 for alpha chain variable domain of TCR clone 82644 (TRAV1-1, TRAJ9)
CAAKNTGGFKTIF

SEQ ID NO: 165288 - protein, 14 aa, Homo sapiens
  CDR3 for beta chain variable domain of TCR clone 82644 (TRBV20-1, TRBJ2-1)
CSAQLGGSANEQFF

SEQ ID NO: 165289 - protein, 16 aa, Homo sapiens
  CDR3 for alpha chain variable domain of TCR clone 82645 (TRAV13-1, TRAJ48)
CSKYRESNFGNEKLTF

SEQ ID NO: 165290 - protein, 17 aa, Homo sapiens
  CDR3 for beta chain variable domain of TCR clone 82645 (TRBV28, TRBJ2-1)
CASSSARQALTYSEQFF

SEQ ID NO: 165291 - protein, 20 aa, Homo sapiens
  CDR3 for alpha chain variable domain of TCR clone 82646 (TRAV12-1, TRAJ42)
SSVIQPPTSVKGGSQGNPIF

SEQ ID NO: 165292 - protein, 14 aa, Homo sapiens
  CDR3 for beta chain variable domain of TCR clone 82646 (TRBV25-1, TRBJ1-2)
CASSDTTGVVGYTF

SEQ ID NO: 165293 - protein, 15 aa, Homo sapiens
  CDR3 for alpha chain variable domain of TCR clone 82647 (TRAV38-1, TRAJ37)
CAFIHGSGNTGKLIF

SEQ ID NO: 165294 - protein, 14 aa, Homo sapiens
  CDR3 for beta chain variable domain of TCR clone 82647 (TRBV28, TRBJ2-7)
CASSGLAEPAEQYF

SEQ ID NO: 165295 - protein, 11 aa, Homo sapiens
  CDR3 for alpha chain variable domain of TCR clone 82648 (TRAV12-3, TRAJ26)
CAMSHGQNFVF

SEQ ID NO: 165296 - protein, 15 aa, Homo sapiens
  CDR3 for beta chain variable domain of TCR clone 82648 (TRBV20-1, TRBJ2-7)
CSARDRVSGMDEQYF

SEQ ID NO: 165297 - protein, 12 aa, Homo sapiens
  CDR3 for alpha chain variable domain of TCR clone 82649 (TRAV2, TRAJ33)
CAFMDSNYQLIW

SEQ ID NO: 165298 - protein, 16 aa, Homo sapiens
  CDR3 for beta chain variable domain of TCR clone 82649 (TRBV2, TRBJ2-7)
CASSEPWTGPYYEQYF

SEQ ID NO: 165299 - protein, 12 aa, Homo sapiens
  CDR3 for alpha chain variable domain of TCR clone 82650 (TRAV26-1, TRAJ13)
CIVPRGYQKVTF

SEQ ID NO: 165300 - protein, 16 aa, Homo sapiens
  CDR3 for beta chain variable domain of TCR clone 82650 (TRBV27, TRBJ2-1)
CASSLSKGFGLDEQFF

SEQ ID NO: 165301 - protein, 14 aa, Homo sapiens
  CDR3 for alpha chain variable domain of TCR clone 82651 (TRAV12-2, TRAJ17)
CAVLFKAAGNKLTF

SEQ ID NO: 165302 - protein, 17 aa, Homo sapiens
  CDR3 for beta chain variable domain of TCR clone 82651 (TRBV11-2, TRBJ2-1)
CASSLYPPGVGYNEQFF

SEQ ID NO: 165303 - protein, 17 aa, Homo sapiens
  CDR3 for alpha chain variable domain of TCR clone 82652 (TRAV3, TRAJ6)
CAVRDGPRAGGSYIPTF

SEQ ID NO: 165304 - protein, 13 aa, Homo sapiens
  CDR3 for beta chain variable domain of TCR clone 82652 (TRBV20-1, TRBJ1-6)
CSAPLGVGSPLYF

SEQ ID NO: 165305 - protein, 12 aa, Homo sapiens
  CDR3 for alpha chain variable domain of TCR clone 82653 (TRAV12-2, TRAJ10)
WGVTGGGNKLTF

SEQ ID NO: 165306 - protein, 12 aa, Homo sapiens
  CDR3 for beta chain variable domain of TCR clone 82653 (TRBV29-1, TRBJ2-3)
CSVTGGADTQYF

SEQ ID NO: 165307 - protein, 18 aa, Homo sapiens
  CDR3 for alpha chain variable domain of TCR clone 82654 (TRAV13-1, TRAJ52)
CAASKRSAGGTSYGKLTF

SEQ ID NO: 165308 - protein, 19 aa, Homo sapiens
  CDR3 for beta chain variable domain of TCR clone 82654 (TRBV6-5, TRBJ2-1)
CASRSGGLAGESSYNEQFF

SEQ ID NO: 165309 - protein, 14 aa, Homo sapiens
  CDR3 for alpha chain variable domain of TCR clone 82655 (TRAV1-2, TRAJ8)
CAVREDTGFQKLVF

SEQ ID NO: 165310 - protein, 14 aa, Homo sapiens
  CDR3 for beta chain variable domain of TCR clone 82655 (TRBV12-5, TRBJ2-5)
CASGLRTHQETQYF

SEQ ID NO: 165311 - protein, 15 aa, Homo sapiens
  CDR3 for alpha chain variable domain of TCR clone 82656 (TRAV34, TRAJ38)
CGADFTPGNNRKLIW

SEQ ID NO: 165312 - protein, 16 aa, Homo sapiens
  CDR3 for beta chain variable domain of TCR clone 82656 (TRBV29-1, TRBJ2-7)
CSVEVVGTSGSYEQYF

SEQ ID NO: 165313 - protein, 16 aa, Homo sapiens
  CDR3 for alpha chain variable domain of TCR clone 82657 (TRAV30, TRAJ24)
CGTEIVGADSWGKFQF

SEQ ID NO: 165314 - protein, 15 aa, Homo sapiens
  CDR3 for beta chain variable domain of TCR clone 82657 (TRBV7-9, TRBJ1-4)
CASSARTGGNEKLLF

SEQ ID NO: 165315 - protein, 13 aa, Homo sapiens
  CDR3 for alpha chain variable domain of TCR clone 82658 (TRAV21, TRAJ20)
RAVGLRVDYKLSF

SEQ ID NO: 165316 - protein, 14 aa, Homo sapiens
  CDR3 for beta chain variable domain of TCR clone 82658 (TRBV7-6, TRBJ2-3)
CASSLGTVTDTQYF

SEQ ID NO: 165317 - protein, 16 aa, Homo sapiens
  CDR3 for alpha chain variable domain of TCR clone 82659 (TRAV13-1, TRAJ48)
CAASIFGNFGNEKLTF

SEQ ID NO: 165318 - protein, 16 aa, Homo sapiens
  CDR3 for beta chain variable domain of TCR clone 82659 (TRBV5-4, TRBJ2-2)
CASSSGLAANTGELFF

SEQ ID NO: 165319 - protein, 14 aa, Homo sapiens
  CDR3 for alpha chain variable domain of TCR clone 82660 (TRAV12-1, TRAJ30)
CVVNIGGRDDKNIF

SEQ ID NO: 165320 - protein, 13 aa, Homo sapiens
  CDR3 for beta chain variable domain of TCR clone 82660 (TRBV12-5, TRBJ2-1)
CASGLGRGNEQFF

SEQ ID NO: 165321 - protein, 12 aa, Homo sapiens
  CDR3 for alpha chain variable domain of TCR clone 82661 (TRAV21, TRAJ11)
CAATSGYSTLTF

SEQ ID NO: 165322 - protein, 14 aa, Homo sapiens
  CDR3 for beta chain variable domain of TCR clone 82661 (TRBV20-1, TRBJ2-7)
CSAPELAGVGEQFF

SEQ ID NO: 165323 - protein, 14 aa, Homo sapiens
  CDR3 for alpha chain variable domain of TCR clone 82662 (TRAV8-6, TRAJ8)
CAVNENTGFQKLAF

SEQ ID NO: 165324 - protein, 11 aa, Homo sapiens
  CDR3 for beta chain variable domain of TCR clone 82662 (TRBV29-1, TRBJ2-5)
CSEDRTGTQYF

SEQ ID NO: 165325 - protein, 13 aa, Homo sapiens
  CDR3 for alpha chain variable domain of TCR clone 82663 (TRAV21, TRAJ56)
CAGWVGANSKLTF

SEQ ID NO: 165326 - protein, 14 aa, Homo sapiens
  CDR3 for beta chain variable domain of TCR clone 82663 (TRBV7-6, TRBJ2-1)
CASSLGGGADEQFF

SEQ ID NO: 165327 - protein, 14 aa, Homo sapiens
  CDR3 for alpha chain variable domain of TCR clone 82664 (TRAV13-1, TRAJ44)
CAAKATGTASKLTF

SEQ ID NO: 165328 - protein, 17 aa, Homo sapiens
  CDR3 for beta chain variable domain of TCR clone 82664 (TRBV7-3, TRBJ2-3)
RASSLMKRMRGSATQYF

SEQ ID NO: 165329 - protein, 13 aa, Homo sapiens
  CDR3 for alpha chain variable domain of TCR clone 82665 (TRAV27, TRAJ41)
CAGEGNSGYALNF

SEQ ID NO: 165330 - protein, 12 aa, Homo sapiens
  CDR3 for beta chain variable domain of TCR clone 82665 (TRBV5-1, TRBJ2-7)
CASSFRGYEQYF

SEQ ID NO: 165331 - protein, 15 aa, Homo sapiens
  CDR3 for alpha chain variable domain of TCR clone 82666 (TRAV17, TRAJ57)
CATDWTPGGAEKLVF

SEQ ID NO: 165332 - protein, 15 aa, Homo sapiens
  CDR3 for beta chain variable domain of TCR clone 82666 (TRBV27, TRBJ2-1)
CASSLAGGPFNEQFF

SEQ ID NO: 165333 - protein, 12 aa, Homo sapiens
  CDR3 for alpha chain variable domain of TCR clone 82667 (TRAV12-1, TRAJ40)
CVFYSGTYKYIF

SEQ ID NO: 165334 - protein, 18 aa, Homo sapiens
  CDR3 for beta chain variable domain of TCR clone 82667 (TRBV12-4, TRBJ2-2)
CTSSLVAGTRGRTGELFF

SEQ ID NO: 165335 - protein, 14 aa, Homo sapiens
  CDR3 for alpha chain variable domain of TCR clone 82668 (TRAV16, TRAJ26)
CALSSANYGQNFVF

SEQ ID NO: 165336 - protein, 12 aa, Homo sapiens
  CDR3 for beta chain variable domain of TCR clone 82668 (TRBV6-5, TRBJ2-2)
CASRSGTGELFF

SEQ ID NO: 165337 - protein, 16 aa, Homo sapiens
  CDR3 for alpha chain variable domain of TCR clone 82669 (TRAV12-3, TRAJ45)
CAMGWGSGGGADGFTF

SEQ ID NO: 165338 - protein, 15 aa, Homo sapiens
  CDR3 for beta chain variable domain of TCR clone 82669 (TRBV3-1, TRBJ1-2)
CASSHPGTPGYGYTF

SEQ ID NO: 165339 - protein, 14 aa, Homo sapiens
  CDR3 for alpha chain variable domain of TCR clone 82670 (TRAV12-2, TRAJ53)
CAVKGGGSNYKLTF

SEQ ID NO: 165340 - protein, 14 aa, Homo sapiens
  CDR3 for beta chain variable domain of TCR clone 82670 (TRBV19, TRBJ2-1)
CASPTCVLSGEQFF

SEQ ID NO: 165341 - protein, 14 aa, Homo sapiens
  CDR3 for alpha chain variable domain of TCR clone 82671 (TRAV35, TRAJ33)
CAGSSQDSNYQLIW

SEQ ID NO: 165342 - protein, 15 aa, Homo sapiens
  CDR3 for beta chain variable domain of TCR clone 82671 (TRBV20-1, TRBJ2-7)
CSAESGTSGSYEQYF

SEQ ID NO: 165343 - protein, 14 aa, Homo sapiens
  CDR3 for alpha chain variable domain of TCR clone 82672 (TRAV13-1, TRAJ35)
CAASKGGFGNVLHC

SEQ ID NO: 165344 - protein, 14 aa, Homo sapiens
  CDR3 for beta chain variable domain of TCR clone 82672 (TRBV7-2, TRBJ2-7)
CASRSQGAAYEQYF

SEQ ID NO: 165345 - protein, 13 aa, Homo sapiens
  CDR3 for alpha chain variable domain of TCR clone 82673 (TRAV35, TRAJ42)
CAGFPGSQGNLIF

SEQ ID NO: 165346 - protein, 14 aa, Homo sapiens
  CDR3 for beta chain variable domain of TCR clone 82673 (TRBV7-9, TRBJ2-3)
CASSLEDGTDTQYF

SEQ ID NO: 165347 - protein, 11 aa, Homo sapiens
  CDR3 for alpha chain variable domain of TCR clone 82674 (TRAV29/DV5, TRAJ30)
CAVREVDKIIF

SEQ ID NO: 165348 - protein, 13 aa, Homo sapiens
  CDR3 for beta chain variable domain of TCR clone 82674 (TRBV18, TRBJ1-1)
CASSGGRNTEAFF

SEQ ID NO: 165349 - protein, 14 aa, Homo sapiens
  CDR3 for alpha chain variable domain of TCR clone 82675 (TRAV12-2, TRAJ17)
CAVLFKAAGNKLTF

SEQ ID NO: 165350 - protein, 17 aa, Homo sapiens
  CDR3 for beta chain variable domain of TCR clone 82675 (TRBV20-1, TRBJ2-2)
WSASGSGQGGLTGELFF

SEQ ID NO: 165351 - protein, 22 aa, Homo sapiens
  CDR3 for alpha chain variable domain of TCR clone 82676 (TRAV8-3, TRAJ32)
CAVEVVLQTSSSLELALCLLSI

SEQ ID NO: 165352 - protein, 12 aa, Homo sapiens
  CDR3 for beta chain variable domain of TCR clone 82676 (TRBV7-8, TRBJ2-7)
CASSLGDREQYF

SEQ ID NO: 165353 - protein, 16 aa, Homo sapiens
  CDR3 for alpha chain variable domain of TCR clone 82677 (TRAV35, TRAJ28)
CAGQRYSGAGSYQLTF

SEQ ID NO: 165354 - protein, 11 aa, Homo sapiens
  CDR3 for beta chain variable domain of TCR clone 82677 (TRBV11-2, TRBJ2-2)
CASSLPGELFF

SEQ ID NO: 165355 - protein, 14 aa, Homo sapiens
  CDR3 for alpha chain variable domain of TCR clone 82678 (TRAV2, TRAJ37)
CAVDFTSNTGKLIF

SEQ ID NO: 165356 - protein, 15 aa, Homo sapiens
  CDR3 for beta chain variable domain of TCR clone 82678 (TRBV28, TRBJ1-2)
CASSRWGASNYGYTF

SEQ ID NO: 165357 - protein, 13 aa, Homo sapiens
  CDR3 for alpha chain variable domain of TCR clone 82679 (TRAV13-1, TRAJ21)
CAASIYNFNKFYF

SEQ ID NO: 165358 - protein, 15 aa, Homo sapiens
  CDR3 for beta chain variable domain of TCR clone 82679 (TRBV5-5, TRBJ1-5)
CASSLKGGGEQPQHF

SEQ ID NO: 165359 - protein, 14 aa, Homo sapiens
  CDR3 for alpha chain variable domain of TCR clone 82680 (TRAV1-2, TRAJ8)
CAVREDTGFQKLVF

SEQ ID NO: 165360 - protein, 15 aa, Homo sapiens
  CDR3 for beta chain variable domain of TCR clone 82680 (TRBV19, TRBJ2-1)
CASSTGASSYNEQFF

SEQ ID NO: 165361 - protein, 12 aa, Homo sapiens
  CDR3 for alpha chain variable domain of TCR clone 82681 (TRAV1-2, TRAJ24)
CAVGGSWGKFQF

SEQ ID NO: 165362 - protein, 17 aa, Homo sapiens
  CDR3 for beta chain variable domain of TCR clone 82681 (TRBV4-1, TRBJ2-3)
CASSQGYVSGGTDTQYF

SEQ ID NO: 165363 - protein, 14 aa, Homo sapiens
  CDR3 for alpha chain variable domain of TCR clone 82682 (TRAV3, TRAJ8)
CAVSLNTGFQKLVF

SEQ ID NO: 165364 - protein, 15 aa, Homo sapiens
  CDR3 for beta chain variable domain of TCR clone 82682 (TRBV11-2, TRBJ2-1)
CASSLGTSGLNEQFF

SEQ ID NO: 165365 - protein, 14 aa, Homo sapiens
  CDR3 for alpha chain variable domain of TCR clone 82683 (TRAV13-1, TRAJ44)
CAAKATGTASKLTF

SEQ ID NO: 165366 - protein, 17 aa, Homo sapiens
  CDR3 for beta chain variable domain of TCR clone 82683 (TRBV7-3, TRBJ2-3)
CASSLMKRMRGADTQYF

SEQ ID NO: 165367 - protein, 15 aa, Homo sapiens
  CDR3 for alpha chain variable domain of TCR clone 82684 (TRAV29/DV5, TRAJ42)
CAAKTDGGSQGNLIF

SEQ ID NO: 165368 - protein, 17 aa, Homo sapiens
  CDR3 for beta chain variable domain of TCR clone 82684 (TRBV13, TRBJ2-3)
CASSLSRVAGGRNTQYF

SEQ ID NO: 165369 - protein, 14 aa, Homo sapiens
  CDR3 for alpha chain variable domain of TCR clone 82685 (TRAV12-2, TRAJ53)
CAVKGGGSHYKLTF

SEQ ID NO: 165370 - protein, 14 aa, Homo sapiens
  CDR3 for beta chain variable domain of TCR clone 82685 (TRBV7-7, TRBJ2-2)
CATRQDSDTGELFF

SEQ ID NO: 165371 - protein, 14 aa, Homo sapiens
  CDR3 for alpha chain variable domain of TCR clone 82686 (TRAV12-2, TRAJ13)
CAVKKTGGYQKVTL

SEQ ID NO: 165372 - protein, 12 aa, Homo sapiens
  CDR3 for beta chain variable domain of TCR clone 82686 (TRBV11-2, TRBJ2-2)
CASSLGGGELFF

SEQ ID NO: 165373 - protein, 15 aa, Homo sapiens
  CDR3 for alpha chain variable domain of TCR clone 82687 (TRAV17, TRAJ23)
CATAAEDNQGGKLIF

SEQ ID NO: 165374 - protein, 12 aa, Homo sapiens
  CDR3 for beta chain variable domain of TCR clone 82687 (TRBV2, TRBJ2-1)
CAKREGYNEQFF

SEQ ID NO: 165375 - protein, 13 aa, Homo sapiens
  CDR3 for alpha chain variable domain of TCR clone 82688 (TRAV21, TRAJ36)
CSVIKTGANNLFF

SEQ ID NO: 165376 - protein, 13 aa, Homo sapiens
  CDR3 for beta chain variable domain of TCR clone 82688 (TRBV29-1, TRBJ2-3)
CSATRGGRDTQYF

SEQ ID NO: 165377 - protein, 16 aa, Homo sapiens
  CDR3 for alpha chain variable domain of TCR clone 82689 (TRAV12-1, TRAJ48)
CVVNMRDNFGNEKLNF

SEQ ID NO: 165378 - protein, 16 aa, Homo sapiens
  CDR3 for beta chain variable domain of TCR clone 82689 (TRBV7-6, TRBJ2-1)
CASSSVVAGTYNEQFF

SEQ ID NO: 165379 - protein, 12 aa, Homo sapiens
  CDR3 for alpha chain variable domain of TCR clone 82690 (TRAV13-1, TRAJ21)
CSAKEGFNKFYF

SEQ ID NO: 165380 - protein, 20 aa, Homo sapiens
  CDR3 for beta chain variable domain of TCR clone 82690 (TRBV28, TRBJ2-1)
CASTPIGRSPGLAGGNEQFF

SEQ ID NO: 165381 - protein, 13 aa, Homo sapiens
  CDR3 for alpha chain variable domain of TCR clone 82691 (TRAV29/DV5, TRAJ29)
CAASAAGNTPLAF

SEQ ID NO: 165382 - protein, 14 aa, Homo sapiens
  CDR3 for beta chain variable domain of TCR clone 82691 (TRBV19, TRBJ2-3)
CASSAPRGTDTQYF

SEQ ID NO: 165383 - protein, 16 aa, Homo sapiens
  CDR3 for alpha chain variable domain of TCR clone 82692 (TRAV3, TRAJ37)
CAVRVRGSGSTGKLIF

SEQ ID NO: 165384 - protein, 11 aa, Homo sapiens
  CDR3 for beta chain variable domain of TCR clone 82692 (TRBV11-2, TRBJ2-2)
CASSLPGELFF

SEQ ID NO: 165385 - protein, 15 aa, Homo sapiens
  CDR3 for alpha chain variable domain of TCR clone 82693 (TRAV8-4, TRAJ37)
CAVTYGSSNTGNLIF

SEQ ID NO: 165386 - protein, 13 aa, Homo sapiens
  CDR3 for beta chain variable domain of TCR clone 82693 (TRBV12-4, TRBJ2-5)
CASSLGGSRTQYF

SEQ ID NO: 165387 - protein, 14 aa, Homo sapiens
  CDR3 for alpha chain variable domain of TCR clone 82694 (TRAV12-3, TRAJ56)
CAMSVTGANSKLTF

SEQ ID NO: 165388 - protein, 17 aa, Homo sapiens
  CDR3 for beta chain variable domain of TCR clone 82694 (TRBV20-1, TRBJ2-3)
CSVSLLGRGGSADTQYF

SEQ ID NO: 165389 - protein, 11 aa, Homo sapiens
  CDR3 for alpha chain variable domain of TCR clone 82695 (TRAV25, TRAJ49)
CAGGTGNQFYF

SEQ ID NO: 165390 - protein, 12 aa, Homo sapiens
  CDR3 for beta chain variable domain of TCR clone 82695 (TRBV6-5, TRBJ2-1)
CASRNERGQQFF

SEQ ID NO: 165391 - protein, 14 aa, Homo sapiens
  CDR3 for alpha chain variable domain of TCR clone 82696 (TRAV38-1, TRAJ45)
CASHSGGGADGLTF

SEQ ID NO: 165392 - protein, 12 aa, Homo sapiens
  CDR3 for beta chain variable domain of TCR clone 82696 (TRBV7-8, TRBJ2-7)
CASSLGDREQYF

SEQ ID NO: 165393 - protein, 14 aa, Homo sapiens
  CDR3 for alpha chain variable domain of TCR clone 82697 (TRAV12-1, TRAJ15)
CLPPANQAGTALIF

SEQ ID NO: 165394 - protein, 15 aa, Homo sapiens
  CDR3 for beta chain variable domain of TCR clone 82697 (TRBV7-3, TRBJ2-1)
CQQLAPSGSYNEQFF

SEQ ID NO: 165395 - protein, 14 aa, Homo sapiens
  CDR3 for alpha chain variable domain of TCR clone 82698 (TRAV2, TRAJ9)
CAVEDRSGVFKTIF

SEQ ID NO: 165396 - protein, 13 aa, Homo sapiens
  CDR3 for beta chain variable domain of TCR clone 82698 (TRBV7-9, TRBJ1-2)
CASSLKQNYGYTF

SEQ ID NO: 165397 - protein, 13 aa, Homo sapiens
  CDR3 for alpha chain variable domain of TCR clone 82699 (TRAV17, TRAJ21)
CATDGGNFNKFYF

SEQ ID NO: 165398 - protein, 13 aa, Homo sapiens
  CDR3 for beta chain variable domain of TCR clone 82699 (TRBV11-3, TRBJ1-1)
CASTGSLNTEAFF

SEQ ID NO: 165399 - protein, 16 aa, Homo sapiens
  CDR3 for alpha chain variable domain of TCR clone 82700 (TRAV20, TRAJ10)
CAVLRGFTGGGNKLTF

SEQ ID NO: 165400 - protein, 14 aa, Homo sapiens
  CDR3 for beta chain variable domain of TCR clone 82700 (TRBV19, TRBJ1-5)
CASRAPDSFLSQHF

SEQ ID NO: 165401 - protein, 15 aa, Homo sapiens
  CDR3 for alpha chain variable domain of TCR clone 82701 (TRAV26-1, TRAJ44)
CIVRIGTGTASKLTF

SEQ ID NO: 165402 - protein, 12 aa, Homo sapiens
  CDR3 for beta chain variable domain of TCR clone 82701 (TRBV3-1, TRBJ2-7)
CASSQDRDEQYF

SEQ ID NO: 165403 - protein, 14 aa, Homo sapiens
  CDR3 for alpha chain variable domain of TCR clone 82702 (TRAV26-1, TRAJ23)
CIVRDYNQGGKLIF

SEQ ID NO: 165404 - protein, 18 aa, Homo sapiens
  CDR3 for beta chain variable domain of TCR clone 82702 (TRBV7-2, TRBJ2-7)
CASSLSGRGLAGGYEQYF

SEQ ID NO: 165405 - protein, 11 aa, Homo sapiens
  CDR3 for alpha chain variable domain of TCR clone 82703 (TRAV3, TRAJ21)
CAVGNFNKFYF

SEQ ID NO: 165406 - protein, 16 aa, Homo sapiens
  CDR3 for beta chain variable domain of TCR clone 82703 (TRBV5-4, TRBJ2-1)
CASSLVGSGQDNEQFF

SEQ ID NO: 165407 - protein, 12 aa, Homo sapiens
  CDR3 for alpha chain variable domain of TCR clone 82704 (TRAV26-2, TRAJ21)
CILRGNFNKFYF

SEQ ID NO: 165408 - protein, 14 aa, Homo sapiens
  CDR3 for beta chain variable domain of TCR clone 82704 (TRBV25-1, TRBJ1-4)
CASSGGGQPEKLFF

SEQ ID NO: 165409 - protein, 12 aa, Homo sapiens
  CDR3 for alpha chain variable domain of TCR clone 82705 (TRAV12-3, TRAJ42)
CAPRGSQGNLIF

SEQ ID NO: 165410 - protein, 13 aa, Homo sapiens
  CDR3 for beta chain variable domain of TCR clone 82705 (TRBV5-7, TRBJ2-6)
CASTSSGANVLTF

SEQ ID NO: 165411 - protein, 15 aa, Homo sapiens
  CDR3 for alpha chain variable domain of TCR clone 82706 (TRAV12-3, TRAJ11)
CAMSEENSGYSTLTL

SEQ ID NO: 165412 - protein, 20 aa, Homo sapiens
  CDR3 for beta chain variable domain of TCR clone 82706 (TRBV7-8, TRBJ2-2)
CASSHLFPGPTTHITGELFF

SEQ ID NO: 165413 - protein, 14 aa, Homo sapiens
  CDR3 for alpha chain variable domain of TCR clone 82707 (TRAV12-3, TRAJ42)
CAMNYGGSQGNLIF

SEQ ID NO: 165414 - protein, 15 aa, Homo sapiens
  CDR3 for beta chain variable domain of TCR clone 82707 (TRBV5-7, TRBJ1-5)
CASSYGKLGDQPQHF

SEQ ID NO: 165415 - protein, 15 aa, Homo sapiens
  CDR3 for alpha chain variable domain of TCR clone 82708 (TRAV3, TRAJ22)
CGVRDRGGSARQLTF

SEQ ID NO: 165416 - protein, 16 aa, Homo sapiens
  CDR3 for beta chain variable domain of TCR clone 82708 (TRBV5-4, TRBJ2-3)
CASQQPGAGGADTQYF

SEQ ID NO: 165417 - protein, 18 aa, Homo sapiens
  CDR3 for alpha chain variable domain of TCR clone 82709 (TRAV13-1, TRAJ52)
CAAKNPNAGGTSYGKLTF

SEQ ID NO: 165418 - protein, 15 aa, Homo sapiens
  CDR3 for beta chain variable domain of TCR clone 82709 (TRBV28, TRBJ2-1)
CASSIMAGGRSEQFF

SEQ ID NO: 165419 - protein, 14 aa, Homo sapiens
  CDR3 for alpha chain variable domain of TCR clone 82710 (TRAV16, TRAJ15)
RALSFNQAGTALIF

SEQ ID NO: 165420 - protein, 16 aa, Homo sapiens
  CDR3 for beta chain variable domain of TCR clone 82710 (TRBV9, TRBJ2-7)
CASSAGPDRSPYEQYF

SEQ ID NO: 165421 - protein, 12 aa, Homo sapiens
  CDR3 for alpha chain variable domain of TCR clone 82711 (TRAV12-2, TRAJ20)
CAVRPSDYKLSF

SEQ ID NO: 165422 - protein, 11 aa, Homo sapiens
  CDR3 for beta chain variable domain of TCR clone 82711 (TRBV11-2, TRBJ2-2)
CASSLPGELFF

SEQ ID NO: 165423 - protein, 14 aa, Homo sapiens
  CDR3 for alpha chain variable domain of TCR clone 82712 (TRAV13-2, TRAJ39)
CADHPPGAGNMLTF

SEQ ID NO: 165424 - protein, 14 aa, Homo sapiens
  CDR3 for beta chain variable domain of TCR clone 82712 (TRBV19, TRBJ2-1)
CASPTFVLSGEQFF

SEQ ID NO: 165425 - protein, 10 aa, Homo sapiens
  CDR3 for alpha chain variable domain of TCR clone 82713 (TRAV8-4, TRAJ12)
WRDSSYKLIF

SEQ ID NO: 165426 - protein, 12 aa, Homo sapiens
  CDR3 for beta chain variable domain of TCR clone 82713 (TRBV11-2, TRBJ2-2)
CASSLGGGELFF

SEQ ID NO: 165427 - protein, 15 aa, Homo sapiens
  CDR3 for alpha chain variable domain of TCR clone 82714 (TRAV23/DV6, TRAJ38)
CAATVNAGSNRKLIW

SEQ ID NO: 165428 - protein, 16 aa, Homo sapiens
  CDR3 for beta chain variable domain of TCR clone 82714 (TRBV12-5, TRBJ2-5)
CASGPRTSGNQETQYF

SEQ ID NO: 165429 - protein, 12 aa, Homo sapiens
  CDR3 for alpha chain variable domain of TCR clone 82715 (TRAV12-3, TRAJ20)
CAMVRGDYKLSF

SEQ ID NO: 165430 - protein, 15 aa, Homo sapiens
  CDR3 for beta chain variable domain of TCR clone 82715 (TRBV2, TRBJ2-3)
CASSDFEKATDTQYF

SEQ ID NO: 165431 - protein, 16 aa, Homo sapiens
  CDR3 for alpha chain variable domain of TCR clone 82716 (TRAV38-2/DV8, TRAJ57)
CAYRSVGQGGSEKLVF

SEQ ID NO: 165432 - protein, 14 aa, Homo sapiens
  CDR3 for beta chain variable domain of TCR clone 82716 (TRBV7-9, TRBJ1-1)
CASTPLQSYTEAFY

SEQ ID NO: 165433 - protein, 13 aa, Homo sapiens
  CDR3 for alpha chain variable domain of TCR clone 82717 (TRAV12-3, TRAJ6)
CANPSGGSNIPTF

SEQ ID NO: 165434 - protein, 14 aa, Homo sapiens
  CDR3 for beta chain variable domain of TCR clone 82717 (TRBV19, TRBJ1-1)
CASSRDRDATEAFF

SEQ ID NO: 165435 - protein, 13 aa, Homo sapiens
  CDR3 for alpha chain variable domain of TCR clone 82718 (TRAV3, TRAJ20)
CAVRSLNDYRLSF

SEQ ID NO: 165436 - protein, 13 aa, Homo sapiens
  CDR3 for beta chain variable domain of TCR clone 82718 (TRBV6-1, TRBJ2-1)
CAGMDPTNNEQFF

SEQ ID NO: 165437 - protein, 14 aa, Homo sapiens
  CDR3 for alpha chain variable domain of TCR clone 82719 (TRAV12-1, TRAJ23)
CVAMIYNQGGKLIF

SEQ ID NO: 165438 - protein, 23 aa, Homo sapiens
  CDR3 for beta chain variable domain of TCR clone 82719 (TRBV7-3, TRBJ1-6)
CASSLTSRDEASDPSSYNSPLHF

SEQ ID NO: 165439 - protein, 15 aa, Homo sapiens
  CDR3 for alpha chain variable domain of TCR clone 82720 (TRAV26-2, TRAJ28)
CILVKSGAGSYQLTF

SEQ ID NO: 165440 - protein, 16 aa, Homo sapiens
  CDR3 for beta chain variable domain of TCR clone 82720 (TRBV4-2, TRBJ1-2)
CASSQEIGGASYGYTF

SEQ ID NO: 165441 - protein, 18 aa, Homo sapiens
  CDR3 for alpha chain variable domain of TCR clone 82721 (TRAV21, TRAJ52)
CAVRPSPAGGTSYGKLTF

SEQ ID NO: 165442 - protein, 15 aa, Homo sapiens
  CDR3 for beta chain variable domain of TCR clone 82721 (TRBV18, TRBJ2-1)
CASSPPSASYNEQFF

SEQ ID NO: 165443 - protein, 17 aa, Homo sapiens
  CDR3 for alpha chain variable domain of TCR clone 82722 (TRAV38-2/DV8, TRAJ23)
CALSRKLIFGQGTEVSV

SEQ ID NO: 165444 - protein, 17 aa, Homo sapiens
  CDR3 for beta chain variable domain of TCR clone 82722 (TRBV5-4, TRBJ2-1)
CASSSAGGRGPYNEQFF

SEQ ID NO: 165445 - protein, 13 aa, Homo sapiens
  CDR3 for alpha chain variable domain of TCR clone 82723 (TRAV8-4, TRAJ48)
CAGSLFGNEKLTF

SEQ ID NO: 165446 - protein, 15 aa, Homo sapiens
  CDR3 for beta chain variable domain of TCR clone 82723 (TRBV20-1, TRBJ2-7)
CSARKGLAESYEQYF

SEQ ID NO: 165447 - protein, 16 aa, Homo sapiens
  CDR3 for alpha chain variable domain of TCR clone 82724 (TRAV20, TRAJ22)
CAVQASSSGSARKLTF

SEQ ID NO: 165448 - protein, 13 aa, Homo sapiens
  CDR3 for beta chain variable domain of TCR clone 82724 (TRBV7-2, TRBJ2-5)
CASSQTSVETQYF

SEQ ID NO: 165449 - protein, 15 aa, Homo sapiens
  CDR3 for alpha chain variable domain of TCR clone 82725 (TRAV12-3, TRAJ6)
YAMSATSGGSYIPTF

SEQ ID NO: 165450 - protein, 11 aa, Homo sapiens
  CDR3 for beta chain variable domain of TCR clone 82725 (TRBV20-1, TRBJ1-5)
CSAQGDQPQHF

SEQ ID NO: 165451 - protein, 11 aa, Homo sapiens
  CDR3 for alpha chain variable domain of TCR clone 82726 (TRAV3, TRAJ21)
CAVGNPNKFYF

SEQ ID NO: 165452 - protein, 16 aa, Homo sapiens
  CDR3 for beta chain variable domain of TCR clone 82726 (TRBV19, TRBJ2-1)
CASSKAGPSSYNEQFF

SEQ ID NO: 165453 - protein, 16 aa, Homo sapiens
  CDR3 for alpha chain variable domain of TCR clone 82727 (TRAV20, TRAJ10)
CAVLRGLTGGGNKLTF

SEQ ID NO: 165454 - protein, 17 aa, Homo sapiens
  CDR3 for beta chain variable domain of TCR clone 82727 (TRBV7-3, TRBJ2-3)
CASSPRGQGYGTDTQYF

SEQ ID NO: 165455 - protein, 14 aa, Homo sapiens
  CDR3 for alpha chain variable domain of TCR clone 82728 (TRAV29/DV5, TRAJ49)
CAASLSNTGNPFYF

SEQ ID NO: 165456 - protein, 15 aa, Homo sapiens
  CDR3 for beta chain variable domain of TCR clone 82728 (TRBV20-1, TRBJ2-1)
CSARGIGGTYNEQFF

SEQ ID NO: 165457 - protein, 16 aa, Homo sapiens
  CDR3 for alpha chain variable domain of TCR clone 82729 (TRAV3, TRAJ37)
CAVRPHGSGNTGKLIF

SEQ ID NO: 165458 - protein, 16 aa, Homo sapiens
  CDR3 for beta chain variable domain of TCR clone 82729 (TRBV9, TRBJ1-2)
CASSVEEKVSSYGYTF

SEQ ID NO: 165459 - protein, 19 aa, Homo sapiens
  CDR3 for alpha chain variable domain of TCR clone 82730 (TRAV13-1, TRAJ52)
CAASPYQNAGGTSYGKLTF

SEQ ID NO: 165460 - protein, 16 aa, Homo sapiens
  CDR3 for beta chain variable domain of TCR clone 82730 (TRBV12-5, TRBJ2-5)
CASGPRTSGNQETQYF

SEQ ID NO: 165461 - protein, 16 aa, Homo sapiens
  CDR3 for alpha chain variable domain of TCR clone 82731 (TRAV30, TRAJ24)
CGTEIVDADSRGKFQF

SEQ ID NO: 165462 - protein, 18 aa, Homo sapiens
  CDR3 for beta chain variable domain of TCR clone 82731 (TRBV11-2, TRBJ2-3)
CASSLGGASRGAPNTQYF

SEQ ID NO: 165463 - protein, 11 aa, Homo sapiens
  CDR3 for alpha chain variable domain of TCR clone 82732 (TRAV12-3, TRAJ53)
GSGGSNYKLTF

SEQ ID NO: 165464 - protein, 11 aa, Homo sapiens
  CDR3 for beta chain variable domain of TCR clone 82732 (TRBV29-1, TRBJ2-5)
CSEDRTGTQYF

SEQ ID NO: 165465 - protein, 17 aa, Homo sapiens
  CDR3 for alpha chain variable domain of TCR clone 82733 (TRAV3, TRAJ38)
CAVRDCLNAGNNRKLIW

SEQ ID NO: 165466 - protein, 14 aa, Homo sapiens
  CDR3 for beta chain variable domain of TCR clone 82733 (TRBV4-2, TRBJ2-1)
CASGLDRAYNEQFF

SEQ ID NO: 165467 - protein, 14 aa, Homo sapiens
  CDR3 for alpha chain variable domain of TCR clone 82734 (TRAV8-2, TRAJ23)
CVVSDDNQGGKLIF

SEQ ID NO: 165468 - protein, 15 aa, Homo sapiens
  CDR3 for beta chain variable domain of TCR clone 82734 (TRBV5-1, TRBJ1-1)
CASSLGEGENTEAFF

SEQ ID NO: 165469 - protein, 10 aa, Homo sapiens
  CDR3 for alpha chain variable domain of TCR clone 82735 (TRAV12-1, TRAJ43)
CVVHNNDMRF

SEQ ID NO: 165470 - protein, 20 aa, Homo sapiens
  CDR3 for beta chain variable domain of TCR clone 82735 (TRBV7-8, TRBJ2-2)
CASSHLFPGPTIHITGELFF

SEQ ID NO: 165471 - protein, 19 aa, Homo sapiens
  CDR3 for alpha chain variable domain of TCR clone 82736 (TRAV26-1, TRAJ52)
CIVRAHRNAGGTSYGKLTF

SEQ ID NO: 165472 - protein, 16 aa, Homo sapiens
  CDR3 for beta chain variable domain of TCR clone 82736 (TRBV19, TRBJ1-2)
CASSIVPARGSYVYTF

SEQ ID NO: 165473 - protein, 16 aa, Homo sapiens
  CDR3 for alpha chain variable domain of TCR clone 82737 (TRAV12-3, TRAJ53)
CAMSPGSGGSNYKLTF

SEQ ID NO: 165474 - protein, 16 aa, Homo sapiens
  CDR3 for beta chain variable domain of TCR clone 82737 (TRBV4-2, TRBJ1-1)
CASSQAGFGMNTGAFF

SEQ ID NO: 165475 - protein, 16 aa, Homo sapiens
  CDR3 for alpha chain variable domain of TCR clone 82738 (TRAV8-3, TRAJ13)
CSVGAYPSGGYQKVTF

SEQ ID NO: 165476 - protein, 13 aa, Homo sapiens
  CDR3 for beta chain variable domain of TCR clone 82738 (TRBV7-9, TRBJ1-2)
CASSLKQNYGYTF

SEQ ID NO: 165477 - protein, 17 aa, Homo sapiens
  CDR3 for alpha chain variable domain of TCR clone 82739 (TRAV3, TRAJ6)
CAVSRRTATGGSYIPTF

SEQ ID NO: 165478 - protein, 18 aa, Homo sapiens
  CDR3 for beta chain variable domain of TCR clone 82739 (TRBV7-2, TRBJ2-3)
CASSLETSRGRKADTQYF

SEQ ID NO: 165479 - protein, 18 aa, Homo sapiens
  CDR3 for alpha chain variable domain of TCR clone 82740 (TRAV26-1, TRAJ23)
CIVRVGLEVWNQGGKLIF

SEQ ID NO: 165480 - protein, 16 aa, Homo sapiens
  CDR3 for beta chain variable domain of TCR clone 82740 (TRBV6-1, TRBJ1-2)
CASSGAWQGRSHGYTF

SEQ ID NO: 165481 - protein, 17 aa, Homo sapiens
  CDR3 for alpha chain variable domain of TCR clone 82741 (TRAV8-6, TRAJ58)
CAVSSWVGETSGSRFTF

SEQ ID NO: 165482 - protein, 15 aa, Homo sapiens
  CDR3 for beta chain variable domain of TCR clone 82741 (TRBV20-1, TRBJ2-7)
CSARDRVSGMDEQYF

SEQ ID NO: 165483 - protein, 14 aa, Homo sapiens
  CDR3 for alpha chain variable domain of TCR clone 82742 (TRAV8-3, TRAJ9)
CAVVYNTGGFKTIF

SEQ ID NO: 165484 - protein, 14 aa, Homo sapiens
  CDR3 for beta chain variable domain of TCR clone 82742 (TRBV7-3, TRBJ2-2)
CASNSGGYTGELFF

SEQ ID NO: 165485 - protein, 16 aa, Homo sapiens
  CDR3 for alpha chain variable domain of TCR clone 82743 (TRAV30, TRAJ24)
CGTEIVDADSWGKFQL

SEQ ID NO: 165486 - protein, 14 aa, Homo sapiens
  CDR3 for beta chain variable domain of TCR clone 82743 (TRBV7-2, TRBJ1-1)
CASSHRQGRTEAFF

SEQ ID NO: 165487 - protein, 15 aa, Homo sapiens
  CDR3 for alpha chain variable domain of TCR clone 82744 (TRAV26-1, TRAJ23)
CIVRVLNNQGGKLIF

SEQ ID NO: 165488 - protein, 15 aa, Homo sapiens
  CDR3 for beta chain variable domain of TCR clone 82744 (TRBV7-3, TRBJ2-1)
CASSFSQSNYNEQFF

SEQ ID NO: 165489 - protein, 16 aa, Homo sapiens
  CDR3 for alpha chain variable domain of TCR clone 82745 (TRAV12-3, TRAJ53)
CAMSPGSGGSNYNLTF

SEQ ID NO: 165490 - protein, 16 aa, Homo sapiens
  CDR3 for beta chain variable domain of TCR clone 82745 (TRBV4-2, TRBJ1-1)
CASSQAGFGMNTEAFF

SEQ ID NO: 165491 - protein, 12 aa, Homo sapiens
  CDR3 for alpha chain variable domain of TCR clone 82746 (TRAV12-1, TRAJ34)
CVVTFNTDKLIF

SEQ ID NO: 165492 - protein, 14 aa, Homo sapiens
  CDR3 for beta chain variable domain of TCR clone 82746 (TRBV19, TRBJ1-1)
CASLRTGLNTEASF

SEQ ID NO: 165493 - protein, 14 aa, Homo sapiens
  CDR3 for alpha chain variable domain of TCR clone 82747 (TRAV1-2, TRAJ16)
CAVNRFSDGQKLLF

SEQ ID NO: 165494 - protein, 16 aa, Homo sapiens
  CDR3 for beta chain variable domain of TCR clone 82747 (TRBV20-1, TRBJ1-4)
CSAPGQVLLTNEKLFF

SEQ ID NO: 165495 - protein, 16 aa, Homo sapiens
  CDR3 for alpha chain variable domain of TCR clone 82748 (TRAV27, TRAJ13)
CAGAKSYSGGYQKVTF

SEQ ID NO: 165496 - protein, 15 aa, Homo sapiens
  CDR3 for beta chain variable domain of TCR clone 82748 (TRBV29-1, TRBJ2-1)
CSVGRHALFYNEQFF

SEQ ID NO: 165497 - protein, 17 aa, Homo sapiens
  CDR3 for alpha chain variable domain of TCR clone 82749 (TRAV38-1, TRAJ18)
CAFMTYYRGSTLGRLYF

SEQ ID NO: 165498 - protein, 20 aa, Homo sapiens
  CDR3 for beta chain variable domain of TCR clone 82749 (TRBV25-1, TRBJ2-1)
CASSEPLSRVAGGTGAEQFF

SEQ ID NO: 165499 - protein, 14 aa, Homo sapiens
  CDR3 for alpha chain variable domain of TCR clone 82750 (TRAV12-3, TRAJ10)
SHLPLTGGGNKLTF

SEQ ID NO: 165500 - protein, 13 aa, Homo sapiens
  CDR3 for beta chain variable domain of TCR clone 82750 (TRBV20-1, TRBJ2-1)
CSASTGTSDEQFF

SEQ ID NO: 165501 - protein, 19 aa, Homo sapiens
  CDR3 for alpha chain variable domain of TCR clone 82751 (TRAV8-3, TRAJ32)
LSTSVLWVRRGGTTNKLIF

SEQ ID NO: 165502 - protein, 15 aa, Homo sapiens
  CDR3 for beta chain variable domain of TCR clone 82751 (TRBV7-2, TRBJ2-1)
CASSSPGQYLGEQFF

SEQ ID NO: 165503 - protein, 17 aa, Homo sapiens
  CDR3 for alpha chain variable domain of TCR clone 82752 (TRAV12-2, TRAJ6)
CAPQGPPRAGGSYLPTF

SEQ ID NO: 165504 - protein, 16 aa, Homo sapiens
  CDR3 for beta chain variable domain of TCR clone 82752 (TRBV19, TRBJ2-2)
CASSTARASNTGELFF

SEQ ID NO: 165505 - protein, 14 aa, Homo sapiens
  CDR3 for alpha chain variable domain of TCR clone 82753 (TRAV1-2, TRAJ8)
CAVREDTGFQKLVF

SEQ ID NO: 165506 - protein, 16 aa, Homo sapiens
  CDR3 for beta chain variable domain of TCR clone 82753 (TRBV27, TRBJ1-1)
CASSSRGRTGYTEAFF

SEQ ID NO: 165507 - protein, 15 aa, Homo sapiens
  CDR3 for alpha chain variable domain of TCR clone 82754 (TRAV34, TRAJ38)
CGADFTPGNNRKPIW

SEQ ID NO: 165508 - protein, 16 aa, Homo sapiens
  CDR3 for beta chain variable domain of TCR clone 82754 (TRBV6-1, TRBJ2-3)
CASSEVIGQGTDTQYF

SEQ ID NO: 165509 - protein, 15 aa, Homo sapiens
  CDR3 for alpha chain variable domain of TCR clone 82755 (TRAV8-3, TRAJ45)
CASSYSGGGADGLTF

SEQ ID NO: 165510 - protein, 13 aa, Homo sapiens
  CDR3 for beta chain variable domain of TCR clone 82755 (TRBV10-3, TRBJ2-7)
CACKLAVNYEQYF

SEQ ID NO: 165511 - protein, 11 aa, Homo sapiens
  CDR3 for alpha chain variable domain of TCR clone 82756 (TRAV17, TRAJ49)
CATDTGNQFYF

SEQ ID NO: 165512 - protein, 12 aa, Homo sapiens
  CDR3 for beta chain variable domain of TCR clone 82756 (TRBV2, TRBJ2-7)
CASSGGSGIPYF

SEQ ID NO: 165513 - protein, 17 aa, Homo sapiens
  CDR3 for alpha chain variable domain of TCR clone 82757 (TRAV4, TRAJ18)
CLVGERSVGSTLGRLHF

SEQ ID NO: 165514 - protein, 11 aa, Homo sapiens
  CDR3 for beta chain variable domain of TCR clone 82757 (TRBV29-1, TRBJ2-5)
CSEDRTGTQYF

SEQ ID NO: 165515 - protein, 15 aa, Homo sapiens
  CDR3 for alpha chain variable domain of TCR clone 82758 (TRAV3, TRAJ4)
CAVRDGTGGYNKLIF

SEQ ID NO: 165516 - protein, 15 aa, Homo sapiens
  CDR3 for beta chain variable domain of TCR clone 82758 (TRBV10-2, TRBJ2-6)
CASSEQGTGANVLTF

SEQ ID NO: 165517 - protein, 15 aa, Homo sapiens
  CDR3 for alpha chain variable domain of TCR clone 82759 (TRAV13-2, TRAJ50)
CAEEPLKISYDKVIF

SEQ ID NO: 165518 - protein, 15 aa, Homo sapiens
  CDR3 for beta chain variable domain of TCR clone 82759 (TRBV20-1, TRBJ1-5)
CSARGSVDSNQPQHF

SEQ ID NO: 165519 - protein, 16 aa, Homo sapiens
  CDR3 for alpha chain variable domain of TCR clone 82760 (TRAV30, TRAJ24)
CGTAIVDADSWGKFQF

SEQ ID NO: 165520 - protein, 13 aa, Homo sapiens
  CDR3 for beta chain variable domain of TCR clone 82760 (TRBV10-3, TRBJ1-2)
CAISERDSYGYTF

SEQ ID NO: 165521 - protein, 19 aa, Homo sapiens
  CDR3 for alpha chain variable domain of TCR clone 82761 (TRAV2, TRAJ20)
ILQVREADAAVYRDCTLSF

SEQ ID NO: 165522 - protein, 13 aa, Homo sapiens
  CDR3 for beta chain variable domain of TCR clone 82761 (TRBV15, TRBJ1-6)
CATSGGLNSPLHF

SEQ ID NO: 165523 - protein, 17 aa, Homo sapiens
  CDR3 for alpha chain variable domain of TCR clone 82762 (TRAV23/DV6, TRAJ12)
CAAIDLGAMDSSYKLIF

SEQ ID NO: 165524 - protein, 14 aa, Homo sapiens
  CDR3 for beta chain variable domain of TCR clone 82762 (TRBV6-1, TRBJ1-3)
CASVQGGGGNTIYF

SEQ ID NO: 165525 - protein, 12 aa, Homo sapiens
  CDR3 for alpha chain variable domain of TCR clone 82763 (TRAV8-3, TRAJ41)
CAVALSGYALNF

SEQ ID NO: 165526 - protein, 18 aa, Homo sapiens
  CDR3 for beta chain variable domain of TCR clone 82763 (TRBV20-1, TRBJ2-6)
CSAETTPTHGSGANGLTF

SEQ ID NO: 165527 - protein, 14 aa, Homo sapiens
  CDR3 for alpha chain variable domain of TCR clone 82764 (TRAV16, TRAJ17)
CALSGRAAGNKLTF

SEQ ID NO: 165528 - protein, 15 aa, Homo sapiens
  CDR3 for beta chain variable domain of TCR clone 82764 (TRBV3-1, TRBJ1-2)
CASSTTRLPEGGYTF

SEQ ID NO: 165529 - protein, 12 aa, Homo sapiens
  CDR3 for alpha chain variable domain of TCR clone 82765 (TRAV8-3, TRAJ43)
CAVCAGNNDMRF

SEQ ID NO: 165530 - protein, 14 aa, Homo sapiens
  CDR3 for beta chain variable domain of TCR clone 82765 (TRBV4-2, TRBJ1-5)
CASSRDRGNQPQHF

SEQ ID NO: 165531 - protein, 13 aa, Homo sapiens
  CDR3 for alpha chain variable domain of TCR clone 82766 (TRAV22, TRAJ29)
CAVGVSGNTPLVF

SEQ ID NO: 165532 - protein, 13 aa, Homo sapiens
  CDR3 for beta chain variable domain of TCR clone 82766 (TRBV4-2, TRBJ1-1)
CASSQAGNTEAFF

SEQ ID NO: 165533 - protein, 14 aa, Homo sapiens
  CDR3 for alpha chain variable domain of TCR clone 82767 (TRAV13-1, TRAJ13)
CAAKATGTASKLTF

SEQ ID NO: 165534 - protein, 15 aa, Homo sapiens
  CDR3 for beta chain variable domain of TCR clone 82767 (TRBV27, TRBJ2-1)
CASSNGGGSSNEQFF

SEQ ID NO: 165535 - protein, 12 aa, Homo sapiens
  CDR3 for alpha chain variable domain of TCR clone 82768 (TRAV13-1, TRAJ48)
CAANFGNEKLTF

SEQ ID NO: 165536 - protein, 18 aa, Homo sapiens
  CDR3 for beta chain variable domain of TCR clone 82768 (TRBV12-4, TRBJ2-2)
CASSLVAGTRGRTGELFF

SEQ ID NO: 165537 - protein, 12 aa, Homo sapiens
  CDR3 for alpha chain variable domain of TCR clone 82769 (TRAV36/DV7, TRAJ54)
CAVVRGAQKLVF

SEQ ID NO: 165538 - protein, 15 aa, Homo sapiens
  CDR3 for beta chain variable domain of TCR clone 82769 (TRBV6-3, TRBJ2-7)
CASSSPGTVFYEQYF

SEQ ID NO: 165539 - protein, 17 aa, Homo sapiens
  CDR3 for alpha chain variable domain of TCR clone 82770 (TRAV8-3, TRAJ34)
CAIPGKLIFGTGTRLQV

SEQ ID NO: 165540 - protein, 15 aa, Homo sapiens
  CDR3 for beta chain variable domain of TCR clone 82770 (TRBV5-7, TRBJ2-1)
CAISRRLAGDNEQFF

SEQ ID NO: 165541 - protein, 16 aa, Homo sapiens
  CDR3 for alpha chain variable domain of TCR clone 82771 (TRAV26-1, TRAJ53)
CIVRVEMGGSNYKLTF

SEQ ID NO: 165542 - protein, 12 aa, Homo sapiens
  CDR3 for beta chain variable domain of TCR clone 82771 (TRBV7-9, TRBJ1-5)
CASSPQGQPQHF

SEQ ID NO: 165543 - protein, 14 aa, Homo sapiens
  CDR3 for alpha chain variable domain of TCR clone 82772 (TRAV17, TRAJ37)
CATVPSSNTGKLIF

SEQ ID NO: 165544 - protein, 15 aa, Homo sapiens
  CDR3 for beta chain variable domain of TCR clone 82772 (TRBV10-2, TRBJ2-5)
CASKPEDRRRETQYF

SEQ ID NO: 165545 - protein, 14 aa, Homo sapiens
  CDR3 for alpha chain variable domain of TCR clone 82773 (TRAV12-3, TRAJ10)
SHLPLTGGGNKLTF

SEQ ID NO: 165546 - protein, 15 aa, Homo sapiens
  CDR3 for beta chain variable domain of TCR clone 82773 (TRBV20-1, TRBJ2-7)
CSAREGRDSLHEQYF

SEQ ID NO: 165547 - protein, 13 aa, Homo sapiens
  CDR3 for alpha chain variable domain of TCR clone 82774 (TRAV8-3, TRAJ28)
CAVGAVGSYQLTF

SEQ ID NO: 165548 - protein, 15 aa, Homo sapiens
  CDR3 for beta chain variable domain of TCR clone 82774 (TRBV7-9, TRBJ1-5)
CASSQGHQANQPQHF

SEQ ID NO: 165549 - protein, 14 aa, Homo sapiens
  CDR3 for alpha chain variable domain of TCR clone 82775 (TRAV13-1, TRAJ44)
CAAKATVTASKLTF

SEQ ID NO: 165550 - protein, 17 aa, Homo sapiens
  CDR3 for beta chain variable domain of TCR clone 82775 (TRBV7-3, TRBJ2-3)
RASSLMKRMRGADTQYF

SEQ ID NO: 165551 - protein, 11 aa, Homo sapiens
  CDR3 for alpha chain variable domain of TCR clone 82776 (TRAV3, TRAJ21)
CAVGNFNKFYF

SEQ ID NO: 165552 - protein, 13 aa, Homo sapiens
  CDR3 for beta chain variable domain of TCR clone 82776 (TRBV20-1, TRBJ2-5)
CSAATELQETQYF

SEQ ID NO: 165553 - protein, 16 aa, Homo sapiens
  CDR3 for alpha chain variable domain of TCR clone 82777 (TRAV4, TRAJ9)
CLVGDPNRPGGFKTIF

SEQ ID NO: 165554 - protein, 16 aa, Homo sapiens
  CDR3 for beta chain variable domain of TCR clone 82777 (TRBV28, TRBJ1-4)
CASSPPYRGRSEKPFF

SEQ ID NO: 165555 - protein, 12 aa, Homo sapiens
  CDR3 for alpha chain variable domain of TCR clone 82778 (TRAV17, TRAJ57)
CATDGGSEKLVF

SEQ ID NO: 165556 - protein, 16 aa, Homo sapiens
  CDR3 for beta chain variable domain of TCR clone 82778 (TRBV19, TRBJ2-1)
CASSKAGPSSYNEQFF

SEQ ID NO: 165557 - protein, 13 aa, Homo sapiens
  CDR3 for alpha chain variable domain of TCR clone 82779 (TRAV17, TRAJ40)
CATAPGGTYKYIF

SEQ ID NO: 165558 - protein, 12 aa, Homo sapiens
  CDR3 for beta chain variable domain of TCR clone 82779 (TRBV2, TRBJ1-5)
CASSENRTHQHF

SEQ ID NO: 165559 - protein, 14 aa, Homo sapiens
  CDR3 for alpha chain variable domain of TCR clone 82780 (TRAV12-1, TRAJ17)
CVVNYKAAGNKLTF

SEQ ID NO: 165560 - protein, 16 aa, Homo sapiens
  CDR3 for beta chain variable domain of TCR clone 82780 (TRBV5-1, TRBJ2-3)
CASSLGLAVYTDTQYF

SEQ ID NO: 165561 - protein, 17 aa, Homo sapiens
  CDR3 for alpha chain variable domain of TCR clone 82781 (TRAV38-2/DV8, TRAJ38)
CAYRSARGAGNNRKLMW

SEQ ID NO: 165562 - protein, 13 aa, Homo sapiens
  CDR3 for beta chain variable domain of TCR clone 82781 (TRBV6-5, TRBJ2-1)
CASRGRVGNEQFF

SEQ ID NO: 165563 - protein, 12 aa, Homo sapiens
  CDR3 for alpha chain variable domain of TCR clone 82782 (TRAV13-1, TRAJ9)
CAIPTGGFKTIF

SEQ ID NO: 165564 - protein, 15 aa, Homo sapiens
  CDR3 for beta chain variable domain of TCR clone 82782 (TRBV2, TRBJ2-1)
CASSEEREGDNEQFF

SEQ ID NO: 165565 - protein, 10 aa, Homo sapiens
  CDR3 for alpha chain variable domain of TCR clone 82783 (TRAV23/DV6, TRAJ57)
CAASSTLSQG

SEQ ID NO: 165566 - protein, 13 aa, Homo sapiens
  CDR3 for beta chain variable domain of TCR clone 82783 (TRBV4-1, TRBJ1-1)
CASSRKMNTEAFF

SEQ ID NO: 165567 - protein, 14 aa, Homo sapiens
  CDR3 for alpha chain variable domain of TCR clone 82784 (TRAV38-1, TRAJ40)
CALRPTSGTYKYIF

SEQ ID NO: 165568 - protein, 16 aa, Homo sapiens
  CDR3 for beta chain variable domain of TCR clone 82784 (TRBV4-1, TRBJ1-2)
CASSQDAGQVLYGYTF

SEQ ID NO: 165569 - protein, 14 aa, Homo sapiens
  CDR3 for alpha chain variable domain of TCR clone 82785 (TRAV1-2, TRAJ8)
CAVREGTGFQKLVF

SEQ ID NO: 165570 - protein, 13 aa, Homo sapiens
  CDR3 for beta chain variable domain of TCR clone 82785 (TRBV12-4, TRBJ1-5)
CASSPDRAQPQHF

SEQ ID NO: 165571 - protein, 16 aa, Homo sapiens
  CDR3 for alpha chain variable domain of TCR clone 82786 (TRAV26-1, TRAJ37)
RIVRGDGSGNTGKLIF

SEQ ID NO: 165572 - protein, 17 aa, Homo sapiens
  CDR3 for beta chain variable domain of TCR clone 82786 (TRBV4-1, TRBJ2-7)
CASSRDPLGVRGGEQYF

SEQ ID NO: 165573 - protein, 12 aa, Homo sapiens
  CDR3 for alpha chain variable domain of TCR clone 82787 (TRAV12-1, TRAJ40)
CVVYSGTYKYIF

SEQ ID NO: 165574 - protein, 18 aa, Homo sapiens
  CDR3 for beta chain variable domain of TCR clone 82787 (TRBV11-2, TRBJ2-3)
CASILGGASRGAPNTQYF

SEQ ID NO: 165575 - protein, 10 aa, Homo sapiens
  CDR3 for alpha chain variable domain of TCR clone 82788 (TRAV23/DV6, TRAJ9)
CAASIGGNTG

SEQ ID NO: 165576 - protein, 17 aa, Homo sapiens
  CDR3 for beta chain variable domain of TCR clone 82788 (TRBV11-2, TRBJ2-1)
CASSLYPPGVEYNEQFF

SEQ ID NO: 165577 - protein, 13 aa, Homo sapiens
  CDR3 for alpha chain variable domain of TCR clone 82789 (TRAV22, TRAJ29)
CAVGGSGNTPLVF

SEQ ID NO: 165578 - protein, 15 aa, Homo sapiens
  CDR3 for beta chain variable domain of TCR clone 82789 (TRBV11-2, TRBJ2-1)
CASSKNRGLIYEQFF

SEQ ID NO: 165579 - protein, 11 aa, Homo sapiens
  CDR3 for alpha chain variable domain of TCR clone 82790 (TRAV1-1, TRAJ23)
CAVRQGGKLIF

SEQ ID NO: 165580 - protein, 16 aa, Homo sapiens
  CDR3 for beta chain variable domain of TCR clone 82790 (TRBV13, TRBJ2-2)
CASSPRTGEHTGELFF

SEQ ID NO: 165581 - protein, 13 aa, Homo sapiens
  CDR3 for alpha chain variable domain of TCR clone 82791 (TRAV30, TRAJ24)
CGTVTDSWWKLQF

SEQ ID NO: 165582 - protein, 14 aa, Homo sapiens
  CDR3 for beta chain variable domain of TCR clone 82791 (TRBV6-3, TRBJ2-2)
CASTYTPDTGELFF

SEQ ID NO: 165583 - protein, 15 aa, Homo sapiens
  CDR3 for alpha chain variable domain of TCR clone 82792 (TRAV8-1, TRAJ6)
CAVNAGAGGSYIPTF

SEQ ID NO: 165584 - protein, 14 aa, Homo sapiens
  CDR3 for beta chain variable domain of TCR clone 82792 (TRBV25-1, TRBJ1-6)
CASSLSADISPLLF

SEQ ID NO: 165585 - protein, 16 aa, Homo sapiens
  CDR3 for alpha chain variable domain of TCR clone 82793 (TRAV26-1, TRAJ38)
CIVRVELGGNNRKLIL

SEQ ID NO: 165586 - protein, 14 aa, Homo sapiens
  CDR3 for beta chain variable domain of TCR clone 82793 (TRBV5-1, TRBJ2-3)
CASSPGLAADTQYF

SEQ ID NO: 165587 - protein, 12 aa, Homo sapiens
  CDR3 for alpha chain variable domain of TCR clone 82794 (TRAV6, TRAJ40)
CARTSGTYKYIF

SEQ ID NO: 165588 - protein, 12 aa, Homo sapiens
  CDR3 for beta chain variable domain of TCR clone 82794 (TRBV27, TRBJ2-5)
CAGSPTGETQYF

SEQ ID NO: 165589 - protein, 12 aa, Homo sapiens
  CDR3 for alpha chain variable domain of TCR clone 82795 (TRAV1-1, TRAJ8)
CAGGTGFQKLVF

SEQ ID NO: 165590 - protein, 15 aa, Homo sapiens
  CDR3 for beta chain variable domain of TCR clone 82795 (TRBV24-1, TRBJ2-1)
CATSGSGGFYNEQFF

SEQ ID NO: 165591 - protein, 18 aa, Homo sapiens
  CDR3 for alpha chain variable domain of TCR clone 82796 (TRAV21, TRAJ52)
CAVRPSPAGGTSYGKLTF

SEQ ID NO: 165592 - protein, 14 aa, Homo sapiens
  CDR3 for beta chain variable domain of TCR clone 82796 (TRBV7-9, TRBJ2-2)
CASSGLADTGELFF

SEQ ID NO: 165593 - protein, 17 aa, Homo sapiens
  CDR3 for alpha chain variable domain of TCR clone 82797 (TRAV21, TRAJ52)
CAVGTNAGGTSYGKLTF

SEQ ID NO: 165594 - protein, 13 aa, Homo sapiens
  CDR3 for beta chain variable domain of TCR clone 82797 (TRBV5-1, TRBJ1-2)
CASSFSGNPGYTF

SEQ ID NO: 165595 - protein, 15 aa, Homo sapiens
  CDR3 for alpha chain variable domain of TCR clone 82798 (TRAV2, TRAJ28)
CAVPYSGAGVTNSLS

SEQ ID NO: 165596 - protein, 17 aa, Homo sapiens
  CDR3 for beta chain variable domain of TCR clone 82798 (TRBV20-1, TRBJ2-4)
CSARDWASGGRENIQYF

SEQ ID NO: 165597 - protein, 13 aa, Homo sapiens
  CDR3 for alpha chain variable domain of TCR clone 82799 (TRAV8-4, TRAJ30)
CAASVNRDDKIIL

SEQ ID NO: 165598 - protein, 13 aa, Homo sapiens
  CDR3 for beta chain variable domain of TCR clone 82799 (TRBV3-1, TRBJ2-2)
CASLARGSGELFF

SEQ ID NO: 165599 - protein, 12 aa, Homo sapiens
  CDR3 for alpha chain variable domain of TCR clone 82800 (TRAV12-3, TRAJ20)
CAMVRGDYKLSF

SEQ ID NO: 165600 - protein, 18 aa, Homo sapiens
  CDR3 for beta chain variable domain of TCR clone 82800 (TRBV12-4, TRBJ2-2)
CASSLVAGTRGRTGELFF

SEQ ID NO: 165601 - protein, 14 aa, Homo sapiens
  CDR3 for alpha chain variable domain of TCR clone 82801 (TRAV8-1, TRAJ5)
CAVRTDTGRRALTL

SEQ ID NO: 165602 - protein, 14 aa, Homo sapiens
  CDR3 for beta chain variable domain of TCR clone 82801 (TRBV7-8, TRBJ2-3)
CASSFPDGQDTQYF

SEQ ID NO: 165603 - protein, 16 aa, Homo sapiens
  CDR3 for alpha chain variable domain of TCR clone 82802 (TRAV3, TRAJ4)
CAVRPSPSGGYNKLIF

SEQ ID NO: 165604 - protein, 15 aa, Homo sapiens
  CDR3 for beta chain variable domain of TCR clone 82802 (TRBV11-1, TRBJ2-7)
CASSLAPGTAYEQYF

SEQ ID NO: 165605 - protein, 14 aa, Homo sapiens
  CDR3 for alpha chain variable domain of TCR clone 82803 (TRAV26-1, TRAJ45)
CIEVTGGGADGLTF

SEQ ID NO: 165606 - protein, 13 aa, Homo sapiens
  CDR3 for beta chain variable domain of TCR clone 82803 (TRBV7-6, TRBJ1-2)
CASSLVTDYGYTF

SEQ ID NO: 165607 - protein, 16 aa, Homo sapiens
  CDR3 for alpha chain variable domain of TCR clone 82804 (TRAV3, TRAJ37)
CAVRGRGSGNTGKLIF

SEQ ID NO: 165608 - protein, 15 aa, Homo sapiens
  CDR3 for beta chain variable domain of TCR clone 82804 (TRBV7-9, TRBJ1-6)
CASSSPGRGNSPLHF

SEQ ID NO: 165609 - protein, 15 aa, Homo sapiens
  CDR3 for alpha chain variable domain of TCR clone 82805 (TRAV12-2, TRAJ53)
CAVNGGGGSNYKLTF

SEQ ID NO: 165610 - protein, 15 aa, Homo sapiens
  CDR3 for beta chain variable domain of TCR clone 82805 (TRBV28, TRBJ2-7)
CASSPGGRGFYEQYF

SEQ ID NO: 165611 - protein, 19 aa, Homo sapiens
  CDR3 for alpha chain variable domain of TCR clone 82806 (TRAV35, TRAJ22)
CAGQLATVDASGSARQLTF

SEQ ID NO: 165612 - protein, 11 aa, Homo sapiens
  CDR3 for beta chain variable domain of TCR clone 82806 (TRBV19, TRBJ2-7)
CASSILGEQYF

SEQ ID NO: 165613 - protein, 13 aa, Homo sapiens
  CDR3 for alpha chain variable domain of TCR clone 82807 (TRAV8-6, TRAJ49)
CAVNTNTGNQFYF

SEQ ID NO: 165614 - protein, 14 aa, Homo sapiens
  CDR3 for beta chain variable domain of TCR clone 82807 (TRBV5-1, TRBJ2-7)
CASSRGESLYEQYF

SEQ ID NO: 165615 - protein, 15 aa, Homo sapiens
  CDR3 for alpha chain variable domain of TCR clone 82808 (TRAV13-1, TRAJ32)
CAASNGWWCYKQAHL

SEQ ID NO: 165616 - protein, 15 aa, Homo sapiens
  CDR3 for beta chain variable domain of TCR clone 82808 (TRBV20-1, TRBJ1-2)
CSATRTGAFNYGYTF

SEQ ID NO: 165617 - protein, 14 aa, Homo sapiens
  CDR3 for alpha chain variable domain of TCR clone 82809 (TRAV1-2, TRAJ8)
CAVREDTGFQKLVF

SEQ ID NO: 165618 - protein, 16 aa, Homo sapiens
  CDR3 for beta chain variable domain of TCR clone 82809 (TRBV7-3, TRBJ2-1)
CTSSLEGYRSYNEQFF

SEQ ID NO: 165619 - protein, 15 aa, Homo sapiens
  CDR3 for alpha chain variable domain of TCR clone 82810 (TRAV12-1, TRAJ44)
YVVDTPQGTASKLTF

SEQ ID NO: 165620 - protein, 13 aa, Homo sapiens
  CDR3 for beta chain variable domain of TCR clone 82810 (TRBV27, TRBJ2-1)
CASSSGSYNEQFF

SEQ ID NO: 165621 - protein, 14 aa, Homo sapiens
  CDR3 for alpha chain variable domain of TCR clone 82811 (TRAV1-2, TRAJ8)
CAVREDTGSQKLVF

SEQ ID NO: 165622 - protein, 15 aa, Homo sapiens
  CDR3 for beta chain variable domain of TCR clone 82811 (TRBV9, TRBJ1-6)
CASSVAGTGDSPLHF

SEQ ID NO: 165623 - protein, 13 aa, Homo sapiens
  CDR3 for alpha chain variable domain of TCR clone 82812 (TRAV35, TRAJ42)
CAGFPGSQGNLIF

SEQ ID NO: 165624 - protein, 13 aa, Homo sapiens
  CDR3 for beta chain variable domain of TCR clone 82812 (TRBV29-1, TRBJ2-1)
CSVEGGRVNERFF

SEQ ID NO: 165625 - protein, 18 aa, Homo sapiens
  CDR3 for alpha chain variable domain of TCR clone 82813 (TRAV21, TRAJ52)
CAVRPSPAGGTSYGKLTF

SEQ ID NO: 165626 - protein, 15 aa, Homo sapiens
  CDR3 for beta chain variable domain of TCR clone 82813 (TRBV19, TRBJ1-6)
CASSTQGAVGSPLHF

SEQ ID NO: 165627 - protein, 19 aa, Homo sapiens
  CDR3 for alpha chain variable domain of TCR clone 82814 (TRAV3, TRAJ6)
CAVRDRNPGRSGGSYIPTF

SEQ ID NO: 165628 - protein, 15 aa, Homo sapiens
  CDR3 for beta chain variable domain of TCR clone 82814 (TRBV18, TRBJ2-7)
CASSPTFMDSYEQYF

SEQ ID NO: 165629 - protein, 13 aa, Homo sapiens
  CDR3 for alpha chain variable domain of TCR clone 82815 (TRAV29/DV5, TRAJ49)
CAASTNTGNQFYS

SEQ ID NO: 165630 - protein, 14 aa, Homo sapiens
  CDR3 for beta chain variable domain of TCR clone 82815 (TRBV7-2, TRBJ2-7)
CASSLPPGQGPQYF

SEQ ID NO: 165631 - protein, 15 aa, Homo sapiens
  CDR3 for alpha chain variable domain of TCR clone 82816 (TRAV8-3, TRAJ27)
CAVGPSKTNPGKSTF

SEQ ID NO: 165632 - protein, 15 aa, Homo sapiens
  CDR3 for beta chain variable domain of TCR clone 82816 (TRBV7-2, TRBJ2-1)
CASSSGLAGGNEQFF

SEQ ID NO: 165633 - protein, 15 aa, Homo sapiens
  CDR3 for alpha chain variable domain of TCR clone 82817 (TRAV3, TRAJ36)
CAVRASQTGANNLFF

SEQ ID NO: 165634 - protein, 12 aa, Homo sapiens
  CDR3 for beta chain variable domain of TCR clone 82817 (TRBV11-2, TRBJ2-2)
CASSLGGGELFF

SEQ ID NO: 165635 - protein, 13 aa, Homo sapiens
  CDR3 for alpha chain variable domain of TCR clone 82818 (TRAV2, TRAJ15)
CAVASQAGTDLIF

SEQ ID NO: 165636 - protein, 16 aa, Homo sapiens
  CDR3 for beta chain variable domain of TCR clone 82818 (TRBV5-1, TRBJ1-1)
CASSSGGNSLNTEAFF

SEQ ID NO: 165637 - protein, 11 aa, Homo sapiens
  CDR3 for alpha chain variable domain of TCR clone 82819 (TRAV12-3, TRAJ6)
CAMNGSYIPTF

SEQ ID NO: 165638 - protein, 14 aa, Homo sapiens
  CDR3 for beta chain variable domain of TCR clone 82819 (TRBV7-2, TRBJ2-3)
CASSSGISTDTQYF

SEQ ID NO: 165639 - protein, 12 aa, Homo sapiens
  CDR3 for alpha chain variable domain of TCR clone 82820 (TRAV3, TRAJ26)
CAVRDYGQNFVF

SEQ ID NO: 165640 - protein, 16 aa, Homo sapiens
  CDR3 for beta chain variable domain of TCR clone 82820 (TRBV11-2, TRBJ1-2)
CASSPSGREANYGYTF

SEQ ID NO: 165641 - protein, 14 aa, Homo sapiens
  CDR3 for alpha chain variable domain of TCR clone 82821 (TRAV8-4, TRAJ17)
CAVREGAAGNKLTF

SEQ ID NO: 165642 - protein, 13 aa, Homo sapiens
  CDR3 for beta chain variable domain of TCR clone 82821 (TRBV19, TRBJ2-1)
CASSMYRVNEQFF

SEQ ID NO: 165643 - protein, 13 aa, Homo sapiens
  CDR3 for alpha chain variable domain of TCR clone 82822 (TRAV29/DV5, TRAJ49)
CAASTNTGNQFYF

SEQ ID NO: 165644 - protein, 15 aa, Homo sapiens
  CDR3 for beta chain variable domain of TCR clone 82822 (TRBV7-9, TRBJ1-4)
CASSARTGGNEKLFF

SEQ ID NO: 165645 - protein, 13 aa, Homo sapiens
  CDR3 for alpha chain variable domain of TCR clone 82823 (TRAV13-2, TRAJ40)
CAEFTSGTYKYIF

SEQ ID NO: 165646 - protein, 14 aa, Homo sapiens
  CDR3 for beta chain variable domain of TCR clone 82823 (TRBV7-9, TRBJ1-1)
CASSLGGANTEAFF

SEQ ID NO: 165647 - protein, 14 aa, Homo sapiens
  CDR3 for alpha chain variable domain of TCR clone 82824 (TRAV12-3, TRAJ10)
SHLPLTGGGNKLTF

SEQ ID NO: 165648 - protein, 14 aa, Homo sapiens
  CDR3 for beta chain variable domain of TCR clone 82824 (TRBV2, TRBJ2-1)
CASRTGSSYNEQFF

SEQ ID NO: 165649 - protein, 12 aa, Homo sapiens
  CDR3 for alpha chain variable domain of TCR clone 82825 (TRAV12-1, TRAJ34)
CVVAGATDKLIF

SEQ ID NO: 165650 - protein, 19 aa, Homo sapiens
  CDR3 for beta chain variable domain of TCR clone 82825 (TRBV7-2, TRBJ2-3)
CASSFLSRNWGGGTDTQYF

SEQ ID NO: 165651 - protein, 14 aa, Homo sapiens
  CDR3 for alpha chain variable domain of TCR clone 82826 (TRAV1-2, TRAJ16)
CAVNRFSDGQKLPF

SEQ ID NO: 165652 - protein, 14 aa, Homo sapiens
  CDR3 for beta chain variable domain of TCR clone 82826 (TRBV6-1, TRBJ1-3)
CASVQGGGGNTIYF

SEQ ID NO: 165653 - protein, 14 aa, Homo sapiens
  CDR3 for alpha chain variable domain of TCR clone 82827 (TRAV21, TRAJ35)
CAVMPIGFGNVLHL

SEQ ID NO: 165654 - protein, 12 aa, Homo sapiens
  CDR3 for beta chain variable domain of TCR clone 82827 (TRBV7-9, TRBJ2-7)
CASSIKREEQYF

SEQ ID NO: 165655 - protein, 11 aa, Homo sapiens
  CDR3 for alpha chain variable domain of TCR clone 82828 (TRAV16, TRAJ33)
CALHSNYQLIW

SEQ ID NO: 165656 - protein, 15 aa, Homo sapiens
  CDR3 for beta chain variable domain of TCR clone 82828 (TRBV7-2, TRBJ1-5)
CASSLDRGQDQPQHF

SEQ ID NO: 165657 - protein, 13 aa, Homo sapiens
  CDR3 for alpha chain variable domain of TCR clone 82829 (TRAV8-3, TRAJ28)
CAVGAVGSYQLTF

SEQ ID NO: 165658 - protein, 14 aa, Homo sapiens
  CDR3 for beta chain variable domain of TCR clone 82829 (TRBV7-2, TRBJ1-1)
CASSFLTGTTEAFF

SEQ ID NO: 165659 - protein, 16 aa, Homo sapiens
  CDR3 for alpha chain variable domain of TCR clone 82830 (TRAV8-3, TRAJ44)
CAVGASNTGTASNLTF

SEQ ID NO: 165660 - protein, 15 aa, Homo sapiens
  CDR3 for beta chain variable domain of TCR clone 82830 (TRBV27, TRBJ1-5)
CASTFNRGSNQPQHF

SEQ ID NO: 165661 - protein, 15 aa, Homo sapiens
  CDR3 for alpha chain variable domain of TCR clone 82831 (TRAV3, TRAJ21)
CAVREPDFNKFYLDL

SEQ ID NO: 165662 - protein, 15 aa, Homo sapiens
  CDR3 for beta chain variable domain of TCR clone 82831 (TRBV20-1, TRBJ1-1)
CSASRGVTGNTEAFF

SEQ ID NO: 165663 - protein, 16 aa, Homo sapiens
  CDR3 for alpha chain variable domain of TCR clone 82832 (TRAV30, TRAJ24)
CGTEIVDADSWGNSSL

SEQ ID NO: 165664 - protein, 17 aa, Homo sapiens
  CDR3 for beta chain variable domain of TCR clone 82832 (TRBV20-1, TRBJ2-1)
CSASSSGLAGSYNEQFF

SEQ ID NO: 165665 - protein, 14 aa, Homo sapiens
  CDR3 for alpha chain variable domain of TCR clone 82833 (TRAV1-2, TRAJ16)
CAVNRFSDGQKLLF

SEQ ID NO: 165666 - protein, 15 aa, Homo sapiens
  CDR3 for beta chain variable domain of TCR clone 82833 (TRBV20-1, TRBJ2-5)
CSAPPRTGFGETQYF

SEQ ID NO: 165667 - protein, 13 aa, Homo sapiens
  CDR3 for alpha chain variable domain of TCR clone 82834 (TRAV27, TRAJ53)
CAGQGGSNYKLTF

SEQ ID NO: 165668 - protein, 13 aa, Homo sapiens
  CDR3 for beta chain variable domain of TCR clone 82834 (TRBV29-1, TRBJ1-1)
CSVESGCGTEAFF

SEQ ID NO: 165669 - protein, 12 aa, Homo sapiens
  CDR3 for alpha chain variable domain of TCR clone 82835 (TRAV16, TRAJ12)
CAHGDSSCKLIF

SEQ ID NO: 165670 - protein, 12 aa, Homo sapiens
  CDR3 for beta chain variable domain of TCR clone 82835 (TRBV28, TRBJ2-1)
CASSRLVGEQFF

SEQ ID NO: 165671 - protein, 14 aa, Homo sapiens
  CDR3 for alpha chain variable domain of TCR clone 82836 (TRAV8-4, TRAJ38)
CARLNAGNNRTLIW

SEQ ID NO: 165672 - protein, 12 aa, Homo sapiens
  CDR3 for beta chain variable domain of TCR clone 82836 (TRBV6-1, TRBJ2-7)
CASSEPLYEQYF

SEQ ID NO: 165673 - protein, 13 aa, Homo sapiens
  CDR3 for alpha chain variable domain of TCR clone 82837 (TRAV12-3, TRAJ7)
CAMTPYGNSRLAF

SEQ ID NO: 165674 - protein, 16 aa, Homo sapiens
  CDR3 for beta chain variable domain of TCR clone 82837 (TRBV20-1, TRBJ1-4)
CSARPYGGELNEKLFF

SEQ ID NO: 165675 - protein, 11 aa, Homo sapiens
  CDR3 for alpha chain variable domain of TCR clone 82838 (TRAV12-1, TRAJ31)
CVVTFNARLMF

SEQ ID NO: 165676 - protein, 15 aa, Homo sapiens
  CDR3 for beta chain variable domain of TCR clone 82838 (TRBV7-9, TRBJ1-6)
CASSSPGRGNSPLHF

SEQ ID NO: 165677 - protein, 17 aa, Homo sapiens
  CDR3 for alpha chain variable domain of TCR clone 82839 (TRAV3, TRAJ42)
CAVRDRDYGGSQGNLIF

SEQ ID NO: 165678 - protein, 18 aa, Homo sapiens
  CDR3 for beta chain variable domain of TCR clone 82839 (TRBV20-1, TRBJ2-3)
CGASGLAGGPGTTDTQYF

SEQ ID NO: 165679 - protein, 14 aa, Homo sapiens
  CDR3 for alpha chain variable domain of TCR clone 82840 (TRAV29/DV5, TRAJ36)
CTARRKTGANNLFF

SEQ ID NO: 165680 - protein, 15 aa, Homo sapiens
  CDR3 for beta chain variable domain of TCR clone 82840 (TRBV11-2, TRBJ2-1)
CASSKNRGLIYEQFF

SEQ ID NO: 165681 - protein, 16 aa, Homo sapiens
  CDR3 for alpha chain variable domain of TCR clone 82841 (TRAV35, TRAJ28)
CAGQRYSGAGSYPLTF

SEQ ID NO: 165682 - protein, 13 aa, Homo sapiens
  CDR3 for beta chain variable domain of TCR clone 82841 (TRBV19, TRBJ1-2)
CASSQGQVYGYTF

SEQ ID NO: 165683 - protein, 14 aa, Homo sapiens
  CDR3 for alpha chain variable domain of TCR clone 82842 (TRAV21, TRAJ21)
CAVGVEDDFNKFYF

SEQ ID NO: 165684 - protein, 17 aa, Homo sapiens
  CDR3 for beta chain variable domain of TCR clone 82842 (TRBV20-1, TRBJ2-2)
CSASGSGQGGLTGELFF

SEQ ID NO: 165685 - protein, 11 aa, Homo sapiens
  CDR3 for alpha chain variable domain of TCR clone 82843 (TRAV12-3, TRAJ49)
CAANTGNQFYF

SEQ ID NO: 165686 - protein, 12 aa, Homo sapiens
  CDR3 for beta chain variable domain of TCR clone 82843 (TRBV6-3, TRBJ2-7)
CASSEPRFEQYF

SEQ ID NO: 165687 - protein, 14 aa, Homo sapiens
  CDR3 for alpha chain variable domain of TCR clone 82844 (TRAV12-2, TRAJ13)
CAVKKTGGYQKVTF

SEQ ID NO: 165688 - protein, 13 aa, Homo sapiens
  CDR3 for beta chain variable domain of TCR clone 82844 (TRBV19, TRBJ1-2)
CASSQGQVYGYTF

SEQ ID NO: 165689 - protein, 12 aa, Homo sapiens
  CDR3 for alpha chain variable domain of TCR clone 82845 (TRAV21, TRAJ33)
CAKMDSNYQLVW

SEQ ID NO: 165690 - protein, 17 aa, Homo sapiens
  CDR3 for beta chain variable domain of TCR clone 82845 (TRBV20-1, TRBJ2-2)
CSASGSGQGGLTGELFF

SEQ ID NO: 165691 - protein, 21 aa, Homo sapiens
  CDR3 for alpha chain variable domain of TCR clone 82846 (TRAV30, TRAJ6)
CGFIEGGSYIPTLEEEPALLF

SEQ ID NO: 165692 - protein, 13 aa, Homo sapiens
  CDR3 for beta chain variable domain of TCR clone 82846 (TRBV5-4, TRBJ2-5)
CASSPVSQETQYF

SEQ ID NO: 165693 - protein, 15 aa, Homo sapiens
  CDR3 for alpha chain variable domain of TCR clone 82847 (TRAV12-1, TRAJ9)
CVVSFGDTGGFKTIF

SEQ ID NO: 165694 - protein, 12 aa, Homo sapiens
  CDR3 for beta chain variable domain of TCR clone 82847 (TRBV11-2, TRBJ2-5)
CASSPPAETQYF

SEQ ID NO: 165695 - protein, 14 aa, Homo sapiens
  CDR3 for alpha chain variable domain of TCR clone 82848 (TRAV1-2, TRAJ16)
CAVNRFSDGQKLLF

SEQ ID NO: 165696 - protein, 15 aa, Homo sapiens
  CDR3 for beta chain variable domain of TCR clone 82848 (TRBV9, TRBJ1-6)
SASSVAGTGDSPLHF

SEQ ID NO: 165697 - protein, 12 aa, Homo sapiens
  CDR3 for alpha chain variable domain of TCR clone 82849 (TRAV12-2, TRAJ40)
CAVKIPLRNLQM

SEQ ID NO: 165698 - protein, 14 aa, Homo sapiens
  CDR3 for beta chain variable domain of TCR clone 82849 (TRBV20-1, TRBJ1-1)
CSAQTRIGGTEAFF

SEQ ID NO: 165699 - protein, 13 aa, Homo sapiens
  CDR3 for alpha chain variable domain of TCR clone 82850 (TRAV8-2, TRAJ44)
CSRGAGTASKLTF

SEQ ID NO: 165700 - protein, 13 aa, Homo sapiens
  CDR3 for beta chain variable domain of TCR clone 82850 (TRBV12-4, TRBJ2-7)
CAGSRQASYEQYF

SEQ ID NO: 165701 - protein, 14 aa, Homo sapiens
  CDR3 for alpha chain variable domain of TCR clone 82851 (TRAV26-2, TRAJ31)
CILIPGNNNARLMF

SEQ ID NO: 165702 - protein, 16 aa, Homo sapiens
  CDR3 for beta chain variable domain of TCR clone 82851 (TRBV7-3, TRBJ2-1)
CASSLVGGSSNNEQFF

SEQ ID NO: 165703 - protein, 15 aa, Homo sapiens
  CDR3 for alpha chain variable domain of TCR clone 82852 (TRAV17, TRAJ56)
CATEPFTGANSKLTF

SEQ ID NO: 165704 - protein, 15 aa, Homo sapiens
  CDR3 for beta chain variable domain of TCR clone 82852 (TRBV28, TRBJ1-5)
CASSSTGGYVQPQHF

SEQ ID NO: 165705 - protein, 16 aa, Homo sapiens
  CDR3 for alpha chain variable domain of TCR clone 82853 (TRAV3, TRAJ10)
CAVRDMRAGGGNKLTF

SEQ ID NO: 165706 - protein, 14 aa, Homo sapiens
  CDR3 for beta chain variable domain of TCR clone 82853 (TRBV25-1, TRBJ1-1)
CASTQLGGNTEAFF

SEQ ID NO: 165707 - protein, 14 aa, Homo sapiens
  CDR3 for alpha chain variable domain of TCR clone 82854 (TRAV35, TRAJ22)
CAGLRPGSAMQLTF

SEQ ID NO: 165708 - protein, 13 aa, Homo sapiens
  CDR3 for beta chain variable domain of TCR clone 82854 (TRBV12-5, TRBJ2-3)
CASGDRQSDTQYF

SEQ ID NO: 165709 - protein, 12 aa, Homo sapiens
  CDR3 for alpha chain variable domain of TCR clone 82855 (TRAV12-3, TRAJ40)
CAMSSGTYKYIF

SEQ ID NO: 165710 - protein, 13 aa, Homo sapiens
  CDR3 for beta chain variable domain of TCR clone 82855 (TRBV7-6, TRBJ1-2)
CASSLVADYGYTF

SEQ ID NO: 165711 - protein, 16 aa, Homo sapiens
  CDR3 for alpha chain variable domain of TCR clone 82856 (TRAV30, TRAJ57)
CGTGWAPQGGSDKLVF

SEQ ID NO: 165712 - protein, 14 aa, Homo sapiens
  CDR3 for beta chain variable domain of TCR clone 82856 (TRBV18, TRBJ1-1)
CASSPGFQGVEAFF

SEQ ID NO: 165713 - protein, 14 aa, Homo sapiens
  CDR3 for alpha chain variable domain of TCR clone 82857 (TRAV8-3, TRAJ15)
CAVGRHQAGTALIF

SEQ ID NO: 165714 - protein, 13 aa, Homo sapiens
  CDR3 for beta chain variable domain of TCR clone 82857 (TRBV5-5, TRBJ1-2)
CASSFWRGEDYTF

SEQ ID NO: 165715 - protein, 16 aa, Homo sapiens
  CDR3 for alpha chain variable domain of TCR clone 82858 (TRAV12-2, TRAJ10)
CAVNRVLTGGGNKLTF

SEQ ID NO: 165716 - protein, 12 aa, Homo sapiens
  CDR3 for beta chain variable domain of TCR clone 82858 (TRBV28, TRBJ2-7)
CASSFRSYEQYF

SEQ ID NO: 165717 - protein, 14 aa, Homo sapiens
  CDR3 for alpha chain variable domain of TCR clone 82859 (TRAV12-1, TRAJ12)
CVVTRMDSSYKLIF

SEQ ID NO: 165718 - protein, 13 aa, Homo sapiens
  CDR3 for beta chain variable domain of TCR clone 82859 (TRBV20-1, TRBJ1-1)
CSARGGGNTEAFV

SEQ ID NO: 165719 - protein, 18 aa, Homo sapiens
  CDR3 for alpha chain variable domain of TCR clone 82860 (TRAV21, TRAJ52)
CAVRPSPAGGTSYGKLTF

SEQ ID NO: 165720 - protein, 14 aa, Homo sapiens
  CDR3 for beta chain variable domain of TCR clone 82860 (TRBV7-9, TRBJ2-5)
CASSLDTAQETQYF

SEQ ID NO: 165721 - protein, 12 aa, Homo sapiens
  CDR3 for alpha chain variable domain of TCR clone 82861 (TRAV21, TRAJ33)
CAKMDSNYQLIW

SEQ ID NO: 165722 - protein, 14 aa, Homo sapiens
  CDR3 for beta chain variable domain of TCR clone 82861 (TRBV2, TRBJ2-7)
CASSLTSGGYDQYF

SEQ ID NO: 165723 - protein, 18 aa, Homo sapiens
  CDR3 for alpha chain variable domain of TCR clone 82862 (TRAV13-1, TRAJ52)
CAASKRSAGGTSYGKLTF

SEQ ID NO: 165724 - protein, 13 aa, Homo sapiens
  CDR3 for beta chain variable domain of TCR clone 82862 (TRBV10-3, TRBJ2-7)
CAIRAGGPHEQYF

SEQ ID NO: 165725 - protein, 13 aa, Homo sapiens
  CDR3 for alpha chain variable domain of TCR clone 82863 (TRAV2, TRAJ40)
CAVVTSGTYKYIF

SEQ ID NO: 165726 - protein, 16 aa, Homo sapiens
  CDR3 for beta chain variable domain of TCR clone 82863 (TRBV11-2, TRBJ2-7)
CASSPTTGGVSYEQYF

SEQ ID NO: 165727 - protein, 13 aa, Homo sapiens
  CDR3 for alpha chain variable domain of TCR clone 82864 (TRAV13-2, TRAJ13)
CADRPGGYQKVTF

SEQ ID NO: 165728 - protein, 15 aa, Homo sapiens
  CDR3 for beta chain variable domain of TCR clone 82864 (TRBV11-3, TRBJ2-7)
CASSPGPASSYEQYF

SEQ ID NO: 165729 - protein, 10 aa, Homo sapiens
  CDR3 for alpha chain variable domain of TCR clone 82865 (TRAV13-1, TRAJ27)
CAPLARQINL

SEQ ID NO: 165730 - protein, 13 aa, Homo sapiens
  CDR3 for beta chain variable domain of TCR clone 82865 (TRBV7-3, TRBJ1-1)
CASSHDWGAEAFF

SEQ ID NO: 165731 - protein, 13 aa, Homo sapiens
  CDR3 for alpha chain variable domain of TCR clone 82866 (TRAV12-1, TRAJ7)
CVVNMRGNNRLAF

SEQ ID NO: 165732 - protein, 15 aa, Homo sapiens
  CDR3 for beta chain variable domain of TCR clone 82866 (TRBV27, TRBJ2-3)
CASSLGRAATDTQYF

SEQ ID NO: 165733 - protein, 13 aa, Homo sapiens
  CDR3 for alpha chain variable domain of TCR clone 82867 (TRAV21, TRAJ20)
CVVGLRVDYKLSF

SEQ ID NO: 165734 - protein, 13 aa, Homo sapiens
  CDR3 for beta chain variable domain of TCR clone 82867 (TRBV6-1, TRBJ1-1)
CASSRQGNTEAFF

SEQ ID NO: 165735 - protein, 14 aa, Homo sapiens
  CDR3 for alpha chain variable domain of TCR clone 82868 (TRAV13-1, TRAJ44)
CAAKATGTASKLTF

SEQ ID NO: 165736 - protein, 14 aa, Homo sapiens
  CDR3 for beta chain variable domain of TCR clone 82868 (TRBV19, TRBJ2-2)
CASSTLHRSGEMFF

SEQ ID NO: 165737 - protein, 13 aa, Homo sapiens
  CDR3 for alpha chain variable domain of TCR clone 82869 (TRAV12-3, TRAJ31)
CAMSANNNARLMF

SEQ ID NO: 165738 - protein, 16 aa, Homo sapiens
  CDR3 for beta chain variable domain of TCR clone 82869 (TRBV7-9, TRBJ1-2)
CASSLDFSSGEDGYTF

SEQ ID NO: 165739 - protein, 13 aa, Homo sapiens
  CDR3 for alpha chain variable domain of TCR clone 82870 (TRAV13-1, TRAJ4)
CAARIGGYNKLIF

SEQ ID NO: 165740 - protein, 16 aa, Homo sapiens
  CDR3 for beta chain variable domain of TCR clone 82870 (TRBV20-1, TRBJ2-1)
CSAPGLAGSYSDEQFF

SEQ ID NO: 165741 - protein, 11 aa, Homo sapiens
  CDR3 for alpha chain variable domain of TCR clone 82871 (TRAV26-1, TRAJ37)
FIVRVGRKLIF

SEQ ID NO: 165742 - protein, 13 aa, Homo sapiens
  CDR3 for beta chain variable domain of TCR clone 82871 (TRBV14, TRBJ1-2)
CASSEDRRYGYTF

SEQ ID NO: 165743 - protein, 12 aa, Homo sapiens
  CDR3 for alpha chain variable domain of TCR clone 82872 (TRAV2, TRAJ31)
CAVEDNNARLMF

SEQ ID NO: 165744 - protein, 17 aa, Homo sapiens
  CDR3 for beta chain variable domain of TCR clone 82872 (TRBV7-9, TRBJ1-1)
CASSSPPGQGQNTEAFF

SEQ ID NO: 165745 - protein, 14 aa, Homo sapiens
  CDR3 for alpha chain variable domain of TCR clone 82873 (TRAV2, TRAJ9)
CAVDPNTGGFKTIF

SEQ ID NO: 165746 - protein, 13 aa, Homo sapiens
  CDR3 for beta chain variable domain of TCR clone 82873 (TRBV12-4, TRBJ2-7)
CASSPTETYEQYF

SEQ ID NO: 165747 - protein, 17 aa, Homo sapiens
  CDR3 for alpha chain variable domain of TCR clone 82874 (TRAV13-1, TRAJ5)
CSNPSLSRDTGRRALTF

SEQ ID NO: 165748 - protein, 17 aa, Homo sapiens
  CDR3 for beta chain variable domain of TCR clone 82874 (TRBV24-1, TRBJ2-1)
CATSDVSNSGTYNEQFF

SEQ ID NO: 165749 - protein, 16 aa, Homo sapiens
  CDR3 for alpha chain variable domain of TCR clone 82875 (TRAV1-2, TRAJ18)
CAVRVERGSTLGGLYF

SEQ ID NO: 165750 - protein, 16 aa, Homo sapiens
  CDR3 for beta chain variable domain of TCR clone 82875 (TRBV20-1, TRBJ2-7)
CSASTSGRLSSYEQYF

SEQ ID NO: 165751 - protein, 17 aa, Homo sapiens
  CDR3 for alpha chain variable domain of TCR clone 82876 (TRAV35, TRAJ52)
CAGQLAAGCTSYGKLTF

SEQ ID NO: 165752 - protein, 12 aa, Homo sapiens
  CDR3 for beta chain variable domain of TCR clone 82876 (TRBV20-1, TRBJ2-7)
CSAGRRQSEQYF

SEQ ID NO: 165753 - protein, 14 aa, Homo sapiens
  CDR3 for alpha chain variable domain of TCR clone 82877 (TRAV6, TRAJ6)
CALPTSGGSYIPTF

SEQ ID NO: 165754 - protein, 17 aa, Homo sapiens
  CDR3 for beta chain variable domain of TCR clone 82877 (TRBV5-1, TRBJ2-5)
CASSPVALGQNQEAQYF

SEQ ID NO: 165755 - protein, 13 aa, Homo sapiens
  CDR3 for alpha chain variable domain of TCR clone 82878 (TRAV39, TRAJ58)
CAGEETSGSRLTF

SEQ ID NO: 165756 - protein, 13 aa, Homo sapiens
  CDR3 for beta chain variable domain of TCR clone 82878 (TRBV15, TRBJ2-7)
CATRTTGHYEQYF

SEQ ID NO: 165757 - protein, 14 aa, Homo sapiens
  CDR3 for alpha chain variable domain of TCR clone 82879 (TRAV12-3, TRAJ10)
SHLPLTGGGNKLTF

SEQ ID NO: 165758 - protein, 14 aa, Homo sapiens
  CDR3 for beta chain variable domain of TCR clone 82879 (TRBV11-3, TRBJ2-7)
CASSSDRNTYEQYF

SEQ ID NO: 165759 - protein, 14 aa, Homo sapiens
  CDR3 for alpha chain variable domain of TCR clone 82880 (TRAV1-2, TRAJ16)
CAVNRFSDGQKLLF

SEQ ID NO: 165760 - protein, 13 aa, Homo sapiens
  CDR3 for beta chain variable domain of TCR clone 82880 (TRBV19, TRBJ1-2)
CASSVPGQDGYTL

SEQ ID NO: 165761 - protein, 15 aa, Homo sapiens
  CDR3 for alpha chain variable domain of TCR clone 82881 (TRAV26-1, TRAJ44)
CIVRTNTGTASKLTF

SEQ ID NO: 165762 - protein, 16 aa, Homo sapiens
  CDR3 for beta chain variable domain of TCR clone 82881 (TRBV7-7, TRBJ2-1)
CASSLASGTSYNEQFF

SEQ ID NO: 165763 - protein, 14 aa, Homo sapiens
  CDR3 for alpha chain variable domain of TCR clone 82882 (TRAV13-1, TRAJ39)
CAASYDNAGNMLTF

SEQ ID NO: 165764 - protein, 13 aa, Homo sapiens
  CDR3 for beta chain variable domain of TCR clone 82882 (TRBV24-1, TRBJ1-4)
CATNNGRSEKLFF

SEQ ID NO: 165765 - protein, 14 aa, Homo sapiens
  CDR3 for alpha chain variable domain of TCR clone 82883 (TRAV1-2, TRAJ16)
CAVNRFSDGQKLLF

SEQ ID NO: 165766 - protein, 13 aa, Homo sapiens
  CDR3 for beta chain variable domain of TCR clone 82883 (TRBV20-1, TRBJ1-1)
CSARLGQGTKAFF

SEQ ID NO: 165767 - protein, 15 aa, Homo sapiens
  CDR3 for alpha chain variable domain of TCR clone 82884 (TRAV21, TRAJ53)
CATLNSGGSNYKLTF

SEQ ID NO: 165768 - protein, 13 aa, Homo sapiens
  CDR3 for beta chain variable domain of TCR clone 82884 (TRBV27, TRBJ1-1)
CASSLSIGAEAFF

SEQ ID NO: 165769 - protein, 14 aa, Homo sapiens
  CDR3 for alpha chain variable domain of TCR clone 82885 (TRAV2, TRAJ37)
CAVDFTSNTGKLIF

SEQ ID NO: 165770 - protein, 14 aa, Homo sapiens
  CDR3 for beta chain variable domain of TCR clone 82885 (TRBV7-9, TRBJ1-1)
CASTPLQSYTEAFF

SEQ ID NO: 165771 - protein, 14 aa, Homo sapiens
  CDR3 for alpha chain variable domain of TCR clone 82886 (TRAV12-3, TRAJ9)
CAMSPNTGGFKTIF

SEQ ID NO: 165772 - protein, 12 aa, Homo sapiens
  CDR3 for beta chain variable domain of TCR clone 82886 (TRBV19, TRBJ1-5)
CASGIAQQPQHF

SEQ ID NO: 165773 - protein, 11 aa, Homo sapiens
  CDR3 for alpha chain variable domain of TCR clone 82887 (TRAV12-3, TRAJ43)
CAMSVSNDKRF

SEQ ID NO: 165774 - protein, 13 aa, Homo sapiens
  CDR3 for beta chain variable domain of TCR clone 82887 (TRBV20-1, TRBJ1-1)
CSAPLGGGTEAFF

SEQ ID NO: 165775 - protein, 14 aa, Homo sapiens
  CDR3 for alpha chain variable domain of TCR clone 82888 (TRAV8-6, TRAJ9)
CAVSSYTGGFKTIF

SEQ ID NO: 165776 - protein, 15 aa, Homo sapiens
  CDR3 for beta chain variable domain of TCR clone 82888 (TRBV2, TRBJ1-2)
CASSESRTVNYGYAF

SEQ ID NO: 165777 - protein, 16 aa, Homo sapiens
  CDR3 for alpha chain variable domain of TCR clone 82889 (TRAV30, TRAJ24)
CGTAIVDADSWGKFQF

SEQ ID NO: 165778 - protein, 18 aa, Homo sapiens
  CDR3 for beta chain variable domain of TCR clone 82889 (TRBV7-9, TRBJ2-7)
CASSLTTSGSRTWYEQYF

SEQ ID NO: 165779 - protein, 15 aa, Homo sapiens
  CDR3 for alpha chain variable domain of TCR clone 82890 (TRAV23/DV6, TRAJ18)
CAARYRGSTLGRLYF

SEQ ID NO: 165780 - protein, 13 aa, Homo sapiens
  CDR3 for beta chain variable domain of TCR clone 82890 (TRBV7-2, TRBJ2-7)
CASSSPSGREQYF

SEQ ID NO: 165781 - protein, 15 aa, Homo sapiens
  CDR3 for alpha chain variable domain of TCR clone 82891 (TRAV29/DV5, TRAJ54)
CAASPIIQGAQKLVF

SEQ ID NO: 165782 - protein, 16 aa, Homo sapiens
  CDR3 for beta chain variable domain of TCR clone 82891 (TRBV19, TRBJ2-1)
CASSKAGPSSYNEQFF

SEQ ID NO: 165783 - protein, 12 aa, Homo sapiens
  CDR3 for alpha chain variable domain of TCR clone 82892 (TRAV26-1, TRAJ31)
CIVRNNNARLMF

SEQ ID NO: 165784 - protein, 15 aa, Homo sapiens
  CDR3 for beta chain variable domain of TCR clone 82892 (TRBV20-1, TRBJ2-4)
CSARDLTGGPNIQYF

SEQ ID NO: 165785 - protein, 17 aa, Homo sapiens
  CDR3 for alpha chain variable domain of TCR clone 82893 (TRAV22, TRAJ53)
CAVEFSNSGGSNYKLTF

SEQ ID NO: 165786 - protein, 15 aa, Homo sapiens
  CDR3 for beta chain variable domain of TCR clone 82893 (TRBV2, TRBJ2-2)
CASSRETVGTGELFF

SEQ ID NO: 165787 - protein, 10 aa, Homo sapiens
  CDR3 for alpha chain variable domain of TCR clone 82894 (TRAV36/DV7, TRAJ48)
CAVGNEKLTF

SEQ ID NO: 165788 - protein, 17 aa, Homo sapiens
  CDR3 for beta chain variable domain of TCR clone 82894 (TRBV7-8, TRBJ2-6)
CASSAGTGGAGANVLTF

SEQ ID NO: 165789 - protein, 12 aa, Homo sapiens
  CDR3 for alpha chain variable domain of TCR clone 82895 (TRAV12-3, TRAJ17)
CAMTLTGNKLTF

SEQ ID NO: 165790 - protein, 10 aa, Homo sapiens
  CDR3 for beta chain variable domain of TCR clone 82895 (TRBV20-1, TRBJ2-7)
IVSGMDEQYF

SEQ ID NO: 165791 - protein, 12 aa, Homo sapiens
  CDR3 for alpha chain variable domain of TCR clone 82896 (TRAV8-3, TRAJ27)
CAVGAEAGKSAF

SEQ ID NO: 165792 - protein, 14 aa, Homo sapiens
  CDR3 for beta chain variable domain of TCR clone 82896 (TRBV2, TRBJ2-1)
CASRLIVGHDEQFF

SEQ ID NO: 165793 - protein, 14 aa, Homo sapiens
  CDR3 for alpha chain variable domain of TCR clone 82897 (TRAV1-2, TRAJ8)
CAVREDTGFQKLVF

SEQ ID NO: 165794 - protein, 15 aa, Homo sapiens
  CDR3 for beta chain variable domain of TCR clone 82897 (TRBV18, TRBJ1-1)
CASSGRTGEVTEAFF

SEQ ID NO: 165795 - protein, 13 aa, Homo sapiens
  CDR3 for alpha chain variable domain of TCR clone 82898 (TRAV41, TRAJ38)
CAGNAGNNRKLIW

SEQ ID NO: 165796 - protein, 15 aa, Homo sapiens
  CDR3 for beta chain variable domain of TCR clone 82898 (TRBV15, TRBJ1-4)
CATSRDMGSYEKLFF

SEQ ID NO: 165797 - protein, 16 aa, Homo sapiens
  CDR3 for alpha chain variable domain of TCR clone 82899 (TRAV12-3, TRAJ53)
CAMSPGSGGSNYKLTF

SEQ ID NO: 165798 - protein, 11 aa, Homo sapiens
  CDR3 for beta chain variable domain of TCR clone 82899 (TRBV29-1, TRBJ2-5)
SSEDRTGTQYF

SEQ ID NO: 165799 - protein, 12 aa, Homo sapiens
  CDR3 for alpha chain variable domain of TCR clone 82900 (TRAV2, TRAJ31)
CAVEDNNARLMF

SEQ ID NO: 165800 - protein, 14 aa, Homo sapiens
  CDR3 for beta chain variable domain of TCR clone 82900 (TRBV5-4, TRBJ1-1)
CASSLDSRRDEAFF

SEQ ID NO: 165801 - protein, 13 aa, Homo sapiens
  CDR3 for alpha chain variable domain of TCR clone 82901 (TRAV21, TRAJ15)
CAVANQSGTALIF

SEQ ID NO: 165802 - protein, 14 aa, Homo sapiens
  CDR3 for beta chain variable domain of TCR clone 82901 (TRBV27, TRBJ2-2)
CASSLGAATGELFF

SEQ ID NO: 165803 - protein, 15 aa, Homo sapiens
  CDR3 for alpha chain variable domain of TCR clone 82902 (TRAV8-2, TRAJ40)
CFVLGTTSGTYKYIF

SEQ ID NO: 165804 - protein, 16 aa, Homo sapiens
  CDR3 for beta chain variable domain of TCR clone 82902 (TRBV7-3, TRBJ2-1)
CASSLEGYRSYNEQFF

SEQ ID NO: 165805 - protein, 12 aa, Homo sapiens
  CDR3 for alpha chain variable domain of TCR clone 82903 (TRAV8-3, TRAJ26)
CAGDNYGQNFVF

SEQ ID NO: 165806 - protein, 11 aa, Homo sapiens
  CDR3 for beta chain variable domain of TCR clone 82903 (TRBV29-1, TRBJ2-5)
CSEGRTGTQYF

SEQ ID NO: 165807 - protein, 14 aa, Homo sapiens
  CDR3 for alpha chain variable domain of TCR clone 82904 (TRAV8-4, TRAJ29)
CAVSAVDGNTPLVF

SEQ ID NO: 165808 - protein, 13 aa, Homo sapiens
  CDR3 for beta chain variable domain of TCR clone 82904 (TRBV12-4, TRBJ2-7)
CASSFQGRYEQYF

SEQ ID NO: 165809 - protein, 15 aa, Homo sapiens
  CDR3 for alpha chain variable domain of TCR clone 82905 (TRAV17, TRAJ56)
CATEPFTGANSKLTF

SEQ ID NO: 165810 - protein, 15 aa, Homo sapiens
  CDR3 for beta chain variable domain of TCR clone 82905 (TRBV28, TRBJ1-5)
CASSRTGGYVQPQRF

SEQ ID NO: 165811 - protein, 13 aa, Homo sapiens
  CDR3 for alpha chain variable domain of TCR clone 82906 (TRAV1-2, TRAJ9)
CAVLNTGGFKTIF

SEQ ID NO: 165812 - protein, 15 aa, Homo sapiens
  CDR3 for beta chain variable domain of TCR clone 82906 (TRBV7-3, TRBJ2-1)
CASNPTGGGEVEQFF

SEQ ID NO: 165813 - protein, 15 aa, Homo sapiens
  CDR3 for alpha chain variable domain of TCR clone 82907 (TRAV13-1, TRAJ44)
CAASRGGGPASKLTF

SEQ ID NO: 165814 - protein, 14 aa, Homo sapiens
  CDR3 for beta chain variable domain of TCR clone 82907 (TRBV7-2, TRBJ2-5)
CASSPRGSSETQYF

SEQ ID NO: 165815 - protein, 14 aa, Homo sapiens
  CDR3 for alpha chain variable domain of TCR clone 82908 (TRAV1-2, TRAJ8)
CAVREDTGFQKLVF

SEQ ID NO: 165816 - protein, 15 aa, Homo sapiens
  CDR3 for beta chain variable domain of TCR clone 82908 (TRBV4-3, TRBJ1-1)
CASSQELGRGTEAFF

SEQ ID NO: 165817 - protein, 15 aa, Homo sapiens
  CDR3 for alpha chain variable domain of TCR clone 82909 (TRAV13-2, TRAJ35)
CAESPNIGFGNVLHC

SEQ ID NO: 165818 - protein, 13 aa, Homo sapiens
  CDR3 for beta chain variable domain of TCR clone 82909 (TRBV10-2, TRBJ2-5)
CASGTLAREIQYF

SEQ ID NO: 165819 - protein, 13 aa, Homo sapiens
  CDR3 for alpha chain variable domain of TCR clone 82910 (TRAV23/DV6, TRAJ47)
CAASMTRGNKLVF

SEQ ID NO: 165820 - protein, 16 aa, Homo sapiens
  CDR3 for beta chain variable domain of TCR clone 82910 (TRBV7-3, TRBJ2-2)
CASSLKRGTLSGELFF

SEQ ID NO: 165821 - protein, 14 aa, Homo sapiens
  CDR3 for alpha chain variable domain of TCR clone 82911 (TRAV1-2, TRAJ16)
CAVNRFSDGQKLLF

SEQ ID NO: 165822 - protein, 13 aa, Homo sapiens
  CDR3 for beta chain variable domain of TCR clone 82911 (TRBV7-9, TRBJ1-2)
CASSLNQNYGYTF

SEQ ID NO: 165823 - protein, 16 aa, Homo sapiens
  CDR3 for alpha chain variable domain of TCR clone 82912 (TRAV3, TRAJ23)
CAVKIGIYNQGGKLIF

SEQ ID NO: 165824 - protein, 17 aa, Homo sapiens
  CDR3 for beta chain variable domain of TCR clone 82912 (TRBV10-3, TRBJ2-6)
CAISESTATSGANVLTF

SEQ ID NO: 165825 - protein, 14 aa, Homo sapiens
  CDR3 for alpha chain variable domain of TCR clone 82913 (TRAV26-1, TRAJ40)
CIVRVARGTYKYIF

SEQ ID NO: 165826 - protein, 14 aa, Homo sapiens
  CDR3 for beta chain variable domain of TCR clone 82913 (TRBV7-3, TRBJ2-7)
CASSLRADSYEQYF

SEQ ID NO: 165827 - protein, 15 aa, Homo sapiens
  CDR3 for alpha chain variable domain of TCR clone 82914 (TRAV23/DV6, TRAJ18)
CAARYRGSTLGRLYF

SEQ ID NO: 165828 - protein, 13 aa, Homo sapiens
  CDR3 for beta chain variable domain of TCR clone 82914 (TRBV7-3, TRBJ1-1)
CASSQDWGAEAFF

SEQ ID NO: 165829 - protein, 11 aa, Homo sapiens
  CDR3 for alpha chain variable domain of TCR clone 82915 (TRAV2, TRAJ13)
CASGGYQKDTF

SEQ ID NO: 165830 - protein, 18 aa, Homo sapiens
  CDR3 for beta chain variable domain of TCR clone 82915 (TRBV11-2, TRBJ2-3)
CASSLGGASRGAPNTQYF

SEQ ID NO: 165831 - protein, 17 aa, Homo sapiens
  CDR3 for alpha chain variable domain of TCR clone 82916 (TRAV3, TRAJ6)
CAVRDGPRAGGSYIPTF

SEQ ID NO: 165832 - protein, 18 aa, Homo sapiens
  CDR3 for beta chain variable domain of TCR clone 82916 (TRBV11-2, TRBJ2-6)
CASSLNPFLGTGANVLTF

SEQ ID NO: 165833 - protein, 13 aa, Homo sapiens
  CDR3 for alpha chain variable domain of TCR clone 82917 (TRAV27, TRAJ17)
CAGAATAGNTLTF

SEQ ID NO: 165834 - protein, 15 aa, Homo sapiens
  CDR3 for beta chain variable domain of TCR clone 82917 (TRBV5-1, TRBJ2-3)
CASRNQAGSTDTQYF

SEQ ID NO: 165835 - protein, 10 aa, Homo sapiens
  CDR3 for alpha chain variable domain of TCR clone 82918 (TRAV1-2, TRAJ20)
CALNDYKLSF

SEQ ID NO: 165836 - protein, 11 aa, Homo sapiens
  CDR3 for beta chain variable domain of TCR clone 82918 (TRBV29-1, TRBJ2-5)
CSEDRTGAQYF

SEQ ID NO: 165837 - protein, 12 aa, Homo sapiens
  CDR3 for alpha chain variable domain of TCR clone 82919 (TRAV12-3, TRAJ17)
CAMTPTGNKLTF

SEQ ID NO: 165838 - protein, 14 aa, Homo sapiens
  CDR3 for beta chain variable domain of TCR clone 82919 (TRBV7-3, TRBJ2-1)
CASSLAGGTNEQFF

SEQ ID NO: 165839 - protein, 14 aa, Homo sapiens
  CDR3 for alpha chain variable domain of TCR clone 82920 (TRAV8-2, TRAJ4)
CVVSPSRGYNKLIF

SEQ ID NO: 165840 - protein, 15 aa, Homo sapiens
  CDR3 for beta chain variable domain of TCR clone 82920 (TRBV4-1, TRBJ1-4)
CASSDTGGTNEKLFF

SEQ ID NO: 165841 - protein, 16 aa, Homo sapiens
  CDR3 for alpha chain variable domain of TCR clone 82921 (TRAV12-3, TRAJ53)
CAMSPGSGGSNYKLTF

SEQ ID NO: 165842 - protein, 16 aa, Homo sapiens
  CDR3 for beta chain variable domain of TCR clone 82921 (TRBV29-1, TRBJ2-5)
SAARTNGDPVLRARHA

SEQ ID NO: 165843 - protein, 11 aa, Homo sapiens
  CDR3 for alpha chain variable domain of TCR clone 82922 (TRAV12-3, TRAJ49)
CAMSSDNQFYF

SEQ ID NO: 165844 - protein, 15 aa, Homo sapiens
  CDR3 for beta chain variable domain of TCR clone 82922 (TRBV10-2, TRBJ2-6)
CASSEQGTGANVLTF

SEQ ID NO: 165845 - protein, 12 aa, Homo sapiens
  CDR3 for alpha chain variable domain of TCR clone 82923 (TRAV12-2, TRAJ10)
WGVTGGGNKLTF

SEQ ID NO: 165846 - protein, 14 aa, Homo sapiens
  CDR3 for beta chain variable domain of TCR clone 82923 (TRBV25-1, TRBJ1-1)
CTSTHLGGNTEAFF

SEQ ID NO: 165847 - protein, 15 aa, Homo sapiens
  CDR3 for alpha chain variable domain of TCR clone 82924 (TRAV12-3, TRAJ27)
CAMRAYNTNAGKSTF

SEQ ID NO: 165848 - protein, 15 aa, Homo sapiens
  CDR3 for beta chain variable domain of TCR clone 82924 (TRBV7-3, TRBJ2-1)
CASSPTGGGEVEQFF

SEQ ID NO: 165849 - protein, 18 aa, Homo sapiens
  CDR3 for alpha chain variable domain of TCR clone 82925 (TRAV8-3, TRAJ4)
WVRDPTSNDPGGYNKLIF

SEQ ID NO: 165850 - protein, 13 aa, Homo sapiens
  CDR3 for beta chain variable domain of TCR clone 82925 (TRBV20-1, TRBJ1-2)
CSATGIQGSGDTF

SEQ ID NO: 165851 - protein, 12 aa, Homo sapiens
  CDR3 for alpha chain variable domain of TCR clone 82926 (TRAV21, TRAJ33)
CAKMDSNYQLIW

SEQ ID NO: 165852 - protein, 13 aa, Homo sapiens
  CDR3 for beta chain variable domain of TCR clone 82926 (TRBV10-3, TRBJ2-7)
CASKLAVNYEQYF

SEQ ID NO: 165853 - protein, 16 aa, Homo sapiens
  CDR3 for alpha chain variable domain of TCR clone 82927 (TRAV17, TRAJ35)
CATAEGGIGFGNVLNC

SEQ ID NO: 165854 - protein, 16 aa, Homo sapiens
  CDR3 for beta chain variable domain of TCR clone 82927 (TRBV6-5, TRBJ2-7)
CASSSDPTSGFYEQYF

SEQ ID NO: 165855 - protein, 13 aa, Homo sapiens
  CDR3 for alpha chain variable domain of TCR clone 82928 (TRAV13-1, TRAJ21)
CAASIYNVNKFYF

SEQ ID NO: 165856 - protein, 13 aa, Homo sapiens
  CDR3 for beta chain variable domain of TCR clone 82928 (TRBV27, TRBJ1-4)
CASSLMGDEKLFF

SEQ ID NO: 165857 - protein, 13 aa, Homo sapiens
  CDR3 for alpha chain variable domain of TCR clone 82929 (TRAV2, TRAJ29)
CAAQNSGNTPLVS

SEQ ID NO: 165858 - protein, 14 aa, Homo sapiens
  CDR3 for beta chain variable domain of TCR clone 82929 (TRBV7-9, TRBJ2-4)
CASSLAMGGNIQYF

SEQ ID NO: 165859 - protein, 18 aa, Homo sapiens
  CDR3 for alpha chain variable domain of TCR clone 82930 (TRAV21, TRAJ52)
CAVRPSPAGGASYGKLTF

SEQ ID NO: 165860 - protein, 15 aa, Homo sapiens
  CDR3 for beta chain variable domain of TCR clone 82930 (TRBV20-1, TRBJ2-5)
CSATPLTGDQEAQYF

SEQ ID NO: 165861 - protein, 13 aa, Homo sapiens
  CDR3 for alpha chain variable domain of TCR clone 82931 (TRAV29/DV5, TRAJ31)
CAASRNNNARLMF

SEQ ID NO: 165862 - protein, 12 aa, Homo sapiens
  CDR3 for beta chain variable domain of TCR clone 82931 (TRBV14, TRBJ2-7)
CASSRYKDEQYF

SEQ ID NO: 165863 - protein, 14 aa, Homo sapiens
  CDR3 for alpha chain variable domain of TCR clone 82932 (TRAV12-2, TRAJ17)
CAVNIRAAGNKLTF

SEQ ID NO: 165864 - protein, 16 aa, Homo sapiens
  CDR3 for beta chain variable domain of TCR clone 82932 (TRBV20-1, TRBJ2-6)
CSASSQGYDGANVLTF

SEQ ID NO: 165865 - protein, 12 aa, Homo sapiens
  CDR3 for alpha chain variable domain of TCR clone 82933 (TRAV12-1, TRAJ29)
CVVYSGTYKYIF

SEQ ID NO: 165866 - protein, 15 aa, Homo sapiens
  CDR3 for beta chain variable domain of TCR clone 82933 (TRBV5-1, TRBJ2-1)
CASSPPRAPYNEQFF

SEQ ID NO: 165867 - protein, 12 aa, Homo sapiens
  CDR3 for alpha chain variable domain of TCR clone 82934 (TRAV16, TRAJ10)
CSRTGGGNKLTF

SEQ ID NO: 165868 - protein, 16 aa, Homo sapiens
  CDR3 for beta chain variable domain of TCR clone 82934 (TRBV7-7, TRBJ2-1)
CASSLASGTSYNEQFF

SEQ ID NO: 165869 - protein, 12 aa, Homo sapiens
  CDR3 for alpha chain variable domain of TCR clone 82935 (TRAV8-3, TRAJ26)
CAVDNYGQNFVF

SEQ ID NO: 165870 - protein, 15 aa, Homo sapiens
  CDR3 for beta chain variable domain of TCR clone 82935 (TRBV11-2, TRBJ2-1)
CASSLGTSGLNEQFF

SEQ ID NO: 165871 - protein, 14 aa, Homo sapiens
  CDR3 for alpha chain variable domain of TCR clone 82936 (TRAV12-2, TRAJ13)
CAVKKTGGYQKVTF

SEQ ID NO: 165872 - protein, 16 aa, Homo sapiens
  CDR3 for beta chain variable domain of TCR clone 82936 (TRBV11-1, TRBJ2-7)
CASSAQTGTLSYEQYF

SEQ ID NO: 165873 - protein, 16 aa, Homo sapiens
  CDR3 for alpha chain variable domain of TCR clone 82937 (TRAV27, TRAJ13)
CAGAKSESGGYQKVTF

SEQ ID NO: 165874 - protein, 15 aa, Homo sapiens
  CDR3 for beta chain variable domain of TCR clone 82937 (TRBV29-1, TRBJ2-1)
CSVGRHALFYNEQFF

SEQ ID NO: 165875 - protein, 15 aa, Homo sapiens
  CDR3 for alpha chain variable domain of TCR clone 82938 (TRAV8-4, TRAJ3)
CAVTGVNLVQQCFQD

SEQ ID NO: 165876 - protein, 16 aa, Homo sapiens
  CDR3 for beta chain variable domain of TCR clone 82938 (TRBV4-2, TRBJ1-1)
CASSQAGFGMNTEAFF

SEQ ID NO: 165877 - protein, 13 aa, Homo sapiens
  CDR3 for alpha chain variable domain of TCR clone 82939 (TRAV9-2, TRAJ53)
CALSGGSNYKLTF

SEQ ID NO: 165878 - protein, 16 aa, Homo sapiens
  CDR3 for beta chain variable domain of TCR clone 82939 (TRBV2, TRBJ2-3)
CASSTSVEGVTDTQYF

SEQ ID NO: 165879 - protein, 14 aa, Homo sapiens
  CDR3 for alpha chain variable domain of TCR clone 82940 (TRAV16, TRAJ3)
CSLSQYSSASKIIF

SEQ ID NO: 165880 - protein, 14 aa, Homo sapiens
  CDR3 for beta chain variable domain of TCR clone 82940 (TRBV6-3, TRBJ2-1)
CASLHSAYYNEQFF

SEQ ID NO: 165881 - protein, 14 aa, Homo sapiens
  CDR3 for alpha chain variable domain of TCR clone 82941 (TRAV8-2, TRAJ45)
CVVSAGGGADGLTF

SEQ ID NO: 165882 - protein, 12 aa, Homo sapiens
  CDR3 for beta chain variable domain of TCR clone 82941 (TRBV12-4, TRBJ2-1)
CASSVVRVEQFF

SEQ ID NO: 165883 - protein, 12 aa, Homo sapiens
  CDR3 for alpha chain variable domain of TCR clone 82942 (TRAV27, TRAJ35)
CAGADFGNVLHC

SEQ ID NO: 165884 - protein, 16 aa, Homo sapiens
  CDR3 for beta chain variable domain of TCR clone 82942 (TRBV6-1, TRBJ2-1)
CASILRQGSSYNEQLF

SEQ ID NO: 165885 - protein, 13 aa, Homo sapiens
  CDR3 for alpha chain variable domain of TCR clone 82943 (TRAV21, TRAJ47)
CAVSGLYGNKLVI

SEQ ID NO: 165886 - protein, 17 aa, Homo sapiens
  CDR3 for beta chain variable domain of TCR clone 82943 (TRBV15, TRBJ2-3)
CATSGTTSEEGTDTQYF

SEQ ID NO: 165887 - protein, 16 aa, Homo sapiens
  CDR3 for alpha chain variable domain of TCR clone 82944 (TRAV29/DV5, TRAJ30)
QCTSVLQANRDDKIIF

SEQ ID NO: 165888 - protein, 13 aa, Homo sapiens
  CDR3 for beta chain variable domain of TCR clone 82944 (TRBV12-5, TRBJ2-3)
CASQNRGTDTQYF

SEQ ID NO: 165889 - protein, 16 aa, Homo sapiens
  CDR3 for alpha chain variable domain of TCR clone 82945 (TRAV38-1, TRAJ56)
CAFMKRQTGANSKLTF

SEQ ID NO: 165890 - protein, 14 aa, Homo sapiens
  CDR3 for beta chain variable domain of TCR clone 82945 (TRBV7-9, TRBJ1-1)
CASTPLQSYTEAFF

SEQ ID NO: 165891 - protein, 14 aa, Homo sapiens
  CDR3 for alpha chain variable domain of TCR clone 82946 (TRAV17, TRAJ16)
RATADFSDGQKLLF

SEQ ID NO: 165892 - protein, 12 aa, Homo sapiens
  CDR3 for beta chain variable domain of TCR clone 82946 (TRBV24-1, TRBJ1-1)
CATLYPDTEAFF

SEQ ID NO: 165893 - protein, 15 aa, Homo sapiens
  CDR3 for alpha chain variable domain of TCR clone 82947 (TRAV12-3, TRAJ6)
CAMSATTGGSYIPTF

SEQ ID NO: 165894 - protein, 13 aa, Homo sapiens
  CDR3 for beta chain variable domain of TCR clone 82947 (TRBV24-1, TRBJ2-2)
CATSDWSTGELFF

SEQ ID NO: 165895 - protein, 14 aa, Homo sapiens
  CDR3 for alpha chain variable domain of TCR clone 82948 (TRAV26-1, TRAJ38)
CIADNAGNNRKVIW

SEQ ID NO: 165896 - protein, 13 aa, Homo sapiens
  CDR3 for beta chain variable domain of TCR clone 82948 (TRBV20-1, TRBJ1-1)
CSARGGGNTEAFF

SEQ ID NO: 165897 - protein, 13 aa, Homo sapiens
  CDR3 for alpha chain variable domain of TCR clone 82949 (TRAV8-6, TRAJ49)
CAVITNTGNQFYF

SEQ ID NO: 165898 - protein, 14 aa, Homo sapiens
  CDR3 for beta chain variable domain of TCR clone 82949 (TRBV20-1, TRBJ1-1)
CSAQTRIGGTEAFF

SEQ ID NO: 165899 - protein, 16 aa, Homo sapiens
  CDR3 for alpha chain variable domain of TCR clone 82950 (TRAV23/DV6, TRAJ21)
CAASSGGGTTSTNFTL

SEQ ID NO: 165900 - protein, 11 aa, Homo sapiens
  CDR3 for beta chain variable domain of TCR clone 82950 (TRBV7-8, TRBJ2-7)
CASSLPLEQYF

SEQ ID NO: 165901 - protein, 12 aa, Homo sapiens
  CDR3 for alpha chain variable domain of TCR clone 82951 (TRAV20, TRAJ37)
CALPSNTGKLIF

SEQ ID NO: 165902 - protein, 15 aa, Homo sapiens
  CDR3 for beta chain variable domain of TCR clone 82951 (TRBV7-3, TRBJ2-2)
CASSETGQGTGELFF

SEQ ID NO: 165903 - protein, 17 aa, Homo sapiens
  CDR3 for alpha chain variable domain of TCR clone 82952 (TRAV4, TRAJ42)
CLVGVLNYGGSQGNLIF

SEQ ID NO: 165904 - protein, 12 aa, Homo sapiens
  CDR3 for beta chain variable domain of TCR clone 82952 (TRBV20-1, TRBJ2-1)
CSAQYTYNEQFF

SEQ ID NO: 165905 - protein, 16 aa, Homo sapiens
  CDR3 for alpha chain variable domain of TCR clone 82953 (TRAV21, TRAJ33)
CAVSPASMDSNYQLTW

SEQ ID NO: 165906 - protein, 17 aa, Homo sapiens
  CDR3 for beta chain variable domain of TCR clone 82953 (TRBV2, TRBJ1-4)
CASSKRELTQGEEKLFF

SEQ ID NO: 165907 - protein, 14 aa, Homo sapiens
  CDR3 for alpha chain variable domain of TCR clone 82954 (TRAV26-1, TRAJ39)
CIVRGSRAGNMLTF

SEQ ID NO: 165908 - protein, 15 aa, Homo sapiens
  CDR3 for beta chain variable domain of TCR clone 82954 (TRBV7-9, TRBJ1-5)
CVSSQGHQPNQPQHF

SEQ ID NO: 165909 - protein, 14 aa, Homo sapiens
  CDR3 for alpha chain variable domain of TCR clone 82955 (TRAV12-2, TRAJ5)
CAVNRSTGKRALTF

SEQ ID NO: 165910 - protein, 12 aa, Homo sapiens
  CDR3 for beta chain variable domain of TCR clone 82955 (TRBV19, TRBJ1-5)
CASSIAQQPQHF

SEQ ID NO: 165911 - protein, 12 aa, Homo sapiens
  CDR3 for alpha chain variable domain of TCR clone 82956 (TRAV8-4, TRAJ43)
CAVSVNNNDMRF

SEQ ID NO: 165912 - protein, 13 aa, Homo sapiens
  CDR3 for beta chain variable domain of TCR clone 82956 (TRBV12-4, TRBJ1-1)
CASSPGTGFEAFF

SEQ ID NO: 165913 - protein, 16 aa, Homo sapiens
  CDR3 for alpha chain variable domain of TCR clone 82957 (TRAV3, TRAJ10)
CAVRDMRAGGGNKLTF

SEQ ID NO: 165914 - protein, 14 aa, Homo sapiens
  CDR3 for beta chain variable domain of TCR clone 82957 (TRBV6-3, TRBJ2-2)
CASTYTPDTGELFF

SEQ ID NO: 165915 - protein, 12 aa, Homo sapiens
  CDR3 for alpha chain variable domain of TCR clone 82958 (TRAV22, TRAJ7)
CAASYGNNRLAF

SEQ ID NO: 165916 - protein, 14 aa, Homo sapiens
  CDR3 for beta chain variable domain of TCR clone 82958 (TRBV12-4, TRBJ2-5)
CASSFGASGGTQYF

SEQ ID NO: 165917 - protein, 13 aa, Homo sapiens
  CDR3 for alpha chain variable domain of TCR clone 82959 (TRAV13-2, TRAJ8)
CAESYTGFQKLVF

SEQ ID NO: 165918 - protein, 12 aa, Homo sapiens
  CDR3 for beta chain variable domain of TCR clone 82959 (TRBV11-2, TRBJ2-1)
CASSPGNNEQFF

SEQ ID NO: 165919 - protein, 13 aa, Homo sapiens
  CDR3 for alpha chain variable domain of TCR clone 82960 (TRAV13-1, TRAJ21)
CAASIYNFNKFHF

SEQ ID NO: 165920 - protein, 13 aa, Homo sapiens
  CDR3 for beta chain variable domain of TCR clone 82960 (TRBV27, TRBJ1-4)
CASSLMGDEKLFF

SEQ ID NO: 165921 - protein, 14 aa, Homo sapiens
  CDR3 for alpha chain variable domain of TCR clone 82961 (TRAV12-1, TRAJ17)
CVVNPKAAGNKLTF

SEQ ID NO: 165922 - protein, 16 aa, Homo sapiens
  CDR3 for beta chain variable domain of TCR clone 82961 (TRBV20-1, TRBJ2-1)
YSASASGYSSYNEQFF

SEQ ID NO: 165923 - protein, 14 aa, Homo sapiens
  CDR3 for alpha chain variable domain of TCR clone 82962 (TRAV1-2, TRAJ16)
CAVNRFSDGQKLLF

SEQ ID NO: 165924 - protein, 15 aa, Homo sapiens
  CDR3 for beta chain variable domain of TCR clone 82962 (TRBV28, TRBJ1-3)
CASGATGNSGNTMYF

SEQ ID NO: 165925 - protein, 20 aa, Homo sapiens
  CDR3 for alpha chain variable domain of TCR clone 82963 (TRAV4, TRAJ29)
CCVLLPRGCVPFSRNTPLVF

SEQ ID NO: 165926 - protein, 17 aa, Homo sapiens
  CDR3 for beta chain variable domain of TCR clone 82963 (TRBV25-1, TRBJ2-7)
CASSDARVVFSSYEQYF

SEQ ID NO: 165927 - protein, 14 aa, Homo sapiens
  CDR3 for alpha chain variable domain of TCR clone 82964 (TRAV29/DV5, TRAJ36)
CAARLKTGANNLFF

SEQ ID NO: 165928 - protein, 15 aa, Homo sapiens
  CDR3 for beta chain variable domain of TCR clone 82964 (TRBV27, TRBJ2-1)
CASSNGGGSSNEQFF

SEQ ID NO: 165929 - protein, 12 aa, Homo sapiens
  CDR3 for alpha chain variable domain of TCR clone 82965 (TRAV13-1, TRAJ48)
CAANFGNEKLTF

SEQ ID NO: 165930 - protein, 13 aa, Homo sapiens
  CDR3 for beta chain variable domain of TCR clone 82965 (TRBV7-3, TRBJ1-1)
CASSQDWGAEAFL

SEQ ID NO: 165931 - protein, 14 aa, Homo sapiens
  CDR3 for alpha chain variable domain of TCR clone 82966 (TRAV1-2, TRAJ16)
CAVRGFSDGQKLLF

SEQ ID NO: 165932 - protein, 14 aa, Homo sapiens
  CDR3 for beta chain variable domain of TCR clone 82966 (TRBV18, TRBJ2-7)
CASSPRGGAYEQYF

SEQ ID NO: 165933 - protein, 12 aa, Homo sapiens
  CDR3 for alpha chain variable domain of TCR clone 82967 (TRAV12-1, TRAJ40)
CVFYSGTYKYIF

SEQ ID NO: 165934 - protein, 16 aa, Homo sapiens
  CDR3 for beta chain variable domain of TCR clone 82967 (TRBV2, TRBJ2-7)
CASSEPWTGPSYEQYF

SEQ ID NO: 165935 - protein, 13 aa, Homo sapiens
  CDR3 for alpha chain variable domain of TCR clone 82968 (TRAV12-3, TRAJ56)
CALATGANSKLTF

SEQ ID NO: 165936 - protein, 12 aa, Homo sapiens
  CDR3 for beta chain variable domain of TCR clone 82968 (TRBV7-8, TRBJ2-7)
CASSLGDREQYF

SEQ ID NO: 165937 - protein, 16 aa, Homo sapiens
  CDR3 for alpha chain variable domain of TCR clone 82969 (TRAV12-2, TRAJ18)
CAVTTDRGSTLGRLYF

SEQ ID NO: 165938 - protein, 15 aa, Homo sapiens
  CDR3 for beta chain variable domain of TCR clone 82969 (TRBV9, TRBJ1-6)
CASSVSGTGDSPLHF

SEQ ID NO: 165939 - protein, 15 aa, Homo sapiens
  CDR3 for alpha chain variable domain of TCR clone 82970 (TRAV21, TRAJ53)
CATLNSGGSNYKLTF

SEQ ID NO: 165940 - protein, 20 aa, Homo sapiens
  CDR3 for beta chain variable domain of TCR clone 82970 (TRBV28, TRBJ2-1)
CASTPIGRSPGLAGGNEQFF

SEQ ID NO: 165941 - protein, 13 aa, Homo sapiens
  CDR3 for alpha chain variable domain of TCR clone 82971 (TRAV21, TRAJ27)
CAARPGNAGRSTF

SEQ ID NO: 165942 - protein, 16 aa, Homo sapiens
  CDR3 for beta chain variable domain of TCR clone 82971 (TRBV20-1, TRBJ1-2)
CSASMGQGVANYGYTF

SEQ ID NO: 165943 - protein, 15 aa, Homo sapiens
  CDR3 for alpha chain variable domain of TCR clone 82972 (TRAV2, TRAJ9)
CAVEDRGTEGFKTIF

SEQ ID NO: 165944 - protein, 16 aa, Homo sapiens
  CDR3 for beta chain variable domain of TCR clone 82972 (TRBV24-1, TRBJ2-3)
CATSDPGTGATDTQYF

SEQ ID NO: 165945 - protein, 14 aa, Homo sapiens
  CDR3 for alpha chain variable domain of TCR clone 82973 (TRAV13-1, TRAJ44)
CAAKATGTASKLTF

SEQ ID NO: 165946 - protein, 13 aa, Homo sapiens
  CDR3 for beta chain variable domain of TCR clone 82973 (TRBV12-4, TRBJ1-2)
CASSLRQGKGYTF

SEQ ID NO: 165947 - protein, 15 aa, Homo sapiens
  CDR3 for alpha chain variable domain of TCR clone 82974 (TRAV8-3, TRAJ11)
CAVGLLNSGYSTLTF

SEQ ID NO: 165948 - protein, 13 aa, Homo sapiens
  CDR3 for beta chain variable domain of TCR clone 82974 (TRBV7-6, TRBJ1-2)
CASSLVADYGYTF

SEQ ID NO: 165949 - protein, 15 aa, Homo sapiens
  CDR3 for alpha chain variable domain of TCR clone 82975 (TRAV27, TRAJ38)
CAARRNAGNNRKLIW

SEQ ID NO: 165950 - protein, 17 aa, Homo sapiens
  CDR3 for beta chain variable domain of TCR clone 82975 (TRBV20-1, TRBJ2-2)
CSAIGSGQGGLTGELFF

SEQ ID NO: 165951 - protein, 13 aa, Homo sapiens
  CDR3 for alpha chain variable domain of TCR clone 82976 (TRAV3, TRAJ27)
CAVRPLGAGKSTF

SEQ ID NO: 165952 - protein, 15 aa, Homo sapiens
  CDR3 for beta chain variable domain of TCR clone 82976 (TRBV18, TRBJ1-4)
CASSPTTAYNEKLFF

SEQ ID NO: 165953 - protein, 12 aa, Homo sapiens
  CDR3 for alpha chain variable domain of TCR clone 82977 (TRAV12-2, TRAJ4)
GWPEGGYNKLIF

SEQ ID NO: 165954 - protein, 15 aa, Homo sapiens
  CDR3 for beta chain variable domain of TCR clone 82977 (TRBV9, TRBJ1-6)
CASSVAGTGNSPLHF

SEQ ID NO: 165955 - protein, 17 aa, Homo sapiens
  CDR3 for alpha chain variable domain of TCR clone 82978 (TRAV17, TRAJ52)
CATERPSGGTSYGKLTF

SEQ ID NO: 165956 - protein, 13 aa, Homo sapiens
  CDR3 for beta chain variable domain of TCR clone 82978 (TRBV20-1, TRBJ1-1)
CSARVGGNTEAFF

SEQ ID NO: 165957 - protein, 13 aa, Homo sapiens
  CDR3 for alpha chain variable domain of TCR clone 82979 (TRAV12-2, TRAJ20)
CAVYPSNDYKLSF

SEQ ID NO: 165958 - protein, 15 aa, Homo sapiens
  CDR3 for beta chain variable domain of TCR clone 82979 (TRBV18, TRBJ1-2)
CASSPGNGPGYGYTF

SEQ ID NO: 165959 - protein, 14 aa, Homo sapiens
  CDR3 for alpha chain variable domain of TCR clone 82980 (TRAV30, TRAJ26)
CGTEIVSYGRNFVF

SEQ ID NO: 165960 - protein, 13 aa, Homo sapiens
  CDR3 for beta chain variable domain of TCR clone 82980 (TRBV19, TRBJ1-3)
CASRLSLGNTIYF

SEQ ID NO: 165961 - protein, 13 aa, Homo sapiens
  CDR3 for alpha chain variable domain of TCR clone 82981 (TRAV13-1, TRAJ10)
CAATAGGGNKLTF

SEQ ID NO: 165962 - protein, 14 aa, Homo sapiens
  CDR3 for beta chain variable domain of TCR clone 82981 (TRBV12-4, TRBJ2-7)
CASSPAGLKYEQYS

SEQ ID NO: 165963 - protein, 11 aa, Homo sapiens
  CDR3 for alpha chain variable domain of TCR clone 82982 (TRAV29/DV5, TRAJ49)
CAAVPGNQFYF

SEQ ID NO: 165964 - protein, 13 aa, Homo sapiens
  CDR3 for beta chain variable domain of TCR clone 82982 (TRBV4-2, TRBJ1-1)
CASSQAGNTEAFF

SEQ ID NO: 165965 - protein, 13 aa, Homo sapiens
  CDR3 for alpha chain variable domain of TCR clone 82983 (TRAV12-2, TRAJ20)
CAVYPSSDYKLSF

SEQ ID NO: 165966 - protein, 15 aa, Homo sapiens
  CDR3 for beta chain variable domain of TCR clone 82983 (TRBV27, TRBJ2-5)
CASSLYPRGGETQYF

SEQ ID NO: 165967 - protein, 14 aa, Homo sapiens
  CDR3 for alpha chain variable domain of TCR clone 82984 (TRAV12-3, TRAJ54)
CATRGIQGAQKLVF

SEQ ID NO: 165968 - protein, 13 aa, Homo sapiens
  CDR3 for beta chain variable domain of TCR clone 82984 (TRBV19, TRBJ1-1)
CASSPSNGGEAFF

SEQ ID NO: 165969 - protein, 13 aa, Homo sapiens
  CDR3 for alpha chain variable domain of TCR clone 82985 (TRAV3, TRAJ3)
CAVADSSASKIIF

SEQ ID NO: 165970 - protein, 13 aa, Homo sapiens
  CDR3 for beta chain variable domain of TCR clone 82985 (TRBV19, TRBJ2-2)
CASSIWSTGELFF

SEQ ID NO: 165971 - protein, 14 aa, Homo sapiens
  CDR3 for alpha chain variable domain of TCR clone 82986 (TRAV3, TRAJ22)
CAERPGRFCKATDL

SEQ ID NO: 165972 - protein, 16 aa, Homo sapiens
  CDR3 for beta chain variable domain of TCR clone 82986 (TRBV5-4, TRBJ2-3)
CASQQPGAGGADTQYF

SEQ ID NO: 165973 - protein, 13 aa, Homo sapiens
  CDR3 for alpha chain variable domain of TCR clone 82987 (TRAV13-1, TRAJ6)
CAARRGGRYIPTF

SEQ ID NO: 165974 - protein, 16 aa, Homo sapiens
  CDR3 for beta chain variable domain of TCR clone 82987 (TRBV7-9, TRBJ2-2)
CASSLATGVGTGELFF

SEQ ID NO: 165975 - protein, 14 aa, Homo sapiens
  CDR3 for alpha chain variable domain of TCR clone 82988 (TRAV1-2, TRAJ33)
CAVRAPDSNYQLIW

SEQ ID NO: 165976 - protein, 12 aa, Homo sapiens
  CDR3 for beta chain variable domain of TCR clone 82988 (TRBV11-2, TRBJ2-2)
CASSLGGGELFF

SEQ ID NO: 165977 - protein, 15 aa, Homo sapiens
  CDR3 for alpha chain variable domain of TCR clone 82989 (TRAV26-1, TRAJ44)
CIVRANTGTASRLTF

SEQ ID NO: 165978 - protein, 16 aa, Homo sapiens
  CDR3 for beta chain variable domain of TCR clone 82989 (TRBV7-7, TRBJ2-1)
CASSLASGTSYNEQFL

SEQ ID NO: 165979 - protein, 13 aa, Homo sapiens
  CDR3 for alpha chain variable domain of TCR clone 82990 (TRAV17, TRAJ5)
CAPMDTGRRALTF

SEQ ID NO: 165980 - protein, 15 aa, Homo sapiens
  CDR3 for beta chain variable domain of TCR clone 82990 (TRBV6-6, TRBJ2-5)
CTSSPGGGLEETQYF

SEQ ID NO: 165981 - protein, 16 aa, Homo sapiens
  CDR3 for alpha chain variable domain of TCR clone 82991 (TRAV12-1, TRAJ53)
CVVTSVAGGSNYKLTF

SEQ ID NO: 165982 - protein, 14 aa, Homo sapiens
  CDR3 for beta chain variable domain of TCR clone 82991 (TRBV7-2, TRBJ2-3)
CASSLEGRTDTQYF

SEQ ID NO: 165983 - protein, 12 aa, Homo sapiens
  CDR3 for alpha chain variable domain of TCR clone 82992 (TRAV26-1, TRAJ17)
CIVRSAGNKLTF

SEQ ID NO: 165984 - protein, 15 aa, Homo sapiens
  CDR3 for beta chain variable domain of TCR clone 82992 (TRBV7-6, TRBJ1-2)
CASSSGGRGGCGYTF

SEQ ID NO: 165985 - protein, 15 aa, Homo sapiens
  CDR3 for alpha chain variable domain of TCR clone 82993 (TRAV8-4, TRAJ29)
CAVSEDFRGNKPLVF

SEQ ID NO: 165986 - protein, 18 aa, Homo sapiens
  CDR3 for beta chain variable domain of TCR clone 82993 (TRBV20-1, TRBJ2-6)
CSARTLAGGPSGANVLTF

SEQ ID NO: 165987 - protein, 14 aa, Homo sapiens
  CDR3 for alpha chain variable domain of TCR clone 82994 (TRAV6, TRAJ6)
CALPTSGGSYIPTF

SEQ ID NO: 165988 - protein, 17 aa, Homo sapiens
  CDR3 for beta chain variable domain of TCR clone 82994 (TRBV5-1, TRBJ2-5)
CASSPVVLGQNQETQYL

SEQ ID NO: 165989 - protein, 12 aa, Homo sapiens
  CDR3 for alpha chain variable domain of TCR clone 82995 (TRAV10, TRAJ6)
CVVSEGSYIPTF

SEQ ID NO: 165990 - protein, 19 aa, Homo sapiens
  CDR3 for beta chain variable domain of TCR clone 82995 (TRBV4-3, TRBJ2-7)
CASSQGGRGLRAVLRAGHQ

SEQ ID NO: 165991 - protein, 14 aa, Homo sapiens
  CDR3 for alpha chain variable domain of TCR clone 82996 (TRAV12-2, TRAJ40)
CAVKIPSGTYKYIF

SEQ ID NO: 165992 - protein, 12 aa, Homo sapiens
  CDR3 for beta chain variable domain of TCR clone 82996 (TRBV11-2, TRBJ2-2)
CASRLGGGELFF

SEQ ID NO: 165993 - protein, 14 aa, Homo sapiens
  CDR3 for alpha chain variable domain of TCR clone 82997 (TRAV12-1, TRAJ30)
CVPTGTNRDDKIIF

SEQ ID NO: 165994 - protein, 11 aa, Homo sapiens
  CDR3 for beta chain variable domain of TCR clone 82997 (TRBV4-1, TRBJ2-2)
CAGEHTGELFF

SEQ ID NO: 165995 - protein, 14 aa, Homo sapiens
  CDR3 for alpha chain variable domain of TCR clone 82998 (TRAV36/DV7, TRAJ32)
CAVGHVGATNKLIF

SEQ ID NO: 165996 - protein, 15 aa, Homo sapiens
  CDR3 for beta chain variable domain of TCR clone 82998 (TRBV28, TRBJ2-1)
CASSIIAGGRSEQFF

SEQ ID NO: 165997 - protein, 12 aa, Homo sapiens
  CDR3 for alpha chain variable domain of TCR clone 82999 (TRAV16, TRAJ10)
CSRTGGGNKLTF

SEQ ID NO: 165998 - protein, 15 aa, Homo sapiens
  CDR3 for beta chain variable domain of TCR clone 82999 (TRBV6-3, TRBJ2-7)
CASSSPGTVFYEQYS

SEQ ID NO: 165999 - protein, 13 aa, Homo sapiens
  CDR3 for alpha chain variable domain of TCR clone 83000 (TRAV17, TRAJ29)
CATDAFRKHTSCL

SEQ ID NO: 166000 - protein, 13 aa, Homo sapiens
  CDR3 for beta chain variable domain of TCR clone 83000 (TRBV5-7, TRBJ2-6)
CASTSSGANGLTF

SEQ ID NO: 166001 - protein, 10 aa, Homo sapiens
  CDR3 for alpha chain variable domain of TCR clone 83001 (TRAV12-3, TRAJ18)
CAMSAEAQPW

SEQ ID NO: 166002 - protein, 13 aa, Homo sapiens
  CDR3 for beta chain variable domain of TCR clone 83001 (TRBV15, TRBJ1-6)
CATSGGLNSHLHF

SEQ ID NO: 166003 - protein, 11 aa, Homo sapiens
  CDR3 for alpha chain variable domain of TCR clone 83002 (TRAV3, TRAJ21)
RAVGNFNKFYF

SEQ ID NO: 166004 - protein, 14 aa, Homo sapiens
  CDR3 for beta chain variable domain of TCR clone 83002 (TRBV29-1, TRBJ2-2)
CSGRGSGNTGELFF

SEQ ID NO: 166005 - protein, 16 aa, Homo sapiens
  CDR3 for alpha chain variable domain of TCR clone 83003 (TRAV3, TRAJ37)
CAVRGKGSGNTGKLIF

SEQ ID NO: 166006 - protein, 14 aa, Homo sapiens
  CDR3 for beta chain variable domain of TCR clone 83003 (TRBV6-1, TRBJ1-3)
CASVQGGGGNTMYF

SEQ ID NO: 166007 - protein, 17 aa, Homo sapiens
  CDR3 for alpha chain variable domain of TCR clone 83004 (TRAV12-3, TRAJ6)
CAMSARGGPGGSYIPTF

SEQ ID NO: 166008 - protein, 12 aa, Homo sapiens
  CDR3 for beta chain variable domain of TCR clone 83004 (TRBV12-4, TRBJ2-3)
CASSTLPDTQYF

SEQ ID NO: 166009 - protein, 14 aa, Homo sapiens
  CDR3 for alpha chain variable domain of TCR clone 83005 (TRAV12-2, TRAJ13)
CAVKKTGGYQKVTF

SEQ ID NO: 166010 - protein, 15 aa, Homo sapiens
  CDR3 for beta chain variable domain of TCR clone 83005 (TRBV6-1, TRBJ2-7)
CASSESMGDFYEQYF

SEQ ID NO: 166011 - protein, 13 aa, Homo sapiens
  CDR3 for alpha chain variable domain of TCR clone 83006 (TRAV2, TRAJ21)
CAVEDLDFNKFYF

SEQ ID NO: 166012 - protein, 15 aa, Homo sapiens
  CDR3 for beta chain variable domain of TCR clone 83006 (TRBV28, TRBJ2-5)
CASSPGQGSIETQYF

SEQ ID NO: 166013 - protein, 11 aa, Homo sapiens
  CDR3 for alpha chain variable domain of TCR clone 83007 (TRAV2, TRAJ21)
CAVFNFNKFYF

SEQ ID NO: 166014 - protein, 14 aa, Homo sapiens
  CDR3 for beta chain variable domain of TCR clone 83007 (TRBV15, TRBJ2-3)
CATRSGTSTDTQYL

SEQ ID NO: 166015 - protein, 13 aa, Homo sapiens
  CDR3 for alpha chain variable domain of TCR clone 83008 (TRAV13-1, TRAJ47)
CAATLTGGNKLVF

SEQ ID NO: 166016 - protein, 14 aa, Homo sapiens
  CDR3 for beta chain variable domain of TCR clone 83008 (TRBV12-4, TRBJ1-2)
CASSNLRGNYVYTF

SEQ ID NO: 166017 - protein, 13 aa, Homo sapiens
  CDR3 for alpha chain variable domain of TCR clone 83009 (TRAV12-3, TRAJ13)
CAMTSGGYQKVTF

SEQ ID NO: 166018 - protein, 13 aa, Homo sapiens
  CDR3 for beta chain variable domain of TCR clone 83009 (TRBV7-9, TRBJ1-2)
CASSLKQYYGYTF

SEQ ID NO: 166019 - protein, 17 aa, Homo sapiens
  CDR3 for alpha chain variable domain of TCR clone 83010 (TRAV26-1, TRAJ53)
CIVRVDDSGGSNYKLTF

SEQ ID NO: 166020 - protein, 15 aa, Homo sapiens
  CDR3 for beta chain variable domain of TCR clone 83010 (TRBV11-3, TRBJ2-3)
CASLKDGREGDTQYF

SEQ ID NO: 166021 - protein, 11 aa, Homo sapiens
  CDR3 for alpha chain variable domain of TCR clone 83011 (TRAV3, TRAJ17)
PRGAAGYKLTF

SEQ ID NO: 166022 - protein, 16 aa, Homo sapiens
  CDR3 for beta chain variable domain of TCR clone 83011 (TRBV7-6, TRBJ2-1)
CASSAPGPSSYNEQFF

SEQ ID NO: 166023 - protein, 15 aa, Homo sapiens
  CDR3 for alpha chain variable domain of TCR clone 83012 (TRAV13-1, TRAJ10)
CAATILTGGGNKLTF

SEQ ID NO: 166024 - protein, 14 aa, Homo sapiens
  CDR3 for beta chain variable domain of TCR clone 83012 (TRBV19, TRBJ2-1)
CARGARSFQWEQFF

SEQ ID NO: 166025 - protein, 15 aa, Homo sapiens
  CDR3 for alpha chain variable domain of TCR clone 83013 (TRAV16, TRAJ39)
CALSPSNNAGNMLTF

SEQ ID NO: 166026 - protein, 16 aa, Homo sapiens
  CDR3 for beta chain variable domain of TCR clone 83013 (TRBV12-4, TRBJ1-5)
CASSRPVGGSNQPQHF

SEQ ID NO: 166027 - protein, 14 aa, Homo sapiens
  CDR3 for alpha chain variable domain of TCR clone 83014 (TRAV13-1, TRAJ40)
CAASMTSVTYKYIF

SEQ ID NO: 166028 - protein, 13 aa, Homo sapiens
  CDR3 for beta chain variable domain of TCR clone 83014 (TRBV4-1, TRBJ2-5)
CASSQEVQETQYF

SEQ ID NO: 166029 - protein, 12 aa, Homo sapiens
  CDR3 for alpha chain variable domain of TCR clone 83015 (TRAV3, TRAJ7)
CADLLWEQQTRF

SEQ ID NO: 166030 - protein, 13 aa, Homo sapiens
  CDR3 for beta chain variable domain of TCR clone 83015 (TRBV7-3, TRBJ2-5)
CASSFRGGETQYV

SEQ ID NO: 166031 - protein, 16 aa, Homo sapiens
  CDR3 for alpha chain variable domain of TCR clone 83016 (TRAV14/DV4, TRAJ53)
CAMREGGGGSNYKLTF

SEQ ID NO: 166032 - protein, 13 aa, Homo sapiens
  CDR3 for beta chain variable domain of TCR clone 83016 (TRBV19, TRBJ1-2)
CASSVPGQDGYTF

SEQ ID NO: 166033 - protein, 12 aa, Homo sapiens
  CDR3 for alpha chain variable domain of TCR clone 83017 (TRAV29/DV5, TRAJ49)
CAATDTGNQFYF

SEQ ID NO: 166034 - protein, 13 aa, Homo sapiens
  CDR3 for beta chain variable domain of TCR clone 83017 (TRBV12-5, TRBJ2-3)
CASGDRQSDTQYF

SEQ ID NO: 166035 - protein, 16 aa, Homo sapiens
  CDR3 for alpha chain variable domain of TCR clone 83018 (TRAV26-1, TRAJ53)
CIVRVAMGGSNYKLTF

SEQ ID NO: 166036 - protein, 15 aa, Homo sapiens
  CDR3 for beta chain variable domain of TCR clone 83018 (TRBV12-4, TRBJ2-5)
CASSPPTGLQETQYF

SEQ ID NO: 166037 - protein, 13 aa, Homo sapiens
  CDR3 for alpha chain variable domain of TCR clone 83019 (TRAV22, TRAJ29)
CAVGGSGNTPLVF

SEQ ID NO: 166038 - protein, 15 aa, Homo sapiens
  CDR3 for beta chain variable domain of TCR clone 83019 (TRBV6-3, TRBJ2-7)
CASSSPGTVFYEQYF

SEQ ID NO: 166039 - protein, 15 aa, Homo sapiens
  CDR3 for alpha chain variable domain of TCR clone 83020 (TRAV8-4, TRAJ37)
CAVTYGSSNTGKLIF

SEQ ID NO: 166040 - protein, 14 aa, Homo sapiens
  CDR3 for beta chain variable domain of TCR clone 83020 (TRBV7-2, TRBJ1-5)
CASSTQGAGQPQHF

SEQ ID NO: 166041 - protein, 12 aa, Homo sapiens
  CDR3 for alpha chain variable domain of TCR clone 83021 (TRAV21, TRAJ12)
CAVMDSSYKLIF

SEQ ID NO: 166042 - protein, 16 aa, Homo sapiens
  CDR3 for beta chain variable domain of TCR clone 83021 (TRBV7-9, TRBJ2-5)
CASRLGIGTRKETQYF

SEQ ID NO: 166043 - protein, 17 aa, Homo sapiens
  CDR3 for alpha chain variable domain of TCR clone 83022 (TRAV4, TRAJ42)
CLVGVLNYGGSQGNLIF

SEQ ID NO: 166044 - protein, 12 aa, Homo sapiens
  CDR3 for beta chain variable domain of TCR clone 83022 (TRBV20-1, TRBJ2-1)
CSAQYMYNEQFF

SEQ ID NO: 166045 - protein, 12 aa, Homo sapiens
  CDR3 for alpha chain variable domain of TCR clone 83023 (TRAV16, TRAJ56)
CAPTGANSKLTF

SEQ ID NO: 166046 - protein, 13 aa, Homo sapiens
  CDR3 for beta chain variable domain of TCR clone 83023 (TRBV20-1, TRBJ2-5)
CSAREGGKETQYF

SEQ ID NO: 166047 - protein, 13 aa, Homo sapiens
  CDR3 for alpha chain variable domain of TCR clone 83024 (TRAV38-1, TRAJ42)
CARWGGSQGNLIF

SEQ ID NO: 166048 - protein, 13 aa, Homo sapiens
  CDR3 for beta chain variable domain of TCR clone 83024 (TRBV7-2, TRBJ2-3)
CASSSDWTDTQYF

SEQ ID NO: 166049 - protein, 17 aa, Homo sapiens
  CDR3 for alpha chain variable domain of TCR clone 83025 (TRAV3, TRAJ6)
CAVRGGPRAGGSYIPTS

SEQ ID NO: 166050 - protein, 14 aa, Homo sapiens
  CDR3 for beta chain variable domain of TCR clone 83025 (TRBV7-2, TRBJ2-7)
RASSPKTSFYEQYF

SEQ ID NO: 166051 - protein, 14 aa, Homo sapiens
  CDR3 for alpha chain variable domain of TCR clone 83026 (TRAV1-2, TRAJ16)
CAVNRFSDCQKLLF

SEQ ID NO: 166052 - protein, 16 aa, Homo sapiens
  CDR3 for beta chain variable domain of TCR clone 83026 (TRBV7-2, TRBJ2-7)
CASSLDLSGGAYEQYF

SEQ ID NO: 166053 - protein, 13 aa, Homo sapiens
  CDR3 for alpha chain variable domain of TCR clone 83027 (TRAV35, TRAJ42)
CAGFPGSQGNLIF

SEQ ID NO: 166054 - protein, 14 aa, Homo sapiens
  CDR3 for beta chain variable domain of TCR clone 83027 (TRBV19, TRBJ2-1)
CASPTFVLNGEQFF

SEQ ID NO: 166055 - protein, 18 aa, Homo sapiens
  CDR3 for alpha chain variable domain of TCR clone 83028 (TRAV12-3, TRAJ52)
CAMSRTNAGGTSYGKRTF

SEQ ID NO: 166056 - protein, 17 aa, Homo sapiens
  CDR3 for beta chain variable domain of TCR clone 83028 (TRBV7-3, TRBJ2-3)
CASSLMKRMRGADTQYF

SEQ ID NO: 166057 - protein, 11 aa, Homo sapiens
  CDR3 for alpha chain variable domain of TCR clone 83029 (TRAV12-2, TRAJ31)
CAVTRWARLTF

SEQ ID NO: 166058 - protein, 15 aa, Homo sapiens
  CDR3 for beta chain variable domain of TCR clone 83029 (TRBV19, TRBJ2-7)
CASSTGGGLVNEQYF

SEQ ID NO: 166059 - protein, 16 aa, Homo sapiens
  CDR3 for alpha chain variable domain of TCR clone 83030 (TRAV12-2, TRAJ28)
CAVITDSGAGSYQLTF

SEQ ID NO: 166060 - protein, 16 aa, Homo sapiens
  CDR3 for beta chain variable domain of TCR clone 83030 (TRBV12-5, TRBJ2-5)
CASGPRTSGNQETQYF

SEQ ID NO: 166061 - protein, 14 aa, Homo sapiens
  CDR3 for alpha chain variable domain of TCR clone 83031 (TRAV8-2, TRAJ4)
CVVSPSGGYNKLIF

SEQ ID NO: 166062 - protein, 13 aa, Homo sapiens
  CDR3 for beta chain variable domain of TCR clone 83031 (TRBV4-1, TRBJ2-2)
CASSQENTGELFF

SEQ ID NO: 166063 - protein, 11 aa, Homo sapiens
  CDR3 for alpha chain variable domain of TCR clone 83032 (TRAV23/DV6, TRAJ58)
CAARLLRGETS

SEQ ID NO: 166064 - protein, 16 aa, Homo sapiens
  CDR3 for beta chain variable domain of TCR clone 83032 (TRBV12-5, TRBJ2-5)
CASGPRTSGNRETQYF

SEQ ID NO: 166065 - protein, 16 aa, Homo sapiens
  CDR3 for alpha chain variable domain of TCR clone 83033 (TRAV3, TRAJ10)
CAVRDMRAGGGNKLTF

SEQ ID NO: 166066 - protein, 15 aa, Homo sapiens
  CDR3 for beta chain variable domain of TCR clone 83033 (TRBV6-3, TRBJ2-7)
WASSSPGTVFYEQYF

SEQ ID NO: 166067 - protein, 13 aa, Homo sapiens
  CDR3 for alpha chain variable domain of TCR clone 83034 (TRAV3, TRAJ21)
CAVREPDFNKFYF

SEQ ID NO: 166068 - protein, 13 aa, Homo sapiens
  CDR3 for beta chain variable domain of TCR clone 83034 (TRBV20-1, TRBJ1-1)
CSARGGGNTEAFF

SEQ ID NO: 166069 - protein, 14 aa, Homo sapiens
  CDR3 for alpha chain variable domain of TCR clone 83035 (TRAV8-3, TRAJ4)
CAVGASGGYNKLIF

SEQ ID NO: 166070 - protein, 13 aa, Homo sapiens
  CDR3 for beta chain variable domain of TCR clone 83035 (TRBV7-9, TRBJ1-2)
CASSLKQNYGYTF

SEQ ID NO: 166071 - protein, 13 aa, Homo sapiens
  CDR3 for alpha chain variable domain of TCR clone 83036 (TRAV26-1, TRAJ30)
CIVRVESNDKIIF

SEQ ID NO: 166072 - protein, 16 aa, Homo sapiens
  CDR3 for beta chain variable domain of TCR clone 83036 (TRBV9, TRBJ2-1)
CASSVGGGGNYNEQFF

SEQ ID NO: 166073 - protein, 14 aa, Homo sapiens
  CDR3 for alpha chain variable domain of TCR clone 83037 (TRAV1-2, TRAJ16)
CAVNRFSDGQKLLF

SEQ ID NO: 166074 - protein, 12 aa, Homo sapiens
  CDR3 for beta chain variable domain of TCR clone 83037 (TRBV20-1, TRBJ2-1)
CSAYRGAGEQFF

SEQ ID NO: 166075 - protein, 14 aa, Homo sapiens
  CDR3 for alpha chain variable domain of TCR clone 83038 (TRAV26-1, TRAJ39)
CIVRGSRAGNMLTF

SEQ ID NO: 166076 - protein, 15 aa, Homo sapiens
  CDR3 for beta chain variable domain of TCR clone 83038 (TRBV7-9, TRBJ1-5)
CASSQGHQPNQPQNF

SEQ ID NO: 166077 - protein, 11 aa, Homo sapiens
  CDR3 for alpha chain variable domain of TCR clone 83039 (TRAV21, TRAJ11)
CAVNGYSTLTF

SEQ ID NO: 166078 - protein, 18 aa, Homo sapiens
  CDR3 for beta chain variable domain of TCR clone 83039 (TRBV27, TRBJ2-1)
CASTSGTSGKATYNEQFF

SEQ ID NO: 166079 - protein, 16 aa, Homo sapiens
  CDR3 for alpha chain variable domain of TCR clone 83040 (TRAV30, TRAJ24)
CGTEIVDADSWGKFQC

SEQ ID NO: 166080 - protein, 18 aa, Homo sapiens
  CDR3 for beta chain variable domain of TCR clone 83040 (TRBV7-9, TRBJ2-7)
CASSLTTSGSRTWYEQYF

SEQ ID NO: 166081 - protein, 18 aa, Homo sapiens
  CDR3 for alpha chain variable domain of TCR clone 83041 (TRAV13-1, TRAJ52)
CAAKNPNAGGTSYRKLTF

SEQ ID NO: 166082 - protein, 16 aa, Homo sapiens
  CDR3 for beta chain variable domain of TCR clone 83041 (TRBV27, TRBJ2-2)
CASSFRGLVHTGELFF

SEQ ID NO: 166083 - protein, 17 aa, Homo sapiens
  CDR3 for alpha chain variable domain of TCR clone 83042 (TRAV38-2/DV8, TRAJ38)
CAYRSTRGAGNNRKLIW

SEQ ID NO: 166084 - protein, 13 aa, Homo sapiens
  CDR3 for beta chain variable domain of TCR clone 83042 (TRBV6-5, TRBJ2-1)
CASRGRVGNEQFF

SEQ ID NO: 166085 - protein, 12 aa, Homo sapiens
  CDR3 for alpha chain variable domain of TCR clone 83043 (TRAV17, TRAJ12)
CATLRSSYKLIF

SEQ ID NO: 166086 - protein, 16 aa, Homo sapiens
  CDR3 for beta chain variable domain of TCR clone 83043 (TRBV28, TRBJ2-7)
CASSLFFETVGPEQYF

SEQ ID NO: 166087 - protein, 11 aa, Homo sapiens
  CDR3 for alpha chain variable domain of TCR clone 83044 (TRAV1-1, TRAJ23)
CAVRQGGKLIF

SEQ ID NO: 166088 - protein, 14 aa, Homo sapiens
  CDR3 for beta chain variable domain of TCR clone 83044 (TRBV19, TRBJ2-7)
CASTVQGRPYEQYF

SEQ ID NO: 166089 - protein, 17 aa, Homo sapiens
  CDR3 for alpha chain variable domain of TCR clone 83045 (TRAV3, TRAJ6)
CAVRDGPRAGGSYIPTF

SEQ ID NO: 166090 - protein, 14 aa, Homo sapiens
  CDR3 for beta chain variable domain of TCR clone 83045 (TRBV11-2, TRBJ2-3)
CASSRLARTDTKYF

SEQ ID NO: 166091 - protein, 15 aa, Homo sapiens
  CDR3 for alpha chain variable domain of TCR clone 83046 (TRAV12-2, TRAJ9)
CAVNNERTGGFKTIF

SEQ ID NO: 166092 - protein, 14 aa, Homo sapiens
  CDR3 for beta chain variable domain of TCR clone 83046 (TRBV4-1, TRBJ1-4)
CASSQERKNEKLLF

SEQ ID NO: 166093 - protein, 14 aa, Homo sapiens
  CDR3 for alpha chain variable domain of TCR clone 83047 (TRAV8-4, TRAJ48)
CAVSETFGNEKLTF

SEQ ID NO: 166094 - protein, 14 aa, Homo sapiens
  CDR3 for beta chain variable domain of TCR clone 83047 (TRBV13, TRBJ2-7)
CTSSLKGASYEQYF

SEQ ID NO: 166095 - protein, 15 aa, Homo sapiens
  CDR3 for alpha chain variable domain of TCR clone 83048 (TRAV3, TRAJ32)
CAVSSYGGATNKLII

SEQ ID NO: 166096 - protein, 13 aa, Homo sapiens
  CDR3 for beta chain variable domain of TCR clone 83048 (TRBV20-1, TRBJ2-7)
CSARPSTNYEQYF

SEQ ID NO: 166097 - protein, 18 aa, Homo sapiens
  CDR3 for alpha chain variable domain of TCR clone 83049 (TRAV29/DV5, TRAJ52)
CAAGFRGAGGTSYGKLTF

SEQ ID NO: 166098 - protein, 14 aa, Homo sapiens
  CDR3 for beta chain variable domain of TCR clone 83049 (TRBV27, TRBJ2-2)
CASRPGVSTGELFF

SEQ ID NO: 166099 - protein, 10 aa, Homo sapiens
  CDR3 for alpha chain variable domain of TCR clone 83050 (TRAV26-1, TRAJ22)
RSGSARQLTF

SEQ ID NO: 166100 - protein, 13 aa, Homo sapiens
  CDR3 for beta chain variable domain of TCR clone 83050 (TRBV7-9, TRBJ1-2)
CASSLKQDYGYTF

SEQ ID NO: 166101 - protein, 10 aa, Homo sapiens
  CDR3 for alpha chain variable domain of TCR clone 83051 (TRAV30, TRAJ48)
CGIGNEKLAF

SEQ ID NO: 166102 - protein, 15 aa, Homo sapiens
  CDR3 for beta chain variable domain of TCR clone 83051 (TRBV28, TRBJ2-1)
CASRKTGTAYNEQFF

SEQ ID NO: 166103 - protein, 14 aa, Homo sapiens
  CDR3 for alpha chain variable domain of TCR clone 83052 (TRAV17, TRAJ57)
CATDPQGGSEKLVF

SEQ ID NO: 166104 - protein, 18 aa, Homo sapiens
  CDR3 for beta chain variable domain of TCR clone 83052 (TRBV6-6, TRBJ1-3)
CASSYSKWDSISGNIIYF

SEQ ID NO: 166105 - protein, 12 aa, Homo sapiens
  CDR3 for alpha chain variable domain of TCR clone 83053 (TRAV2, TRAJ9)
CAVGAGGFKTIF

SEQ ID NO: 166106 - protein, 17 aa, Homo sapiens
  CDR3 for beta chain variable domain of TCR clone 83053 (TRBV4-3, TRBJ1-1)
CASSQDLGPFMNTEAFF

SEQ ID NO: 166107 - protein, 13 aa, Homo sapiens
  CDR3 for alpha chain variable domain of TCR clone 83054 (TRAV8-3, TRAJ36)
CAVGATGANNLFS

SEQ ID NO: 166108 - protein, 15 aa, Homo sapiens
  CDR3 for beta chain variable domain of TCR clone 83054 (TRBV7-2, TRBJ1-2)
CASSPRAGWNYGYTF

SEQ ID NO: 166109 - protein, 18 aa, Homo sapiens
  CDR3 for alpha chain variable domain of TCR clone 83055 (TRAV21, TRAJ53)
CAVKGGENSGGSDYKLTF

SEQ ID NO: 166110 - protein, 13 aa, Homo sapiens
  CDR3 for beta chain variable domain of TCR clone 83055 (TRBV9, TRBJ2-1)
CASSPSGGSEQFF

SEQ ID NO: 166111 - protein, 17 aa, Homo sapiens
  CDR3 for alpha chain variable domain of TCR clone 83056 (TRAV12-2, TRAJ6)
CAPQVPPRAGGSYIPTF

SEQ ID NO: 166112 - protein, 16 aa, Homo sapiens
  CDR3 for beta chain variable domain of TCR clone 83056 (TRBV19, TRBJ2-2)
CASSTARASNTGELFF

SEQ ID NO: 166113 - protein, 18 aa, Homo sapiens
  CDR3 for alpha chain variable domain of TCR clone 83057 (TRAV12-3, TRAJ52)
CAMSRTNAGGTSYGKLTF

SEQ ID NO: 166114 - protein, 17 aa, Homo sapiens
  CDR3 for beta chain variable domain of TCR clone 83057 (TRBV13, TRBJ2-3)
CASSLSRVAGGRNTRYF

SEQ ID NO: 166115 - protein, 11 aa, Homo sapiens
  CDR3 for alpha chain variable domain of TCR clone 83058 (TRAV26-2, TRAJ8)
CILTGFQKLVF

SEQ ID NO: 166116 - protein, 16 aa, Homo sapiens
  CDR3 for beta chain variable domain of TCR clone 83058 (TRBV28, TRBJ2-1)
CASSSSYSGSLNEQFF

SEQ ID NO: 166117 - protein, 13 aa, Homo sapiens
  CDR3 for alpha chain variable domain of TCR clone 83059 (TRAV8-3, TRAJ28)
CAVGAVGSYQLTF

SEQ ID NO: 166118 - protein, 14 aa, Homo sapiens
  CDR3 for beta chain variable domain of TCR clone 83059 (TRBV7-2, TRBJ2-7)
CASRSQGAAYELYF

SEQ ID NO: 166119 - protein, 13 aa, Homo sapiens
  CDR3 for alpha chain variable domain of TCR clone 83060 (TRAV27, TRAJ45)
CRSSGGGADGLTF

SEQ ID NO: 166120 - protein, 17 aa, Homo sapiens
  CDR3 for beta chain variable domain of TCR clone 83060 (TRBV11-2, TRBJ2-1)
CASSLYPPGVEYKEQFF

SEQ ID NO: 166121 - protein, 14 aa, Homo sapiens
  CDR3 for alpha chain variable domain of TCR clone 83061 (TRAV27, TRAJ22)
CAGLPSGSARQLTF

SEQ ID NO: 166122 - protein, 15 aa, Homo sapiens
  CDR3 for beta chain variable domain of TCR clone 83061 (TRBV27, TRBJ2-1)
CASSNGGGSSNEQFF

SEQ ID NO: 166123 - protein, 12 aa, Homo sapiens
  CDR3 for alpha chain variable domain of TCR clone 83062 (TRAV12-3, TRAJ40)
CAMSSGTSKYIF

SEQ ID NO: 166124 - protein, 15 aa, Homo sapiens
  CDR3 for beta chain variable domain of TCR clone 83062 (TRBV7-3, TRBJ2-2)
CASSETGQGTGELFF

SEQ ID NO: 166125 - protein, 11 aa, Homo sapiens
  CDR3 for alpha chain variable domain of TCR clone 83063 (TRAV12-1, TRAJ30)
CVVNGQDKIIF

SEQ ID NO: 166126 - protein, 14 aa, Homo sapiens
  CDR3 for beta chain variable domain of TCR clone 83063 (TRBV7-2, TRBJ2-7)
CASSPKTSFYEPYF

SEQ ID NO: 166127 - protein, 12 aa, Homo sapiens
  CDR3 for alpha chain variable domain of TCR clone 83064 (TRAV2, TRAJ26)
CAGSPGSLWSEF

SEQ ID NO: 166128 - protein, 16 aa, Homo sapiens
  CDR3 for beta chain variable domain of TCR clone 83064 (TRBV13, TRBJ2-2)
CASSPRTGEHTGELFF

SEQ ID NO: 166129 - protein, 12 aa, Homo sapiens
  CDR3 for alpha chain variable domain of TCR clone 83065 (TRAV16, TRAJ10)
CSRTGVGNKLTF

SEQ ID NO: 166130 - protein, 19 aa, Homo sapiens
  CDR3 for beta chain variable domain of TCR clone 83065 (TRBV25-1, TRBJ2-2)
CAILVYRVDRGHKTGELFF

SEQ ID NO: 166131 - protein, 12 aa, Homo sapiens
  CDR3 for alpha chain variable domain of TCR clone 83066 (TRAV1-1, TRAJ9)
CAVDTGGFRTIF

SEQ ID NO: 166132 - protein, 14 aa, Homo sapiens
  CDR3 for beta chain variable domain of TCR clone 83066 (TRBV7-8, TRBJ2-5)
CASSATGGQETQYF

SEQ ID NO: 166133 - protein, 13 aa, Homo sapiens
  CDR3 for alpha chain variable domain of TCR clone 83067 (TRAV1-1, TRAJ9)
CAAKNTGGFKTIF

SEQ ID NO: 166134 - protein, 14 aa, Homo sapiens
  CDR3 for beta chain variable domain of TCR clone 83067 (TRBV20-1, TRBJ2-1)
CSAQIGGSADEQLF

SEQ ID NO: 166135 - protein, 14 aa, Homo sapiens
  CDR3 for alpha chain variable domain of TCR clone 83068 (TRAV3, TRAJ8)
CSVSLNTGFQKLVF

SEQ ID NO: 166136 - protein, 14 aa, Homo sapiens
  CDR3 for beta chain variable domain of TCR clone 83068 (TRBV6-6, TRBJ1-5)
CASVDSGFNQPQHF

SEQ ID NO: 166137 - protein, 11 aa, Homo sapiens
  CDR3 for alpha chain variable domain of TCR clone 83069 (TRAV1-2, TRAJ40)
CAVPGTYNYIF

SEQ ID NO: 166138 - protein, 16 aa, Homo sapiens
  CDR3 for beta chain variable domain of TCR clone 83069 (TRBV7-3, TRBJ2-2)
CASSLKRGTLSGELFF

SEQ ID NO: 166139 - protein, 14 aa, Homo sapiens
  CDR3 for alpha chain variable domain of TCR clone 83070 (TRAV26-1, TRAJ38)
CIADNAGNNRKLIW

SEQ ID NO: 166140 - protein, 13 aa, Homo sapiens
  CDR3 for beta chain variable domain of TCR clone 83070 (TRBV7-9, TRBJ1-2)
CASSLKQNYGYTF

SEQ ID NO: 166141 - protein, 15 aa, Homo sapiens
  CDR3 for alpha chain variable domain of TCR clone 83071 (TRAV14/DV4, TRAJ26)
CTMREGQNYGQNFVF

SEQ ID NO: 166142 - protein, 13 aa, Homo sapiens
  CDR3 for beta chain variable domain of TCR clone 83071 (TRBV24-1, TRBJ2-2)
CATSDWSTGELFF

SEQ ID NO: 166143 - protein, 13 aa, Homo sapiens
  CDR3 for alpha chain variable domain of TCR clone 83072 (TRAV26-1, TRAJ33)
CIVRVEGNHQLIW

SEQ ID NO: 166144 - protein, 16 aa, Homo sapiens
  CDR3 for beta chain variable domain of TCR clone 83072 (TRBV15, TRBJ2-7)
CATSRDRGRRRGEQYF

SEQ ID NO: 166145 - protein, 15 aa, Homo sapiens
  CDR3 for alpha chain variable domain of TCR clone 83073 (TRAV21, TRAJ53)
CATLNSGGSNYKLTF

SEQ ID NO: 166146 - protein, 14 aa, Homo sapiens
  CDR3 for beta chain variable domain of TCR clone 83073 (TRBV2, TRBJ2-1)
CASSDRAYYNEQFF

SEQ ID NO: 166147 - protein, 15 aa, Homo sapiens
  CDR3 for alpha chain variable domain of TCR clone 83074 (TRAV3, TRAJ29)
CAVRDLYSGNTPLVF

SEQ ID NO: 166148 - protein, 12 aa, Homo sapiens
  CDR3 for beta chain variable domain of TCR clone 83074 (TRBV11-2, TRBJ2-2)
CASSLGGGELFF

SEQ ID NO: 166149 - protein, 12 aa, Homo sapiens
  CDR3 for alpha chain variable domain of TCR clone 83075 (TRAV17, TRAJ53)
CAFGGSNYKLTF

SEQ ID NO: 166150 - protein, 18 aa, Homo sapiens
  CDR3 for beta chain variable domain of TCR clone 83075 (TRBV11-2, TRBJ2-4)
CASSQEGRGAWTFSTSAP

SEQ ID NO: 166151 - protein, 12 aa, Homo sapiens
  CDR3 for alpha chain variable domain of TCR clone 83076 (TRAV21, TRAJ31)
CAVWGNNARLMF

SEQ ID NO: 166152 - protein, 14 aa, Homo sapiens
  CDR3 for beta chain variable domain of TCR clone 83076 (TRBV20-1, TRBJ2-7)
CSAKRGRSSYEQYF

SEQ ID NO: 166153 - protein, 15 aa, Homo sapiens
  CDR3 for alpha chain variable domain of TCR clone 83077 (TRAV21, TRAJ24)
CAARSSTDSWGKLPF

SEQ ID NO: 166154 - protein, 14 aa, Homo sapiens
  CDR3 for beta chain variable domain of TCR clone 83077 (TRBV11-2, TRBJ2-5)
CASSRTGGIETQYF

SEQ ID NO: 166155 - protein, 16 aa, Homo sapiens
  CDR3 for alpha chain variable domain of TCR clone 83078 (TRAV8-3, TRAJ8)
CAVPRDGNTGFQKLVF

SEQ ID NO: 166156 - protein, 14 aa, Homo sapiens
  CDR3 for beta chain variable domain of TCR clone 83078 (TRBV28, TRBJ1-1)
CAISESGRGTEAFF

SEQ ID NO: 166157 - protein, 15 aa, Homo sapiens
  CDR3 for alpha chain variable domain of TCR clone 83079 (TRAV1-2, TRAJ10)
CAVRGFTGGGNKLTF

SEQ ID NO: 166158 - protein, 12 aa, Homo sapiens
  CDR3 for beta chain variable domain of TCR clone 83079 (TRBV5-1, TRBJ1-2)
CASSQDTYGYTF

SEQ ID NO: 166159 - protein, 13 aa, Homo sapiens
  CDR3 for alpha chain variable domain of TCR clone 83080 (TRAV27, TRAJ40)
CAGPPSGTYKYIF

SEQ ID NO: 166160 - protein, 13 aa, Homo sapiens
  CDR3 for beta chain variable domain of TCR clone 83080 (TRBV7-9, TRBJ2-3)
CASSPGSTDTQYF

SEQ ID NO: 166161 - protein, 14 aa, Homo sapiens
  CDR3 for alpha chain variable domain of TCR clone 83081 (TRAV1-2, TRAJ16)
CAVTRFSDGQKLLF

SEQ ID NO: 166162 - protein, 16 aa, Homo sapiens
  CDR3 for beta chain variable domain of TCR clone 83081 (TRBV12-5, TRBJ2-5)
CASGPRTSGNQETQYF

SEQ ID NO: 166163 - protein, 14 aa, Homo sapiens
  CDR3 for alpha chain variable domain of TCR clone 83082 (TRAV13-1, TRAJ39)
CAASEGNAGNMLTF

SEQ ID NO: 166164 - protein, 14 aa, Homo sapiens
  CDR3 for beta chain variable domain of TCR clone 83082 (TRBV7-9, TRBJ2-2)
CASSLGHRTGELFF

SEQ ID NO: 166165 - protein, 10 aa, Homo sapiens
  CDR3 for alpha chain variable domain of TCR clone 83083 (TRAV21, TRAJ31)
CAVDNARLMF

SEQ ID NO: 166166 - protein, 13 aa, Homo sapiens
  CDR3 for beta chain variable domain of TCR clone 83083 (TRBV4-1, TRBJ1-1)
CASSRKMNTEDFF

SEQ ID NO: 166167 - protein, 17 aa, Homo sapiens
  CDR3 for alpha chain variable domain of TCR clone 83084 (TRAV3, TRAJ42)
CAVRGRDYGGSQGNLIF

SEQ ID NO: 166168 - protein, 15 aa, Homo sapiens
  CDR3 for beta chain variable domain of TCR clone 83084 (TRBV2, TRBJ2-7)
CASSEGLARSYEQYF

SEQ ID NO: 166169 - protein, 14 aa, Homo sapiens
  CDR3 for alpha chain variable domain of TCR clone 83085 (TRAV12-2, TRAJ17)
RAVLFKAAGNKLTF

SEQ ID NO: 166170 - protein, 20 aa, Homo sapiens
  CDR3 for beta chain variable domain of TCR clone 83085 (TRBV7-8, TRBJ2-2)
CASSHLFPGPTIHITGELFF

SEQ ID NO: 166171 - protein, 20 aa, Homo sapiens
  CDR3 for alpha chain variable domain of TCR clone 83086 (TRAV12-2, TRAJ52)
SPVIQPPTSLRSTSYGKLTF

SEQ ID NO: 166172 - protein, 14 aa, Homo sapiens
  CDR3 for beta chain variable domain of TCR clone 83086 (TRBV7-8, TRBJ2-3)
CASSLEAGTDTQYF

SEQ ID NO: 166173 - protein, 13 aa, Homo sapiens
  CDR3 for alpha chain variable domain of TCR clone 83087 (TRAV26-2, TRAJ43)
CILRAVNNNDMRF

SEQ ID NO: 166174 - protein, 16 aa, Homo sapiens
  CDR3 for beta chain variable domain of TCR clone 83087 (TRBV12-5, TRBJ2-5)
CASGPRTSGNQETQYF

SEQ ID NO: 166175 - protein, 14 aa, Homo sapiens
  CDR3 for alpha chain variable domain of TCR clone 83088 (TRAV8-4, TRAJ43)
CAVSDPRNNNDIRF

SEQ ID NO: 166176 - protein, 15 aa, Homo sapiens
  CDR3 for beta chain variable domain of TCR clone 83088 (TRBV4-2, TRBJ1-2)
CASSQRTGGRDGYTF

SEQ ID NO: 166177 - protein, 15 aa, Homo sapiens
  CDR3 for alpha chain variable domain of TCR clone 83089 (TRAV21, TRAJ24)
CAARSSTDSWGKLQF

SEQ ID NO: 166178 - protein, 13 aa, Homo sapiens
  CDR3 for beta chain variable domain of TCR clone 83089 (TRBV11-2, TRBJ2-5)
CASSSTGDETQYF

SEQ ID NO: 166179 - protein, 16 aa, Homo sapiens
  CDR3 for alpha chain variable domain of TCR clone 83090 (TRAV17, TRAJ22)
CATDAISSCSARQLTF

SEQ ID NO: 166180 - protein, 15 aa, Homo sapiens
  CDR3 for beta chain variable domain of TCR clone 83090 (TRBV5-1, TRBJ2-1)
CASSPPRAPYNEQFF

SEQ ID NO: 166181 - protein, 13 aa, Homo sapiens
  CDR3 for alpha chain variable domain of TCR clone 83091 (TRAV12-3, TRAJ8)
CAMEKTGFQKLVF

SEQ ID NO: 166182 - protein, 15 aa, Homo sapiens
  CDR3 for beta chain variable domain of TCR clone 83091 (TRBV4-1, TRBJ1-4)
CASSDTGGTNEKLFF

SEQ ID NO: 166183 - protein, 16 aa, Homo sapiens
  CDR3 for alpha chain variable domain of TCR clone 83092 (TRAV8-3, TRAJ13)
CAVGAYPSGGYQKVTF

SEQ ID NO: 166184 - protein, 15 aa, Homo sapiens
  CDR3 for beta chain variable domain of TCR clone 83092 (TRBV9, TRBJ1-6)
CASSVAGTGDSPLHF

SEQ ID NO: 166185 - protein, 11 aa, Homo sapiens
  CDR3 for alpha chain variable domain of TCR clone 83093 (TRAV1-2, TRAJ20)
CAVANDYKLSF

SEQ ID NO: 166186 - protein, 11 aa, Homo sapiens
  CDR3 for beta chain variable domain of TCR clone 83093 (TRBV12-4, TRBJ2-3)
CASTATDTQYF

SEQ ID NO: 166187 - protein, 14 aa, Homo sapiens
  CDR3 for alpha chain variable domain of TCR clone 83094 (TRAV13-1, TRAJ5)
CAAHPDTGRRALTF

SEQ ID NO: 166188 - protein, 14 aa, Homo sapiens
  CDR3 for beta chain variable domain of TCR clone 83094 (TRBV7-2, TRBJ2-7)
CASSLYPGRCEQYF

SEQ ID NO: 166189 - protein, 13 aa, Homo sapiens
  CDR3 for alpha chain variable domain of TCR clone 83095 (TRAV12-2, TRAJ39)
CAVNNNAGNMLTV

SEQ ID NO: 166190 - protein, 13 aa, Homo sapiens
  CDR3 for beta chain variable domain of TCR clone 83095 (TRBV2, TRBJ1-5)
CATAGPGNQPQHF

SEQ ID NO: 166191 - protein, 12 aa, Homo sapiens
  CDR3 for alpha chain variable domain of TCR clone 83096 (TRAV20, TRAJ54)
CAVQEGAQKLVF

SEQ ID NO: 166192 - protein, 17 aa, Homo sapiens
  CDR3 for beta chain variable domain of TCR clone 83096 (TRBV13, TRBJ2-3)
CASSLSRVAGGRNTQYL

SEQ ID NO: 166193 - protein, 11 aa, Homo sapiens
  CDR3 for alpha chain variable domain of TCR clone 83097 (TRAV29/DV5, TRAJ37)
CATSNTGKLVF

SEQ ID NO: 166194 - protein, 13 aa, Homo sapiens
  CDR3 for beta chain variable domain of TCR clone 83097 (TRBV12-4, TRBJ2-3)
CASSSPLGGTQYF

SEQ ID NO: 166195 - protein, 14 aa, Homo sapiens
  CDR3 for alpha chain variable domain of TCR clone 83098 (TRAV17, TRAJ22)
CATSPSGSARQLTF

SEQ ID NO: 166196 - protein, 15 aa, Homo sapiens
  CDR3 for beta chain variable domain of TCR clone 83098 (TRBV4-1, TRBJ2-5)
CASSQWDLYQETQYL

SEQ ID NO: 166197 - protein, 14 aa, Homo sapiens
  CDR3 for alpha chain variable domain of TCR clone 83099 (TRAV1-2, TRAJ8)
CAVREDTGFQKLVF

SEQ ID NO: 166198 - protein, 16 aa, Homo sapiens
  CDR3 for beta chain variable domain of TCR clone 83099 (TRBV5-7, TRBJ2-5)
CASTLAPAGGRETKYF

SEQ ID NO: 166199 - protein, 13 aa, Homo sapiens
  CDR3 for alpha chain variable domain of TCR clone 83100 (TRAV20, TRAJ40)
CAVRTSGTYKYIF

SEQ ID NO: 166200 - protein, 15 aa, Homo sapiens
  CDR3 for beta chain variable domain of TCR clone 83100 (TRBV19, TRBJ2-7)
CASSIGGGLVNEQYF

SEQ ID NO: 166201 - protein, 19 aa, Homo sapiens
  CDR3 for alpha chain variable domain of TCR clone 83101 (TRAV1-2, TRAJ26)
CLLPLCCERPDNYGQNFVL

SEQ ID NO: 166202 - protein, 13 aa, Homo sapiens
  CDR3 for beta chain variable domain of TCR clone 83101 (TRBV19, TRBJ1-2)
CASSQGQVYGYTF

SEQ ID NO: 166203 - protein, 14 aa, Homo sapiens
  CDR3 for alpha chain variable domain of TCR clone 83102 (TRAV1-2, TRAJ16)
CAVNRFSDGQKLLF

SEQ ID NO: 166204 - protein, 11 aa, Homo sapiens
  CDR3 for beta chain variable domain of TCR clone 83102 (TRBV20-1, TRBJ2-1)
CSLSSGSEQFF

SEQ ID NO: 166205 - protein, 14 aa, Homo sapiens
  CDR3 for alpha chain variable domain of TCR clone 83103 (TRAV12-3, TRAJ10)
SHLPLTGGGNKLTF

SEQ ID NO: 166206 - protein, 16 aa, Homo sapiens
  CDR3 for beta chain variable domain of TCR clone 83103 (TRBV29-1, TRBJ1-2)
CSVEANRDIANYGYTF

SEQ ID NO: 166207 - protein, 12 aa, Homo sapiens
  CDR3 for alpha chain variable domain of TCR clone 83104 (TRAV2, TRAJ9)
CAVGAGGFKTIF

SEQ ID NO: 166208 - protein, 15 aa, Homo sapiens
  CDR3 for beta chain variable domain of TCR clone 83104 (TRBV13, TRBJ2-2)
CSSPRTGEHTGELFF

SEQ ID NO: 166209 - protein, 11 aa, Homo sapiens
  CDR3 for alpha chain variable domain of TCR clone 83105 (TRAV21, TRAJ23)
CAPQRRGKIIF

SEQ ID NO: 166210 - protein, 14 aa, Homo sapiens
  CDR3 for beta chain variable domain of TCR clone 83105 (TRBV12-4, TRBJ1-1)
CASTWTGHDTEAFF

SEQ ID NO: 166211 - protein, 15 aa, Homo sapiens
  CDR3 for alpha chain variable domain of TCR clone 83106 (TRAV8-3, TRAJ45)
CASSYSGGGADGLTF

SEQ ID NO: 166212 - protein, 17 aa, Homo sapiens
  CDR3 for beta chain variable domain of TCR clone 83106 (TRBV7-8, TRBJ1-2)
FASSLRPLQGHLYGYTF

SEQ ID NO: 166213 - protein, 13 aa, Homo sapiens
  CDR3 for alpha chain variable domain of TCR clone 83107 (TRAV8-4, TRAJ10)
CAAFTGGGNKLTF

SEQ ID NO: 166214 - protein, 15 aa, Homo sapiens
  CDR3 for beta chain variable domain of TCR clone 83107 (TRBV2, TRBJ2-3)
CASSDSEKATDTQYF

SEQ ID NO: 166215 - protein, 18 aa, Homo sapiens
  CDR3 for alpha chain variable domain of TCR clone 83108 (TRAV26-2, TRAJ45)
CILRLWGYSGGGADGLTF

SEQ ID NO: 166216 - protein, 17 aa, Homo sapiens
  CDR3 for beta chain variable domain of TCR clone 83108 (TRBV28, TRBJ2-3)
CASSPTPAGGRVDTQCF

SEQ ID NO: 166217 - protein, 13 aa, Homo sapiens
  CDR3 for alpha chain variable domain of TCR clone 83109 (TRAV1-1, TRAJ30)
CAVRSDRDDKIIF

SEQ ID NO: 166218 - protein, 14 aa, Homo sapiens
  CDR3 for beta chain variable domain of TCR clone 83109 (TRBV28, TRBJ2-7)
CASTLYGRAHEQYF

SEQ ID NO: 166219 - protein, 16 aa, Homo sapiens
  CDR3 for alpha chain variable domain of TCR clone 83110 (TRAV21, TRAJ37)
CAVRPRGPSNTGKLIF

SEQ ID NO: 166220 - protein, 13 aa, Homo sapiens
  CDR3 for beta chain variable domain of TCR clone 83110 (TRBV20-1, TRBJ2-2)
CSALSGGAGELFF

SEQ ID NO: 166221 - protein, 14 aa, Homo sapiens
  CDR3 for alpha chain variable domain of TCR clone 83111 (TRAV2, TRAJ37)
CAVDFTSNTGKLIF

SEQ ID NO: 166222 - protein, 17 aa, Homo sapiens
  CDR3 for beta chain variable domain of TCR clone 83111 (TRBV19, TRBJ2-7)
CASSISFYDSYPCEQYF

SEQ ID NO: 166223 - protein, 13 aa, Homo sapiens
  CDR3 for alpha chain variable domain of TCR clone 83112 (TRAV38-1, TRAJ42)
CARWGGSQGNLIF

SEQ ID NO: 166224 - protein, 16 aa, Homo sapiens
  CDR3 for beta chain variable domain of TCR clone 83112 (TRBV19, TRBJ2-1)
CASSKAGPSSYNEQFF

SEQ ID NO: 166225 - protein, 13 aa, Homo sapiens
  CDR3 for alpha chain variable domain of TCR clone 83113 (TRAV3, TRAJ27)
CAVRPLGAGKSTF

SEQ ID NO: 166226 - protein, 15 aa, Homo sapiens
  CDR3 for beta chain variable domain of TCR clone 83113 (TRBV11-2, TRBJ2-1)
CASSRNRGLMYEQFF

SEQ ID NO: 166227 - protein, 12 aa, Homo sapiens
  CDR3 for alpha chain variable domain of TCR clone 83114 (TRAV29/DV5, TRAJ15)
CASNQAGTALIF

SEQ ID NO: 166228 - protein, 13 aa, Homo sapiens
  CDR3 for beta chain variable domain of TCR clone 83114 (TRBV14, TRBJ2-7)
CASSQDRRYEQYF

SEQ ID NO: 166229 - protein, 14 aa, Homo sapiens
  CDR3 for alpha chain variable domain of TCR clone 83115 (TRAV2, TRAJ37)
CAVDFTSNTGKLIF

SEQ ID NO: 166230 - protein, 15 aa, Homo sapiens
  CDR3 for beta chain variable domain of TCR clone 83115 (TRBV7-2, TRBJ2-1)
CASSSGLAGGNEQFF

SEQ ID NO: 166231 - protein, 13 aa, Homo sapiens
  CDR3 for alpha chain variable domain of TCR clone 83116 (TRAV8-6, TRAJ49)
CAVITNTGNQFYF

SEQ ID NO: 166232 - protein, 14 aa, Homo sapiens
  CDR3 for beta chain variable domain of TCR clone 83116 (TRBV5-1, TRBJ2-7)
CASSRGESLHEQYF

SEQ ID NO: 166233 - protein, 15 aa, Homo sapiens
  CDR3 for alpha chain variable domain of TCR clone 83117 (TRAV3, TRAJ5)
CAVRDLDTGRRALTF

SEQ ID NO: 166234 - protein, 13 aa, Homo sapiens
  CDR3 for beta chain variable domain of TCR clone 83117 (TRBV12-4, TRBJ2-7)
CASSPTETYEQYS

SEQ ID NO: 166235 - protein, 12 aa, Homo sapiens
  CDR3 for alpha chain variable domain of TCR clone 83118 (TRAV35, TRAJ52)
NAGGTSYGKLAF

SEQ ID NO: 166236 - protein, 12 aa, Homo sapiens
  CDR3 for beta chain variable domain of TCR clone 83118 (TRBV11-2, TRBJ2-7)
CASSLPTYEQYF

SEQ ID NO: 166237 - protein, 13 aa, Homo sapiens
  CDR3 for alpha chain variable domain of TCR clone 83119 (TRAV1-2, TRAJ9)
CAALNTEGFKTIF

SEQ ID NO: 166238 - protein, 16 aa, Homo sapiens
  CDR3 for beta chain variable domain of TCR clone 83119 (TRBV11-2, TRBJ2-1)
CASSPRLAGVYNEQFF

SEQ ID NO: 166239 - protein, 13 aa, Homo sapiens
  CDR3 for alpha chain variable domain of TCR clone 83120 (TRAV13-1, TRAJ41)
CADAPNSVYALNF

SEQ ID NO: 166240 - protein, 13 aa, Homo sapiens
  CDR3 for beta chain variable domain of TCR clone 83120 (TRBV19, TRBJ2-7)
CASEGTTTYEQYF

SEQ ID NO: 166241 - protein, 13 aa, Homo sapiens
  CDR3 for alpha chain variable domain of TCR clone 83121 (TRAV20, TRAJ21)
CAVEGYNFNKFYF

SEQ ID NO: 166242 - protein, 14 aa, Homo sapiens
  CDR3 for beta chain variable domain of TCR clone 83121 (TRBV12-5, TRBJ2-5)
CASGSRTQQETQYF

SEQ ID NO: 166243 - protein, 13 aa, Homo sapiens
  CDR3 for alpha chain variable domain of TCR clone 83122 (TRAV8-2, TRAJ29)
CALPGAGNTPLVF

SEQ ID NO: 166244 - protein, 14 aa, Homo sapiens
  CDR3 for beta chain variable domain of TCR clone 83122 (TRBV7-3, TRBJ2-1)
CASSLAGGTNEQFF

SEQ ID NO: 166245 - protein, 13 aa, Homo sapiens
  CDR3 for alpha chain variable domain of TCR clone 83123 (TRAV13-2, TRAJ48)
CAEMDFGNEKLTF

SEQ ID NO: 166246 - protein, 15 aa, Homo sapiens
  CDR3 for beta chain variable domain of TCR clone 83123 (TRBV7-9, TRBJ1-6)
CASSSPGRGNSTLLF

SEQ ID NO: 166247 - protein, 11 aa, Homo sapiens
  CDR3 for alpha chain variable domain of TCR clone 83124 (TRAV3, TRAJ32)
CAVREGIMVVL

SEQ ID NO: 166248 - protein, 16 aa, Homo sapiens
  CDR3 for beta chain variable domain of TCR clone 83124 (TRBV7-6, TRBJ2-1)
CASSAPGPSSYNEQFF

SEQ ID NO: 166249 - protein, 13 aa, Homo sapiens
  CDR3 for alpha chain variable domain of TCR clone 83125 (TRAV27, TRAJ17)
CAGAATAGNKLTF

SEQ ID NO: 166250 - protein, 15 aa, Homo sapiens
  CDR3 for beta chain variable domain of TCR clone 83125 (TRBV5-1, TRBJ2-3)
RASRNQAGSTDTQYF

SEQ ID NO: 166251 - protein, 11 aa, Homo sapiens
  CDR3 for alpha chain variable domain of TCR clone 83126 (TRAV12-2, TRAJ33)
CAVTSNYQLLW

SEQ ID NO: 166252 - protein, 14 aa, Homo sapiens
  CDR3 for beta chain variable domain of TCR clone 83126 (TRBV12-4, TRBJ2-2)
CASNQGANTGELFF

SEQ ID NO: 166253 - protein, 15 aa, Homo sapiens
  CDR3 for alpha chain variable domain of TCR clone 83127 (TRAV21, TRAJ53)
CATLNSGGSNYKLTF

SEQ ID NO: 166254 - protein, 15 aa, Homo sapiens
  CDR3 for beta chain variable domain of TCR clone 83127 (TRBV27, TRBJ2-3)
CASSSLAGVIDTQYF

SEQ ID NO: 166255 - protein, 11 aa, Homo sapiens
  CDR3 for alpha chain variable domain of TCR clone 83128 (TRAV1-2, TRAJ20)
CAVANDYKLSF

SEQ ID NO: 166256 - protein, 18 aa, Homo sapiens
  CDR3 for beta chain variable domain of TCR clone 83128 (TRBV20-1, TRBJ2-6)
CSAETTATHGSGANVLTF

SEQ ID NO: 166257 - protein, 13 aa, Homo sapiens
  CDR3 for alpha chain variable domain of TCR clone 83129 (TRAV8-6, TRAJ16)
CAVSSPDGQKLLF

SEQ ID NO: 166258 - protein, 16 aa, Homo sapiens
  CDR3 for beta chain variable domain of TCR clone 83129 (TRBV5-7, TRBJ2-3)
CASSSLGGAITDTQYV

SEQ ID NO: 166259 - protein, 11 aa, Homo sapiens
  CDR3 for alpha chain variable domain of TCR clone 83130 (TRAV3, TRAJ21)
CAVGNFNKFYF

SEQ ID NO: 166260 - protein, 13 aa, Homo sapiens
  CDR3 for beta chain variable domain of TCR clone 83130 (TRBV12-4, TRBJ1-1)
CASSPGTGFEAFF

SEQ ID NO: 166261 - protein, 13 aa, Homo sapiens
  CDR3 for alpha chain variable domain of TCR clone 83131 (TRAV8-6, TRAJ49)
CAVITHTGNQFYF

SEQ ID NO: 166262 - protein, 14 aa, Homo sapiens
  CDR3 for beta chain variable domain of TCR clone 83131 (TRBV5-1, TRBJ2-7)
CASSRGESLYEQYF

SEQ ID NO: 166263 - protein, 12 aa, Homo sapiens
  CDR3 for alpha chain variable domain of TCR clone 83132 (TRAV23/DV6, TRAJ30)
CAASKGGDKIIF

SEQ ID NO: 166264 - protein, 15 aa, Homo sapiens
  CDR3 for beta chain variable domain of TCR clone 83132 (TRBV12-4, TRBJ2-1)
CASRPTRTGYNEQFF

SEQ ID NO: 166265 - protein, 12 aa, Homo sapiens
  CDR3 for alpha chain variable domain of TCR clone 83133 (TRAV12-3, TRAJ42)
CAPGGSQGNLIF

SEQ ID NO: 166266 - protein, 17 aa, Homo sapiens
  CDR3 for beta chain variable domain of TCR clone 83133 (TRBV13, TRBJ2-3)
CASSLSRVAGGRNTQYF

SEQ ID NO: 166267 - protein, 14 aa, Homo sapiens
  CDR3 for alpha chain variable domain of TCR clone 83134 (TRAV13-2, TRAJ17)
CAENSKAAGNKLTF

SEQ ID NO: 166268 - protein, 14 aa, Homo sapiens
  CDR3 for beta chain variable domain of TCR clone 83134 (TRBV7-2, TRBJ2-5)
CASSPRGSSETQYF

SEQ ID NO: 166269 - protein, 12 aa, Homo sapiens
  CDR3 for alpha chain variable domain of TCR clone 83135 (TRAV12-3, TRAJ17)
CAMTLTGNKLTF

SEQ ID NO: 166270 - protein, 16 aa, Homo sapiens
  CDR3 for beta chain variable domain of TCR clone 83135 (TRBV28, TRBJ2-2)
CASSLEGGSNTGELFF

SEQ ID NO: 166271 - protein, 12 aa, Homo sapiens
  CDR3 for alpha chain variable domain of TCR clone 83136 (TRAV3, TRAJ7)
CADLLWEQQTRF

SEQ ID NO: 166272 - protein, 13 aa, Homo sapiens
  CDR3 for beta chain variable domain of TCR clone 83136 (TRBV7-3, TRBJ2-5)
YASSFRGGETQYF

SEQ ID NO: 166273 - protein, 12 aa, Homo sapiens
  CDR3 for alpha chain variable domain of TCR clone 83137 (TRAV12-3, TRAJ17)
CAMTLTGNKLTF

SEQ ID NO: 166274 - protein, 17 aa, Homo sapiens
  CDR3 for beta chain variable domain of TCR clone 83137 (TRBV7-3, TRBJ2-3)
CASSLMKRVRGADTQYF

SEQ ID NO: 166275 - protein, 13 aa, Homo sapiens
  CDR3 for alpha chain variable domain of TCR clone 83138 (TRAV2, TRAJ40)
CAVVTSGTYKYIF

SEQ ID NO: 166276 - protein, 14 aa, Homo sapiens
  CDR3 for beta chain variable domain of TCR clone 83138 (TRBV28, TRBJ2-7)
CASSGLAEPAEQYF

SEQ ID NO: 166277 - protein, 12 aa, Homo sapiens
  CDR3 for alpha chain variable domain of TCR clone 83139 (TRAV2, TRAJ10)
CASTGGGNKLTF

SEQ ID NO: 166278 - protein, 16 aa, Homo sapiens
  CDR3 for beta chain variable domain of TCR clone 83139 (TRBV7-3, TRBJ2-2)
CASSLERGTLSGELFF

SEQ ID NO: 166279 - protein, 18 aa, Homo sapiens
  CDR3 for alpha chain variable domain of TCR clone 83140 (TRAV21, TRAJ52)
CAVRPSPAGGTSYGKLTF

SEQ ID NO: 166280 - protein, 15 aa, Homo sapiens
  CDR3 for beta chain variable domain of TCR clone 83140 (TRBV7-9, TRBJ2-7)
CASSLALAEAYEQYF

SEQ ID NO: 166281 - protein, 13 aa, Homo sapiens
  CDR3 for alpha chain variable domain of TCR clone 83141 (TRAV20, TRAJ20)
CAVRWVRDYKLSF

SEQ ID NO: 166282 - protein, 15 aa, Homo sapiens
  CDR3 for beta chain variable domain of TCR clone 83141 (TRBV5-1, TRBJ2-5)
CASSSGREMVETQYF

SEQ ID NO: 166283 - protein, 13 aa, Homo sapiens
  CDR3 for alpha chain variable domain of TCR clone 83142 (TRAV12-3, TRAJ33)
CAMSVNSNYQLIW

SEQ ID NO: 166284 - protein, 14 aa, Homo sapiens
  CDR3 for beta chain variable domain of TCR clone 83142 (TRBV20-1, TRBJ1-1)
CSAQTRIGGTEAFF

SEQ ID NO: 166285 - protein, 11 aa, Homo sapiens
  CDR3 for alpha chain variable domain of TCR clone 83143 (TRAV16, TRAJ42)
CALASQGNLIF

SEQ ID NO: 166286 - protein, 15 aa, Homo sapiens
  CDR3 for beta chain variable domain of TCR clone 83143 (TRBV6-5, TRBJ2-1)
CASSYDAGAGNEQFF

SEQ ID NO: 166287 - protein, 13 aa, Homo sapiens
  CDR3 for alpha chain variable domain of TCR clone 83144 (TRAV12-1, TRAJ13)
CVVALLGYQKVTF

SEQ ID NO: 166288 - protein, 15 aa, Homo sapiens
  CDR3 for beta chain variable domain of TCR clone 83144 (TRBV9, TRBJ1-6)
CASSVAGTGDSPLHF

SEQ ID NO: 166289 - protein, 14 aa, Homo sapiens
  CDR3 for alpha chain variable domain of TCR clone 83145 (TRAV12-2, TRAJ40)
CAVKIPSGTYKYIF

SEQ ID NO: 166290 - protein, 14 aa, Homo sapiens
  CDR3 for beta chain variable domain of TCR clone 83145 (TRBV7-8, TRBJ2-3)
CASSLEAGTDTQYF

SEQ ID NO: 166291 - protein, 14 aa, Homo sapiens
  CDR3 for alpha chain variable domain of TCR clone 83146 (TRAV23/DV6, TRAJ37)
CVASTSSNTGKLIF

SEQ ID NO: 166292 - protein, 13 aa, Homo sapiens
  CDR3 for beta chain variable domain of TCR clone 83146 (TRBV7-7, TRBJ1-1)
CASSLGANTEAFF

SEQ ID NO: 166293 - protein, 11 aa, Homo sapiens
  CDR3 for alpha chain variable domain of TCR clone 83147 (TRAV20, TRAJ27)
CAVTNAGKSTF

SEQ ID NO: 166294 - protein, 14 aa, Homo sapiens
  CDR3 for beta chain variable domain of TCR clone 83147 (TRBV27, TRBJ2-5)
CASSSLKGWETQYF

SEQ ID NO: 166295 - protein, 11 aa, Homo sapiens
  CDR3 for alpha chain variable domain of TCR clone 83148 (TRAV1-2, TRAJ31)
CAVNNNARLMF

SEQ ID NO: 166296 - protein, 12 aa, Homo sapiens
  CDR3 for beta chain variable domain of TCR clone 83148 (TRBV11-2, TRBJ2-5)
CASSLGQETQYF

SEQ ID NO: 166297 - protein, 14 aa, Homo sapiens
  CDR3 for alpha chain variable domain of TCR clone 83149 (TRAV13-1, TRAJ20)
CAARPGSNDYKLSF

SEQ ID NO: 166298 - protein, 14 aa, Homo sapiens
  CDR3 for beta chain variable domain of TCR clone 83149 (TRBV19, TRBJ2-1)
CASPTFVLSGEQFF

SEQ ID NO: 166299 - protein, 14 aa, Homo sapiens
  CDR3 for alpha chain variable domain of TCR clone 83150 (TRAV12-1, TRAJ13)
CVVIDSGGYQEVTF

SEQ ID NO: 166300 - protein, 12 aa, Homo sapiens
  CDR3 for beta chain variable domain of TCR clone 83150 (TRBV29-1, TRBJ2-3)
CSVTGGADTQYF

SEQ ID NO: 166301 - protein, 11 aa, Homo sapiens
  CDR3 for alpha chain variable domain of TCR clone 83151 (TRAV1-2, TRAJ20)
CAVANDYKLRF

SEQ ID NO: 166302 - protein, 14 aa, Homo sapiens
  CDR3 for beta chain variable domain of TCR clone 83151 (TRBV7-9, TRBJ1-1)
CASTPLQSYTEAFF

SEQ ID NO: 166303 - protein, 11 aa, Homo sapiens
  CDR3 for alpha chain variable domain of TCR clone 83152 (TRAV1-2, TRAJ20)
CAVANDYKLSF

SEQ ID NO: 166304 - protein, 14 aa, Homo sapiens
  CDR3 for beta chain variable domain of TCR clone 83152 (TRBV7-9, TRBJ1-1)
CASTPLQAYTEAFF

SEQ ID NO: 166305 - protein, 16 aa, Homo sapiens
  CDR3 for alpha chain variable domain of TCR clone 83153 (TRAV30, TRAJ24)
CSTEIVDADSWGKFQF

SEQ ID NO: 166306 - protein, 13 aa, Homo sapiens
  CDR3 for beta chain variable domain of TCR clone 83153 (TRBV18, TRBJ1-2)
CASSASATEGYTF

SEQ ID NO: 166307 - protein, 14 aa, Homo sapiens
  CDR3 for alpha chain variable domain of TCR clone 83154 (TRAV12-2, TRAJ53)
CRERGGGSNYKLTF

SEQ ID NO: 166308 - protein, 12 aa, Homo sapiens
  CDR3 for beta chain variable domain of TCR clone 83154 (TRBV6-5, TRBJ2-2)
CASRTGTGELFF

SEQ ID NO: 166309 - protein, 13 aa, Homo sapiens
  CDR3 for alpha chain variable domain of TCR clone 83155 (TRAV8-3, TRAJ28)
CAVGAVGSYQLTF

SEQ ID NO: 166310 - protein, 14 aa, Homo sapiens
  CDR3 for beta chain variable domain of TCR clone 83155 (TRBV7-6, TRBJ2-3)
CASSLGTVTDTQYF

SEQ ID NO: 166311 - protein, 13 aa, Homo sapiens
  CDR3 for alpha chain variable domain of TCR clone 83156 (TRAV12-2, TRAJ20)
CAVNRFDGYKLSF

SEQ ID NO: 166312 - protein, 12 aa, Homo sapiens
  CDR3 for beta chain variable domain of TCR clone 83156 (TRBV19, TRBJ2-1)
CASSQISNEQFF

SEQ ID NO: 166313 - protein, 14 aa, Homo sapiens
  CDR3 for alpha chain variable domain of TCR clone 83157 (TRAV20, TRAJ36)
CAVQAGTGANNLFF

SEQ ID NO: 166314 - protein, 15 aa, Homo sapiens
  CDR3 for beta chain variable domain of TCR clone 83157 (TRBV20-1, TRBJ2-7)
CSARDRVSGMDEQYF

SEQ ID NO: 166315 - protein, 17 aa, Homo sapiens
  CDR3 for alpha chain variable domain of TCR clone 83158 (TRAV3, TRAJ38)
CAVRDCLNAGNNRKLIW

SEQ ID NO: 166316 - protein, 14 aa, Homo sapiens
  CDR3 for beta chain variable domain of TCR clone 83158 (TRBV28, TRBJ2-7)
CASTTDRDGFVQYF

SEQ ID NO: 166317 - protein, 15 aa, Homo sapiens
  CDR3 for alpha chain variable domain of TCR clone 83159 (TRAV13-1, TRAJ44)
CAACRGGGTASKLTF

SEQ ID NO: 166318 - protein, 16 aa, Homo sapiens
  CDR3 for beta chain variable domain of TCR clone 83159 (TRBV29-1, TRBJ2-7)
CSVEVVGTSGSYEQYF

SEQ ID NO: 166319 - protein, 12 aa, Homo sapiens
  CDR3 for alpha chain variable domain of TCR clone 83160 (TRAV12-3, TRAJ17)
CAMTLTGNKLTF

SEQ ID NO: 166320 - protein, 15 aa, Homo sapiens
  CDR3 for beta chain variable domain of TCR clone 83160 (TRBV19, TRBJ2-1)
CASSMGWNSNNEQFF

SEQ ID NO: 166321 - protein, 16 aa, Homo sapiens
  CDR3 for alpha chain variable domain of TCR clone 83161 (TRAV1-2, TRAJ10)
CAVRGVLTGGGNKLTF

SEQ ID NO: 166322 - protein, 13 aa, Homo sapiens
  CDR3 for beta chain variable domain of TCR clone 83161 (TRBV7-2, TRBJ2-2)
CASSLAVTGELFF

SEQ ID NO: 166323 - protein, 13 aa, Homo sapiens
  CDR3 for alpha chain variable domain of TCR clone 83162 (TRAV30, TRAJ18)
CGTEASTLGRLYF

SEQ ID NO: 166324 - protein, 15 aa, Homo sapiens
  CDR3 for beta chain variable domain of TCR clone 83162 (TRBV7-3, TRBJ2-1)
CASSRIGTGSSEQSF

SEQ ID NO: 166325 - protein, 13 aa, Homo sapiens
  CDR3 for alpha chain variable domain of TCR clone 83163 (TRAV3, TRAJ21)
CAVREPDFNKSYF

SEQ ID NO: 166326 - protein, 13 aa, Homo sapiens
  CDR3 for beta chain variable domain of TCR clone 83163 (TRBV20-1, TRBJ1-1)
CSARGGGNTEAFF

SEQ ID NO: 166327 - protein, 14 aa, Homo sapiens
  CDR3 for alpha chain variable domain of TCR clone 83164 (TRAV3, TRAJ37)
CAVKESGNTGKLIF

SEQ ID NO: 166328 - protein, 16 aa, Homo sapiens
  CDR3 for beta chain variable domain of TCR clone 83164 (TRBV7-9, TRBJ2-1)
CASSDVAGGSYNEQFF

SEQ ID NO: 166329 - protein, 16 aa, Homo sapiens
  CDR3 for alpha chain variable domain of TCR clone 83165 (TRAV3, TRAJ37)
CAVRGKGSGNTGKLLF

SEQ ID NO: 166330 - protein, 13 aa, Homo sapiens
  CDR3 for beta chain variable domain of TCR clone 83165 (TRBV14, TRBJ2-7)
CASSQDRRYEQYF

SEQ ID NO: 166331 - protein, 12 aa, Homo sapiens
  CDR3 for alpha chain variable domain of TCR clone 83166 (TRAV13-1, TRAJ27)
CAAHTNAGKSTF

SEQ ID NO: 166332 - protein, 14 aa, Homo sapiens
  CDR3 for beta chain variable domain of TCR clone 83166 (TRBV19, TRBJ2-2)
CASSGQGIAGELFV

SEQ ID NO: 166333 - protein, 12 aa, Homo sapiens
  CDR3 for alpha chain variable domain of TCR clone 83167 (TRAV12-3, TRAJ17)
CAMTLTGNKLTF

SEQ ID NO: 166334 - protein, 16 aa, Homo sapiens
  CDR3 for beta chain variable domain of TCR clone 83167 (TRBV28, TRBJ2-7)
CASSPWVATGDLSQYF

SEQ ID NO: 166335 - protein, 15 aa, Homo sapiens
  CDR3 for alpha chain variable domain of TCR clone 83168 (TRAV17, TRAJ16)
CATALRFSDGQKLLS

SEQ ID NO: 166336 - protein, 16 aa, Homo sapiens
  CDR3 for beta chain variable domain of TCR clone 83168 (TRBV19, TRBJ2-1)
CASSKAGPSSYNEQFF

SEQ ID NO: 166337 - protein, 13 aa, Homo sapiens
  CDR3 for alpha chain variable domain of TCR clone 83169 (TRAV21, TRAJ57)
CAVTQGGSEKLVF

SEQ ID NO: 166338 - protein, 16 aa, Homo sapiens
  CDR3 for beta chain variable domain of TCR clone 83169 (TRBV11-2, TRBJ1-1)
CASSLRQGGEHSKAFF

SEQ ID NO: 166339 - protein, 14 aa, Homo sapiens
  CDR3 for alpha chain variable domain of TCR clone 83170 (TRAV30, TRAJ33)
CGTVAPRGNYQLIW

SEQ ID NO: 166340 - protein, 14 aa, Homo sapiens
  CDR3 for beta chain variable domain of TCR clone 83170 (TRBV7-2, TRBJ2-7)
CASRSQGAAYEQYF

SEQ ID NO: 166341 - protein, 15 aa, Homo sapiens
  CDR3 for alpha chain variable domain of TCR clone 83171 (TRAV12-1, TRAJ44)
CVVFVNTGTASKLTF

SEQ ID NO: 166342 - protein, 14 aa, Homo sapiens
  CDR3 for beta chain variable domain of TCR clone 83171 (TRBV11-2, TRBJ2-5)
CASSRTGGIETQYF

SEQ ID NO: 166343 - protein, 13 aa, Homo sapiens
  CDR3 for alpha chain variable domain of TCR clone 83172 (TRAV8-3, TRAJ43)
CAVVPYNNNDMRF

SEQ ID NO: 166344 - protein, 14 aa, Homo sapiens
  CDR3 for beta chain variable domain of TCR clone 83172 (TRBV5-1, TRBJ2-7)
CASSRGESLYEQYF

SEQ ID NO: 166345 - protein, 19 aa, Homo sapiens
  CDR3 for alpha chain variable domain of TCR clone 83173 (TRAV26-1, TRAJ28)
CIVRVAHAYSGAGSYQLTS

SEQ ID NO: 166346 - protein, 15 aa, Homo sapiens
  CDR3 for beta chain variable domain of TCR clone 83173 (TRBV20-1, TRBJ1-1)
CSASRGVTGNTEAFF

SEQ ID NO: 166347 - protein, 14 aa, Homo sapiens
  CDR3 for alpha chain variable domain of TCR clone 83174 (TRAV12-2, TRAJ4)
CAEDLSGGYNKLIF

SEQ ID NO: 166348 - protein, 13 aa, Homo sapiens
  CDR3 for beta chain variable domain of TCR clone 83174 (TRBV7-9, TRBJ1-2)
CASSVKQNYGYTF

SEQ ID NO: 166349 - protein, 13 aa, Homo sapiens
  CDR3 for alpha chain variable domain of TCR clone 83175 (TRAV26-1, TRAJ22)
CIVKAGSARQLTF

SEQ ID NO: 166350 - protein, 17 aa, Homo sapiens
  CDR3 for beta chain variable domain of TCR clone 83175 (TRBV7-8, TRBJ2-6)
CASSAGTGGAGANVLTF

SEQ ID NO: 166351 - protein, 15 aa, Homo sapiens
  CDR3 for alpha chain variable domain of TCR clone 83176 (TRAV27, TRAJ38)
RAARRNAGNNRKLIW

SEQ ID NO: 166352 - protein, 13 aa, Homo sapiens
  CDR3 for beta chain variable domain of TCR clone 83176 (TRBV12-5, TRBJ2-3)
CASGDRQSDTQYL

SEQ ID NO: 166353 - protein, 12 aa, Homo sapiens
  CDR3 for alpha chain variable domain of TCR clone 83177 (TRAV3, TRAJ43)
CAVRDPNNDMRF

SEQ ID NO: 166354 - protein, 15 aa, Homo sapiens
  CDR3 for beta chain variable domain of TCR clone 83177 (TRBV27, TRBJ1-5)
CASSLGTGFDKPQHF

SEQ ID NO: 166355 - protein, 12 aa, Homo sapiens
  CDR3 for alpha chain variable domain of TCR clone 83178 (TRAV14/DV4, TRAJ9)
CAMNPGGFKTIF

SEQ ID NO: 166356 - protein, 16 aa, Homo sapiens
  CDR3 for beta chain variable domain of TCR clone 83178 (TRBV28, TRBJ2-5)
CASSCSPAGGWETQYF

SEQ ID NO: 166357 - protein, 12 aa, Homo sapiens
  CDR3 for alpha chain variable domain of TCR clone 83179 (TRAV21, TRAJ33)
CAKMDSNYQLIW

SEQ ID NO: 166358 - protein, 14 aa, Homo sapiens
  CDR3 for beta chain variable domain of TCR clone 83179 (TRBV7-2, TRBJ2-2)
CASSLNSNTGELFF

SEQ ID NO: 166359 - protein, 14 aa, Homo sapiens
  CDR3 for alpha chain variable domain of TCR clone 83180 (TRAV13-2, TRAJ43)
CAEIPTYNNNYMRF

SEQ ID NO: 166360 - protein, 15 aa, Homo sapiens
  CDR3 for beta chain variable domain of TCR clone 83180 (TRBV7-9, TRBJ2-2)
CASGPLDTFPGELFF

SEQ ID NO: 166361 - protein, 13 aa, Homo sapiens
  CDR3 for alpha chain variable domain of TCR clone 83181 (TRAV21, TRAJ27)
CAARPGNAGKSTF

SEQ ID NO: 166362 - protein, 14 aa, Homo sapiens
  CDR3 for beta chain variable domain of TCR clone 83181 (TRBV5-1, TRBJ2-7)
CASSRGESLYEQYF

SEQ ID NO: 166363 - protein, 13 aa, Homo sapiens
  CDR3 for alpha chain variable domain of TCR clone 83182 (TRAV12-3, TRAJ49)
CAMSRNTGSQFYF

SEQ ID NO: 166364 - protein, 16 aa, Homo sapiens
  CDR3 for beta chain variable domain of TCR clone 83182 (TRBV5-8, TRBJ2-2)
CASSLINPGGAGELFF

SEQ ID NO: 166365 - protein, 15 aa, Homo sapiens
  CDR3 for alpha chain variable domain of TCR clone 83183 (TRAV40, TRAJ45)
CLLGDLGGGADGLTF

SEQ ID NO: 166366 - protein, 13 aa, Homo sapiens
  CDR3 for beta chain variable domain of TCR clone 83183 (TRBV7-9, TRBJ1-2)
CASSVKQNYGYTF

SEQ ID NO: 166367 - protein, 11 aa, Homo sapiens
  CDR3 for alpha chain variable domain of TCR clone 83184 (TRAV1-1, TRAJ23)
CAVRQGGKLIF

SEQ ID NO: 166368 - protein, 12 aa, Homo sapiens
  CDR3 for beta chain variable domain of TCR clone 83184 (TRBV7-3, TRBJ2-1)
CASSFQSGPQFF

SEQ ID NO: 166369 - protein, 13 aa, Homo sapiens
  CDR3 for alpha chain variable domain of TCR clone 83185 (TRAV27, TRAJ57)
CRSAQGGSEKLVF

SEQ ID NO: 166370 - protein, 14 aa, Homo sapiens
  CDR3 for beta chain variable domain of TCR clone 83185 (TRBV12-5, TRBJ2-5)
CASGSRTHQETQYF

SEQ ID NO: 166371 - protein, 11 aa, Homo sapiens
  CDR3 for alpha chain variable domain of TCR clone 83186 (TRAV4, TRAJ23)
CLVAPGGKLIF

SEQ ID NO: 166372 - protein, 15 aa, Homo sapiens
  CDR3 for beta chain variable domain of TCR clone 83186 (TRBV7-2, TRBJ2-1)
CASSFQADGYNEQFF

SEQ ID NO: 166373 - protein, 13 aa, Homo sapiens
  CDR3 for alpha chain variable domain of TCR clone 83187 (TRAV20, TRAJ37)
CAGCPSNTGKLIF

SEQ ID NO: 166374 - protein, 17 aa, Homo sapiens
  CDR3 for beta chain variable domain of TCR clone 83187 (TRBV28, TRBJ2-5)
CASSRQGGLAGAETQYF

SEQ ID NO: 166375 - protein, 12 aa, Homo sapiens
  CDR3 for alpha chain variable domain of TCR clone 83188 (TRAV3, TRAJ43)
CAVRDPNNDMRF

SEQ ID NO: 166376 - protein, 18 aa, Homo sapiens
  CDR3 for beta chain variable domain of TCR clone 83188 (TRBV11-2, TRBJ2-3)
CASSLGGASRGAPNTQYF

SEQ ID NO: 166377 - protein, 13 aa, Homo sapiens
  CDR3 for alpha chain variable domain of TCR clone 83189 (TRAV21, TRAJ10)
CAVPTGGGNKLTF

SEQ ID NO: 166378 - protein, 22 aa, Homo sapiens
  CDR3 for beta chain variable domain of TCR clone 83189 (TRBV19, TRBJ2-1)
CASSVRDRVTGTSGRIYNEQLF

SEQ ID NO: 166379 - protein, 13 aa, Homo sapiens
  CDR3 for alpha chain variable domain of TCR clone 83190 (TRAV9-2, TRAJ53)
CALSGGSNYKLPF

SEQ ID NO: 166380 - protein, 17 aa, Homo sapiens
  CDR3 for beta chain variable domain of TCR clone 83190 (TRBV11-2, TRBJ2-1)
CASSLYPPGVEYNEQFF

SEQ ID NO: 166381 - protein, 17 aa, Homo sapiens
  CDR3 for alpha chain variable domain of TCR clone 83191 (TRAV38-2/DV8, TRAJ38)
CAYRSARGAGNKRKLIW

SEQ ID NO: 166382 - protein, 13 aa, Homo sapiens
  CDR3 for beta chain variable domain of TCR clone 83191 (TRBV6-5, TRBJ2-1)
CASRGRVGNEQFF

SEQ ID NO: 166383 - protein, 12 aa, Homo sapiens
  CDR3 for alpha chain variable domain of TCR clone 83192 (TRAV12-1, TRAJ15)
CVVNQAGTALIF

SEQ ID NO: 166384 - protein, 11 aa, Homo sapiens
  CDR3 for beta chain variable domain of TCR clone 83192 (TRBV7-9, TRBJ2-2)
CASSGFGGANT

SEQ ID NO: 166385 - protein, 15 aa, Homo sapiens
  CDR3 for alpha chain variable domain of TCR clone 83193 (TRAV13-1, TRAJ32)
CAASNGWWCHKQAHL

SEQ ID NO: 166386 - protein, 15 aa, Homo sapiens
  CDR3 for beta chain variable domain of TCR clone 83193 (TRBV20-1, TRBJ2-7)
CSARDRVSGMDEQYF

SEQ ID NO: 166387 - protein, 14 aa, Homo sapiens
  CDR3 for alpha chain variable domain of TCR clone 83194 (TRAV29/DV5, TRAJ36)
CAARRKTGANNLFF

SEQ ID NO: 166388 - protein, 15 aa, Homo sapiens
  CDR3 for beta chain variable domain of TCR clone 83194 (TRBV7-6, TRBJ1-5)
CASSQSSGINQPQHF

SEQ ID NO: 166389 - protein, 14 aa, Homo sapiens
  CDR3 for alpha chain variable domain of TCR clone 83195 (TRAV17, TRAJ57)
CATDPQGGSEKLVF

SEQ ID NO: 166390 - protein, 17 aa, Homo sapiens
  CDR3 for beta chain variable domain of TCR clone 83195 (TRBV11-2, TRBJ2-1)
CASSLYPPGVEYNEQFF

SEQ ID NO: 166391 - protein, 15 aa, Homo sapiens
  CDR3 for alpha chain variable domain of TCR clone 83196 (TRAV21, TRAJ40)
CSVRPQTSGTYKYIF

SEQ ID NO: 166392 - protein, 13 aa, Homo sapiens
  CDR3 for beta chain variable domain of TCR clone 83196 (TRBV7-2, TRBJ2-2)
CASSSVRAGELFF

SEQ ID NO: 166393 - protein, 15 aa, Homo sapiens
  CDR3 for alpha chain variable domain of TCR clone 83197 (TRAV26-1, TRAJ29)
CIVRVEGSGNTPLVF

SEQ ID NO: 166394 - protein, 14 aa, Homo sapiens
  CDR3 for beta chain variable domain of TCR clone 83197 (TRBV18, TRBJ2-5)
CASPPGVSQGTQYF

SEQ ID NO: 166395 - protein, 15 aa, Homo sapiens
  CDR3 for alpha chain variable domain of TCR clone 83198 (TRAV3, TRAJ47)
CAVRDIGEYGIKLVF

SEQ ID NO: 166396 - protein, 14 aa, Homo sapiens
  CDR3 for beta chain variable domain of TCR clone 83198 (TRBV13, TRBJ2-5)
CASSLERVGETQYF

SEQ ID NO: 166397 - protein, 10 aa, Homo sapiens
  CDR3 for alpha chain variable domain of TCR clone 83199 (TRAV26-1, TRAJ40)
CIAGTYKYIF

SEQ ID NO: 166398 - protein, 15 aa, Homo sapiens
  CDR3 for beta chain variable domain of TCR clone 83199 (TRBV19, TRBJ2-1)
CASSSPVVPLDEQFF

SEQ ID NO: 166399 - protein, 17 aa, Homo sapiens
  CDR3 for alpha chain variable domain of TCR clone 83200 (TRAV3, TRAJ38)
CAVRDCLNAGNNRKLIW

SEQ ID NO: 166400 - protein, 14 aa, Homo sapiens
  CDR3 for beta chain variable domain of TCR clone 83200 (TRBV5-5, TRBJ1-5)
CASSGQGVDQPQNF

SEQ ID NO: 166401 - protein, 15 aa, Homo sapiens
  CDR3 for alpha chain variable domain of TCR clone 83201 (TRAV4, TRAJ39)
CLVGPYNNAGNMLTF

SEQ ID NO: 166402 - protein, 13 aa, Homo sapiens
  CDR3 for beta chain variable domain of TCR clone 83201 (TRBV11-2, TRBJ2-5)
CASSSTGEETQYF

SEQ ID NO: 166403 - protein, 12 aa, Homo sapiens
  CDR3 for alpha chain variable domain of TCR clone 83202 (TRAV12-1, TRAJ40)
CVVYSGTYKYIF

SEQ ID NO: 166404 - protein, 15 aa, Homo sapiens
  CDR3 for beta chain variable domain of TCR clone 83202 (TRBV7-9, TRBJ1-6)
CASSSPGRGNSPLHC

SEQ ID NO: 166405 - protein, 13 aa, Homo sapiens
  CDR3 for alpha chain variable domain of TCR clone 83203 (TRAV27, TRAJ8)
CAGGPTGFQKLVV

SEQ ID NO: 166406 - protein, 15 aa, Homo sapiens
  CDR3 for beta chain variable domain of TCR clone 83203 (TRBV6-1, TRBJ2-7)
CASSESMGDFYEQYF

SEQ ID NO: 166407 - protein, 12 aa, Homo sapiens
  CDR3 for alpha chain variable domain of TCR clone 83204 (TRAV3, TRAJ7)
CADLLWEQQTRF

SEQ ID NO: 166408 - protein, 17 aa, Homo sapiens
  CDR3 for beta chain variable domain of TCR clone 83204 (TRBV7-3, TRBJ2-5)
CASSFRGGDPVLRARHA

SEQ ID NO: 166409 - protein, 15 aa, Homo sapiens
  CDR3 for alpha chain variable domain of TCR clone 83205 (TRAV3, TRAJ22)
CAVRDRGGSARQLTF

SEQ ID NO: 166410 - protein, 15 aa, Homo sapiens
  CDR3 for beta chain variable domain of TCR clone 83205 (TRBV7-2, TRBJ1-3)
CASSLQAGGENTIYF

SEQ ID NO: 166411 - protein, 15 aa, Homo sapiens
  CDR3 for alpha chain variable domain of TCR clone 83206 (TRAV26-2, TRAJ28)
CILVESGAGSYQLTF

SEQ ID NO: 166412 - protein, 14 aa, Homo sapiens
  CDR3 for beta chain variable domain of TCR clone 83206 (TRBV12-5, TRBJ2-5)
CASGSRTHQETQYF

SEQ ID NO: 166413 - protein, 14 aa, Homo sapiens
  CDR3 for alpha chain variable domain of TCR clone 83207 (TRAV1-2, TRAJ8)
CAVREDTGFQKLVF

SEQ ID NO: 166414 - protein, 13 aa, Homo sapiens
  CDR3 for beta chain variable domain of TCR clone 83207 (TRBV10-3, TRBJ2-7)
CASKLAVNYEQYL

SEQ ID NO: 166415 - protein, 13 aa, Homo sapiens
  CDR3 for alpha chain variable domain of TCR clone 83208 (TRAV1-1, TRAJ9)
CAAKNTGGFKTIF

SEQ ID NO: 166416 - protein, 16 aa, Homo sapiens
  CDR3 for beta chain variable domain of TCR clone 83208 (TRBV7-3, TRBJ2-2)
CASSLKRGTLSGELFF

SEQ ID NO: 166417 - protein, 18 aa, Homo sapiens
  CDR3 for alpha chain variable domain of TCR clone 83209 (TRAV29/DV5, TRAJ52)
CAAGFRGAGGTSYGKLTF

SEQ ID NO: 166418 - protein, 15 aa, Homo sapiens
  CDR3 for beta chain variable domain of TCR clone 83209 (TRBV12-4, TRBJ2-5)
CASSPPTGLQETQYF

SEQ ID NO: 166419 - protein, 15 aa, Homo sapiens
  CDR3 for alpha chain variable domain of TCR clone 83210 (TRAV26-1, TRAJ40)
CIVRAVPSGNYKYIF

SEQ ID NO: 166420 - protein, 14 aa, Homo sapiens
  CDR3 for beta chain variable domain of TCR clone 83210 (TRBV19, TRBJ2-1)
CASKDPGLANEQFF

SEQ ID NO: 166421 - protein, 15 aa, Homo sapiens
  CDR3 for alpha chain variable domain of TCR clone 83211 (TRAV27, TRAJ38)
CAGRFNAGNNRKLIW

SEQ ID NO: 166422 - protein, 14 aa, Homo sapiens
  CDR3 for beta chain variable domain of TCR clone 83211 (TRBV7-8, TRBJ2-3)
CASSLEAGTDTQYF

SEQ ID NO: 166423 - protein, 16 aa, Homo sapiens
  CDR3 for alpha chain variable domain of TCR clone 83212 (TRAV12-3, TRAJ53)
CAMSPGSGCSNYKLTF

SEQ ID NO: 166424 - protein, 16 aa, Homo sapiens
  CDR3 for beta chain variable domain of TCR clone 83212 (TRBV4-2, TRBJ1-1)
CASSQAGFGMNTEAFF

SEQ ID NO: 166425 - protein, 14 aa, Homo sapiens
  CDR3 for alpha chain variable domain of TCR clone 83213 (TRAV17, TRAJ22)
CATSPSGSARQLTF

SEQ ID NO: 166426 - protein, 15 aa, Homo sapiens
  CDR3 for beta chain variable domain of TCR clone 83213 (TRBV4-1, TRBJ2-5)
CASRQWDLYQETQYF

SEQ ID NO: 166427 - protein, 14 aa, Homo sapiens
  CDR3 for alpha chain variable domain of TCR clone 83214 (TRAV17, TRAJ58)
CATDGETSGSRLTF

SEQ ID NO: 166428 - protein, 15 aa, Homo sapiens
  CDR3 for beta chain variable domain of TCR clone 83214 (TRBV6-3, TRBJ2-7)
CASSPPGTVFYEQYF

SEQ ID NO: 166429 - protein, 11 aa, Homo sapiens
  CDR3 for alpha chain variable domain of TCR clone 83215 (TRAV1-2, TRAJ20)
CAVSNDYKLSF

SEQ ID NO: 166430 - protein, 13 aa, Homo sapiens
  CDR3 for beta chain variable domain of TCR clone 83215 (TRBV7-9, TRBJ1-2)
CASSLEQNYGYTF

SEQ ID NO: 166431 - protein, 16 aa, Homo sapiens
  CDR3 for alpha chain variable domain of TCR clone 83216 (TRAV22, TRAJ45)
CAVERGKRGGADGLTF

SEQ ID NO: 166432 - protein, 17 aa, Homo sapiens
  CDR3 for beta chain variable domain of TCR clone 83216 (TRBV20-1, TRBJ1-5)
CSAREIPQGVGSQPQHF

SEQ ID NO: 166433 - protein, 14 aa, Homo sapiens
  CDR3 for alpha chain variable domain of TCR clone 83217 (TRAV2, TRAJ23)
CTVGLRNQGGKLIF

SEQ ID NO: 166434 - protein, 13 aa, Homo sapiens
  CDR3 for beta chain variable domain of TCR clone 83217 (TRBV12-4, TRBJ2-5)
CASSPGTEETQYF

SEQ ID NO: 166435 - protein, 14 aa, Homo sapiens
  CDR3 for alpha chain variable domain of TCR clone 83218 (TRAV1-2, TRAJ8)
CAVREDTGLQKLVF

SEQ ID NO: 166436 - protein, 15 aa, Homo sapiens
  CDR3 for beta chain variable domain of TCR clone 83218 (TRBV12-4, TRBJ2-5)
CASSPPTGLQETQYF

SEQ ID NO: 166437 - protein, 13 aa, Homo sapiens
  CDR3 for alpha chain variable domain of TCR clone 83219 (TRAV21, TRAJ27)
CAARPGNAGKSPL

SEQ ID NO: 166438 - protein, 14 aa, Homo sapiens
  CDR3 for beta chain variable domain of TCR clone 83219 (TRBV7-6, TRBJ2-3)
CASSLGTVTDTQYF

SEQ ID NO: 166439 - protein, 14 aa, Homo sapiens
  CDR3 for alpha chain variable domain of TCR clone 83220 (TRAV20, TRAJ4)
CAVRLGGGYNKLIF

SEQ ID NO: 166440 - protein, 22 aa, Homo sapiens
  CDR3 for beta chain variable domain of TCR clone 83220 (TRBV15, TRBJ2-1)
QAWGTQPCTCVPPAEVDTARFF

SEQ ID NO: 166441 - protein, 11 aa, Homo sapiens
  CDR3 for alpha chain variable domain of TCR clone 83221 (TRAV3, TRAJ21)
CAMGNFNKFYF

SEQ ID NO: 166442 - protein, 11 aa, Homo sapiens
  CDR3 for beta chain variable domain of TCR clone 83221 (TRBV11-2, TRBJ2-2)
CASSLPGELFF

SEQ ID NO: 166443 - protein, 11 aa, Homo sapiens
  CDR3 for alpha chain variable domain of TCR clone 83222 (TRAV35, TRAJ31)
CAESGDARLMF

SEQ ID NO: 166444 - protein, 13 aa, Homo sapiens
  CDR3 for beta chain variable domain of TCR clone 83222 (TRBV25-1, TRBJ2-7)
CASSEDGDYEQYF

SEQ ID NO: 166445 - protein, 19 aa, Homo sapiens
  CDR3 for alpha chain variable domain of TCR clone 83223 (TRAV2, TRAJ20)
ILQVREADAAVYRDCKLSF

SEQ ID NO: 166446 - protein, 15 aa, Homo sapiens
  CDR3 for beta chain variable domain of TCR clone 83223 (TRBV20-1, TRBJ2-5)
CSAEGKGGLQETQYF

SEQ ID NO: 166447 - protein, 14 aa, Homo sapiens
  CDR3 for alpha chain variable domain of TCR clone 83224 (TRAV27, TRAJ22)
CAGVVPGSARQLTF

SEQ ID NO: 166448 - protein, 14 aa, Homo sapiens
  CDR3 for beta chain variable domain of TCR clone 83224 (TRBV19, TRBJ2-1)
CASPTFVLSGEQFF

SEQ ID NO: 166449 - protein, 19 aa, Homo sapiens
  CDR3 for alpha chain variable domain of TCR clone 83225 (TRAV2, TRAJ20)
ILQVRKADAAVYRDCKLSF

SEQ ID NO: 166450 - protein, 16 aa, Homo sapiens
  CDR3 for beta chain variable domain of TCR clone 83225 (TRBV20-1, TRBJ1-4)
CSAPGQGLLTNEKLFF

SEQ ID NO: 166451 - protein, 14 aa, Homo sapiens
  CDR3 for alpha chain variable domain of TCR clone 83226 (TRAV12-2, TRAJ33)
CAVKRARSNYQLIG

SEQ ID NO: 166452 - protein, 12 aa, Homo sapiens
  CDR3 for beta chain variable domain of TCR clone 83226 (TRBV24-1, TRBJ2-3)
CATSDSTDTQYF

SEQ ID NO: 166453 - protein, 12 aa, Homo sapiens
  CDR3 for alpha chain variable domain of TCR clone 83227 (TRAV16, TRAJ10)
CSRTGGGNKLTF

SEQ ID NO: 166454 - protein, 10 aa, Homo sapiens
  CDR3 for beta chain variable domain of TCR clone 83227 (TRBV5-1, TRBJ2-2)
CASSSQGGTP

SEQ ID NO: 166455 - protein, 13 aa, Homo sapiens
  CDR3 for alpha chain variable domain of TCR clone 83228 (TRAV27, TRAJ37)
CAGGPSNTGKLIF

SEQ ID NO: 166456 - protein, 15 aa, Homo sapiens
  CDR3 for beta chain variable domain of TCR clone 83228 (TRBV18, TRBJ2-1)
CASLPDRGRDNEQFF

SEQ ID NO: 166457 - protein, 14 aa, Homo sapiens
  CDR3 for alpha chain variable domain of TCR clone 83229 (TRAV13-2, TRAJ43)
CAEIPTYNNNDMRF

SEQ ID NO: 166458 - protein, 15 aa, Homo sapiens
  CDR3 for beta chain variable domain of TCR clone 83229 (TRBV7-9, TRBJ2-2)
FASGPLDTFPGELFF

SEQ ID NO: 166459 - protein, 18 aa, Homo sapiens
  CDR3 for alpha chain variable domain of TCR clone 83230 (TRAV13-1, TRAJ52)
CAAKNPNAGGTSYGKLTF

SEQ ID NO: 166460 - protein, 18 aa, Homo sapiens
  CDR3 for beta chain variable domain of TCR clone 83230 (TRBV13, TRBJ2-6)
CASSPMTSGGSGANVLTF

SEQ ID NO: 166461 - protein, 23 aa, Homo sapiens
  CDR3 for alpha chain variable domain of TCR clone 83231 (TRAV26-1, TRAJ38)
CIADNAGNNHIQNPDPAVYQLRD

SEQ ID NO: 166462 - protein, 12 aa, Homo sapiens
  CDR3 for beta chain variable domain of TCR clone 83231 (TRBV11-2, TRBJ2-2)
CASSLGGEELFF

SEQ ID NO: 166463 - protein, 12 aa, Homo sapiens
  CDR3 for alpha chain variable domain of TCR clone 83232 (TRAV13-1, TRAJ48)
CAANFGNEKLTF

SEQ ID NO: 166464 - protein, 13 aa, Homo sapiens
  CDR3 for beta chain variable domain of TCR clone 83232 (TRBV7-3, TRBJ1-1)
CASSQDWEAEAFF

SEQ ID NO: 166465 - protein, 15 aa, Homo sapiens
  CDR3 for alpha chain variable domain of TCR clone 83233 (TRAV13-1, TRAJ32)
CAASNGWGCYKQAHL

SEQ ID NO: 166466 - protein, 17 aa, Homo sapiens
  CDR3 for beta chain variable domain of TCR clone 83233 (TRBV15, TRBJ1-2)
CATSGREIDVVNYGYTF

SEQ ID NO: 166467 - protein, 18 aa, Homo sapiens
  CDR3 for alpha chain variable domain of TCR clone 83234 (TRAV26-1, TRAJ52)
CIVRVEGAGGTSYGKLTF

SEQ ID NO: 166468 - protein, 13 aa, Homo sapiens
  CDR3 for beta chain variable domain of TCR clone 83234 (TRBV7-3, TRBJ1-2)
CDSSLKRGYGYTF

SEQ ID NO: 166469 - protein, 13 aa, Homo sapiens
  CDR3 for alpha chain variable domain of TCR clone 83235 (TRAV3, TRAJ20)
CAVRRLNDYKLSF

SEQ ID NO: 166470 - protein, 13 aa, Homo sapiens
  CDR3 for beta chain variable domain of TCR clone 83235 (TRBV6-1, TRBJ2-1)
CAGMDPTNNEQFF

SEQ ID NO: 166471 - protein, 13 aa, Homo sapiens
  CDR3 for alpha chain variable domain of TCR clone 83236 (TRAV27, TRAJ11)
CAGGGSGYSTLTF

SEQ ID NO: 166472 - protein, 16 aa, Homo sapiens
  CDR3 for beta chain variable domain of TCR clone 83236 (TRBV6-3, TRBJ2-3)
CASSSPGLASTDTQYF

SEQ ID NO: 166473 - protein, 14 aa, Homo sapiens
  CDR3 for alpha chain variable domain of TCR clone 83237 (TRAV13-1, TRAJ53)
CATSTGGSNYKLTF

SEQ ID NO: 166474 - protein, 19 aa, Homo sapiens
  CDR3 for beta chain variable domain of TCR clone 83237 (TRBV19, TRBJ2-5)
CASSIGQVTDFFLGETQYF

SEQ ID NO: 166475 - protein, 11 aa, Homo sapiens
  CDR3 for alpha chain variable domain of TCR clone 83238 (TRAV21, TRAJ34)
CAHYNTDKLIF

SEQ ID NO: 166476 - protein, 16 aa, Homo sapiens
  CDR3 for beta chain variable domain of TCR clone 83238 (TRBV4-1, TRBJ2-1)
CASSQARQGWINEQFF

SEQ ID NO: 166477 - protein, 16 aa, Homo sapiens
  CDR3 for alpha chain variable domain of TCR clone 83239 (TRAV8-3, TRAJ10)
CAVGPILTGGGNKLTF

SEQ ID NO: 166478 - protein, 16 aa, Homo sapiens
  CDR3 for beta chain variable domain of TCR clone 83239 (TRBV7-2, TRBJ2-5)
CASSSKRLSGQETQYF

SEQ ID NO: 166479 - protein, 13 aa, Homo sapiens
  CDR3 for alpha chain variable domain of TCR clone 83240 (TRAV13-1, TRAJ21)
CAASIYNFNKFYF

SEQ ID NO: 166480 - protein, 14 aa, Homo sapiens
  CDR3 for beta chain variable domain of TCR clone 83240 (TRBV18, TRBJ2-7)
CASSPRGGAYEQYF

SEQ ID NO: 166481 - protein, 17 aa, Homo sapiens
  CDR3 for alpha chain variable domain of TCR clone 83241 (TRAV12-3, TRAJ6)
CAMSARGGAGGSYIPTF

SEQ ID NO: 166482 - protein, 12 aa, Homo sapiens
  CDR3 for beta chain variable domain of TCR clone 83241 (TRBV12-4, TRBJ2-3)
CASSTLPDKQYF

SEQ ID NO: 166483 - protein, 18 aa, Homo sapiens
  CDR3 for alpha chain variable domain of TCR clone 83242 (TRAV29/DV5, TRAJ52)
CAAGFRGAGGTSYGKLTF

SEQ ID NO: 166484 - protein, 16 aa, Homo sapiens
  CDR3 for beta chain variable domain of TCR clone 83242 (TRBV7-3, TRBJ2-2)
CASSLKRGTLAGELFF

SEQ ID NO: 166485 - protein, 15 aa, Homo sapiens
  CDR3 for alpha chain variable domain of TCR clone 83243 (TRAV12-1, TRAJ8)
CVVNVENTGFQKPVF

SEQ ID NO: 166486 - protein, 16 aa, Homo sapiens
  CDR3 for beta chain variable domain of TCR clone 83243 (TRBV7-2, TRBJ2-7)
CASSLEAGGPWYEQYF

SEQ ID NO: 166487 - protein, 11 aa, Homo sapiens
  CDR3 for alpha chain variable domain of TCR clone 83244 (TRAV13-1, TRAJ40)
CSVSGTYKYIF

SEQ ID NO: 166488 - protein, 13 aa, Homo sapiens
  CDR3 for beta chain variable domain of TCR clone 83244 (TRBV19, TRBJ1-5)
CASSIGGNQPQHF

SEQ ID NO: 166489 - protein, 15 aa, Homo sapiens
  CDR3 for alpha chain variable domain of TCR clone 83245 (TRAV25, TRAJ52)
CAGRPGGTSYGKLTF

SEQ ID NO: 166490 - protein, 12 aa, Homo sapiens
  CDR3 for beta chain variable domain of TCR clone 83245 (TRBV5-1, TRBJ2-7)
CASSFRGYEQYF

SEQ ID NO: 166491 - protein, 12 aa, Homo sapiens
  CDR3 for alpha chain variable domain of TCR clone 83246 (TRAV12-1, TRAJ40)
CVVYSGTYKYIF

SEQ ID NO: 166492 - protein, 18 aa, Homo sapiens
  CDR3 for beta chain variable domain of TCR clone 83246 (TRBV11-2, TRBJ2-3)
CASSLGGASGGAPNTQYF

SEQ ID NO: 166493 - protein, 14 aa, Homo sapiens
  CDR3 for alpha chain variable domain of TCR clone 83247 (TRAV2, TRAJ9)
CAVDPNTGGFKTIF

SEQ ID NO: 166494 - protein, 13 aa, Homo sapiens
  CDR3 for beta chain variable domain of TCR clone 83247 (TRBV7-9, TRBJ1-2)
CASSLKQNYGYTF

SEQ ID NO: 166495 - protein, 15 aa, Homo sapiens
  CDR3 for alpha chain variable domain of TCR clone 83248 (TRAV8-3, TRAJ45)
CASSYSGGGADGLTF

SEQ ID NO: 166496 - protein, 17 aa, Homo sapiens
  CDR3 for beta chain variable domain of TCR clone 83248 (TRBV20-1, TRBJ2-2)
CSASGSGQGGLTGELFF

SEQ ID NO: 166497 - protein, 16 aa, Homo sapiens
  CDR3 for alpha chain variable domain of TCR clone 83249 (TRAV4, TRAJ22)
CLVGDLYSGSARQLTF

SEQ ID NO: 166498 - protein, 16 aa, Homo sapiens
  CDR3 for beta chain variable domain of TCR clone 83249 (TRBV7-9, TRBJ2-1)
CASSDVAGGYYNEQFF

SEQ ID NO: 166499 - protein, 14 aa, Homo sapiens
  CDR3 for alpha chain variable domain of TCR clone 83250 (TRAV2, TRAJ16)
CAMERGSDGQKLLS

SEQ ID NO: 166500 - protein, 12 aa, Homo sapiens
  CDR3 for beta chain variable domain of TCR clone 83250 (TRBV6-5, TRBJ2-7)
CASYIYGYEQYF

SEQ ID NO: 166501 - protein, 13 aa, Homo sapiens
  CDR3 for alpha chain variable domain of TCR clone 83251 (TRAV1-2, TRAJ9)
CAALNTGGFKTIF

SEQ ID NO: 166502 - protein, 15 aa, Homo sapiens
  CDR3 for beta chain variable domain of TCR clone 83251 (TRBV28, TRBJ2-1)
CASRVGLDEYNEQFF

SEQ ID NO: 166503 - protein, 13 aa, Homo sapiens
  CDR3 for alpha chain variable domain of TCR clone 83252 (TRAV27, TRAJ6)
CAGGTRGSYIPTF

SEQ ID NO: 166504 - protein, 14 aa, Homo sapiens
  CDR3 for beta chain variable domain of TCR clone 83252 (TRBV28, TRBJ2-7)
CASKPGPDLYEQYF

SEQ ID NO: 166505 - protein, 16 aa, Homo sapiens
  CDR3 for alpha chain variable domain of TCR clone 83253 (TRAV30, TRAJ24)
CGTEIVDADSWGKFQF

SEQ ID NO: 166506 - protein, 14 aa, Homo sapiens
  CDR3 for beta chain variable domain of TCR clone 83253 (TRBV28, TRBJ2-1)
CASSIQGTVGEQFF

SEQ ID NO: 166507 - protein, 13 aa, Homo sapiens
  CDR3 for alpha chain variable domain of TCR clone 83254 (TRAV17, TRAJ9)
CATASTGGFKTIF

SEQ ID NO: 166508 - protein, 14 aa, Homo sapiens
  CDR3 for beta chain variable domain of TCR clone 83254 (TRBV7-2, TRBJ2-7)
CASRSQGAAYEQYF

SEQ ID NO: 166509 - protein, 14 aa, Homo sapiens
  CDR3 for alpha chain variable domain of TCR clone 83255 (TRAV1-2, TRAJ8)
CAVREDTGFQKLVF

SEQ ID NO: 166510 - protein, 16 aa, Homo sapiens
  CDR3 for beta chain variable domain of TCR clone 83255 (TRBV11-2, TRBJ2-3)
CASSSRTSGGAGTQYF

SEQ ID NO: 166511 - protein, 12 aa, Homo sapiens
  CDR3 for alpha chain variable domain of TCR clone 83256 (TRAV12-3, TRAJ3)
CAIDGSASKIIF

SEQ ID NO: 166512 - protein, 17 aa, Homo sapiens
  CDR3 for beta chain variable domain of TCR clone 83256 (TRBV7-9, TRBJ2-3)
CASSLEEAGAYPDTQYF

SEQ ID NO: 166513 - protein, 14 aa, Homo sapiens
  CDR3 for alpha chain variable domain of TCR clone 83257 (TRAV8-1, TRAJ5)
CAVRTDTGRRALTF

SEQ ID NO: 166514 - protein, 14 aa, Homo sapiens
  CDR3 for beta chain variable domain of TCR clone 83257 (TRBV7-8, TRBJ2-3)
CASSFPDVQDTQYF

SEQ ID NO: 166515 - protein, 12 aa, Homo sapiens
  CDR3 for alpha chain variable domain of TCR clone 83258 (TRAV8-3, TRAJ27)
FAVGAEAGKSTF

SEQ ID NO: 166516 - protein, 14 aa, Homo sapiens
  CDR3 for beta chain variable domain of TCR clone 83258 (TRBV2, TRBJ2-1)
CASRLIVGHDEQFF

SEQ ID NO: 166517 - protein, 11 aa, Homo sapiens
  CDR3 for alpha chain variable domain of TCR clone 83259 (TRAV29/DV5, TRAJ47)
CAATYGNKRVF

SEQ ID NO: 166518 - protein, 17 aa, Homo sapiens
  CDR3 for beta chain variable domain of TCR clone 83259 (TRBV7-9, TRBJ2-1)
CASSLVASYPSYNEQFF

SEQ ID NO: 166519 - protein, 12 aa, Homo sapiens
  CDR3 for alpha chain variable domain of TCR clone 83260 (TRAV17, TRAJ4)
CATDGGYNKLIF

SEQ ID NO: 166520 - protein, 13 aa, Homo sapiens
  CDR3 for beta chain variable domain of TCR clone 83260 (TRBV29-1, TRBJ2-2)
CSTTGDNTGELFF

SEQ ID NO: 166521 - protein, 16 aa, Homo sapiens
  CDR3 for alpha chain variable domain of TCR clone 83261 (TRAV12-2, TRAJ40)
CAVLRGGTSGTYKYIF

SEQ ID NO: 166522 - protein, 14 aa, Homo sapiens
  CDR3 for beta chain variable domain of TCR clone 83261 (TRBV20-1, TRBJ2-5)
CSARDGRAGETQYF

SEQ ID NO: 166523 - protein, 13 aa, Homo sapiens
  CDR3 for alpha chain variable domain of TCR clone 83262 (TRAV12-3, TRAJ33)
CAMSVNSNYQLIW

SEQ ID NO: 166524 - protein, 15 aa, Homo sapiens
  CDR3 for beta chain variable domain of TCR clone 83262 (TRBV7-3, TRBJ2-2)
CASSETGQGTGELFF

SEQ ID NO: 166525 - protein, 12 aa, Homo sapiens
  CDR3 for alpha chain variable domain of TCR clone 83263 (TRAV8-3, TRAJ26)
CAGDNYGQNFVF

SEQ ID NO: 166526 - protein, 17 aa, Homo sapiens
  CDR3 for beta chain variable domain of TCR clone 83263 (TRBV7-8, TRBJ1-2)
CASSLRPLQGHLYGYTF

SEQ ID NO: 166527 - protein, 13 aa, Homo sapiens
  CDR3 for alpha chain variable domain of TCR clone 83264 (TRAV12-3, TRAJ9)
CAMRNTGGFKTIF

SEQ ID NO: 166528 - protein, 18 aa, Homo sapiens
  CDR3 for beta chain variable domain of TCR clone 83264 (TRBV11-2, TRBJ2-3)
CASSLGGASRGAPNTQYF

SEQ ID NO: 166529 - protein, 16 aa, Homo sapiens
  CDR3 for alpha chain variable domain of TCR clone 83265 (TRAV12-3, TRAJ53)
CAMSVGSGGSNYKLTF

SEQ ID NO: 166530 - protein, 11 aa, Homo sapiens
  CDR3 for beta chain variable domain of TCR clone 83265 (TRBV29-1, TRBJ2-5)
CGVASGETQYF

SEQ ID NO: 166531 - protein, 11 aa, Homo sapiens
  CDR3 for alpha chain variable domain of TCR clone 83266 (TRAV2, TRAJ13)
CASVGYQKVTF

SEQ ID NO: 166532 - protein, 16 aa, Homo sapiens
  CDR3 for beta chain variable domain of TCR clone 83266 (TRBV2, TRBJ2-1)
CASSVGGSLSYNEQFF

SEQ ID NO: 166533 - protein, 13 aa, Homo sapiens
  CDR3 for alpha chain variable domain of TCR clone 83267 (TRAV13-1, TRAJ39)
CSKYSNAGDMLTF

SEQ ID NO: 166534 - protein, 16 aa, Homo sapiens
  CDR3 for beta chain variable domain of TCR clone 83267 (TRBV20-1, TRBJ1-4)
CSAPGQGLLTNEKLFF

SEQ ID NO: 166535 - protein, 13 aa, Homo sapiens
  CDR3 for alpha chain variable domain of TCR clone 83268 (TRAV24, TRAJ44)
CALLTGTASKLTF

SEQ ID NO: 166536 - protein, 13 aa, Homo sapiens
  CDR3 for beta chain variable domain of TCR clone 83268 (TRBV19, TRBJ1-3)
CASRLSPGNTIYF

SEQ ID NO: 166537 - protein, 13 aa, Homo sapiens
  CDR3 for alpha chain variable domain of TCR clone 83269 (TRAV4, TRAJ22)
CLGGSGSARQLTF

SEQ ID NO: 166538 - protein, 15 aa, Homo sapiens
  CDR3 for beta chain variable domain of TCR clone 83269 (TRBV7-9, TRBJ1-6)
CASSSPGRGDSPLHF

SEQ ID NO: 166539 - protein, 14 aa, Homo sapiens
  CDR3 for alpha chain variable domain of TCR clone 83270 (TRAV29/DV5, TRAJ36)
CAARRKTGANNLFF

SEQ ID NO: 166540 - protein, 16 aa, Homo sapiens
  CDR3 for beta chain variable domain of TCR clone 83270 (TRBV7-9, TRBJ1-2)
CASSLGFSSGEDGYTF

SEQ ID NO: 166541 - protein, 14 aa, Homo sapiens
  CDR3 for alpha chain variable domain of TCR clone 83271 (TRAV2, TRAJ9)
CAVEDRSGGFKTIF

SEQ ID NO: 166542 - protein, 14 aa, Homo sapiens
  CDR3 for beta chain variable domain of TCR clone 83271 (TRBV7-3, TRBJ2-1)
CSSSLAGGTNEQFF

SEQ ID NO: 166543 - protein, 17 aa, Homo sapiens
  CDR3 for alpha chain variable domain of TCR clone 83272 (TRAV3, TRAJ6)
CAVSRRTDKGGSYIPTF

SEQ ID NO: 166544 - protein, 18 aa, Homo sapiens
  CDR3 for beta chain variable domain of TCR clone 83272 (TRBV7-2, TRBJ2-3)
CASRLETSRGRKADTQYF

SEQ ID NO: 166545 - protein, 14 aa, Homo sapiens
  CDR3 for alpha chain variable domain of TCR clone 83273 (TRAV1-2, TRAJ6)
CAVSLSGRSYIPTF

SEQ ID NO: 166546 - protein, 15 aa, Homo sapiens
  CDR3 for beta chain variable domain of TCR clone 83273 (TRBV28, TRBJ2-7)
CASSPGGRGFYEQYF

SEQ ID NO: 166547 - protein, 14 aa, Homo sapiens
  CDR3 for alpha chain variable domain of TCR clone 83274 (TRAV27, TRAJ36)
RAGPPKRGANNLFF

SEQ ID NO: 166548 - protein, 15 aa, Homo sapiens
  CDR3 for beta chain variable domain of TCR clone 83274 (TRBV18, TRBJ2-7)
CASSPASTPNYEQYF

SEQ ID NO: 166549 - protein, 16 aa, Homo sapiens
  CDR3 for alpha chain variable domain of TCR clone 83275 (TRAV17, TRAJ35)
CATAEGGIGFGNALHC

SEQ ID NO: 166550 - protein, 16 aa, Homo sapiens
  CDR3 for beta chain variable domain of TCR clone 83275 (TRBV6-5, TRBJ2-7)
CASSSDPTSGFYEQYF

SEQ ID NO: 166551 - protein, 14 aa, Homo sapiens
  CDR3 for alpha chain variable domain of TCR clone 83276 (TRAV8-4, TRAJ9)
CAVRINTGGFKTIF

SEQ ID NO: 166552 - protein, 16 aa, Homo sapiens
  CDR3 for beta chain variable domain of TCR clone 83276 (TRBV2, TRBJ2-1)
CASSVGGSLSYNEQFF

SEQ ID NO: 166553 - protein, 14 aa, Homo sapiens
  CDR3 for alpha chain variable domain of TCR clone 83277 (TRAV1-1, TRAJ27)
CAVIYNTNAGKSTF

SEQ ID NO: 166554 - protein, 16 aa, Homo sapiens
  CDR3 for beta chain variable domain of TCR clone 83277 (TRBV9, TRBJ2-1)
CASSVGGGGNYNEQFF

SEQ ID NO: 166555 - protein, 13 aa, Homo sapiens
  CDR3 for alpha chain variable domain of TCR clone 83278 (TRAV8-4, TRAJ30)
CAVSVNRDDKITF

SEQ ID NO: 166556 - protein, 13 aa, Homo sapiens
  CDR3 for beta chain variable domain of TCR clone 83278 (TRBV3-1, TRBJ2-2)
CASLARGSGELFF

SEQ ID NO: 166557 - protein, 16 aa, Homo sapiens
  CDR3 for alpha chain variable domain of TCR clone 83279 (TRAV16, TRAJ42)
CARKMNYGGSQGNLIF

SEQ ID NO: 166558 - protein, 16 aa, Homo sapiens
  CDR3 for beta chain variable domain of TCR clone 83279 (TRBV12-5, TRBJ2-5)
CASGPRTSGNQETQYF

SEQ ID NO: 166559 - protein, 16 aa, Homo sapiens
  CDR3 for alpha chain variable domain of TCR clone 83280 (TRAV30, TRAJ57)
CGTGWAPQGGSEKLVF

SEQ ID NO: 166560 - protein, 14 aa, Homo sapiens
  CDR3 for beta chain variable domain of TCR clone 83280 (TRBV18, TRBJ1-1)
CASSPGVQGVEAFF

SEQ ID NO: 166561 - protein, 11 aa, Homo sapiens
  CDR3 for alpha chain variable domain of TCR clone 83281 (TRAV2, TRAJ33)
CGVESNYQLIW

SEQ ID NO: 166562 - protein, 15 aa, Homo sapiens
  CDR3 for beta chain variable domain of TCR clone 83281 (TRBV19, TRBJ1-1)
CASTSGQIQNTEAFF

SEQ ID NO: 166563 - protein, 13 aa, Homo sapiens
  CDR3 for alpha chain variable domain of TCR clone 83282 (TRAV30, TRAJ34)
CGTVGYNTDKLIF

SEQ ID NO: 166564 - protein, 13 aa, Homo sapiens
  CDR3 for beta chain variable domain of TCR clone 83282 (TRBV7-9, TRBJ1-2)
CASSLKQNYGYTF

SEQ ID NO: 166565 - protein, 15 aa, Homo sapiens
  CDR3 for alpha chain variable domain of TCR clone 83283 (TRAV25, TRAJ52)
CAGRPDGTSYGKLTF

SEQ ID NO: 166566 - protein, 15 aa, Homo sapiens
  CDR3 for beta chain variable domain of TCR clone 83283 (TRBV19, TRBJ1-2)
CASSVGQVLNYGYTF

SEQ ID NO: 166567 - protein, 13 aa, Homo sapiens
  CDR3 for alpha chain variable domain of TCR clone 83284 (TRAV16, TRAJ26)
CITVPCLGQNFVF

SEQ ID NO: 166568 - protein, 12 aa, Homo sapiens
  CDR3 for beta chain variable domain of TCR clone 83284 (TRBV11-2, TRBJ2-1)
CASSPGNNEQFF

SEQ ID NO: 166569 - protein, 14 aa, Homo sapiens
  CDR3 for alpha chain variable domain of TCR clone 83285 (TRAV12-2, TRAJ17)
CAVLFKAAGNKLTF

SEQ ID NO: 166570 - protein, 15 aa, Homo sapiens
  CDR3 for beta chain variable domain of TCR clone 83285 (TRBV5-1, TRBJ2-7)
CASSLDLTSSYEQYF

SEQ ID NO: 166571 - protein, 12 aa, Homo sapiens
  CDR3 for alpha chain variable domain of TCR clone 83286 (TRAV30, TRAJ43)
CGTEERGNDTRF

SEQ ID NO: 166572 - protein, 13 aa, Homo sapiens
  CDR3 for beta chain variable domain of TCR clone 83286 (TRBV7-9, TRBJ2-3)
CASSPGSTDTQYF

SEQ ID NO: 166573 - protein, 13 aa, Homo sapiens
  CDR3 for alpha chain variable domain of TCR clone 83287 (TRAV21, TRAJ27)
CAARPGNAGKPTL

SEQ ID NO: 166574 - protein, 14 aa, Homo sapiens
  CDR3 for beta chain variable domain of TCR clone 83287 (TRBV7-6, TRBJ2-3)
CASSLGTVTDTQYF

SEQ ID NO: 166575 - protein, 14 aa, Homo sapiens
  CDR3 for alpha chain variable domain of TCR clone 83288 (TRAV17, TRAJ12)
CATDENDSSYKLIF

SEQ ID NO: 166576 - protein, 16 aa, Homo sapiens
  CDR3 for beta chain variable domain of TCR clone 83288 (TRBV11-2, TRBJ2-1)
CASSPRLAGVYNEQFF

SEQ ID NO: 166577 - protein, 15 aa, Homo sapiens
  CDR3 for alpha chain variable domain of TCR clone 83289 (TRAV8-3, TRAJ11)
CAVGLLNSGYSTLTF

SEQ ID NO: 166578 - protein, 18 aa, Homo sapiens
  CDR3 for beta chain variable domain of TCR clone 83289 (TRBV12-4, TRBJ2-2)
CASSLVAGTRGRTGELFF

SEQ ID NO: 166579 - protein, 14 aa, Homo sapiens
  CDR3 for alpha chain variable domain of TCR clone 83290 (TRAV2, TRAJ9)
CAVEGRSGGFKTIF

SEQ ID NO: 166580 - protein, 11 aa, Homo sapiens
  CDR3 for beta chain variable domain of TCR clone 83290 (TRBV7-9, TRBJ2-5)
CASSLGETQYF

SEQ ID NO: 166581 - protein, 16 aa, Homo sapiens
  CDR3 for alpha chain variable domain of TCR clone 83291 (TRAV1-2, TRAJ35)
CAVRGLTIGFGNVLHF

SEQ ID NO: 166582 - protein, 13 aa, Homo sapiens
  CDR3 for beta chain variable domain of TCR clone 83291 (TRBV6-6, TRBJ2-1)
CASSLHQGDEQFF

SEQ ID NO: 166583 - protein, 13 aa, Homo sapiens
  CDR3 for alpha chain variable domain of TCR clone 83292 (TRAV29/DV5, TRAJ47)
CAASAEYGNKLVF

SEQ ID NO: 166584 - protein, 16 aa, Homo sapiens
  CDR3 for beta chain variable domain of TCR clone 83292 (TRBV13, TRBJ2-2)
CASSPRTGEHTGELFF

SEQ ID NO: 166585 - protein, 14 aa, Homo sapiens
  CDR3 for alpha chain variable domain of TCR clone 83293 (TRAV8-1, TRAJ5)
CAVRTDTGRRALTF

SEQ ID NO: 166586 - protein, 13 aa, Homo sapiens
  CDR3 for beta chain variable domain of TCR clone 83293 (TRBV27, TRBJ2-3)
CASSWGRTDTQYF

SEQ ID NO: 166587 - protein, 10 aa, Homo sapiens
  CDR3 for alpha chain variable domain of TCR clone 83294 (TRAV5, TRAJ34)
CAEDTDKLIF

SEQ ID NO: 166588 - protein, 17 aa, Homo sapiens
  CDR3 for beta chain variable domain of TCR clone 83294 (TRBV20-1, TRBJ2-1)
CSASSSGLAGSYNEQFF

SEQ ID NO: 166589 - protein, 15 aa, Homo sapiens
  CDR3 for alpha chain variable domain of TCR clone 83295 (TRAV1-2, TRAJ30)
CAVRPHGNRDDKTIF

SEQ ID NO: 166590 - protein, 13 aa, Homo sapiens
  CDR3 for beta chain variable domain of TCR clone 83295 (TRBV4-1, TRBJ2-7)
CASSQGQAYEQYF

SEQ ID NO: 166591 - protein, 11 aa, Homo sapiens
  CDR3 for alpha chain variable domain of TCR clone 83296 (TRAV2, TRAJ13)
CASGGYQKVTF

SEQ ID NO: 166592 - protein, 14 aa, Homo sapiens
  CDR3 for beta chain variable domain of TCR clone 83296 (TRBV12-4, TRBJ2-3)
CASTIAGWGDTQYF

SEQ ID NO: 166593 - protein, 17 aa, Homo sapiens
  CDR3 for alpha chain variable domain of TCR clone 83297 (TRAV13-1, TRAJ31)
CAPRDRLMFGDGTQLVV

SEQ ID NO: 166594 - protein, 20 aa, Homo sapiens
  CDR3 for beta chain variable domain of TCR clone 83297 (TRBV7-9, TRBJ2-2)
CASSHLFPGPTIHITGELFF

SEQ ID NO: 166595 - protein, 13 aa, Homo sapiens
  CDR3 for alpha chain variable domain of TCR clone 83298 (TRAV35, TRAJ44)
CAGLSGTASKLTF

SEQ ID NO: 166596 - protein, 14 aa, Homo sapiens
  CDR3 for beta chain variable domain of TCR clone 83298 (TRBV4-2, TRBJ1-5)
CASSQDSINQPQHF

SEQ ID NO: 166597 - protein, 10 aa, Homo sapiens
  CDR3 for alpha chain variable domain of TCR clone 83299 (TRAV36/DV7, TRAJ48)
CAVGSEKLTF

SEQ ID NO: 166598 - protein, 12 aa, Homo sapiens
  CDR3 for beta chain variable domain of TCR clone 83299 (TRBV20-1, TRBJ2-5)
CSAGGAGETQYF

SEQ ID NO: 166599 - protein, 11 aa, Homo sapiens
  CDR3 for alpha chain variable domain of TCR clone 83300 (TRAV2, TRAJ13)
CASGGYQKVTF

SEQ ID NO: 166600 - protein, 15 aa, Homo sapiens
  CDR3 for beta chain variable domain of TCR clone 83300 (TRBV19, TRBJ2-4)
CASRGPRRGENIQYF

SEQ ID NO: 166601 - protein, 13 aa, Homo sapiens
  CDR3 for alpha chain variable domain of TCR clone 83301 (TRAV3, TRAJ7)
CAVSSYGNNRLAF

SEQ ID NO: 166602 - protein, 14 aa, Homo sapiens
  CDR3 for beta chain variable domain of TCR clone 83301 (TRBV19, TRBJ2-1)
CASPTFVLSGEQFF

SEQ ID NO: 166603 - protein, 14 aa, Homo sapiens
  CDR3 for alpha chain variable domain of TCR clone 83302 (TRAV1-2, TRAJ8)
CAVREDTGFQKLVF

SEQ ID NO: 166604 - protein, 14 aa, Homo sapiens
  CDR3 for beta chain variable domain of TCR clone 83302 (TRBV12-5, TRBJ2-5)
CASGSRTHQETQYS

SEQ ID NO: 166605 - protein, 15 aa, Homo sapiens
  CDR3 for alpha chain variable domain of TCR clone 83303 (TRAV12-1, TRAJ9)
CVVSFGDTVGFKTIF

SEQ ID NO: 166606 - protein, 13 aa, Homo sapiens
  CDR3 for beta chain variable domain of TCR clone 83303 (TRBV2, TRBJ1-4)
CASSERAGEKLFF

SEQ ID NO: 166607 - protein, 12 aa, Homo sapiens
  CDR3 for alpha chain variable domain of TCR clone 83304 (TRAV8-3, TRAJ26)
CAGDNYGQNFVF

SEQ ID NO: 166608 - protein, 15 aa, Homo sapiens
  CDR3 for beta chain variable domain of TCR clone 83304 (TRBV7-2, TRBJ2-3)
CASSSTGLETDTQYF

SEQ ID NO: 166609 - protein, 15 aa, Homo sapiens
  CDR3 for alpha chain variable domain of TCR clone 83305 (TRAV27, TRAJ38)
CAARRNAGNNRKLIW

SEQ ID NO: 166610 - protein, 13 aa, Homo sapiens
  CDR3 for beta chain variable domain of TCR clone 83305 (TRBV7-3, TRBJ1-2)
CASSLKRGYGYTF

SEQ ID NO: 166611 - protein, 11 aa, Homo sapiens
  CDR3 for alpha chain variable domain of TCR clone 83306 (TRAV12-3, TRAJ27)
CAMANAGKSTS

SEQ ID NO: 166612 - protein, 13 aa, Homo sapiens
  CDR3 for beta chain variable domain of TCR clone 83306 (TRBV20-1, TRBJ1-1)
CSARVGGNTEAFF

SEQ ID NO: 166613 - protein, 14 aa, Homo sapiens
  CDR3 for alpha chain variable domain of TCR clone 83307 (TRAV20, TRAJ29)
CAVQAWVGNTPLVF

SEQ ID NO: 166614 - protein, 15 aa, Homo sapiens
  CDR3 for beta chain variable domain of TCR clone 83307 (TRBV29-1, TRBJ2-7)
CSVESFDRGSYEQYF

SEQ ID NO: 166615 - protein, 16 aa, Homo sapiens
  CDR3 for alpha chain variable domain of TCR clone 83308 (TRAV26-1, TRAJ47)
CIVRVVLSQYGNKLVF

SEQ ID NO: 166616 - protein, 16 aa, Homo sapiens
  CDR3 for beta chain variable domain of TCR clone 83308 (TRBV5-1, TRBJ2-1)
CASSLGVSGSYNEQFF

SEQ ID NO: 166617 - protein, 15 aa, Homo sapiens
  CDR3 for alpha chain variable domain of TCR clone 83309 (TRAV3, TRAJ4)
CAVRDGTGGYNKLIF

SEQ ID NO: 166618 - protein, 16 aa, Homo sapiens
  CDR3 for beta chain variable domain of TCR clone 83309 (TRBV19, TRBJ2-1)
CASSKAGPSSYNEQFF

SEQ ID NO: 166619 - protein, 13 aa, Homo sapiens
  CDR3 for alpha chain variable domain of TCR clone 83310 (TRAV2, TRAJ40)
CAVVTSGTYKYIF

SEQ ID NO: 166620 - protein, 17 aa, Homo sapiens
  CDR3 for beta chain variable domain of TCR clone 83310 (TRBV11-2, TRBJ2-1)
CASSLYPPGVEYNEQFL

SEQ ID NO: 166621 - protein, 16 aa, Homo sapiens
  CDR3 for alpha chain variable domain of TCR clone 83311 (TRAV20, TRAJ29)
CAVQESFRKHTSCLRK

SEQ ID NO: 166622 - protein, 16 aa, Homo sapiens
  CDR3 for beta chain variable domain of TCR clone 83311 (TRBV7-2, TRBJ2-7)
CASSLDLSGGAYEQYF

SEQ ID NO: 166623 - protein, 15 aa, Homo sapiens
  CDR3 for alpha chain variable domain of TCR clone 83312 (TRAV4, TRAJ8)
CLVGEQHTGLQKLVF

SEQ ID NO: 166624 - protein, 15 aa, Homo sapiens
  CDR3 for beta chain variable domain of TCR clone 83312 (TRBV7-9, TRBJ2-5)
CASSNRDYLQETQYF

SEQ ID NO: 166625 - protein, 15 aa, Homo sapiens
  CDR3 for alpha chain variable domain of TCR clone 83313 (TRAV8-6, TRAJ6)
CAVRDASGGSYIPTF

SEQ ID NO: 166626 - protein, 14 aa, Homo sapiens
  CDR3 for beta chain variable domain of TCR clone 83313 (TRBV19, TRBJ2-1)
CASSSGRDYNEQFF

SEQ ID NO: 166627 - protein, 14 aa, Homo sapiens
  CDR3 for alpha chain variable domain of TCR clone 83314 (TRAV8-4, TRAJ54)
CAVSEVLGAQKLVF

SEQ ID NO: 166628 - protein, 13 aa, Homo sapiens
  CDR3 for beta chain variable domain of TCR clone 83314 (TRBV27, TRBJ2-7)
CASSFVPSYEQYF

SEQ ID NO: 166629 - protein, 12 aa, Homo sapiens
  CDR3 for alpha chain variable domain of TCR clone 83315 (TRAV1-1, TRAJ39)
CAVPVVGNMLTF

SEQ ID NO: 166630 - protein, 14 aa, Homo sapiens
  CDR3 for beta chain variable domain of TCR clone 83315 (TRBV25-1, TRBJ1-1)
CASTHLGGNTEAFF

SEQ ID NO: 166631 - protein, 14 aa, Homo sapiens
  CDR3 for alpha chain variable domain of TCR clone 83316 (TRAV8-1, TRAJ34)
CAVNPSYNTDKLIF

SEQ ID NO: 166632 - protein, 16 aa, Homo sapiens
  CDR3 for beta chain variable domain of TCR clone 83316 (TRBV7-2, TRBJ2-6)
CASSLAGRSGANGLTF

SEQ ID NO: 166633 - protein, 14 aa, Homo sapiens
  CDR3 for alpha chain variable domain of TCR clone 83317 (TRAV27, TRAJ22)
CAGVSVLGKRQLTF

SEQ ID NO: 166634 - protein, 17 aa, Homo sapiens
  CDR3 for beta chain variable domain of TCR clone 83317 (TRBV13, TRBJ2-3)
CASSLSRVAGGRNTQYF

SEQ ID NO: 166635 - protein, 14 aa, Homo sapiens
  CDR3 for alpha chain variable domain of TCR clone 83318 (TRAV1-2, TRAJ8)
CAVREDTGFQKLVF

SEQ ID NO: 166636 - protein, 15 aa, Homo sapiens
  CDR3 for beta chain variable domain of TCR clone 83318 (TRBV6-4, TRBJ2-1)
CASSDSTGGYNEQFF

SEQ ID NO: 166637 - protein, 14 aa, Homo sapiens
  CDR3 for alpha chain variable domain of TCR clone 83319 (TRAV9-2, TRAJ39)
CALYIYNAGNMLTF

SEQ ID NO: 166638 - protein, 13 aa, Homo sapiens
  CDR3 for beta chain variable domain of TCR clone 83319 (TRBV19, TRBJ2-5)
CASSETAPETQYF

SEQ ID NO: 166639 - protein, 10 aa, Homo sapiens
  CDR3 for alpha chain variable domain of TCR clone 83320 (TRAV30, TRAJ32)
CGTEKDMVVL

SEQ ID NO: 166640 - protein, 13 aa, Homo sapiens
  CDR3 for beta chain variable domain of TCR clone 83320 (TRBV10-3, TRBJ2-7)
CAAKLAVNYEQYF

SEQ ID NO: 166641 - protein, 12 aa, Homo sapiens
  CDR3 for alpha chain variable domain of TCR clone 83321 (TRAV12-1, TRAJ40)
CVFYSGTYKNIF

SEQ ID NO: 166642 - protein, 18 aa, Homo sapiens
  CDR3 for beta chain variable domain of TCR clone 83321 (TRBV12-4, TRBJ2-2)
CASSLVAGTRGRTGELFF

SEQ ID NO: 166643 - protein, 14 aa, Homo sapiens
  CDR3 for alpha chain variable domain of TCR clone 83322 (TRAV8-4, TRAJ9)
CAVRINTGGFKTIF

SEQ ID NO: 166644 - protein, 10 aa, Homo sapiens
  CDR3 for beta chain variable domain of TCR clone 83322 (TRBV19, TRBJ1-1)
CASRQVEAFF

SEQ ID NO: 166645 - protein, 14 aa, Homo sapiens
  CDR3 for alpha chain variable domain of TCR clone 83323 (TRAV26-1, TRAJ34)
CIVRVSYNTDKLIF

SEQ ID NO: 166646 - protein, 15 aa, Homo sapiens
  CDR3 for beta chain variable domain of TCR clone 83323 (TRBV20-1, TRBJ2-7)
CSARVPAAYFYEQYF

SEQ ID NO: 166647 - protein, 23 aa, Homo sapiens
  CDR3 for alpha chain variable domain of TCR clone 83324 (TRAV12-2, TRAJ43)
SLLIRDSQPSDSATYLFAFDMRF

SEQ ID NO: 166648 - protein, 18 aa, Homo sapiens
  CDR3 for beta chain variable domain of TCR clone 83324 (TRBV20-1, TRBJ2-3)
CSASGLAGGPGTTDTQYF

SEQ ID NO: 166649 - protein, 13 aa, Homo sapiens
  CDR3 for alpha chain variable domain of TCR clone 83325 (TRAV13-2, TRAJ13)
CAERPGGYQTVTF

SEQ ID NO: 166650 - protein, 14 aa, Homo sapiens
  CDR3 for beta chain variable domain of TCR clone 83325 (TRBV23-1, TRBJ2-5)
CASSFLRSQETQYF

SEQ ID NO: 166651 - protein, 11 aa, Homo sapiens
  CDR3 for alpha chain variable domain of TCR clone 83326 (TRAV35, TRAJ12)
RRMDSSYKLIF

SEQ ID NO: 166652 - protein, 14 aa, Homo sapiens
  CDR3 for beta chain variable domain of TCR clone 83326 (TRBV19, TRBJ1-1)
CASSPNRGDTEASF

SEQ ID NO: 166653 - protein, 12 aa, Homo sapiens
  CDR3 for alpha chain variable domain of TCR clone 83327 (TRAV12-3, TRAJ20)
CAMVRGDYKLSF

SEQ ID NO: 166654 - protein, 14 aa, Homo sapiens
  CDR3 for beta chain variable domain of TCR clone 83327 (TRBV4-2, TRBJ2-7)
CASSQDGRKGEQYF

SEQ ID NO: 166655 - protein, 13 aa, Homo sapiens
  CDR3 for alpha chain variable domain of TCR clone 83328 (TRAV1-1, TRAJ23)
CAVVANQGGKLIF

SEQ ID NO: 166656 - protein, 19 aa, Homo sapiens
  CDR3 for beta chain variable domain of TCR clone 83328 (TRBV11-3, TRBJ2-2)
CASSTRPGAKTTNTGELFF

SEQ ID NO: 166657 - protein, 12 aa, Homo sapiens
  CDR3 for alpha chain variable domain of TCR clone 83329 (TRAV13-1, TRAJ15)
CAASQAGTALIF

SEQ ID NO: 166658 - protein, 18 aa, Homo sapiens
  CDR3 for beta chain variable domain of TCR clone 83329 (TRBV7-9, TRBJ2-3)
CASSLQINGQISTDTQYF

SEQ ID NO: 166659 - protein, 14 aa, Homo sapiens
  CDR3 for alpha chain variable domain of TCR clone 83330 (TRAV12-2, TRAJ17)
CAALFKAAGNKLTF

SEQ ID NO: 166660 - protein, 15 aa, Homo sapiens
  CDR3 for beta chain variable domain of TCR clone 83330 (TRBV18, TRBJ2-3)
CAGSPLAGETDTQYF

SEQ ID NO: 166661 - protein, 14 aa, Homo sapiens
  CDR3 for alpha chain variable domain of TCR clone 83331 (TRAV1-2, TRAJ16)
CAVNRFSDGQKLLL

SEQ ID NO: 166662 - protein, 14 aa, Homo sapiens
  CDR3 for beta chain variable domain of TCR clone 83331 (TRBV12-5, TRBJ2-5)
CASGSRTHQETQYF

SEQ ID NO: 166663 - protein, 14 aa, Homo sapiens
  CDR3 for alpha chain variable domain of TCR clone 83332 (TRAV17, TRAJ57)
CATDPQGGSEKLVF

SEQ ID NO: 166664 - protein, 15 aa, Homo sapiens
  CDR3 for beta chain variable domain of TCR clone 83332 (TRBV4-1, TRBJ1-4)
CASSDTGGTNEKLFF

SEQ ID NO: 166665 - protein, 15 aa, Homo sapiens
  CDR3 for alpha chain variable domain of TCR clone 83333 (TRAV8-3, TRAJ45)
CASSYSGGGADGLTF

SEQ ID NO: 166666 - protein, 13 aa, Homo sapiens
  CDR3 for beta chain variable domain of TCR clone 83333 (TRBV10-3, TRBJ2-7)
CASKLAVNYYQYF

SEQ ID NO: 166667 - protein, 12 aa, Homo sapiens
  CDR3 for alpha chain variable domain of TCR clone 83334 (TRAV17, TRAJ4)
CATDGGYNKLIF

SEQ ID NO: 166668 - protein, 15 aa, Homo sapiens
  CDR3 for beta chain variable domain of TCR clone 83334 (TRBV20-1, TRBJ2-7)
CSARDRVSGMDEQYF

SEQ ID NO: 166669 - protein, 11 aa, Homo sapiens
  CDR3 for alpha chain variable domain of TCR clone 83335 (TRAV3, TRAJ21)
CAVGNFNKFYF

SEQ ID NO: 166670 - protein, 16 aa, Homo sapiens
  CDR3 for beta chain variable domain of TCR clone 83335 (TRBV19, TRBJ2-1)
CASSKAGPCSYNEQFF

SEQ ID NO: 166671 - protein, 13 aa, Homo sapiens
  CDR3 for alpha chain variable domain of TCR clone 83336 (TRAV8-4, TRAJ30)
CAVSVNRDDKNIF

SEQ ID NO: 166672 - protein, 13 aa, Homo sapiens
  CDR3 for beta chain variable domain of TCR clone 83336 (TRBV3-1, TRBJ2-2)
CASLARGSGELFF

SEQ ID NO: 166673 - protein, 18 aa, Homo sapiens
  CDR3 for alpha chain variable domain of TCR clone 83337 (TRAV21, TRAJ52)
CAVRPSPAGGTSLGKLTF

SEQ ID NO: 166674 - protein, 17 aa, Homo sapiens
  CDR3 for beta chain variable domain of TCR clone 83337 (TRBV13, TRBJ2-3)
CASSLSRVAGGRNTQYF

SEQ ID NO: 166675 - protein, 14 aa, Homo sapiens
  CDR3 for alpha chain variable domain of TCR clone 83338 (TRAV12-2, TRAJ13)
CAVNPSGGYQKVTF

SEQ ID NO: 166676 - protein, 13 aa, Homo sapiens
  CDR3 for beta chain variable domain of TCR clone 83338 (TRBV20-1, TRBJ1-6)
CSAKLGGTSPLLF

SEQ ID NO: 166677 - protein, 15 aa, Homo sapiens
  CDR3 for alpha chain variable domain of TCR clone 83339 (TRAV3, TRAJ22)
CAVRDRGGSARQLTF

SEQ ID NO: 166678 - protein, 13 aa, Homo sapiens
  CDR3 for beta chain variable domain of TCR clone 83339 (TRBV3-1, TRBJ1-1)
CASSQLQGAEAFF

SEQ ID NO: 166679 - protein, 14 aa, Homo sapiens
  CDR3 for alpha chain variable domain of TCR clone 83340 (TRAV12-3, TRAJ53)
CGATSGGSNYKLTF

SEQ ID NO: 166680 - protein, 13 aa, Homo sapiens
  CDR3 for beta chain variable domain of TCR clone 83340 (TRBV19, TRBJ1-5)
CASSTQGGQPQHF

SEQ ID NO: 166681 - protein, 14 aa, Homo sapiens
  CDR3 for alpha chain variable domain of TCR clone 83341 (TRAV12-3, TRAJ56)
CAMSVTGANSKLTF

SEQ ID NO: 166682 - protein, 13 aa, Homo sapiens
  CDR3 for beta chain variable domain of TCR clone 83341 (TRBV12-5, TRBJ2-3)
CASGDRQSDTQYF

SEQ ID NO: 166683 - protein, 14 aa, Homo sapiens
  CDR3 for alpha chain variable domain of TCR clone 83342 (TRAV1-2, TRAJ16)
CAVNRFSDGQKLLF

SEQ ID NO: 166684 - protein, 18 aa, Homo sapiens
  CDR3 for beta chain variable domain of TCR clone 83342 (TRBV4-3, TRBJ1-4)
CASSQGSGQGAANEKLFF

SEQ ID NO: 166685 - protein, 13 aa, Homo sapiens
  CDR3 for alpha chain variable domain of TCR clone 83343 (TRAV27, TRAJ49)
CAPRPYTGNQFYF

SEQ ID NO: 166686 - protein, 12 aa, Homo sapiens
  CDR3 for beta chain variable domain of TCR clone 83343 (TRBV11-2, TRBJ2-2)
CASSLGGGELFF

SEQ ID NO: 166687 - protein, 14 aa, Homo sapiens
  CDR3 for alpha chain variable domain of TCR clone 83344 (TRAV8-3, TRAJ39)
CAVGANNAGNMLTF

SEQ ID NO: 166688 - protein, 13 aa, Homo sapiens
  CDR3 for beta chain variable domain of TCR clone 83344 (TRBV3-1, TRBJ2-5)
CASSPLLSETQYF

SEQ ID NO: 166689 - protein, 15 aa, Homo sapiens
  CDR3 for alpha chain variable domain of TCR clone 83345 (TRAV40, TRAJ45)
CLLGDLGGGADGLAF

SEQ ID NO: 166690 - protein, 13 aa, Homo sapiens
  CDR3 for beta chain variable domain of TCR clone 83345 (TRBV7-9, TRBJ1-2)
CASSLKQNYGYTF

SEQ ID NO: 166691 - protein, 17 aa, Homo sapiens
  CDR3 for alpha chain variable domain of TCR clone 83346 (TRAV26-2, TRAJ28)
CILRPLLIVAGSYQLTF

SEQ ID NO: 166692 - protein, 13 aa, Homo sapiens
  CDR3 for beta chain variable domain of TCR clone 83346 (TRBV2, TRBJ1-4)
CASNRGTNEKLFF

SEQ ID NO: 166693 - protein, 13 aa, Homo sapiens
  CDR3 for alpha chain variable domain of TCR clone 83347 (TRAV23/DV6, TRAJ22)
CAPYSGSARQLPF

SEQ ID NO: 166694 - protein, 15 aa, Homo sapiens
  CDR3 for beta chain variable domain of TCR clone 83347 (TRBV11-2, TRBJ1-6)
CASSLDPWAVSPLHF

SEQ ID NO: 166695 - protein, 13 aa, Homo sapiens
  CDR3 for alpha chain variable domain of TCR clone 83348 (TRAV8-2, TRAJ15)
CVVSGPGRNCSDL

SEQ ID NO: 166696 - protein, 14 aa, Homo sapiens
  CDR3 for beta chain variable domain of TCR clone 83348 (TRBV9, TRBJ1-1)
CQQRSSKDGTEAFF

SEQ ID NO: 166697 - protein, 14 aa, Homo sapiens
  CDR3 for alpha chain variable domain of TCR clone 83349 (TRAV1-2, TRAJ8)
CAVREDTGFQKLVF

SEQ ID NO: 166698 - protein, 16 aa, Homo sapiens
  CDR3 for beta chain variable domain of TCR clone 83349 (TRBV12-4, TRBJ1-5)
CASSRPVGGSNQHQHF

SEQ ID NO: 166699 - protein, 13 aa, Homo sapiens
  CDR3 for alpha chain variable domain of TCR clone 83350 (TRAV1-1, TRAJ28)
CVTSVAGSYQLTF

SEQ ID NO: 166700 - protein, 17 aa, Homo sapiens
  CDR3 for beta chain variable domain of TCR clone 83350 (TRBV18, TRBJ2-2)
CASSQRSSGQGPGELFF

SEQ ID NO: 166701 - protein, 14 aa, Homo sapiens
  CDR3 for alpha chain variable domain of TCR clone 83351 (TRAV9-2, TRAJ39)
CALYIYNAGNMLTF

SEQ ID NO: 166702 - protein, 14 aa, Homo sapiens
  CDR3 for beta chain variable domain of TCR clone 83351 (TRBV28, TRBJ2-5)
CASSLYRGTETQYF

SEQ ID NO: 166703 - protein, 12 aa, Homo sapiens
  CDR3 for alpha chain variable domain of TCR clone 83352 (TRAV13-1, TRAJ42)
SVLRGSQGNIIF

SEQ ID NO: 166704 - protein, 13 aa, Homo sapiens
  CDR3 for beta chain variable domain of TCR clone 83352 (TRBV2, TRBJ1-4)
CASSELGVEKLFF

SEQ ID NO: 166705 - protein, 16 aa, Homo sapiens
  CDR3 for alpha chain variable domain of TCR clone 83353 (TRAV3, TRAJ37)
CAVRQHGSGNTGKLIF

SEQ ID NO: 166706 - protein, 16 aa, Homo sapiens
  CDR3 for beta chain variable domain of TCR clone 83353 (TRBV9, TRBJ1-2)
CASSVEEKVSPYGYTF

SEQ ID NO: 166707 - protein, 14 aa, Homo sapiens
  CDR3 for alpha chain variable domain of TCR clone 83354 (TRAV26-1, TRAJ38)
CIADNAGNNRKLIW

SEQ ID NO: 166708 - protein, 15 aa, Homo sapiens
  CDR3 for beta chain variable domain of TCR clone 83354 (TRBV20-1, TRBJ2-7)
CSARDRVSGMDEQYF

SEQ ID NO: 166709 - protein, 13 aa, Homo sapiens
  CDR3 for alpha chain variable domain of TCR clone 83355 (TRAV23/DV6, TRAJ27)
CAASKPMQANQPL

SEQ ID NO: 166710 - protein, 14 aa, Homo sapiens
  CDR3 for beta chain variable domain of TCR clone 83355 (TRBV25-1, TRBJ1-6)
CASSLSADISPLHF

SEQ ID NO: 166711 - protein, 13 aa, Homo sapiens
  CDR3 for alpha chain variable domain of TCR clone 83356 (TRAV12-2, TRAJ18)
CAVRGSTLGRLYF

SEQ ID NO: 166712 - protein, 13 aa, Homo sapiens
  CDR3 for beta chain variable domain of TCR clone 83356 (TRBV7-9, TRBJ1-2)
CASSLKQNYGYTF

SEQ ID NO: 166713 - protein, 14 aa, Homo sapiens
  CDR3 for alpha chain variable domain of TCR clone 83357 (TRAV13-1, TRAJ35)
CAASKGGFGNVLHC

SEQ ID NO: 166714 - protein, 18 aa, Homo sapiens
  CDR3 for beta chain variable domain of TCR clone 83357 (TRBV27, TRBJ2-3)
CASSLSGTIGRGTDTQYF

SEQ ID NO: 166715 - protein, 13 aa, Homo sapiens
  CDR3 for alpha chain variable domain of TCR clone 83358 (TRAV1-1, TRAJ15)
CTVVDQAGTALIF

SEQ ID NO: 166716 - protein, 14 aa, Homo sapiens
  CDR3 for beta chain variable domain of TCR clone 83358 (TRBV5-4, TRBJ1-6)
CASSLWSDNSPLHF

SEQ ID NO: 166717 - protein, 13 aa, Homo sapiens
  CDR3 for alpha chain variable domain of TCR clone 83359 (TRAV12-3, TRAJ33)
CAMSVNSNYQLTW

SEQ ID NO: 166718 - protein, 13 aa, Homo sapiens
  CDR3 for beta chain variable domain of TCR clone 83359 (TRBV7-2, TRBJ2-2)
RASSLAVTGELFF

SEQ ID NO: 166719 - protein, 12 aa, Homo sapiens
  CDR3 for alpha chain variable domain of TCR clone 83360 (TRAV12-3, TRAJ34)
CAMGYNTDKLIF

SEQ ID NO: 166720 - protein, 14 aa, Homo sapiens
  CDR3 for beta chain variable domain of TCR clone 83360 (TRBV4-1, TRBJ2-2)
CASSQAVNTGELFL

SEQ ID NO: 166721 - protein, 12 aa, Homo sapiens
  CDR3 for alpha chain variable domain of TCR clone 83361 (TRAV12-3, TRAJ17)
CAMTLTGNKLTF

SEQ ID NO: 166722 - protein, 12 aa, Homo sapiens
  CDR3 for beta chain variable domain of TCR clone 83361 (TRBV12-4, TRBJ2-1)
CASSLQGSEQFF

SEQ ID NO: 166723 - protein, 12 aa, Homo sapiens
  CDR3 for alpha chain variable domain of TCR clone 83362 (TRAV17, TRAJ49)
CATASTGNQFYF

SEQ ID NO: 166724 - protein, 15 aa, Homo sapiens
  CDR3 for beta chain variable domain of TCR clone 83362 (TRBV15, TRBJ2-1)
CATSRDVGSYNEQFF

SEQ ID NO: 166725 - protein, 16 aa, Homo sapiens
  CDR3 for alpha chain variable domain of TCR clone 83363 (TRAV3, TRAJ37)
CAVRGKGSGNTGKLIF

SEQ ID NO: 166726 - protein, 15 aa, Homo sapiens
  CDR3 for beta chain variable domain of TCR clone 83363 (TRBV29-1, TRBJ2-1)
CSVGRHALFYNEQFF

SEQ ID NO: 166727 - protein, 13 aa, Homo sapiens
  CDR3 for alpha chain variable domain of TCR clone 83364 (TRAV36/DV7, TRAJ38)
CVANAGNNRKLIW

SEQ ID NO: 166728 - protein, 14 aa, Homo sapiens
  CDR3 for beta chain variable domain of TCR clone 83364 (TRBV7-2, TRBJ2-7)
CANSLRWGVNEQYF

SEQ ID NO: 166729 - protein, 13 aa, Homo sapiens
  CDR3 for alpha chain variable domain of TCR clone 83365 (TRAV13-2, TRAJ48)
CAEMDFGNEKLTF

SEQ ID NO: 166730 - protein, 17 aa, Homo sapiens
  CDR3 for beta chain variable domain of TCR clone 83365 (TRBV7-9, TRBJ1-6)
CASSSPGREIHPSTLGT

SEQ ID NO: 166731 - protein, 15 aa, Homo sapiens
  CDR3 for alpha chain variable domain of TCR clone 83366 (TRAV12-3, TRAJ53)
CAVNGGGGSNYKLTF

SEQ ID NO: 166732 - protein, 17 aa, Homo sapiens
  CDR3 for beta chain variable domain of TCR clone 83366 (TRBV7-3, TRBJ2-3)
RASSLMKRMRGADTQYF

SEQ ID NO: 166733 - protein, 15 aa, Homo sapiens
  CDR3 for alpha chain variable domain of TCR clone 83367 (TRAV13-1, TRAJ57)
QVPPLSQGGSEKLVF

SEQ ID NO: 166734 - protein, 17 aa, Homo sapiens
  CDR3 for beta chain variable domain of TCR clone 83367 (TRBV7-3, TRBJ2-3)
CASSLIKRMRGADTQYF

SEQ ID NO: 166735 - protein, 11 aa, Homo sapiens
  CDR3 for alpha chain variable domain of TCR clone 83368 (TRAV27, TRAJ47)
SIVEYGNKLVF

SEQ ID NO: 166736 - protein, 18 aa, Homo sapiens
  CDR3 for beta chain variable domain of TCR clone 83368 (TRBV2, TRBJ2-1)
CASRGLAGGPRTHNEQFF

SEQ ID NO: 166737 - protein, 14 aa, Homo sapiens
  CDR3 for alpha chain variable domain of TCR clone 83369 (TRAV1-2, TRAJ16)
CAVNRFSDGQKLLF

SEQ ID NO: 166738 - protein, 12 aa, Homo sapiens
  CDR3 for beta chain variable domain of TCR clone 83369 (TRBV28, TRBJ2-6)
CAIQAGANVPTF

SEQ ID NO: 166739 - protein, 17 aa, Homo sapiens
  CDR3 for alpha chain variable domain of TCR clone 83370 (TRAV3, TRAJ6)
CAVSRRTDTGGSYIPTF

SEQ ID NO: 166740 - protein, 18 aa, Homo sapiens
  CDR3 for beta chain variable domain of TCR clone 83370 (TRBV7-2, TRBJ2-3)
CASSLETGRGRKADTQYF

SEQ ID NO: 166741 - protein, 13 aa, Homo sapiens
  CDR3 for alpha chain variable domain of TCR clone 83371 (TRAV12-3, TRAJ33)
CAMSVNSNNQLIW

SEQ ID NO: 166742 - protein, 13 aa, Homo sapiens
  CDR3 for beta chain variable domain of TCR clone 83371 (TRBV7-2, TRBJ2-2)
CASSLAVTGELFF

SEQ ID NO: 166743 - protein, 17 aa, Homo sapiens
  CDR3 for alpha chain variable domain of TCR clone 83372 (TRAV1-1, TRAJ32)
CAVRVDDLWWCYKQAHL

SEQ ID NO: 166744 - protein, 12 aa, Homo sapiens
  CDR3 for beta chain variable domain of TCR clone 83372 (TRBV19, TRBJ2-1)
CASSRQGAEQFF

SEQ ID NO: 166745 - protein, 14 aa, Homo sapiens
  CDR3 for alpha chain variable domain of TCR clone 83373 (TRAV2, TRAJ33)
YAVEDQGSNYQLIW

SEQ ID NO: 166746 - protein, 15 aa, Homo sapiens
  CDR3 for beta chain variable domain of TCR clone 83373 (TRBV9, TRBJ2-3)
CASSEQGAGRDTQYF

SEQ ID NO: 166747 - protein, 12 aa, Homo sapiens
  CDR3 for alpha chain variable domain of TCR clone 83374 (TRAV12-3, TRAJ36)
CAAPRGANNLFF

SEQ ID NO: 166748 - protein, 15 aa, Homo sapiens
  CDR3 for beta chain variable domain of TCR clone 83374 (TRBV11-2, TRBJ1-3)
CASSLDGTVGNTIYF

SEQ ID NO: 166749 - protein, 16 aa, Homo sapiens
  CDR3 for alpha chain variable domain of TCR clone 83375 (TRAV12-2, TRAJ40)
CAGIRGGTSGTYKYIF

SEQ ID NO: 166750 - protein, 14 aa, Homo sapiens
  CDR3 for beta chain variable domain of TCR clone 83375 (TRBV20-1, TRBJ2-5)
CSARDGRAGETQYF

SEQ ID NO: 166751 - protein, 17 aa, Homo sapiens
  CDR3 for alpha chain variable domain of TCR clone 83376 (TRAV12-3, TRAJ18)
CAMIRADRGSTLGRLYF

SEQ ID NO: 166752 - protein, 14 aa, Homo sapiens
  CDR3 for beta chain variable domain of TCR clone 83376 (TRBV5-7, TRBJ1-6)
CASTPWPADSPLLF

SEQ ID NO: 166753 - protein, 16 aa, Homo sapiens
  CDR3 for alpha chain variable domain of TCR clone 83377 (TRAV3, TRAJ21)
RAVRDIERGNFNKFYF

SEQ ID NO: 166754 - protein, 13 aa, Homo sapiens
  CDR3 for beta chain variable domain of TCR clone 83377 (TRBV27, TRBJ2-7)
CASSLTTGYEQYF

SEQ ID NO: 166755 - protein, 14 aa, Homo sapiens
  CDR3 for alpha chain variable domain of TCR clone 83378 (TRAV1-2, TRAJ16)
CAVNRFSDGQKLLF

SEQ ID NO: 166756 - protein, 14 aa, Homo sapiens
  CDR3 for beta chain variable domain of TCR clone 83378 (TRBV7-8, TRBJ2-7)
CASSPRDRVYEQYF

SEQ ID NO: 166757 - protein, 12 aa, Homo sapiens
  CDR3 for alpha chain variable domain of TCR clone 83379 (TRAV21, TRAJ13)
PGPSVGYQKVTF

SEQ ID NO: 166758 - protein, 14 aa, Homo sapiens
  CDR3 for beta chain variable domain of TCR clone 83379 (TRBV20-1, TRBJ2-7)
CSAKDRKGAYEQYF

SEQ ID NO: 166759 - protein, 16 aa, Homo sapiens
  CDR3 for alpha chain variable domain of TCR clone 83380 (TRAV16, TRAJ4)
CALSRMFSGGYNKLIF

SEQ ID NO: 166760 - protein, 14 aa, Homo sapiens
  CDR3 for beta chain variable domain of TCR clone 83380 (TRBV4-2, TRBJ1-2)
CASSPGGSNYGYTF

SEQ ID NO: 166761 - protein, 14 aa, Homo sapiens
  CDR3 for alpha chain variable domain of TCR clone 83381 (TRAV12-2, TRAJ44)
CAVNPAGTASKFTF

SEQ ID NO: 166762 - protein, 13 aa, Homo sapiens
  CDR3 for beta chain variable domain of TCR clone 83381 (TRBV20-1, TRBJ1-6)
CSAPLGVGSPLHF

SEQ ID NO: 166763 - protein, 13 aa, Homo sapiens
  CDR3 for alpha chain variable domain of TCR clone 83382 (TRAV2, TRAJ15)
CAVASQAGTALIF

SEQ ID NO: 166764 - protein, 16 aa, Homo sapiens
  CDR3 for beta chain variable domain of TCR clone 83382 (TRBV11-3, TRBJ2-3)
CASSSGSGGGTDTQYL

SEQ ID NO: 166765 - protein, 11 aa, Homo sapiens
  CDR3 for alpha chain variable domain of TCR clone 83383 (TRAV16, TRAJ31)
CALFNNARLMF

SEQ ID NO: 166766 - protein, 14 aa, Homo sapiens
  CDR3 for beta chain variable domain of TCR clone 83383 (TRBV4-2, TRBJ2-1)
CASGLDRAYNEQFF

SEQ ID NO: 166767 - protein, 15 aa, Homo sapiens
  CDR3 for alpha chain variable domain of TCR clone 83384 (TRAV17, TRAJ16)
CATALRFSYGQKLLF

SEQ ID NO: 166768 - protein, 12 aa, Homo sapiens
  CDR3 for beta chain variable domain of TCR clone 83384 (TRBV2, TRBJ2-7)
CASSDPDYEQYF

SEQ ID NO: 166769 - protein, 18 aa, Homo sapiens
  CDR3 for alpha chain variable domain of TCR clone 83385 (TRAV21, TRAJ53)
CAVKGGENSGGSNYKLTF

SEQ ID NO: 166770 - protein, 14 aa, Homo sapiens
  CDR3 for beta chain variable domain of TCR clone 83385 (TRBV4-3, TRBJ1-5)
CASSQGGQGWPQHF

SEQ ID NO: 166771 - protein, 16 aa, Homo sapiens
  CDR3 for alpha chain variable domain of TCR clone 83386 (TRAV30, TRAJ24)
CGTEIVDAYSWGKFQF

SEQ ID NO: 166772 - protein, 16 aa, Homo sapiens
  CDR3 for beta chain variable domain of TCR clone 83386 (TRBV6-1, TRBJ2-1)
CASILRQGSSYNEQFF

SEQ ID NO: 166773 - protein, 15 aa, Homo sapiens
  CDR3 for alpha chain variable domain of TCR clone 83387 (TRAV25, TRAJ52)
CAGRPGGTSYGKLTF

SEQ ID NO: 166774 - protein, 17 aa, Homo sapiens
  CDR3 for beta chain variable domain of TCR clone 83387 (TRBV7-8, TRBJ2-6)
WASSAGTGGAGANDLTF

SEQ ID NO: 166775 - protein, 14 aa, Homo sapiens
  CDR3 for alpha chain variable domain of TCR clone 83388 (TRAV4, TRAJ9)
CLVGSGTGGFNTIF

SEQ ID NO: 166776 - protein, 15 aa, Homo sapiens
  CDR3 for beta chain variable domain of TCR clone 83388 (TRBV7-2, TRBJ2-1)
CASSLASGRVNEQFF

SEQ ID NO: 166777 - protein, 14 aa, Homo sapiens
  CDR3 for alpha chain variable domain of TCR clone 83389 (TRAV1-2, TRAJ16)
CAVNRFSDGQKLLF

SEQ ID NO: 166778 - protein, 15 aa, Homo sapiens
  CDR3 for beta chain variable domain of TCR clone 83389 (TRBV7-9, TRBJ2-2)
CASGPLDTFPGELFL

SEQ ID NO: 166779 - protein, 15 aa, Homo sapiens
  CDR3 for alpha chain variable domain of TCR clone 83390 (TRAV26-1, TRAJ44)
CIVRANTGTASKLTF

SEQ ID NO: 166780 - protein, 16 aa, Homo sapiens
  CDR3 for beta chain variable domain of TCR clone 83390 (TRBV20-1, TRBJ1-4)
CSAPGQGLLTNEKLFF

SEQ ID NO: 166781 - protein, 12 aa, Homo sapiens
  CDR3 for alpha chain variable domain of TCR clone 83391 (TRAV12-1, TRAJ41)
CVVGNSGYALNF

SEQ ID NO: 166782 - protein, 12 aa, Homo sapiens
  CDR3 for beta chain variable domain of TCR clone 83391 (TRBV11-2, TRBJ2-2)
CASSLPTGELFF

SEQ ID NO: 166783 - protein, 14 aa, Homo sapiens
  CDR3 for alpha chain variable domain of TCR clone 83392 (TRAV12-2, TRAJ45)
CAVYSGGGADGLTF

SEQ ID NO: 166784 - protein, 15 aa, Homo sapiens
  CDR3 for beta chain variable domain of TCR clone 83392 (TRBV4-1, TRBJ1-4)
CAGSDTGGTNEKLFF

SEQ ID NO: 166785 - protein, 14 aa, Homo sapiens
  CDR3 for alpha chain variable domain of TCR clone 83393 (TRAV27, TRAJ22)
CAGLPSGSARQLTF

SEQ ID NO: 166786 - protein, 14 aa, Homo sapiens
  CDR3 for beta chain variable domain of TCR clone 83393 (TRBV7-6, TRBJ2-3)
CASSLGTVTDTQYF

SEQ ID NO: 166787 - protein, 12 aa, Homo sapiens
  CDR3 for alpha chain variable domain of TCR clone 83394 (TRAV12-3, TRAJ17)
CAVTLTGNKLTF

SEQ ID NO: 166788 - protein, 12 aa, Homo sapiens
  CDR3 for beta chain variable domain of TCR clone 83394 (TRBV28, TRBJ2-6)
CAIQAGANVLTF

SEQ ID NO: 166789 - protein, 14 aa, Homo sapiens
  CDR3 for alpha chain variable domain of TCR clone 83395 (TRAV12-2, TRAJ40)
CAVKIPSGTYKSIF

SEQ ID NO: 166790 - protein, 12 aa, Homo sapiens
  CDR3 for beta chain variable domain of TCR clone 83395 (TRBV11-2, TRBJ2-1)
CASSPGNNEQFF

SEQ ID NO: 166791 - protein, 13 aa, Homo sapiens
  CDR3 for alpha chain variable domain of TCR clone 83396 (TRAV38-1, TRAJ42)
CARWGGSQGNLIF

SEQ ID NO: 166792 - protein, 10 aa, Homo sapiens
  CDR3 for beta chain variable domain of TCR clone 83396 (TRBV2, TRBJ2-5)
CASSATTQYF

SEQ ID NO: 166793 - protein, 14 aa, Homo sapiens
  CDR3 for alpha chain variable domain of TCR clone 83397 (TRAV26-1, TRAJ39)
CIVRGSRAGNMLTF

SEQ ID NO: 166794 - protein, 15 aa, Homo sapiens
  CDR3 for beta chain variable domain of TCR clone 83397 (TRBV7-9, TRBJ1-5)
CASSQGQQPNQPQHF

SEQ ID NO: 166795 - protein, 12 aa, Homo sapiens
  CDR3 for alpha chain variable domain of TCR clone 83398 (TRAV2, TRAJ31)
CAVGEGNARLMF

SEQ ID NO: 166796 - protein, 18 aa, Homo sapiens
  CDR3 for beta chain variable domain of TCR clone 83398 (TRBV7-9, TRBJ2-3)
CASSLDLAGLATPDTQYF

SEQ ID NO: 166797 - protein, 17 aa, Homo sapiens
  CDR3 for alpha chain variable domain of TCR clone 83399 (TRAV3, TRAJ6)
CAVRDGPRVGGSYIPTF

SEQ ID NO: 166798 - protein, 14 aa, Homo sapiens
  CDR3 for beta chain variable domain of TCR clone 83399 (TRBV25-1, TRBJ1-1)
CASTHLGGNTEAFF

SEQ ID NO: 166799 - protein, 18 aa, Homo sapiens
  CDR3 for alpha chain variable domain of TCR clone 83400 (TRAV29/DV5, TRAJ52)
CAAGFRGAGGTSYGKLTF

SEQ ID NO: 166800 - protein, 16 aa, Homo sapiens
  CDR3 for beta chain variable domain of TCR clone 83400 (TRBV7-3, TRBJ2-2)
CSSSLKRGTLSGELFF

SEQ ID NO: 166801 - protein, 15 aa, Homo sapiens
  CDR3 for alpha chain variable domain of TCR clone 83401 (TRAV12-1, TRAJ44)
WVVFVNTGTASKLTF

SEQ ID NO: 166802 - protein, 17 aa, Homo sapiens
  CDR3 for beta chain variable domain of TCR clone 83401 (TRBV7-8, TRBJ2-6)
CASSAGTGGAGANVLTF

SEQ ID NO: 166803 - protein, 12 aa, Homo sapiens
  CDR3 for alpha chain variable domain of TCR clone 83402 (TRAV2, TRAJ31)
CAVEDNNARIMF

SEQ ID NO: 166804 - protein, 14 aa, Homo sapiens
  CDR3 for beta chain variable domain of TCR clone 83402 (TRBV19, TRBJ2-5)
CASSMTGQQETQYF

SEQ ID NO: 166805 - protein, 15 aa, Homo sapiens
  CDR3 for alpha chain variable domain of TCR clone 83403 (TRAV17, TRAJ57)
CATGPSQGGSEKLVF

SEQ ID NO: 166806 - protein, 14 aa, Homo sapiens
  CDR3 for beta chain variable domain of TCR clone 83403 (TRBV12-5, TRBJ2-5)
CASGSRTRQETQYF

SEQ ID NO: 166807 - protein, 14 aa, Homo sapiens
  CDR3 for alpha chain variable domain of TCR clone 83404 (TRAV2, TRAJ41)
CAVGTSNSGYALNF

SEQ ID NO: 166808 - protein, 13 aa, Homo sapiens
  CDR3 for beta chain variable domain of TCR clone 83404 (TRBV4-1, TRBJ2-1)
CASGQEVQYEQFF

SEQ ID NO: 166809 - protein, 11 aa, Homo sapiens
  CDR3 for alpha chain variable domain of TCR clone 83405 (TRAV21, TRAJ34)
RAVTNTDKLIF

SEQ ID NO: 166810 - protein, 12 aa, Homo sapiens
  CDR3 for beta chain variable domain of TCR clone 83405 (TRBV7-9, TRBJ1-1)
CASSLVRGEAFF

SEQ ID NO: 166811 - protein, 13 aa, Homo sapiens
  CDR3 for alpha chain variable domain of TCR clone 83406 (TRAV12-1, TRAJ16)
CVVNGPDGQKLLF

SEQ ID NO: 166812 - protein, 13 aa, Homo sapiens
  CDR3 for beta chain variable domain of TCR clone 83406 (TRBV2, TRBJ1-1)
YARNPTGGFHAFF

SEQ ID NO: 166813 - protein, 17 aa, Homo sapiens
  CDR3 for alpha chain variable domain of TCR clone 83407 (TRAV8-6, TRAJ8)
CAVKEGIENTGFQKLVF

SEQ ID NO: 166814 - protein, 12 aa, Homo sapiens
  CDR3 for beta chain variable domain of TCR clone 83407 (TRBV27, TRBJ2-2)
CASKLFTGELFF

SEQ ID NO: 166815 - protein, 12 aa, Homo sapiens
  CDR3 for alpha chain variable domain of TCR clone 83408 (TRAV27, TRAJ35)
CAGADFGNVLHC

SEQ ID NO: 166816 - protein, 16 aa, Homo sapiens
  CDR3 for beta chain variable domain of TCR clone 83408 (TRBV2, TRBJ2-7)
CASSEPWTGPSYEQYF

SEQ ID NO: 166817 - protein, 18 aa, Homo sapiens
  CDR3 for alpha chain variable domain of TCR clone 83409 (TRAV26-2, TRAJ54)
CILRDVEVGIQGAQKLVS

SEQ ID NO: 166818 - protein, 17 aa, Homo sapiens
  CDR3 for beta chain variable domain of TCR clone 83409 (TRBV20-1, TRBJ1-5)
CSASLSPGQGGNQPQHF

SEQ ID NO: 166819 - protein, 12 aa, Homo sapiens
  CDR3 for alpha chain variable domain of TCR clone 83410 (TRAV2, TRAJ31)
CAVEDNNARLMF

SEQ ID NO: 166820 - protein, 12 aa, Homo sapiens
  CDR3 for beta chain variable domain of TCR clone 83410 (TRBV11-2, TRBJ2-2)
CASSLPTGELFF

SEQ ID NO: 166821 - protein, 12 aa, Homo sapiens
  CDR3 for alpha chain variable domain of TCR clone 83411 (TRAV2, TRAJ36)
CAELTGAHNLFF

SEQ ID NO: 166822 - protein, 18 aa, Homo sapiens
  CDR3 for beta chain variable domain of TCR clone 83411 (TRBV19, TRBJ1-1)
CASSIDGGDYTGNTEAFF

SEQ ID NO: 166823 - protein, 14 aa, Homo sapiens
  CDR3 for alpha chain variable domain of TCR clone 83412 (TRAV2, TRAJ23)
RAVGLRNQGGKLIF

SEQ ID NO: 166824 - protein, 13 aa, Homo sapiens
  CDR3 for beta chain variable domain of TCR clone 83412 (TRBV12-4, TRBJ2-5)
CASSPGTEETQYF

SEQ ID NO: 166825 - protein, 18 aa, Homo sapiens
  CDR3 for alpha chain variable domain of TCR clone 83413 (TRAV13-1, TRAJ52)
CAAKNPNAGGTSSGKLTF

SEQ ID NO: 166826 - protein, 18 aa, Homo sapiens
  CDR3 for beta chain variable domain of TCR clone 83413 (TRBV4-1, TRBJ1-4)
CASSPRTGGAWTNEKLFF

SEQ ID NO: 166827 - protein, 14 aa, Homo sapiens
  CDR3 for alpha chain variable domain of TCR clone 83414 (TRAV35, TRAJ22)
CAGLRPGSARQLTF

SEQ ID NO: 166828 - protein, 12 aa, Homo sapiens
  CDR3 for beta chain variable domain of TCR clone 83414 (TRBV11-2, TRBJ2-2)
CASSLPTGELFF

SEQ ID NO: 166829 - protein, 14 aa, Homo sapiens
  CDR3 for alpha chain variable domain of TCR clone 83415 (TRAV30, TRAJ26)
CGTEIVSYGQNLVF

SEQ ID NO: 166830 - protein, 13 aa, Homo sapiens
  CDR3 for beta chain variable domain of TCR clone 83415 (TRBV19, TRBJ1-3)
CASRLSLGNTIYF

SEQ ID NO: 166831 - protein, 14 aa, Homo sapiens
  CDR3 for alpha chain variable domain of TCR clone 83416 (TRAV20, TRAJ44)
CTVRDTGTASKLTF

SEQ ID NO: 166832 - protein, 13 aa, Homo sapiens
  CDR3 for beta chain variable domain of TCR clone 83416 (TRBV29-1, TRBJ1-3)
CSAGTGRGNTIYF

SEQ ID NO: 166833 - protein, 13 aa, Homo sapiens
  CDR3 for alpha chain variable domain of TCR clone 83417 (TRAV8-4, TRAJ54)
CAVRIQGAQKLVF

SEQ ID NO: 166834 - protein, 15 aa, Homo sapiens
  CDR3 for beta chain variable domain of TCR clone 83417 (TRBV5-5, TRBJ2-7)
CASSLDAPLSYEQYF

SEQ ID NO: 166835 - protein, 18 aa, Homo sapiens
  CDR3 for alpha chain variable domain of TCR clone 83418 (TRAV13-1, TRAJ52)
CAAKNPNAGGTSYGKLTF

SEQ ID NO: 166836 - protein, 15 aa, Homo sapiens
  CDR3 for beta chain variable domain of TCR clone 83418 (TRBV6-1, TRBJ2-3)
CASSERGGITDTQHF

SEQ ID NO: 166837 - protein, 14 aa, Homo sapiens
  CDR3 for alpha chain variable domain of TCR clone 83419 (TRAV29/DV5, TRAJ45)
CAASFRGGADGLTF

SEQ ID NO: 166838 - protein, 11 aa, Homo sapiens
  CDR3 for beta chain variable domain of TCR clone 83419 (TRBV11-2, TRBJ2-2)
CASSLPGELFL

SEQ ID NO: 166839 - protein, 11 aa, Homo sapiens
  CDR3 for alpha chain variable domain of TCR clone 83420 (TRAV2, TRAJ8)
CASGGYQKVTF

SEQ ID NO: 166840 - protein, 15 aa, Homo sapiens
  CDR3 for beta chain variable domain of TCR clone 83420 (TRBV6-3, TRBJ2-7)
CASSSPGTVSYEQYF

SEQ ID NO: 166841 - protein, 20 aa, Homo sapiens
  CDR3 for alpha chain variable domain of TCR clone 83421 (TRAV12-1, TRAJ42)
SSVIQPPTSVKGGSQGNHIF

SEQ ID NO: 166842 - protein, 18 aa, Homo sapiens
  CDR3 for beta chain variable domain of TCR clone 83421 (TRBV11-2, TRBJ2-3)
CASSLGGASRGAPNTQYF

SEQ ID NO: 166843 - protein, 13 aa, Homo sapiens
  CDR3 for alpha chain variable domain of TCR clone 83422 (TRAV13-2, TRAJ13)
CAERPGGYQKVTF

SEQ ID NO: 166844 - protein, 19 aa, Homo sapiens
  CDR3 for beta chain variable domain of TCR clone 83422 (TRBV28, TRBJ2-7)
CASSYSGTSRLGWVYEQYF

SEQ ID NO: 166845 - protein, 17 aa, Homo sapiens
  CDR3 for alpha chain variable domain of TCR clone 83423 (TRAV16, TRAJ58)
CITVLSNGETSGSRLTF

SEQ ID NO: 166846 - protein, 17 aa, Homo sapiens
  CDR3 for beta chain variable domain of TCR clone 83423 (TRBV18, TRBJ2-1)
CASSTGLSGGADNEQFF

SEQ ID NO: 166847 - protein, 13 aa, Homo sapiens
  CDR3 for alpha chain variable domain of TCR clone 83424 (TRAV17, TRAJ40)
CATAPGGTYKYIF

SEQ ID NO: 166848 - protein, 12 aa, Homo sapiens
  CDR3 for beta chain variable domain of TCR clone 83424 (TRBV2, TRBJ1-5)
CASSENRTTQHF

SEQ ID NO: 166849 - protein, 16 aa, Homo sapiens
  CDR3 for alpha chain variable domain of TCR clone 83425 (TRAV20, TRAJ52)
CAVLPDGGTSYGKLTF

SEQ ID NO: 166850 - protein, 12 aa, Homo sapiens
  CDR3 for beta chain variable domain of TCR clone 83425 (TRBV19, TRBJ2-1)
CASTQISNEQFF

SEQ ID NO: 166851 - protein, 12 aa, Homo sapiens
  CDR3 for alpha chain variable domain of TCR clone 83426 (TRAV12-3, TRAJ17)
CAMTLTGNKLAF

SEQ ID NO: 166852 - protein, 15 aa, Homo sapiens
  CDR3 for beta chain variable domain of TCR clone 83426 (TRBV11-3, TRBJ2-3)
CASLRDGREGDTQYF

SEQ ID NO: 166853 - protein, 12 aa, Homo sapiens
  CDR3 for alpha chain variable domain of TCR clone 83427 (TRAV1-2, TRAJ37)
CAFPGNTGKLIF

SEQ ID NO: 166854 - protein, 17 aa, Homo sapiens
  CDR3 for beta chain variable domain of TCR clone 83427 (TRBV4-2, TRBJ1-1)
CASSQVATGGMSTEAFF

SEQ ID NO: 166855 - protein, 13 aa, Homo sapiens
  CDR3 for alpha chain variable domain of TCR clone 83428 (TRAV13-2, TRAJ53)
CAENMESNYKLTF

SEQ ID NO: 166856 - protein, 13 aa, Homo sapiens
  CDR3 for beta chain variable domain of TCR clone 83428 (TRBV4-1, TRBJ2-2)
CASSQENTGELFF

SEQ ID NO: 166857 - protein, 15 aa, Homo sapiens
  CDR3 for alpha chain variable domain of TCR clone 83429 (TRAV9-2, TRAJ6)
CALRIGPGGSYIPTF

SEQ ID NO: 166858 - protein, 16 aa, Homo sapiens
  CDR3 for beta chain variable domain of TCR clone 83429 (TRBV5-6, TRBJ2-7)
CASSSPGGRTPYEQYF

SEQ ID NO: 166859 - protein, 10 aa, Homo sapiens
  CDR3 for alpha chain variable domain of TCR clone 83430 (TRAV12-3, TRAJ49)
CAMNDDQFYF

SEQ ID NO: 166860 - protein, 17 aa, Homo sapiens
  CDR3 for beta chain variable domain of TCR clone 83430 (TRBV20-1, TRBJ2-1)
CSASSSGLAGSYNEQFF

SEQ ID NO: 166861 - protein, 12 aa, Homo sapiens
  CDR3 for alpha chain variable domain of TCR clone 83431 (TRAV1-2, TRAJ29)
CAVPSGNTPLVF

SEQ ID NO: 166862 - protein, 12 aa, Homo sapiens
  CDR3 for beta chain variable domain of TCR clone 83431 (TRBV12-4, TRBJ2-7)
CASGLGGYEQYF

SEQ ID NO: 166863 - protein, 16 aa, Homo sapiens
  CDR3 for alpha chain variable domain of TCR clone 83432 (TRAV35, TRAJ37)
CWAFLRGSSNTGKLIF

SEQ ID NO: 166864 - protein, 13 aa, Homo sapiens
  CDR3 for beta chain variable domain of TCR clone 83432 (TRBV2, TRBJ1-2)
CASSARGNYGYTF

SEQ ID NO: 166865 - protein, 17 aa, Homo sapiens
  CDR3 for alpha chain variable domain of TCR clone 83433 (TRAV12-2, TRAJ52)
CAVNPYAGGTSYGKLTF

SEQ ID NO: 166866 - protein, 17 aa, Homo sapiens
  CDR3 for beta chain variable domain of TCR clone 83433 (TRBV11-2, TRBJ2-1)
CASSLYPPGVEYNEQFF

SEQ ID NO: 166867 - protein, 20 aa, Homo sapiens
  CDR3 for alpha chain variable domain of TCR clone 83434 (TRAV25, TRAJ33)
TAAQTTDVGTSRGSNYQLIW

SEQ ID NO: 166868 - protein, 14 aa, Homo sapiens
  CDR3 for beta chain variable domain of TCR clone 83434 (TRBV7-2, TRBJ2-5)
CASSTGGELKTQYF

SEQ ID NO: 166869 - protein, 12 aa, Homo sapiens
  CDR3 for alpha chain variable domain of TCR clone 83435 (TRAV25, TRAJ11)
CSGASGYSTLTF

SEQ ID NO: 166870 - protein, 14 aa, Homo sapiens
  CDR3 for beta chain variable domain of TCR clone 83435 (TRBV5-8, TRBJ2-3)
CASSLGQGTDTQYF

SEQ ID NO: 166871 - protein, 14 aa, Homo sapiens
  CDR3 for alpha chain variable domain of TCR clone 83436 (TRAV1-2, TRAJ16)
CAVNWFSDGQKLLF

SEQ ID NO: 166872 - protein, 13 aa, Homo sapiens
  CDR3 for beta chain variable domain of TCR clone 83436 (TRBV20-1, TRBJ1-1)
CSARLGQGTEAFF

SEQ ID NO: 166873 - protein, 11 aa, Homo sapiens
  CDR3 for alpha chain variable domain of TCR clone 83437 (TRAV4, TRAJ31)
CLVGDNARLVF

SEQ ID NO: 166874 - protein, 16 aa, Homo sapiens
  CDR3 for beta chain variable domain of TCR clone 83437 (TRBV7-2, TRBJ2-5)
CASSSKWLSGQEAQYF

SEQ ID NO: 166875 - protein, 12 aa, Homo sapiens
  CDR3 for alpha chain variable domain of TCR clone 83438 (TRAV8-3, TRAJ20)
CAVGAIDYKLSF

SEQ ID NO: 166876 - protein, 16 aa, Homo sapiens
  CDR3 for beta chain variable domain of TCR clone 83438 (TRBV19, TRBJ2-2)
CASRSPGTGATGELFF

SEQ ID NO: 166877 - protein, 13 aa, Homo sapiens
  CDR3 for alpha chain variable domain of TCR clone 83439 (TRAV17, TRAJ29)
CATSPSGNTPLVF

SEQ ID NO: 166878 - protein, 15 aa, Homo sapiens
  CDR3 for beta chain variable domain of TCR clone 83439 (TRBV3-1, TRBJ2-2)
CARSQDWTRAGELFF

SEQ ID NO: 166879 - protein, 10 aa, Homo sapiens
  CDR3 for alpha chain variable domain of TCR clone 83440 (TRAV30, TRAJ48)
CGIGNEKLTF

SEQ ID NO: 166880 - protein, 16 aa, Homo sapiens
  CDR3 for beta chain variable domain of TCR clone 83440 (TRBV7-3, TRBJ2-2)
CASSLKRGTLSGELFF

SEQ ID NO: 166881 - protein, 11 aa, Homo sapiens
  CDR3 for alpha chain variable domain of TCR clone 83441 (TRAV21, TRAJ11)
CAVNGYSTLTF

SEQ ID NO: 166882 - protein, 11 aa, Homo sapiens
  CDR3 for beta chain variable domain of TCR clone 83441 (TRBV19, TRBJ1-1)
CASSIGSQAFF

SEQ ID NO: 166883 - protein, 14 aa, Homo sapiens
  CDR3 for alpha chain variable domain of TCR clone 83442 (TRAV12-3, TRAJ50)
CAMSPKTSYDKVIF

SEQ ID NO: 166884 - protein, 13 aa, Homo sapiens
  CDR3 for beta chain variable domain of TCR clone 83442 (TRBV11-2, TRBJ2-5)
CASSSTGEETQYF

SEQ ID NO: 166885 - protein, 16 aa, Homo sapiens
  CDR3 for alpha chain variable domain of TCR clone 83443 (TRAV12-1, TRAJ42)
CVVTPYYGGSQGNLIF

SEQ ID NO: 166886 - protein, 16 aa, Homo sapiens
  CDR3 for beta chain variable domain of TCR clone 83443 (TRBV7-3, TRBJ2-2)
CASSLKRGTLSGELFF

SEQ ID NO: 166887 - protein, 18 aa, Homo sapiens
  CDR3 for alpha chain variable domain of TCR clone 83444 (TRAV26-1, TRAJ56)
CIVRVASRVTGTNSKLTF

SEQ ID NO: 166888 - protein, 15 aa, Homo sapiens
  CDR3 for beta chain variable domain of TCR clone 83444 (TRBV7-9, TRBJ2-5)
CASSDTGRGRETQYF

SEQ ID NO: 166889 - protein, 17 aa, Homo sapiens
  CDR3 for alpha chain variable domain of TCR clone 83445 (TRAV26-1, TRAJ37)
CIVRVITVSSNTGKLIF

SEQ ID NO: 166890 - protein, 15 aa, Homo sapiens
  CDR3 for beta chain variable domain of TCR clone 83445 (TRBV19, TRBJ2-1)
CASSMGWNSNNEQFF

SEQ ID NO: 166891 - protein, 15 aa, Homo sapiens
  CDR3 for alpha chain variable domain of TCR clone 83446 (TRAV13-1, TRAJ36)
CAASIRQTGANNLFF

SEQ ID NO: 166892 - protein, 17 aa, Homo sapiens
  CDR3 for beta chain variable domain of TCR clone 83446 (TRBV20-1, TRBJ2-2)
CSARDRTSGRHTGELFF

SEQ ID NO: 166893 - protein, 17 aa, Homo sapiens
  CDR3 for alpha chain variable domain of TCR clone 83447 (TRAV4, TRAJ42)
CLVGVLNSGGSQGNLIF

SEQ ID NO: 166894 - protein, 12 aa, Homo sapiens
  CDR3 for beta chain variable domain of TCR clone 83447 (TRBV20-1, TRBJ2-1)
CSAQYTYNEQFF

SEQ ID NO: 166895 - protein, 14 aa, Homo sapiens
  CDR3 for alpha chain variable domain of TCR clone 83448 (TRAV17, TRAJ56)
CSTVPAGANSKLTF

SEQ ID NO: 166896 - protein, 13 aa, Homo sapiens
  CDR3 for beta chain variable domain of TCR clone 83448 (TRBV12-4, TRBJ2-2)
CASSITGSGELFF

SEQ ID NO: 166897 - protein, 15 aa, Homo sapiens
  CDR3 for alpha chain variable domain of TCR clone 83449 (TRAV27, TRAJ38)
CAARRNAGNNRKLLW

SEQ ID NO: 166898 - protein, 14 aa, Homo sapiens
  CDR3 for beta chain variable domain of TCR clone 83449 (TRBV7-8, TRBJ2-3)
CASSLEAGTDTQYF

SEQ ID NO: 166899 - protein, 16 aa, Homo sapiens
  CDR3 for alpha chain variable domain of TCR clone 83450 (TRAV3, TRAJ10)
CAVRDMGAGGGNKLTF

SEQ ID NO: 166900 - protein, 20 aa, Homo sapiens
  CDR3 for beta chain variable domain of TCR clone 83450 (TRBV11-3, TRBJ2-7)
CASSQRTSGSLRAVLRAGHQ

SEQ ID NO: 166901 - protein, 14 aa, Homo sapiens
  CDR3 for alpha chain variable domain of TCR clone 83451 (TRAV1-2, TRAJ6)
CAVSLSGGSCIPTF

SEQ ID NO: 166902 - protein, 15 aa, Homo sapiens
  CDR3 for beta chain variable domain of TCR clone 83451 (TRBV28, TRBJ2-7)
CASSPGGRGFYEQYF

SEQ ID NO: 166903 - protein, 14 aa, Homo sapiens
  CDR3 for alpha chain variable domain of TCR clone 83452 (TRAV25, TRAJ45)
CARESGGGADGLTF

SEQ ID NO: 166904 - protein, 12 aa, Homo sapiens
  CDR3 for beta chain variable domain of TCR clone 83452 (TRBV7-9, TRBJ2-7)
CASSFDRYEQYF

SEQ ID NO: 166905 - protein, 15 aa, Homo sapiens
  CDR3 for alpha chain variable domain of TCR clone 83453 (TRAV21, TRAJ24)
CAARSSTDSWGKLQF

SEQ ID NO: 166906 - protein, 13 aa, Homo sapiens
  CDR3 for beta chain variable domain of TCR clone 83453 (TRBV11-2, TRBJ2-5)
CASSSTGEEAQYF

SEQ ID NO: 166907 - protein, 15 aa, Homo sapiens
  CDR3 for alpha chain variable domain of TCR clone 83454 (TRAV21, TRAJ13)
RAVRPTSGGYQKVTF

SEQ ID NO: 166908 - protein, 15 aa, Homo sapiens
  CDR3 for beta chain variable domain of TCR clone 83454 (TRBV28, TRBJ2-7)
CASSPGGRGFYEQYF

SEQ ID NO: 166909 - protein, 14 aa, Homo sapiens
  CDR3 for alpha chain variable domain of TCR clone 83455 (TRAV12-3, TRAJ13)
CAMRNSGGYQKVTF

SEQ ID NO: 166910 - protein, 14 aa, Homo sapiens
  CDR3 for beta chain variable domain of TCR clone 83455 (TRBV4-1, TRBJ1-6)
CASSPGSDSPPLHF

SEQ ID NO: 166911 - protein, 14 aa, Homo sapiens
  CDR3 for alpha chain variable domain of TCR clone 83456 (TRAV12-2, TRAJ44)
FAVNPAGTASKLTF

SEQ ID NO: 166912 - protein, 13 aa, Homo sapiens
  CDR3 for beta chain variable domain of TCR clone 83456 (TRBV20-1, TRBJ1-6)
CSAPLGVGSPLHF

SEQ ID NO: 166913 - protein, 14 aa, Homo sapiens
  CDR3 for alpha chain variable domain of TCR clone 83457 (TRAV21, TRAJ58)
CAVRRGRSGSRLTF

SEQ ID NO: 166914 - protein, 13 aa, Homo sapiens
  CDR3 for beta chain variable domain of TCR clone 83457 (TRBV7-2, TRBJ1-6)
CARGLKFDSPLHF

SEQ ID NO: 166915 - protein, 15 aa, Homo sapiens
  CDR3 for alpha chain variable domain of TCR clone 83458 (TRAV3, TRAJ4)
CAVRDGTGGYNKLIF

SEQ ID NO: 166916 - protein, 13 aa, Homo sapiens
  CDR3 for beta chain variable domain of TCR clone 83458 (TRBV10-3, TRBJ1-2)
CAISERDSYGYTF

SEQ ID NO: 166917 - protein, 14 aa, Homo sapiens
  CDR3 for alpha chain variable domain of TCR clone 83459 (TRAV26-1, TRAJ38)
CIADNAGNNRKLIS

SEQ ID NO: 166918 - protein, 13 aa, Homo sapiens
  CDR3 for beta chain variable domain of TCR clone 83459 (TRBV20-1, TRBJ1-1)
CSARGGGNTEAFF

SEQ ID NO: 166919 - protein, 13 aa, Homo sapiens
  CDR3 for alpha chain variable domain of TCR clone 83460 (TRAV21, TRAJ20)
CAVGLRVDYKLSF

SEQ ID NO: 166920 - protein, 14 aa, Homo sapiens
  CDR3 for beta chain variable domain of TCR clone 83460 (TRBV7-6, TRBJ2-4)
CASSPAPGSFLWYF

SEQ ID NO: 166921 - protein, 14 aa, Homo sapiens
  CDR3 for alpha chain variable domain of TCR clone 83461 (TRAV2, TRAJ9)
CAVEDRSGGFKTIF

SEQ ID NO: 166922 - protein, 18 aa, Homo sapiens
  CDR3 for beta chain variable domain of TCR clone 83461 (TRBV12-4, TRBJ2-2)
CASSLVAGTRGRTGELFF

SEQ ID NO: 166923 - protein, 18 aa, Homo sapiens
  CDR3 for alpha chain variable domain of TCR clone 83462 (TRAV26-1, TRAJ23)
CIVRVGLEVWNQGGKLLF

SEQ ID NO: 166924 - protein, 16 aa, Homo sapiens
  CDR3 for beta chain variable domain of TCR clone 83462 (TRBV12-4, TRBJ2-5)
CASSFFVRGRQETQYF

SEQ ID NO: 166925 - protein, 14 aa, Homo sapiens
  CDR3 for alpha chain variable domain of TCR clone 83463 (TRAV35, TRAJ33)
CAGSSQDSNYQLIW

SEQ ID NO: 166926 - protein, 15 aa, Homo sapiens
  CDR3 for beta chain variable domain of TCR clone 83463 (TRBV20-1, TRBJ2-7)
CSAESGTSGADEQYF

SEQ ID NO: 166927 - protein, 18 aa, Homo sapiens
  CDR3 for alpha chain variable domain of TCR clone 83464 (TRAV13-2, TRAJ42)
CAEKGDLNYGGSQGNLIF

SEQ ID NO: 166928 - protein, 17 aa, Homo sapiens
  CDR3 for beta chain variable domain of TCR clone 83464 (TRBV13, TRBJ2-3)
CASSLSRVAGGRNTQYF

SEQ ID NO: 166929 - protein, 12 aa, Homo sapiens
  CDR3 for alpha chain variable domain of TCR clone 83465 (TRAV1-1, TRAJ8)
CAGGTGFQKLVF

SEQ ID NO: 166930 - protein, 13 aa, Homo sapiens
  CDR3 for beta chain variable domain of TCR clone 83465 (TRBV7-9, TRBJ1-2)
CASSLKQNYGYAF

SEQ ID NO: 166931 - protein, 12 aa, Homo sapiens
  CDR3 for alpha chain variable domain of TCR clone 83466 (TRAV12-3, TRAJ3)
CAIDSIASKIIF

SEQ ID NO: 166932 - protein, 17 aa, Homo sapiens
  CDR3 for beta chain variable domain of TCR clone 83466 (TRBV7-9, TRBJ2-3)
CASSLEEAGAYPDTQYF

SEQ ID NO: 166933 - protein, 14 aa, Homo sapiens
  CDR3 for alpha chain variable domain of TCR clone 83467 (TRAV29/DV5, TRAJ32)
CAAAYGGATNKLIF

SEQ ID NO: 166934 - protein, 15 aa, Homo sapiens
  CDR3 for beta chain variable domain of TCR clone 83467 (TRBV27, TRBJ2-7)
CASSTAGTGSYERYF

SEQ ID NO: 166935 - protein, 12 aa, Homo sapiens
  CDR3 for alpha chain variable domain of TCR clone 83468 (TRAV3, TRAJ31)
FAVRDGNARLMF

SEQ ID NO: 166936 - protein, 18 aa, Homo sapiens
  CDR3 for beta chain variable domain of TCR clone 83468 (TRBV7-2, TRBJ2-3)
CASSLKREGSGITDTQYF

SEQ ID NO: 166937 - protein, 13 aa, Homo sapiens
  CDR3 for alpha chain variable domain of TCR clone 83469 (TRAV21, TRAJ37)
CAVSSGNTGKLIF

SEQ ID NO: 166938 - protein, 14 aa, Homo sapiens
  CDR3 for beta chain variable domain of TCR clone 83469 (TRBV7-2, TRBJ2-7)
CASRSQGAAYEQYF

SEQ ID NO: 166939 - protein, 19 aa, Homo sapiens
  CDR3 for alpha chain variable domain of TCR clone 83470 (TRAV2, TRAJ20)
ILQVREADAAVYRDCKLSF

SEQ ID NO: 166940 - protein, 14 aa, Homo sapiens
  CDR3 for beta chain variable domain of TCR clone 83470 (TRBV5-4, TRBJ1-1)
CASSLDSRRDEAFF

SEQ ID NO: 166941 - protein, 23 aa, Homo sapiens
  CDR3 for alpha chain variable domain of TCR clone 83471 (TRAV26-1, TRAJ38)
CIADNAGNNHIQNPDPAVYQLRD

SEQ ID NO: 166942 - protein, 13 aa, Homo sapiens
  CDR3 for beta chain variable domain of TCR clone 83471 (TRBV20-1, TRBJ1-1)
CSDRGGGNTEAFF

SEQ ID NO: 166943 - protein, 13 aa, Homo sapiens
  CDR3 for alpha chain variable domain of TCR clone 83472 (TRAV21, TRAJ57)
CAVTEGGSEKLVF

SEQ ID NO: 166944 - protein, 15 aa, Homo sapiens
  CDR3 for beta chain variable domain of TCR clone 83472 (TRBV10-3, TRBJ2-5)
CAISEFGRGQETQYF

SEQ ID NO: 166945 - protein, 14 aa, Homo sapiens
  CDR3 for alpha chain variable domain of TCR clone 83473 (TRAV12-2, TRAJ53)
CAVKGGGSNYKLTF

SEQ ID NO: 166946 - protein, 15 aa, Homo sapiens
  CDR3 for beta chain variable domain of TCR clone 83473 (TRBV11-2, TRBJ2-2)
SASSLDTGNTGELFF

SEQ ID NO: 166947 - protein, 14 aa, Homo sapiens
  CDR3 for alpha chain variable domain of TCR clone 83474 (TRAV4, TRAJ6)
CLVGEAGGSYIPTF

SEQ ID NO: 166948 - protein, 16 aa, Homo sapiens
  CDR3 for beta chain variable domain of TCR clone 83474 (TRBV7-9, TRBJ1-2)
CASSLGFSSGEDGYTF

SEQ ID NO: 166949 - protein, 18 aa, Homo sapiens
  CDR3 for alpha chain variable domain of TCR clone 83475 (TRAV29/DV5, TRAJ53)
CSVLLCSKRGGSNYKLTF

SEQ ID NO: 166950 - protein, 15 aa, Homo sapiens
  CDR3 for beta chain variable domain of TCR clone 83475 (TRBV4-2, TRBJ1-2)
CASSRNTGAGYGYTF

SEQ ID NO: 166951 - protein, 12 aa, Homo sapiens
  CDR3 for alpha chain variable domain of TCR clone 83476 (TRAV12-3, TRAJ17)
CAMKLTGNKLTF

SEQ ID NO: 166952 - protein, 13 aa, Homo sapiens
  CDR3 for beta chain variable domain of TCR clone 83476 (TRBV7-9, TRBJ1-2)
CASSLKQNYGYTF

SEQ ID NO: 166953 - protein, 10 aa, Homo sapiens
  CDR3 for alpha chain variable domain of TCR clone 83477 (TRAV36/DV7, TRAJ48)
CAVGNEKLTF

SEQ ID NO: 166954 - protein, 14 aa, Homo sapiens
  CDR3 for beta chain variable domain of TCR clone 83477 (TRBV7-8, TRBJ2-3)
CASSLEAGTDTQYF

SEQ ID NO: 166955 - protein, 12 aa, Homo sapiens
  CDR3 for alpha chain variable domain of TCR clone 83478 (TRAV8-3, TRAJ26)
CAGDNYGQNFVF

SEQ ID NO: 166956 - protein, 15 aa, Homo sapiens
  CDR3 for beta chain variable domain of TCR clone 83478 (TRBV18, TRBJ2-1)
CASSPPSASYNEQFF

SEQ ID NO: 166957 - protein, 16 aa, Homo sapiens
  CDR3 for alpha chain variable domain of TCR clone 83479 (TRAV4, TRAJ37)
CLVGWFGSSNTGQLIF

SEQ ID NO: 166958 - protein, 15 aa, Homo sapiens
  CDR3 for beta chain variable domain of TCR clone 83479 (TRBV12-4, TRBJ2-3)
CASSLAERPTDTQYF

SEQ ID NO: 166959 - protein, 15 aa, Homo sapiens
  CDR3 for alpha chain variable domain of TCR clone 83480 (TRAV21, TRAJ38)
CAVRQDAGNNRKLSW

SEQ ID NO: 166960 - protein, 16 aa, Homo sapiens
  CDR3 for beta chain variable domain of TCR clone 83480 (TRBV4-2, TRBJ1-1)
CASRPLDGGGDTEAFF

SEQ ID NO: 166961 - protein, 12 aa, Homo sapiens
  CDR3 for alpha chain variable domain of TCR clone 83481 (TRAV16, TRAJ10)
CSRTGGGNKLTF

SEQ ID NO: 166962 - protein, 17 aa, Homo sapiens
  CDR3 for beta chain variable domain of TCR clone 83481 (TRBV18, TRBJ2-3)
CASSSRGPASSTDTQYF

SEQ ID NO: 166963 - protein, 13 aa, Homo sapiens
  CDR3 for alpha chain variable domain of TCR clone 83482 (TRAV12-3, TRAJ33)
CAMSVNSNYQLIW

SEQ ID NO: 166964 - protein, 17 aa, Homo sapiens
  CDR3 for beta chain variable domain of TCR clone 83482 (TRBV4-1, TRBJ2-7)
CASSRDPLGVRGGEQYF

SEQ ID NO: 166965 - protein, 13 aa, Homo sapiens
  CDR3 for alpha chain variable domain of TCR clone 83483 (TRAV8-3, TRAJ20)
CAVGRPNDYKLSF

SEQ ID NO: 166966 - protein, 13 aa, Homo sapiens
  CDR3 for beta chain variable domain of TCR clone 83483 (TRBV6-5, TRBJ1-4)
CASSYLSREKLFF

SEQ ID NO: 166967 - protein, 13 aa, Homo sapiens
  CDR3 for alpha chain variable domain of TCR clone 83484 (TRAV12-2, TRAJ37)
CAGGSGNTGKLIL

SEQ ID NO: 166968 - protein, 14 aa, Homo sapiens
  CDR3 for beta chain variable domain of TCR clone 83484 (TRBV6-1, TRBJ2-6)
CASQQGAGANVLTF

SEQ ID NO: 166969 - protein, 14 aa, Homo sapiens
  CDR3 for alpha chain variable domain of TCR clone 83485 (TRAV1-2, TRAJ8)
CAAREDTGFQKLVF

SEQ ID NO: 166970 - protein, 19 aa, Homo sapiens
  CDR3 for beta chain variable domain of TCR clone 83485 (TRBV28, TRBJ2-1)
CASSFSIRGSGRTRYEQFF

SEQ ID NO: 166971 - protein, 16 aa, Homo sapiens
  CDR3 for alpha chain variable domain of TCR clone 83486 (TRAV12-1, TRAJ28)
CVVIAYSGAGSYQLTF

SEQ ID NO: 166972 - protein, 16 aa, Homo sapiens
  CDR3 for beta chain variable domain of TCR clone 83486 (TRBV19, TRBJ1-1)
CASSPTRFWPGTEAFF

SEQ ID NO: 166973 - protein, 15 aa, Homo sapiens
  CDR3 for alpha chain variable domain of TCR clone 83487 (TRAV26-2, TRAJ13)
CILRDLSGGYQKVTF

SEQ ID NO: 166974 - protein, 11 aa, Homo sapiens
  CDR3 for beta chain variable domain of TCR clone 83487 (TRBV7-9, TRBJ2-3)
CAISYTDTQYF

SEQ ID NO: 166975 - protein, 12 aa, Homo sapiens
  CDR3 for alpha chain variable domain of TCR clone 83488 (TRAV17, TRAJ39)
CATGAAGNMITF

SEQ ID NO: 166976 - protein, 14 aa, Homo sapiens
  CDR3 for beta chain variable domain of TCR clone 83488 (TRBV7-9, TRBJ1-2)
CASSRQGANYGYTF

SEQ ID NO: 166977 - protein, 12 aa, Homo sapiens
  CDR3 for alpha chain variable domain of TCR clone 83489 (TRAV29/DV5, TRAJ34)
CAASGNTDKLIF

SEQ ID NO: 166978 - protein, 13 aa, Homo sapiens
  CDR3 for beta chain variable domain of TCR clone 83489 (TRBV19, TRBJ2-7)
CASRKAGGSEQYF

SEQ ID NO: 166979 - protein, 13 aa, Homo sapiens
  CDR3 for alpha chain variable domain of TCR clone 83490 (TRAV12-2, TRAJ20)
CAVYTSNDYKLSF

SEQ ID NO: 166980 - protein, 15 aa, Homo sapiens
  CDR3 for beta chain variable domain of TCR clone 83490 (TRBV27, TRBJ2-5)
CASSLYPRGGETQYF

SEQ ID NO: 166981 - protein, 11 aa, Homo sapiens
  CDR3 for alpha chain variable domain of TCR clone 83491 (TRAV12-3, TRAJ17)
CNDAYRQKLTF

SEQ ID NO: 166982 - protein, 15 aa, Homo sapiens
  CDR3 for beta chain variable domain of TCR clone 83491 (TRBV20-1, TRBJ2-7)
CSARDRVSGMDEQYF

SEQ ID NO: 166983 - protein, 12 aa, Homo sapiens
  CDR3 for alpha chain variable domain of TCR clone 83492 (TRAV3, TRAJ27)
CAVRDGAGKSPF

SEQ ID NO: 166984 - protein, 13 aa, Homo sapiens
  CDR3 for beta chain variable domain of TCR clone 83492 (TRBV10-3, TRBJ1-2)
CAINADLNYGYTF

SEQ ID NO: 166985 - protein, 14 aa, Homo sapiens
  CDR3 for alpha chain variable domain of TCR clone 83493 (TRAV12-1, TRAJ17)
CVVNYKAAGNKLTF

SEQ ID NO: 166986 - protein, 18 aa, Homo sapiens
  CDR3 for beta chain variable domain of TCR clone 83493 (TRBV18, TRBJ1-1)
CASSLPGAPQGAGTEAFF

SEQ ID NO: 166987 - protein, 16 aa, Homo sapiens
  CDR3 for alpha chain variable domain of TCR clone 83494 (TRAV23/DV6, TRAJ9)
CAASIGGNTGGFKTIF

SEQ ID NO: 166988 - protein, 14 aa, Homo sapiens
  CDR3 for beta chain variable domain of TCR clone 83494 (TRBV9, TRBJ2-7)
CASSVGVGSYEQYV

SEQ ID NO: 166989 - protein, 14 aa, Homo sapiens
  CDR3 for alpha chain variable domain of TCR clone 83495 (TRAV21, TRAJ58)
CAVRRGRSGSRLTF

SEQ ID NO: 166990 - protein, 13 aa, Homo sapiens
  CDR3 for beta chain variable domain of TCR clone 83495 (TRBV7-2, TRBJ1-6)
CASSVKFDSPLHF

SEQ ID NO: 166991 - protein, 13 aa, Homo sapiens
  CDR3 for alpha chain variable domain of TCR clone 83496 (TRAV12-2, TRAJ39)
CAVNNNAGNMLTF

SEQ ID NO: 166992 - protein, 13 aa, Homo sapiens
  CDR3 for beta chain variable domain of TCR clone 83496 (TRBV2, TRBJ1-5)
CATAGPGNQAQHF

SEQ ID NO: 166993 - protein, 15 aa, Homo sapiens
  CDR3 for alpha chain variable domain of TCR clone 83497 (TRAV1-2, TRAJ28)
CAVQYSGAGGYQLTF

SEQ ID NO: 166994 - protein, 13 aa, Homo sapiens
  CDR3 for beta chain variable domain of TCR clone 83497 (TRBV20-1, TRBJ2-7)
CSATHTSGYEQYF

SEQ ID NO: 166995 - protein, 11 aa, Homo sapiens
  CDR3 for alpha chain variable domain of TCR clone 83498 (TRAV2, TRAJ13)
CASGGYQKVTF

SEQ ID NO: 166996 - protein, 16 aa, Homo sapiens
  CDR3 for beta chain variable domain of TCR clone 83498 (TRBV12-4, TRBJ2-7)
CASSLIGGTGTYEQYF

SEQ ID NO: 166997 - protein, 13 aa, Homo sapiens
  CDR3 for alpha chain variable domain of TCR clone 83499 (TRAV36/DV7, TRAJ38)
CVANAGNNRKLIL

SEQ ID NO: 166998 - protein, 14 aa, Homo sapiens
  CDR3 for beta chain variable domain of TCR clone 83499 (TRBV7-2, TRBJ2-7)
CASSLRWEVNEQYF

SEQ ID NO: 166999 - protein, 18 aa, Homo sapiens
  CDR3 for alpha chain variable domain of TCR clone 83500 (TRAV8-4, TRAJ52)
CAVTRANAGGTSYRKLTF

SEQ ID NO: 167000 - protein, 20 aa, Homo sapiens
  CDR3 for beta chain variable domain of TCR clone 83500 (TRBV19, TRBJ2-1)
CASSISRTVTSTRLNNEQFL

SEQ ID NO: 167001 - protein, 14 aa, Homo sapiens
  CDR3 for alpha chain variable domain of TCR clone 83501 (TRAV38-1, TRAJ40)
CALRPTSGTYKYIF

SEQ ID NO: 167002 - protein, 15 aa, Homo sapiens
  CDR3 for beta chain variable domain of TCR clone 83501 (TRBV19, TRBJ1-2)
CASSVGQVLNYGYTF

SEQ ID NO: 167003 - protein, 11 aa, Homo sapiens
  CDR3 for alpha chain variable domain of TCR clone 83502 (TRAV12-3, TRAJ43)
CAMSVSNDMRF

SEQ ID NO: 167004 - protein, 15 aa, Homo sapiens
  CDR3 for beta chain variable domain of TCR clone 83502 (TRBV12-4, TRBJ2-5)
CASSPPTGLQETQYF

SEQ ID NO: 167005 - protein, 18 aa, Homo sapiens
  CDR3 for alpha chain variable domain of TCR clone 83503 (TRAV21, TRAJ52)
CAVRPSPAGGTSYGKLTF

SEQ ID NO: 167006 - protein, 13 aa, Homo sapiens
  CDR3 for beta chain variable domain of TCR clone 83503 (TRBV2, TRBJ1-1)
CASSEGGNTEAFF

SEQ ID NO: 167007 - protein, 16 aa, Homo sapiens
  CDR3 for alpha chain variable domain of TCR clone 83504 (TRAV8-1, TRAJ39)
CAVNVPSYNAGNMLTF

SEQ ID NO: 167008 - protein, 15 aa, Homo sapiens
  CDR3 for beta chain variable domain of TCR clone 83504 (TRBV4-1, TRBJ2-3)
GASRSTRAGTDTQYF

SEQ ID NO: 167009 - protein, 11 aa, Homo sapiens
  CDR3 for alpha chain variable domain of TCR clone 83505 (TRAV13-1, TRAJ6)
CATLGSYIPIF

SEQ ID NO: 167010 - protein, 13 aa, Homo sapiens
  CDR3 for beta chain variable domain of TCR clone 83505 (TRBV6-6, TRBJ2-1)
CASSLHQGDEQFF

SEQ ID NO: 167011 - protein, 10 aa, Homo sapiens
  CDR3 for alpha chain variable domain of TCR clone 83506 (TRAV5, TRAJ34)
CAEDTDKLVF

SEQ ID NO: 167012 - protein, 12 aa, Homo sapiens
  CDR3 for beta chain variable domain of TCR clone 83506 (TRBV11-2, TRBJ2-2)
CASSLGGGELFF

SEQ ID NO: 167013 - protein, 15 aa, Homo sapiens
  CDR3 for alpha chain variable domain of TCR clone 83507 (TRAV26-2, TRAJ53)
CILRDVGGSNYKLTF

SEQ ID NO: 167014 - protein, 13 aa, Homo sapiens
  CDR3 for beta chain variable domain of TCR clone 83507 (TRBV7-2, TRBJ2-7)
CASSSPSGSGQYF

SEQ ID NO: 167015 - protein, 18 aa, Homo sapiens
  CDR3 for alpha chain variable domain of TCR clone 83508 (TRAV21, TRAJ52)
CAVRPSPAGGTSYGKLAF

SEQ ID NO: 167016 - protein, 13 aa, Homo sapiens
  CDR3 for beta chain variable domain of TCR clone 83508 (TRBV20-1, TRBJ1-1)
CSARVGGNTEAFF

SEQ ID NO: 167017 - protein, 16 aa, Homo sapiens
  CDR3 for alpha chain variable domain of TCR clone 83509 (TRAV3, TRAJ37)
CAVRGKGSGNTGKLIF

SEQ ID NO: 167018 - protein, 12 aa, Homo sapiens
  CDR3 for beta chain variable domain of TCR clone 83509 (TRBV14, TRBJ1-1)
CASSQLKGLAFF

SEQ ID NO: 167019 - protein, 14 aa, Homo sapiens
  CDR3 for alpha chain variable domain of TCR clone 83510 (TRAV1-2, TRAJ16)
CAVNRFSDGQKLLF

SEQ ID NO: 167020 - protein, 16 aa, Homo sapiens
  CDR3 for beta chain variable domain of TCR clone 83510 (TRBV7-3, TRBJ2-2)
CSSSLKRGTLSGELFF

SEQ ID NO: 167021 - protein, 14 aa, Homo sapiens
  CDR3 for alpha chain variable domain of TCR clone 83511 (TRAV26-1, TRAJ39)
CIVRGSRAGNMLTF

SEQ ID NO: 167022 - protein, 15 aa, Homo sapiens
  CDR3 for beta chain variable domain of TCR clone 83511 (TRBV7-9, TRBJ1-5)
CASSQGHQPNQPQHY

SEQ ID NO: 167023 - protein, 18 aa, Homo sapiens
  CDR3 for alpha chain variable domain of TCR clone 83512 (TRAV13-1, TRAJ52)
CATSKRSAGGTSYGKLTF

SEQ ID NO: 167024 - protein, 13 aa, Homo sapiens
  CDR3 for beta chain variable domain of TCR clone 83512 (TRBV10-3, TRBJ2-7)
CASKLAVNYEQYF

SEQ ID NO: 167025 - protein, 15 aa, Homo sapiens
  CDR3 for alpha chain variable domain of TCR clone 83513 (TRAV35, TRAJ50)
CAGQLRKTSYDQVIF

SEQ ID NO: 167026 - protein, 12 aa, Homo sapiens
  CDR3 for beta chain variable domain of TCR clone 83513 (TRBV5-1, TRBJ2-5)
CASSLGLETQYF

SEQ ID NO: 167027 - protein, 10 aa, Homo sapiens
  CDR3 for alpha chain variable domain of TCR clone 83514 (TRAV23/DV6, TRAJ57)
CAASSTLSQG

SEQ ID NO: 167028 - protein, 14 aa, Homo sapiens
  CDR3 for beta chain variable domain of TCR clone 83514 (TRBV12-4, TRBJ1-1)
CASSLGTGGTEAFF

SEQ ID NO: 167029 - protein, 14 aa, Homo sapiens
  CDR3 for alpha chain variable domain of TCR clone 83515 (TRAV12-2, TRAJ40)
CAVKIPSGTYKYIF

SEQ ID NO: 167030 - protein, 17 aa, Homo sapiens
  CDR3 for beta chain variable domain of TCR clone 83515 (TRBV20-1, TRBJ2-1)
CSAVSGTSGSLYNEQFF

SEQ ID NO: 167031 - protein, 14 aa, Homo sapiens
  CDR3 for alpha chain variable domain of TCR clone 83516 (TRAV12-2, TRAJ17)
CAVLFKAAGNKLTF

SEQ ID NO: 167032 - protein, 13 aa, Homo sapiens
  CDR3 for beta chain variable domain of TCR clone 83516 (TRBV12-4, TRBJ1-5)
CASSPDRAQPQHF

SEQ ID NO: 167033 - protein, 12 aa, Homo sapiens
  CDR3 for alpha chain variable domain of TCR clone 83517 (TRAV13-1, TRAJ49)
CAALNTGNQFYF

SEQ ID NO: 167034 - protein, 17 aa, Homo sapiens
  CDR3 for beta chain variable domain of TCR clone 83517 (TRBV25-1, TRBJ2-7)
CASSDARVVFSSYEQYF

SEQ ID NO: 167035 - protein, 15 aa, Homo sapiens
  CDR3 for alpha chain variable domain of TCR clone 83518 (TRAV26-1, TRAJ12)
CIVRVQMDSSYKLIF

SEQ ID NO: 167036 - protein, 15 aa, Homo sapiens
  CDR3 for beta chain variable domain of TCR clone 83518 (TRBV12-4, TRBJ2-5)
CASSPPTGLQETQYF

SEQ ID NO: 167037 - protein, 16 aa, Homo sapiens
  CDR3 for alpha chain variable domain of TCR clone 83519 (TRAV1-1, TRAJ45)
CAVRAYSGGGADGLTF

SEQ ID NO: 167038 - protein, 13 aa, Homo sapiens
  CDR3 for beta chain variable domain of TCR clone 83519 (TRBV20-1, TRBJ1-2)
CSARGTADYGYTS

SEQ ID NO: 167039 - protein, 15 aa, Homo sapiens
  CDR3 for alpha chain variable domain of TCR clone 83520 (TRAV8-4, TRAJ3)
CAVTGENLVQQCFQD

SEQ ID NO: 167040 - protein, 16 aa, Homo sapiens
  CDR3 for beta chain variable domain of TCR clone 83520 (TRBV4-2, TRBJ1-1)
CASSQAGFGMNTEAFC

SEQ ID NO: 167041 - protein, 14 aa, Homo sapiens
  CDR3 for alpha chain variable domain of TCR clone 83521 (TRAV12-1, TRAJ37)
CVVNRSGNTGKLIF

SEQ ID NO: 167042 - protein, 16 aa, Homo sapiens
  CDR3 for beta chain variable domain of TCR clone 83521 (TRBV7-2, TRBJ2-5)
CASSPFPTGGEETQYF

SEQ ID NO: 167043 - protein, 13 aa, Homo sapiens
  CDR3 for alpha chain variable domain of TCR clone 83522 (TRAV8-6, TRAJ49)
CAVITNTGNQFYF

SEQ ID NO: 167044 - protein, 15 aa, Homo sapiens
  CDR3 for beta chain variable domain of TCR clone 83522 (TRBV6-3, TRBJ2-2)
CASSFLATLTGELFF

SEQ ID NO: 167045 - protein, 12 aa, Homo sapiens
  CDR3 for alpha chain variable domain of TCR clone 83523 (TRAV8-3, TRAJ26)
CAGDNYGQNFVF

SEQ ID NO: 167046 - protein, 12 aa, Homo sapiens
  CDR3 for beta chain variable domain of TCR clone 83523 (TRBV11-2, TRBJ2-1)
CASSPGNNEQFS

SEQ ID NO: 167047 - protein, 13 aa, Homo sapiens
  CDR3 for alpha chain variable domain of TCR clone 83524 (TRAV21, TRAJ27)
CAARPGNVGKSTF

SEQ ID NO: 167048 - protein, 13 aa, Homo sapiens
  CDR3 for beta chain variable domain of TCR clone 83524 (TRBV7-6, TRBJ2-1)
CQQLGGGADEQFF

SEQ ID NO: 167049 - protein, 12 aa, Homo sapiens
  CDR3 for alpha chain variable domain of TCR clone 83525 (TRAV21, TRAJ33)
CAKMDSNYQLIW

SEQ ID NO: 167050 - protein, 16 aa, Homo sapiens
  CDR3 for beta chain variable domain of TCR clone 83525 (TRBV5-1, TRBJ1-1)
CASGSGGNSLNTEAFF

SEQ ID NO: 167051 - protein, 12 aa, Homo sapiens
  CDR3 for alpha chain variable domain of TCR clone 83526 (TRAV20, TRAJ33)
CAVRGSNYQLIC

SEQ ID NO: 167052 - protein, 13 aa, Homo sapiens
  CDR3 for beta chain variable domain of TCR clone 83526 (TRBV4-3, TRBJ1-1)
CASSPTGNTEAFF

SEQ ID NO: 167053 - protein, 14 aa, Homo sapiens
  CDR3 for alpha chain variable domain of TCR clone 83527 (TRAV17, TRAJ45)
CATASGGGADGLTF

SEQ ID NO: 167054 - protein, 15 aa, Homo sapiens
  CDR3 for beta chain variable domain of TCR clone 83527 (TRBV11-2, TRBJ2-1)
CSSSRNRGLMYEQFF

SEQ ID NO: 167055 - protein, 17 aa, Homo sapiens
  CDR3 for alpha chain variable domain of TCR clone 83528 (TRAV26-1, TRAJ58)
CIVRVGAEETSGSRLTF

SEQ ID NO: 167056 - protein, 13 aa, Homo sapiens
  CDR3 for beta chain variable domain of TCR clone 83528 (TRBV12-5, TRBJ1-2)
CTSGVRTGNGYTF

SEQ ID NO: 167057 - protein, 17 aa, Homo sapiens
  CDR3 for alpha chain variable domain of TCR clone 83529 (TRAV23/DV6, TRAJ57)
CAASSTLSQGGSEKLVF

SEQ ID NO: 167058 - protein, 14 aa, Homo sapiens
  CDR3 for beta chain variable domain of TCR clone 83529 (TRBV25-1, TRBJ1-1)
CASTHLGENTEAFF

SEQ ID NO: 167059 - protein, 11 aa, Homo sapiens
  CDR3 for alpha chain variable domain of TCR clone 83530 (TRAV2, TRAJ33)
CAVESNYQLIW

SEQ ID NO: 167060 - protein, 18 aa, Homo sapiens
  CDR3 for beta chain variable domain of TCR clone 83530 (TRBV18, TRBJ2-3)
CASSYTSGAAGGTDTQYF

SEQ ID NO: 167061 - protein, 17 aa, Homo sapiens
  CDR3 for alpha chain variable domain of TCR clone 83531 (TRAV3, TRAJ6)
CAVRDGPRAGGSYIPTF

SEQ ID NO: 167062 - protein, 15 aa, Homo sapiens
  CDR3 for beta chain variable domain of TCR clone 83531 (TRBV7-8, TRBJ2-1)
CASSLADSLYNEQFF

SEQ ID NO: 167063 - protein, 21 aa, Homo sapiens
  CDR3 for alpha chain variable domain of TCR clone 83532 (TRAV8-3, TRAJ10)
CAVGHTHGRRKQTPLWDRHSA

SEQ ID NO: 167064 - protein, 10 aa, Homo sapiens
  CDR3 for beta chain variable domain of TCR clone 83532 (TRBV20-1, TRBJ2-5)
CSARFETQYF

SEQ ID NO: 167065 - protein, 14 aa, Homo sapiens
  CDR3 for alpha chain variable domain of TCR clone 83533 (TRAV12-3, TRAJ12)
CAMSEVDSSYKLFF

SEQ ID NO: 167066 - protein, 12 aa, Homo sapiens
  CDR3 for beta chain variable domain of TCR clone 83533 (TRBV18, TRBJ1-4)
CASSPSREKLFF

SEQ ID NO: 167067 - protein, 12 aa, Homo sapiens
  CDR3 for alpha chain variable domain of TCR clone 83534 (TRAV35, TRAJ31)
CAAASNNARFMF

SEQ ID NO: 167068 - protein, 14 aa, Homo sapiens
  CDR3 for beta chain variable domain of TCR clone 83534 (TRBV2, TRBJ2-2)
CASSLFGGNGELFF

SEQ ID NO: 167069 - protein, 13 aa, Homo sapiens
  CDR3 for alpha chain variable domain of TCR clone 83535 (TRAV23/DV6, TRAJ22)
CAPYSGSARQLTF

SEQ ID NO: 167070 - protein, 15 aa, Homo sapiens
  CDR3 for beta chain variable domain of TCR clone 83535 (TRBV11-2, TRBJ1-6)
CASSLDPWAVSPLHL

SEQ ID NO: 167071 - protein, 18 aa, Homo sapiens
  CDR3 for alpha chain variable domain of TCR clone 83536 (TRAV26-2, TRAJ54)
CILRDVGVGIQGAQKLVF

SEQ ID NO: 167072 - protein, 16 aa, Homo sapiens
  CDR3 for beta chain variable domain of TCR clone 83536 (TRBV6-1, TRBJ2-5)
CASSETLDRGAETQYF

SEQ ID NO: 167073 - protein, 17 aa, Homo sapiens
  CDR3 for alpha chain variable domain of TCR clone 83537 (TRAV8-6, TRAJ58)
CAVSSWVGETSGSRLTF

SEQ ID NO: 167074 - protein, 14 aa, Homo sapiens
  CDR3 for beta chain variable domain of TCR clone 83537 (TRBV4-2, TRBJ2-1)
CASGLYRAYNEQFF

SEQ ID NO: 167075 - protein, 15 aa, Homo sapiens
  CDR3 for alpha chain variable domain of TCR clone 83538 (TRAV8-3, TRAJ27)
CAVGPSKTNAGKSTF

SEQ ID NO: 167076 - protein, 14 aa, Homo sapiens
  CDR3 for beta chain variable domain of TCR clone 83538 (TRBV20-1, TRBJ1-1)
SAVLHLGGGTEAFF

SEQ ID NO: 167077 - protein, 11 aa, Homo sapiens
  CDR3 for alpha chain variable domain of TCR clone 83539 (TRAV2, TRAJ21)
CAVFNFNKFYS

SEQ ID NO: 167078 - protein, 14 aa, Homo sapiens
  CDR3 for beta chain variable domain of TCR clone 83539 (TRBV15, TRBJ2-3)
CATRSGTGTDTQYF

SEQ ID NO: 167079 - protein, 14 aa, Homo sapiens
  CDR3 for alpha chain variable domain of TCR clone 83540 (TRAV16, TRAJ17)
CALGEGAAGNKLTF

SEQ ID NO: 167080 - protein, 14 aa, Homo sapiens
  CDR3 for beta chain variable domain of TCR clone 83540 (TRBV28, TRBJ2-2)
CASRIRSGTGELFF

SEQ ID NO: 167081 - protein, 14 aa, Homo sapiens
  CDR3 for alpha chain variable domain of TCR clone 83541 (TRAV12-1, TRAJ9)
CVVNRRTGGFKTIF

SEQ ID NO: 167082 - protein, 15 aa, Homo sapiens
  CDR3 for beta chain variable domain of TCR clone 83541 (TRBV27, TRBJ2-1)
CASSNGGGSSNEQFF

SEQ ID NO: 167083 - protein, 17 aa, Homo sapiens
  CDR3 for alpha chain variable domain of TCR clone 83542 (TRAV36/DV7, TRAJ42)
CAGGGMNYGGSQGNLIF

SEQ ID NO: 167084 - protein, 13 aa, Homo sapiens
  CDR3 for beta chain variable domain of TCR clone 83542 (TRBV19, TRBJ1-2)
CASSVPGQDGYTF

SEQ ID NO: 167085 - protein, 16 aa, Homo sapiens
  CDR3 for alpha chain variable domain of TCR clone 83543 (TRAV12-1, TRAJ45)
CVVIRYSGGGADVLTF

SEQ ID NO: 167086 - protein, 12 aa, Homo sapiens
  CDR3 for beta chain variable domain of TCR clone 83543 (TRBV6-5, TRBJ2-2)
CASRQITGELFF

SEQ ID NO: 167087 - protein, 16 aa, Homo sapiens
  CDR3 for alpha chain variable domain of TCR clone 83544 (TRAV12-3, TRAJ53)
CAMSPGSGGSNYKLTF

SEQ ID NO: 167088 - protein, 15 aa, Homo sapiens
  CDR3 for beta chain variable domain of TCR clone 83544 (TRBV19, TRBJ2-1)
CASSSPGVPLDEQFF

SEQ ID NO: 167089 - protein, 14 aa, Homo sapiens
  CDR3 for alpha chain variable domain of TCR clone 83545 (TRAV12-1, TRAJ26)
CVVKGSNYGQNFVF

SEQ ID NO: 167090 - protein, 14 aa, Homo sapiens
  CDR3 for beta chain variable domain of TCR clone 83545 (TRBV18, TRBJ2-5)
CASSPGVSQETQYF

SEQ ID NO: 167091 - protein, 13 aa, Homo sapiens
  CDR3 for alpha chain variable domain of TCR clone 83546 (TRAV12-3, TRAJ7)
CAMSASGNNRLAF

SEQ ID NO: 167092 - protein, 14 aa, Homo sapiens
  CDR3 for beta chain variable domain of TCR clone 83546 (TRBV13, TRBJ2-5)
CASSLGPRGESQYF

SEQ ID NO: 167093 - protein, 19 aa, Homo sapiens
  CDR3 for alpha chain variable domain of TCR clone 83547 (TRAV17, TRAJ17)
RATDGRPGVIKAAGNKLTF

SEQ ID NO: 167094 - protein, 17 aa, Homo sapiens
  CDR3 for beta chain variable domain of TCR clone 83547 (TRBV12-4, TRBJ1-1)
CASSLSGFRTMNTEAFF

SEQ ID NO: 167095 - protein, 15 aa, Homo sapiens
  CDR3 for alpha chain variable domain of TCR clone 83548 (TRAV12-2, TRAJ53)
CAVNGGGGSNYKLAF

SEQ ID NO: 167096 - protein, 14 aa, Homo sapiens
  CDR3 for beta chain variable domain of TCR clone 83548 (TRBV12-5, TRBJ2-5)
CASGSRTHQETQYF

SEQ ID NO: 167097 - protein, 15 aa, Homo sapiens
  CDR3 for alpha chain variable domain of TCR clone 83549 (TRAV25, TRAJ52)
CAWTSGGTSYGKLTF

SEQ ID NO: 167098 - protein, 16 aa, Homo sapiens
  CDR3 for beta chain variable domain of TCR clone 83549 (TRBV15, TRBJ1-2)
CATSRGPRTGGGGYTF

SEQ ID NO: 167099 - protein, 13 aa, Homo sapiens
  CDR3 for alpha chain variable domain of TCR clone 83550 (TRAV1-1, TRAJ9)
CAAKNTGGFKTIF

SEQ ID NO: 167100 - protein, 16 aa, Homo sapiens
  CDR3 for beta chain variable domain of TCR clone 83550 (TRBV7-9, TRBJ1-2)
CASSLGFSSGEDGYTF

SEQ ID NO: 167101 - protein, 15 aa, Homo sapiens
  CDR3 for alpha chain variable domain of TCR clone 83551 (TRAV29/DV5, TRAJ24)
CATSGATDSWGKFQF

SEQ ID NO: 167102 - protein, 20 aa, Homo sapiens
  CDR3 for beta chain variable domain of TCR clone 83551 (TRBV11-2, TRBJ2-2)
LRTRPCISVPAASLPGSCFF

SEQ ID NO: 167103 - protein, 13 aa, Homo sapiens
  CDR3 for alpha chain variable domain of TCR clone 83552 (TRAV12-1, TRAJ6)
CVVFPGGSYIPTF

SEQ ID NO: 167104 - protein, 22 aa, Homo sapiens
  CDR3 for beta chain variable domain of TCR clone 83552 (TRBV19, TRBJ2-1)
CASSVRDRVTGTSGRIYNEQFF

SEQ ID NO: 167105 - protein, 18 aa, Homo sapiens
  CDR3 for alpha chain variable domain of TCR clone 83553 (TRAV13-1, TRAJ52)
CAAKNPNTGGTSYGKLTF

SEQ ID NO: 167106 - protein, 14 aa, Homo sapiens
  CDR3 for beta chain variable domain of TCR clone 83553 (TRBV7-3, TRBJ2-1)
CASSLAGGTNEQFF

SEQ ID NO: 167107 - protein, 11 aa, Homo sapiens
  CDR3 for alpha chain variable domain of TCR clone 83554 (TRAV13-1, TRAJ6)
CATLGSYIPTF

SEQ ID NO: 167108 - protein, 12 aa, Homo sapiens
  CDR3 for beta chain variable domain of TCR clone 83554 (TRBV11-2, TRBJ2-1)
CTSSPGNNEQFF

SEQ ID NO: 167109 - protein, 15 aa, Homo sapiens
  CDR3 for alpha chain variable domain of TCR clone 83555 (TRAV3, TRAJ29)
CAVRAPLSGSTPLVF

SEQ ID NO: 167110 - protein, 15 aa, Homo sapiens
  CDR3 for beta chain variable domain of TCR clone 83555 (TRBV28, TRBJ1-1)
CASRIKGGLNTEAFF

SEQ ID NO: 167111 - protein, 13 aa, Homo sapiens
  CDR3 for alpha chain variable domain of TCR clone 83556 (TRAV12-2, TRAJ30)
CAVNLNRDDKVVF

SEQ ID NO: 167112 - protein, 14 aa, Homo sapiens
  CDR3 for beta chain variable domain of TCR clone 83556 (TRBV7-8, TRBJ2-7)
CASSLGRASYEQYF

SEQ ID NO: 167113 - protein, 16 aa, Homo sapiens
  CDR3 for alpha chain variable domain of TCR clone 83557 (TRAV1-2, TRAJ10)
CAVRGVLTGGGNKLTF

SEQ ID NO: 167114 - protein, 15 aa, Homo sapiens
  CDR3 for beta chain variable domain of TCR clone 83557 (TRBV5-1, TRBJ2-3)
CASSVTSGSTDTQYF

SEQ ID NO: 167115 - protein, 18 aa, Homo sapiens
  CDR3 for alpha chain variable domain of TCR clone 83558 (TRAV21, TRAJ52)
CAVRPSPAGGTSYGKLTF

SEQ ID NO: 167116 - protein, 17 aa, Homo sapiens
  CDR3 for beta chain variable domain of TCR clone 83558 (TRBV13, TRBJ2-3)
CASSLSRVAGGRNTQNF

SEQ ID NO: 167117 - protein, 14 aa, Homo sapiens
  CDR3 for alpha chain variable domain of TCR clone 83559 (TRAV12-3, TRAJ9)
CATSVGTGGFKTIF

SEQ ID NO: 167118 - protein, 14 aa, Homo sapiens
  CDR3 for beta chain variable domain of TCR clone 83559 (TRBV7-2, TRBJ2-7)
CASRSQGAAYEQYF

SEQ ID NO: 167119 - protein, 20 aa, Homo sapiens
  CDR3 for alpha chain variable domain of TCR clone 83560 (TRAV12-1, TRAJ42)
SSVIQPPTSVKGGSQGNLIF

SEQ ID NO: 167120 - protein, 15 aa, Homo sapiens
  CDR3 for beta chain variable domain of TCR clone 83560 (TRBV4-1, TRBJ2-7)
CASSQNTRRLYEQYF

SEQ ID NO: 167121 - protein, 12 aa, Homo sapiens
  CDR3 for alpha chain variable domain of TCR clone 83561 (TRAV12-3, TRAJ17)
CAMTLTGNKLTF

SEQ ID NO: 167122 - protein, 15 aa, Homo sapiens
  CDR3 for beta chain variable domain of TCR clone 83561 (TRBV20-1, TRBJ2-7)
CSARDRVSGIDKQYF

SEQ ID NO: 167123 - protein, 11 aa, Homo sapiens
  CDR3 for alpha chain variable domain of TCR clone 83562 (TRAV13-2, TRAJ20)
CAENMSYKLSF

SEQ ID NO: 167124 - protein, 13 aa, Homo sapiens
  CDR3 for beta chain variable domain of TCR clone 83562 (TRBV20-1, TRBJ2-5)
CSARYTGEEAQYF

SEQ ID NO: 167125 - protein, 13 aa, Homo sapiens
  CDR3 for alpha chain variable domain of TCR clone 83563 (TRAV35, TRAJ48)
CAGHESGNEKLTF

SEQ ID NO: 167126 - protein, 14 aa, Homo sapiens
  CDR3 for beta chain variable domain of TCR clone 83563 (TRBV19, TRBJ2-1)
CAGPTFVLSGEQFF

SEQ ID NO: 167127 - protein, 14 aa, Homo sapiens
  CDR3 for alpha chain variable domain of TCR clone 83564 (TRAV26-1, TRAJ39)
CIVRGSRAGNMLTF

SEQ ID NO: 167128 - protein, 11 aa, Homo sapiens
  CDR3 for beta chain variable domain of TCR clone 83564 (TRBV11-2, TRBJ2-2)
CASSLPGELFF

SEQ ID NO: 167129 - protein, 12 aa, Homo sapiens
  CDR3 for alpha chain variable domain of TCR clone 83565 (TRAV21, TRAJ13)
PGPSGGYQKVTF

SEQ ID NO: 167130 - protein, 15 aa, Homo sapiens
  CDR3 for beta chain variable domain of TCR clone 83565 (TRBV7-9, TRBJ1-6)
CARSSPGRGNSPLHF

SEQ ID NO: 167131 - protein, 14 aa, Homo sapiens
  CDR3 for alpha chain variable domain of TCR clone 83566 (TRAV26-1, TRAJ34)
CIVRVAYNTDKLIF

SEQ ID NO: 167132 - protein, 15 aa, Homo sapiens
  CDR3 for beta chain variable domain of TCR clone 83566 (TRBV20-1, TRBJ2-7)
CSARVPAAYFYEEYF

SEQ ID NO: 167133 - protein, 16 aa, Homo sapiens
  CDR3 for alpha chain variable domain of TCR clone 83567 (TRAV20, TRAJ22)
CAVQAASSGSARQLTF

SEQ ID NO: 167134 - protein, 13 aa, Homo sapiens
  CDR3 for beta chain variable domain of TCR clone 83567 (TRBV7-2, TRBJ2-5)
CASSQTSVETQYF

SEQ ID NO: 167135 - protein, 11 aa, Homo sapiens
  CDR3 for alpha chain variable domain of TCR clone 83568 (TRAV1-2, TRAJ20)
CAVANDYKLSF

SEQ ID NO: 167136 - protein, 18 aa, Homo sapiens
  CDR3 for beta chain variable domain of TCR clone 83568 (TRBV20-1, TRBJ2-6)
CSAETSPTHGSGANVLTF

SEQ ID NO: 167137 - protein, 12 aa, Homo sapiens
  CDR3 for alpha chain variable domain of TCR clone 83569 (TRAV12-3, TRAJ17)
CAMTLTGNKQTF

SEQ ID NO: 167138 - protein, 15 aa, Homo sapiens
  CDR3 for beta chain variable domain of TCR clone 83569 (TRBV11-3, TRBJ2-3)
CASLKDGREGDTQYF

SEQ ID NO: 167139 - protein, 15 aa, Homo sapiens
  CDR3 for alpha chain variable domain of TCR clone 83570 (TRAV8-2, TRAJ40)
CVVLGTTSGTYKYIF

SEQ ID NO: 167140 - protein, 16 aa, Homo sapiens
  CDR3 for beta chain variable domain of TCR clone 83570 (TRBV7-3, TRBJ2-1)
CASSSEGYRSYNEQFF

SEQ ID NO: 167141 - protein, 11 aa, Homo sapiens
  CDR3 for alpha chain variable domain of TCR clone 83571 (TRAV2, TRAJ33)
CAVESNYRLIW

SEQ ID NO: 167142 - protein, 15 aa, Homo sapiens
  CDR3 for beta chain variable domain of TCR clone 83571 (TRBV18, TRBJ2-1)
CASSPPSASYNEQFF

SEQ ID NO: 167143 - protein, 12 aa, Homo sapiens
  CDR3 for alpha chain variable domain of TCR clone 83572 (TRAV8-2, TRAJ30)
CVVSDRDDKIIF

SEQ ID NO: 167144 - protein, 16 aa, Homo sapiens
  CDR3 for beta chain variable domain of TCR clone 83572 (TRBV10-3, TRBJ2-6)
CAISTSGDLGANDLTF

SEQ ID NO: 167145 - protein, 13 aa, Homo sapiens
  CDR3 for alpha chain variable domain of TCR clone 83573 (TRAV12-2, TRAJ52)
CAVSGTSYGKLTF

SEQ ID NO: 167146 - protein, 14 aa, Homo sapiens
  CDR3 for beta chain variable domain of TCR clone 83573 (TRBV7-2, TRBJ2-7)
CASRSQGAAYEQYF

SEQ ID NO: 167147 - protein, 12 aa, Homo sapiens
  CDR3 for alpha chain variable domain of TCR clone 83574 (TRAV3, TRAJ27)
CAVSDGAGKSTF

SEQ ID NO: 167148 - protein, 13 aa, Homo sapiens
  CDR3 for beta chain variable domain of TCR clone 83574 (TRBV10-3, TRBJ1-2)
CAINADLNYGYTF

SEQ ID NO: 167149 - protein, 16 aa, Homo sapiens
  CDR3 for alpha chain variable domain of TCR clone 83575 (TRAV26-1, TRAJ48)
IASSDLSNFGNEKLTF

SEQ ID NO: 167150 - protein, 14 aa, Homo sapiens
  CDR3 for beta chain variable domain of TCR clone 83575 (TRBV13, TRBJ2-7)
CASSVKGASYEQYF

SEQ ID NO: 167151 - protein, 15 aa, Homo sapiens
  CDR3 for alpha chain variable domain of TCR clone 83576 (TRAV2, TRAJ15)
CAVEDREQAGTALIF

SEQ ID NO: 167152 - protein, 13 aa, Homo sapiens
  CDR3 for beta chain variable domain of TCR clone 83576 (TRBV10-2, TRBJ2-3)
RASSESGDHTQYF

SEQ ID NO: 167153 - protein, 12 aa, Homo sapiens
  CDR3 for alpha chain variable domain of TCR clone 83577 (TRAV2, TRAJ10)
CASTGGENKLTF

SEQ ID NO: 167154 - protein, 14 aa, Homo sapiens
  CDR3 for beta chain variable domain of TCR clone 83577 (TRBV7-2, TRBJ2-2)
CASRGQGAAGELFF

SEQ ID NO: 167155 - protein, 16 aa, Homo sapiens
  CDR3 for alpha chain variable domain of TCR clone 83578 (TRAV20, TRAJ22)
CAVQASSSGSARQLTF

SEQ ID NO: 167156 - protein, 13 aa, Homo sapiens
  CDR3 for beta chain variable domain of TCR clone 83578 (TRBV7-2, TRBJ2-5)
CASSQTSVETQDF

SEQ ID NO: 167157 - protein, 12 aa, Homo sapiens
  CDR3 for alpha chain variable domain of TCR clone 83579 (TRAV21, TRAJ30)
CAVMNRDDKIIF

SEQ ID NO: 167158 - protein, 17 aa, Homo sapiens
  CDR3 for beta chain variable domain of TCR clone 83579 (TRBV5-1, TRBJ1-1)
CASRPIRTVGVNTEAFF

SEQ ID NO: 167159 - protein, 14 aa, Homo sapiens
  CDR3 for alpha chain variable domain of TCR clone 83580 (TRAV12-1, TRAJ17)
CVVNTKAAGNKLTF

SEQ ID NO: 167160 - protein, 16 aa, Homo sapiens
  CDR3 for beta chain variable domain of TCR clone 83580 (TRBV20-1, TRBJ2-1)
CSASASGYSSYNEQFF

SEQ ID NO: 167161 - protein, 15 aa, Homo sapiens
  CDR3 for alpha chain variable domain of TCR clone 83581 (TRAV21, TRAJ22)
CTVRLFFWFCKATDL

SEQ ID NO: 167162 - protein, 14 aa, Homo sapiens
  CDR3 for beta chain variable domain of TCR clone 83581 (TRBV19, TRBJ1-5)
CASRAPDSFLSQHF

SEQ ID NO: 167163 - protein, 20 aa, Homo sapiens
  CDR3 for alpha chain variable domain of TCR clone 83582 (TRAV12-3, TRAJ41)
SLFIRDSQPSDSATPEALDF

SEQ ID NO: 167164 - protein, 15 aa, Homo sapiens
  CDR3 for beta chain variable domain of TCR clone 83582 (TRBV5-1, TRBJ2-7)
CASSLDLTSSYEQYF

SEQ ID NO: 167165 - protein, 15 aa, Homo sapiens
  CDR3 for alpha chain variable domain of TCR clone 83583 (TRAV17, TRAJ57)
CATGPSQGGSEKLVF

SEQ ID NO: 167166 - protein, 19 aa, Homo sapiens
  CDR3 for beta chain variable domain of TCR clone 83583 (TRBV12-4, TRBJ1-5)
CTSVPAADRSGGSNQPQHF

SEQ ID NO: 167167 - protein, 13 aa, Homo sapiens
  CDR3 for alpha chain variable domain of TCR clone 83584 (TRAV27, TRAJ41)
CAGEGNSGYALNF

SEQ ID NO: 167168 - protein, 14 aa, Homo sapiens
  CDR3 for beta chain variable domain of TCR clone 83584 (TRBV7-2, TRBJ1-1)
CASRFLTGTTEAFF

SEQ ID NO: 167169 - protein, 14 aa, Homo sapiens
  CDR3 for alpha chain variable domain of TCR clone 83585 (TRAV1-2, TRAJ16)
CAVNRFSDGQKLLF

SEQ ID NO: 167170 - protein, 12 aa, Homo sapiens
  CDR3 for beta chain variable domain of TCR clone 83585 (TRBV3-1, TRBJ2-1)
CASSQGSSEQFF

SEQ ID NO: 167171 - protein, 14 aa, Homo sapiens
  CDR3 for alpha chain variable domain of TCR clone 83586 (TRAV35, TRAJ33)
CAGSSQDSNYQLIW

SEQ ID NO: 167172 - protein, 14 aa, Homo sapiens
  CDR3 for beta chain variable domain of TCR clone 83586 (TRBV20-1, TRBJ2-7)
CSAWTALSSYEQYF

SEQ ID NO: 167173 - protein, 15 aa, Homo sapiens
  CDR3 for alpha chain variable domain of TCR clone 83587 (TRAV12-2, TRAJ43)
CAFDMRFGAGTRLTV

SEQ ID NO: 167174 - protein, 14 aa, Homo sapiens
  CDR3 for beta chain variable domain of TCR clone 83587 (TRBV4-1, TRBJ2-2)
CASSQAVNTGELFF

SEQ ID NO: 167175 - protein, 17 aa, Homo sapiens
  CDR3 for alpha chain variable domain of TCR clone 83588 (TRAV13-1, TRAJ53)
CAASWKSSGGSNYKLTF

SEQ ID NO: 167176 - protein, 13 aa, Homo sapiens
  CDR3 for beta chain variable domain of TCR clone 83588 (TRBV6-5, TRBJ2-5)
CASSPQGGETQYF

SEQ ID NO: 167177 - protein, 16 aa, Homo sapiens
  CDR3 for alpha chain variable domain of TCR clone 83589 (TRAV3, TRAJ37)
CAVREKGSGNTGKLIF

SEQ ID NO: 167178 - protein, 16 aa, Homo sapiens
  CDR3 for beta chain variable domain of TCR clone 83589 (TRBV12-5, TRBJ2-5)
CASGPRTSGSQETQHF

SEQ ID NO: 167179 - protein, 12 aa, Homo sapiens
  CDR3 for alpha chain variable domain of TCR clone 83590 (TRAV8-3, TRAJ26)
CAGDNYGQNFVF

SEQ ID NO: 167180 - protein, 14 aa, Homo sapiens
  CDR3 for beta chain variable domain of TCR clone 83590 (TRBV2, TRBJ2-7)
CASSLTSGGYEQYF

SEQ ID NO: 167181 - protein, 13 aa, Homo sapiens
  CDR3 for alpha chain variable domain of TCR clone 83591 (TRAV35, TRAJ44)
CAGLYGTASKLTF

SEQ ID NO: 167182 - protein, 17 aa, Homo sapiens
  CDR3 for beta chain variable domain of TCR clone 83591 (TRBV7-8, TRBJ1-2)
CASSLRPLQGHLYGYTF

SEQ ID NO: 167183 - protein, 13 aa, Homo sapiens
  CDR3 for alpha chain variable domain of TCR clone 83592 (TRAV8-3, TRAJ4)
WVSYSGGYNKLIF

SEQ ID NO: 167184 - protein, 16 aa, Homo sapiens
  CDR3 for beta chain variable domain of TCR clone 83592 (TRBV7-8, TRBJ2-3)
CASSTEGQRETDTQYF

SEQ ID NO: 167185 - protein, 13 aa, Homo sapiens
  CDR3 for alpha chain variable domain of TCR clone 83593 (TRAV17, TRAJ26)
CATVDNYGQNFVF

SEQ ID NO: 167186 - protein, 16 aa, Homo sapiens
  CDR3 for beta chain variable domain of TCR clone 83593 (TRBV4-1, TRBJ2-7)
CASSQEWTSGPLEQYF

SEQ ID NO: 167187 - protein, 13 aa, Homo sapiens
  CDR3 for alpha chain variable domain of TCR clone 83594 (TRAV27, TRAJ54)
CAGEGQGAQKLVF

SEQ ID NO: 167188 - protein, 15 aa, Homo sapiens
  CDR3 for beta chain variable domain of TCR clone 83594 (TRBV18, TRBJ2-6)
CASSPSYAGANVLTF

SEQ ID NO: 167189 - protein, 15 aa, Homo sapiens
  CDR3 for alpha chain variable domain of TCR clone 83595 (TRAV13-1, TRAJ44)
RAASRGGGTASKLTF

SEQ ID NO: 167190 - protein, 14 aa, Homo sapiens
  CDR3 for beta chain variable domain of TCR clone 83595 (TRBV7-2, TRBJ2-5)
CASSPRGSSETQYF

SEQ ID NO: 167191 - protein, 14 aa, Homo sapiens
  CDR3 for alpha chain variable domain of TCR clone 83596 (TRAV8-3, TRAJ4)
CAVGAAGGYNKLIF

SEQ ID NO: 167192 - protein, 17 aa, Homo sapiens
  CDR3 for beta chain variable domain of TCR clone 83596 (TRBV7-8, TRBJ2-1)
CASSPPTGTLAYNEQFF

SEQ ID NO: 167193 - protein, 18 aa, Homo sapiens
  CDR3 for alpha chain variable domain of TCR clone 83597 (TRAV35, TRAJ28)
CAGHNYPLSGAGSYQLTF

SEQ ID NO: 167194 - protein, 12 aa, Homo sapiens
  CDR3 for beta chain variable domain of TCR clone 83597 (TRBV7-9, TRBJ1-1)
CASSSQGTEAFF

SEQ ID NO: 167195 - protein, 14 aa, Homo sapiens
  CDR3 for alpha chain variable domain of TCR clone 83598 (TRAV20, TRAJ22)
CAVALGDSARQLTF

SEQ ID NO: 167196 - protein, 15 aa, Homo sapiens
  CDR3 for beta chain variable domain of TCR clone 83598 (TRBV7-2, TRBJ1-1)
CASSFAGDRDTEAFF

SEQ ID NO: 167197 - protein, 16 aa, Homo sapiens
  CDR3 for alpha chain variable domain of TCR clone 83599 (TRAV12-3, TRAJ53)
CAMSVGSGGSDYKRTF

SEQ ID NO: 167198 - protein, 11 aa, Homo sapiens
  CDR3 for beta chain variable domain of TCR clone 83599 (TRBV29-1, TRBJ2-5)
CSVASGETQYF

SEQ ID NO: 167199 - protein, 15 aa, Homo sapiens
  CDR3 for alpha chain variable domain of TCR clone 83600 (TRAV21, TRAJ40)
CAVRPQTSGTYKYIF

SEQ ID NO: 167200 - protein, 13 aa, Homo sapiens
  CDR3 for beta chain variable domain of TCR clone 83600 (TRBV7-2, TRBJ2-2)
CASVSVRARELFF

SEQ ID NO: 167201 - protein, 14 aa, Homo sapiens
  CDR3 for alpha chain variable domain of TCR clone 83601 (TRAV1-1, TRAJ30)
CAVRSLNRDDKIIF

SEQ ID NO: 167202 - protein, 12 aa, Homo sapiens
  CDR3 for beta chain variable domain of TCR clone 83601 (TRBV11-2, TRBJ2-2)
CASSLGGGELFF

SEQ ID NO: 167203 - protein, 11 aa, Homo sapiens
  CDR3 for alpha chain variable domain of TCR clone 83602 (TRAV4, TRAJ23)
CLVAPGGKLNF

SEQ ID NO: 167204 - protein, 15 aa, Homo sapiens
  CDR3 for beta chain variable domain of TCR clone 83602 (TRBV7-2, TRBJ2-1)
CASSFQADEYNEQFF

SEQ ID NO: 167205 - protein, 15 aa, Homo sapiens
  CDR3 for alpha chain variable domain of TCR clone 83603 (TRAV17, TRAJ57)
CATGPSQGGSEKLVF

SEQ ID NO: 167206 - protein, 15 aa, Homo sapiens
  CDR3 for beta chain variable domain of TCR clone 83603 (TRBV13, TRBJ1-3)
CASSPNRGSGNTIYF

SEQ ID NO: 167207 - protein, 11 aa, Homo sapiens
  CDR3 for alpha chain variable domain of TCR clone 83604 (TRAV2, TRAJ13)
CASGGYQKVTF

SEQ ID NO: 167208 - protein, 15 aa, Homo sapiens
  CDR3 for beta chain variable domain of TCR clone 83604 (TRBV29-1, TRBJ2-1)
CSGRDRKSAYNEQFF

SEQ ID NO: 167209 - protein, 16 aa, Homo sapiens
  CDR3 for alpha chain variable domain of TCR clone 83605 (TRAV1-2, TRAJ6)
CAVRDQGTGGSYIPTF

SEQ ID NO: 167210 - protein, 13 aa, Homo sapiens
  CDR3 for beta chain variable domain of TCR clone 83605 (TRBV28, TRBJ2-7)
CASTLGLAGEQYF

SEQ ID NO: 167211 - protein, 13 aa, Homo sapiens
  CDR3 for alpha chain variable domain of TCR clone 83606 (TRAV8-3, TRAJ28)
CAVGAVGSYQLTF

SEQ ID NO: 167212 - protein, 13 aa, Homo sapiens
  CDR3 for beta chain variable domain of TCR clone 83606 (TRBV25-1, TRBJ1-1)
CQHPPGGNTEAFF

SEQ ID NO: 167213 - protein, 14 aa, Homo sapiens
  CDR3 for alpha chain variable domain of TCR clone 83607 (TRAV12-2, )
CAVEDIQNPDPAVY

SEQ ID NO: 167214 - protein, 18 aa, Homo sapiens
  CDR3 for beta chain variable domain of TCR clone 83607 (TRBV11-2, TRBJ2-3)
CASSLGGASRGAPNTQYF

SEQ ID NO: 167215 - protein, 14 aa, Homo sapiens
  CDR3 for alpha chain variable domain of TCR clone 83608 (TRAV12-1, TRAJ12)
CVVTRMDSSYKLIF

SEQ ID NO: 167216 - protein, 13 aa, Homo sapiens
  CDR3 for beta chain variable domain of TCR clone 83608 (TRBV27, TRBJ2-1)
CASSSGSYNEQFF

SEQ ID NO: 167217 - protein, 13 aa, Homo sapiens
  CDR3 for alpha chain variable domain of TCR clone 83609 (TRAV1-2, TRAJ30)
CAVRDDRDDKIIF

SEQ ID NO: 167218 - protein, 13 aa, Homo sapiens
  CDR3 for beta chain variable domain of TCR clone 83609 (TRBV20-1, TRBJ2-5)
CSAREAFQETQYF

SEQ ID NO: 167219 - protein, 13 aa, Homo sapiens
  CDR3 for alpha chain variable domain of TCR clone 83610 (TRAV17, TRAJ5)
CATMDMGRRALTF

SEQ ID NO: 167220 - protein, 15 aa, Homo sapiens
  CDR3 for beta chain variable domain of TCR clone 83610 (TRBV20-1, TRBJ2-5)
CSAARTSGSLETQYF

SEQ ID NO: 167221 - protein, 13 aa, Homo sapiens
  CDR3 for alpha chain variable domain of TCR clone 83611 (TRAV36/DV7, TRAJ38)
CVANAGNNRKLIW

SEQ ID NO: 167222 - protein, 14 aa, Homo sapiens
  CDR3 for beta chain variable domain of TCR clone 83611 (TRBV19, TRBJ2-1)
CASPTFVLSGEQFF

SEQ ID NO: 167223 - protein, 12 aa, Homo sapiens
  CDR3 for alpha chain variable domain of TCR clone 83612 (TRAV20, TRAJ39)
CAVGNAGNMLTF

SEQ ID NO: 167224 - protein, 16 aa, Homo sapiens
  CDR3 for beta chain variable domain of TCR clone 83612 (TRBV15, TRBJ1-2)
CATSRGPRKGGGGYTF

SEQ ID NO: 167225 - protein, 14 aa, Homo sapiens
  CDR3 for alpha chain variable domain of TCR clone 83613 (TRAV26-1, TRAJ39)
CIVRGSRAGNMLTF

SEQ ID NO: 167226 - protein, 12 aa, Homo sapiens
  CDR3 for beta chain variable domain of TCR clone 83613 (TRBV7-9, TRBJ1-1)
CASSLVRGEAFF

SEQ ID NO: 167227 - protein, 14 aa, Homo sapiens
  CDR3 for alpha chain variable domain of TCR clone 83614 (TRAV8-2, TRAJ37)
CAVSISGNTGKLIF

SEQ ID NO: 167228 - protein, 13 aa, Homo sapiens
  CDR3 for beta chain variable domain of TCR clone 83614 (TRBV7-8, TRBJ2-7)
RRVRLTEMGEQYF

SEQ ID NO: 167229 - protein, 13 aa, Homo sapiens
  CDR3 for alpha chain variable domain of TCR clone 83615 (TRAV22, TRAJ26)
CAVEHNHGQNFVF

SEQ ID NO: 167230 - protein, 16 aa, Homo sapiens
  CDR3 for beta chain variable domain of TCR clone 83615 (TRBV7-2, TRBJ2-6)
CASSERRASGANVLTF

SEQ ID NO: 167231 - protein, 16 aa, Homo sapiens
  CDR3 for alpha chain variable domain of TCR clone 83616 (TRAV21, TRAJ17)
CAVRPGEETAGNKLTF

SEQ ID NO: 167232 - protein, 16 aa, Homo sapiens
  CDR3 for beta chain variable domain of TCR clone 83616 (TRBV2, TRBJ2-7)
CASSEPWTGPSYEQYF

SEQ ID NO: 167233 - protein, 12 aa, Homo sapiens
  CDR3 for alpha chain variable domain of TCR clone 83617 (TRAV16, TRAJ26)
CALRMYGQNFVF

SEQ ID NO: 167234 - protein, 16 aa, Homo sapiens
  CDR3 for beta chain variable domain of TCR clone 83617 (TRBV7-3, TRBJ2-2)
CASSLKRGTLSGELFF

SEQ ID NO: 167235 - protein, 19 aa, Homo sapiens
  CDR3 for alpha chain variable domain of TCR clone 83618 (TRAV1-2, TRAJ26)
CLLPLCCERPDNYGQNFVF

SEQ ID NO: 167236 - protein, 17 aa, Homo sapiens
  CDR3 for beta chain variable domain of TCR clone 83618 (TRBV13, TRBJ2-3)
CASSLSRVAGGEEYAAF

SEQ ID NO: 167237 - protein, 14 aa, Homo sapiens
  CDR3 for alpha chain variable domain of TCR clone 83619 (TRAV2, TRAJ29)
CAVTPPSGNTPLVL

SEQ ID NO: 167238 - protein, 13 aa, Homo sapiens
  CDR3 for beta chain variable domain of TCR clone 83619 (TRBV11-2, TRBJ2-1)
CASSLGLAGGRFF

SEQ ID NO: 167239 - protein, 12 aa, Homo sapiens
  CDR3 for alpha chain variable domain of TCR clone 83620 (TRAV17, TRAJ30)
CVPERRDDKIIF

SEQ ID NO: 167240 - protein, 14 aa, Homo sapiens
  CDR3 for beta chain variable domain of TCR clone 83620 (TRBV7-7, TRBJ2-2)
CASSLDRSTGELFF

SEQ ID NO: 167241 - protein, 16 aa, Homo sapiens
  CDR3 for alpha chain variable domain of TCR clone 83621 (TRAV16, TRAJ4)
CALSRMFSGGYNKLIF

SEQ ID NO: 167242 - protein, 15 aa, Homo sapiens
  CDR3 for beta chain variable domain of TCR clone 83621 (TRBV29-1, TRBJ2-6)
CSFTGGRSGANVLTF

SEQ ID NO: 167243 - protein, 14 aa, Homo sapiens
  CDR3 for alpha chain variable domain of TCR clone 83622 (TRAV12-2, TRAJ13)
CAVKKTGGYQKVTF

SEQ ID NO: 167244 - protein, 16 aa, Homo sapiens
  CDR3 for beta chain variable domain of TCR clone 83622 (TRBV19, TRBJ1-5)
CASSIDRGGPRQPQHF

SEQ ID NO: 167245 - protein, 13 aa, Homo sapiens
  CDR3 for alpha chain variable domain of TCR clone 83623 (TRAV23/DV6, TRAJ34)
CAAIENNTDKLIF

SEQ ID NO: 167246 - protein, 13 aa, Homo sapiens
  CDR3 for beta chain variable domain of TCR clone 83623 (TRBV29-1, TRBJ2-7)
CSVGTSGGYEQYF

SEQ ID NO: 167247 - protein, 16 aa, Homo sapiens
  CDR3 for alpha chain variable domain of TCR clone 83624 (TRAV30, TRAJ24)
CGTEIVDADSWGKFKF

SEQ ID NO: 167248 - protein, 12 aa, Homo sapiens
  CDR3 for beta chain variable domain of TCR clone 83624 (TRBV7-8, TRBJ2-7)
CASSLGDREQYF

SEQ ID NO: 167249 - protein, 14 aa, Homo sapiens
  CDR3 for alpha chain variable domain of TCR clone 83625 (TRAV12-1, TRAJ12)
CVVARMDSSYKLIF

SEQ ID NO: 167250 - protein, 13 aa, Homo sapiens
  CDR3 for beta chain variable domain of TCR clone 83625 (TRBV20-1, TRBJ1-1)
CSARGGGNTEAFF

SEQ ID NO: 167251 - protein, 14 aa, Homo sapiens
  CDR3 for alpha chain variable domain of TCR clone 83626 (TRAV13-1, TRAJ44)
CAAKATGTASKLTF

SEQ ID NO: 167252 - protein, 13 aa, Homo sapiens
  CDR3 for beta chain variable domain of TCR clone 83626 (TRBV7-2, TRBJ2-4)
CASSREHANIQYF

SEQ ID NO: 167253 - protein, 19 aa, Homo sapiens
  CDR3 for alpha chain variable domain of TCR clone 83627 (TRAV8-3, TRAJ8)
LSTSVLWDPMNTGFQKLVF

SEQ ID NO: 167254 - protein, 15 aa, Homo sapiens
  CDR3 for beta chain variable domain of TCR clone 83627 (TRBV5-1, TRBJ2-7)
CASSPQGRPLDEQYF

SEQ ID NO: 167255 - protein, 12 aa, Homo sapiens
  CDR3 for alpha chain variable domain of TCR clone 83628 (TRAV26-1, TRAJ36)
CIVRVRADNIFF

SEQ ID NO: 167256 - protein, 13 aa, Homo sapiens
  CDR3 for beta chain variable domain of TCR clone 83628 (TRBV11-2, TRBJ2-5)
CASSRGPSETQYF

SEQ ID NO: 167257 - protein, 13 aa, Homo sapiens
  CDR3 for alpha chain variable domain of TCR clone 83629 (TRAV1-1, TRAJ13)
CAVNSVGYQKVTF

SEQ ID NO: 167258 - protein, 12 aa, Homo sapiens
  CDR3 for beta chain variable domain of TCR clone 83629 (TRBV28, TRBJ2-1)
CASSVQINEQFF

SEQ ID NO: 167259 - protein, 12 aa, Homo sapiens
  CDR3 for alpha chain variable domain of TCR clone 83630 (TRAV21, TRAJ33)
CAKMDSNYQLIW

SEQ ID NO: 167260 - protein, 15 aa, Homo sapiens
  CDR3 for beta chain variable domain of TCR clone 83630 (TRBV7-9, TRBJ1-5)
CASSQGHQPNQPQHF

SEQ ID NO: 167261 - protein, 16 aa, Homo sapiens
  CDR3 for alpha chain variable domain of TCR clone 83631 (TRAV30, TRAJ24)
CGTEIVDADRWGKFQF

SEQ ID NO: 167262 - protein, 12 aa, Homo sapiens
  CDR3 for beta chain variable domain of TCR clone 83631 (TRBV11-2, TRBJ2-2)
CASSLGGGELFF

SEQ ID NO: 167263 - protein, 15 aa, Homo sapiens
  CDR3 for alpha chain variable domain of TCR clone 83632 (TRAV12-2, TRAJ53)
CAVNGGGGSNYKLTF

SEQ ID NO: 167264 - protein, 17 aa, Homo sapiens
  CDR3 for beta chain variable domain of TCR clone 83632 (TRBV7-3, TRBJ2-3)
RASSLMKRRRGADTQYF

SEQ ID NO: 167265 - protein, 16 aa, Homo sapiens
  CDR3 for alpha chain variable domain of TCR clone 83633 (TRAV35, TRAJ37)
CWAFLRGSSNTGKLIF

SEQ ID NO: 167266 - protein, 15 aa, Homo sapiens
  CDR3 for beta chain variable domain of TCR clone 83633 (TRBV2, TRBJ2-7)
CASSENRQGKGEQYF

SEQ ID NO: 167267 - protein, 14 aa, Homo sapiens
  CDR3 for alpha chain variable domain of TCR clone 83634 (TRAV16, TRAJ42)
CALLAGGSQGNPIF

SEQ ID NO: 167268 - protein, 13 aa, Homo sapiens
  CDR3 for beta chain variable domain of TCR clone 83634 (TRBV7-9, TRBJ1-2)
CASSLKQNYGYTF

SEQ ID NO: 167269 - protein, 14 aa, Homo sapiens
  CDR3 for alpha chain variable domain of TCR clone 83635 (TRAV8-1, TRAJ34)
CAVITTYNTDKLIF

SEQ ID NO: 167270 - protein, 14 aa, Homo sapiens
  CDR3 for beta chain variable domain of TCR clone 83635 (TRBV11-3, TRBJ1-3)
CASSHNGQGNTTYF

SEQ ID NO: 167271 - protein, 14 aa, Homo sapiens
  CDR3 for alpha chain variable domain of TCR clone 83636 (TRAV12-3, TRAJ10)
SHLPLTGGGNKLTF

SEQ ID NO: 167272 - protein, 12 aa, Homo sapiens
  CDR3 for beta chain variable domain of TCR clone 83636 (TRBV11-2, TRBJ2-2)
CARSLGGGELFF

SEQ ID NO: 167273 - protein, 16 aa, Homo sapiens
  CDR3 for alpha chain variable domain of TCR clone 83637 (TRAV16, TRAJ4)
CALSRMFSGGYNKLIF

SEQ ID NO: 167274 - protein, 13 aa, Homo sapiens
  CDR3 for beta chain variable domain of TCR clone 83637 (TRBV19, TRBJ1-5)
CASSIGGNQLQHF

SEQ ID NO: 167275 - protein, 12 aa, Homo sapiens
  CDR3 for alpha chain variable domain of TCR clone 83638 (TRAV8-3, TRAJ34)
WASGYNTDKLIF

SEQ ID NO: 167276 - protein, 13 aa, Homo sapiens
  CDR3 for beta chain variable domain of TCR clone 83638 (TRBV6-4, TRBJ2-3)
CASSVAWADTQYF

SEQ ID NO: 167277 - protein, 15 aa, Homo sapiens
  CDR3 for alpha chain variable domain of TCR clone 83639 (TRAV3, TRAJ22)
CAVRDRGGSARQLTF

SEQ ID NO: 167278 - protein, 16 aa, Homo sapiens
  CDR3 for beta chain variable domain of TCR clone 83639 (TRBV5-4, TRBJ2-3)
CASQQPGAGGADTRYF

SEQ ID NO: 167279 - protein, 11 aa, Homo sapiens
  CDR3 for alpha chain variable domain of TCR clone 83640 (TRAV3, TRAJ21)
CAVGNFNKFYF

SEQ ID NO: 167280 - protein, 17 aa, Homo sapiens
  CDR3 for beta chain variable domain of TCR clone 83640 (TRBV7-3, TRBJ2-2)
CASSLSGTSGGTGELFF

SEQ ID NO: 167281 - protein, 11 aa, Homo sapiens
  CDR3 for alpha chain variable domain of TCR clone 83641 (TRAV2, TRAJ23)
CAVETRGKLIF

SEQ ID NO: 167282 - protein, 19 aa, Homo sapiens
  CDR3 for beta chain variable domain of TCR clone 83641 (TRBV2, TRBJ2-7)
CASSDDETSGRANDYEQYF

SEQ ID NO: 167283 - protein, 13 aa, Homo sapiens
  CDR3 for alpha chain variable domain of TCR clone 83642 (TRAV12-2, TRAJ24)
CAVSTDSWGKLQF

SEQ ID NO: 167284 - protein, 13 aa, Homo sapiens
  CDR3 for beta chain variable domain of TCR clone 83642 (TRBV27, TRBJ1-4)
CASSLMGDEKLFF

SEQ ID NO: 167285 - protein, 13 aa, Homo sapiens
  CDR3 for alpha chain variable domain of TCR clone 83643 (TRAV21, TRAJ57)
CAVIEGGSEKLVS

SEQ ID NO: 167286 - protein, 15 aa, Homo sapiens
  CDR3 for beta chain variable domain of TCR clone 83643 (TRBV10-3, TRBJ2-5)
CTISEFGRGQETQYF

SEQ ID NO: 167287 - protein, 19 aa, Homo sapiens
  CDR3 for alpha chain variable domain of TCR clone 83644 (TRAV29/DV5, TRAJ49)
CSVLLCSKLTVDTGNQFYF

SEQ ID NO: 167288 - protein, 13 aa, Homo sapiens
  CDR3 for beta chain variable domain of TCR clone 83644 (TRBV7-6, TRBJ2-3)
CASSLRSDNTQYF

SEQ ID NO: 167289 - protein, 13 aa, Homo sapiens
  CDR3 for alpha chain variable domain of TCR clone 83645 (TRAV35, TRAJ13)
CAGRAGGYQKVTF

SEQ ID NO: 167290 - protein, 14 aa, Homo sapiens
  CDR3 for beta chain variable domain of TCR clone 83645 (TRBV7-2, TRBJ2-7)
CASSLYPGRYEQYF

SEQ ID NO: 167291 - protein, 15 aa, Homo sapiens
  CDR3 for alpha chain variable domain of TCR clone 83646 (TRAV8-6, TRAJ6)
CAVSGESGGSYIPTF

SEQ ID NO: 167292 - protein, 14 aa, Homo sapiens
  CDR3 for beta chain variable domain of TCR clone 83646 (TRBV7-9, TRBJ2-1)
CAGSSMVGFGEQFF

SEQ ID NO: 167293 - protein, 14 aa, Homo sapiens
  CDR3 for alpha chain variable domain of TCR clone 83647 (TRAV12-1, TRAJ17)
CVVNYKAAGNKLTF

SEQ ID NO: 167294 - protein, 17 aa, Homo sapiens
  CDR3 for beta chain variable domain of TCR clone 83647 (TRBV20-1, TRBJ2-1)
CSASSSGLAGSSNEQFF

SEQ ID NO: 167295 - protein, 13 aa, Homo sapiens
  CDR3 for alpha chain variable domain of TCR clone 83648 (TRAV13-2, TRAJ48)
CAEMDFGNEKLTF

SEQ ID NO: 167296 - protein, 15 aa, Homo sapiens
  CDR3 for beta chain variable domain of TCR clone 83648 (TRBV7-3, TRBJ2-1)
CASSQQGGALIEQFF

SEQ ID NO: 167297 - protein, 12 aa, Homo sapiens
  CDR3 for alpha chain variable domain of TCR clone 83649 (TRAV17, TRAJ29)
CYASSGNTPLVF

SEQ ID NO: 167298 - protein, 17 aa, Homo sapiens
  CDR3 for beta chain variable domain of TCR clone 83649 (TRBV20-1, TRBJ2-2)
CSTSGSGQGGLTGELFF

SEQ ID NO: 167299 - protein, 16 aa, Homo sapiens
  CDR3 for alpha chain variable domain of TCR clone 83650 (TRAV17, TRAJ22)
CATGPISSGSARQLTF

SEQ ID NO: 167300 - protein, 13 aa, Homo sapiens
  CDR3 for beta chain variable domain of TCR clone 83650 (TRBV11-2, TRBJ2-1)
CASSLGLTGGRFF

SEQ ID NO: 167301 - protein, 12 aa, Homo sapiens
  CDR3 for alpha chain variable domain of TCR clone 83651 (TRAV27, TRAJ13)
CAGVRGYQKVTF

SEQ ID NO: 167302 - protein, 16 aa, Homo sapiens
  CDR3 for beta chain variable domain of TCR clone 83651 (TRBV28, TRBJ2-1)
CASSSSCSGSLNEQFF

SEQ ID NO: 167303 - protein, 12 aa, Homo sapiens
  CDR3 for alpha chain variable domain of TCR clone 83652 (TRAV21, TRAJ27)
CTANTNAGKSTF

SEQ ID NO: 167304 - protein, 15 aa, Homo sapiens
  CDR3 for beta chain variable domain of TCR clone 83652 (TRBV29-1, TRBJ1-4)
CSVVGIGDINEKLFF

SEQ ID NO: 167305 - protein, 14 aa, Homo sapiens
  CDR3 for alpha chain variable domain of TCR clone 83653 (TRAV38-1, TRAJ45)
CASHSGGGPDGLTF

SEQ ID NO: 167306 - protein, 13 aa, Homo sapiens
  CDR3 for beta chain variable domain of TCR clone 83653 (TRBV10-3, TRBJ1-2)
CAISERDSYGYTF

SEQ ID NO: 167307 - protein, 15 aa, Homo sapiens
  CDR3 for alpha chain variable domain of TCR clone 83654 (TRAV17, TRAJ4)
CATGTWSGGYNKLIF

SEQ ID NO: 167308 - protein, 13 aa, Homo sapiens
  CDR3 for beta chain variable domain of TCR clone 83654 (TRBV7-9, TRBJ1-2)
CASSLKQNYGYTF

SEQ ID NO: 167309 - protein, 14 aa, Homo sapiens
  CDR3 for alpha chain variable domain of TCR clone 83655 (TRAV1-2, TRAJ16)
CAVNRFSDGQKLLF

SEQ ID NO: 167310 - protein, 16 aa, Homo sapiens
  CDR3 for beta chain variable domain of TCR clone 83655 (TRBV18, TRBJ1-1)
CASSPGVGGRGGEAFF

SEQ ID NO: 167311 - protein, 14 aa, Homo sapiens
  CDR3 for alpha chain variable domain of TCR clone 83656 (TRAV20, TRAJ42)
CAVQAGGSQGHLIF

SEQ ID NO: 167312 - protein, 14 aa, Homo sapiens
  CDR3 for beta chain variable domain of TCR clone 83656 (TRBV28, TRBJ1-2)
CASRIQGANYGYTF

SEQ ID NO: 167313 - protein, 14 aa, Homo sapiens
  CDR3 for alpha chain variable domain of TCR clone 83657 (TRAV13-1, TRAJ35)
CAASKGGFGNVLHC

SEQ ID NO: 167314 - protein, 13 aa, Homo sapiens
  CDR3 for beta chain variable domain of TCR clone 83657 (TRBV7-3, TRBJ1-1)
RASSQDWGAKAFF

SEQ ID NO: 167315 - protein, 16 aa, Homo sapiens
  CDR3 for alpha chain variable domain of TCR clone 83658 (TRAV38-1, TRAJ32)
CAFMKGGGGATNKLIF

SEQ ID NO: 167316 - protein, 13 aa, Homo sapiens
  CDR3 for beta chain variable domain of TCR clone 83658 (TRBV20-1, TRBJ2-5)
CSAREAFQETQYF

SEQ ID NO: 167317 - protein, 19 aa, Homo sapiens
  CDR3 for alpha chain variable domain of TCR clone 83659 (TRAV8-4, TRAJ16)
CAVSPVGRWPEAALCKVDH

SEQ ID NO: 167318 - protein, 14 aa, Homo sapiens
  CDR3 for beta chain variable domain of TCR clone 83659 (TRBV23-1, TRBJ2-5)
CASSFLRSQETQYF

SEQ ID NO: 167319 - protein, 11 aa, Homo sapiens
  CDR3 for alpha chain variable domain of TCR clone 83660 (TRAV2, TRAJ33)
CAVDSNYQLIW

SEQ ID NO: 167320 - protein, 15 aa, Homo sapiens
  CDR3 for beta chain variable domain of TCR clone 83660 (TRBV19, TRBJ1-2)
CASSVGQVLDYGYTF

SEQ ID NO: 167321 - protein, 14 aa, Homo sapiens
  CDR3 for alpha chain variable domain of TCR clone 83661 (TRAV13-1, TRAJ10)
CAAKEPGGGNKLTF

SEQ ID NO: 167322 - protein, 14 aa, Homo sapiens
  CDR3 for beta chain variable domain of TCR clone 83661 (TRBV6-6, TRBJ2-7)
CASSDSGAGYEQHF

SEQ ID NO: 167323 - protein, 15 aa, Homo sapiens
  CDR3 for alpha chain variable domain of TCR clone 83662 (TRAV12-1, TRAJ44)
CVVFVNTGTASKLTF

SEQ ID NO: 167324 - protein, 17 aa, Homo sapiens
  CDR3 for beta chain variable domain of TCR clone 83662 (TRBV7-8, TRBJ2-6)
CASRAGTGGAGANVLTF

SEQ ID NO: 167325 - protein, 14 aa, Homo sapiens
  CDR3 for alpha chain variable domain of TCR clone 83663 (TRAV1-2, TRAJ16)
CAVNRVSDGQKLLF

SEQ ID NO: 167326 - protein, 12 aa, Homo sapiens
  CDR3 for beta chain variable domain of TCR clone 83663 (TRBV24-1, TRBJ1-1)
CATLYPDTEAFF

SEQ ID NO: 167327 - protein, 16 aa, Homo sapiens
  CDR3 for alpha chain variable domain of TCR clone 83664 (TRAV4, TRAJ9)
CLVGDPNRPGVFKTIF

SEQ ID NO: 167328 - protein, 16 aa, Homo sapiens
  CDR3 for beta chain variable domain of TCR clone 83664 (TRBV28, TRBJ1-4)
CASSPPYRGRSEKLFF

SEQ ID NO: 167329 - protein, 14 aa, Homo sapiens
  CDR3 for alpha chain variable domain of TCR clone 83665 (TRAV8-4, TRAJ37)
CAVSESSNTGKLIF

SEQ ID NO: 167330 - protein, 12 aa, Homo sapiens
  CDR3 for beta chain variable domain of TCR clone 83665 (TRBV11-2, TRBJ2-2)
CASSLPTGELFF

SEQ ID NO: 167331 - protein, 12 aa, Homo sapiens
  CDR3 for alpha chain variable domain of TCR clone 83666 (TRAV13-1, TRAJ15)
CAASQEGTALIF

SEQ ID NO: 167332 - protein, 14 aa, Homo sapiens
  CDR3 for beta chain variable domain of TCR clone 83666 (TRBV19, TRBJ2-2)
CASSTLHRSGELFF

SEQ ID NO: 167333 - protein, 13 aa, Homo sapiens
  CDR3 for alpha chain variable domain of TCR clone 83667 (TRAV2, TRAJ15)
CAVASQAGTALIF

SEQ ID NO: 167334 - protein, 15 aa, Homo sapiens
  CDR3 for beta chain variable domain of TCR clone 83667 (TRBV7-3, TRBJ2-2)
CASSKTGQGTGELFF

SEQ ID NO: 167335 - protein, 11 aa, Homo sapiens
  CDR3 for alpha chain variable domain of TCR clone 83668 (TRAV13-1, TRAJ23)
CAASSRGKLIF

SEQ ID NO: 167336 - protein, 12 aa, Homo sapiens
  CDR3 for beta chain variable domain of TCR clone 83668 (TRBV7-2, TRBJ1-5)
CASSLWSQPQHF

SEQ ID NO: 167337 - protein, 15 aa, Homo sapiens
  CDR3 for alpha chain variable domain of TCR clone 83669 (TRAV8-3, TRAJ27)
CAVGPSKTNAGKSTL

SEQ ID NO: 167338 - protein, 16 aa, Homo sapiens
  CDR3 for beta chain variable domain of TCR clone 83669 (TRBV6-6, TRBJ2-1)
CASSLLSDSSYNEQFF

SEQ ID NO: 167339 - protein, 13 aa, Homo sapiens
  CDR3 for alpha chain variable domain of TCR clone 83670 (TRAV21, TRAJ20)
CAVGLRVDYKLSF

SEQ ID NO: 167340 - protein, 16 aa, Homo sapiens
  CDR3 for beta chain variable domain of TCR clone 83670 (TRBV6-1, TRBJ2-5)
CASSETLDRGAETQYL

SEQ ID NO: 167341 - protein, 12 aa, Homo sapiens
  CDR3 for alpha chain variable domain of TCR clone 83671 (TRAV4, TRAJ26)
CLVGDYGQNFVF

SEQ ID NO: 167342 - protein, 16 aa, Homo sapiens
  CDR3 for beta chain variable domain of TCR clone 83671 (TRBV7-2, TRBJ1-2)
CASSSNQDRRGHGYTC

SEQ ID NO: 167343 - protein, 20 aa, Homo sapiens
  CDR3 for alpha chain variable domain of TCR clone 83672 (TRAV12-3, TRAJ41)
SLFIRDSQPSDSATPEALNF

SEQ ID NO: 167344 - protein, 15 aa, Homo sapiens
  CDR3 for beta chain variable domain of TCR clone 83672 (TRBV5-1, TRBJ2-7)
CASSLDLTISYEQYF

SEQ ID NO: 167345 - protein, 13 aa, Homo sapiens
  CDR3 for alpha chain variable domain of TCR clone 83673 (TRAV12-2, TRAJ52)
CAAHGTSYGKLTF

SEQ ID NO: 167346 - protein, 15 aa, Homo sapiens
  CDR3 for beta chain variable domain of TCR clone 83673 (TRBV10-3, TRBJ2-7)
CAISTCSGVKGEQYF

SEQ ID NO: 167347 - protein, 15 aa, Homo sapiens
  CDR3 for alpha chain variable domain of TCR clone 83674 (TRAV13-1, TRAJ16)
CAARYQMVRSCSLQG

SEQ ID NO: 167348 - protein, 13 aa, Homo sapiens
  CDR3 for beta chain variable domain of TCR clone 83674 (TRBV4-1, TRBJ2-1)
CASSQAGGDEQFF

SEQ ID NO: 167349 - protein, 16 aa, Homo sapiens
  CDR3 for alpha chain variable domain of TCR clone 83675 (TRAV26-1, TRAJ37)
CIVRGDGSGNTGKLIF

SEQ ID NO: 167350 - protein, 17 aa, Homo sapiens
  CDR3 for beta chain variable domain of TCR clone 83675 (TRBV4-1, TRBJ2-7)
CASSRDPLGVCGGEQYF

SEQ ID NO: 167351 - protein, 17 aa, Homo sapiens
  CDR3 for alpha chain variable domain of TCR clone 83676 (TRAV4, TRAJ42)
CLVGVLNYGGSQGNLIF

SEQ ID NO: 167352 - protein, 15 aa, Homo sapiens
  CDR3 for beta chain variable domain of TCR clone 83676 (TRBV9, TRBJ1-6)
CASSVAGTGDSPLHF

SEQ ID NO: 167353 - protein, 16 aa, Homo sapiens
  CDR3 for alpha chain variable domain of TCR clone 83677 (TRAV23/DV6, TRAJ9)
CAASIGGNTGGFKTIF

SEQ ID NO: 167354 - protein, 12 aa, Homo sapiens
  CDR3 for beta chain variable domain of TCR clone 83677 (TRBV28, TRBJ2-7)
CASSFSSYEQYF

SEQ ID NO: 167355 - protein, 15 aa, Homo sapiens
  CDR3 for alpha chain variable domain of TCR clone 83678 (TRAV20, TRAJ40)
CAVQRGTSGTCKYIF

SEQ ID NO: 167356 - protein, 19 aa, Homo sapiens
  CDR3 for beta chain variable domain of TCR clone 83678 (TRBV28, TRBJ2-7)
CASSYSGTSRLGWVYEQYF

SEQ ID NO: 167357 - protein, 14 aa, Homo sapiens
  CDR3 for alpha chain variable domain of TCR clone 83679 (TRAV12-1, TRAJ4)
CVVPLKSGYNKLIF

SEQ ID NO: 167358 - protein, 15 aa, Homo sapiens
  CDR3 for beta chain variable domain of TCR clone 83679 (TRBV7-3, TRBJ2-2)
CASSEAGQGTGELFF

SEQ ID NO: 167359 - protein, 13 aa, Homo sapiens
  CDR3 for alpha chain variable domain of TCR clone 83680 (TRAV12-1, TRAJ22)
CVVYSGSARQLTF

SEQ ID NO: 167360 - protein, 10 aa, Homo sapiens
  CDR3 for beta chain variable domain of TCR clone 83680 (TRBV6-3, TRBJ2-2)
CARRDGELFF

SEQ ID NO: 167361 - protein, 14 aa, Homo sapiens
  CDR3 for alpha chain variable domain of TCR clone 83681 (TRAV29/DV5, TRAJ36)
CAARRRTGANNLFF

SEQ ID NO: 167362 - protein, 14 aa, Homo sapiens
  CDR3 for beta chain variable domain of TCR clone 83681 (TRBV12-5, TRBJ2-5)
CASGSRTHQETQYF

SEQ ID NO: 167363 - protein, 13 aa, Homo sapiens
  CDR3 for alpha chain variable domain of TCR clone 83682 (TRAV1-2, TRAJ9)
CAPLNTGGFKTIF

SEQ ID NO: 167364 - protein, 13 aa, Homo sapiens
  CDR3 for beta chain variable domain of TCR clone 83682 (TRBV19, TRBJ1-2)
CASSVPGQDGYTF

SEQ ID NO: 167365 - protein, 13 aa, Homo sapiens
  CDR3 for alpha chain variable domain of TCR clone 83683 (TRAV8-6, TRAJ21)
CDVSPSSLNKFYF

SEQ ID NO: 167366 - protein, 14 aa, Homo sapiens
  CDR3 for beta chain variable domain of TCR clone 83683 (TRBV7-9, TRBJ2-5)
CASSLDTAQETQYF

SEQ ID NO: 167367 - protein, 21 aa, Homo sapiens
  CDR3 for alpha chain variable domain of TCR clone 83684 (TRAV8-4, TRAJ47)
HLTKPSAHMSDAAERGNKLVF

SEQ ID NO: 167368 - protein, 12 aa, Homo sapiens
  CDR3 for beta chain variable domain of TCR clone 83684 (TRBV11-2, TRBJ2-2)
CASSLGGGELFF

SEQ ID NO: 167369 - protein, 16 aa, Homo sapiens
  CDR3 for alpha chain variable domain of TCR clone 83685 (TRAV30, TRAJ24)
CGTAIVDADSWGKFPF

SEQ ID NO: 167370 - protein, 14 aa, Homo sapiens
  CDR3 for beta chain variable domain of TCR clone 83685 (TRBV12-5, TRBJ2-5)
CASGSRTHQETQYF

SEQ ID NO: 167371 - protein, 16 aa, Homo sapiens
  CDR3 for alpha chain variable domain of TCR clone 83686 (TRAV12-3, TRAJ53)
CAMSPGSGGSNYKLTF

SEQ ID NO: 167372 - protein, 14 aa, Homo sapiens
  CDR3 for beta chain variable domain of TCR clone 83686 (TRBV28, TRBJ2-1)
CASSLNGRNNEQFF

SEQ ID NO: 167373 - protein, 11 aa, Homo sapiens
  CDR3 for alpha chain variable domain of TCR clone 83687 (TRAV21, TRAJ34)
CAHYNTDKLIF

SEQ ID NO: 167374 - protein, 15 aa, Homo sapiens
  CDR3 for beta chain variable domain of TCR clone 83687 (TRBV19, TRBJ1-1)
CASTSGQIQNTEAFF

SEQ ID NO: 167375 - protein, 14 aa, Homo sapiens
  CDR3 for alpha chain variable domain of TCR clone 83688 (TRAV29/DV5, TRAJ45)
CAASFRGGADGLTF

SEQ ID NO: 167376 - protein, 11 aa, Homo sapiens
  CDR3 for beta chain variable domain of TCR clone 83688 (TRBV11-2, TRBJ2-2)
CACSLPGELFF

SEQ ID NO: 167377 - protein, 12 aa, Homo sapiens
  CDR3 for alpha chain variable domain of TCR clone 83689 (TRAV12-1, TRAJ31)
CVVNRNNARLMF

SEQ ID NO: 167378 - protein, 18 aa, Homo sapiens
  CDR3 for beta chain variable domain of TCR clone 83689 (TRBV11-2, TRBJ2-3)
CASSLGGASRGAPNTQYF

SEQ ID NO: 167379 - protein, 14 aa, Homo sapiens
  CDR3 for alpha chain variable domain of TCR clone 83690 (TRAV12-2, TRAJ33)
CAVKRASSNYQLIW

SEQ ID NO: 167380 - protein, 12 aa, Homo sapiens
  CDR3 for beta chain variable domain of TCR clone 83690 (TRBV24-1, TRBJ2-3)
CATSDSTDTQYF

SEQ ID NO: 167381 - protein, 13 aa, Homo sapiens
  CDR3 for alpha chain variable domain of TCR clone 83691 (TRAV13-1, TRAJ29)
CAASIGLNTPLVF

SEQ ID NO: 167382 - protein, 10 aa, Homo sapiens
  CDR3 for beta chain variable domain of TCR clone 83691 (TRBV23-1, TRBJ2-7)
NDSTSYEQYF

SEQ ID NO: 167383 - protein, 15 aa, Homo sapiens
  CDR3 for alpha chain variable domain of TCR clone 83692 (TRAV13-1, TRAJ45)
CAASGSGGGADGLTF

SEQ ID NO: 167384 - protein, 15 aa, Homo sapiens
  CDR3 for beta chain variable domain of TCR clone 83692 (TRBV11-3, TRBJ2-7)
CASSPGPASSYEQYF

SEQ ID NO: 167385 - protein, 15 aa, Homo sapiens
  CDR3 for alpha chain variable domain of TCR clone 83693 (TRAV12-2, TRAJ57)
CAVSRGQGGSEKLVF

SEQ ID NO: 167386 - protein, 15 aa, Homo sapiens
  CDR3 for beta chain variable domain of TCR clone 83693 (TRBV7-6, TRBJ2-5)
CASSKPTGPQETQYF

SEQ ID NO: 167387 - protein, 14 aa, Homo sapiens
  CDR3 for alpha chain variable domain of TCR clone 83694 (TRAV12-3, TRAJ57)
CAMSAWGGSEKLVF

SEQ ID NO: 167388 - protein, 14 aa, Homo sapiens
  CDR3 for beta chain variable domain of TCR clone 83694 (TRBV19, TRBJ2-7)
CASSMGQGAIEQYF

SEQ ID NO: 167389 - protein, 12 aa, Homo sapiens
  CDR3 for alpha chain variable domain of TCR clone 83695 (TRAV13-1, TRAJ27)
CAAPTNAGKSTF

SEQ ID NO: 167390 - protein, 14 aa, Homo sapiens
  CDR3 for beta chain variable domain of TCR clone 83695 (TRBV19, TRBJ2-2)
CASSGQGIAGELFF

SEQ ID NO: 167391 - protein, 14 aa, Homo sapiens
  CDR3 for alpha chain variable domain of TCR clone 83696 (TRAV12-2, TRAJ45)
CALPERGGADGLTF

SEQ ID NO: 167392 - protein, 14 aa, Homo sapiens
  CDR3 for beta chain variable domain of TCR clone 83696 (TRBV18, TRBJ1-5)
CASSPGNSDQPQHF

SEQ ID NO: 167393 - protein, 13 aa, Homo sapiens
  CDR3 for alpha chain variable domain of TCR clone 83697 (TRAV30, TRAJ8)
CGTPNTGFQKLVF

SEQ ID NO: 167394 - protein, 15 aa, Homo sapiens
  CDR3 for beta chain variable domain of TCR clone 83697 (TRBV5-1, TRBJ1-1)
CASSSTTGTNTEAFF

SEQ ID NO: 167395 - protein, 17 aa, Homo sapiens
  CDR3 for alpha chain variable domain of TCR clone 83698 (TRAV12-3, TRAJ6)
CAMSARGGAGGSYIPTF

SEQ ID NO: 167396 - protein, 12 aa, Homo sapiens
  CDR3 for beta chain variable domain of TCR clone 83698 (TRBV12-4, TRBJ2-3)
CASSTLPDTQYC

SEQ ID NO: 167397 - protein, 15 aa, Homo sapiens
  CDR3 for alpha chain variable domain of TCR clone 83699 (TRAV8-1, TRAJ6)
CAVNTSPGGSYIPTF

SEQ ID NO: 167398 - protein, 15 aa, Homo sapiens
  CDR3 for beta chain variable domain of TCR clone 83699 (TRBV6-3, TRBJ2-7)
CASSSPGTVFYEQYF

SEQ ID NO: 167399 - protein, 15 aa, Homo sapiens
  CDR3 for alpha chain variable domain of TCR clone 83700 (TRAV13-1, TRAJ44)
CAASLGAGTASKLTF

SEQ ID NO: 167400 - protein, 20 aa, Homo sapiens
  CDR3 for beta chain variable domain of TCR clone 83700 (TRBV4-3, TRBJ2-4)
CASSQGRWTGGLRSLNIQYF

SEQ ID NO: 167401 - protein, 15 aa, Homo sapiens
  CDR3 for alpha chain variable domain of TCR clone 83701 (TRAV3, TRAJ5)
CAVRDLDTGRRALTF

SEQ ID NO: 167402 - protein, 11 aa, Homo sapiens
  CDR3 for beta chain variable domain of TCR clone 83701 (TRBV11-3, TRBJ2-1)
CASSLGNEQFF

SEQ ID NO: 167403 - protein, 14 aa, Homo sapiens
  CDR3 for alpha chain variable domain of TCR clone 83702 (TRAV17, TRAJ11)
CATDTSRGYSTLTF

SEQ ID NO: 167404 - protein, 13 aa, Homo sapiens
  CDR3 for beta chain variable domain of TCR clone 83702 (TRBV19, TRBJ2-5)
CANRDSRRETQYF

SEQ ID NO: 167405 - protein, 14 aa, Homo sapiens
  CDR3 for alpha chain variable domain of TCR clone 83703 (TRAV2, TRAJ37)
CAVEDLGSTGKLIF

SEQ ID NO: 167406 - protein, 11 aa, Homo sapiens
  CDR3 for beta chain variable domain of TCR clone 83703 (TRBV25-1, TRBJ2-2)
CASSAQGDEHR

SEQ ID NO: 167407 - protein, 14 aa, Homo sapiens
  CDR3 for alpha chain variable domain of TCR clone 83704 (TRAV16, TRAJ37)
CALDISGSTGKLIF

SEQ ID NO: 167408 - protein, 11 aa, Homo sapiens
  CDR3 for beta chain variable domain of TCR clone 83704 (TRBV6-1, TRBJ2-1)
CASISSNEQFF

SEQ ID NO: 167409 - protein, 11 aa, Homo sapiens
  CDR3 for alpha chain variable domain of TCR clone 83705 (TRAV1-1, TRAJ23)
CAVRQGGKLIF

SEQ ID NO: 167410 - protein, 15 aa, Homo sapiens
  CDR3 for beta chain variable domain of TCR clone 83705 (TRBV19, TRBJ1-6)
RASSTQGAVGSPLHF

SEQ ID NO: 167411 - protein, 12 aa, Homo sapiens
  CDR3 for alpha chain variable domain of TCR clone 83706 (TRAV1-2, TRAJ26)
CAVRYYGKNFVF

SEQ ID NO: 167412 - protein, 15 aa, Homo sapiens
  CDR3 for beta chain variable domain of TCR clone 83706 (TRBV28, TRBJ2-1)
CASSIIAGGRSEQFF

SEQ ID NO: 167413 - protein, 13 aa, Homo sapiens
  CDR3 for alpha chain variable domain of TCR clone 83707 (TRAV8-3, TRAJ48)
CAVVPFGNEKLNF

SEQ ID NO: 167414 - protein, 15 aa, Homo sapiens
  CDR3 for beta chain variable domain of TCR clone 83707 (TRBV11-2, TRBJ2-1)
CASSSPSTRYNEQFF

SEQ ID NO: 167415 - protein, 14 aa, Homo sapiens
  CDR3 for alpha chain variable domain of TCR clone 83708 (TRAV13-1, TRAJ35)
CAASKGGFGNVRHC

SEQ ID NO: 167416 - protein, 14 aa, Homo sapiens
  CDR3 for beta chain variable domain of TCR clone 83708 (TRBV4-1, TRBJ2-2)
CASSQAVNTGELFF

SEQ ID NO: 167417 - protein, 13 aa, Homo sapiens
  CDR3 for alpha chain variable domain of TCR clone 83709 (TRAV12-3, TRAJ33)
CAMSVDSNYQLIW

SEQ ID NO: 167418 - protein, 11 aa, Homo sapiens
  CDR3 for beta chain variable domain of TCR clone 83709 (TRBV7-3, TRBJ2-5)
CASSLSETQYF

SEQ ID NO: 167419 - protein, 15 aa, Homo sapiens
  CDR3 for alpha chain variable domain of TCR clone 83710 (TRAV8-2, TRAJ32)
CVVTRSSGATNKLIF

SEQ ID NO: 167420 - protein, 14 aa, Homo sapiens
  CDR3 for beta chain variable domain of TCR clone 83710 (TRBV25-1, TRBJ1-1)
CASTHLGGNTEAFF

SEQ ID NO: 167421 - protein, 14 aa, Homo sapiens
  CDR3 for alpha chain variable domain of TCR clone 83711 (TRAV26-1, TRAJ38)
CIADNAGNNRKLIW

SEQ ID NO: 167422 - protein, 15 aa, Homo sapiens
  CDR3 for beta chain variable domain of TCR clone 83711 (TRBV7-6, TRBJ1-4)
CASSLGAGAGEKLSF

SEQ ID NO: 167423 - protein, 12 aa, Homo sapiens
  CDR3 for alpha chain variable domain of TCR clone 83712 (TRAV13-2, TRAJ39)
CAENNAGNMLTF

SEQ ID NO: 167424 - protein, 12 aa, Homo sapiens
  CDR3 for beta chain variable domain of TCR clone 83712 (TRBV11-2, TRBJ2-2)
CASSLVGGELFF

SEQ ID NO: 167425 - protein, 11 aa, Homo sapiens
  CDR3 for alpha chain variable domain of TCR clone 83713 (TRAV21, TRAJ11)
CAVNGYSTLTF

SEQ ID NO: 167426 - protein, 15 aa, Homo sapiens
  CDR3 for beta chain variable domain of TCR clone 83713 (TRBV5-1, TRBJ2-1)
CASSPPRAPYNEQFF

SEQ ID NO: 167427 - protein, 12 aa, Homo sapiens
  CDR3 for alpha chain variable domain of TCR clone 83714 (TRAV21, TRAJ49)
CAVNDGGNQFYF

SEQ ID NO: 167428 - protein, 11 aa, Homo sapiens
  CDR3 for beta chain variable domain of TCR clone 83714 (TRBV23-1, TRBJ2-7)
SSSGTGLEQYF

SEQ ID NO: 167429 - protein, 14 aa, Homo sapiens
  CDR3 for alpha chain variable domain of TCR clone 83715 (TRAV35, TRAJ22)
CAGLRPGSARQLTF

SEQ ID NO: 167430 - protein, 12 aa, Homo sapiens
  CDR3 for beta chain variable domain of TCR clone 83715 (TRBV11-2, TRBJ2-1)
CASSPGNNEQFF

SEQ ID NO: 167431 - protein, 11 aa, Homo sapiens
  CDR3 for alpha chain variable domain of TCR clone 83716 (TRAV3, TRAJ21)
CAVGNFNKFYF

SEQ ID NO: 167432 - protein, 20 aa, Homo sapiens
  CDR3 for beta chain variable domain of TCR clone 83716 (TRBV7-8, TRBJ2-2)
CASSHLFPGPTTHITGELFF

SEQ ID NO: 167433 - protein, 15 aa, Homo sapiens
  CDR3 for alpha chain variable domain of TCR clone 83717 (TRAV2, TRAJ11)
CAVVGRNSGYSTLTF

SEQ ID NO: 167434 - protein, 14 aa, Homo sapiens
  CDR3 for beta chain variable domain of TCR clone 83717 (TRBV4-1, TRBJ2-2)
CASSQAVNTGELFF

SEQ ID NO: 167435 - protein, 16 aa, Homo sapiens
  CDR3 for alpha chain variable domain of TCR clone 83718 (TRAV3, TRAJ21)
CAVRDIERGNFNKFYF

SEQ ID NO: 167436 - protein, 13 aa, Homo sapiens
  CDR3 for beta chain variable domain of TCR clone 83718 (TRBV27, TRBJ2-7)
CASSLTTGYEKYF

SEQ ID NO: 167437 - protein, 14 aa, Homo sapiens
  CDR3 for alpha chain variable domain of TCR clone 83719 (TRAV12-3, TRAJ5)
CAMSTYTGRIALTF

SEQ ID NO: 167438 - protein, 13 aa, Homo sapiens
  CDR3 for beta chain variable domain of TCR clone 83719 (TRBV28, TRBJ2-3)
CASSTGGGDTQYF

SEQ ID NO: 167439 - protein, 14 aa, Homo sapiens
  CDR3 for alpha chain variable domain of TCR clone 83720 (TRAV12-2, TRAJ13)
CAVNKTGGYQKVTF

SEQ ID NO: 167440 - protein, 16 aa, Homo sapiens
  CDR3 for beta chain variable domain of TCR clone 83720 (TRBV12-5, TRBJ2-5)
CASGPRTSGNQETQYF

SEQ ID NO: 167441 - protein, 15 aa, Homo sapiens
  CDR3 for alpha chain variable domain of TCR clone 83721 (TRAV21, TRAJ40)
CAVRPQTSGTYKYIF

SEQ ID NO: 167442 - protein, 14 aa, Homo sapiens
  CDR3 for beta chain variable domain of TCR clone 83721 (TRBV5-1, TRBJ2-7)
CASSRGESLYEQYF

SEQ ID NO: 167443 - protein, 14 aa, Homo sapiens
  CDR3 for alpha chain variable domain of TCR clone 83722 (TRAV1-1, TRAJ27)
CAVIYNTNAGKSTF

SEQ ID NO: 167444 - protein, 15 aa, Homo sapiens
  CDR3 for beta chain variable domain of TCR clone 83722 (TRBV7-2, TRBJ2-1)
CASSSGVAGGNEQFF

SEQ ID NO: 167445 - protein, 17 aa, Homo sapiens
  CDR3 for alpha chain variable domain of TCR clone 83723 (TRAV2, TRAJ36)
CAVEDRGNWDKQPLLWD

SEQ ID NO: 167446 - protein, 14 aa, Homo sapiens
  CDR3 for beta chain variable domain of TCR clone 83723 (TRBV7-9, TRBJ2-5)
CASSLDTAQETQYF

SEQ ID NO: 167447 - protein, 15 aa, Homo sapiens
  CDR3 for alpha chain variable domain of TCR clone 83724 (TRAV21, TRAJ53)
CATLNSGGSNYKLTF

SEQ ID NO: 167448 - protein, 12 aa, Homo sapiens
  CDR3 for beta chain variable domain of TCR clone 83724 (TRBV7-9, TRBJ2-7)
CASSIKREEQYF

SEQ ID NO: 167449 - protein, 13 aa, Homo sapiens
  CDR3 for alpha chain variable domain of TCR clone 83725 (TRAV3, TRAJ21)
CAVREPDLNKFYF

SEQ ID NO: 167450 - protein, 17 aa, Homo sapiens
  CDR3 for beta chain variable domain of TCR clone 83725 (TRBV7-8, TRBJ2-6)
CASSAGTGGAGANVLTF

SEQ ID NO: 167451 - protein, 11 aa, Homo sapiens
  CDR3 for alpha chain variable domain of TCR clone 83726 (TRAV1-1, TRAJ23)
CAVRQGGKLIF

SEQ ID NO: 167452 - protein, 14 aa, Homo sapiens
  CDR3 for beta chain variable domain of TCR clone 83726 (TRBV7-2, TRBJ2-7)
CASSLPPGQGPQYF

SEQ ID NO: 167453 - protein, 13 aa, Homo sapiens
  CDR3 for alpha chain variable domain of TCR clone 83727 (TRAV17, TRAJ9)
CATDYTRGFKTIF

SEQ ID NO: 167454 - protein, 14 aa, Homo sapiens
  CDR3 for beta chain variable domain of TCR clone 83727 (TRBV19, TRBJ2-5)
CASSMTGQQETQYF

SEQ ID NO: 167455 - protein, 16 aa, Homo sapiens
  CDR3 for alpha chain variable domain of TCR clone 83728 (TRAV4, TRAJ18)
CCVLLIGGSTLGRLCF

SEQ ID NO: 167456 - protein, 12 aa, Homo sapiens
  CDR3 for beta chain variable domain of TCR clone 83728 (TRBV6-3, TRBJ2-7)
CASSLTPYEQYF

SEQ ID NO: 167457 - protein, 13 aa, Homo sapiens
  CDR3 for alpha chain variable domain of TCR clone 83729 (TRAV13-2, TRAJ40)
CAEFTSGTYKYIF

SEQ ID NO: 167458 - protein, 14 aa, Homo sapiens
  CDR3 for beta chain variable domain of TCR clone 83729 (TRBV10-2, TRBJ1-5)
CASSSTGRNQHQHF

SEQ ID NO: 167459 - protein, 16 aa, Homo sapiens
  CDR3 for alpha chain variable domain of TCR clone 83730 (TRAV12-3, TRAJ53)
CAMSRGSGGSNYKLTF

SEQ ID NO: 167460 - protein, 11 aa, Homo sapiens
  CDR3 for beta chain variable domain of TCR clone 83730 (TRBV29-1, TRBJ2-5)
CSEDRTGTQYF

SEQ ID NO: 167461 - protein, 14 aa, Homo sapiens
  CDR3 for alpha chain variable domain of TCR clone 83731 (TRAV8-3, TRAJ4)
CAVGAAGGYNKLIF

SEQ ID NO: 167462 - protein, 14 aa, Homo sapiens
  CDR3 for beta chain variable domain of TCR clone 83731 (TRBV7-6, TRBJ2-3)
CASSLGTVTDTQYF

SEQ ID NO: 167463 - protein, 12 aa, Homo sapiens
  CDR3 for alpha chain variable domain of TCR clone 83732 (TRAV36/DV7, TRAJ37)
CACYGNTGKLIF

SEQ ID NO: 167464 - protein, 14 aa, Homo sapiens
  CDR3 for beta chain variable domain of TCR clone 83732 (TRBV6-3, TRBJ1-4)
CASSGQNLNDKLFF

SEQ ID NO: 167465 - protein, 14 aa, Homo sapiens
  CDR3 for alpha chain variable domain of TCR clone 83733 (TRAV4, TRAJ26)
CLVGPHHYGQNFVF

SEQ ID NO: 167466 - protein, 17 aa, Homo sapiens
  CDR3 for beta chain variable domain of TCR clone 83733 (TRBV24-1, TRBJ2-1)
CATSDVSTSGTYNEQFF

SEQ ID NO: 167467 - protein, 13 aa, Homo sapiens
  CDR3 for alpha chain variable domain of TCR clone 83734 (TRAV39, TRAJ49)
CAVDRNTGNQFYF

SEQ ID NO: 167468 - protein, 14 aa, Homo sapiens
  CDR3 for beta chain variable domain of TCR clone 83734 (TRBV10-1, TRBJ1-5)
CASRARGAIQPQHF

SEQ ID NO: 167469 - protein, 12 aa, Homo sapiens
  CDR3 for alpha chain variable domain of TCR clone 83735 (TRAV21, TRAJ23)
CAVGPQGGKLIF

SEQ ID NO: 167470 - protein, 12 aa, Homo sapiens
  CDR3 for beta chain variable domain of TCR clone 83735 (TRBV11-2, TRBJ2-1)
CASSPGNNEQFF

SEQ ID NO: 167471 - protein, 13 aa, Homo sapiens
  CDR3 for alpha chain variable domain of TCR clone 83736 (TRAV1-2, TRAJ9)
CAALNTGGFKTIF

SEQ ID NO: 167472 - protein, 15 aa, Homo sapiens
  CDR3 for beta chain variable domain of TCR clone 83736 (TRBV24-1, TRBJ2-1)
CATSGSGGLYNEQFF

SEQ ID NO: 167473 - protein, 15 aa, Homo sapiens
  CDR3 for alpha chain variable domain of TCR clone 83737 (TRAV23/DV6, TRAJ13)
CAAWPGGGGYQKVTF

SEQ ID NO: 167474 - protein, 17 aa, Homo sapiens
  CDR3 for beta chain variable domain of TCR clone 83737 (TRBV19, TRBJ2-7)
CASSISFYDSYPYKQYF

SEQ ID NO: 167475 - protein, 14 aa, Homo sapiens
  CDR3 for alpha chain variable domain of TCR clone 83738 (TRAV1-2, TRAJ16)
CAVNRFSDGQKLLF

SEQ ID NO: 167476 - protein, 14 aa, Homo sapiens
  CDR3 for beta chain variable domain of TCR clone 83738 (TRBV10-3, TRBJ1-3)
CAIRGQRAGNTIYF

SEQ ID NO: 167477 - protein, 20 aa, Homo sapiens
  CDR3 for alpha chain variable domain of TCR clone 83739 (TRAV8-3, TRAJ44)
LSTSVLWVRLYTGTASKLTF

SEQ ID NO: 167478 - protein, 15 aa, Homo sapiens
  CDR3 for beta chain variable domain of TCR clone 83739 (TRBV20-1, TRBJ2-7)
CSARDRVSGMDEQYF

SEQ ID NO: 167479 - protein, 14 aa, Homo sapiens
  CDR3 for alpha chain variable domain of TCR clone 83740 (TRAV12-2, TRAJ17)
CAVLFKSAGNKLTF

SEQ ID NO: 167480 - protein, 11 aa, Homo sapiens
  CDR3 for beta chain variable domain of TCR clone 83740 (TRBV29-1, TRBJ2-5)
CSEDRTGTQYF

SEQ ID NO: 167481 - protein, 14 aa, Homo sapiens
  CDR3 for alpha chain variable domain of TCR clone 83741 (TRAV2, TRAJ22)
CAVEVKRAARQLTF

SEQ ID NO: 167482 - protein, 14 aa, Homo sapiens
  CDR3 for beta chain variable domain of TCR clone 83741 (TRBV19, TRBJ2-2)
CASTPGYSGGEPFF

SEQ ID NO: 167483 - protein, 12 aa, Homo sapiens
  CDR3 for alpha chain variable domain of TCR clone 83742 (TRAV8-3, TRAJ20)
CAVGANDYKLSF

SEQ ID NO: 167484 - protein, 16 aa, Homo sapiens
  CDR3 for beta chain variable domain of TCR clone 83742 (TRBV19, TRBJ2-2)
CASRSPGTGATGELFL

SEQ ID NO: 167485 - protein, 12 aa, Homo sapiens
  CDR3 for alpha chain variable domain of TCR clone 83743 (TRAV1-1, TRAJ39)
CAVPMVGNMLTF

SEQ ID NO: 167486 - protein, 15 aa, Homo sapiens
  CDR3 for beta chain variable domain of TCR clone 83743 (TRBV19, TRBJ1-6)
CASSTQGAVGSPLHF

SEQ ID NO: 167487 - protein, 13 aa, Homo sapiens
  CDR3 for alpha chain variable domain of TCR clone 83744 (TRAV12-3, TRAJ40)
CAMSDSGTYKYIF

SEQ ID NO: 167488 - protein, 22 aa, Homo sapiens
  CDR3 for beta chain variable domain of TCR clone 83744 (TRBV14, TRBJ1-5)
CASSQDGVTPSLPPIGNQPQHF

SEQ ID NO: 167489 - protein, 14 aa, Homo sapiens
  CDR3 for alpha chain variable domain of TCR clone 83745 (TRAV13-1, TRAJ44)
CAAKATGTASKLTF

SEQ ID NO: 167490 - protein, 15 aa, Homo sapiens
  CDR3 for beta chain variable domain of TCR clone 83745 (TRBV28, TRBJ1-3)
CASSMGWASGNTVYF

SEQ ID NO: 167491 - protein, 13 aa, Homo sapiens
  CDR3 for alpha chain variable domain of TCR clone 83746 (TRAV13-1, TRAJ5)
CAARVTGRRALPF

SEQ ID NO: 167492 - protein, 15 aa, Homo sapiens
  CDR3 for beta chain variable domain of TCR clone 83746 (TRBV7-9, TRBJ2-7)
CASSPGGGLTYEQYF

SEQ ID NO: 167493 - protein, 12 aa, Homo sapiens
  CDR3 for alpha chain variable domain of TCR clone 83747 (TRAV12-3, TRAJ17)
CAMTLTGNKLTF

SEQ ID NO: 167494 - protein, 19 aa, Homo sapiens
  CDR3 for beta chain variable domain of TCR clone 83747 (TRBV25-1, TRBJ2-2)
CAILVYRVDRGRKTGELFL

SEQ ID NO: 167495 - protein, 16 aa, Homo sapiens
  CDR3 for alpha chain variable domain of TCR clone 83748 (TRAV30, TRAJ24)
CGTEIVDADSRGKFQF

SEQ ID NO: 167496 - protein, 16 aa, Homo sapiens
  CDR3 for beta chain variable domain of TCR clone 83748 (TRBV7-3, TRBJ2-2)
CASSLKRGTLSGELFF

SEQ ID NO: 167497 - protein, 13 aa, Homo sapiens
  CDR3 for alpha chain variable domain of TCR clone 83749 (TRAV13-1, TRAJ21)
CAASIYNFNKFYF

SEQ ID NO: 167498 - protein, 14 aa, Homo sapiens
  CDR3 for beta chain variable domain of TCR clone 83749 (TRBV7-8, TRBJ2-7)
CASSPRDRVYEQYF

SEQ ID NO: 167499 - protein, 13 aa, Homo sapiens
  CDR3 for alpha chain variable domain of TCR clone 83750 (TRAV20, TRAJ21)
CAVEGYNFNKFYF

SEQ ID NO: 167500 - protein, 13 aa, Homo sapiens
  CDR3 for beta chain variable domain of TCR clone 83750 (TRBV7-9, TRBJ2-7)
CASSFAGAYEQYF

SEQ ID NO: 167501 - protein, 14 aa, Homo sapiens
  CDR3 for alpha chain variable domain of TCR clone 83751 (TRAV21, TRAJ45)
CAVVSGGGADGLPF

SEQ ID NO: 167502 - protein, 14 aa, Homo sapiens
  CDR3 for beta chain variable domain of TCR clone 83751 (TRBV20-1, TRBJ2-3)
CSALGLEGADTQYF

SEQ ID NO: 167503 - protein, 13 aa, Homo sapiens
  CDR3 for alpha chain variable domain of TCR clone 83752 (TRAV12-3, TRAJ9)
CPMRNTGGFKTIF

SEQ ID NO: 167504 - protein, 15 aa, Homo sapiens
  CDR3 for beta chain variable domain of TCR clone 83752 (TRBV20-1, TRBJ2-7)
CSARDRVSGMDEQYF

SEQ ID NO: 167505 - protein, 16 aa, Homo sapiens
  CDR3 for alpha chain variable domain of TCR clone 83753 (TRAV3, TRAJ10)
CAVRDMRAGGGNKLTF

SEQ ID NO: 167506 - protein, 14 aa, Homo sapiens
  CDR3 for beta chain variable domain of TCR clone 83753 (TRBV7-9, TRBJ2-1)
CASSPRDSLYEQFF

SEQ ID NO: 167507 - protein, 15 aa, Homo sapiens
  CDR3 for alpha chain variable domain of TCR clone 83754 (TRAV12-2, TRAJ57)
CAVSRGQGGSEKLVF

SEQ ID NO: 167508 - protein, 16 aa, Homo sapiens
  CDR3 for beta chain variable domain of TCR clone 83754 (TRBV2, TRBJ2-3)
CASSTSVEGVTDTQYF

SEQ ID NO: 167509 - protein, 14 aa, Homo sapiens
  CDR3 for alpha chain variable domain of TCR clone 83755 (TRAV1-2, TRAJ8)
CAVREDTGLQKLVF

SEQ ID NO: 167510 - protein, 12 aa, Homo sapiens
  CDR3 for beta chain variable domain of TCR clone 83755 (TRBV27, TRBJ2-2)
CASKLFTGELFF

SEQ ID NO: 167511 - protein, 14 aa, Homo sapiens
  CDR3 for alpha chain variable domain of TCR clone 83756 (TRAV38-1, TRAJ40)
CALRPTSATYKYIF

SEQ ID NO: 167512 - protein, 14 aa, Homo sapiens
  CDR3 for beta chain variable domain of TCR clone 83756 (TRBV25-1, TRBJ1-1)
CASTHLGGNTEAFF

SEQ ID NO: 167513 - protein, 13 aa, Homo sapiens
  CDR3 for alpha chain variable domain of TCR clone 83757 (TRAV3, TRAJ36)
CAVRDTGANNLFF

SEQ ID NO: 167514 - protein, 15 aa, Homo sapiens
  CDR3 for beta chain variable domain of TCR clone 83757 (TRBV24-1, TRBJ2-1)
CATSGSGGFYDEQFF

SEQ ID NO: 167515 - protein, 13 aa, Homo sapiens
  CDR3 for alpha chain variable domain of TCR clone 83758 (TRAV29/DV5, TRAJ44)
CAASTGTASKLTF

SEQ ID NO: 167516 - protein, 14 aa, Homo sapiens
  CDR3 for beta chain variable domain of TCR clone 83758 (TRBV7-6, TRBJ2-3)
CASSLGTVTDTQYF

SEQ ID NO: 167517 - protein, 15 aa, Homo sapiens
  CDR3 for alpha chain variable domain of TCR clone 83759 (TRAV27, TRAJ38)
CAARRNAGNNRKLIW

SEQ ID NO: 167518 - protein, 14 aa, Homo sapiens
  CDR3 for beta chain variable domain of TCR clone 83759 (TRBV11-2, TRBJ2-7)
CASSLGAGAYEQYF

SEQ ID NO: 167519 - protein, 12 aa, Homo sapiens
  CDR3 for alpha chain variable domain of TCR clone 83760 (TRAV12-3, TRAJ17)
CAMTLTGNKLTF

SEQ ID NO: 167520 - protein, 17 aa, Homo sapiens
  CDR3 for beta chain variable domain of TCR clone 83760 (TRBV4-1, TRBJ1-4)
CASSQEGPRGVEEKLFF

SEQ ID NO: 167521 - protein, 13 aa, Homo sapiens
  CDR3 for alpha chain variable domain of TCR clone 83761 (TRAV8-3, TRAJ40)
CAVDPSGTYKYIF

SEQ ID NO: 167522 - protein, 12 aa, Homo sapiens
  CDR3 for beta chain variable domain of TCR clone 83761 (TRBV11-2, TRBJ2-1)
CASSPGNNEQFF

SEQ ID NO: 167523 - protein, 14 aa, Homo sapiens
  CDR3 for alpha chain variable domain of TCR clone 83762 (TRAV1-2, TRAJ16)
CAVNRFSDGQKLLF

SEQ ID NO: 167524 - protein, 15 aa, Homo sapiens
  CDR3 for beta chain variable domain of TCR clone 83762 (TRBV7-9, TRBJ1-6)
CTSSSPGRGNSPLHF

SEQ ID NO: 167525 - protein, 16 aa, Homo sapiens
  CDR3 for alpha chain variable domain of TCR clone 83763 (TRAV1-2, TRAJ40)
CAVRAPVPSGTYKYIF

SEQ ID NO: 167526 - protein, 20 aa, Homo sapiens
  CDR3 for beta chain variable domain of TCR clone 83763 (TRBV7-2, TRBJ2-3)
CASSSPPVEVAGRSTDTQYF

SEQ ID NO: 167527 - protein, 14 aa, Homo sapiens
  CDR3 for alpha chain variable domain of TCR clone 83764 (TRAV12-2, TRAJ6)
CAVIASGGSYIPTF

SEQ ID NO: 167528 - protein, 12 aa, Homo sapiens
  CDR3 for beta chain variable domain of TCR clone 83764 (TRBV5-1, TRBJ1-2)
CASSQDAYGYTF

SEQ ID NO: 167529 - protein, 16 aa, Homo sapiens
  CDR3 for alpha chain variable domain of TCR clone 83765 (TRAV12-3, TRAJ53)
CAMSPGSGDSNYKLTF

SEQ ID NO: 167530 - protein, 16 aa, Homo sapiens
  CDR3 for beta chain variable domain of TCR clone 83765 (TRBV4-2, TRBJ1-1)
CASRPLDGGGDTEAFF

SEQ ID NO: 167531 - protein, 11 aa, Homo sapiens
  CDR3 for alpha chain variable domain of TCR clone 83766 (TRAV17, TRAJ31)
CATSNNARLMF

SEQ ID NO: 167532 - protein, 13 aa, Homo sapiens
  CDR3 for beta chain variable domain of TCR clone 83766 (TRBV18, TRBJ2-7)
CQLTERGAYEQYF

SEQ ID NO: 167533 - protein, 14 aa, Homo sapiens
  CDR3 for alpha chain variable domain of TCR clone 83767 (TRAV8-3, TRAJ4)
CAVGAAVGYNKLIF

SEQ ID NO: 167534 - protein, 15 aa, Homo sapiens
  CDR3 for beta chain variable domain of TCR clone 83767 (TRBV5-1, TRBJ2-1)
CASSPPRAPYNEQFF

SEQ ID NO: 167535 - protein, 15 aa, Homo sapiens
  CDR3 for alpha chain variable domain of TCR clone 83768 (TRAV23/DV6, TRAJ30)
CAASSQESRDGKIIF

SEQ ID NO: 167536 - protein, 12 aa, Homo sapiens
  CDR3 for beta chain variable domain of TCR clone 83768 (TRBV11-2, TRBJ2-2)
CASSLPTGELFF

SEQ ID NO: 167537 - protein, 12 aa, Homo sapiens
  CDR3 for alpha chain variable domain of TCR clone 83769 (TRAV21, TRAJ20)
RAVRGNDYKLSF

SEQ ID NO: 167538 - protein, 14 aa, Homo sapiens
  CDR3 for beta chain variable domain of TCR clone 83769 (TRBV7-8, TRBJ2-7)
CASSQTQGADEQYF

SEQ ID NO: 167539 - protein, 14 aa, Homo sapiens
  CDR3 for alpha chain variable domain of TCR clone 83770 (TRAV1-2, TRAJ8)
RAVREDTGFQKLVF

SEQ ID NO: 167540 - protein, 13 aa, Homo sapiens
  CDR3 for beta chain variable domain of TCR clone 83770 (TRBV7-3, TRBJ2-1)
CASSLDSYNEQFF

SEQ ID NO: 167541 - protein, 12 aa, Homo sapiens
  CDR3 for alpha chain variable domain of TCR clone 83771 (TRAV3, TRAJ27)
CAVRDGAGKSTF

SEQ ID NO: 167542 - protein, 14 aa, Homo sapiens
  CDR3 for beta chain variable domain of TCR clone 83771 (TRBV5-1, TRBJ2-1)
CASSLDGDWNEQFF

SEQ ID NO: 167543 - protein, 14 aa, Homo sapiens
  CDR3 for alpha chain variable domain of TCR clone 83772 (TRAV1-2, TRAJ29)
CAVRELISATPLVF

SEQ ID NO: 167544 - protein, 16 aa, Homo sapiens
  CDR3 for beta chain variable domain of TCR clone 83772 (TRBV20-1, TRBJ1-4)
CSAPGQGLLTNEKLFF

SEQ ID NO: 167545 - protein, 15 aa, Homo sapiens
  CDR3 for alpha chain variable domain of TCR clone 83773 (TRAV20, TRAJ6)
FAVRLQSGGSYIPTF

SEQ ID NO: 167546 - protein, 14 aa, Homo sapiens
  CDR3 for beta chain variable domain of TCR clone 83773 (TRBV12-4, TRBJ2-7)
CASSASGGWYEQYF

SEQ ID NO: 167547 - protein, 14 aa, Homo sapiens
  CDR3 for alpha chain variable domain of TCR clone 83774 (TRAV20, TRAJ32)
CCGRDGGATNKLIF

SEQ ID NO: 167548 - protein, 16 aa, Homo sapiens
  CDR3 for beta chain variable domain of TCR clone 83774 (TRBV19, TRBJ2-2)
CASRSPGTGATGELFF

SEQ ID NO: 167549 - protein, 11 aa, Homo sapiens
  CDR3 for alpha chain variable domain of TCR clone 83775 (TRAV3, TRAJ21)
CAVGNFNKFYF

SEQ ID NO: 167550 - protein, 16 aa, Homo sapiens
  CDR3 for beta chain variable domain of TCR clone 83775 (TRBV11-2, TRBJ2-7)
CASSTVTAPKTYEQYF

SEQ ID NO: 167551 - protein, 14 aa, Homo sapiens
  CDR3 for alpha chain variable domain of TCR clone 83776 (TRAV8-6, TRAJ8)
CAVNENTGFQKLVF

SEQ ID NO: 167552 - protein, 11 aa, Homo sapiens
  CDR3 for beta chain variable domain of TCR clone 83776 (TRBV29-1, TRBJ2-5)
CSEDRTGTQYL

SEQ ID NO: 167553 - protein, 16 aa, Homo sapiens
  CDR3 for alpha chain variable domain of TCR clone 83777 (TRAV30, TRAJ24)
CGTEIVDADSWGKFQF

SEQ ID NO: 167554 - protein, 16 aa, Homo sapiens
  CDR3 for beta chain variable domain of TCR clone 83777 (TRBV6-4, TRBJ1-2)
CASSEAVGDPNYGYTF

SEQ ID NO: 167555 - protein, 16 aa, Homo sapiens
  CDR3 for alpha chain variable domain of TCR clone 83778 (TRAV8-6, TRAJ53)
CAVTSNSGGSNYKLTF

SEQ ID NO: 167556 - protein, 13 aa, Homo sapiens
  CDR3 for beta chain variable domain of TCR clone 83778 (TRBV19, TRBJ1-2)
CASSVPGQDGYTF

SEQ ID NO: 167557 - protein, 10 aa, Homo sapiens
  CDR3 for alpha chain variable domain of TCR clone 83779 (TRAV26-1, TRAJ22)
RSGSARQLTF

SEQ ID NO: 167558 - protein, 14 aa, Homo sapiens
  CDR3 for beta chain variable domain of TCR clone 83779 (TRBV18, TRBJ2-7)
CASSPRGGAYEQYF

SEQ ID NO: 167559 - protein, 12 aa, Homo sapiens
  CDR3 for alpha chain variable domain of TCR clone 83780 (TRAV21, TRAJ20)
CAVRRNDYKLSF

SEQ ID NO: 167560 - protein, 20 aa, Homo sapiens
  CDR3 for beta chain variable domain of TCR clone 83780 (TRBV19, TRBJ2-1)
CASSISRTVTSTRLNNEQFF

SEQ ID NO: 167561 - protein, 14 aa, Homo sapiens
  CDR3 for alpha chain variable domain of TCR clone 83781 (TRAV21, TRAJ35)
CAVMPIGFGNVLHC

SEQ ID NO: 167562 - protein, 12 aa, Homo sapiens
  CDR3 for beta chain variable domain of TCR clone 83781 (TRBV7-9, TRBJ2-7)
CASSIKREEKYF

SEQ ID NO: 167563 - protein, 18 aa, Homo sapiens
  CDR3 for alpha chain variable domain of TCR clone 83782 (TRAV12-3, TRAJ52)
CAMSVGRAGGTSYGKLTF

SEQ ID NO: 167564 - protein, 15 aa, Homo sapiens
  CDR3 for beta chain variable domain of TCR clone 83782 (TRBV27, TRBJ1-6)
CASSFDRGLGSPLHF

SEQ ID NO: 167565 - protein, 17 aa, Homo sapiens
  CDR3 for alpha chain variable domain of TCR clone 83783 (TRAV26-2, TRAJ42)
CILRDVGYGGSQGNLLF

SEQ ID NO: 167566 - protein, 16 aa, Homo sapiens
  CDR3 for beta chain variable domain of TCR clone 83783 (TRBV12-4, TRBJ2-7)
CASSLIGGTGTYEQYF

SEQ ID NO: 167567 - protein, 13 aa, Homo sapiens
  CDR3 for alpha chain variable domain of TCR clone 83784 (TRAV1-2, TRAJ9)
CAVLNTGGFKTIF

SEQ ID NO: 167568 - protein, 13 aa, Homo sapiens
  CDR3 for beta chain variable domain of TCR clone 83784 (TRBV19, TRBJ2-7)
CASRKAGGNEQYF

SEQ ID NO: 167569 - protein, 15 aa, Homo sapiens
  CDR3 for alpha chain variable domain of TCR clone 83785 (TRAV9-2, TRAJ8)
CALRGLNTGFQKFVF

SEQ ID NO: 167570 - protein, 12 aa, Homo sapiens
  CDR3 for beta chain variable domain of TCR clone 83785 (TRBV12-5, TRBJ2-5)
CASGQGVETQYF

SEQ ID NO: 167571 - protein, 10 aa, Homo sapiens
  CDR3 for alpha chain variable domain of TCR clone 83786 (TRAV21, TRAJ49)
CAVTGNQFYF

SEQ ID NO: 167572 - protein, 14 aa, Homo sapiens
  CDR3 for beta chain variable domain of TCR clone 83786 (TRBV19, TRBJ2-1)
CASPTFVLSGEQFF

SEQ ID NO: 167573 - protein, 12 aa, Homo sapiens
  CDR3 for alpha chain variable domain of TCR clone 83787 (TRAV12-3, TRAJ34)
CAMGYNTDKLTF

SEQ ID NO: 167574 - protein, 14 aa, Homo sapiens
  CDR3 for beta chain variable domain of TCR clone 83787 (TRBV5-7, TRBJ1-5)
CASSRTGGGQPQHF

SEQ ID NO: 167575 - protein, 15 aa, Homo sapiens
  CDR3 for alpha chain variable domain of TCR clone 83788 (TRAV1-2, TRAJ28)
CAVQYSGAGSYQLTF

SEQ ID NO: 167576 - protein, 13 aa, Homo sapiens
  CDR3 for beta chain variable domain of TCR clone 83788 (TRBV20-1, TRBJ2-7)
CSATQTSGYEQYF

SEQ ID NO: 167577 - protein, 13 aa, Homo sapiens
  CDR3 for alpha chain variable domain of TCR clone 83789 (TRAV12-2, TRAJ20)
CAVYPSNDYKLSF

SEQ ID NO: 167578 - protein, 15 aa, Homo sapiens
  CDR3 for beta chain variable domain of TCR clone 83789 (TRBV5-1, TRBJ2-4)
CASSLGGGGSYIQYF

SEQ ID NO: 167579 - protein, 12 aa, Homo sapiens
  CDR3 for alpha chain variable domain of TCR clone 83790 (TRAV3, TRAJ43)
RAVRDPNNDMRF

SEQ ID NO: 167580 - protein, 15 aa, Homo sapiens
  CDR3 for beta chain variable domain of TCR clone 83790 (TRBV6-5, TRBJ2-1)
CASSYDAGAGNEQFF

SEQ ID NO: 167581 - protein, 16 aa, Homo sapiens
  CDR3 for alpha chain variable domain of TCR clone 83791 (TRAV30, TRAJ24)
CGTEIVDADSWGKFQF

SEQ ID NO: 167582 - protein, 11 aa, Homo sapiens
  CDR3 for beta chain variable domain of TCR clone 83791 (TRBV28, TRBJ2-7)
CASSLTYEQYF

SEQ ID NO: 167583 - protein, 12 aa, Homo sapiens
  CDR3 for alpha chain variable domain of TCR clone 83792 (TRAV16, TRAJ10)
CSRTGGGNKLTF

SEQ ID NO: 167584 - protein, 14 aa, Homo sapiens
  CDR3 for beta chain variable domain of TCR clone 83792 (TRBV11-2, TRBJ2-3)
CASSRLARTDTQYF

SEQ ID NO: 167585 - protein, 12 aa, Homo sapiens
  CDR3 for alpha chain variable domain of TCR clone 83793 (TRAV27, TRAJ9)
CAGESGGFKTIF

SEQ ID NO: 167586 - protein, 18 aa, Homo sapiens
  CDR3 for beta chain variable domain of TCR clone 83793 (TRBV10-2, TRBJ2-2)
CISAPEVHRQADAGELFF

SEQ ID NO: 167587 - protein, 15 aa, Homo sapiens
  CDR3 for alpha chain variable domain of TCR clone 83794 (TRAV13-1, TRAJ10)
CAATILTGGGNKLTF

SEQ ID NO: 167588 - protein, 15 aa, Homo sapiens
  CDR3 for beta chain variable domain of TCR clone 83794 (TRBV2, TRBJ2-7)
CASTRLGSGATEQYF

SEQ ID NO: 167589 - protein, 12 aa, Homo sapiens
  CDR3 for alpha chain variable domain of TCR clone 83795 (TRAV8-3, TRAJ26)
CAGDNYGQNFVF

SEQ ID NO: 167590 - protein, 20 aa, Homo sapiens
  CDR3 for beta chain variable domain of TCR clone 83795 (TRBV7-8, TRBJ2-2)
CASSHLFPGPTIHITGELFF

SEQ ID NO: 167591 - protein, 14 aa, Homo sapiens
  CDR3 for alpha chain variable domain of TCR clone 83796 (TRAV12-3, TRAJ57)
CAMSAWGGSEKLVF

SEQ ID NO: 167592 - protein, 14 aa, Homo sapiens
  CDR3 for beta chain variable domain of TCR clone 83796 (TRBV19, TRBJ2-1)
CASPTFVLSGEQFF

SEQ ID NO: 167593 - protein, 13 aa, Homo sapiens
  CDR3 for alpha chain variable domain of TCR clone 83797 (TRAV30, TRAJ6)
CGFIEGGSYIPTF

SEQ ID NO: 167594 - protein, 15 aa, Homo sapiens
  CDR3 for beta chain variable domain of TCR clone 83797 (TRBV10-2, TRBJ2-6)
CASSEQGTGANVLTF

SEQ ID NO: 167595 - protein, 16 aa, Homo sapiens
  CDR3 for alpha chain variable domain of TCR clone 83798 (TRAV30, TRAJ24)
CGTEIVDADSWGKFQF

SEQ ID NO: 167596 - protein, 16 aa, Homo sapiens
  CDR3 for beta chain variable domain of TCR clone 83798 (TRBV20-1, TRBJ2-1)
CSALTWTSGSYNEQFF

SEQ ID NO: 167597 - protein, 23 aa, Homo sapiens
  CDR3 for alpha chain variable domain of TCR clone 83799 (TRAV26-1, TRAJ38)
CIADNAGNNHIQNPDPAVSQLRA

SEQ ID NO: 167598 - protein, 13 aa, Homo sapiens
  CDR3 for beta chain variable domain of TCR clone 83799 (TRBV20-1, TRBJ1-1)
CSARGGGNTEAFF

SEQ ID NO: 167599 - protein, 16 aa, Homo sapiens
  CDR3 for alpha chain variable domain of TCR clone 83800 (TRAV30, TRAJ24)
CGTEIVDADSWGKFQF

SEQ ID NO: 167600 - protein, 16 aa, Homo sapiens
  CDR3 for beta chain variable domain of TCR clone 83800 (TRBV7-3, TRBJ2-3)
CQQLFTSSLNTDTQYF

SEQ ID NO: 167601 - protein, 16 aa, Homo sapiens
  CDR3 for alpha chain variable domain of TCR clone 83801 (TRAV30, TRAJ24)
CGTGIVDADSWGKFQF

SEQ ID NO: 167602 - protein, 12 aa, Homo sapiens
  CDR3 for beta chain variable domain of TCR clone 83801 (TRBV11-2, TRBJ2-1)
CASSPGNNEQFF

SEQ ID NO: 167603 - protein, 12 aa, Homo sapiens
  CDR3 for alpha chain variable domain of TCR clone 83802 (TRAV21, TRAJ20)
CAVRGNDYKLRF

SEQ ID NO: 167604 - protein, 14 aa, Homo sapiens
  CDR3 for beta chain variable domain of TCR clone 83802 (TRBV7-8, TRBJ2-7)
CASSQTQGADEQYF

SEQ ID NO: 167605 - protein, 14 aa, Homo sapiens
  CDR3 for alpha chain variable domain of TCR clone 83803 (TRAV3, TRAJ8)
CAALMNTGFQKLVF

SEQ ID NO: 167606 - protein, 15 aa, Homo sapiens
  CDR3 for beta chain variable domain of TCR clone 83803 (TRBV28, TRBJ2-5)
CASSLGLGDQETQYL

SEQ ID NO: 167607 - protein, 13 aa, Homo sapiens
  CDR3 for alpha chain variable domain of TCR clone 83804 (TRAV12-3, TRAJ13)
CAMSSGGYQKVTF

SEQ ID NO: 167608 - protein, 14 aa, Homo sapiens
  CDR3 for beta chain variable domain of TCR clone 83804 (TRBV20-1, TRBJ1-1)
CSAQTRIGGTEAFF

SEQ ID NO: 167609 - protein, 14 aa, Homo sapiens
  CDR3 for alpha chain variable domain of TCR clone 83805 (TRAV35, TRAJ22)
CAGLRPGSARQLTF

SEQ ID NO: 167610 - protein, 14 aa, Homo sapiens
  CDR3 for beta chain variable domain of TCR clone 83805 (TRBV18, TRBJ2-5)
CASSPGVSQETQYF

SEQ ID NO: 167611 - protein, 11 aa, Homo sapiens
  CDR3 for alpha chain variable domain of TCR clone 83806 (TRAV21, TRAJ49)
CAVKDGNQFYF

SEQ ID NO: 167612 - protein, 13 aa, Homo sapiens
  CDR3 for beta chain variable domain of TCR clone 83806 (TRBV12-4, TRBJ1-2)
CASSLRQGKGYTF

SEQ ID NO: 167613 - protein, 11 aa, Homo sapiens
  CDR3 for alpha chain variable domain of TCR clone 83807 (TRAV1-1, TRAJ23)
CAVRQGGKLIF

SEQ ID NO: 167614 - protein, 14 aa, Homo sapiens
  CDR3 for beta chain variable domain of TCR clone 83807 (TRBV18, TRBJ2-5)
CASSPGVSQETQYF

SEQ ID NO: 167615 - protein, 11 aa, Homo sapiens
  CDR3 for alpha chain variable domain of TCR clone 83808 (TRAV16, TRAJ31)
CALFNNARLMF

SEQ ID NO: 167616 - protein, 14 aa, Homo sapiens
  CDR3 for beta chain variable domain of TCR clone 83808 (TRBV25-1, TRBJ1-1)
CASTHLGGNTEAFF

SEQ ID NO: 167617 - protein, 12 aa, Homo sapiens
  CDR3 for alpha chain variable domain of TCR clone 83809 (TRAV12-3, TRAJ17)
CAMTLTGNKLTF

SEQ ID NO: 167618 - protein, 15 aa, Homo sapiens
  CDR3 for beta chain variable domain of TCR clone 83809 (TRBV20-1, TRBJ2-7)
CSASGRVSGMDEQYF

SEQ ID NO: 167619 - protein, 13 aa, Homo sapiens
  CDR3 for alpha chain variable domain of TCR clone 83810 (TRAV20, TRAJ34)
CAVSSYNTDTLIF

SEQ ID NO: 167620 - protein, 13 aa, Homo sapiens
  CDR3 for beta chain variable domain of TCR clone 83810 (TRBV7-9, TRBJ1-2)
CASSLKQNYGYTF

SEQ ID NO: 167621 - protein, 15 aa, Homo sapiens
  CDR3 for alpha chain variable domain of TCR clone 83811 (TRAV26-1, TRAJ21)
CIVRVPNYNFNNFYF

SEQ ID NO: 167622 - protein, 16 aa, Homo sapiens
  CDR3 for beta chain variable domain of TCR clone 83811 (TRBV7-9, TRBJ2-3)
CASSLQGNPGTDTQYF

SEQ ID NO: 167623 - protein, 14 aa, Homo sapiens
  CDR3 for alpha chain variable domain of TCR clone 83812 (TRAV8-3, TRAJ4)
CAVGAAGGYNKLIF

SEQ ID NO: 167624 - protein, 14 aa, Homo sapiens
  CDR3 for beta chain variable domain of TCR clone 83812 (TRBV9, TRBJ2-1)
CASSVDPRGKEQFF

SEQ ID NO: 167625 - protein, 15 aa, Homo sapiens
  CDR3 for alpha chain variable domain of TCR clone 83813 (TRAV12-2, TRAJ53)
CAVNGGGGSNYKLKF

SEQ ID NO: 167626 - protein, 17 aa, Homo sapiens
  CDR3 for beta chain variable domain of TCR clone 83813 (TRBV7-3, TRBJ2-3)
RASSLMKRMRGADTQYF

SEQ ID NO: 167627 - protein, 12 aa, Homo sapiens
  CDR3 for alpha chain variable domain of TCR clone 83814 (TRAV12-2, TRAJ3)
CAAWSSASKIIF

SEQ ID NO: 167628 - protein, 12 aa, Homo sapiens
  CDR3 for beta chain variable domain of TCR clone 83814 (TRBV11-2, TRBJ2-1)
CASSPGNNEQFF

SEQ ID NO: 167629 - protein, 12 aa, Homo sapiens
  CDR3 for alpha chain variable domain of TCR clone 83815 (TRAV35, TRAJ53)
CAGLGSNYKLTF

SEQ ID NO: 167630 - protein, 15 aa, Homo sapiens
  CDR3 for beta chain variable domain of TCR clone 83815 (TRBV13, TRBJ2-5)
CASSLGPGRGETQYF

SEQ ID NO: 167631 - protein, 17 aa, Homo sapiens
  CDR3 for alpha chain variable domain of TCR clone 83816 (TRAV3, TRAJ6)
CAVRDGPRAGGRYIPTF

SEQ ID NO: 167632 - protein, 15 aa, Homo sapiens
  CDR3 for beta chain variable domain of TCR clone 83816 (TRBV7-6, TRBJ2-3)
CASSPIIYSTDTQYF

SEQ ID NO: 167633 - protein, 17 aa, Homo sapiens
  CDR3 for alpha chain variable domain of TCR clone 83817 (TRAV13-1, TRAJ52)
WAASSGAGGTSYGKLTF

SEQ ID NO: 167634 - protein, 15 aa, Homo sapiens
  CDR3 for beta chain variable domain of TCR clone 83817 (TRBV2, TRBJ2-1)
CASSELAGSYNEQFF

SEQ ID NO: 167635 - protein, 18 aa, Homo sapiens
  CDR3 for alpha chain variable domain of TCR clone 83818 (TRAV26-1, TRAJ37)
CIVRVDMHGSSNTGKLIF

SEQ ID NO: 167636 - protein, 15 aa, Homo sapiens
  CDR3 for beta chain variable domain of TCR clone 83818 (TRBV20-1, TRBJ2-7)
CSARVLAAPLYEQYF

SEQ ID NO: 167637 - protein, 17 aa, Homo sapiens
  CDR3 for alpha chain variable domain of TCR clone 83819 (TRAV13-1, TRAJ52)
CAASSGAGGTSYGKLTF

SEQ ID NO: 167638 - protein, 15 aa, Homo sapiens
  CDR3 for beta chain variable domain of TCR clone 83819 (TRBV7-2, TRBJ2-1)
CASTHGTGIYNEQFF

SEQ ID NO: 167639 - protein, 14 aa, Homo sapiens
  CDR3 for alpha chain variable domain of TCR clone 83820 (TRAV12-2, TRAJ13)
CAVKKTGGYQKVTF

SEQ ID NO: 167640 - protein, 13 aa, Homo sapiens
  CDR3 for beta chain variable domain of TCR clone 83820 (TRBV4-1, TRBJ1-1)
CASSLRGPTEAFF

SEQ ID NO: 167641 - protein, 14 aa, Homo sapiens
  CDR3 for alpha chain variable domain of TCR clone 83821 (TRAV13-1, TRAJ35)
CAASKGGFGNVLHC

SEQ ID NO: 167642 - protein, 15 aa, Homo sapiens
  CDR3 for beta chain variable domain of TCR clone 83821 (TRBV6-1, TRBJ2-3)
CASSERGGITDTQYF

SEQ ID NO: 167643 - protein, 15 aa, Homo sapiens
  CDR3 for alpha chain variable domain of TCR clone 83822 (TRAV34, TRAJ38)
CGADLTPGNNRKLIW

SEQ ID NO: 167644 - protein, 14 aa, Homo sapiens
  CDR3 for beta chain variable domain of TCR clone 83822 (TRBV11-2, TRBJ2-3)
CASSLGGGANTQYF

SEQ ID NO: 167645 - protein, 16 aa, Homo sapiens
  CDR3 for alpha chain variable domain of TCR clone 83823 (TRAV3, TRAJ37)
CAVRGKGSGKTGKLIF

SEQ ID NO: 167646 - protein, 15 aa, Homo sapiens
  CDR3 for beta chain variable domain of TCR clone 83823 (TRBV7-9, TRBJ2-2)
CASGPLDTFPGELFF

SEQ ID NO: 167647 - protein, 17 aa, Homo sapiens
  CDR3 for alpha chain variable domain of TCR clone 83824 (TRAV26-2, TRAJ42)
CILRDFGYGGSQGNLIF

SEQ ID NO: 167648 - protein, 16 aa, Homo sapiens
  CDR3 for beta chain variable domain of TCR clone 83824 (TRBV12-4, TRBJ2-7)
CASSLIGGTGTYEQYF

SEQ ID NO: 167649 - protein, 13 aa, Homo sapiens
  CDR3 for alpha chain variable domain of TCR clone 83825 (TRAV1-2, TRAJ9)
CAALNTGGFKTIF

SEQ ID NO: 167650 - protein, 15 aa, Homo sapiens
  CDR3 for beta chain variable domain of TCR clone 83825 (TRBV19, TRBJ2-4)
CASRGPRRGENIQYF

SEQ ID NO: 167651 - protein, 17 aa, Homo sapiens
  CDR3 for alpha chain variable domain of TCR clone 83826 (TRAV3, TRAJ42)
CAVRDRDYGGSQGNLIL

SEQ ID NO: 167652 - protein, 15 aa, Homo sapiens
  CDR3 for beta chain variable domain of TCR clone 83826 (TRBV6-6, TRBJ2-7)
CASSYSYGGSYEQYF

SEQ ID NO: 167653 - protein, 14 aa, Homo sapiens
  CDR3 for alpha chain variable domain of TCR clone 83827 (TRAV13-1, TRAJ44)
CAAKATVTASKLTF

SEQ ID NO: 167654 - protein, 13 aa, Homo sapiens
  CDR3 for beta chain variable domain of TCR clone 83827 (TRBV5-5, TRBJ1-2)
CASSFWRGEDYTF

SEQ ID NO: 167655 - protein, 14 aa, Homo sapiens
  CDR3 for alpha chain variable domain of TCR clone 83828 (TRAV1-2, TRAJ8)
CAVREDTGLQKLVF

SEQ ID NO: 167656 - protein, 15 aa, Homo sapiens
  CDR3 for beta chain variable domain of TCR clone 83828 (TRBV15, TRBJ1-1)
CATSLQGGRNTEAFF

SEQ ID NO: 167657 - protein, 16 aa, Homo sapiens
  CDR3 for alpha chain variable domain of TCR clone 83829 (TRAV12-2, TRAJ10)
CAVNRVLTGGGNKLTF

SEQ ID NO: 167658 - protein, 12 aa, Homo sapiens
  CDR3 for beta chain variable domain of TCR clone 83829 (TRBV28, TRBJ2-7)
CASSFSSYEKYF

SEQ ID NO: 167659 - protein, 14 aa, Homo sapiens
  CDR3 for alpha chain variable domain of TCR clone 83830 (TRAV9-2, TRAJ39)
CALYIYNAGNMLTF

SEQ ID NO: 167660 - protein, 15 aa, Homo sapiens
  CDR3 for beta chain variable domain of TCR clone 83830 (TRBV18, TRBJ2-3)
CASSPLAGETDTQYF

SEQ ID NO: 167661 - protein, 14 aa, Homo sapiens
  CDR3 for alpha chain variable domain of TCR clone 83831 (TRAV13-1, TRAJ44)
CAAKATGTASKLTF

SEQ ID NO: 167662 - protein, 14 aa, Homo sapiens
  CDR3 for beta chain variable domain of TCR clone 83831 (TRBV19, TRBJ2-2)
CASSTLHRSGELLF

SEQ ID NO: 167663 - protein, 11 aa, Homo sapiens
  CDR3 for alpha chain variable domain of TCR clone 83832 (TRAV21, TRAJ9)
CAVPGGFKTIF

SEQ ID NO: 167664 - protein, 17 aa, Homo sapiens
  CDR3 for beta chain variable domain of TCR clone 83832 (TRBV7-9, TRBJ2-5)
CATSGGERDPVLRARHA

SEQ ID NO: 167665 - protein, 13 aa, Homo sapiens
  CDR3 for alpha chain variable domain of TCR clone 83833 (TRAV12-1, TRAJ33)
CGDAPDSNYQLIC

SEQ ID NO: 167666 - protein, 15 aa, Homo sapiens
  CDR3 for beta chain variable domain of TCR clone 83833 (TRBV27, TRBJ2-1)
CASSNGGGSSNEQFF

SEQ ID NO: 167667 - protein, 12 aa, Homo sapiens
  CDR3 for alpha chain variable domain of TCR clone 83834 (TRAV2, TRAJ34)
CAVERNTDKLIF

SEQ ID NO: 167668 - protein, 14 aa, Homo sapiens
  CDR3 for beta chain variable domain of TCR clone 83834 (TRBV7-9, TRBJ2-1)
CVSSDNSGYNEQFF

SEQ ID NO: 167669 - protein, 15 aa, Homo sapiens
  CDR3 for alpha chain variable domain of TCR clone 83835 (TRAV3, TRAJ23)
CAVGDRGNQGGKLIF

SEQ ID NO: 167670 - protein, 15 aa, Homo sapiens
  CDR3 for beta chain variable domain of TCR clone 83835 (TRBV7-3, TRBJ2-1)
CQQLAPSGSYNEQFF

SEQ ID NO: 167671 - protein, 12 aa, Homo sapiens
  CDR3 for alpha chain variable domain of TCR clone 83836 (TRAV8-3, TRAJ20)
CAVGGGDYKLSF

SEQ ID NO: 167672 - protein, 12 aa, Homo sapiens
  CDR3 for beta chain variable domain of TCR clone 83836 (TRBV11-2, TRBJ2-2)
CASSLGGGELFF

SEQ ID NO: 167673 - protein, 16 aa, Homo sapiens
  CDR3 for alpha chain variable domain of TCR clone 83837 (TRAV17, TRAJ17)
CATALQEEAAGNKLTF

SEQ ID NO: 167674 - protein, 12 aa, Homo sapiens
  CDR3 for beta chain variable domain of TCR clone 83837 (TRBV4-2, TRBJ2-5)
CASGGARETQYF

SEQ ID NO: 167675 - protein, 13 aa, Homo sapiens
  CDR3 for alpha chain variable domain of TCR clone 83838 (TRAV13-1, TRAJ33)
CAASRAGNYQLIW

SEQ ID NO: 167676 - protein, 12 aa, Homo sapiens
  CDR3 for beta chain variable domain of TCR clone 83838 (TRBV11-2, TRBJ1-2)
CASSREGDGYAF

SEQ ID NO: 167677 - protein, 13 aa, Homo sapiens
  CDR3 for alpha chain variable domain of TCR clone 83839 (TRAV1-2, TRAJ9)
CATLNTGGFKTIF

SEQ ID NO: 167678 - protein, 15 aa, Homo sapiens
  CDR3 for beta chain variable domain of TCR clone 83839 (TRBV19, TRBJ1-1)
CASTSGQIQNTEAFF

SEQ ID NO: 167679 - protein, 14 aa, Homo sapiens
  CDR3 for alpha chain variable domain of TCR clone 83840 (TRAV1-2, TRAJ8)
CAVREDTGFQKLVF

SEQ ID NO: 167680 - protein, 15 aa, Homo sapiens
  CDR3 for beta chain variable domain of TCR clone 83840 (TRBV15, TRBJ1-1)
CATSLQGGRNAEAFF

SEQ ID NO: 167681 - protein, 11 aa, Homo sapiens
  CDR3 for alpha chain variable domain of TCR clone 83841 (TRAV12-3, TRAJ53)
CAMSPGSGGSN

SEQ ID NO: 167682 - protein, 11 aa, Homo sapiens
  CDR3 for beta chain variable domain of TCR clone 83841 (TRBV29-1, TRBJ2-5)
CSEDRTGTQYF

SEQ ID NO: 167683 - protein, 12 aa, Homo sapiens
  CDR3 for alpha chain variable domain of TCR clone 83842 (TRAV13-1, TRAJ21)
CAAKEGFNKFYF

SEQ ID NO: 167684 - protein, 14 aa, Homo sapiens
  CDR3 for beta chain variable domain of TCR clone 83842 (TRBV19, TRBJ2-2)
CASSGQGIAGELFF

SEQ ID NO: 167685 - protein, 16 aa, Homo sapiens
  CDR3 for alpha chain variable domain of TCR clone 83843 (TRAV21, TRAJ52)
CAVSDAGGTSYGKLTF

SEQ ID NO: 167686 - protein, 13 aa, Homo sapiens
  CDR3 for beta chain variable domain of TCR clone 83843 (TRBV7-3, TRBJ2-5)
CASSFRGSRTQYF

SEQ ID NO: 167687 - protein, 12 aa, Homo sapiens
  CDR3 for alpha chain variable domain of TCR clone 83844 (TRAV23/DV6, TRAJ32)
CSMPGATNKLIF

SEQ ID NO: 167688 - protein, 17 aa, Homo sapiens
  CDR3 for beta chain variable domain of TCR clone 83844 (TRBV13, TRBJ2-3)
CASSSRGTSGLTDTQYF

SEQ ID NO: 167689 - protein, 13 aa, Homo sapiens
  CDR3 for alpha chain variable domain of TCR clone 83845 (TRAV12-2, TRAJ12)
CAVNWDSSYKLIF

SEQ ID NO: 167690 - protein, 15 aa, Homo sapiens
  CDR3 for beta chain variable domain of TCR clone 83845 (TRBV19, TRBJ1-2)
CASSVGQVLNYGYTF

SEQ ID NO: 167691 - protein, 14 aa, Homo sapiens
  CDR3 for alpha chain variable domain of TCR clone 83846 (TRAV8-3, TRAJ31)
CAVGRGLNNARLMF

SEQ ID NO: 167692 - protein, 14 aa, Homo sapiens
  CDR3 for beta chain variable domain of TCR clone 83846 (TRBV7-2, TRBJ2-2)
CQQLSGGLTGELFF

SEQ ID NO: 167693 - protein, 13 aa, Homo sapiens
  CDR3 for alpha chain variable domain of TCR clone 83847 (TRAV12-1, TRAJ20)
CVVNRETDYKLSF

SEQ ID NO: 167694 - protein, 15 aa, Homo sapiens
  CDR3 for beta chain variable domain of TCR clone 83847 (TRBV28, TRBJ2-1)
CASSIIAGGRSEQFF

SEQ ID NO: 167695 - protein, 11 aa, Homo sapiens
  CDR3 for alpha chain variable domain of TCR clone 83848 (TRAV3, TRAJ21)
CAVGNFNKFYF

SEQ ID NO: 167696 - protein, 15 aa, Homo sapiens
  CDR3 for beta chain variable domain of TCR clone 83848 (TRBV20-1, TRBJ2-7)
CSAESGTSGAYEQYF

SEQ ID NO: 167697 - protein, 16 aa, Homo sapiens
  CDR3 for alpha chain variable domain of TCR clone 83849 (TRAV8-3, TRAJ13)
CAVGAYPSGGYQKVTF

SEQ ID NO: 167698 - protein, 15 aa, Homo sapiens
  CDR3 for beta chain variable domain of TCR clone 83849 (TRBV19, TRBJ1-5)
CASTIVWADNQPQHF

SEQ ID NO: 167699 - protein, 18 aa, Homo sapiens
  CDR3 for alpha chain variable domain of TCR clone 83850 (TRAV13-1, TRAJ52)
CASSKRSAGGTSYGKLTF

SEQ ID NO: 167700 - protein, 13 aa, Homo sapiens
  CDR3 for beta chain variable domain of TCR clone 83850 (TRBV12-4, TRBJ1-2)
CASSLRQGKGYTF

SEQ ID NO: 167701 - protein, 13 aa, Homo sapiens
  CDR3 for alpha chain variable domain of TCR clone 83851 (TRAV13-2, TRAJ48)
CAEMDFGNEKLTF

SEQ ID NO: 167702 - protein, 14 aa, Homo sapiens
  CDR3 for beta chain variable domain of TCR clone 83851 (TRBV20-1, TRBJ2-3)
CSARGGTSTDTQYF

SEQ ID NO: 167703 - protein, 14 aa, Homo sapiens
  CDR3 for alpha chain variable domain of TCR clone 83852 (TRAV38-1, TRAJ29)
CAFITPSGNTPLVF

SEQ ID NO: 167704 - protein, 14 aa, Homo sapiens
  CDR3 for beta chain variable domain of TCR clone 83852 (TRBV18, TRBJ2-7)
CASSPRGGAYGQYF

SEQ ID NO: 167705 - protein, 15 aa, Homo sapiens
  CDR3 for alpha chain variable domain of TCR clone 83853 (TRAV17, TRAJ23)
CATDAEDNQGGKLIF

SEQ ID NO: 167706 - protein, 12 aa, Homo sapiens
  CDR3 for beta chain variable domain of TCR clone 83853 (TRBV2, TRBJ2-1)
CAKREGYKEQFF

SEQ ID NO: 167707 - protein, 14 aa, Homo sapiens
  CDR3 for alpha chain variable domain of TCR clone 83854 (TRAV12-1, TRAJ17)
CVVNYKSAGNKLTF

SEQ ID NO: 167708 - protein, 12 aa, Homo sapiens
  CDR3 for beta chain variable domain of TCR clone 83854 (TRBV11-2, TRBJ2-2)
CASSLPTGELFF

SEQ ID NO: 167709 - protein, 14 aa, Homo sapiens
  CDR3 for alpha chain variable domain of TCR clone 83855 (TRAV8-2, TRAJ4)
CVVSPSGGYNKLIF

SEQ ID NO: 167710 - protein, 16 aa, Homo sapiens
  CDR3 for beta chain variable domain of TCR clone 83855 (TRBV4-3, TRBJ2-3)
CASSLGLAGEGDTQYF

SEQ ID NO: 167711 - protein, 13 aa, Homo sapiens
  CDR3 for alpha chain variable domain of TCR clone 83856 (TRAV29/DV5, TRAJ31)
CAASRNNNARLMF

SEQ ID NO: 167712 - protein, 17 aa, Homo sapiens
  CDR3 for beta chain variable domain of TCR clone 83856 (TRBV5-4, TRBJ2-3)
CISVPAVLTASTDTQCF

SEQ ID NO: 167713 - protein, 17 aa, Homo sapiens
  CDR3 for alpha chain variable domain of TCR clone 83857 (TRAV3, TRAJ6)
CVVRDGPRAGGSYIPTF

SEQ ID NO: 167714 - protein, 13 aa, Homo sapiens
  CDR3 for beta chain variable domain of TCR clone 83857 (TRBV20-1, TRBJ1-6)
CSAPLGVGSPLHF

SEQ ID NO: 167715 - protein, 12 aa, Homo sapiens
  CDR3 for alpha chain variable domain of TCR clone 83858 (TRAV12-1, TRAJ20)
CVAHFNDYKLSF

SEQ ID NO: 167716 - protein, 13 aa, Homo sapiens
  CDR3 for beta chain variable domain of TCR clone 83858 (TRBV5-7, TRBJ2-5)
CASSLRLQGTQYF

SEQ ID NO: 167717 - protein, 13 aa, Homo sapiens
  CDR3 for alpha chain variable domain of TCR clone 83859 (TRAV2, TRAJ15)
RAVASQAGTALIF

SEQ ID NO: 167718 - protein, 17 aa, Homo sapiens
  CDR3 for beta chain variable domain of TCR clone 83859 (TRBV20-1, TRBJ2-2)
CSASGSGQGGLTGELFF

SEQ ID NO: 167719 - protein, 12 aa, Homo sapiens
  CDR3 for alpha chain variable domain of TCR clone 83860 (TRAV12-1, TRAJ20)
CVVNPDDYKLSF

SEQ ID NO: 167720 - protein, 14 aa, Homo sapiens
  CDR3 for beta chain variable domain of TCR clone 83860 (TRBV2, TRBJ2-3)
CASTAQTSTDTQYF

SEQ ID NO: 167721 - protein, 12 aa, Homo sapiens
  CDR3 for alpha chain variable domain of TCR clone 83861 (TRAV8-6, TRAJ8)
CAVTPGFQKLVF

SEQ ID NO: 167722 - protein, 16 aa, Homo sapiens
  CDR3 for beta chain variable domain of TCR clone 83861 (TRBV7-3, TRBJ2-2)
CASSLKRGTLSGELLF

SEQ ID NO: 167723 - protein, 13 aa, Homo sapiens
  CDR3 for alpha chain variable domain of TCR clone 83862 (TRAV3, TRAJ15)
CAVRDQAGTALIF

SEQ ID NO: 167724 - protein, 15 aa, Homo sapiens
  CDR3 for beta chain variable domain of TCR clone 83862 (TRBV11-3, TRBJ2-3)
CASLKDGREGDTQYF

SEQ ID NO: 167725 - protein, 14 aa, Homo sapiens
  CDR3 for alpha chain variable domain of TCR clone 83863 (TRAV12-3, TRAJ29)
CAMIFLSGNTPLVF

SEQ ID NO: 167726 - protein, 16 aa, Homo sapiens
  CDR3 for beta chain variable domain of TCR clone 83863 (TRBV28, TRBJ2-7)
CASSSGTSGRGYEQYF

SEQ ID NO: 167727 - protein, 14 aa, Homo sapiens
  CDR3 for alpha chain variable domain of TCR clone 83864 (TRAV1-2, TRAJ16)
CAVNRFSDGQKLLF

SEQ ID NO: 167728 - protein, 15 aa, Homo sapiens
  CDR3 for beta chain variable domain of TCR clone 83864 (TRBV7-2, TRBJ2-1)
CASSFQADEYNEQFF

SEQ ID NO: 167729 - protein, 13 aa, Homo sapiens
  CDR3 for alpha chain variable domain of TCR clone 83865 (TRAV13-1, TRAJ6)
CARGSGGSYIPTF

SEQ ID NO: 167730 - protein, 17 aa, Homo sapiens
  CDR3 for beta chain variable domain of TCR clone 83865 (TRBV7-8, TRBJ2-1)
CASSPPTGALAYNEQFF

SEQ ID NO: 167731 - protein, 13 aa, Homo sapiens
  CDR3 for alpha chain variable domain of TCR clone 83866 (TRAV2, TRAJ9)
CAVVETGGFKTIF

SEQ ID NO: 167732 - protein, 20 aa, Homo sapiens
  CDR3 for beta chain variable domain of TCR clone 83866 (TRBV28, TRBJ2-1)
CASTPIGRSPGLAGGNEQFF

SEQ ID NO: 167733 - protein, 21 aa, Homo sapiens
  CDR3 for alpha chain variable domain of TCR clone 83867 (TRAV12-1, TRAJ32)
SSVIQPPTSMNYGGATNKLIF

SEQ ID NO: 167734 - protein, 15 aa, Homo sapiens
  CDR3 for beta chain variable domain of TCR clone 83867 (TRBV7-9, TRBJ2-2)
CASGPLDAFPGELFF

SEQ ID NO: 167735 - protein, 14 aa, Homo sapiens
  CDR3 for alpha chain variable domain of TCR clone 83868 (TRAV26-1, TRAJ38)
CIADNAGNNRKLIW

SEQ ID NO: 167736 - protein, 15 aa, Homo sapiens
  CDR3 for beta chain variable domain of TCR clone 83868 (TRBV7-6, TRBJ1-4)
CASSLGAGAGEKLFF

SEQ ID NO: 167737 - protein, 11 aa, Homo sapiens
  CDR3 for alpha chain variable domain of TCR clone 83869 (TRAV19, TRAJ5)
CALRDRRALTF

SEQ ID NO: 167738 - protein, 15 aa, Homo sapiens
  CDR3 for beta chain variable domain of TCR clone 83869 (TRBV28, TRBJ2-1)
CASRVGLDEYNEQFF

SEQ ID NO: 167739 - protein, 14 aa, Homo sapiens
  CDR3 for alpha chain variable domain of TCR clone 83870 (TRAV3, TRAJ28)
CAVRRGAGSYQITF

SEQ ID NO: 167740 - protein, 16 aa, Homo sapiens
  CDR3 for beta chain variable domain of TCR clone 83870 (TRBV4-1, TRBJ2-7)
CASSQEWTSGPLEQYF

SEQ ID NO: 167741 - protein, 12 aa, Homo sapiens
  CDR3 for alpha chain variable domain of TCR clone 83871 (TRAV16, TRAJ22)
CALEVSARQLTF

SEQ ID NO: 167742 - protein, 14 aa, Homo sapiens
  CDR3 for beta chain variable domain of TCR clone 83871 (TRBV11-2, TRBJ2-3)
CASSSIAGTDTQYF

SEQ ID NO: 167743 - protein, 14 aa, Homo sapiens
  CDR3 for alpha chain variable domain of TCR clone 83872 (TRAV3, TRAJ34)
CAVRDINNTDELIF

SEQ ID NO: 167744 - protein, 13 aa, Homo sapiens
  CDR3 for beta chain variable domain of TCR clone 83872 (TRBV20-1, TRBJ1-1)
CSARGGGNTEAFF

SEQ ID NO: 167745 - protein, 14 aa, Homo sapiens
  CDR3 for alpha chain variable domain of TCR clone 83873 (TRAV1-2, TRAJ16)
CDVNRFSDGQKLLF

SEQ ID NO: 167746 - protein, 11 aa, Homo sapiens
  CDR3 for beta chain variable domain of TCR clone 83873 (TRBV7-8, TRBJ2-7)
CASSLSLEQYF

SEQ ID NO: 167747 - protein, 13 aa, Homo sapiens
  CDR3 for alpha chain variable domain of TCR clone 83874 (TRAV2, TRAJ15)
CAVASQAGTALIF

SEQ ID NO: 167748 - protein, 14 aa, Homo sapiens
  CDR3 for beta chain variable domain of TCR clone 83874 (TRBV18, TRBJ2-5)
CASSPGVSQETQYF

SEQ ID NO: 167749 - protein, 16 aa, Homo sapiens
  CDR3 for alpha chain variable domain of TCR clone 83875 (TRAV23/DV6, )
CADIQNPDPAVYQLTD

SEQ ID NO: 167750 - protein, 13 aa, Homo sapiens
  CDR3 for beta chain variable domain of TCR clone 83875 (TRBV28, TRBJ2-7)
CASRSSGVYEQYF

SEQ ID NO: 167751 - protein, 15 aa, Homo sapiens
  CDR3 for alpha chain variable domain of TCR clone 83876 (TRAV25, TRAJ52)
CAGTSGGTSYGKLTF

SEQ ID NO: 167752 - protein, 16 aa, Homo sapiens
  CDR3 for beta chain variable domain of TCR clone 83876 (TRBV15, TRBJ1-2)
CATSRGSRTGGGGYTF

SEQ ID NO: 167753 - protein, 12 aa, Homo sapiens
  CDR3 for alpha chain variable domain of TCR clone 83877 (TRAV2, TRAJ9)
CAVGAGGFKTIF

SEQ ID NO: 167754 - protein, 11 aa, Homo sapiens
  CDR3 for beta chain variable domain of TCR clone 83877 (TRBV12-4, TRBJ2-3)
CASTATDTQYF

SEQ ID NO: 167755 - protein, 14 aa, Homo sapiens
  CDR3 for alpha chain variable domain of TCR clone 83878 (TRAV23/DV6, TRAJ22)
CAASVSGSARQLTF

SEQ ID NO: 167756 - protein, 16 aa, Homo sapiens
  CDR3 for beta chain variable domain of TCR clone 83878 (TRBV19, TRBJ2-2)
CASSFPGQGLVGELFF

SEQ ID NO: 167757 - protein, 16 aa, Homo sapiens
  CDR3 for alpha chain variable domain of TCR clone 83879 (TRAV3, TRAJ23)
CAVKIGIYNQGGKLSF

SEQ ID NO: 167758 - protein, 17 aa, Homo sapiens
  CDR3 for beta chain variable domain of TCR clone 83879 (TRBV10-3, TRBJ2-6)
CAISESTAPSGANVLTF

SEQ ID NO: 167759 - protein, 10 aa, Homo sapiens
  CDR3 for alpha chain variable domain of TCR clone 83880 (TRAV16, TRAJ22)
SAMYLRQLTF

SEQ ID NO: 167760 - protein, 14 aa, Homo sapiens
  CDR3 for beta chain variable domain of TCR clone 83880 (TRBV7-8, TRBJ2-3)
CASSLEAGTDTQYF

SEQ ID NO: 167761 - protein, 18 aa, Homo sapiens
  CDR3 for alpha chain variable domain of TCR clone 83881 (TRAV29/DV5, TRAJ52)
CAAGFRGAGGTSYGKLTF

SEQ ID NO: 167762 - protein, 10 aa, Homo sapiens
  CDR3 for beta chain variable domain of TCR clone 83881 (TRBV19, TRBJ1-1)
CASRQVEAFF

SEQ ID NO: 167763 - protein, 15 aa, Homo sapiens
  CDR3 for alpha chain variable domain of TCR clone 83882 (TRAV21, TRAJ24)
CAARSSTDSWGKLQF

SEQ ID NO: 167764 - protein, 13 aa, Homo sapiens
  CDR3 for beta chain variable domain of TCR clone 83882 (TRBV11-2, TRBJ2-5)
CASSSAGEETQYF

SEQ ID NO: 167765 - protein, 14 aa, Homo sapiens
  CDR3 for alpha chain variable domain of TCR clone 83883 (TRAV40, TRAJ41)
CLLGPPNSGYALNF

SEQ ID NO: 167766 - protein, 11 aa, Homo sapiens
  CDR3 for beta chain variable domain of TCR clone 83883 (TRBV19, TRBJ2-7)
CASSILGEQYS

SEQ ID NO: 167767 - protein, 11 aa, Homo sapiens
  CDR3 for alpha chain variable domain of TCR clone 83884 (TRAV8-3, TRAJ15)
CAVGPGTALIF

SEQ ID NO: 167768 - protein, 15 aa, Homo sapiens
  CDR3 for beta chain variable domain of TCR clone 83884 (TRBV7-9, TRBJ1-3)
CASSPPTGTGNTIYF

SEQ ID NO: 167769 - protein, 17 aa, Homo sapiens
  CDR3 for alpha chain variable domain of TCR clone 83885 (TRAV13-1, TRAJ5)
CSNPSLSRDTGRRALTF

SEQ ID NO: 167770 - protein, 12 aa, Homo sapiens
  CDR3 for beta chain variable domain of TCR clone 83885 (TRBV11-2, TRBJ2-1)
CASSPGNNEQFF

SEQ ID NO: 167771 - protein, 13 aa, Homo sapiens
  CDR3 for alpha chain variable domain of TCR clone 83886 (TRAV9-2, TRAJ9)
CALSDRGGFKTIF

SEQ ID NO: 167772 - protein, 14 aa, Homo sapiens
  CDR3 for beta chain variable domain of TCR clone 83886 (TRBV20-1, TRBJ2-2)
CGAPDTASTGELFF

SEQ ID NO: 167773 - protein, 14 aa, Homo sapiens
  CDR3 for alpha chain variable domain of TCR clone 83887 (TRAV12-2, TRAJ44)
CAVNPAGTASKLTF

SEQ ID NO: 167774 - protein, 16 aa, Homo sapiens
  CDR3 for beta chain variable domain of TCR clone 83887 (TRBV2, TRBJ2-6)
CASSEVGGAGANGLTF

SEQ ID NO: 167775 - protein, 15 aa, Homo sapiens
  CDR3 for alpha chain variable domain of TCR clone 83888 (TRAV12-3, TRAJ6)
CAMSVTTGGSYIPTF

SEQ ID NO: 167776 - protein, 17 aa, Homo sapiens
  CDR3 for beta chain variable domain of TCR clone 83888 (TRBV20-1, TRBJ2-1)
CSARSPSGGPPTMSSSS

SEQ ID NO: 167777 - protein, 17 aa, Homo sapiens
  CDR3 for alpha chain variable domain of TCR clone 83889 (TRAV19, TRAJ58)
CALRGLRVGTSGSRLTF

SEQ ID NO: 167778 - protein, 15 aa, Homo sapiens
  CDR3 for beta chain variable domain of TCR clone 83889 (TRBV5-1, TRBJ2-5)
CASNFKGGDQETQYF

SEQ ID NO: 167779 - protein, 17 aa, Homo sapiens
  CDR3 for alpha chain variable domain of TCR clone 83890 (TRAV12-2, TRAJ4)
CAVNVRPVSGGYNKLIF

SEQ ID NO: 167780 - protein, 12 aa, Homo sapiens
  CDR3 for beta chain variable domain of TCR clone 83890 (TRBV7-8, TRBJ2-7)
CASSLGDREQYF

SEQ ID NO: 167781 - protein, 12 aa, Homo sapiens
  CDR3 for alpha chain variable domain of TCR clone 83891 (TRAV12-3, TRAJ5)
CAMDTGRRALTF

SEQ ID NO: 167782 - protein, 12 aa, Homo sapiens
  CDR3 for beta chain variable domain of TCR clone 83891 (TRBV12-4, TRBJ1-3)
CASSFSGNTIYF

SEQ ID NO: 167783 - protein, 14 aa, Homo sapiens
  CDR3 for alpha chain variable domain of TCR clone 83892 (TRAV2, TRAJ37)
CAVDFTSNTGKLIF

SEQ ID NO: 167784 - protein, 13 aa, Homo sapiens
  CDR3 for beta chain variable domain of TCR clone 83892 (TRBV12-5, TRBJ2-1)
CASGLGRGNEQFF

SEQ ID NO: 167785 - protein, 15 aa, Homo sapiens
  CDR3 for alpha chain variable domain of TCR clone 83893 (TRAV38-2/DV8, TRAJ45)
CAYCDSGGGADGLTF

SEQ ID NO: 167786 - protein, 16 aa, Homo sapiens
  CDR3 for beta chain variable domain of TCR clone 83893 (TRBV19, TRBJ1-1)
CASSPTRFWPGTEAFF

SEQ ID NO: 167787 - protein, 14 aa, Homo sapiens
  CDR3 for alpha chain variable domain of TCR clone 83894 (TRAV17, TRAJ49)
CVTDARDTGNQFYF

SEQ ID NO: 167788 - protein, 14 aa, Homo sapiens
  CDR3 for beta chain variable domain of TCR clone 83894 (TRBV5-5, TRBJ1-2)
CASSFGQINYGYTF

SEQ ID NO: 167789 - protein, 18 aa, Homo sapiens
  CDR3 for alpha chain variable domain of TCR clone 83895 (TRAV12-3, TRAJ52)
CAMSVGGAGGTSYGKLTF

SEQ ID NO: 167790 - protein, 14 aa, Homo sapiens
  CDR3 for beta chain variable domain of TCR clone 83895 (TRBV7-2, TRBJ2-5)
CASSFTQGQETQYF

SEQ ID NO: 167791 - protein, 12 aa, Homo sapiens
  CDR3 for alpha chain variable domain of TCR clone 83896 (TRAV12-3, TRAJ21)
CAMFNNFNKFYF

SEQ ID NO: 167792 - protein, 12 aa, Homo sapiens
  CDR3 for beta chain variable domain of TCR clone 83896 (TRBV6-3, TRBJ2-7)
CASSLTPYEQYF

SEQ ID NO: 167793 - protein, 12 aa, Homo sapiens
  CDR3 for alpha chain variable domain of TCR clone 83897 (TRAV2, TRAJ9)
CAVGAGGFKTIF

SEQ ID NO: 167794 - protein, 18 aa, Homo sapiens
  CDR3 for beta chain variable domain of TCR clone 83897 (TRBV20-1, TRBJ2-3)
CSASGLAGGPGTTDTQYF

SEQ ID NO: 167795 - protein, 14 aa, Homo sapiens
  CDR3 for alpha chain variable domain of TCR clone 83898 (TRAV29/DV5, TRAJ32)
CAAAYGGATNKLIF

SEQ ID NO: 167796 - protein, 12 aa, Homo sapiens
  CDR3 for beta chain variable domain of TCR clone 83898 (TRBV11-2, TRBJ2-1)
CASSPGNNEQFF

SEQ ID NO: 167797 - protein, 14 aa, Homo sapiens
  CDR3 for alpha chain variable domain of TCR clone 83899 (TRAV13-1, TRAJ28)
CAASKGAGSYQLTF

SEQ ID NO: 167798 - protein, 21 aa, Homo sapiens
  CDR3 for beta chain variable domain of TCR clone 83899 (TRBV4-2, TRBJ2-3)
CASSQDGARGGGEAVFWPRHP

SEQ ID NO: 167799 - protein, 13 aa, Homo sapiens
  CDR3 for alpha chain variable domain of TCR clone 83900 (TRAV29/DV5, TRAJ44)
CAASTGTASKLTF

SEQ ID NO: 167800 - protein, 14 aa, Homo sapiens
  CDR3 for beta chain variable domain of TCR clone 83900 (TRBV2, TRBJ2-5)
CASSEVLAQETQYF

SEQ ID NO: 167801 - protein, 12 aa, Homo sapiens
  CDR3 for alpha chain variable domain of TCR clone 83901 (TRAV16, TRAJ49)
CALHEGGNQFYF

SEQ ID NO: 167802 - protein, 14 aa, Homo sapiens
  CDR3 for beta chain variable domain of TCR clone 83901 (TRBV7-9, TRBJ2-1)
CASRPTGLRNEQFF

SEQ ID NO: 167803 - protein, 15 aa, Homo sapiens
  CDR3 for alpha chain variable domain of TCR clone 83902 (TRAV3, TRAJ3)
CAVRDRSSSASKIIF

SEQ ID NO: 167804 - protein, 14 aa, Homo sapiens
  CDR3 for beta chain variable domain of TCR clone 83902 (TRBV19, TRBJ2-1)
CASPTFVLSGEQFF

SEQ ID NO: 167805 - protein, 16 aa, Homo sapiens
  CDR3 for alpha chain variable domain of TCR clone 83903 (TRAV14/DV4, TRAJ53)
CAMREGGGGSNYKLTF

SEQ ID NO: 167806 - protein, 14 aa, Homo sapiens
  CDR3 for beta chain variable domain of TCR clone 83903 (TRBV7-2, TRBJ2-7)
CASRSQGAAYEQYF

SEQ ID NO: 167807 - protein, 12 aa, Homo sapiens
  CDR3 for alpha chain variable domain of TCR clone 83904 (TRAV12-3, TRAJ29)
CAAREGNTPLVF

SEQ ID NO: 167808 - protein, 17 aa, Homo sapiens
  CDR3 for beta chain variable domain of TCR clone 83904 (TRBV18, TRBJ2-1)
CASSPLAAGAGDNEQFL

SEQ ID NO: 167809 - protein, 15 aa, Homo sapiens
  CDR3 for alpha chain variable domain of TCR clone 83905 (TRAV41, TRAJ45)
CAASYSGGGAYGLTF

SEQ ID NO: 167810 - protein, 14 aa, Homo sapiens
  CDR3 for beta chain variable domain of TCR clone 83905 (TRBV12-5, TRBJ2-5)
CASGSRTHQETQYF

SEQ ID NO: 167811 - protein, 15 aa, Homo sapiens
  CDR3 for alpha chain variable domain of TCR clone 83906 (TRAV8-3, TRAJ45)
CASSYSGGGADGLTF

SEQ ID NO: 167812 - protein, 13 aa, Homo sapiens
  CDR3 for beta chain variable domain of TCR clone 83906 (TRBV7-2, TRBJ2-7)
CASSSPSGSEQYF

SEQ ID NO: 167813 - protein, 16 aa, Homo sapiens
  CDR3 for alpha chain variable domain of TCR clone 83907 (TRAV3, TRAJ6)
CAVRDGMGRRKLHTYI

SEQ ID NO: 167814 - protein, 15 aa, Homo sapiens
  CDR3 for beta chain variable domain of TCR clone 83907 (TRBV9, TRBJ2-1)
CASSRAGSSYNEQFF

SEQ ID NO: 167815 - protein, 15 aa, Homo sapiens
  CDR3 for alpha chain variable domain of TCR clone 83908 (TRAV3, TRAJ20)
CAVTDIKLSDYKLSF

SEQ ID NO: 167816 - protein, 15 aa, Homo sapiens
  CDR3 for beta chain variable domain of TCR clone 83908 (TRBV7-9, TRBJ1-6)
CASSSPGRGNSPLHF

SEQ ID NO: 167817 - protein, 15 aa, Homo sapiens
  CDR3 for alpha chain variable domain of TCR clone 83909 (TRAV17, TRAJ57)
CATGPSQDGSEKLVF

SEQ ID NO: 167818 - protein, 14 aa, Homo sapiens
  CDR3 for beta chain variable domain of TCR clone 83909 (TRBV12-5, TRBJ2-5)
CASGSRTHQETQYF

SEQ ID NO: 167819 - protein, 16 aa, Homo sapiens
  CDR3 for alpha chain variable domain of TCR clone 83910 (TRAV30, TRAJ57)
CGTGWAPQGGSEKLVF

SEQ ID NO: 167820 - protein, 14 aa, Homo sapiens
  CDR3 for beta chain variable domain of TCR clone 83910 (TRBV18, TRBJ1-1)
RASSPGFQGVEAFF

SEQ ID NO: 167821 - protein, 15 aa, Homo sapiens
  CDR3 for alpha chain variable domain of TCR clone 83911 (TRAV23/DV6, TRAJ18)
CAARYRGSTLGMLYF

SEQ ID NO: 167822 - protein, 13 aa, Homo sapiens
  CDR3 for beta chain variable domain of TCR clone 83911 (TRBV7-2, TRBJ2-7)
CASSSPSGSEQYF

SEQ ID NO: 167823 - protein, 16 aa, Homo sapiens
  CDR3 for alpha chain variable domain of TCR clone 83912 (TRAV4, TRAJ18)
CCVLLIGGSTLGRLYF

SEQ ID NO: 167824 - protein, 17 aa, Homo sapiens
  CDR3 for beta chain variable domain of TCR clone 83912 (TRBV11-2, TRBJ2-1)
CASSLYPPGVEYNEQFF

SEQ ID NO: 167825 - protein, 16 aa, Homo sapiens
  CDR3 for alpha chain variable domain of TCR clone 83913 (TRAV21, TRAJ52)
CAVTNAGGTSYGKLTF

SEQ ID NO: 167826 - protein, 11 aa, Homo sapiens
  CDR3 for beta chain variable domain of TCR clone 83913 (TRBV2, TRBJ1-1)
CASRKGTEAFF

SEQ ID NO: 167827 - protein, 13 aa, Homo sapiens
  CDR3 for alpha chain variable domain of TCR clone 83914 (TRAV30, TRAJ34)
CGTVGYNTDKLIF

SEQ ID NO: 167828 - protein, 15 aa, Homo sapiens
  CDR3 for beta chain variable domain of TCR clone 83914 (TRBV7-9, TRBJ1-2)
CQQLGFSSGEDGYTF

SEQ ID NO: 167829 - protein, 16 aa, Homo sapiens
  CDR3 for alpha chain variable domain of TCR clone 83915 (TRAV1-2, TRAJ10)
CAVRGVLTGGGNKLTF

SEQ ID NO: 167830 - protein, 15 aa, Homo sapiens
  CDR3 for beta chain variable domain of TCR clone 83915 (TRBV11-2, TRBJ2-2)
CASRGLAANTGELFF

SEQ ID NO: 167831 - protein, 12 aa, Homo sapiens
  CDR3 for alpha chain variable domain of TCR clone 83916 (TRAV1-1, TRAJ8)
CAGGTGFQKLVF

SEQ ID NO: 167832 - protein, 15 aa, Homo sapiens
  CDR3 for beta chain variable domain of TCR clone 83916 (TRBV7-9, TRBJ1-4)
CDSSRTGGFNEKLFF

SEQ ID NO: 167833 - protein, 14 aa, Homo sapiens
  CDR3 for alpha chain variable domain of TCR clone 83917 (TRAV26-1, TRAJ38)
CIADNAGNNRKLIW

SEQ ID NO: 167834 - protein, 12 aa, Homo sapiens
  CDR3 for beta chain variable domain of TCR clone 83917 (TRBV5-1, TRBJ2-7)
CASSFRGYEQYF

SEQ ID NO: 167835 - protein, 15 aa, Homo sapiens
  CDR3 for alpha chain variable domain of TCR clone 83918 (TRAV38-1, TRAJ37)
CAFIFGSGNTGKLIF

SEQ ID NO: 167836 - protein, 12 aa, Homo sapiens
  CDR3 for beta chain variable domain of TCR clone 83918 (TRBV11-2, TRBJ2-2)
CASSLGGGELFF

SEQ ID NO: 167837 - protein, 13 aa, Homo sapiens
  CDR3 for alpha chain variable domain of TCR clone 83919 (TRAV2, TRAJ20)
CSVEDPSEYKLSF

SEQ ID NO: 167838 - protein, 16 aa, Homo sapiens
  CDR3 for beta chain variable domain of TCR clone 83919 (TRBV25-1, TRBJ2-7)
CASSELTGGGIYEQYF

SEQ ID NO: 167839 - protein, 16 aa, Homo sapiens
  CDR3 for alpha chain variable domain of TCR clone 83920 (TRAV3, TRAJ37)
CAVRPHGSGNTGKLIF

SEQ ID NO: 167840 - protein, 15 aa, Homo sapiens
  CDR3 for beta chain variable domain of TCR clone 83920 (TRBV7-3, TRBJ2-2)
CASSETGQGTGELFF

SEQ ID NO: 167841 - protein, 13 aa, Homo sapiens
  CDR3 for alpha chain variable domain of TCR clone 83921 (TRAV13-1, TRAJ8)
CAASIRGFQKLVF

SEQ ID NO: 167842 - protein, 14 aa, Homo sapiens
  CDR3 for beta chain variable domain of TCR clone 83921 (TRBV7-2, TRBJ2-1)
CASSSVQGRNEQFF

SEQ ID NO: 167843 - protein, 14 aa, Homo sapiens
  CDR3 for alpha chain variable domain of TCR clone 83922 (TRAV9-2, TRAJ36)
CALPWRTGANNLFF

SEQ ID NO: 167844 - protein, 14 aa, Homo sapiens
  CDR3 for beta chain variable domain of TCR clone 83922 (TRBV2, TRBJ1-2)
CAGSELQFNYGYTF

SEQ ID NO: 167845 - protein, 14 aa, Homo sapiens
  CDR3 for alpha chain variable domain of TCR clone 83923 (TRAV13-1, TRAJ44)
CAAKATGTASKLTF

SEQ ID NO: 167846 - protein, 12 aa, Homo sapiens
  CDR3 for beta chain variable domain of TCR clone 83923 (TRBV3-1, TRBJ2-1)
CASGGLGNEQFF

SEQ ID NO: 167847 - protein, 11 aa, Homo sapiens
  CDR3 for alpha chain variable domain of TCR clone 83924 (TRAV1-2, TRAJ20)
CAVSNDYKLSF

SEQ ID NO: 167848 - protein, 14 aa, Homo sapiens
  CDR3 for beta chain variable domain of TCR clone 83924 (TRBV11-2, TRBJ1-2)
CASSLGTANYGYTF

SEQ ID NO: 167849 - protein, 11 aa, Homo sapiens
  CDR3 for alpha chain variable domain of TCR clone 83925 (TRAV12-2, TRAJ30)
CAVGRDDKIIF

SEQ ID NO: 167850 - protein, 18 aa, Homo sapiens
  CDR3 for beta chain variable domain of TCR clone 83925 (TRBV11-2, TRBJ2-3)
CASSLGGASRGAPNTQYF

SEQ ID NO: 167851 - protein, 21 aa, Homo sapiens
  CDR3 for alpha chain variable domain of TCR clone 83926 (TRAV1-1, TRAJ6)
CLLLLRCERLERTGECYIPTF

SEQ ID NO: 167852 - protein, 13 aa, Homo sapiens
  CDR3 for beta chain variable domain of TCR clone 83926 (TRBV10-2, TRBJ2-7)
CASGASGGYEQYF

SEQ ID NO: 167853 - protein, 15 aa, Homo sapiens
  CDR3 for alpha chain variable domain of TCR clone 83927 (TRAV17, TRAJ45)
TSVLRTGGGADELTF

SEQ ID NO: 167854 - protein, 15 aa, Homo sapiens
  CDR3 for beta chain variable domain of TCR clone 83927 (TRBV5-7, TRBJ1-5)
CASSYGKLWDQPQHF

SEQ ID NO: 167855 - protein, 16 aa, Homo sapiens
  CDR3 for alpha chain variable domain of TCR clone 83928 (TRAV3, TRAJ32)
CAVRGNYGGATNKLIF

SEQ ID NO: 167856 - protein, 12 aa, Homo sapiens
  CDR3 for beta chain variable domain of TCR clone 83928 (TRBV20-1, TRBJ1-2)
CSVTPEGYGYTF

SEQ ID NO: 167857 - protein, 12 aa, Homo sapiens
  CDR3 for alpha chain variable domain of TCR clone 83929 (TRAV21, TRAJ49)
CAVRNTGNQSYF

SEQ ID NO: 167858 - protein, 12 aa, Homo sapiens
  CDR3 for beta chain variable domain of TCR clone 83929 (TRBV7-9, TRBJ2-7)
CATRTDAYEQYF

SEQ ID NO: 167859 - protein, 13 aa, Homo sapiens
  CDR3 for alpha chain variable domain of TCR clone 83930 (TRAV12-3, TRAJ9)
CAMRNTGGIKTIF

SEQ ID NO: 167860 - protein, 14 aa, Homo sapiens
  CDR3 for beta chain variable domain of TCR clone 83930 (TRBV11-2, TRBJ2-7)
CASSSTGEGYEQYF

SEQ ID NO: 167861 - protein, 12 aa, Homo sapiens
  CDR3 for alpha chain variable domain of TCR clone 83931 (TRAV1-2, TRAJ33)
CAALDSNYQLIC

SEQ ID NO: 167862 - protein, 13 aa, Homo sapiens
  CDR3 for beta chain variable domain of TCR clone 83931 (TRBV7-2, TRBJ2-7)
CASSFGQEKEQYF

SEQ ID NO: 167863 - protein, 14 aa, Homo sapiens
  CDR3 for alpha chain variable domain of TCR clone 83932 (TRAV12-2, TRAJ23)
CAVGGYNQGGKLIF

SEQ ID NO: 167864 - protein, 13 aa, Homo sapiens
  CDR3 for beta chain variable domain of TCR clone 83932 (TRBV19, TRBJ2-7)
CASSPRQSYEQYF

SEQ ID NO: 167865 - protein, 16 aa, Homo sapiens
  CDR3 for alpha chain variable domain of TCR clone 83933 (TRAV30, TRAJ24)
CGTEIVDAGSWGKFQF

SEQ ID NO: 167866 - protein, 14 aa, Homo sapiens
  CDR3 for beta chain variable domain of TCR clone 83933 (TRBV12-5, TRBJ2-5)
CASGSRTHQETQYL

SEQ ID NO: 167867 - protein, 15 aa, Homo sapiens
  CDR3 for alpha chain variable domain of TCR clone 83934 (TRAV3, TRAJ5)
CAVRDLDTGRRALTF

SEQ ID NO: 167868 - protein, 18 aa, Homo sapiens
  CDR3 for beta chain variable domain of TCR clone 83934 (TRBV25-1, TRBJ1-2)
CASSGLQNGQGLIFGYTF

SEQ ID NO: 167869 - protein, 15 aa, Homo sapiens
  CDR3 for alpha chain variable domain of TCR clone 83935 (TRAV21, TRAJ45)
CAVRYSGGGADGLTF

SEQ ID NO: 167870 - protein, 13 aa, Homo sapiens
  CDR3 for beta chain variable domain of TCR clone 83935 (TRBV20-1, TRBJ2-5)
CSAATELQETQYF

SEQ ID NO: 167871 - protein, 12 aa, Homo sapiens
  CDR3 for alpha chain variable domain of TCR clone 83936 (TRAV12-3, TRAJ5)
CAMDTGRRALTF

SEQ ID NO: 167872 - protein, 12 aa, Homo sapiens
  CDR3 for beta chain variable domain of TCR clone 83936 (TRBV19, TRBJ1-5)
CASSIAQQPQHF

SEQ ID NO: 167873 - protein, 11 aa, Homo sapiens
  CDR3 for alpha chain variable domain of TCR clone 83937 (TRAV16, TRAJ33)
CALHSNYQLIW

SEQ ID NO: 167874 - protein, 15 aa, Homo sapiens
  CDR3 for beta chain variable domain of TCR clone 83937 (TRBV4-1, TRBJ2-7)
CASSHQGQGFDEQYF

SEQ ID NO: 167875 - protein, 10 aa, Homo sapiens
  CDR3 for alpha chain variable domain of TCR clone 83938 (TRAV12-1, TRAJ23)
CVVSGGKLIF

SEQ ID NO: 167876 - protein, 14 aa, Homo sapiens
  CDR3 for beta chain variable domain of TCR clone 83938 (TRBV19, TRBJ1-1)
CASTGHRLNTEAFF

SEQ ID NO: 167877 - protein, 13 aa, Homo sapiens
  CDR3 for alpha chain variable domain of TCR clone 83939 (TRAV14/DV4, TRAJ20)
RAMRESNDYKLSF

SEQ ID NO: 167878 - protein, 15 aa, Homo sapiens
  CDR3 for beta chain variable domain of TCR clone 83939 (TRBV7-9, TRBJ1-1)
CASSRPGTANTEAFF

SEQ ID NO: 167879 - protein, 12 aa, Homo sapiens
  CDR3 for alpha chain variable domain of TCR clone 83940 (TRAV27, TRAJ13)
CAGVRGYQTVTF

SEQ ID NO: 167880 - protein, 16 aa, Homo sapiens
  CDR3 for beta chain variable domain of TCR clone 83940 (TRBV28, TRBJ2-1)
CASSSSYSGSLNEQFF

SEQ ID NO: 167881 - protein, 15 aa, Homo sapiens
  CDR3 for alpha chain variable domain of TCR clone 83941 (TRAV17, TRAJ23)
CATDAEDNQGGKLIF

SEQ ID NO: 167882 - protein, 12 aa, Homo sapiens
  CDR3 for beta chain variable domain of TCR clone 83941 (TRBV2, TRBJ2-1)
CAKREVYNEQFF

SEQ ID NO: 167883 - protein, 15 aa, Homo sapiens
  CDR3 for alpha chain variable domain of TCR clone 83942 (TRAV17, TRAJ36)
CATVSLNWGKQPLLW

SEQ ID NO: 167884 - protein, 13 aa, Homo sapiens
  CDR3 for beta chain variable domain of TCR clone 83942 (TRBV4-1, TRBJ1-1)
CASSQLGTGEAFF

SEQ ID NO: 167885 - protein, 14 aa, Homo sapiens
  CDR3 for alpha chain variable domain of TCR clone 83943 (TRAV12-2, TRAJ9)
CAVNMEGGGFKTIF

SEQ ID NO: 167886 - protein, 14 aa, Homo sapiens
  CDR3 for beta chain variable domain of TCR clone 83943 (TRBV6-6, TRBJ1-5)
CASVDSGFNQPQHF

SEQ ID NO: 167887 - protein, 10 aa, Homo sapiens
  CDR3 for alpha chain variable domain of TCR clone 83944 (TRAV30, TRAJ48)
CGIGTEKLTF

SEQ ID NO: 167888 - protein, 14 aa, Homo sapiens
  CDR3 for beta chain variable domain of TCR clone 83944 (TRBV7-6, TRBJ2-3)
CASSVAGGTDTQYF

SEQ ID NO: 167889 - protein, 16 aa, Homo sapiens
  CDR3 for alpha chain variable domain of TCR clone 83945 (TRAV8-2, TRAJ50)
CVVSDHMKTSYDKVIF

SEQ ID NO: 167890 - protein, 15 aa, Homo sapiens
  CDR3 for beta chain variable domain of TCR clone 83945 (TRBV7-2, TRBJ2-1)
CASSFQAGEYNEQFF

SEQ ID NO: 167891 - protein, 12 aa, Homo sapiens
  CDR3 for alpha chain variable domain of TCR clone 83946 (TRAV25, TRAJ53)
CQSGGSSYKLTF

SEQ ID NO: 167892 - protein, 15 aa, Homo sapiens
  CDR3 for beta chain variable domain of TCR clone 83946 (TRBV5-1, TRBJ2-2)
CASSWTSPNTGELFF

SEQ ID NO: 167893 - protein, 20 aa, Homo sapiens
  CDR3 for alpha chain variable domain of TCR clone 83947 (TRAV1-1, TRAJ4)
CLLLLRCEGFLSGGYNKLIF

SEQ ID NO: 167894 - protein, 16 aa, Homo sapiens
  CDR3 for beta chain variable domain of TCR clone 83947 (TRBV28, TRBJ2-7)
CASSSGTSGRGYEQYF

SEQ ID NO: 167895 - protein, 13 aa, Homo sapiens
  CDR3 for alpha chain variable domain of TCR clone 83948 (TRAV17, TRAJ26)
CATVDNYSQNFVF

SEQ ID NO: 167896 - protein, 16 aa, Homo sapiens
  CDR3 for beta chain variable domain of TCR clone 83948 (TRBV2, TRBJ2-1)
CASSVGGSLSYNEQFF

SEQ ID NO: 167897 - protein, 11 aa, Homo sapiens
  CDR3 for alpha chain variable domain of TCR clone 83949 (TRAV12-2, TRAJ31)
CAVTRWARLMF

SEQ ID NO: 167898 - protein, 15 aa, Homo sapiens
  CDR3 for beta chain variable domain of TCR clone 83949 (TRBV19, TRBJ2-7)
CASSIGGGLVNERYF

SEQ ID NO: 167899 - protein, 14 aa, Homo sapiens
  CDR3 for alpha chain variable domain of TCR clone 83950 (TRAV17, TRAJ57)
CATDPQGGPEKLVF

SEQ ID NO: 167900 - protein, 13 aa, Homo sapiens
  CDR3 for beta chain variable domain of TCR clone 83950 (TRBV19, TRBJ2-7)
CASSPRQSYEQYF

SEQ ID NO: 167901 - protein, 15 aa, Homo sapiens
  CDR3 for alpha chain variable domain of TCR clone 83951 (TRAV21, TRAJ53)
CAVRQSGGSNYKLTF

SEQ ID NO: 167902 - protein, 12 aa, Homo sapiens
  CDR3 for beta chain variable domain of TCR clone 83951 (TRBV11-2, TRBJ2-2)
CASSLGGGELFF

SEQ ID NO: 167903 - protein, 10 aa, Homo sapiens
  CDR3 for alpha chain variable domain of TCR clone 83952 (TRAV12-2, TRAJ22)
CAVSETQLTF

SEQ ID NO: 167904 - protein, 13 aa, Homo sapiens
  CDR3 for beta chain variable domain of TCR clone 83952 (TRBV6-5, TRBJ2-6)
CASSTSGPLRLDF

SEQ ID NO: 167905 - protein, 11 aa, Homo sapiens
  CDR3 for alpha chain variable domain of TCR clone 83953 (TRAV12-2, TRAJ29)
CAVTLRSPLVF

SEQ ID NO: 167906 - protein, 16 aa, Homo sapiens
  CDR3 for beta chain variable domain of TCR clone 83953 (TRBV19, TRBJ1-5)
CASSIDRGGPRQAQHF

SEQ ID NO: 167907 - protein, 14 aa, Homo sapiens
  CDR3 for alpha chain variable domain of TCR clone 83954 (TRAV1-2, TRAJ16)
CAVNRFSDGQKLLF

SEQ ID NO: 167908 - protein, 16 aa, Homo sapiens
  CDR3 for beta chain variable domain of TCR clone 83954 (TRBV15, TRBJ2-3)
CATSRDLGIVTDTQYF

SEQ ID NO: 167909 - protein, 13 aa, Homo sapiens
  CDR3 for alpha chain variable domain of TCR clone 83955 (TRAV12-1, TRAJ40)
CVVPTSGTYQYIF

SEQ ID NO: 167910 - protein, 18 aa, Homo sapiens
  CDR3 for beta chain variable domain of TCR clone 83955 (TRBV7-6, TRBJ2-1)
CASSPRTSGMSSYNEQFF

SEQ ID NO: 167911 - protein, 12 aa, Homo sapiens
  CDR3 for alpha chain variable domain of TCR clone 83956 (TRAV4, TRAJ26)
CLVGDYGQNFVF

SEQ ID NO: 167912 - protein, 13 aa, Homo sapiens
  CDR3 for beta chain variable domain of TCR clone 83956 (TRBV7-9, TRBJ2-7)
CASSFAGAYEQYF

SEQ ID NO: 167913 - protein, 14 aa, Homo sapiens
  CDR3 for alpha chain variable domain of TCR clone 83957 (TRAV1-2, TRAJ16)
CAVNRFSDSQKLLF

SEQ ID NO: 167914 - protein, 13 aa, Homo sapiens
  CDR3 for beta chain variable domain of TCR clone 83957 (TRBV18, TRBJ2-5)
CASSPAGKETQYF

SEQ ID NO: 167915 - protein, 15 aa, Homo sapiens
  CDR3 for alpha chain variable domain of TCR clone 83958 (TRAV25, TRAJ53)
CPTSNSGGSNYKLTF

SEQ ID NO: 167916 - protein, 14 aa, Homo sapiens
  CDR3 for beta chain variable domain of TCR clone 83958 (TRBV6-1, TRBJ1-3)
CASVQGGGGNTIYF

SEQ ID NO: 167917 - protein, 13 aa, Homo sapiens
  CDR3 for alpha chain variable domain of TCR clone 83959 (TRAV13-1, TRAJ6)
CAASKGGCYIPTF

SEQ ID NO: 167918 - protein, 14 aa, Homo sapiens
  CDR3 for beta chain variable domain of TCR clone 83959 (TRBV7-2, TRBJ2-1)
CASSLGVGYNEQFF

SEQ ID NO: 167919 - protein, 11 aa, Homo sapiens
  CDR3 for alpha chain variable domain of TCR clone 83960 (TRAV26-1, TRAJ37)
CIVRVGGKLIF

SEQ ID NO: 167920 - protein, 13 aa, Homo sapiens
  CDR3 for beta chain variable domain of TCR clone 83960 (TRBV14, TRBJ1-2)
CASSEDRRYGYTF

SEQ ID NO: 167921 - protein, 14 aa, Homo sapiens
  CDR3 for alpha chain variable domain of TCR clone 83961 (TRAV12-1, TRAJ13)
CVVIDSGGYKKVTF

SEQ ID NO: 167922 - protein, 12 aa, Homo sapiens
  CDR3 for beta chain variable domain of TCR clone 83961 (TRBV29-1, TRBJ2-3)
CSVTGGADTQYF

SEQ ID NO: 167923 - protein, 17 aa, Homo sapiens
  CDR3 for alpha chain variable domain of TCR clone 83962 (TRAV13-1, TRAJ52)
CAAGRNAGGTSYGKLTF

SEQ ID NO: 167924 - protein, 16 aa, Homo sapiens
  CDR3 for beta chain variable domain of TCR clone 83962 (TRBV5-1, TRBJ2-7)
CASSLEGLAGLYEQYF

SEQ ID NO: 167925 - protein, 14 aa, Homo sapiens
  CDR3 for alpha chain variable domain of TCR clone 83963 (TRAV35, TRAJ22)
CAGLRPGSARQLTF

SEQ ID NO: 167926 - protein, 15 aa, Homo sapiens
  CDR3 for beta chain variable domain of TCR clone 83963 (TRBV20-1, TRBJ1-1)
CSARGGGTLKLSLDK

SEQ ID NO: 167927 - protein, 12 aa, Homo sapiens
  CDR3 for alpha chain variable domain of TCR clone 83964 (TRAV12-3, TRAJ42)
CAPGGSQGNLIF

SEQ ID NO: 167928 - protein, 13 aa, Homo sapiens
  CDR3 for beta chain variable domain of TCR clone 83964 (TRBV5-7, TRBJ2-6)
CASTSSGANILTF

SEQ ID NO: 167929 - protein, 13 aa, Homo sapiens
  CDR3 for alpha chain variable domain of TCR clone 83965 (TRAV17, TRAJ21)
CATDGGNFNKFYF

SEQ ID NO: 167930 - protein, 17 aa, Homo sapiens
  CDR3 for beta chain variable domain of TCR clone 83965 (TRBV13, TRBJ2-3)
CASSLSRVAGGRNTQYF

SEQ ID NO: 167931 - protein, 14 aa, Homo sapiens
  CDR3 for alpha chain variable domain of TCR clone 83966 (TRAV26-1, TRAJ39)
CIVRGSRAGNMLTF

SEQ ID NO: 167932 - protein, 13 aa, Homo sapiens
  CDR3 for beta chain variable domain of TCR clone 83966 (TRBV18, TRBJ1-1)
CASSPETKPEAFF

SEQ ID NO: 167933 - protein, 10 aa, Homo sapiens
  CDR3 for alpha chain variable domain of TCR clone 83967 (TRAV13-1, TRAJ8)
CAAPFQKLVF

SEQ ID NO: 167934 - protein, 13 aa, Homo sapiens
  CDR3 for beta chain variable domain of TCR clone 83967 (TRBV2, TRBJ1-1)
CASRWTVNTEAFF

SEQ ID NO: 167935 - protein, 17 aa, Homo sapiens
  CDR3 for alpha chain variable domain of TCR clone 83968 (TRAV3, TRAJ6)
CAVRDGPRVGGSYIPTL

SEQ ID NO: 167936 - protein, 12 aa, Homo sapiens
  CDR3 for beta chain variable domain of TCR clone 83968 (TRBV11-2, TRBJ2-2)
CASSLGGGELFF

SEQ ID NO: 167937 - protein, 13 aa, Homo sapiens
  CDR3 for alpha chain variable domain of TCR clone 83969 (TRAV12-2, TRAJ20)
CAVYPSNDYKLSF

SEQ ID NO: 167938 - protein, 15 aa, Homo sapiens
  CDR3 for beta chain variable domain of TCR clone 83969 (TRBV20-1, TRBJ1-1)
CSASRGVTGNTEAFF

SEQ ID NO: 167939 - protein, 16 aa, Homo sapiens
  CDR3 for alpha chain variable domain of TCR clone 83970 (TRAV1-2, TRAJ10)
CAVGGVLTGGGNKLTF

SEQ ID NO: 167940 - protein, 15 aa, Homo sapiens
  CDR3 for beta chain variable domain of TCR clone 83970 (TRBV7-2, TRBJ2-1)
CASTHGTGIYNEQFF

SEQ ID NO: 167941 - protein, 11 aa, Homo sapiens
  CDR3 for alpha chain variable domain of TCR clone 83971 (TRAV12-1, TRAJ30)
CVVNGQDKIIF

SEQ ID NO: 167942 - protein, 15 aa, Homo sapiens
  CDR3 for beta chain variable domain of TCR clone 83971 (TRBV18, TRBJ1-6)
CASSPGGGVNSPLHF

SEQ ID NO: 167943 - protein, 14 aa, Homo sapiens
  CDR3 for alpha chain variable domain of TCR clone 83972 (TRAV27, TRAJ17)
CRSTIRAAGTKLTF

SEQ ID NO: 167944 - protein, 16 aa, Homo sapiens
  CDR3 for beta chain variable domain of TCR clone 83972 (TRBV5-7, TRBJ2-5)
CASTLAPAGGRETQYF

SEQ ID NO: 167945 - protein, 17 aa, Homo sapiens
  CDR3 for alpha chain variable domain of TCR clone 83973 (TRAV3, TRAJ6)
CAVRDGPRAGGSYIPTF

SEQ ID NO: 167946 - protein, 15 aa, Homo sapiens
  CDR3 for beta chain variable domain of TCR clone 83973 (TRBV7-6, TRBJ2-3)
CASSPIIYSTDTQYF

SEQ ID NO: 167947 - protein, 12 aa, Homo sapiens
  CDR3 for alpha chain variable domain of TCR clone 83974 (TRAV8-6, TRAJ36)
CAVSDWLGQTTS

SEQ ID NO: 167948 - protein, 11 aa, Homo sapiens
  CDR3 for beta chain variable domain of TCR clone 83974 (TRBV29-1, TRBJ2-5)
CSEDRTGTQYF

SEQ ID NO: 167949 - protein, 13 aa, Homo sapiens
  CDR3 for alpha chain variable domain of TCR clone 83975 (TRAV29/DV5, TRAJ49)
CAASTNTGNQFYF

SEQ ID NO: 167950 - protein, 13 aa, Homo sapiens
  CDR3 for beta chain variable domain of TCR clone 83975 (TRBV20-1, TRBJ2-2)
CSASAAGTGELFF

SEQ ID NO: 167951 - protein, 13 aa, Homo sapiens
  CDR3 for alpha chain variable domain of TCR clone 83976 (TRAV17, TRAJ9)
WATDYTGGFKTIF

SEQ ID NO: 167952 - protein, 14 aa, Homo sapiens
  CDR3 for beta chain variable domain of TCR clone 83976 (TRBV19, TRBJ2-5)
CASSMTGQQETQYF

SEQ ID NO: 167953 - protein, 16 aa, Homo sapiens
  CDR3 for alpha chain variable domain of TCR clone 83977 (TRAV12-2, TRAJ18)
CAVTTDRGSTLGRLYF

SEQ ID NO: 167954 - protein, 12 aa, Homo sapiens
  CDR3 for beta chain variable domain of TCR clone 83977 (TRBV11-2, TRBJ2-2)
CASSLPTGELFF

SEQ ID NO: 167955 - protein, 17 aa, Homo sapiens
  CDR3 for alpha chain variable domain of TCR clone 83978 (TRAV23/DV6, TRAJ57)
CAASSTLSQGGSEKLVF

SEQ ID NO: 167956 - protein, 15 aa, Homo sapiens
  CDR3 for beta chain variable domain of TCR clone 83978 (TRBV7-9, TRBJ1-5)
CASSQGHQPNQPQHF

SEQ ID NO: 167957 - protein, 12 aa, Homo sapiens
  CDR3 for alpha chain variable domain of TCR clone 83979 (TRAV1-1, TRAJ33)
CAASDSNYQLIW

SEQ ID NO: 167958 - protein, 18 aa, Homo sapiens
  CDR3 for beta chain variable domain of TCR clone 83979 (TRBV20-1, TRBJ2-2)
CSARVQKARPSGTGELFF

SEQ ID NO: 167959 - protein, 18 aa, Homo sapiens
  CDR3 for alpha chain variable domain of TCR clone 83980 (TRAV13-1, TRAJ10)
CAASNGRAVTGGGNKLTF

SEQ ID NO: 167960 - protein, 14 aa, Homo sapiens
  CDR3 for beta chain variable domain of TCR clone 83980 (TRBV18, TRBJ2-7)
CASSPRGGAYEQYF

SEQ ID NO: 167961 - protein, 13 aa, Homo sapiens
  CDR3 for alpha chain variable domain of TCR clone 83981 (TRAV20, TRAJ37)
CAGCSSKTGKLIF

SEQ ID NO: 167962 - protein, 14 aa, Homo sapiens
  CDR3 for beta chain variable domain of TCR clone 83981 (TRBV20-1, TRBJ2-5)
CSARDGRAGETQYF

SEQ ID NO: 167963 - protein, 12 aa, Homo sapiens
  CDR3 for alpha chain variable domain of TCR clone 83982 (TRAV3, TRAJ39)
CAVIECSNMLTF

SEQ ID NO: 167964 - protein, 14 aa, Homo sapiens
  CDR3 for beta chain variable domain of TCR clone 83982 (TRBV7-8, TRBJ2-3)
CASSFPDGQDTQYF

SEQ ID NO: 167965 - protein, 13 aa, Homo sapiens
  CDR3 for alpha chain variable domain of TCR clone 83983 (TRAV23/DV6, TRAJ41)
CAAIGDSGYALNF

SEQ ID NO: 167966 - protein, 13 aa, Homo sapiens
  CDR3 for beta chain variable domain of TCR clone 83983 (TRBV28, TRBJ2-5)
CASSWGTQETQYF

SEQ ID NO: 167967 - protein, 17 aa, Homo sapiens
  CDR3 for alpha chain variable domain of TCR clone 83984 (TRAV38-2/DV8, TRAJ45)
CAYRSRYSGGGADGLTL

SEQ ID NO: 167968 - protein, 15 aa, Homo sapiens
  CDR3 for beta chain variable domain of TCR clone 83984 (TRBV19, TRBJ2-1)
CASIKGRGPYNEQFF

SEQ ID NO: 167969 - protein, 13 aa, Homo sapiens
  CDR3 for alpha chain variable domain of TCR clone 83985 (TRAV13-1, TRAJ5)
CAASDTGRRALTF

SEQ ID NO: 167970 - protein, 15 aa, Homo sapiens
  CDR3 for beta chain variable domain of TCR clone 83985 (TRBV28, TRBJ1-2)
CASTRPGIMAYGYTF

SEQ ID NO: 167971 - protein, 23 aa, Homo sapiens
  CDR3 for alpha chain variable domain of TCR clone 83986 (TRAV8-6, TRAJ38)
CAVRNAGNNHIQNPDPAVYQLRD

SEQ ID NO: 167972 - protein, 15 aa, Homo sapiens
  CDR3 for beta chain variable domain of TCR clone 83986 (TRBV7-9, TRBJ1-4)
CASSRTGGFNEKLFF

SEQ ID NO: 167973 - protein, 12 aa, Homo sapiens
  CDR3 for alpha chain variable domain of TCR clone 83987 (TRAV12-3, TRAJ17)
CAMTLTGNKLTF

SEQ ID NO: 167974 - protein, 15 aa, Homo sapiens
  CDR3 for beta chain variable domain of TCR clone 83987 (TRBV11-3, TRBJ2-3)
CASSAGTVVTNTQYF

SEQ ID NO: 167975 - protein, 19 aa, Homo sapiens
  CDR3 for alpha chain variable domain of TCR clone 83988 (TRAV1-2, TRAJ26)
CLLPLCCERPDNYGQNFVF

SEQ ID NO: 167976 - protein, 15 aa, Homo sapiens
  CDR3 for beta chain variable domain of TCR clone 83988 (TRBV9, TRBJ1-6)
CASSVAGTGDSPLLF

SEQ ID NO: 167977 - protein, 19 aa, Homo sapiens
  CDR3 for alpha chain variable domain of TCR clone 83989 (TRAV26-1, TRAJ52)
CIVRAHRNAGGTSYGKLTF

SEQ ID NO: 167978 - protein, 16 aa, Homo sapiens
  CDR3 for beta chain variable domain of TCR clone 83989 (TRBV19, TRBJ2-1)
CASSKAGPSSYNEQFF

SEQ ID NO: 167979 - protein, 14 aa, Homo sapiens
  CDR3 for alpha chain variable domain of TCR clone 83990 (TRAV1-2, TRAJ8)
CAVREDTGFQKLVF

SEQ ID NO: 167980 - protein, 16 aa, Homo sapiens
  CDR3 for beta chain variable domain of TCR clone 83990 (TRBV29-1, TRBJ1-2)
CSVEANWDIANYGYTF

SEQ ID NO: 167981 - protein, 15 aa, Homo sapiens
  CDR3 for alpha chain variable domain of TCR clone 83991 (TRAV8-3, TRAJ45)
CASSYSGGGADGLTF

SEQ ID NO: 167982 - protein, 17 aa, Homo sapiens
  CDR3 for beta chain variable domain of TCR clone 83991 (TRBV18, TRBJ2-2)
CASSPSDPWQNTGELFF

SEQ ID NO: 167983 - protein, 14 aa, Homo sapiens
  CDR3 for alpha chain variable domain of TCR clone 83992 (TRAV17, TRAJ54)
CATDANQGAQKLVF

SEQ ID NO: 167984 - protein, 12 aa, Homo sapiens
  CDR3 for beta chain variable domain of TCR clone 83992 (TRBV11-2, TRBJ2-2)
CASSLGGGELFF

SEQ ID NO: 167985 - protein, 12 aa, Homo sapiens
  CDR3 for alpha chain variable domain of TCR clone 83993 (TRAV21, TRAJ33)
CAKMDSNYQLIW

SEQ ID NO: 167986 - protein, 14 aa, Homo sapiens
  CDR3 for beta chain variable domain of TCR clone 83993 (TRBV7-6, TRBJ2-3)
CASSLGTVTDTQYF

SEQ ID NO: 167987 - protein, 13 aa, Homo sapiens
  CDR3 for alpha chain variable domain of TCR clone 83994 (TRAV8-4, TRAJ30)
CAVSVNRDDEIIF

SEQ ID NO: 167988 - protein, 13 aa, Homo sapiens
  CDR3 for beta chain variable domain of TCR clone 83994 (TRBV3-1, TRBJ2-2)
CASLARGSGELFF

SEQ ID NO: 167989 - protein, 15 aa, Homo sapiens
  CDR3 for alpha chain variable domain of TCR clone 83995 (TRAV8-4, TRAJ47)
CAVSDPEEYGNKRVF

SEQ ID NO: 167990 - protein, 15 aa, Homo sapiens
  CDR3 for beta chain variable domain of TCR clone 83995 (TRBV11-2, TRBJ2-1)
CASSLGPDSYNEQFF

SEQ ID NO: 167991 - protein, 18 aa, Homo sapiens
  CDR3 for alpha chain variable domain of TCR clone 83996 (TRAV21, TRAJ52)
CAVRTSPAGGTSYGKLTF

SEQ ID NO: 167992 - protein, 11 aa, Homo sapiens
  CDR3 for beta chain variable domain of TCR clone 83996 (TRBV12-4, TRBJ2-3)
CASTATDTQYF

SEQ ID NO: 167993 - protein, 14 aa, Homo sapiens
  CDR3 for alpha chain variable domain of TCR clone 83997 (TRAV22, TRAJ6)
CAGVGPGGSYIPTF

SEQ ID NO: 167994 - protein, 13 aa, Homo sapiens
  CDR3 for beta chain variable domain of TCR clone 83997 (TRBV7-9, TRBJ1-2)
CASSLKQNYGYTF

SEQ ID NO: 167995 - protein, 16 aa, Homo sapiens
  CDR3 for alpha chain variable domain of TCR clone 83998 (TRAV30, TRAJ24)
CGTEIVDADGWGKFQF

SEQ ID NO: 167996 - protein, 14 aa, Homo sapiens
  CDR3 for beta chain variable domain of TCR clone 83998 (TRBV7-9, TRBJ2-4)
CASSLAMGGNIQYF

SEQ ID NO: 167997 - protein, 15 aa, Homo sapiens
  CDR3 for alpha chain variable domain of TCR clone 83999 (TRAV1-2, TRAJ17)
CAVRGYGAAGNRLTF

SEQ ID NO: 167998 - protein, 23 aa, Homo sapiens
  CDR3 for beta chain variable domain of TCR clone 83999 (TRBV11-2, TRBJ2-5)
CASSSPGGEGAASRGPVLRARHA

SEQ ID NO: 167999 - protein, 14 aa, Homo sapiens
  CDR3 for alpha chain variable domain of TCR clone 84000 (TRAV23/DV6, TRAJ37)
CAASTSSNTGKIIF

SEQ ID NO: 168000 - protein, 13 aa, Homo sapiens
  CDR3 for beta chain variable domain of TCR clone 84000 (TRBV7-7, TRBJ1-1)
CASSLGANTEAFF

SEQ ID NO: 168001 - protein, 14 aa, Homo sapiens
  CDR3 for alpha chain variable domain of TCR clone 84001 (TRAV17, TRAJ57)
CATDPQGGSEKLVF

SEQ ID NO: 168002 - protein, 13 aa, Homo sapiens
  CDR3 for beta chain variable domain of TCR clone 84001 (TRBV11-2, TRBJ2-5)
CASSSTGEETQYF

SEQ ID NO: 168003 - protein, 18 aa, Homo sapiens
  CDR3 for alpha chain variable domain of TCR clone 84002 (TRAV12-3, TRAJ52)
CAMSRTNAGGTSYGKLTF

SEQ ID NO: 168004 - protein, 16 aa, Homo sapiens
  CDR3 for beta chain variable domain of TCR clone 84002 (TRBV7-3, TRBJ2-2)
CASSLKRGTLSGELFF

SEQ ID NO: 168005 - protein, 12 aa, Homo sapiens
  CDR3 for alpha chain variable domain of TCR clone 84003 (TRAV3, TRAJ31)
CAVRDGNARLMF

SEQ ID NO: 168006 - protein, 18 aa, Homo sapiens
  CDR3 for beta chain variable domain of TCR clone 84003 (TRBV7-2, TRBJ2-3)
WASSLKREGSGITDTQYF

SEQ ID NO: 168007 - protein, 14 aa, Homo sapiens
  CDR3 for alpha chain variable domain of TCR clone 84004 (TRAV16, TRAJ32)
CALKSGGATNKLIF

SEQ ID NO: 168008 - protein, 13 aa, Homo sapiens
  CDR3 for beta chain variable domain of TCR clone 84004 (TRBV11-2, TRBJ2-1)
CASSLRLTHEQFF

SEQ ID NO: 168009 - protein, 13 aa, Homo sapiens
  CDR3 for alpha chain variable domain of TCR clone 84005 (TRAV3, TRAJ20)
CAVRDTPRYKLSF

SEQ ID NO: 168010 - protein, 16 aa, Homo sapiens
  CDR3 for beta chain variable domain of TCR clone 84005 (TRBV20-1, TRBJ2-7)
CSARAPGIALSYEQYF

SEQ ID NO: 168011 - protein, 14 aa, Homo sapiens
  CDR3 for alpha chain variable domain of TCR clone 84006 (TRAV3, TRAJ28)
CAVRRGTGSYQLTF

SEQ ID NO: 168012 - protein, 16 aa, Homo sapiens
  CDR3 for beta chain variable domain of TCR clone 84006 (TRBV4-1, TRBJ2-7)
CASSQEWTSGPLEQYF

SEQ ID NO: 168013 - protein, 13 aa, Homo sapiens
  CDR3 for alpha chain variable domain of TCR clone 84007 (TRAV8-3, TRAJ36)
CAVGATGANNLFF

SEQ ID NO: 168014 - protein, 16 aa, Homo sapiens
  CDR3 for beta chain variable domain of TCR clone 84007 (TRBV13, TRBJ2-2)
CASSPRTGEHTGELFF

SEQ ID NO: 168015 - protein, 10 aa, Homo sapiens
  CDR3 for alpha chain variable domain of TCR clone 84008 (TRAV1-2, TRAJ31)
CVSEDASLMF

SEQ ID NO: 168016 - protein, 14 aa, Homo sapiens
  CDR3 for beta chain variable domain of TCR clone 84008 (TRBV19, TRBJ2-1)
CASPTFVLSGEQFF

SEQ ID NO: 168017 - protein, 12 aa, Homo sapiens
  CDR3 for alpha chain variable domain of TCR clone 84009 (TRAV8-3, TRAJ41)
CAVGALGYALNF

SEQ ID NO: 168018 - protein, 16 aa, Homo sapiens
  CDR3 for beta chain variable domain of TCR clone 84009 (TRBV7-6, TRBJ2-3)
CASSDSRGEGTETQYF

SEQ ID NO: 168019 - protein, 12 aa, Homo sapiens
  CDR3 for alpha chain variable domain of TCR clone 84010 (TRAV12-3, TRAJ17)
CAMTLTGNRLTF

SEQ ID NO: 168020 - protein, 15 aa, Homo sapiens
  CDR3 for beta chain variable domain of TCR clone 84010 (TRBV20-1, TRBJ2-7)
CSARDRVSGMDEQCF

SEQ ID NO: 168021 - protein, 23 aa, Homo sapiens
  CDR3 for alpha chain variable domain of TCR clone 84011 (TRAV26-1, TRAJ38)
CIADNAGNNHIQNPDPAVYKLRD

SEQ ID NO: 168022 - protein, 12 aa, Homo sapiens
  CDR3 for beta chain variable domain of TCR clone 84011 (TRBV11-2, TRBJ2-2)
CASSLGGGELFF

SEQ ID NO: 168023 - protein, 13 aa, Homo sapiens
  CDR3 for alpha chain variable domain of TCR clone 84012 (TRAV38-2/DV8, TRAJ34)
CAYRNYNTDKLIF

SEQ ID NO: 168024 - protein, 15 aa, Homo sapiens
  CDR3 for beta chain variable domain of TCR clone 84012 (TRBV20-1, TRBJ2-5)
YSAEGTGGLQETQYF

SEQ ID NO: 168025 - protein, 10 aa, Homo sapiens
  CDR3 for alpha chain variable domain of TCR clone 84013 (TRAV13-2, TRAJ15)
CNQAGTALIF

SEQ ID NO: 168026 - protein, 14 aa, Homo sapiens
  CDR3 for beta chain variable domain of TCR clone 84013 (TRBV7-9, TRBJ2-1)
CASSDNSGYNEQFF

SEQ ID NO: 168027 - protein, 16 aa, Homo sapiens
  CDR3 for alpha chain variable domain of TCR clone 84014 (TRAV3, TRAJ5)
CVVRNLMDTGRRALTF

SEQ ID NO: 168028 - protein, 16 aa, Homo sapiens
  CDR3 for beta chain variable domain of TCR clone 84014 (TRBV4-2, TRBJ2-7)
CASSQEGLANSYEQYF

SEQ ID NO: 168029 - protein, 16 aa, Homo sapiens
  CDR3 for alpha chain variable domain of TCR clone 84015 (TRAV12-3, TRAJ53)
CAMSPGSGGSNYKLTF

SEQ ID NO: 168030 - protein, 15 aa, Homo sapiens
  CDR3 for beta chain variable domain of TCR clone 84015 (TRBV11-2, TRBJ2-2)
CASSSDRVNAGELFF

SEQ ID NO: 168031 - protein, 15 aa, Homo sapiens
  CDR3 for alpha chain variable domain of TCR clone 84016 (TRAV12-2, TRAJ52)
CAAPGGGTSYGKLTF

SEQ ID NO: 168032 - protein, 13 aa, Homo sapiens
  CDR3 for beta chain variable domain of TCR clone 84016 (TRBV12-4, TRBJ1-1)
CASSPGTGFEAFF

SEQ ID NO: 168033 - protein, 14 aa, Homo sapiens
  CDR3 for alpha chain variable domain of TCR clone 84017 (TRAV12-1, TRAJ13)
CVVIDSGGYQKVTF

SEQ ID NO: 168034 - protein, 17 aa, Homo sapiens
  CDR3 for beta chain variable domain of TCR clone 84017 (TRBV15, TRBJ1-5)
CATSRAPPGTRDQPQHF

SEQ ID NO: 168035 - protein, 17 aa, Homo sapiens
  CDR3 for alpha chain variable domain of TCR clone 84018 (TRAV3, TRAJ38)
CAVRDCLNAGNNRKLIW

SEQ ID NO: 168036 - protein, 17 aa, Homo sapiens
  CDR3 for beta chain variable domain of TCR clone 84018 (TRBV18, TRBJ2-1)
CASSKGLSGGADNEQFF

SEQ ID NO: 168037 - protein, 14 aa, Homo sapiens
  CDR3 for alpha chain variable domain of TCR clone 84019 (TRAV12-2, TRAJ40)
CAVKIPSGTYKYIF

SEQ ID NO: 168038 - protein, 20 aa, Homo sapiens
  CDR3 for beta chain variable domain of TCR clone 84019 (TRBV7-8, TRBJ2-2)
RASSHLFPGPTIHITGELFF

SEQ ID NO: 168039 - protein, 13 aa, Homo sapiens
  CDR3 for alpha chain variable domain of TCR clone 84020 (TRAV27, TRAJ29)
CAGAHSGNTPLVF

SEQ ID NO: 168040 - protein, 14 aa, Homo sapiens
  CDR3 for beta chain variable domain of TCR clone 84020 (TRBV12-4, TRBJ2-7)
CASSFSGADYEQYF

SEQ ID NO: 168041 - protein, 18 aa, Homo sapiens
  CDR3 for alpha chain variable domain of TCR clone 84021 (TRAV9-2, TRAJ52)
CALSRHNAVGTSYGKLTF

SEQ ID NO: 168042 - protein, 13 aa, Homo sapiens
  CDR3 for beta chain variable domain of TCR clone 84021 (TRBV7-9, TRBJ1-2)
CASSLKQNYGYTF

SEQ ID NO: 168043 - protein, 11 aa, Homo sapiens
  CDR3 for alpha chain variable domain of TCR clone 84022 (TRAV12-1, TRAJ30)
CVVNGQDKIIF

SEQ ID NO: 168044 - protein, 13 aa, Homo sapiens
  CDR3 for beta chain variable domain of TCR clone 84022 (TRBV7-6, TRBJ1-2)
CASSLVADYGYTF

SEQ ID NO: 168045 - protein, 11 aa, Homo sapiens
  CDR3 for alpha chain variable domain of TCR clone 84023 (TRAV2, TRAJ33)
CAVDSNYQLIW

SEQ ID NO: 168046 - protein, 15 aa, Homo sapiens
  CDR3 for beta chain variable domain of TCR clone 84023 (TRBV19, TRBJ1-2)
CASSVGQVRNYGYTF

SEQ ID NO: 168047 - protein, 14 aa, Homo sapiens
  CDR3 for alpha chain variable domain of TCR clone 84024 (TRAV29/DV5, TRAJ36)
CAARRKTGANNLFF

SEQ ID NO: 168048 - protein, 15 aa, Homo sapiens
  CDR3 for beta chain variable domain of TCR clone 84024 (TRBV4-1, TRBJ2-7)
CASSQNTGRLYEQYF

SEQ ID NO: 168049 - protein, 12 aa, Homo sapiens
  CDR3 for alpha chain variable domain of TCR clone 84025 (TRAV8-3, TRAJ41)
CAVGALGHALNF

SEQ ID NO: 168050 - protein, 16 aa, Homo sapiens
  CDR3 for beta chain variable domain of TCR clone 84025 (TRBV7-6, TRBJ2-3)
CASSDSRGEGTDTQYF

SEQ ID NO: 168051 - protein, 16 aa, Homo sapiens
  CDR3 for alpha chain variable domain of TCR clone 84026 (TRAV21, TRAJ37)
CAVRTAGSSNTRKLIF

SEQ ID NO: 168052 - protein, 13 aa, Homo sapiens
  CDR3 for beta chain variable domain of TCR clone 84026 (TRBV7-9, TRBJ2-5)
CASLPSGRETQYF

SEQ ID NO: 168053 - protein, 12 aa, Homo sapiens
  CDR3 for alpha chain variable domain of TCR clone 84027 (TRAV21, TRAJ13)
PGPSGGYQKVTF

SEQ ID NO: 168054 - protein, 15 aa, Homo sapiens
  CDR3 for beta chain variable domain of TCR clone 84027 (TRBV7-9, TRBJ1-6)
CASSSPGRGNSPLHV

SEQ ID NO: 168055 - protein, 17 aa, Homo sapiens
  CDR3 for alpha chain variable domain of TCR clone 84028 (TRAV12-3, TRAJ18)
CAMIRADRGSTLGRLYF

SEQ ID NO: 168056 - protein, 14 aa, Homo sapiens
  CDR3 for beta chain variable domain of TCR clone 84028 (TRBV5-7, TRBJ1-6)
CASTPWTADSPLHF

SEQ ID NO: 168057 - protein, 14 aa, Homo sapiens
  CDR3 for alpha chain variable domain of TCR clone 84029 (TRAV23/DV6, TRAJ49)
CAASTPNTVNQFYF

SEQ ID NO: 168058 - protein, 14 aa, Homo sapiens
  CDR3 for beta chain variable domain of TCR clone 84029 (TRBV18, TRBJ2-3)
CASSETSASDTQYF

SEQ ID NO: 168059 - protein, 11 aa, Homo sapiens
  CDR3 for alpha chain variable domain of TCR clone 84030 (TRAV3, TRAJ13)
CAVTSYPKVTF

SEQ ID NO: 168060 - protein, 15 aa, Homo sapiens
  CDR3 for beta chain variable domain of TCR clone 84030 (TRBV7-9, TRBJ2-7)
CASSSSGLAVYEQYF

SEQ ID NO: 168061 - protein, 13 aa, Homo sapiens
  CDR3 for alpha chain variable domain of TCR clone 84031 (TRAV38-1, TRAJ20)
CAFMRDKDYKLSF

SEQ ID NO: 168062 - protein, 12 aa, Homo sapiens
  CDR3 for beta chain variable domain of TCR clone 84031 (TRBV18, TRBJ2-5)
CASSPSKETQYF

SEQ ID NO: 168063 - protein, 12 aa, Homo sapiens
  CDR3 for alpha chain variable domain of TCR clone 84032 (TRAV12-1, TRAJ40)
CVVYSGTYKYIF

SEQ ID NO: 168064 - protein, 14 aa, Homo sapiens
  CDR3 for beta chain variable domain of TCR clone 84032 (TRBV7-9, TRBJ2-5)
CASSSDTAQETQYF

SEQ ID NO: 168065 - protein, 14 aa, Homo sapiens
  CDR3 for alpha chain variable domain of TCR clone 84033 (TRAV26-1, TRAJ38)
CIADNAGNNRKLIW

SEQ ID NO: 168066 - protein, 13 aa, Homo sapiens
  CDR3 for beta chain variable domain of TCR clone 84033 (TRBV15, TRBJ1-6)
CATSGGLNSPLHF

SEQ ID NO: 168067 - protein, 16 aa, Homo sapiens
  CDR3 for alpha chain variable domain of TCR clone 84034 (TRAV14/DV4, TRAJ54)
CAMREGRIQGAQKLVF

SEQ ID NO: 168068 - protein, 15 aa, Homo sapiens
  CDR3 for beta chain variable domain of TCR clone 84034 (TRBV20-1, TRBJ2-7)
CGARDRVSGMDEQYF

SEQ ID NO: 168069 - protein, 13 aa, Homo sapiens
  CDR3 for alpha chain variable domain of TCR clone 84035 (TRAV13-1, TRAJ21)
CAASIYNSNKFYF

SEQ ID NO: 168070 - protein, 16 aa, Homo sapiens
  CDR3 for beta chain variable domain of TCR clone 84035 (TRBV19, TRBJ2-1)
CASSKAGPSSYNEQFF

SEQ ID NO: 168071 - protein, 16 aa, Homo sapiens
  CDR3 for alpha chain variable domain of TCR clone 84036 (TRAV14/DV4, TRAJ15)
CAMREGPAQAGTALIF

SEQ ID NO: 168072 - protein, 12 aa, Homo sapiens
  CDR3 for beta chain variable domain of TCR clone 84036 (TRBV28, TRBJ2-6)
CAIQAGVNVLTF

SEQ ID NO: 168073 - protein, 12 aa, Homo sapiens
  CDR3 for alpha chain variable domain of TCR clone 84037 (TRAV10, TRAJ6)
CVVSEGSYIPTF

SEQ ID NO: 168074 - protein, 12 aa, Homo sapiens
  CDR3 for beta chain variable domain of TCR clone 84037 (TRBV7-9, TRBJ2-7)
CASSLEDYEQYF

SEQ ID NO: 168075 - protein, 17 aa, Homo sapiens
  CDR3 for alpha chain variable domain of TCR clone 84038 (TRAV8-6, TRAJ8)
CAVKEGIEKTGFQKLVF

SEQ ID NO: 168076 - protein, 12 aa, Homo sapiens
  CDR3 for beta chain variable domain of TCR clone 84038 (TRBV19, TRBJ1-4)
CASKDWPGGLFF

SEQ ID NO: 168077 - protein, 17 aa, Homo sapiens
  CDR3 for alpha chain variable domain of TCR clone 84039 (TRAV3, TRAJ28)
CAVREAYSGAGSYQLTF

SEQ ID NO: 168078 - protein, 18 aa, Homo sapiens
  CDR3 for beta chain variable domain of TCR clone 84039 (TRBV27, TRBJ2-1)
CSSGNRAVGVGSKNEQFF

SEQ ID NO: 168079 - protein, 11 aa, Homo sapiens
  CDR3 for alpha chain variable domain of TCR clone 84040 (TRAV2, TRAJ13)
CASGGYQKVTF

SEQ ID NO: 168080 - protein, 15 aa, Homo sapiens
  CDR3 for beta chain variable domain of TCR clone 84040 (TRBV5-1, TRBJ2-7)
CASSLDLTSSYEHYF

SEQ ID NO: 168081 - protein, 16 aa, Homo sapiens
  CDR3 for alpha chain variable domain of TCR clone 84041 (TRAV2, TRAJ4)
CAVEDRFSGGYNKLTF

SEQ ID NO: 168082 - protein, 13 aa, Homo sapiens
  CDR3 for beta chain variable domain of TCR clone 84041 (TRBV7-7, TRBJ2-5)
CASSRSGQETQYF

SEQ ID NO: 168083 - protein, 13 aa, Homo sapiens
  CDR3 for alpha chain variable domain of TCR clone 84042 (TRAV3, TRAJ8)
CAVRFTGFQKLVF

SEQ ID NO: 168084 - protein, 18 aa, Homo sapiens
  CDR3 for beta chain variable domain of TCR clone 84042 (TRBV5-1, TRBJ1-6)
CASSRSGQGTARGSPLHF

SEQ ID NO: 168085 - protein, 16 aa, Homo sapiens
  CDR3 for alpha chain variable domain of TCR clone 84043 (TRAV35, TRAJ28)
CAGQRYSGAGSYQLTL

SEQ ID NO: 168086 - protein, 13 aa, Homo sapiens
  CDR3 for beta chain variable domain of TCR clone 84043 (TRBV19, TRBJ1-2)
CASSQGQVYGYTF

SEQ ID NO: 168087 - protein, 14 aa, Homo sapiens
  CDR3 for alpha chain variable domain of TCR clone 84044 (TRAV12-2, TRAJ17)
CAVLFIAAGNKLTF

SEQ ID NO: 168088 - protein, 17 aa, Homo sapiens
  CDR3 for beta chain variable domain of TCR clone 84044 (TRBV20-1, TRBJ2-2)
CSASGSGQGGLTGELFF

SEQ ID NO: 168089 - protein, 13 aa, Homo sapiens
  CDR3 for alpha chain variable domain of TCR clone 84045 (TRAV26-1, TRAJ34)
CIVRPWITDKFIF

SEQ ID NO: 168090 - protein, 13 aa, Homo sapiens
  CDR3 for beta chain variable domain of TCR clone 84045 (TRBV5-1, TRBJ2-1)
CASSLGSYNEQFF

SEQ ID NO: 168091 - protein, 14 aa, Homo sapiens
  CDR3 for alpha chain variable domain of TCR clone 84046 (TRAV21, TRAJ15)
CSVSLNQAGTALIF

SEQ ID NO: 168092 - protein, 11 aa, Homo sapiens
  CDR3 for beta chain variable domain of TCR clone 84046 (TRBV20-1, TRBJ2-7)
CSARTSYEQYF

SEQ ID NO: 168093 - protein, 13 aa, Homo sapiens
  CDR3 for alpha chain variable domain of TCR clone 84047 (TRAV13-1, TRAJ5)
CAASDTGRRGLTF

SEQ ID NO: 168094 - protein, 12 aa, Homo sapiens
  CDR3 for beta chain variable domain of TCR clone 84047 (TRBV28, TRBJ2-3)
CASSLYRDTQYF

SEQ ID NO: 168095 - protein, 11 aa, Homo sapiens
  CDR3 for alpha chain variable domain of TCR clone 84048 (TRAV21, TRAJ9)
CSVPGGFKTIF

SEQ ID NO: 168096 - protein, 12 aa, Homo sapiens
  CDR3 for beta chain variable domain of TCR clone 84048 (TRBV20-1, TRBJ2-3)
CSARVGTDTQYF

SEQ ID NO: 168097 - protein, 14 aa, Homo sapiens
  CDR3 for alpha chain variable domain of TCR clone 84049 (TRAV12-2, TRAJ45)
CAVYSGGGADGLTF

SEQ ID NO: 168098 - protein, 14 aa, Homo sapiens
  CDR3 for beta chain variable domain of TCR clone 84049 (TRBV6-5, TRBJ1-2)
CACTRGGGSDGYTF

SEQ ID NO: 168099 - protein, 16 aa, Homo sapiens
  CDR3 for alpha chain variable domain of TCR clone 84050 (TRAV4, TRAJ9)
CLVGDTNRPGGFKTIF

SEQ ID NO: 168100 - protein, 16 aa, Homo sapiens
  CDR3 for beta chain variable domain of TCR clone 84050 (TRBV28, TRBJ1-4)
CASSPPYRGRSEKLFF

SEQ ID NO: 168101 - protein, 16 aa, Homo sapiens
  CDR3 for alpha chain variable domain of TCR clone 84051 (TRAV20, TRAJ22)
CAMQASSSGSARQLTF

SEQ ID NO: 168102 - protein, 13 aa, Homo sapiens
  CDR3 for beta chain variable domain of TCR clone 84051 (TRBV7-2, TRBJ2-5)
CASSQTSVETQYF

SEQ ID NO: 168103 - protein, 11 aa, Homo sapiens
  CDR3 for alpha chain variable domain of TCR clone 84052 (TRAV21, TRAJ11)
CAVSGYSTLTF

SEQ ID NO: 168104 - protein, 16 aa, Homo sapiens
  CDR3 for beta chain variable domain of TCR clone 84052 (TRBV19, TRBJ2-1)
CASSKAGPSSYNEQFF

SEQ ID NO: 168105 - protein, 12 aa, Homo sapiens
  CDR3 for alpha chain variable domain of TCR clone 84053 (TRAV25, TRAJ17)
CAGEAAGNNLTF

SEQ ID NO: 168106 - protein, 14 aa, Homo sapiens
  CDR3 for beta chain variable domain of TCR clone 84053 (TRBV5-1, TRBJ2-1)
CASSALWAGNEQFF

SEQ ID NO: 168107 - protein, 12 aa, Homo sapiens
  CDR3 for alpha chain variable domain of TCR clone 84054 (TRAV41, TRAJ58)
CSVETSGSRLTF

SEQ ID NO: 168108 - protein, 15 aa, Homo sapiens
  CDR3 for beta chain variable domain of TCR clone 84054 (TRBV29-1, TRBJ2-6)
CSVGDRGSGANVLTF

SEQ ID NO: 168109 - protein, 13 aa, Homo sapiens
  CDR3 for alpha chain variable domain of TCR clone 84055 (TRAV8-3, TRAJ43)
CAVGIYDNNDMRF

SEQ ID NO: 168110 - protein, 16 aa, Homo sapiens
  CDR3 for beta chain variable domain of TCR clone 84055 (TRBV7-2, TRBJ2-5)
CASSLVLWTKQETQYF

SEQ ID NO: 168111 - protein, 17 aa, Homo sapiens
  CDR3 for alpha chain variable domain of TCR clone 84056 (TRAV36/DV7, TRAJ52)
CAVAQRAGGTSYGKLTF

SEQ ID NO: 168112 - protein, 15 aa, Homo sapiens
  CDR3 for beta chain variable domain of TCR clone 84056 (TRBV20-1, TRBJ2-7)
CSAESGTSGAYEQYS

SEQ ID NO: 168113 - protein, 13 aa, Homo sapiens
  CDR3 for alpha chain variable domain of TCR clone 84057 (TRAV21, TRAJ27)
CAARPGNAGKSTF

SEQ ID NO: 168114 - protein, 20 aa, Homo sapiens
  CDR3 for beta chain variable domain of TCR clone 84057 (TRBV4-2, TRBJ2-7)
CASSQASVGNLRAVLRAGHQ

SEQ ID NO: 168115 - protein, 13 aa, Homo sapiens
  CDR3 for alpha chain variable domain of TCR clone 84058 (TRAV1-2, TRAJ9)
CAALNTGGFKTIF

SEQ ID NO: 168116 - protein, 13 aa, Homo sapiens
  CDR3 for beta chain variable domain of TCR clone 84058 (TRBV19, TRBJ1-2)
CASIVPGQDGYTF

SEQ ID NO: 168117 - protein, 13 aa, Homo sapiens
  CDR3 for alpha chain variable domain of TCR clone 84059 (TRAV12-1, TRAJ26)
CVVRRNYGLNFVF

SEQ ID NO: 168118 - protein, 15 aa, Homo sapiens
  CDR3 for beta chain variable domain of TCR clone 84059 (TRBV28, TRBJ2-1)
CASSIIAGGRSEQFF

SEQ ID NO: 168119 - protein, 12 aa, Homo sapiens
  CDR3 for alpha chain variable domain of TCR clone 84060 (TRAV23/DV6, TRAJ16)
CAARGRGQTLLF

SEQ ID NO: 168120 - protein, 15 aa, Homo sapiens
  CDR3 for beta chain variable domain of TCR clone 84060 (TRBV15, TRBJ2-1)
CATSRPGQGLHEQFF

SEQ ID NO: 168121 - protein, 16 aa, Homo sapiens
  CDR3 for alpha chain variable domain of TCR clone 84061 (TRAV30, TRAJ24)
CGTEIADADSWGKFQF

SEQ ID NO: 168122 - protein, 15 aa, Homo sapiens
  CDR3 for beta chain variable domain of TCR clone 84061 (TRBV7-9, TRBJ1-4)
CASSARTGGNEKLFF

SEQ ID NO: 168123 - protein, 14 aa, Homo sapiens
  CDR3 for alpha chain variable domain of TCR clone 84062 (TRAV13-1, TRAJ44)
CAAKATGTASKLTF

SEQ ID NO: 168124 - protein, 12 aa, Homo sapiens
  CDR3 for beta chain variable domain of TCR clone 84062 (TRBV2, TRBJ2-1)
CAYGPPGNEQFF

SEQ ID NO: 168125 - protein, 15 aa, Homo sapiens
  CDR3 for alpha chain variable domain of TCR clone 84063 (TRAV8-3, TRAJ34)
CAVAPHGGNTDKLIF

SEQ ID NO: 168126 - protein, 15 aa, Homo sapiens
  CDR3 for beta chain variable domain of TCR clone 84063 (TRBV20-1, TRBJ2-7)
CSARDRVSGMDEQYF

SEQ ID NO: 168127 - protein, 16 aa, Homo sapiens
  CDR3 for alpha chain variable domain of TCR clone 84064 (TRAV3, TRAJ10)
CAERDMRAGGGNKLTF

SEQ ID NO: 168128 - protein, 17 aa, Homo sapiens
  CDR3 for beta chain variable domain of TCR clone 84064 (TRBV28, TRBJ2-5)
CASSTPEGDALQETQYF

SEQ ID NO: 168129 - protein, 13 aa, Homo sapiens
  CDR3 for alpha chain variable domain of TCR clone 84065 (TRAV12-3, TRAJ35)
CAMAIGFGNVLHC

SEQ ID NO: 168130 - protein, 15 aa, Homo sapiens
  CDR3 for beta chain variable domain of TCR clone 84065 (TRBV20-1, TRBJ2-1)
CSARGSGTDYNEQFF

SEQ ID NO: 168131 - protein, 15 aa, Homo sapiens
  CDR3 for alpha chain variable domain of TCR clone 84066 (TRAV2, TRAJ15)
CAVEDREKAGTALIF

SEQ ID NO: 168132 - protein, 13 aa, Homo sapiens
  CDR3 for beta chain variable domain of TCR clone 84066 (TRBV10-2, TRBJ2-3)
CASSESGDHTQYF

SEQ ID NO: 168133 - protein, 13 aa, Homo sapiens
  CDR3 for alpha chain variable domain of TCR clone 84067 (TRAV12-3, TRAJ9)
CAMGNTGGFKTIF

SEQ ID NO: 168134 - protein, 13 aa, Homo sapiens
  CDR3 for beta chain variable domain of TCR clone 84067 (TRBV9, TRBJ2-1)
CASSVGQGGEQFF

SEQ ID NO: 168135 - protein, 16 aa, Homo sapiens
  CDR3 for alpha chain variable domain of TCR clone 84068 (TRAV16, TRAJ4)
CITVLPFSGGYNKLIF

SEQ ID NO: 168136 - protein, 11 aa, Homo sapiens
  CDR3 for beta chain variable domain of TCR clone 84068 (TRBV29-1, TRBJ2-5)
CSEDRTGTQYF

SEQ ID NO: 168137 - protein, 11 aa, Homo sapiens
  CDR3 for alpha chain variable domain of TCR clone 84069 (TRAV8-3, TRAJ42)
NYGGSQGNLIF

SEQ ID NO: 168138 - protein, 14 aa, Homo sapiens
  CDR3 for beta chain variable domain of TCR clone 84069 (TRBV7-9, TRBJ2-4)
CASSLAMGGNIQYF

SEQ ID NO: 168139 - protein, 17 aa, Homo sapiens
  CDR3 for alpha chain variable domain of TCR clone 84070 (TRAV12-2, TRAJ39)
CAVNNMLTSGGGTRLMV

SEQ ID NO: 168140 - protein, 16 aa, Homo sapiens
  CDR3 for beta chain variable domain of TCR clone 84070 (TRBV5-3, TRBJ2-2)
CARSFGTGTNTGELFF

SEQ ID NO: 168141 - protein, 17 aa, Homo sapiens
  CDR3 for alpha chain variable domain of TCR clone 84071 (TRAV13-2, TRAJ48)
CAENIRSRNFGNEKLTF

SEQ ID NO: 168142 - protein, 15 aa, Homo sapiens
  CDR3 for beta chain variable domain of TCR clone 84071 (TRBV7-6, TRBJ2-7)
CASSNRDSPFGEQYF

SEQ ID NO: 168143 - protein, 17 aa, Homo sapiens
  CDR3 for alpha chain variable domain of TCR clone 84072 (TRAV8-6, TRAJ58)
CAVSSWVGETSGSRLTF

SEQ ID NO: 168144 - protein, 18 aa, Homo sapiens
  CDR3 for beta chain variable domain of TCR clone 84072 (TRBV28, TRBJ1-5)
CASSPLQGARYSNQPQHF

SEQ ID NO: 168145 - protein, 10 aa, Homo sapiens
  CDR3 for alpha chain variable domain of TCR clone 84073 (TRAV1-2, TRAJ31)
CVSEDARLIF

SEQ ID NO: 168146 - protein, 14 aa, Homo sapiens
  CDR3 for beta chain variable domain of TCR clone 84073 (TRBV19, TRBJ2-1)
CASPTFVLSGEQFF

SEQ ID NO: 168147 - protein, 13 aa, Homo sapiens
  CDR3 for alpha chain variable domain of TCR clone 84074 (TRAV8-4, TRAJ49)
CAVSDSTGNQFYF

SEQ ID NO: 168148 - protein, 15 aa, Homo sapiens
  CDR3 for beta chain variable domain of TCR clone 84074 (TRBV3-1, TRBJ2-5)
CASSANLGGPETQYF

SEQ ID NO: 168149 - protein, 15 aa, Homo sapiens
  CDR3 for alpha chain variable domain of TCR clone 84075 (TRAV3, TRAJ22)
CAVRDRCGSARQLTF

SEQ ID NO: 168150 - protein, 13 aa, Homo sapiens
  CDR3 for beta chain variable domain of TCR clone 84075 (TRBV7-3, TRBJ2-1)
CASSPVAYNEQFF

SEQ ID NO: 168151 - protein, 17 aa, Homo sapiens
  CDR3 for alpha chain variable domain of TCR clone 84076 (TRAV8-6, TRAJ8)
CAVKEGMENTGFQKLVF

SEQ ID NO: 168152 - protein, 12 aa, Homo sapiens
  CDR3 for beta chain variable domain of TCR clone 84076 (TRBV19, TRBJ1-4)
CASKDWPGGLFF

SEQ ID NO: 168153 - protein, 14 aa, Homo sapiens
  CDR3 for alpha chain variable domain of TCR clone 84077 (TRAV12-2, TRAJ17)
CAVLFKAAGNKLTF

SEQ ID NO: 168154 - protein, 14 aa, Homo sapiens
  CDR3 for beta chain variable domain of TCR clone 84077 (TRBV18, TRBJ2-7)
CASSPRGGAYEQYF

SEQ ID NO: 168155 - protein, 14 aa, Homo sapiens
  CDR3 for alpha chain variable domain of TCR clone 84078 (TRAV12-3, TRAJ6)
CAMSATGGSYIPTF

SEQ ID NO: 168156 - protein, 13 aa, Homo sapiens
  CDR3 for beta chain variable domain of TCR clone 84078 (TRBV7-9, TRBJ1-2)
CASSLKQNYGYTF

SEQ ID NO: 168157 - protein, 13 aa, Homo sapiens
  CDR3 for alpha chain variable domain of TCR clone 84079 (TRAV30, TRAJ49)
CGKEPNTGNQFYF

SEQ ID NO: 168158 - protein, 14 aa, Homo sapiens
  CDR3 for beta chain variable domain of TCR clone 84079 (TRBV29-1, TRBJ2-1)
CSVEFRGIPFEQFF

SEQ ID NO: 168159 - protein, 16 aa, Homo sapiens
  CDR3 for alpha chain variable domain of TCR clone 84080 (TRAV26-1, TRAJ37)
CIVRGDGSGNTGKLIF

SEQ ID NO: 168160 - protein, 15 aa, Homo sapiens
  CDR3 for beta chain variable domain of TCR clone 84080 (TRBV5-5, TRBJ1-5)
CASSSTPGSNQPQHF

SEQ ID NO: 168161 - protein, 13 aa, Homo sapiens
  CDR3 for alpha chain variable domain of TCR clone 84081 (TRAV2, TRAJ40)
CSVVTSGTYKYIF

SEQ ID NO: 168162 - protein, 16 aa, Homo sapiens
  CDR3 for beta chain variable domain of TCR clone 84081 (TRBV19, TRBJ2-2)
CASRSPGTGATGELFF

SEQ ID NO: 168163 - protein, 12 aa, Homo sapiens
  CDR3 for alpha chain variable domain of TCR clone 84082 (TRAV17, TRAJ54)
CATPQGAQKLVF

SEQ ID NO: 168164 - protein, 13 aa, Homo sapiens
  CDR3 for beta chain variable domain of TCR clone 84082 (TRBV10-3, TRBJ2-7)
CASKLAVNYEQYF

SEQ ID NO: 168165 - protein, 15 aa, Homo sapiens
  CDR3 for alpha chain variable domain of TCR clone 84083 (TRAV20, TRAJ53)
CAVQASGGSYYKLTF

SEQ ID NO: 168166 - protein, 12 aa, Homo sapiens
  CDR3 for beta chain variable domain of TCR clone 84083 (TRBV7-6, TRBJ2-5)
CASSLSQETQYF

SEQ ID NO: 168167 - protein, 15 aa, Homo sapiens
  CDR3 for alpha chain variable domain of TCR clone 84084 (TRAV12-1, TRAJ44)
CVADLPTGTASKLTF

SEQ ID NO: 168168 - protein, 13 aa, Homo sapiens
  CDR3 for beta chain variable domain of TCR clone 84084 (TRBV6-5, TRBJ2-5)
CARSPQGGETQYF

SEQ ID NO: 168169 - protein, 13 aa, Homo sapiens
  CDR3 for alpha chain variable domain of TCR clone 84085 (TRAV12-1, TRAJ34)
CVVTGYNTDKLIF

SEQ ID NO: 168170 - protein, 13 aa, Homo sapiens
  CDR3 for beta chain variable domain of TCR clone 84085 (TRBV28, TRBJ2-7)
CASKAGGVYEHYF

SEQ ID NO: 168171 - protein, 16 aa, Homo sapiens
  CDR3 for alpha chain variable domain of TCR clone 84086 (TRAV30, TRAJ24)
CGTEIVDADSWRKFQF

SEQ ID NO: 168172 - protein, 18 aa, Homo sapiens
  CDR3 for beta chain variable domain of TCR clone 84086 (TRBV11-2, TRBJ2-3)
CASSLGGASRGAPNTQYF

SEQ ID NO: 168173 - protein, 14 aa, Homo sapiens
  CDR3 for alpha chain variable domain of TCR clone 84087 (TRAV1-2, TRAJ16)
CAFNRFSDGQKLLF

SEQ ID NO: 168174 - protein, 16 aa, Homo sapiens
  CDR3 for beta chain variable domain of TCR clone 84087 (TRBV19, TRBJ2-1)
CASSEILAGDGNEQFF

SEQ ID NO: 168175 - protein, 15 aa, Homo sapiens
  CDR3 for alpha chain variable domain of TCR clone 84088 (TRAV2, TRAJ15)
CAVEDREQAGTALIF

SEQ ID NO: 168176 - protein, 13 aa, Homo sapiens
  CDR3 for beta chain variable domain of TCR clone 84088 (TRBV10-2, TRBJ2-3)
CASSESGDHTQYL

SEQ ID NO: 168177 - protein, 13 aa, Homo sapiens
  CDR3 for alpha chain variable domain of TCR clone 84089 (TRAV26-2, TRAJ43)
CILRAVNNNDIRF

SEQ ID NO: 168178 - protein, 14 aa, Homo sapiens
  CDR3 for beta chain variable domain of TCR clone 84089 (TRBV19, TRBJ2-1)
CASPTFVLSGEQFF

SEQ ID NO: 168179 - protein, 13 aa, Homo sapiens
  CDR3 for alpha chain variable domain of TCR clone 84090 (TRAV1-2, TRAJ9)
CAALNTGGFKTIF

SEQ ID NO: 168180 - protein, 16 aa, Homo sapiens
  CDR3 for beta chain variable domain of TCR clone 84090 (TRBV11-3, TRBJ2-5)
CASSSAVAGSTETQYF

SEQ ID NO: 168181 - protein, 13 aa, Homo sapiens
  CDR3 for alpha chain variable domain of TCR clone 84091 (TRAV12-2, TRAJ10)
CAVPTGGGNKLTF

SEQ ID NO: 168182 - protein, 13 aa, Homo sapiens
  CDR3 for beta chain variable domain of TCR clone 84091 (TRBV7-3, TRBJ1-1)
CASSQDWGAEAFF

SEQ ID NO: 168183 - protein, 15 aa, Homo sapiens
  CDR3 for alpha chain variable domain of TCR clone 84092 (TRAV26-1, TRAJ37)
CIVKTGSSNTGKPIF

SEQ ID NO: 168184 - protein, 12 aa, Homo sapiens
  CDR3 for beta chain variable domain of TCR clone 84092 (TRBV7-8, TRBJ2-7)
CASSLGDREQYF

SEQ ID NO: 168185 - protein, 12 aa, Homo sapiens
  CDR3 for alpha chain variable domain of TCR clone 84093 (TRAV21, TRAJ33)
CAKMDSNYQLIW

SEQ ID NO: 168186 - protein, 13 aa, Homo sapiens
  CDR3 for beta chain variable domain of TCR clone 84093 (TRBV20-1, TRBJ2-2)
CSASAAGTGELFF

SEQ ID NO: 168187 - protein, 12 aa, Homo sapiens
  CDR3 for alpha chain variable domain of TCR clone 84094 (TRAV1-2, TRAJ26)
CAVSPYGKNFVF

SEQ ID NO: 168188 - protein, 13 aa, Homo sapiens
  CDR3 for beta chain variable domain of TCR clone 84094 (TRBV4-2, TRBJ2-7)
CASSRDPHDEQYF

SEQ ID NO: 168189 - protein, 18 aa, Homo sapiens
  CDR3 for alpha chain variable domain of TCR clone 84095 (TRAV21, TRAJ52)
CAVRPSPAGGTSYGKLTF

SEQ ID NO: 168190 - protein, 14 aa, Homo sapiens
  CDR3 for beta chain variable domain of TCR clone 84095 (TRBV4-1, TRBJ2-2)
CASSQAVNTWELFF

SEQ ID NO: 168191 - protein, 14 aa, Homo sapiens
  CDR3 for alpha chain variable domain of TCR clone 84096 (TRAV12-2, TRAJ17)
CAALFKAAGNKLTF

SEQ ID NO: 168192 - protein, 14 aa, Homo sapiens
  CDR3 for beta chain variable domain of TCR clone 84096 (TRBV19, TRBJ2-1)
CASPTFVLSGEQFF

SEQ ID NO: 168193 - protein, 13 aa, Homo sapiens
  CDR3 for alpha chain variable domain of TCR clone 84097 (TRAV27, TRAJ41)
CAGEGNSGYALNF

SEQ ID NO: 168194 - protein, 14 aa, Homo sapiens
  CDR3 for beta chain variable domain of TCR clone 84097 (TRBV25-1, TRBJ1-1)
CASTHLGGDTEAFF

SEQ ID NO: 168195 - protein, 17 aa, Homo sapiens
  CDR3 for alpha chain variable domain of TCR clone 84098 (TRAV26-2, TRAJ42)
CILRDESYGGSQGSLIF

SEQ ID NO: 168196 - protein, 15 aa, Homo sapiens
  CDR3 for beta chain variable domain of TCR clone 84098 (TRBV6-6, TRBJ2-7)
CASSYSYGGSYEQYF

SEQ ID NO: 168197 - protein, 15 aa, Homo sapiens
  CDR3 for alpha chain variable domain of TCR clone 84099 (TRAV26-1, TRAJ44)
CIVRANTGTASKLTF

SEQ ID NO: 168198 - protein, 16 aa, Homo sapiens
  CDR3 for beta chain variable domain of TCR clone 84099 (TRBV7-7, TRBJ2-1)
CASSLARGTSYNEQFF

SEQ ID NO: 168199 - protein, 23 aa, Homo sapiens
  CDR3 for alpha chain variable domain of TCR clone 84100 (TRAV1-1, TRAJ11)
LLQELQMKDSASYFCAGYSTLTF

SEQ ID NO: 168200 - protein, 15 aa, Homo sapiens
  CDR3 for beta chain variable domain of TCR clone 84100 (TRBV6-5, TRBJ2-1)
CASRGDFDSCNEQFF

SEQ ID NO: 168201 - protein, 13 aa, Homo sapiens
  CDR3 for alpha chain variable domain of TCR clone 84101 (TRAV38-2/DV8, TRAJ34)
CAYRAWNTDKLIF

SEQ ID NO: 168202 - protein, 18 aa, Homo sapiens
  CDR3 for beta chain variable domain of TCR clone 84101 (TRBV6-6, TRBJ1-3)
CASSYSKWDSISGNTIYF

SEQ ID NO: 168203 - protein, 13 aa, Homo sapiens
  CDR3 for alpha chain variable domain of TCR clone 84102 (TRAV21, TRAJ20)
CAVGLRVDYKLSF

SEQ ID NO: 168204 - protein, 11 aa, Homo sapiens
  CDR3 for beta chain variable domain of TCR clone 84102 (TRBV25-1, TRBJ2-1)
GATTRISEQFF

SEQ ID NO: 168205 - protein, 12 aa, Homo sapiens
  CDR3 for alpha chain variable domain of TCR clone 84103 (TRAV22, TRAJ22)
CAPGGSARQLTF

SEQ ID NO: 168206 - protein, 14 aa, Homo sapiens
  CDR3 for beta chain variable domain of TCR clone 84103 (TRBV5-1, TRBJ2-3)
CASRGQTSTDTQYF

SEQ ID NO: 168207 - protein, 13 aa, Homo sapiens
  CDR3 for alpha chain variable domain of TCR clone 84104 (TRAV8-6, TRAJ21)
CAVSPSSLNKFYF

SEQ ID NO: 168208 - protein, 14 aa, Homo sapiens
  CDR3 for beta chain variable domain of TCR clone 84104 (TRBV7-9, TRBJ2-5)
CGSGLDTAQETQYF

SEQ ID NO: 168209 - protein, 14 aa, Homo sapiens
  CDR3 for alpha chain variable domain of TCR clone 84105 (TRAV27, TRAJ36)
CAGPPKRGANNLFF

SEQ ID NO: 168210 - protein, 15 aa, Homo sapiens
  CDR3 for beta chain variable domain of TCR clone 84105 (TRBV18, TRBJ2-7)
CPRSPASTPNYEQYF

SEQ ID NO: 168211 - protein, 16 aa, Homo sapiens
  CDR3 for alpha chain variable domain of TCR clone 84106 (TRAV12-1, TRAJ53)
CVVTSVAGGSNYKLTF

SEQ ID NO: 168212 - protein, 14 aa, Homo sapiens
  CDR3 for beta chain variable domain of TCR clone 84106 (TRBV13, TRBJ2-5)
CASSLERVGETQYF

SEQ ID NO: 168213 - protein, 14 aa, Homo sapiens
  CDR3 for alpha chain variable domain of TCR clone 84107 (TRAV29/DV5, TRAJ34)
CAASASGNTDKLIF

SEQ ID NO: 168214 - protein, 14 aa, Homo sapiens
  CDR3 for beta chain variable domain of TCR clone 84107 (TRBV6-1, TRBJ1-3)
CASVQGGGGNTIYF

SEQ ID NO: 168215 - protein, 18 aa, Homo sapiens
  CDR3 for alpha chain variable domain of TCR clone 84108 (TRAV26-1, TRAJ22)
CIVSVALISSGSARQLTF

SEQ ID NO: 168216 - protein, 13 aa, Homo sapiens
  CDR3 for beta chain variable domain of TCR clone 84108 (TRBV13, TRBJ2-5)
CASSPEVGETQYF

SEQ ID NO: 168217 - protein, 16 aa, Homo sapiens
  CDR3 for alpha chain variable domain of TCR clone 84109 (TRAV12-3, TRAJ53)
CAMSPGSGGSNYKLTF

SEQ ID NO: 168218 - protein, 11 aa, Homo sapiens
  CDR3 for beta chain variable domain of TCR clone 84109 (TRBV29-1, TRBJ2-5)
CSEDRTGTPYF

SEQ ID NO: 168219 - protein, 14 aa, Homo sapiens
  CDR3 for alpha chain variable domain of TCR clone 84110 (TRAV14/DV4, TRAJ57)
CAMREEGGSEKLVF

SEQ ID NO: 168220 - protein, 11 aa, Homo sapiens
  CDR3 for beta chain variable domain of TCR clone 84110 (TRBV29-1, TRBJ2-5)
CSEDRTGTQYF

SEQ ID NO: 168221 - protein, 13 aa, Homo sapiens
  CDR3 for alpha chain variable domain of TCR clone 84111 (TRAV2, TRAJ40)
CAVVTSGTYKYIF

SEQ ID NO: 168222 - protein, 15 aa, Homo sapiens
  CDR3 for beta chain variable domain of TCR clone 84111 (TRBV13, TRBJ1-2)
CASSLGRQPGYGYTF

SEQ ID NO: 168223 - protein, 14 aa, Homo sapiens
  CDR3 for alpha chain variable domain of TCR clone 84112 (TRAV13-1, TRAJ13)
CAASRVGGYQKVTF

SEQ ID NO: 168224 - protein, 13 aa, Homo sapiens
  CDR3 for beta chain variable domain of TCR clone 84112 (TRBV7-9, TRBJ1-6)
CASSLASLSPLHF

SEQ ID NO: 168225 - protein, 14 aa, Homo sapiens
  CDR3 for alpha chain variable domain of TCR clone 84113 (TRAV2, TRAJ9)
CAVEDWSGGFKTIF

SEQ ID NO: 168226 - protein, 12 aa, Homo sapiens
  CDR3 for beta chain variable domain of TCR clone 84113 (TRBV7-9, TRBJ2-7)
CASSLEGYEQYF

SEQ ID NO: 168227 - protein, 12 aa, Homo sapiens
  CDR3 for alpha chain variable domain of TCR clone 84114 (TRAV16, TRAJ10)
CSRTGGGNKLTF

SEQ ID NO: 168228 - protein, 19 aa, Homo sapiens
  CDR3 for beta chain variable domain of TCR clone 84114 (TRBV25-1, TRBJ2-2)
CAILVYRVDRGRKAGELFF

SEQ ID NO: 168229 - protein, 14 aa, Homo sapiens
  CDR3 for alpha chain variable domain of TCR clone 84115 (TRAV13-1, TRAJ44)
CAAKATGTASKLTF

SEQ ID NO: 168230 - protein, 14 aa, Homo sapiens
  CDR3 for beta chain variable domain of TCR clone 84115 (TRBV11-1, TRBJ2-7)
CASSFRQGSYEQYF

SEQ ID NO: 168231 - protein, 13 aa, Homo sapiens
  CDR3 for alpha chain variable domain of TCR clone 84116 (TRAV12-2, TRAJ37)
CAVSSGKTGKLIF

SEQ ID NO: 168232 - protein, 17 aa, Homo sapiens
  CDR3 for beta chain variable domain of TCR clone 84116 (TRBV5-1, TRBJ2-5)
CASSLLGLAANQETQYF

SEQ ID NO: 168233 - protein, 15 aa, Homo sapiens
  CDR3 for alpha chain variable domain of TCR clone 84117 (TRAV26-1, TRAJ44)
CIVRANTGTASKLTF

SEQ ID NO: 168234 - protein, 12 aa, Homo sapiens
  CDR3 for beta chain variable domain of TCR clone 84117 (TRBV2, TRBJ2-1)
GRGLPSHNEQFF

SEQ ID NO: 168235 - protein, 14 aa, Homo sapiens
  CDR3 for alpha chain variable domain of TCR clone 84118 (TRAV1-1, TRAJ27)
CAVIYNTNAGKSTF

SEQ ID NO: 168236 - protein, 16 aa, Homo sapiens
  CDR3 for beta chain variable domain of TCR clone 84118 (TRBV7-9, TRBJ1-2)
CASSLGFSSGEDGYTF

SEQ ID NO: 168237 - protein, 14 aa, Homo sapiens
  CDR3 for alpha chain variable domain of TCR clone 84119 (TRAV2, TRAJ37)
CAVGFTSNTGKLIF

SEQ ID NO: 168238 - protein, 16 aa, Homo sapiens
  CDR3 for beta chain variable domain of TCR clone 84119 (TRBV27, TRBJ2-7)
CASSSERRDSAYEQYF

SEQ ID NO: 168239 - protein, 15 aa, Homo sapiens
  CDR3 for alpha chain variable domain of TCR clone 84120 (TRAV35, TRAJ58)
CAGRRQETSGSRLTF

SEQ ID NO: 168240 - protein, 11 aa, Homo sapiens
  CDR3 for beta chain variable domain of TCR clone 84120 (TRBV11-2, TRBJ1-1)
CASRINTEAFF

SEQ ID NO: 168241 - protein, 16 aa, Homo sapiens
  CDR3 for alpha chain variable domain of TCR clone 84121 (TRAV8-6, TRAJ37)
CAVSGLGSSNTGKLIF

SEQ ID NO: 168242 - protein, 15 aa, Homo sapiens
  CDR3 for beta chain variable domain of TCR clone 84121 (TRBV6-3, TRBJ2-7)
CASSSPGTVFYEQYF

SEQ ID NO: 168243 - protein, 12 aa, Homo sapiens
  CDR3 for alpha chain variable domain of TCR clone 84122 (TRAV8-3, TRAJ40)
RAVTSGTYKYIF

SEQ ID NO: 168244 - protein, 14 aa, Homo sapiens
  CDR3 for beta chain variable domain of TCR clone 84122 (TRBV12-4, TRBJ2-3)
CASSGQGSTDTQYF

SEQ ID NO: 168245 - protein, 14 aa, Homo sapiens
  CDR3 for alpha chain variable domain of TCR clone 84123 (TRAV38-1, TRAJ45)
CAYYSGGGADGLTF

SEQ ID NO: 168246 - protein, 16 aa, Homo sapiens
  CDR3 for beta chain variable domain of TCR clone 84123 (TRBV24-1, TRBJ2-3)
CATSDPGTGATDTQYF

SEQ ID NO: 168247 - protein, 12 aa, Homo sapiens
  CDR3 for alpha chain variable domain of TCR clone 84124 (TRAV13-1, TRAJ9)
CASHTGGFKPIF

SEQ ID NO: 168248 - protein, 13 aa, Homo sapiens
  CDR3 for beta chain variable domain of TCR clone 84124 (TRBV12-4, TRBJ1-2)
CASSSGSKDGYTF

SEQ ID NO: 168249 - protein, 11 aa, Homo sapiens
  CDR3 for alpha chain variable domain of TCR clone 84125 (TRAV2, TRAJ13)
CASGGYQKVTF

SEQ ID NO: 168250 - protein, 16 aa, Homo sapiens
  CDR3 for beta chain variable domain of TCR clone 84125 (TRBV2, TRBJ2-1)
CASRSPAGGKYNEQFF

SEQ ID NO: 168251 - protein, 13 aa, Homo sapiens
  CDR3 for alpha chain variable domain of TCR clone 84126 (TRAV30, TRAJ34)
CSTVGYNTDKLIF

SEQ ID NO: 168252 - protein, 16 aa, Homo sapiens
  CDR3 for beta chain variable domain of TCR clone 84126 (TRBV7-9, TRBJ1-2)
CASSLGFSSGEDGYTF

SEQ ID NO: 168253 - protein, 15 aa, Homo sapiens
  CDR3 for alpha chain variable domain of TCR clone 84127 (TRAV4, TRAJ39)
CLVGPNNNAGNMLTF

SEQ ID NO: 168254 - protein, 16 aa, Homo sapiens
  CDR3 for beta chain variable domain of TCR clone 84127 (TRBV13, TRBJ2-2)
CASSPRTGKHTGELFF

SEQ ID NO: 168255 - protein, 15 aa, Homo sapiens
  CDR3 for alpha chain variable domain of TCR clone 84128 (TRAV12-3, TRAJ17)
CAMSVGGAAGNKLTF

SEQ ID NO: 168256 - protein, 16 aa, Homo sapiens
  CDR3 for beta chain variable domain of TCR clone 84128 (TRBV7-6, TRBJ2-1)
CASSAPGPSSYNEQFF

SEQ ID NO: 168257 - protein, 13 aa, Homo sapiens
  CDR3 for alpha chain variable domain of TCR clone 84129 (TRAV12-2, TRAJ26)
CAVNENHGQNFVF

SEQ ID NO: 168258 - protein, 13 aa, Homo sapiens
  CDR3 for beta chain variable domain of TCR clone 84129 (TRBV18, TRBJ2-2)
CASSPTRGGELFF

SEQ ID NO: 168259 - protein, 16 aa, Homo sapiens
  CDR3 for alpha chain variable domain of TCR clone 84130 (TRAV3, TRAJ5)
CAVRNLMDTGRRALTF

SEQ ID NO: 168260 - protein, 16 aa, Homo sapiens
  CDR3 for beta chain variable domain of TCR clone 84130 (TRBV4-2, TRBJ2-7)
GASSQEGLAISYEQYF

SEQ ID NO: 168261 - protein, 15 aa, Homo sapiens
  CDR3 for alpha chain variable domain of TCR clone 84131 (TRAV30, TRAJ32)
CVTEILGGATNKLIF

SEQ ID NO: 168262 - protein, 13 aa, Homo sapiens
  CDR3 for beta chain variable domain of TCR clone 84131 (TRBV6-3, TRBJ2-7)
CASSFSGGYEQYF

SEQ ID NO: 168263 - protein, 15 aa, Homo sapiens
  CDR3 for alpha chain variable domain of TCR clone 84132 (TRAV12-2, TRAJ20)
CAVKGGFGAGTTETV

SEQ ID NO: 168264 - protein, 13 aa, Homo sapiens
  CDR3 for beta chain variable domain of TCR clone 84132 (TRBV12-4, TRBJ2-7)
CASSPGQLYEQYF

SEQ ID NO: 168265 - protein, 13 aa, Homo sapiens
  CDR3 for alpha chain variable domain of TCR clone 84133 (TRAV8-3, TRAJ44)
CAVVPGSASKLTF

SEQ ID NO: 168266 - protein, 14 aa, Homo sapiens
  CDR3 for beta chain variable domain of TCR clone 84133 (TRBV11-2, TRBJ2-3)
CASSRLARTDTQYF

SEQ ID NO: 168267 - protein, 18 aa, Homo sapiens
  CDR3 for alpha chain variable domain of TCR clone 84134 (TRAV13-1, TRAJ52)
CAASKRSAGGTSYGKLTF

SEQ ID NO: 168268 - protein, 15 aa, Homo sapiens
  CDR3 for beta chain variable domain of TCR clone 84134 (TRBV28, TRBJ2-1)
CASSIIAGGRSEQFF

SEQ ID NO: 168269 - protein, 14 aa, Homo sapiens
  CDR3 for alpha chain variable domain of TCR clone 84135 (TRAV8-6, TRAJ29)
CAVSGWAGNTPLVF

SEQ ID NO: 168270 - protein, 13 aa, Homo sapiens
  CDR3 for beta chain variable domain of TCR clone 84135 (TRBV11-2, TRBJ1-1)
CASSLETSTEAFF

SEQ ID NO: 168271 - protein, 13 aa, Homo sapiens
  CDR3 for alpha chain variable domain of TCR clone 84136 (TRAV8-3, TRAJ48)
CAVVPFGNEKLPF

SEQ ID NO: 168272 - protein, 19 aa, Homo sapiens
  CDR3 for beta chain variable domain of TCR clone 84136 (TRBV25-1, TRBJ2-2)
CAILVYRVDRGRKTGELFF

SEQ ID NO: 168273 - protein, 17 aa, Homo sapiens
  CDR3 for alpha chain variable domain of TCR clone 84137 (TRAV13-1, TRAJ31)
CAPRDRLMFGDGTQLVV

SEQ ID NO: 168274 - protein, 20 aa, Homo sapiens
  CDR3 for beta chain variable domain of TCR clone 84137 (TRBV28, TRBJ2-1)
CASTPIGRSPGLAGGNEQFF

SEQ ID NO: 168275 - protein, 13 aa, Homo sapiens
  CDR3 for alpha chain variable domain of TCR clone 84138 (TRAV26-1, TRAJ29)
CIVRRSGKTPLVF

SEQ ID NO: 168276 - protein, 16 aa, Homo sapiens
  CDR3 for beta chain variable domain of TCR clone 84138 (TRBV11-2, TRBJ2-7)
CASSLAPTGVNYEQYF

SEQ ID NO: 168277 - protein, 15 aa, Homo sapiens
  CDR3 for alpha chain variable domain of TCR clone 84139 (TRAV20, TRAJ40)
CAVQRGTSGTYKYIF

SEQ ID NO: 168278 - protein, 16 aa, Homo sapiens
  CDR3 for beta chain variable domain of TCR clone 84139 (TRBV6-1, TRBJ2-5)
CASSETLDRGAETQYF

SEQ ID NO: 168279 - protein, 12 aa, Homo sapiens
  CDR3 for alpha chain variable domain of TCR clone 84140 (TRAV12-3, TRAJ17)
CAMTLTGNKLTF

SEQ ID NO: 168280 - protein, 11 aa, Homo sapiens
  CDR3 for beta chain variable domain of TCR clone 84140 (TRBV18, TRBJ2-5)
CASSPRETQYF

SEQ ID NO: 168281 - protein, 14 aa, Homo sapiens
  CDR3 for alpha chain variable domain of TCR clone 84141 (TRAV1-2, TRAJ16)
CAVNRFSDGQKLLF

SEQ ID NO: 168282 - protein, 17 aa, Homo sapiens
  CDR3 for beta chain variable domain of TCR clone 84141 (TRBV19, TRBJ2-6)
CASSTGQVFSGANVLTF

SEQ ID NO: 168283 - protein, 15 aa, Homo sapiens
  CDR3 for alpha chain variable domain of TCR clone 84142 (TRAV16, TRAJ23)
CALSGIYNQGGKLIF

SEQ ID NO: 168284 - protein, 18 aa, Homo sapiens
  CDR3 for beta chain variable domain of TCR clone 84142 (TRBV7-8, TRBJ2-3)
CASSLSWTGGFSTDTQYF

SEQ ID NO: 168285 - protein, 16 aa, Homo sapiens
  CDR3 for alpha chain variable domain of TCR clone 84143 (TRAV4, TRAJ22)
CLVGDLYSGSARQLTF

SEQ ID NO: 168286 - protein, 13 aa, Homo sapiens
  CDR3 for beta chain variable domain of TCR clone 84143 (TRBV10-3, TRBJ2-7)
CASKLAVNYEQYF

SEQ ID NO: 168287 - protein, 12 aa, Homo sapiens
  CDR3 for alpha chain variable domain of TCR clone 84144 (TRAV12-3, TRAJ4)
CAMTGAGTRLAV

SEQ ID NO: 168288 - protein, 14 aa, Homo sapiens
  CDR3 for beta chain variable domain of TCR clone 84144 (TRBV10-3, TRBJ1-1)
YAISDTDRGVEAFF

SEQ ID NO: 168289 - protein, 15 aa, Homo sapiens
  CDR3 for alpha chain variable domain of TCR clone 84145 (TRAV8-2, TRAJ40)
CVVLGTTSGTYKYIF

SEQ ID NO: 168290 - protein, 12 aa, Homo sapiens
  CDR3 for beta chain variable domain of TCR clone 84145 (TRBV7-8, TRBJ2-7)
CASSLGDREQYF

SEQ ID NO: 168291 - protein, 15 aa, Homo sapiens
  CDR3 for alpha chain variable domain of TCR clone 84146 (TRAV26-1, TRAJ29)
CFVRVEGSGNTPLVF

SEQ ID NO: 168292 - protein, 14 aa, Homo sapiens
  CDR3 for beta chain variable domain of TCR clone 84146 (TRBV18, TRBJ2-5)
CASSPGVSQETQYF

SEQ ID NO: 168293 - protein, 12 aa, Homo sapiens
  CDR3 for alpha chain variable domain of TCR clone 84147 (TRAV25, TRAJ11)
CEGASGYSTLTF

SEQ ID NO: 168294 - protein, 14 aa, Homo sapiens
  CDR3 for beta chain variable domain of TCR clone 84147 (TRBV5-8, TRBJ2-3)
CASSLGQGTDTQYF

SEQ ID NO: 168295 - protein, 18 aa, Homo sapiens
  CDR3 for alpha chain variable domain of TCR clone 84148 (TRAV26-2, TRAJ45)
CILRVDKYSGGGADGLTF

SEQ ID NO: 168296 - protein, 16 aa, Homo sapiens
  CDR3 for beta chain variable domain of TCR clone 84148 (TRBV2, TRBJ1-4)
CASNLFQGATNEKLFF

SEQ ID NO: 168297 - protein, 12 aa, Homo sapiens
  CDR3 for alpha chain variable domain of TCR clone 84149 (TRAV35, TRAJ31)
CAAASNNARLMF

SEQ ID NO: 168298 - protein, 16 aa, Homo sapiens
  CDR3 for beta chain variable domain of TCR clone 84149 (TRBV12-5, TRBJ2-5)
CASGPRTSGNQETQYF

SEQ ID NO: 168299 - protein, 16 aa, Homo sapiens
  CDR3 for alpha chain variable domain of TCR clone 84150 (TRAV26-1, TRAJ45)
CIVEKYSGGGADGLTF

SEQ ID NO: 168300 - protein, 14 aa, Homo sapiens
  CDR3 for beta chain variable domain of TCR clone 84150 (TRBV19, TRBJ2-1)
CASPTFVLSGEQFF

SEQ ID NO: 168301 - protein, 11 aa, Homo sapiens
  CDR3 for alpha chain variable domain of TCR clone 84151 (TRAV1-2, TRAJ20)
CAVANDFKLSF

SEQ ID NO: 168302 - protein, 18 aa, Homo sapiens
  CDR3 for beta chain variable domain of TCR clone 84151 (TRBV20-1, TRBJ2-6)
CSAETTPTHGSGANVLTF

SEQ ID NO: 168303 - protein, 13 aa, Homo sapiens
  CDR3 for alpha chain variable domain of TCR clone 84152 (TRAV27, TRAJ41)
CAGEGNSGYALNF

SEQ ID NO: 168304 - protein, 15 aa, Homo sapiens
  CDR3 for beta chain variable domain of TCR clone 84152 (TRBV5-1, TRBJ2-1)
CASSPPRAPYNEQFF

SEQ ID NO: 168305 - protein, 13 aa, Homo sapiens
  CDR3 for alpha chain variable domain of TCR clone 84153 (TRAV3, TRAJ27)
CAVRPLGAGKSTF

SEQ ID NO: 168306 - protein, 13 aa, Homo sapiens
  CDR3 for beta chain variable domain of TCR clone 84153 (TRBV7-9, TRBJ2-3)
CASSPGSTDTQYY

SEQ ID NO: 168307 - protein, 15 aa, Homo sapiens
  CDR3 for alpha chain variable domain of TCR clone 84154 (TRAV3, TRAJ9)
CAVRDINTGDFKTIF

SEQ ID NO: 168308 - protein, 13 aa, Homo sapiens
  CDR3 for beta chain variable domain of TCR clone 84154 (TRBV19, TRBJ2-7)
CASSIPSVREQYF

SEQ ID NO: 168309 - protein, 12 aa, Homo sapiens
  CDR3 for alpha chain variable domain of TCR clone 84155 (TRAV12-3, TRAJ3)
CAIDNSASKIIF

SEQ ID NO: 168310 - protein, 17 aa, Homo sapiens
  CDR3 for beta chain variable domain of TCR clone 84155 (TRBV7-9, TRBJ2-3)
CASSLEEAGAYPDTQYF

SEQ ID NO: 168311 - protein, 12 aa, Homo sapiens
  CDR3 for alpha chain variable domain of TCR clone 84156 (TRAV21, TRAJ11)
CASTSGYSTLTF

SEQ ID NO: 168312 - protein, 14 aa, Homo sapiens
  CDR3 for beta chain variable domain of TCR clone 84156 (TRBV20-1, TRBJ2-7)
CSAPELAGVGEQYF

SEQ ID NO: 168313 - protein, 13 aa, Homo sapiens
  CDR3 for alpha chain variable domain of TCR clone 84157 (TRAV12-1, TRAJ34)
CVVTGYNTDKLIF

SEQ ID NO: 168314 - protein, 13 aa, Homo sapiens
  CDR3 for beta chain variable domain of TCR clone 84157 (TRBV28, TRBJ2-7)
CASKAGGVYEQYS

SEQ ID NO: 168315 - protein, 17 aa, Homo sapiens
  CDR3 for alpha chain variable domain of TCR clone 84158 (TRAV12-3, TRAJ26)
CAMSGGRWDNYGQNLVF

SEQ ID NO: 168316 - protein, 12 aa, Homo sapiens
  CDR3 for beta chain variable domain of TCR clone 84158 (TRBV19, TRBJ1-1)
CASSTTGIEAFF

SEQ ID NO: 168317 - protein, 13 aa, Homo sapiens
  CDR3 for alpha chain variable domain of TCR clone 84159 (TRAV14/DV4, TRAJ20)
CAMRESNDYKPSF

SEQ ID NO: 168318 - protein, 15 aa, Homo sapiens
  CDR3 for beta chain variable domain of TCR clone 84159 (TRBV7-9, TRBJ1-1)
CASSRPGTANTEAFF

SEQ ID NO: 168319 - protein, 15 aa, Homo sapiens
  CDR3 for alpha chain variable domain of TCR clone 84160 (TRAV21, TRAJ52)
CAVRGGGTSYGKLTF

SEQ ID NO: 168320 - protein, 16 aa, Homo sapiens
  CDR3 for beta chain variable domain of TCR clone 84160 (TRBV7-3, TRBJ2-2)
CASSLKRGTLSGELFF

SEQ ID NO: 168321 - protein, 13 aa, Homo sapiens
  CDR3 for alpha chain variable domain of TCR clone 84161 (TRAV4, TRAJ34)
CLVGDYNTDKLIF

SEQ ID NO: 168322 - protein, 23 aa, Homo sapiens
  CDR3 for beta chain variable domain of TCR clone 84161 (TRBV4-3, TRBJ2-3)
WASSQDPPRASSISGGRGDTQYF

SEQ ID NO: 168323 - protein, 17 aa, Homo sapiens
  CDR3 for alpha chain variable domain of TCR clone 84162 (TRAV3, TRAJ38)
CAVRNCLNAGNNRKLIW

SEQ ID NO: 168324 - protein, 16 aa, Homo sapiens
  CDR3 for beta chain variable domain of TCR clone 84162 (TRBV20-1, TRBJ1-4)
CSARPYGGELNEKLFF

SEQ ID NO: 168325 - protein, 12 aa, Homo sapiens
  CDR3 for alpha chain variable domain of TCR clone 84163 (TRAV12-1, TRAJ40)
CVFYSGTYKYIF

SEQ ID NO: 168326 - protein, 17 aa, Homo sapiens
  CDR3 for beta chain variable domain of TCR clone 84163 (TRBV13, TRBJ2-3)
CASSLSRVAGGRNTQYF

SEQ ID NO: 168327 - protein, 13 aa, Homo sapiens
  CDR3 for alpha chain variable domain of TCR clone 84164 (TRAV20, TRAJ20)
CAVRWVRDYKLSF

SEQ ID NO: 168328 - protein, 14 aa, Homo sapiens
  CDR3 for beta chain variable domain of TCR clone 84164 (TRBV19, TRBJ2-2)
CASTVTADTGELFF

SEQ ID NO: 168329 - protein, 12 aa, Homo sapiens
  CDR3 for alpha chain variable domain of TCR clone 84165 (TRAV13-1, TRAJ21)
CAAKEGFDKFYF

SEQ ID NO: 168330 - protein, 13 aa, Homo sapiens
  CDR3 for beta chain variable domain of TCR clone 84165 (TRBV7-3, TRBJ1-1)
CASSQDWGAEAFF

SEQ ID NO: 168331 - protein, 13 aa, Homo sapiens
  CDR3 for alpha chain variable domain of TCR clone 84166 (TRAV27, TRAJ29)
CAGAHSGNTPLVF

SEQ ID NO: 168332 - protein, 14 aa, Homo sapiens
  CDR3 for beta chain variable domain of TCR clone 84166 (TRBV7-9, TRBJ2-7)
CASSIGQEAGEQYF

SEQ ID NO: 168333 - protein, 13 aa, Homo sapiens
  CDR3 for alpha chain variable domain of TCR clone 84167 (TRAV2, TRAJ40)
CAVVTSGTYKYIF

SEQ ID NO: 168334 - protein, 15 aa, Homo sapiens
  CDR3 for beta chain variable domain of TCR clone 84167 (TRBV7-3, TRBJ2-3)
CASSLGLTLGDTQYF

SEQ ID NO: 168335 - protein, 13 aa, Homo sapiens
  CDR3 for alpha chain variable domain of TCR clone 84168 (TRAV12-2, TRAJ24)
CAVSTDSWGKLQF

SEQ ID NO: 168336 - protein, 16 aa, Homo sapiens
  CDR3 for beta chain variable domain of TCR clone 84168 (TRBV27, TRBJ2-2)
CASSFRGLVRTGELFF

SEQ ID NO: 168337 - protein, 15 aa, Homo sapiens
  CDR3 for alpha chain variable domain of TCR clone 84169 (TRAV3, TRAJ36)
CAVRASQTGANNLFF

SEQ ID NO: 168338 - protein, 15 aa, Homo sapiens
  CDR3 for beta chain variable domain of TCR clone 84169 (TRBV7-9, TRBJ1-4)
CASSRTGGFNEKLFF

SEQ ID NO: 168339 - protein, 13 aa, Homo sapiens
  CDR3 for alpha chain variable domain of TCR clone 84170 (TRAV12-1, TRAJ26)
CVVRRNYGQNFVF

SEQ ID NO: 168340 - protein, 13 aa, Homo sapiens
  CDR3 for beta chain variable domain of TCR clone 84170 (TRBV7-9, TRBJ1-2)
CASSLKQNYGYTF

SEQ ID NO: 168341 - protein, 13 aa, Homo sapiens
  CDR3 for alpha chain variable domain of TCR clone 84171 (TRAV13-2, TRAJ53)
CAENIGSNYKLTF

SEQ ID NO: 168342 - protein, 13 aa, Homo sapiens
  CDR3 for beta chain variable domain of TCR clone 84171 (TRBV4-1, TRBJ2-2)
CASSQENTGELFF

SEQ ID NO: 168343 - protein, 12 aa, Homo sapiens
  CDR3 for alpha chain variable domain of TCR clone 84172 (TRAV3, TRAJ20)
CAVRDGDYKLSF

SEQ ID NO: 168344 - protein, 12 aa, Homo sapiens
  CDR3 for beta chain variable domain of TCR clone 84172 (TRBV18, TRBJ2-7)
CASSLDSYEQYF

SEQ ID NO: 168345 - protein, 16 aa, Homo sapiens
  CDR3 for alpha chain variable domain of TCR clone 84173 (TRAV12-3, TRAJ10)
CAMKKGITGGGNKLTF

SEQ ID NO: 168346 - protein, 14 aa, Homo sapiens
  CDR3 for beta chain variable domain of TCR clone 84173 (TRBV12-4, TRBJ1-1)
CASSLGTGGTEAFF

SEQ ID NO: 168347 - protein, 15 aa, Homo sapiens
  CDR3 for alpha chain variable domain of TCR clone 84174 (TRAV35, TRAJ50)
FAGQLRKTSYDKVIF

SEQ ID NO: 168348 - protein, 12 aa, Homo sapiens
  CDR3 for beta chain variable domain of TCR clone 84174 (TRBV5-1, TRBJ2-5)
CASSLGLETQYF

SEQ ID NO: 168349 - protein, 16 aa, Homo sapiens
  CDR3 for alpha chain variable domain of TCR clone 84175 (TRAV3, TRAJ3)
CAVRDRAKSSASKIIF

SEQ ID NO: 168350 - protein, 13 aa, Homo sapiens
  CDR3 for beta chain variable domain of TCR clone 84175 (TRBV10-3, TRBJ2-7)
CASKLAVNYEQYS

SEQ ID NO: 168351 - protein, 12 aa, Homo sapiens
  CDR3 for alpha chain variable domain of TCR clone 84176 (TRAV30, TRAJ43)
CGTEERGNDMRF

SEQ ID NO: 168352 - protein, 13 aa, Homo sapiens
  CDR3 for beta chain variable domain of TCR clone 84176 (TRBV27, TRBJ2-7)
CANSFSQGYEQYF

SEQ ID NO: 168353 - protein, 16 aa, Homo sapiens
  CDR3 for alpha chain variable domain of TCR clone 84177 (TRAV20, TRAJ17)
CAVQARWESCRQQANF

SEQ ID NO: 168354 - protein, 16 aa, Homo sapiens
  CDR3 for beta chain variable domain of TCR clone 84177 (TRBV12-4, TRBJ2-7)
CASSLIGGTGTYEQYF

SEQ ID NO: 168355 - protein, 16 aa, Homo sapiens
  CDR3 for alpha chain variable domain of TCR clone 84178 (TRAV26-1, TRAJ23)
CIVRVHPYNQGGKLIF

SEQ ID NO: 168356 - protein, 15 aa, Homo sapiens
  CDR3 for beta chain variable domain of TCR clone 84178 (TRBV5-7, TRBJ2-7)
CASSPYFEGAYEQYF

SEQ ID NO: 168357 - protein, 16 aa, Homo sapiens
  CDR3 for alpha chain variable domain of TCR clone 84179 (TRAV1-1, TRAJ45)
CAVRAYSGGGADGPTF

SEQ ID NO: 168358 - protein, 13 aa, Homo sapiens
  CDR3 for beta chain variable domain of TCR clone 84179 (TRBV20-1, TRBJ1-2)
CSARGTADYGYTF

SEQ ID NO: 168359 - protein, 18 aa, Homo sapiens
  CDR3 for alpha chain variable domain of TCR clone 84180 (TRAV13-1, TRAJ52)
CAASKRSAGGTSYGKLTF

SEQ ID NO: 168360 - protein, 14 aa, Homo sapiens
  CDR3 for beta chain variable domain of TCR clone 84180 (TRBV11-2, TRBJ2-7)
CASSLGAGAYEQYF

SEQ ID NO: 168361 - protein, 20 aa, Homo sapiens
  CDR3 for alpha chain variable domain of TCR clone 84181 (TRAV12-1, TRAJ32)
SVVQPPTSMNYGGATNKLIF

SEQ ID NO: 168362 - protein, 15 aa, Homo sapiens
  CDR3 for beta chain variable domain of TCR clone 84181 (TRBV7-9, TRBJ2-2)
CASGPLDTFPGELFF

SEQ ID NO: 168363 - protein, 12 aa, Homo sapiens
  CDR3 for alpha chain variable domain of TCR clone 84182 (TRAV3, TRAJ20)
CAVRDPDYKLSF

SEQ ID NO: 168364 - protein, 14 aa, Homo sapiens
  CDR3 for beta chain variable domain of TCR clone 84182 (TRBV7-3, TRBJ1-1)
CASSLKGGNTEAFF

SEQ ID NO: 168365 - protein, 13 aa, Homo sapiens
  CDR3 for alpha chain variable domain of TCR clone 84183 (TRAV12-3, TRAJ13)
CAMTSGGYQKVTF

SEQ ID NO: 168366 - protein, 13 aa, Homo sapiens
  CDR3 for beta chain variable domain of TCR clone 84183 (TRBV20-1, TRBJ2-2)
CSALSGGDGELFF

SEQ ID NO: 168367 - protein, 16 aa, Homo sapiens
  CDR3 for alpha chain variable domain of TCR clone 84184 (TRAV30, TRAJ24)
CGTEMVDADSWGKFQF

SEQ ID NO: 168368 - protein, 13 aa, Homo sapiens
  CDR3 for beta chain variable domain of TCR clone 84184 (TRBV11-2, TRBJ2-5)
CASSSTGEETQYF

SEQ ID NO: 168369 - protein, 13 aa, Homo sapiens
  CDR3 for alpha chain variable domain of TCR clone 84185 (TRAV12-1, TRAJ33)
CGDAPDSNYQLIW

SEQ ID NO: 168370 - protein, 12 aa, Homo sapiens
  CDR3 for beta chain variable domain of TCR clone 84185 (TRBV11-2, TRBJ2-2)
CASSLGGGELFS

SEQ ID NO: 168371 - protein, 14 aa, Homo sapiens
  CDR3 for alpha chain variable domain of TCR clone 84186 (TRAV16, TRAJ17)
CALSGRAAGNKLTF

SEQ ID NO: 168372 - protein, 11 aa, Homo sapiens
  CDR3 for beta chain variable domain of TCR clone 84186 (TRBV12-4, TRBJ2-3)
CASTATDTQYF

SEQ ID NO: 168373 - protein, 14 aa, Homo sapiens
  CDR3 for alpha chain variable domain of TCR clone 84187 (TRAV23/DV6, TRAJ4)
CAANLSGGHNKLIF

SEQ ID NO: 168374 - protein, 11 aa, Homo sapiens
  CDR3 for beta chain variable domain of TCR clone 84187 (TRBV7-9, TRBJ2-3)
CASSPTDTQYF

SEQ ID NO: 168375 - protein, 15 aa, Homo sapiens
  CDR3 for alpha chain variable domain of TCR clone 84188 (TRAV21, TRAJ24)
CAARSSTDSWGKLQF

SEQ ID NO: 168376 - protein, 12 aa, Homo sapiens
  CDR3 for beta chain variable domain of TCR clone 84188 (TRBV11-2, TRBJ2-5)
CQQLDRGRDQYF

SEQ ID NO: 168377 - protein, 21 aa, Homo sapiens
  CDR3 for alpha chain variable domain of TCR clone 84189 (TRAV1-1, TRAJ6)
CLLLLRCERLERTGGSYIPTF

SEQ ID NO: 168378 - protein, 14 aa, Homo sapiens
  CDR3 for beta chain variable domain of TCR clone 84189 (TRBV20-1, TRBJ2-2)
CSAPDTANTGELFF

SEQ ID NO: 168379 - protein, 20 aa, Homo sapiens
  CDR3 for alpha chain variable domain of TCR clone 84190 (TRAV26-2, TRAJ39)
CCVLLHPESAFYNAGNMLTF

SEQ ID NO: 168380 - protein, 14 aa, Homo sapiens
  CDR3 for beta chain variable domain of TCR clone 84190 (TRBV12-4, TRBJ1-4)
CASRMTGRSERLFF

SEQ ID NO: 168381 - protein, 14 aa, Homo sapiens
  CDR3 for alpha chain variable domain of TCR clone 84191 (TRAV2, TRAJ37)
CAVDFTSNTGKLIF

SEQ ID NO: 168382 - protein, 14 aa, Homo sapiens
  CDR3 for beta chain variable domain of TCR clone 84191 (TRBV15, TRBJ2-5)
CATSGGTRTETQYF

SEQ ID NO: 168383 - protein, 12 aa, Homo sapiens
  CDR3 for alpha chain variable domain of TCR clone 84192 (TRAV1-2, TRAJ24)
CAVGGSWGKFQF

SEQ ID NO: 168384 - protein, 14 aa, Homo sapiens
  CDR3 for beta chain variable domain of TCR clone 84192 (TRBV7-2, TRBJ2-7)
CASSPKTSFYEQYF

SEQ ID NO: 168385 - protein, 14 aa, Homo sapiens
  CDR3 for alpha chain variable domain of TCR clone 84193 (TRAV9-2, TRAJ10)
CALTRTGGGNKLTF

SEQ ID NO: 168386 - protein, 17 aa, Homo sapiens
  CDR3 for beta chain variable domain of TCR clone 84193 (TRBV13, TRBJ2-3)
CASSLSRVAGGRNTQYF

SEQ ID NO: 168387 - protein, 13 aa, Homo sapiens
  CDR3 for alpha chain variable domain of TCR clone 84194 (TRAV27, TRAJ49)
CAPRPYTGNQFYF

SEQ ID NO: 168388 - protein, 13 aa, Homo sapiens
  CDR3 for beta chain variable domain of TCR clone 84194 (TRBV4-1, TRBJ2-1)
CASSRSINNEQFF

SEQ ID NO: 168389 - protein, 10 aa, Homo sapiens
  CDR3 for alpha chain variable domain of TCR clone 84195 (TRAV13-1, TRAJ27)
CAPLARQINL

SEQ ID NO: 168390 - protein, 13 aa, Homo sapiens
  CDR3 for beta chain variable domain of TCR clone 84195 (TRBV7-3, TRBJ1-1)
CASSQDWRAEAFF

SEQ ID NO: 168391 - protein, 10 aa, Homo sapiens
  CDR3 for alpha chain variable domain of TCR clone 84196 (TRAV30, TRAJ48)
CGIGNEKLTF

SEQ ID NO: 168392 - protein, 14 aa, Homo sapiens
  CDR3 for beta chain variable domain of TCR clone 84196 (TRBV7-6, TRBJ2-3)
CARSVAGGTDTQYF

SEQ ID NO: 168393 - protein, 13 aa, Homo sapiens
  CDR3 for alpha chain variable domain of TCR clone 84197 (TRAV17, TRAJ29)
CATDTFRKHTSCL

SEQ ID NO: 168394 - protein, 13 aa, Homo sapiens
  CDR3 for beta chain variable domain of TCR clone 84197 (TRBV5-7, TRBJ2-6)
CASTSSGANVLTF

SEQ ID NO: 168395 - protein, 12 aa, Homo sapiens
  CDR3 for alpha chain variable domain of TCR clone 84198 (TRAV12-3, TRAJ20)
CAMVRGDYKLSL

SEQ ID NO: 168396 - protein, 12 aa, Homo sapiens
  CDR3 for beta chain variable domain of TCR clone 84198 (TRBV6-1, TRBJ2-7)
CASSDYSYEQYF

SEQ ID NO: 168397 - protein, 13 aa, Homo sapiens
  CDR3 for alpha chain variable domain of TCR clone 84199 (TRAV22, TRAJ29)
CAVGGSGNTPLVF

SEQ ID NO: 168398 - protein, 12 aa, Homo sapiens
  CDR3 for beta chain variable domain of TCR clone 84199 (TRBV3-1, TRBJ2-1)
CASSQGSSGQFF

SEQ ID NO: 168399 - protein, 15 aa, Homo sapiens
  CDR3 for alpha chain variable domain of TCR clone 84200 (TRAV17, TRAJ13)
CATGAGSGGYQKVTF

SEQ ID NO: 168400 - protein, 17 aa, Homo sapiens
  CDR3 for beta chain variable domain of TCR clone 84200 (TRBV11-2, TRBJ2-1)
CASSLYPPGVEYNEQFF

SEQ ID NO: 168401 - protein, 12 aa, Homo sapiens
  CDR3 for alpha chain variable domain of TCR clone 84201 (TRAV1-2, TRAJ33)
CAALDSNYQLIW

SEQ ID NO: 168402 - protein, 16 aa, Homo sapiens
  CDR3 for beta chain variable domain of TCR clone 84201 (TRBV7-9, TRBJ2-1)
CASSDVAGGSYNEQFF

SEQ ID NO: 168403 - protein, 14 aa, Homo sapiens
  CDR3 for alpha chain variable domain of TCR clone 84202 (TRAV8-2, TRAJ4)
CVVSPSGGYNKLIF

SEQ ID NO: 168404 - protein, 17 aa, Homo sapiens
  CDR3 for beta chain variable domain of TCR clone 84202 (TRBV4-1, TRBJ1-4)
CASSDTGGTMKNCFLAV

SEQ ID NO: 168405 - protein, 16 aa, Homo sapiens
  CDR3 for alpha chain variable domain of TCR clone 84203 (TRAV16, TRAJ4)
CALSRMFSGGYNKLIF

SEQ ID NO: 168406 - protein, 16 aa, Homo sapiens
  CDR3 for beta chain variable domain of TCR clone 84203 (TRBV24-1, TRBJ2-3)
CATSDPGTGATDTQYI

SEQ ID NO: 168407 - protein, 14 aa, Homo sapiens
  CDR3 for alpha chain variable domain of TCR clone 84204 (TRAV12-2, TRAJ5)
CAVNRYTGRRALTF

SEQ ID NO: 168408 - protein, 12 aa, Homo sapiens
  CDR3 for beta chain variable domain of TCR clone 84204 (TRBV19, TRBJ1-5)
CASSIAQQPQHF

SEQ ID NO: 168409 - protein, 11 aa, Homo sapiens
  CDR3 for alpha chain variable domain of TCR clone 84205 (TRAV8-4, TRAJ34)
CAVSWTDKLIF

SEQ ID NO: 168410 - protein, 16 aa, Homo sapiens
  CDR3 for beta chain variable domain of TCR clone 84205 (TRBV11-2, TRBJ2-7)
CASSPLAGGPRYEQYF

SEQ ID NO: 168411 - protein, 18 aa, Homo sapiens
  CDR3 for alpha chain variable domain of TCR clone 84206 (TRAV1-2, TRAJ10)
CSVRALTPVTGGGNKLTF

SEQ ID NO: 168412 - protein, 14 aa, Homo sapiens
  CDR3 for beta chain variable domain of TCR clone 84206 (TRBV4-1, TRBJ1-1)
CASSQQGNGNEAFF

SEQ ID NO: 168413 - protein, 21 aa, Homo sapiens
  CDR3 for alpha chain variable domain of TCR clone 84207 (TRAV1-1, TRAJ6)
CLLLLRCERLERTGGSYIPTF

SEQ ID NO: 168414 - protein, 13 aa, Homo sapiens
  CDR3 for beta chain variable domain of TCR clone 84207 (TRBV10-2, TRBJ2-7)
CASGASGGYEQYC

SEQ ID NO: 168415 - protein, 15 aa, Homo sapiens
  CDR3 for alpha chain variable domain of TCR clone 84208 (TRAV17, TRAJ57)
CATGPSQGGSEKLVF

SEQ ID NO: 168416 - protein, 11 aa, Homo sapiens
  CDR3 for beta chain variable domain of TCR clone 84208 (TRBV29-1, TRBJ2-5)
CSEDRAGTQYF

SEQ ID NO: 168417 - protein, 15 aa, Homo sapiens
  CDR3 for alpha chain variable domain of TCR clone 84209 (TRAV12-1, TRAJ45)
CVVLSGGGGADGLTF

SEQ ID NO: 168418 - protein, 12 aa, Homo sapiens
  CDR3 for beta chain variable domain of TCR clone 84209 (TRBV11-2, TRBJ2-1)
CASSPGNNEQFF

SEQ ID NO: 168419 - protein, 13 aa, Homo sapiens
  CDR3 for alpha chain variable domain of TCR clone 84210 (TRAV13-2, TRAJ48)
CAEMDFGNEKLTF

SEQ ID NO: 168420 - protein, 17 aa, Homo sapiens
  CDR3 for beta chain variable domain of TCR clone 84210 (TRBV11-3, TRBJ2-4)
CASSSVGPGGHRNIQYF

SEQ ID NO: 168421 - protein, 13 aa, Homo sapiens
  CDR3 for alpha chain variable domain of TCR clone 84211 (TRAV13-1, TRAJ17)
CAASRAAGNKLTF

SEQ ID NO: 168422 - protein, 15 aa, Homo sapiens
  CDR3 for beta chain variable domain of TCR clone 84211 (TRBV2, TRBJ1-4)
CASSERRGTNEKLFF

SEQ ID NO: 168423 - protein, 17 aa, Homo sapiens
  CDR3 for alpha chain variable domain of TCR clone 84212 (TRAV36/DV7, TRAJ52)
CAVAQRAGGTSYGKLTF

SEQ ID NO: 168424 - protein, 14 aa, Homo sapiens
  CDR3 for beta chain variable domain of TCR clone 84212 (TRBV7-2, TRBJ1-3)
CASSRLRSGNTIYF

SEQ ID NO: 168425 - protein, 15 aa, Homo sapiens
  CDR3 for alpha chain variable domain of TCR clone 84213 (TRAV8-3, TRAJ45)
CASSYSGGGADGLTL

SEQ ID NO: 168426 - protein, 13 aa, Homo sapiens
  CDR3 for beta chain variable domain of TCR clone 84213 (TRBV7-9, TRBJ2-7)
CASSFAGAYEQYF

SEQ ID NO: 168427 - protein, 11 aa, Homo sapiens
  CDR3 for alpha chain variable domain of TCR clone 84214 (TRAV1-1, TRAJ23)
CAVRQGGKLIF

SEQ ID NO: 168428 - protein, 15 aa, Homo sapiens
  CDR3 for beta chain variable domain of TCR clone 84214 (TRBV7-3, TRBJ2-1)
CASSPTGGGEVEQFF

SEQ ID NO: 168429 - protein, 18 aa, Homo sapiens
  CDR3 for alpha chain variable domain of TCR clone 84215 (TRAV29/DV5, TRAJ52)
CAAGFGGAGGTSYGKLTF

SEQ ID NO: 168430 - protein, 16 aa, Homo sapiens
  CDR3 for beta chain variable domain of TCR clone 84215 (TRBV7-3, TRBJ2-2)
CASSLKRGTLSGELFF

SEQ ID NO: 168431 - protein, 14 aa, Homo sapiens
  CDR3 for alpha chain variable domain of TCR clone 84216 (TRAV13-1, TRAJ35)
CAASKGGFGNVLHC

SEQ ID NO: 168432 - protein, 13 aa, Homo sapiens
  CDR3 for beta chain variable domain of TCR clone 84216 (TRBV20-1, TRBJ2-2)
CSASAAGTGELFF

SEQ ID NO: 168433 - protein, 17 aa, Homo sapiens
  CDR3 for alpha chain variable domain of TCR clone 84217 (TRAV3, TRAJ42)
CAVRDRDYGGSQGNLIF

SEQ ID NO: 168434 - protein, 14 aa, Homo sapiens
  CDR3 for beta chain variable domain of TCR clone 84217 (TRBV7-2, TRBJ2-7)
CASSLRWEVNEQYF

SEQ ID NO: 168435 - protein, 12 aa, Homo sapiens
  CDR3 for alpha chain variable domain of TCR clone 84218 (TRAV35, TRAJ39)
LAPNNAGNMLTF

SEQ ID NO: 168436 - protein, 16 aa, Homo sapiens
  CDR3 for beta chain variable domain of TCR clone 84218 (TRBV2, TRBJ2-3)
CASSTSLEGVTDTQYF

SEQ ID NO: 168437 - protein, 14 aa, Homo sapiens
  CDR3 for alpha chain variable domain of TCR clone 84219 (TRAV1-2, TRAJ16)
CAINRFSDGQKLLF

SEQ ID NO: 168438 - protein, 16 aa, Homo sapiens
  CDR3 for beta chain variable domain of TCR clone 84219 (TRBV5-4, TRBJ2-7)
CASSQNEIAGAYEQYF

SEQ ID NO: 168439 - protein, 18 aa, Homo sapiens
  CDR3 for alpha chain variable domain of TCR clone 84220 (TRAV2, TRAJ20)
LQVREADAAVYRDCKLSF

SEQ ID NO: 168440 - protein, 13 aa, Homo sapiens
  CDR3 for beta chain variable domain of TCR clone 84220 (TRBV15, TRBJ1-6)
CATSEGLNSPLHF

SEQ ID NO: 168441 - protein, 12 aa, Homo sapiens
  CDR3 for alpha chain variable domain of TCR clone 84221 (TRAV1-2, TRAJ29)
CAVPSGNTPLVF

SEQ ID NO: 168442 - protein, 14 aa, Homo sapiens
  CDR3 for beta chain variable domain of TCR clone 84221 (TRBV7-2, TRBJ2-7)
CASSPKTSFYEQYF

SEQ ID NO: 168443 - protein, 12 aa, Homo sapiens
  CDR3 for alpha chain variable domain of TCR clone 84222 (TRAV12-3, TRAJ17)
YAMTLTGNKLTF

SEQ ID NO: 168444 - protein, 13 aa, Homo sapiens
  CDR3 for beta chain variable domain of TCR clone 84222 (TRBV7-3, TRBJ1-1)
CASSQDWGAEAFF

SEQ ID NO: 168445 - protein, 13 aa, Homo sapiens
  CDR3 for alpha chain variable domain of TCR clone 84223 (TRAV21, TRAJ27)
CAARPGNEGKSTF

SEQ ID NO: 168446 - protein, 14 aa, Homo sapiens
  CDR3 for beta chain variable domain of TCR clone 84223 (TRBV7-9, TRBJ2-5)
CASSLDTAQETQYF

SEQ ID NO: 168447 - protein, 18 aa, Homo sapiens
  CDR3 for alpha chain variable domain of TCR clone 84224 (TRAV21, TRAJ52)
CAVRPSPAGGTSYGKLTL

SEQ ID NO: 168448 - protein, 13 aa, Homo sapiens
  CDR3 for beta chain variable domain of TCR clone 84224 (TRBV29-1, TRBJ2-2)
CSVYREDTGELFF

SEQ ID NO: 168449 - protein, 14 aa, Homo sapiens
  CDR3 for alpha chain variable domain of TCR clone 84225 (TRAV12-2, TRAJ52)
CAVPGDTSYGKLTF

SEQ ID NO: 168450 - protein, 12 aa, Homo sapiens
  CDR3 for beta chain variable domain of TCR clone 84225 (TRBV18, TRBJ2-1)
CASSPGTSEGFF

SEQ ID NO: 168451 - protein, 14 aa, Homo sapiens
  CDR3 for alpha chain variable domain of TCR clone 84226 (TRAV26-1, TRAJ38)
CIADNAGNNRKLIG

SEQ ID NO: 168452 - protein, 17 aa, Homo sapiens
  CDR3 for beta chain variable domain of TCR clone 84226 (TRBV7-9, TRBJ2-3)
CASSPTVAGDLTDTQYF

SEQ ID NO: 168453 - protein, 15 aa, Homo sapiens
  CDR3 for alpha chain variable domain of TCR clone 84227 (TRAV26-1, TRAJ21)
CIVRVPIYNFNKFYF

SEQ ID NO: 168454 - protein, 16 aa, Homo sapiens
  CDR3 for beta chain variable domain of TCR clone 84227 (TRBV7-9, TRBJ2-3)
CASSLQGNPGTDTQYF

SEQ ID NO: 168455 - protein, 16 aa, Homo sapiens
  CDR3 for alpha chain variable domain of TCR clone 84228 (TRAV26-1, TRAJ40)
CIVRVGTTSGTYKYIF

SEQ ID NO: 168456 - protein, 15 aa, Homo sapiens
  CDR3 for beta chain variable domain of TCR clone 84228 (TRBV20-1, TRBJ2-7)
RSARDRVSGMDEQYF

SEQ ID NO: 168457 - protein, 11 aa, Homo sapiens
  CDR3 for alpha chain variable domain of TCR clone 84229 (TRAV35, TRAJ30)
CAGPGDDKIIF

SEQ ID NO: 168458 - protein, 18 aa, Homo sapiens
  CDR3 for beta chain variable domain of TCR clone 84229 (TRBV7-6, TRBJ2-1)
CASSARTSGMSSYNEQFF

SEQ ID NO: 168459 - protein, 15 aa, Homo sapiens
  CDR3 for alpha chain variable domain of TCR clone 84230 (TRAV8-4, TRAJ10)
CAVSDGPGGGNKLTF

SEQ ID NO: 168460 - protein, 13 aa, Homo sapiens
  CDR3 for beta chain variable domain of TCR clone 84230 (TRBV28, TRBJ1-3)
CASSFLCSGTIYF

SEQ ID NO: 168461 - protein, 13 aa, Homo sapiens
  CDR3 for alpha chain variable domain of TCR clone 84231 (TRAV3, TRAJ29)
CAVRDWGNTPLVF

SEQ ID NO: 168462 - protein, 15 aa, Homo sapiens
  CDR3 for beta chain variable domain of TCR clone 84231 (TRBV12-4, TRBJ2-5)
CASTGRTGEGETQYF

SEQ ID NO: 168463 - protein, 11 aa, Homo sapiens
  CDR3 for alpha chain variable domain of TCR clone 84232 (TRAV4, TRAJ23)
CLVGRKAYLRT

SEQ ID NO: 168464 - protein, 16 aa, Homo sapiens
  CDR3 for beta chain variable domain of TCR clone 84232 (TRBV4-1, TRBJ1-1)
CASSQDAGMGNTEAFF

SEQ ID NO: 168465 - protein, 14 aa, Homo sapiens
  CDR3 for alpha chain variable domain of TCR clone 84233 (TRAV26-1, TRAJ38)
CIADNAGNNRKLIW

SEQ ID NO: 168466 - protein, 13 aa, Homo sapiens
  CDR3 for beta chain variable domain of TCR clone 84233 (TRBV7-9, TRBJ2-3)
CASSPGSTDAQYF

SEQ ID NO: 168467 - protein, 15 aa, Homo sapiens
  CDR3 for alpha chain variable domain of TCR clone 84234 (TRAV16, TRAJ10)
CALRDLTGGGNKLTF

SEQ ID NO: 168468 - protein, 14 aa, Homo sapiens
  CDR3 for beta chain variable domain of TCR clone 84234 (TRBV5-5, TRBJ2-7)
CASSLGQGTYEQYF

SEQ ID NO: 168469 - protein, 12 aa, Homo sapiens
  CDR3 for alpha chain variable domain of TCR clone 84235 (TRAV13-2, TRAJ8)
CAPWLGFQKLVF

SEQ ID NO: 168470 - protein, 16 aa, Homo sapiens
  CDR3 for beta chain variable domain of TCR clone 84235 (TRBV5-1, TRBJ2-7)
CASSLEGPAGLYEQYF

SEQ ID NO: 168471 - protein, 17 aa, Homo sapiens
  CDR3 for alpha chain variable domain of TCR clone 84236 (TRAV3, TRAJ42)
CAVRDGDYGGSQGNLIF

SEQ ID NO: 168472 - protein, 15 aa, Homo sapiens
  CDR3 for beta chain variable domain of TCR clone 84236 (TRBV2, TRBJ2-7)
CASSEGLARSYEQYF

SEQ ID NO: 168473 - protein, 16 aa, Homo sapiens
  CDR3 for alpha chain variable domain of TCR clone 84237 (TRAV30, TRAJ24)
CGTEIVDADSWGKFQF

SEQ ID NO: 168474 - protein, 17 aa, Homo sapiens
  CDR3 for beta chain variable domain of TCR clone 84237 (TRBV4-2, TRBJ1-1)
CASTQFGGGSGNTEAFF

SEQ ID NO: 168475 - protein, 13 aa, Homo sapiens
  CDR3 for alpha chain variable domain of TCR clone 84238 (TRAV2, TRAJ40)
CAVVTSGTYKYIF

SEQ ID NO: 168476 - protein, 13 aa, Homo sapiens
  CDR3 for beta chain variable domain of TCR clone 84238 (TRBV24-1, TRBJ2-2)
CATSDWSTGELFF

SEQ ID NO: 168477 - protein, 12 aa, Homo sapiens
  CDR3 for alpha chain variable domain of TCR clone 84239 (TRAV12-3, TRAJ17)
CAMMLTGNKLTF

SEQ ID NO: 168478 - protein, 15 aa, Homo sapiens
  CDR3 for beta chain variable domain of TCR clone 84239 (TRBV20-1, TRBJ2-7)
CSARDRVSGMDEQCF

SEQ ID NO: 168479 - protein, 15 aa, Homo sapiens
  CDR3 for alpha chain variable domain of TCR clone 84240 (TRAV8-4, TRAJ7)
CAVSGGNYGNNRLAF

SEQ ID NO: 168480 - protein, 15 aa, Homo sapiens
  CDR3 for beta chain variable domain of TCR clone 84240 (TRBV6-4, TRBJ2-1)
CASSSGTSGHNEQFF

SEQ ID NO: 168481 - protein, 12 aa, Homo sapiens
  CDR3 for alpha chain variable domain of TCR clone 84241 (TRAV12-3, TRAJ40)
CAMSSGTYKYIF

SEQ ID NO: 168482 - protein, 15 aa, Homo sapiens
  CDR3 for beta chain variable domain of TCR clone 84241 (TRBV7-3, TRBJ2-2)
GASSETGQGTGELFF

SEQ ID NO: 168483 - protein, 13 aa, Homo sapiens
  CDR3 for alpha chain variable domain of TCR clone 84242 (TRAV2, TRAJ40)
CAVVTSGTYKYIF

SEQ ID NO: 168484 - protein, 15 aa, Homo sapiens
  CDR3 for beta chain variable domain of TCR clone 84242 (TRBV28, TRBJ1-2)
CASSGSEQRAFGYTF

SEQ ID NO: 168485 - protein, 12 aa, Homo sapiens
  CDR3 for alpha chain variable domain of TCR clone 84243 (TRAV13-2, TRAJ23)
CAECHRGGKLIF

SEQ ID NO: 168486 - protein, 16 aa, Homo sapiens
  CDR3 for beta chain variable domain of TCR clone 84243 (TRBV20-1, TRBJ1-4)
CSAPGQGLLTNEKLFF

SEQ ID NO: 168487 - protein, 22 aa, Homo sapiens
  CDR3 for alpha chain variable domain of TCR clone 84244 (TRAV8-2, TRAJ45)
HLTKPSAHMSDAAEYSADGLTF

SEQ ID NO: 168488 - protein, 15 aa, Homo sapiens
  CDR3 for beta chain variable domain of TCR clone 84244 (TRBV19, TRBJ2-1)
CASSSPGVPLDEQFF

SEQ ID NO: 168489 - protein, 17 aa, Homo sapiens
  CDR3 for alpha chain variable domain of TCR clone 84245 (TRAV3, TRAJ6)
CAVRDGPRAGGSYIPTF

SEQ ID NO: 168490 - protein, 15 aa, Homo sapiens
  CDR3 for beta chain variable domain of TCR clone 84245 (TRBV6-6, TRBJ2-7)
CASSYSYGGSYEQYF

SEQ ID NO: 168491 - protein, 11 aa, Homo sapiens
  CDR3 for alpha chain variable domain of TCR clone 84246 (TRAV13-1, TRAJ30)
CAASRDDKIIF

SEQ ID NO: 168492 - protein, 15 aa, Homo sapiens
  CDR3 for beta chain variable domain of TCR clone 84246 (TRBV18, TRBJ1-1)
CASSPSSWVNNEAFF

SEQ ID NO: 168493 - protein, 13 aa, Homo sapiens
  CDR3 for alpha chain variable domain of TCR clone 84247 (TRAV29/DV5, TRAJ31)
CAASRNNNARLMF

SEQ ID NO: 168494 - protein, 14 aa, Homo sapiens
  CDR3 for beta chain variable domain of TCR clone 84247 (TRBV18, TRBJ1-2)
CASSPDRVVYGYTF

SEQ ID NO: 168495 - protein, 12 aa, Homo sapiens
  CDR3 for alpha chain variable domain of TCR clone 84248 (TRAV30, TRAJ43)
CGTEERGNDMRF

SEQ ID NO: 168496 - protein, 13 aa, Homo sapiens
  CDR3 for beta chain variable domain of TCR clone 84248 (TRBV12-4, TRBJ1-2)
CASSSGSKDGCTF

SEQ ID NO: 168497 - protein, 15 aa, Homo sapiens
  CDR3 for alpha chain variable domain of TCR clone 84249 (TRAV4, TRAJ39)
CLVGPTNNAGNMLTF

SEQ ID NO: 168498 - protein, 14 aa, Homo sapiens
  CDR3 for beta chain variable domain of TCR clone 84249 (TRBV11-2, TRBJ2-5)
CASSRTGGIETQYF

SEQ ID NO: 168499 - protein, 13 aa, Homo sapiens
  CDR3 for alpha chain variable domain of TCR clone 84250 (TRAV27, TRAJ41)
CAGEGNSGYALNF

SEQ ID NO: 168500 - protein, 17 aa, Homo sapiens
  CDR3 for beta chain variable domain of TCR clone 84250 (TRBV28, TRBJ2-7)
CASSPLHRASEVYEQYF

SEQ ID NO: 168501 - protein, 14 aa, Homo sapiens
  CDR3 for alpha chain variable domain of TCR clone 84251 (TRAV1-2, TRAJ16)
CAVNRFSDGQKLLF

SEQ ID NO: 168502 - protein, 16 aa, Homo sapiens
  CDR3 for beta chain variable domain of TCR clone 84251 (TRBV11-2, TRBJ2-7)
CASSTVTAPKTYEQYF

SEQ ID NO: 168503 - protein, 15 aa, Homo sapiens
  CDR3 for alpha chain variable domain of TCR clone 84252 (TRAV8-3, TRAJ45)
CASSYSGGGADGLTF

SEQ ID NO: 168504 - protein, 14 aa, Homo sapiens
  CDR3 for beta chain variable domain of TCR clone 84252 (TRBV19, TRBJ2-3)
CASSAPRGTDTQYF

SEQ ID NO: 168505 - protein, 15 aa, Homo sapiens
  CDR3 for alpha chain variable domain of TCR clone 84253 (TRAV8-4, TRAJ3)
CAVTGENLVQQCFQD

SEQ ID NO: 168506 - protein, 16 aa, Homo sapiens
  CDR3 for beta chain variable domain of TCR clone 84253 (TRBV4-2, TRBJ1-1)
RASSQAGFGMNTKAFF

SEQ ID NO: 168507 - protein, 19 aa, Homo sapiens
  CDR3 for alpha chain variable domain of TCR clone 84254 (TRAV26-1, TRAJ52)
CIVRAHRNAGGTSYGKLTF

SEQ ID NO: 168508 - protein, 15 aa, Homo sapiens
  CDR3 for beta chain variable domain of TCR clone 84254 (TRBV29-1, TRBJ2-1)
WSGRDRKSSYNEQFF

SEQ ID NO: 168509 - protein, 15 aa, Homo sapiens
  CDR3 for alpha chain variable domain of TCR clone 84255 (TRAV26-1, TRAJ23)
CIVRVAGYQGGKLIF

SEQ ID NO: 168510 - protein, 18 aa, Homo sapiens
  CDR3 for beta chain variable domain of TCR clone 84255 (TRBV28, TRBJ2-1)
CASSATSGRANSYNEQFF

SEQ ID NO: 168511 - protein, 15 aa, Homo sapiens
  CDR3 for alpha chain variable domain of TCR clone 84256 (TRAV14/DV4, TRAJ33)
CAMREGRDSNYQLIW

SEQ ID NO: 168512 - protein, 15 aa, Homo sapiens
  CDR3 for beta chain variable domain of TCR clone 84256 (TRBV5-5, TRBJ1-5)
CASSSTPGSNQPQHL

SEQ ID NO: 168513 - protein, 14 aa, Homo sapiens
  CDR3 for alpha chain variable domain of TCR clone 84257 (TRAV4, TRAJ17)
CLVGDMAAGNKLTF

SEQ ID NO: 168514 - protein, 16 aa, Homo sapiens
  CDR3 for beta chain variable domain of TCR clone 84257 (TRBV5-1, TRBJ2-3)
CASSLGLAVYTDTQYF

SEQ ID NO: 168515 - protein, 10 aa, Homo sapiens
  CDR3 for alpha chain variable domain of TCR clone 84258 (TRAV12-2, TRAJ20)
CAVYPYKLSF

SEQ ID NO: 168516 - protein, 16 aa, Homo sapiens
  CDR3 for beta chain variable domain of TCR clone 84258 (TRBV4-3, TRBJ1-6)
CASSAQPGGEGSPLHF

SEQ ID NO: 168517 - protein, 14 aa, Homo sapiens
  CDR3 for alpha chain variable domain of TCR clone 84259 (TRAV1-2, TRAJ8)
CAVREDTGFQKLVF

SEQ ID NO: 168518 - protein, 13 aa, Homo sapiens
  CDR3 for beta chain variable domain of TCR clone 84259 (TRBV13, TRBJ2-5)
CASSPEVGETQYF

SEQ ID NO: 168519 - protein, 13 aa, Homo sapiens
  CDR3 for alpha chain variable domain of TCR clone 84260 (TRAV8-3, TRAJ28)
CAVGAVGSYQLTF

SEQ ID NO: 168520 - protein, 13 aa, Homo sapiens
  CDR3 for beta chain variable domain of TCR clone 84260 (TRBV18, TRBJ1-2)
CASSASATEGYTF

SEQ ID NO: 168521 - protein, 13 aa, Homo sapiens
  CDR3 for alpha chain variable domain of TCR clone 84261 (TRAV20, TRAJ34)
CAVSSYNTDKLIF

SEQ ID NO: 168522 - protein, 13 aa, Homo sapiens
  CDR3 for beta chain variable domain of TCR clone 84261 (TRBV7-9, TRBJ1-2)
CARSLKQNYGYTF

SEQ ID NO: 168523 - protein, 15 aa, Homo sapiens
  CDR3 for alpha chain variable domain of TCR clone 84262 (TRAV38-2/DV8, TRAJ50)
CAYRSEETSYDKVIF

SEQ ID NO: 168524 - protein, 12 aa, Homo sapiens
  CDR3 for beta chain variable domain of TCR clone 84262 (TRBV5-1, TRBJ2-3)
CASSLRGVTQYF

SEQ ID NO: 168525 - protein, 13 aa, Homo sapiens
  CDR3 for alpha chain variable domain of TCR clone 84263 (TRAV1-2, TRAJ9)
CAVLNTGGFKTIF

SEQ ID NO: 168526 - protein, 14 aa, Homo sapiens
  CDR3 for beta chain variable domain of TCR clone 84263 (TRBV19, TRBJ2-1)
CASPTVVLSGEQFF

SEQ ID NO: 168527 - protein, 12 aa, Homo sapiens
  CDR3 for alpha chain variable domain of TCR clone 84264 (TRAV2, TRAJ26)
CPPGDYGQNFVF

SEQ ID NO: 168528 - protein, 13 aa, Homo sapiens
  CDR3 for beta chain variable domain of TCR clone 84264 (TRBV7-9, TRBJ1-2)
CASSLKQNYGYTF

SEQ ID NO: 168529 - protein, 12 aa, Homo sapiens
  CDR3 for alpha chain variable domain of TCR clone 84265 (TRAV16, TRAJ10)
RSRTGGGNKLTF

SEQ ID NO: 168530 - protein, 14 aa, Homo sapiens
  CDR3 for beta chain variable domain of TCR clone 84265 (TRBV7-2, TRBJ2-7)
CASRSQGAAYEQYF

SEQ ID NO: 168531 - protein, 14 aa, Homo sapiens
  CDR3 for alpha chain variable domain of TCR clone 84266 (TRAV12-1, TRAJ4)
CVGDFSGGYNKLIF

SEQ ID NO: 168532 - protein, 15 aa, Homo sapiens
  CDR3 for beta chain variable domain of TCR clone 84266 (TRBV29-1, TRBJ2-7)
CSVEFFDRGSYEQYF

SEQ ID NO: 168533 - protein, 14 aa, Homo sapiens
  CDR3 for alpha chain variable domain of TCR clone 84267 (TRAV38-1, TRAJ43)
CAFMKHNNNNDIRF

SEQ ID NO: 168534 - protein, 14 aa, Homo sapiens
  CDR3 for beta chain variable domain of TCR clone 84267 (TRBV5-4, TRBJ1-1)
CASSLDSRRDEAFF

SEQ ID NO: 168535 - protein, 14 aa, Homo sapiens
  CDR3 for alpha chain variable domain of TCR clone 84268 (TRAV12-3, TRAJ10)
SHLPLTGGGNKLTF

SEQ ID NO: 168536 - protein, 13 aa, Homo sapiens
  CDR3 for beta chain variable domain of TCR clone 84268 (TRBV7-6, TRBJ2-3)
CASSLAVVDTQYF

SEQ ID NO: 168537 - protein, 13 aa, Homo sapiens
  CDR3 for alpha chain variable domain of TCR clone 84269 (TRAV3, TRAJ21)
CAVREPDFNKFYF

SEQ ID NO: 168538 - protein, 14 aa, Homo sapiens
  CDR3 for beta chain variable domain of TCR clone 84269 (TRBV19, TRBJ2-1)
CASRGDPTGNEQFF

SEQ ID NO: 168539 - protein, 17 aa, Homo sapiens
  CDR3 for alpha chain variable domain of TCR clone 84270 (TRAV16, TRAJ28)
CALSKRNSGAGSYQLTF

SEQ ID NO: 168540 - protein, 15 aa, Homo sapiens
  CDR3 for beta chain variable domain of TCR clone 84270 (TRBV27, TRBJ2-1)
CASSNGGGSSNEQFF

SEQ ID NO: 168541 - protein, 12 aa, Homo sapiens
  CDR3 for alpha chain variable domain of TCR clone 84271 (TRAV17, TRAJ53)
CAFGGSNYKLTF

SEQ ID NO: 168542 - protein, 14 aa, Homo sapiens
  CDR3 for beta chain variable domain of TCR clone 84271 (TRBV15, TRBJ2-5)
CATSIGGLGETQYF

SEQ ID NO: 168543 - protein, 14 aa, Homo sapiens
  CDR3 for alpha chain variable domain of TCR clone 84272 (TRAV12-2, TRAJ11)
CAVRKNSGYSTLTL

SEQ ID NO: 168544 - protein, 14 aa, Homo sapiens
  CDR3 for beta chain variable domain of TCR clone 84272 (TRBV7-2, TRBJ2-5)
CASWQERFRETQYF

SEQ ID NO: 168545 - protein, 14 aa, Homo sapiens
  CDR3 for alpha chain variable domain of TCR clone 84273 (TRAV23/DV6, TRAJ4)
CAANLSGGYNKLIF

SEQ ID NO: 168546 - protein, 11 aa, Homo sapiens
  CDR3 for beta chain variable domain of TCR clone 84273 (TRBV7-9, TRBJ2-3)
CASSPTETQYF

SEQ ID NO: 168547 - protein, 15 aa, Homo sapiens
  CDR3 for alpha chain variable domain of TCR clone 84274 (TRAV9-2, TRAJ57)
CALRPNQGGSEKLVF

SEQ ID NO: 168548 - protein, 15 aa, Homo sapiens
  CDR3 for beta chain variable domain of TCR clone 84274 (TRBV4-1, TRBJ2-7)
CASSQQGQGFDEQYF

SEQ ID NO: 168549 - protein, 16 aa, Homo sapiens
  CDR3 for alpha chain variable domain of TCR clone 84275 (TRAV8-2, TRAJ45)
CVVSEGTGGGADGLTF

SEQ ID NO: 168550 - protein, 15 aa, Homo sapiens
  CDR3 for beta chain variable domain of TCR clone 84275 (TRBV7-9, TRBJ2-5)
CASSLVAGWLETQYF

SEQ ID NO: 168551 - protein, 11 aa, Homo sapiens
  CDR3 for alpha chain variable domain of TCR clone 84276 (TRAV1-2, TRAJ40)
CAVPGTYKYIF

SEQ ID NO: 168552 - protein, 15 aa, Homo sapiens
  CDR3 for beta chain variable domain of TCR clone 84276 (TRBV9, TRBJ1-6)
CASSVAGTGDSPLHF

SEQ ID NO: 168553 - protein, 18 aa, Homo sapiens
  CDR3 for alpha chain variable domain of TCR clone 84277 (TRAV21, TRAJ52)
CAVRPSPAGGTSYGKLTF

SEQ ID NO: 168554 - protein, 18 aa, Homo sapiens
  CDR3 for beta chain variable domain of TCR clone 84277 (TRBV18, TRBJ1-3)
CASSPRGGAGPSGNTIYF

SEQ ID NO: 168555 - protein, 14 aa, Homo sapiens
  CDR3 for alpha chain variable domain of TCR clone 84278 (TRAV26-1, TRAJ16)
CIVRVPSDGQKLLL

SEQ ID NO: 168556 - protein, 17 aa, Homo sapiens
  CDR3 for beta chain variable domain of TCR clone 84278 (TRBV20-1, TRBJ2-1)
CSASSSGLAGSYNEQFF

SEQ ID NO: 168557 - protein, 15 aa, Homo sapiens
  CDR3 for alpha chain variable domain of TCR clone 84279 (TRAV21, TRAJ45)
CAVSYSGGGAAGLTF

SEQ ID NO: 168558 - protein, 13 aa, Homo sapiens
  CDR3 for beta chain variable domain of TCR clone 84279 (TRBV20-1, TRBJ2-5)
CSAATELQETQYF

SEQ ID NO: 168559 - protein, 21 aa, Homo sapiens
  CDR3 for alpha chain variable domain of TCR clone 84280 (TRAV35, TRAJ10)
SIHTKCFSHLPLTGGGNKLTF

SEQ ID NO: 168560 - protein, 16 aa, Homo sapiens
  CDR3 for beta chain variable domain of TCR clone 84280 (TRBV20-1, TRBJ1-2)
CSASMGQGVANYGYTF

SEQ ID NO: 168561 - protein, 16 aa, Homo sapiens
  CDR3 for alpha chain variable domain of TCR clone 84281 (TRAV30, TRAJ24)
YGTEIVDADSWGKFQF

SEQ ID NO: 168562 - protein, 15 aa, Homo sapiens
  CDR3 for beta chain variable domain of TCR clone 84281 (TRBV7-9, TRBJ1-4)
CASSARTGGNEKLFF

SEQ ID NO: 168563 - protein, 20 aa, Homo sapiens
  CDR3 for alpha chain variable domain of TCR clone 84282 (TRAV13-1, )
CAASPMDIQNTDPAVYQLRD

SEQ ID NO: 168564 - protein, 13 aa, Homo sapiens
  CDR3 for beta chain variable domain of TCR clone 84282 (TRBV20-1, TRBJ2-2)
CSASAAGTGELFF

SEQ ID NO: 168565 - protein, 14 aa, Homo sapiens
  CDR3 for alpha chain variable domain of TCR clone 84283 (TRAV13-1, TRAJ26)
CEAPKGPDGQNFVF

SEQ ID NO: 168566 - protein, 15 aa, Homo sapiens
  CDR3 for beta chain variable domain of TCR clone 84283 (TRBV28, TRBJ2-5)
CASSFRQGALETQYF

SEQ ID NO: 168567 - protein, 14 aa, Homo sapiens
  CDR3 for alpha chain variable domain of TCR clone 84284 (TRAV35, TRAJ13)
CAGSPSGGHQKVTF

SEQ ID NO: 168568 - protein, 17 aa, Homo sapiens
  CDR3 for beta chain variable domain of TCR clone 84284 (TRBV18, TRBJ1-5)
CQLTTCRVRQNNQPQHF

SEQ ID NO: 168569 - protein, 16 aa, Homo sapiens
  CDR3 for alpha chain variable domain of TCR clone 84285 (TRAV3, TRAJ23)
CAVKIGIYNQGGKLIF

SEQ ID NO: 168570 - protein, 14 aa, Homo sapiens
  CDR3 for beta chain variable domain of TCR clone 84285 (TRBV19, TRBJ2-1)
CASPTFVLSGEQFF

SEQ ID NO: 168571 - protein, 12 aa, Homo sapiens
  CDR3 for alpha chain variable domain of TCR clone 84286 (TRAV12-3, TRAJ17)
CAMTLTGNKLTF

SEQ ID NO: 168572 - protein, 12 aa, Homo sapiens
  CDR3 for beta chain variable domain of TCR clone 84286 (TRBV3-1, TRBJ1-1)
CASSQDPTEAFF

SEQ ID NO: 168573 - protein, 14 aa, Homo sapiens
  CDR3 for alpha chain variable domain of TCR clone 84287 (TRAV1-2, TRAJ16)
CAVNRFSDGQKLLF

SEQ ID NO: 168574 - protein, 15 aa, Homo sapiens
  CDR3 for beta chain variable domain of TCR clone 84287 (TRBV4-3, TRBJ2-3)
CASSQDGRATDTQYF

SEQ ID NO: 168575 - protein, 12 aa, Homo sapiens
  CDR3 for alpha chain variable domain of TCR clone 84288 (TRAV40, TRAJ20)
CLRGLNDYKLGF

SEQ ID NO: 168576 - protein, 14 aa, Homo sapiens
  CDR3 for beta chain variable domain of TCR clone 84288 (TRBV19, TRBJ2-1)
CASSSGRDYNEQFF

SEQ ID NO: 168577 - protein, 17 aa, Homo sapiens
  CDR3 for alpha chain variable domain of TCR clone 84289 (TRAV38-1, TRAJ28)
CAFMKPTSGAESYQLTF

SEQ ID NO: 168578 - protein, 14 aa, Homo sapiens
  CDR3 for beta chain variable domain of TCR clone 84289 (TRBV18, TRBJ2-7)
CASSPRGGAYEQYF

SEQ ID NO: 168579 - protein, 18 aa, Homo sapiens
  CDR3 for alpha chain variable domain of TCR clone 84290 (TRAV21, TRAJ52)
CAVRPSPAGGTSYGKLTF

SEQ ID NO: 168580 - protein, 14 aa, Homo sapiens
  CDR3 for beta chain variable domain of TCR clone 84290 (TRBV9, TRBJ2-1)
CASSVDPRGKEQFF

SEQ ID NO: 168581 - protein, 13 aa, Homo sapiens
  CDR3 for alpha chain variable domain of TCR clone 84291 (TRAV23/DV6, TRAJ22)
CAPYSGSARQLTF

SEQ ID NO: 168582 - protein, 15 aa, Homo sapiens
  CDR3 for beta chain variable domain of TCR clone 84291 (TRBV11-2, TRBJ1-6)
RASSLDPWAVSPLHF

SEQ ID NO: 168583 - protein, 13 aa, Homo sapiens
  CDR3 for alpha chain variable domain of TCR clone 84292 (TRAV2, TRAJ29)
CAAGGPGNTPLVF

SEQ ID NO: 168584 - protein, 14 aa, Homo sapiens
  CDR3 for beta chain variable domain of TCR clone 84292 (TRBV5-1, TRBJ2-2)
CASSLVEGSGELFF

SEQ ID NO: 168585 - protein, 11 aa, Homo sapiens
  CDR3 for alpha chain variable domain of TCR clone 84293 (TRAV17, TRAJ9)
CGFTGGFKTIF

SEQ ID NO: 168586 - protein, 14 aa, Homo sapiens
  CDR3 for beta chain variable domain of TCR clone 84293 (TRBV7-9, TRBJ2-2)
FASSLVQDTGELFF

SEQ ID NO: 168587 - protein, 13 aa, Homo sapiens
  CDR3 for alpha chain variable domain of TCR clone 84294 (TRAV12-3, TRAJ54)
CAMFAQGAQKLVL

SEQ ID NO: 168588 - protein, 16 aa, Homo sapiens
  CDR3 for beta chain variable domain of TCR clone 84294 (TRBV7-6, TRBJ2-3)
CASSPRRGGLGDTQYF

SEQ ID NO: 168589 - protein, 14 aa, Homo sapiens
  CDR3 for alpha chain variable domain of TCR clone 84295 (TRAV12-1, TRAJ12)
CVVTRMDSSYKLIF

SEQ ID NO: 168590 - protein, 18 aa, Homo sapiens
  CDR3 for beta chain variable domain of TCR clone 84295 (TRBV11-2, TRBJ2-3)
CASSLGGASRGAPNTQYF

SEQ ID NO: 168591 - protein, 14 aa, Homo sapiens
  CDR3 for alpha chain variable domain of TCR clone 84296 (TRAV26-1, TRAJ43)
CIVRAGYNNNDMRF

SEQ ID NO: 168592 - protein, 12 aa, Homo sapiens
  CDR3 for beta chain variable domain of TCR clone 84296 (TRBV5-1, TRBJ2-1)
CASIGGYNEQFF

SEQ ID NO: 168593 - protein, 11 aa, Homo sapiens
  CDR3 for alpha chain variable domain of TCR clone 84297 (TRAV2, TRAJ33)
CAVDSNYQLIW

SEQ ID NO: 168594 - protein, 16 aa, Homo sapiens
  CDR3 for beta chain variable domain of TCR clone 84297 (TRBV13, TRBJ2-2)
CASSPRTGEHTGELFF

SEQ ID NO: 168595 - protein, 15 aa, Homo sapiens
  CDR3 for alpha chain variable domain of TCR clone 84298 (TRAV8-3, TRAJ11)
CAVGLLNSGYSTLTF

SEQ ID NO: 168596 - protein, 10 aa, Homo sapiens
  CDR3 for beta chain variable domain of TCR clone 84298 (TRBV15, TRBJ2-7)
AETGGYEQYF

SEQ ID NO: 168597 - protein, 15 aa, Homo sapiens
  CDR3 for alpha chain variable domain of TCR clone 84299 (TRAV17, TRAJ37)
CATDGGSSNPGKLIF

SEQ ID NO: 168598 - protein, 15 aa, Homo sapiens
  CDR3 for beta chain variable domain of TCR clone 84299 (TRBV28, TRBJ2-5)
CASSSGRTIQETQYF

SEQ ID NO: 168599 - protein, 17 aa, Homo sapiens
  CDR3 for alpha chain variable domain of TCR clone 84300 (TRAV3, TRAJ38)
CAVRDCLNAGNNRTLIW

SEQ ID NO: 168600 - protein, 14 aa, Homo sapiens
  CDR3 for beta chain variable domain of TCR clone 84300 (TRBV5-5, TRBJ1-5)
CASSGQGVDQPQHF

SEQ ID NO: 168601 - protein, 18 aa, Homo sapiens
  CDR3 for alpha chain variable domain of TCR clone 84301 (TRAV26-1, TRAJ39)
CIVRPPDLYNNAGNMLTF

SEQ ID NO: 168602 - protein, 15 aa, Homo sapiens
  CDR3 for beta chain variable domain of TCR clone 84301 (TRBV7-4, TRBJ1-2)
CQQPLTGGLSYGCIF

SEQ ID NO: 168603 - protein, 14 aa, Homo sapiens
  CDR3 for alpha chain variable domain of TCR clone 84302 (TRAV13-1, TRAJ35)
CAASRGGFGNVLHC

SEQ ID NO: 168604 - protein, 15 aa, Homo sapiens
  CDR3 for beta chain variable domain of TCR clone 84302 (TRBV28, TRBJ2-1)
CASSGLAEVDNEQFF

SEQ ID NO: 168605 - protein, 14 aa, Homo sapiens
  CDR3 for alpha chain variable domain of TCR clone 84303 (TRAV9-2, TRAJ39)
CALYIYNAGNMLTF

SEQ ID NO: 168606 - protein, 14 aa, Homo sapiens
  CDR3 for beta chain variable domain of TCR clone 84303 (TRBV7-6, TRBJ2-3)
CASSVAGGTDTQYF

SEQ ID NO: 168607 - protein, 15 aa, Homo sapiens
  CDR3 for alpha chain variable domain of TCR clone 84304 (TRAV17, TRAJ16)
CATALRFSDGQKLPF

SEQ ID NO: 168608 - protein, 15 aa, Homo sapiens
  CDR3 for beta chain variable domain of TCR clone 84304 (TRBV13, TRBJ1-5)
CASSFGQGGVQPQHF

SEQ ID NO: 168609 - protein, 17 aa, Homo sapiens
  CDR3 for alpha chain variable domain of TCR clone 84305 (TRAV19, TRAJ28)
CALSEASSGAGSHQLTF

SEQ ID NO: 168610 - protein, 13 aa, Homo sapiens
  CDR3 for beta chain variable domain of TCR clone 84305 (TRBV3-1, TRBJ1-1)
CASSPGVITEAFF

SEQ ID NO: 168611 - protein, 13 aa, Homo sapiens
  CDR3 for alpha chain variable domain of TCR clone 84306 (TRAV16, TRAJ5)
CALTNTGRRALTF

SEQ ID NO: 168612 - protein, 12 aa, Homo sapiens
  CDR3 for beta chain variable domain of TCR clone 84306 (TRBV7-8, TRBJ2-7)
CASSLGDREQYF

SEQ ID NO: 168613 - protein, 11 aa, Homo sapiens
  CDR3 for alpha chain variable domain of TCR clone 84307 (TRAV17, TRAJ9)
CAPTGGFKTIF

SEQ ID NO: 168614 - protein, 14 aa, Homo sapiens
  CDR3 for beta chain variable domain of TCR clone 84307 (TRBV7-9, TRBJ2-2)
CASSGLADTGELFF

SEQ ID NO: 168615 - protein, 13 aa, Homo sapiens
  CDR3 for alpha chain variable domain of TCR clone 84308 (TRAV21, TRAJ56)
CAALTGANSKLTF

SEQ ID NO: 168616 - protein, 16 aa, Homo sapiens
  CDR3 for beta chain variable domain of TCR clone 84308 (TRBV12-4, TRBJ2-2)
CASSSQVGGPGGELFF

SEQ ID NO: 168617 - protein, 15 aa, Homo sapiens
  CDR3 for alpha chain variable domain of TCR clone 84309 (TRAV14/DV4, TRAJ12)
CAMREERDSSYKLIF

SEQ ID NO: 168618 - protein, 15 aa, Homo sapiens
  CDR3 for beta chain variable domain of TCR clone 84309 (TRBV2, TRBJ2-7)
CASSEGLARSYEQYF

SEQ ID NO: 168619 - protein, 16 aa, Homo sapiens
  CDR3 for alpha chain variable domain of TCR clone 84310 (TRAV30, TRAJ24)
CGTEIVDADSWGKFQF

SEQ ID NO: 168620 - protein, 16 aa, Homo sapiens
  CDR3 for beta chain variable domain of TCR clone 84310 (TRBV4-3, TRBJ2-7)
CASSPRTSGRSYEQYF

SEQ ID NO: 168621 - protein, 12 aa, Homo sapiens
  CDR3 for alpha chain variable domain of TCR clone 84311 (TRAV30, TRAJ43)
CGTEERGNDMRF

SEQ ID NO: 168622 - protein, 14 aa, Homo sapiens
  CDR3 for beta chain variable domain of TCR clone 84311 (TRBV25-1, TRBJ1-1)
CASTHLGGNTEAFF

SEQ ID NO: 168623 - protein, 16 aa, Homo sapiens
  CDR3 for alpha chain variable domain of TCR clone 84312 (TRAV3, TRAJ37)
CSVRVRGSGNTGKLIF

SEQ ID NO: 168624 - protein, 13 aa, Homo sapiens
  CDR3 for beta chain variable domain of TCR clone 84312 (TRBV14, TRBJ2-1)
CASSQDRRNEQFF

SEQ ID NO: 168625 - protein, 13 aa, Homo sapiens
  CDR3 for alpha chain variable domain of TCR clone 84313 (TRAV12-3, TRAJ7)
CAMSASGNNRLAF

SEQ ID NO: 168626 - protein, 15 aa, Homo sapiens
  CDR3 for beta chain variable domain of TCR clone 84313 (TRBV7-2, TRBJ2-3)
CASSLAGAFIDTQYF

SEQ ID NO: 168627 - protein, 14 aa, Homo sapiens
  CDR3 for alpha chain variable domain of TCR clone 84314 (TRAV9-2, TRAJ39)
CALYIYNAGNMLTF

SEQ ID NO: 168628 - protein, 16 aa, Homo sapiens
  CDR3 for beta chain variable domain of TCR clone 84314 (TRBV2, TRBJ2-5)
CASSETQGVGEETQYF

SEQ ID NO: 168629 - protein, 16 aa, Homo sapiens
  CDR3 for alpha chain variable domain of TCR clone 84315 (TRAV13-2, TRAJ53)
FAENANSGGSNYKLTF

SEQ ID NO: 168630 - protein, 19 aa, Homo sapiens
  CDR3 for beta chain variable domain of TCR clone 84315 (TRBV28, TRBJ2-7)
CASSYSGTSRLGWVYEQYF

SEQ ID NO: 168631 - protein, 11 aa, Homo sapiens
  CDR3 for alpha chain variable domain of TCR clone 84316 (TRAV2, TRAJ33)
CVVDSNYQLIW

SEQ ID NO: 168632 - protein, 15 aa, Homo sapiens
  CDR3 for beta chain variable domain of TCR clone 84316 (TRBV19, TRBJ1-2)
CASSVGQVLNYGYTF

SEQ ID NO: 168633 - protein, 18 aa, Homo sapiens
  CDR3 for alpha chain variable domain of TCR clone 84317 (TRAV26-2, TRAJ45)
CILRVDKYSGGGADGITF

SEQ ID NO: 168634 - protein, 16 aa, Homo sapiens
  CDR3 for beta chain variable domain of TCR clone 84317 (TRBV2, TRBJ1-4)
CASNLLQGATNEKLFF

SEQ ID NO: 168635 - protein, 14 aa, Homo sapiens
  CDR3 for alpha chain variable domain of TCR clone 84318 (TRAV16, TRAJ42)
CALLAGGGQGNLIF

SEQ ID NO: 168636 - protein, 13 aa, Homo sapiens
  CDR3 for beta chain variable domain of TCR clone 84318 (TRBV7-9, TRBJ1-2)
CASSLKQNYGYTF

SEQ ID NO: 168637 - protein, 12 aa, Homo sapiens
  CDR3 for alpha chain variable domain of TCR clone 84319 (TRAV17, TRAJ30)
CATDARDDKIIF

SEQ ID NO: 168638 - protein, 15 aa, Homo sapiens
  CDR3 for beta chain variable domain of TCR clone 84319 (TRBV4-1, TRBJ2-1)
CASSQGGELYNEQFV

SEQ ID NO: 168639 - protein, 11 aa, Homo sapiens
  CDR3 for alpha chain variable domain of TCR clone 84320 (TRAV12-2, TRAJ31)
CAVTRWARLMF

SEQ ID NO: 168640 - protein, 13 aa, Homo sapiens
  CDR3 for beta chain variable domain of TCR clone 84320 (TRBV12-4, TRBJ1-2)
CASSSGLTVISTF

SEQ ID NO: 168641 - protein, 15 aa, Homo sapiens
  CDR3 for alpha chain variable domain of TCR clone 84321 (TRAV21, TRAJ40)
CAVRPQASGTYKYIF

SEQ ID NO: 168642 - protein, 13 aa, Homo sapiens
  CDR3 for beta chain variable domain of TCR clone 84321 (TRBV7-2, TRBJ2-2)
CASSSVRAGELFF

SEQ ID NO: 168643 - protein, 16 aa, Homo sapiens
  CDR3 for alpha chain variable domain of TCR clone 84322 (TRAV30, TRAJ24)
CGTEIVDADSWGKFQV

SEQ ID NO: 168644 - protein, 15 aa, Homo sapiens
  CDR3 for beta chain variable domain of TCR clone 84322 (TRBV20-1, TRBJ2-7)
CSARDRVSGMDEQYF

SEQ ID NO: 168645 - protein, 16 aa, Homo sapiens
  CDR3 for alpha chain variable domain of TCR clone 84323 (TRAV3, TRAJ37)
CTVRVRGSGNTGKLIF

SEQ ID NO: 168646 - protein, 11 aa, Homo sapiens
  CDR3 for beta chain variable domain of TCR clone 84323 (TRBV11-2, TRBJ2-2)
CASSLPGELFF

SEQ ID NO: 168647 - protein, 10 aa, Homo sapiens
  CDR3 for alpha chain variable domain of TCR clone 84324 (TRAV1-2, TRAJ31)
CAFFDARLMF

SEQ ID NO: 168648 - protein, 16 aa, Homo sapiens
  CDR3 for beta chain variable domain of TCR clone 84324 (TRBV11-2, TRBJ2-1)
CASSLERDGVDNEQFF

SEQ ID NO: 168649 - protein, 11 aa, Homo sapiens
  CDR3 for alpha chain variable domain of TCR clone 84325 (TRAV3, TRAJ21)
CAVGNFNKFYF

SEQ ID NO: 168650 - protein, 15 aa, Homo sapiens
  CDR3 for beta chain variable domain of TCR clone 84325 (TRBV7-8, TRBJ2-1)
CASSLADSLYNEQFF

SEQ ID NO: 168651 - protein, 15 aa, Homo sapiens
  CDR3 for alpha chain variable domain of TCR clone 84326 (TRAV8-3, TRAJ45)
CASSYSGGGADGLTF

SEQ ID NO: 168652 - protein, 15 aa, Homo sapiens
  CDR3 for beta chain variable domain of TCR clone 84326 (TRBV18, TRBJ1-1)
CASSPRQGENTEAVF

SEQ ID NO: 168653 - protein, 16 aa, Homo sapiens
  CDR3 for alpha chain variable domain of TCR clone 84327 (TRAV30, TRAJ24)
CGTAIVDADSWGKFQF

SEQ ID NO: 168654 - protein, 19 aa, Homo sapiens
  CDR3 for beta chain variable domain of TCR clone 84327 (TRBV25-1, TRBJ2-2)
CAILVYRVDRGRKTGELFF

SEQ ID NO: 168655 - protein, 14 aa, Homo sapiens
  CDR3 for alpha chain variable domain of TCR clone 84328 (TRAV2, TRAJ9)
CAVEDRSGGFKTII

SEQ ID NO: 168656 - protein, 12 aa, Homo sapiens
  CDR3 for beta chain variable domain of TCR clone 84328 (TRBV7-9, TRBJ2-7)
CASSLEGYEQYF

SEQ ID NO: 168657 - protein, 17 aa, Homo sapiens
  CDR3 for alpha chain variable domain of TCR clone 84329 (TRAV4, TRAJ13)
CIVGVQGSSGGYQKVTF

SEQ ID NO: 168658 - protein, 18 aa, Homo sapiens
  CDR3 for beta chain variable domain of TCR clone 84329 (TRBV15, TRBJ2-3)
CTTSRDGARSWDTDTQYF

SEQ ID NO: 168659 - protein, 18 aa, Homo sapiens
  CDR3 for alpha chain variable domain of TCR clone 84330 (TRAV26-2, TRAJ54)
CILRDVEGGIQGAQKLVF

SEQ ID NO: 168660 - protein, 17 aa, Homo sapiens
  CDR3 for beta chain variable domain of TCR clone 84330 (TRBV20-1, TRBJ1-5)
CSASLSPGQGGNQPQHF

SEQ ID NO: 168661 - protein, 13 aa, Homo sapiens
  CDR3 for alpha chain variable domain of TCR clone 84331 (TRAV12-3, TRAJ33)
CAMSVNSNYQLIW

SEQ ID NO: 168662 - protein, 15 aa, Homo sapiens
  CDR3 for beta chain variable domain of TCR clone 84331 (TRBV20-1, TRBJ2-7)
CSARDRVSGMDEQHF

SEQ ID NO: 168663 - protein, 18 aa, Homo sapiens
  CDR3 for alpha chain variable domain of TCR clone 84332 (TRAV21, TRAJ52)
CAVRPSPAGGTSYGKLTF

SEQ ID NO: 168664 - protein, 17 aa, Homo sapiens
  CDR3 for beta chain variable domain of TCR clone 84332 (TRBV13, TRBJ2-3)
CASSLSRVAGGKSTQYF

SEQ ID NO: 168665 - protein, 21 aa, Homo sapiens
  CDR3 for alpha chain variable domain of TCR clone 84333 (TRAV12-1, TRAJ32)
SSVIQPPTPMNYGGATNKLIF

SEQ ID NO: 168666 - protein, 18 aa, Homo sapiens
  CDR3 for beta chain variable domain of TCR clone 84333 (TRBV20-1, TRBJ2-3)
CSASGLAGGPGTTDTQYF

SEQ ID NO: 168667 - protein, 12 aa, Homo sapiens
  CDR3 for alpha chain variable domain of TCR clone 84334 (TRAV12-1, TRAJ16)
CVVFRDGQKLLF

SEQ ID NO: 168668 - protein, 14 aa, Homo sapiens
  CDR3 for beta chain variable domain of TCR clone 84334 (TRBV19, TRBJ2-1)
CASPTFVLSGEQFF

SEQ ID NO: 168669 - protein, 15 aa, Homo sapiens
  CDR3 for alpha chain variable domain of TCR clone 84335 (TRAV8-4, TRAJ7)
CAVSGGNYGNNRLAV

SEQ ID NO: 168670 - protein, 11 aa, Homo sapiens
  CDR3 for beta chain variable domain of TCR clone 84335 (TRBV20-1, TRBJ2-1)
CSLSSGSEQFF

SEQ ID NO: 168671 - protein, 18 aa, Homo sapiens
  CDR3 for alpha chain variable domain of TCR clone 84336 (TRAV26-1, TRAJ5)
CIVRVVPPRDTGRKALTF

SEQ ID NO: 168672 - protein, 15 aa, Homo sapiens
  CDR3 for beta chain variable domain of TCR clone 84336 (TRBV7-9, TRBJ2-7)
CASSLPMGQANEQYF

SEQ ID NO: 168673 - protein, 15 aa, Homo sapiens
  CDR3 for alpha chain variable domain of TCR clone 84337 (TRAV21, TRAJ53)
CATLNSGGSNYKLTF

SEQ ID NO: 168674 - protein, 16 aa, Homo sapiens
  CDR3 for beta chain variable domain of TCR clone 84337 (TRBV9, TRBJ2-1)
CASSVGRGGNYNEQFF

SEQ ID NO: 168675 - protein, 13 aa, Homo sapiens
  CDR3 for alpha chain variable domain of TCR clone 84338 (TRAV20, TRAJ21)
YAVEGYNFNKFYF

SEQ ID NO: 168676 - protein, 14 aa, Homo sapiens
  CDR3 for beta chain variable domain of TCR clone 84338 (TRBV12-5, TRBJ2-5)
CASGSRTHQETQYF

SEQ ID NO: 168677 - protein, 14 aa, Homo sapiens
  CDR3 for alpha chain variable domain of TCR clone 84339 (TRAV17, TRAJ37)
CATDGSSNTVKLIF

SEQ ID NO: 168678 - protein, 13 aa, Homo sapiens
  CDR3 for beta chain variable domain of TCR clone 84339 (TRBV11-2, TRBJ2-1)
CASSLDLVNEQFF

SEQ ID NO: 168679 - protein, 14 aa, Homo sapiens
  CDR3 for alpha chain variable domain of TCR clone 84340 (TRAV12-2, TRAJ13)
CAVKKTGGYQKATF

SEQ ID NO: 168680 - protein, 15 aa, Homo sapiens
  CDR3 for beta chain variable domain of TCR clone 84340 (TRBV27, TRBJ2-1)
CASSNGGGSSNEQSF

SEQ ID NO: 168681 - protein, 12 aa, Homo sapiens
  CDR3 for alpha chain variable domain of TCR clone 84341 (TRAV12-3, TRAJ17)
CAMTLTGNKLTF

SEQ ID NO: 168682 - protein, 15 aa, Homo sapiens
  CDR3 for beta chain variable domain of TCR clone 84341 (TRBV20-1, TRBJ2-7)
RSARDRVSGMDEQYL

SEQ ID NO: 168683 - protein, 14 aa, Homo sapiens
  CDR3 for alpha chain variable domain of TCR clone 84342 (TRAV8-3, TRAJ39)
CAVGAWGAGNMLTF

SEQ ID NO: 168684 - protein, 16 aa, Homo sapiens
  CDR3 for beta chain variable domain of TCR clone 84342 (TRBV7-2, TRBJ1-3)
CASSSGRVLSGNTMYF

SEQ ID NO: 168685 - protein, 13 aa, Homo sapiens
  CDR3 for alpha chain variable domain of TCR clone 84343 (TRAV3, TRAJ15)
CAVRDQAGTARIF

SEQ ID NO: 168686 - protein, 15 aa, Homo sapiens
  CDR3 for beta chain variable domain of TCR clone 84343 (TRBV11-1, TRBJ2-7)
CASSLNYGASYEQYF

SEQ ID NO: 168687 - protein, 16 aa, Homo sapiens
  CDR3 for alpha chain variable domain of TCR clone 84344 (TRAV12-3, TRAJ53)
CAMSPGSGGSNYKLTF

SEQ ID NO: 168688 - protein, 17 aa, Homo sapiens
  CDR3 for beta chain variable domain of TCR clone 84344 (TRBV4-1, TRBJ2-3)
CASSQGYVSGGTDTQYF

SEQ ID NO: 168689 - protein, 23 aa, Homo sapiens
  CDR3 for alpha chain variable domain of TCR clone 84345 (TRAV26-1, TRAJ38)
CIADNAGNNHIQNPNPAVYQLRD

SEQ ID NO: 168690 - protein, 17 aa, Homo sapiens
  CDR3 for beta chain variable domain of TCR clone 84345 (TRBV11-2, TRBJ2-6)
CASSQRDIFSGANVLTF

SEQ ID NO: 168691 - protein, 12 aa, Homo sapiens
  CDR3 for alpha chain variable domain of TCR clone 84346 (TRAV13-2, TRAJ23)
CAERHRGGKLIF

SEQ ID NO: 168692 - protein, 16 aa, Homo sapiens
  CDR3 for beta chain variable domain of TCR clone 84346 (TRBV20-1, TRBJ1-4)
CSAPVQGLLTNEKLFF

SEQ ID NO: 168693 - protein, 14 aa, Homo sapiens
  CDR3 for alpha chain variable domain of TCR clone 84347 (TRAV2, TRAJ11)
CAVVPNSGYSTLTF

SEQ ID NO: 168694 - protein, 15 aa, Homo sapiens
  CDR3 for beta chain variable domain of TCR clone 84347 (TRBV4-1, TRBJ1-3)
CASSQDLRVGNTMYF

SEQ ID NO: 168695 - protein, 13 aa, Homo sapiens
  CDR3 for alpha chain variable domain of TCR clone 84348 (TRAV8-3, TRAJ44)
SAVVPGTASKLTF

SEQ ID NO: 168696 - protein, 14 aa, Homo sapiens
  CDR3 for beta chain variable domain of TCR clone 84348 (TRBV11-2, TRBJ2-3)
CASSRLARTDTQHF

SEQ ID NO: 168697 - protein, 14 aa, Homo sapiens
  CDR3 for alpha chain variable domain of TCR clone 84349 (TRAV21, TRAJ23)
CAIMIYNQGGKLIF

SEQ ID NO: 168698 - protein, 18 aa, Homo sapiens
  CDR3 for beta chain variable domain of TCR clone 84349 (TRBV20-1, TRBJ2-6)
GSAETTPTHGSGANVLTF

SEQ ID NO: 168699 - protein, 11 aa, Homo sapiens
  CDR3 for alpha chain variable domain of TCR clone 84350 (TRAV13-1, TRAJ6)
CATLGSYIPPF

SEQ ID NO: 168700 - protein, 12 aa, Homo sapiens
  CDR3 for beta chain variable domain of TCR clone 84350 (TRBV11-2, TRBJ2-1)
CASSPGNNEQFF

SEQ ID NO: 168701 - protein, 15 aa, Homo sapiens
  CDR3 for alpha chain variable domain of TCR clone 84351 (TRAV26-1, TRAJ29)
CIVRVEGSGNTPLVF

SEQ ID NO: 168702 - protein, 16 aa, Homo sapiens
  CDR3 for beta chain variable domain of TCR clone 84351 (TRBV19, TRBJ2-3)
CASSPGAASRTDTQYF

SEQ ID NO: 168703 - protein, 15 aa, Homo sapiens
  CDR3 for alpha chain variable domain of TCR clone 84352 (TRAV25, TRAJ52)
CAGTSCGTSYGKLTF

SEQ ID NO: 168704 - protein, 16 aa, Homo sapiens
  CDR3 for beta chain variable domain of TCR clone 84352 (TRBV15, TRBJ1-2)
CATSRGPRTGGGGYTF

SEQ ID NO: 168705 - protein, 14 aa, Homo sapiens
  CDR3 for alpha chain variable domain of TCR clone 84353 (TRAV26-1, TRAJ38)
CIADNADNNRKLIW

SEQ ID NO: 168706 - protein, 14 aa, Homo sapiens
  CDR3 for beta chain variable domain of TCR clone 84353 (TRBV20-1, TRBJ1-1)
CSAQTRIGGTEAFF

SEQ ID NO: 168707 - protein, 16 aa, Homo sapiens
  CDR3 for alpha chain variable domain of TCR clone 84354 (TRAV12-1, TRAJ15)
CVVSPAGQPGRNCSAL

SEQ ID NO: 168708 - protein, 13 aa, Homo sapiens
  CDR3 for beta chain variable domain of TCR clone 84354 (TRBV7-2, TRBJ2-4)
CASSREHANIQYF

SEQ ID NO: 168709 - protein, 14 aa, Homo sapiens
  CDR3 for alpha chain variable domain of TCR clone 84355 (TRAV13-2, TRAJ22)
CADGTLGSARQLTF

SEQ ID NO: 168710 - protein, 16 aa, Homo sapiens
  CDR3 for beta chain variable domain of TCR clone 84355 (TRBV19, TRBJ2-1)
CASSNKGTRSYNEQFF

SEQ ID NO: 168711 - protein, 14 aa, Homo sapiens
  CDR3 for alpha chain variable domain of TCR clone 84356 (TRAV13-1, TRAJ44)
CAAQATGTASKLTF

SEQ ID NO: 168712 - protein, 17 aa, Homo sapiens
  CDR3 for beta chain variable domain of TCR clone 84356 (TRBV7-3, TRBJ2-3)
CASSLMKRMRGADTQYF

SEQ ID NO: 168713 - protein, 16 aa, Homo sapiens
  CDR3 for alpha chain variable domain of TCR clone 84357 (TRAV3, TRAJ37)
CAVRGKGSGNTGKLIF

SEQ ID NO: 168714 - protein, 19 aa, Homo sapiens
  CDR3 for beta chain variable domain of TCR clone 84357 (TRBV7-2, TRBJ2-3)
CASSFLSRNWGGGTDTQYF

SEQ ID NO: 168715 - protein, 16 aa, Homo sapiens
  CDR3 for alpha chain variable domain of TCR clone 84358 (TRAV2, TRAJ4)
CAVEDLFSGGYNKLIF

SEQ ID NO: 168716 - protein, 13 aa, Homo sapiens
  CDR3 for beta chain variable domain of TCR clone 84358 (TRBV7-7, TRBJ2-5)
CASSRSGQETQYF

SEQ ID NO: 168717 - protein, 14 aa, Homo sapiens
  CDR3 for alpha chain variable domain of TCR clone 84359 (TRAV26-1, TRAJ38)
CIADNAGNNRKLTW

SEQ ID NO: 168718 - protein, 13 aa, Homo sapiens
  CDR3 for beta chain variable domain of TCR clone 84359 (TRBV7-9, TRBJ1-2)
CASSLKQNYGYTF

SEQ ID NO: 168719 - protein, 11 aa, Homo sapiens
  CDR3 for alpha chain variable domain of TCR clone 84360 (TRAV1-2, TRAJ40)
CAVPGTYKYIF

SEQ ID NO: 168720 - protein, 16 aa, Homo sapiens
  CDR3 for beta chain variable domain of TCR clone 84360 (TRBV29-1, TRBJ2-7)
CSVEVVGTSVSYEQYF

SEQ ID NO: 168721 - protein, 13 aa, Homo sapiens
  CDR3 for alpha chain variable domain of TCR clone 84361 (TRAV2, TRAJ40)
CAVVTSGTYKYIF

SEQ ID NO: 168722 - protein, 17 aa, Homo sapiens
  CDR3 for beta chain variable domain of TCR clone 84361 (TRBV28, TRBJ2-3)
CASSPTPAGGRVDTQYF

SEQ ID NO: 168723 - protein, 12 aa, Homo sapiens
  CDR3 for alpha chain variable domain of TCR clone 84362 (TRAV20, TRAJ39)
CAVGNAGNMLTF

SEQ ID NO: 168724 - protein, 17 aa, Homo sapiens
  CDR3 for beta chain variable domain of TCR clone 84362 (TRBV11-2, TRBJ2-4)
CASSSVGPGGHRNIQYF

SEQ ID NO: 168725 - protein, 14 aa, Homo sapiens
  CDR3 for alpha chain variable domain of TCR clone 84363 (TRAV13-2, TRAJ16)
CAENNWEDGQKLLF

SEQ ID NO: 168726 - protein, 14 aa, Homo sapiens
  CDR3 for beta chain variable domain of TCR clone 84363 (TRBV11-3, TRBJ2-5)
CASSLGQGRETQYF

SEQ ID NO: 168727 - protein, 13 aa, Homo sapiens
  CDR3 for alpha chain variable domain of TCR clone 84364 (TRAV38-2/DV8, TRAJ34)
CAYRNYNTDKLIC

SEQ ID NO: 168728 - protein, 16 aa, Homo sapiens
  CDR3 for beta chain variable domain of TCR clone 84364 (TRBV4-2, TRBJ1-1)
CASSQAGFGMNTEAFF

SEQ ID NO: 168729 - protein, 13 aa, Homo sapiens
  CDR3 for alpha chain variable domain of TCR clone 84365 (TRAV8-3, TRAJ28)
CAVGAVGSYQLTF

SEQ ID NO: 168730 - protein, 15 aa, Homo sapiens
  CDR3 for beta chain variable domain of TCR clone 84365 (TRBV7-9, TRBJ1-5)
YASCQGHQPNQPQHF

SEQ ID NO: 168731 - protein, 14 aa, Homo sapiens
  CDR3 for alpha chain variable domain of TCR clone 84366 (TRAV21, TRAJ35)
CAVMPIGFGNVLHC

SEQ ID NO: 168732 - protein, 15 aa, Homo sapiens
  CDR3 for beta chain variable domain of TCR clone 84366 (TRBV12-4, TRBJ2-5)
CASSPPTGLQETQYF

SEQ ID NO: 168733 - protein, 14 aa, Homo sapiens
  CDR3 for alpha chain variable domain of TCR clone 84367 (TRAV13-1, TRAJ13)
CAASRVGGYQKVTF

SEQ ID NO: 168734 - protein, 13 aa, Homo sapiens
  CDR3 for beta chain variable domain of TCR clone 84367 (TRBV7-6, TRBJ1-2)
CASSLVADYGYTF

SEQ ID NO: 168735 - protein, 11 aa, Homo sapiens
  CDR3 for alpha chain variable domain of TCR clone 84368 (TRAV2, TRAJ13)
CASGGYQKVTF

SEQ ID NO: 168736 - protein, 15 aa, Homo sapiens
  CDR3 for beta chain variable domain of TCR clone 84368 (TRBV11-3, TRBJ2-3)
YASLKDGREGDTQYF

SEQ ID NO: 168737 - protein, 16 aa, Homo sapiens
  CDR3 for alpha chain variable domain of TCR clone 84369 (TRAV26-2, TRAJ45)
CTTASPIGGGADGLTF

SEQ ID NO: 168738 - protein, 13 aa, Homo sapiens
  CDR3 for beta chain variable domain of TCR clone 84369 (TRBV7-9, TRBJ1-2)
CASSLKQNYGYTF

SEQ ID NO: 168739 - protein, 16 aa, Homo sapiens
  CDR3 for alpha chain variable domain of TCR clone 84370 (TRAV12-3, TRAJ53)
CAMSPGSGGSNYKLTS

SEQ ID NO: 168740 - protein, 11 aa, Homo sapiens
  CDR3 for beta chain variable domain of TCR clone 84370 (TRBV29-1, TRBJ2-5)
RSEDRTGTQYF

SEQ ID NO: 168741 - protein, 15 aa, Homo sapiens
  CDR3 for alpha chain variable domain of TCR clone 84371 (TRAV27, TRAJ38)
CAARRNAGNNRKLSG

SEQ ID NO: 168742 - protein, 13 aa, Homo sapiens
  CDR3 for beta chain variable domain of TCR clone 84371 (TRBV12-5, TRBJ2-3)
CASGDRQSDTQYF

SEQ ID NO: 168743 - protein, 15 aa, Homo sapiens
  CDR3 for alpha chain variable domain of TCR clone 84372 (TRAV21, TRAJ24)
CAARSSTDSWGKLQF

SEQ ID NO: 168744 - protein, 11 aa, Homo sapiens
  CDR3 for beta chain variable domain of TCR clone 84372 (TRBV24-1, TRBJ2-3)
CATASTDTQYF

SEQ ID NO: 168745 - protein, 15 aa, Homo sapiens
  CDR3 for alpha chain variable domain of TCR clone 84373 (TRAV21, TRAJ53)
CATLNSGGSNYKLTF

SEQ ID NO: 168746 - protein, 13 aa, Homo sapiens
  CDR3 for beta chain variable domain of TCR clone 84373 (TRBV4-1, TRBJ2-2)
CASSQEDTGELFF

SEQ ID NO: 168747 - protein, 14 aa, Homo sapiens
  CDR3 for alpha chain variable domain of TCR clone 84374 (TRAV2, TRAJ37)
CAVDFTSNTGKLIF

SEQ ID NO: 168748 - protein, 15 aa, Homo sapiens
  CDR3 for beta chain variable domain of TCR clone 84374 (TRBV2, TRBJ2-2)
CASSRETVGTGELFF

SEQ ID NO: 168749 - protein, 13 aa, Homo sapiens
  CDR3 for alpha chain variable domain of TCR clone 84375 (TRAV9-2, TRAJ53)
CALSGGSNYKLTF

SEQ ID NO: 168750 - protein, 17 aa, Homo sapiens
  CDR3 for beta chain variable domain of TCR clone 84375 (TRBV11-2, TRBJ2-1)
CASSLYPPGVECNEQFF

SEQ ID NO: 168751 - protein, 15 aa, Homo sapiens
  CDR3 for alpha chain variable domain of TCR clone 84376 (TRAV19, TRAJ53)
CALSSSGGSNYKLTS

SEQ ID NO: 168752 - protein, 14 aa, Homo sapiens
  CDR3 for beta chain variable domain of TCR clone 84376 (TRBV6-1, TRBJ1-3)
CASVQGGGGNTIYF

SEQ ID NO: 168753 - protein, 17 aa, Homo sapiens
  CDR3 for alpha chain variable domain of TCR clone 84377 (TRAV3, TRAJ6)
CAVRDVPRAGGSYIPTF

SEQ ID NO: 168754 - protein, 20 aa, Homo sapiens
  CDR3 for beta chain variable domain of TCR clone 84377 (TRBV28, TRBJ2-1)
CASTPIGRSPGLAGGNEQFF

SEQ ID NO: 168755 - protein, 14 aa, Homo sapiens
  CDR3 for alpha chain variable domain of TCR clone 84378 (TRAV2, TRAJ9)
CAVEDRSGGFKTIF

SEQ ID NO: 168756 - protein, 13 aa, Homo sapiens
  CDR3 for beta chain variable domain of TCR clone 84378 (TRBV20-1, TRBJ2-5)
CSAREAFQETQYF

SEQ ID NO: 168757 - protein, 13 aa, Homo sapiens
  CDR3 for alpha chain variable domain of TCR clone 84379 (TRAV21, TRAJ27)
CAARPGNAGKSTF

SEQ ID NO: 168758 - protein, 13 aa, Homo sapiens
  CDR3 for beta chain variable domain of TCR clone 84379 (TRBV13, TRBJ2-1)
CAGILGGRGEQFF

SEQ ID NO: 168759 - protein, 14 aa, Homo sapiens
  CDR3 for alpha chain variable domain of TCR clone 84380 (TRAV9-2, TRAJ39)
CALYIYNAGNMLTF

SEQ ID NO: 168760 - protein, 14 aa, Homo sapiens
  CDR3 for beta chain variable domain of TCR clone 84380 (TRBV6-1, TRBJ1-3)
CASVQGGGGNTIYV

SEQ ID NO: 168761 - protein, 13 aa, Homo sapiens
  CDR3 for alpha chain variable domain of TCR clone 84381 (TRAV27, TRAJ41)
CAGEGNSGYALNF

SEQ ID NO: 168762 - protein, 19 aa, Homo sapiens
  CDR3 for beta chain variable domain of TCR clone 84381 (TRBV25-1, TRBJ2-2)
CAILVYRVDRGRKTGELFF

SEQ ID NO: 168763 - protein, 22 aa, Homo sapiens
  CDR3 for alpha chain variable domain of TCR clone 84382 (TRAV3, TRAJ38)
CAVKDCLNAGNNHIQNPDPAVY

SEQ ID NO: 168764 - protein, 19 aa, Homo sapiens
  CDR3 for beta chain variable domain of TCR clone 84382 (TRBV7-2, TRBJ2-3)
CASSFLSRNWGGGTDTQYF

SEQ ID NO: 168765 - protein, 14 aa, Homo sapiens
  CDR3 for alpha chain variable domain of TCR clone 84383 (TRAV12-1, TRAJ13)
CVVIDSGGYQNVTF

SEQ ID NO: 168766 - protein, 12 aa, Homo sapiens
  CDR3 for beta chain variable domain of TCR clone 84383 (TRBV29-1, TRBJ2-3)
CSVTGGADTQYF

SEQ ID NO: 168767 - protein, 12 aa, Homo sapiens
  CDR3 for alpha chain variable domain of TCR clone 84384 (TRAV3, TRAJ31)
CAVSPRGPRLMF

SEQ ID NO: 168768 - protein, 17 aa, Homo sapiens
  CDR3 for beta chain variable domain of TCR clone 84384 (TRBV7-9, TRBJ1-5)
CASSASQGGYSNQPQHF

SEQ ID NO: 168769 - protein, 14 aa, Homo sapiens
  CDR3 for alpha chain variable domain of TCR clone 84385 (TRAV8-4, TRAJ4)
CAVSPSGGYNKLIF

SEQ ID NO: 168770 - protein, 15 aa, Homo sapiens
  CDR3 for beta chain variable domain of TCR clone 84385 (TRBV7-8, TRBJ2-3)
CAGSLSADSGGAQYF

SEQ ID NO: 168771 - protein, 14 aa, Homo sapiens
  CDR3 for alpha chain variable domain of TCR clone 84386 (TRAV2, TRAJ9)
CAVEDRSGGFKTTF

SEQ ID NO: 168772 - protein, 13 aa, Homo sapiens
  CDR3 for beta chain variable domain of TCR clone 84386 (TRBV7-3, TRBJ2-5)
CASSFRGGETQYF

SEQ ID NO: 168773 - protein, 18 aa, Homo sapiens
  CDR3 for alpha chain variable domain of TCR clone 84387 (TRAV29/DV5, TRAJ52)
CAAGFRGAGGTSYGKLTF

SEQ ID NO: 168774 - protein, 16 aa, Homo sapiens
  CDR3 for beta chain variable domain of TCR clone 84387 (TRBV7-3, TRBJ2-2)
CASSLTRGTLSGELFF

SEQ ID NO: 168775 - protein, 13 aa, Homo sapiens
  CDR3 for alpha chain variable domain of TCR clone 84388 (TRAV12-2, TRAJ15)
CAVFNQAGTALIF

SEQ ID NO: 168776 - protein, 15 aa, Homo sapiens
  CDR3 for beta chain variable domain of TCR clone 84388 (TRBV7-8, TRBJ1-5)
CASRRGGGADQPQHF

SEQ ID NO: 168777 - protein, 15 aa, Homo sapiens
  CDR3 for alpha chain variable domain of TCR clone 84389 (TRAV3, TRAJ3)
CAVRDRDSSASKILF

SEQ ID NO: 168778 - protein, 18 aa, Homo sapiens
  CDR3 for beta chain variable domain of TCR clone 84389 (TRBV25-1, TRBJ1-2)
CAGSGLQNGQGLIFGYTF

SEQ ID NO: 168779 - protein, 13 aa, Homo sapiens
  CDR3 for alpha chain variable domain of TCR clone 84390 (TRAV2, TRAJ40)
CAVVTSGTYKYIF

SEQ ID NO: 168780 - protein, 16 aa, Homo sapiens
  CDR3 for beta chain variable domain of TCR clone 84390 (TRBV11-2, TRBJ2-7)
CASSLAPTGVNYEQYF

SEQ ID NO: 168781 - protein, 23 aa, Homo sapiens
  CDR3 for alpha chain variable domain of TCR clone 84391 (TRAV26-1, TRAJ38)
CIADNAGNNHIQNPDPAVYQLRD

SEQ ID NO: 168782 - protein, 12 aa, Homo sapiens
  CDR3 for beta chain variable domain of TCR clone 84391 (TRBV5-1, TRBJ1-2)
CASSQDTYGYTF

SEQ ID NO: 168783 - protein, 16 aa, Homo sapiens
  CDR3 for alpha chain variable domain of TCR clone 84392 (TRAV26-1, TRAJ34)
CIVRVAYNTTSSSLGL

SEQ ID NO: 168784 - protein, 15 aa, Homo sapiens
  CDR3 for beta chain variable domain of TCR clone 84392 (TRBV20-1, TRBJ2-7)
CSARVPAAYFYEQYF

SEQ ID NO: 168785 - protein, 18 aa, Homo sapiens
  CDR3 for alpha chain variable domain of TCR clone 84393 (TRAV21, TRAJ52)
CAVRPSPAGGTSYGKLTF

SEQ ID NO: 168786 - protein, 14 aa, Homo sapiens
  CDR3 for beta chain variable domain of TCR clone 84393 (TRBV7-6, TRBJ2-3)
CASSVAGGTDTQYF

SEQ ID NO: 168787 - protein, 14 aa, Homo sapiens
  CDR3 for alpha chain variable domain of TCR clone 84394 (TRAV12-2, TRAJ40)
CAVKIPSGTYKYIF

SEQ ID NO: 168788 - protein, 12 aa, Homo sapiens
  CDR3 for beta chain variable domain of TCR clone 84394 (TRBV10-3, TRBJ2-2)
CAIRENTGELFF

SEQ ID NO: 168789 - protein, 14 aa, Homo sapiens
  CDR3 for alpha chain variable domain of TCR clone 84395 (TRAV1-2, TRAJ8)
CAVREDTGFQKLVF

SEQ ID NO: 168790 - protein, 11 aa, Homo sapiens
  CDR3 for beta chain variable domain of TCR clone 84395 (TRBV29-1, TRBJ1-4)
CGVSSGEKLFF

SEQ ID NO: 168791 - protein, 14 aa, Homo sapiens
  CDR3 for alpha chain variable domain of TCR clone 84396 (TRAV1-2, TRAJ8)
CAVREDTGFQKLVF

SEQ ID NO: 168792 - protein, 13 aa, Homo sapiens
  CDR3 for beta chain variable domain of TCR clone 84396 (TRBV19, TRBJ1-5)
CASSIGGNQPQHF

SEQ ID NO: 168793 - protein, 15 aa, Homo sapiens
  CDR3 for alpha chain variable domain of TCR clone 84397 (TRAV17, TRAJ57)
CATGPSQGGSEKLVF

SEQ ID NO: 168794 - protein, 16 aa, Homo sapiens
  CDR3 for beta chain variable domain of TCR clone 84397 (TRBV6-1, TRBJ2-5)
CASSETLDRGAETQYF

SEQ ID NO: 168795 - protein, 15 aa, Homo sapiens
  CDR3 for alpha chain variable domain of TCR clone 84398 (TRAV23/DV6, TRAJ22)
CAASFSSGSARQLTF

SEQ ID NO: 168796 - protein, 15 aa, Homo sapiens
  CDR3 for beta chain variable domain of TCR clone 84398 (TRBV7-9, TRBJ1-6)
CASSSPGRGNSPLHF

SEQ ID NO: 168797 - protein, 17 aa, Homo sapiens
  CDR3 for alpha chain variable domain of TCR clone 84399 (TRAV23/DV6, TRAJ18)
CAASSSHRGSTLGRLYF

SEQ ID NO: 168798 - protein, 16 aa, Homo sapiens
  CDR3 for beta chain variable domain of TCR clone 84399 (TRBV9, TRBJ2-2)
CASSMVAGANTGELFF

SEQ ID NO: 168799 - protein, 13 aa, Homo sapiens
  CDR3 for alpha chain variable domain of TCR clone 84400 (TRAV20, TRAJ31)
CAVQAWNNARLMF

SEQ ID NO: 168800 - protein, 14 aa, Homo sapiens
  CDR3 for beta chain variable domain of TCR clone 84400 (TRBV7-6, TRBJ2-3)
CASSLGTVTDTQYF

SEQ ID NO: 168801 - protein, 10 aa, Homo sapiens
  CDR3 for alpha chain variable domain of TCR clone 84401 (TRAV8-3, TRAJ33)
CAVGAIATIS

SEQ ID NO: 168802 - protein, 16 aa, Homo sapiens
  CDR3 for beta chain variable domain of TCR clone 84401 (TRBV4-2, TRBJ2-5)
CASSQELVGSQETQYF

SEQ ID NO: 168803 - protein, 12 aa, Homo sapiens
  CDR3 for alpha chain variable domain of TCR clone 84402 (TRAV12-3, TRAJ17)
CAMTLTGNKLTF

SEQ ID NO: 168804 - protein, 15 aa, Homo sapiens
  CDR3 for beta chain variable domain of TCR clone 84402 (TRBV7-2, TRBJ2-2)
CASSFQRGETGELFF

SEQ ID NO: 168805 - protein, 16 aa, Homo sapiens
  CDR3 for alpha chain variable domain of TCR clone 84403 (TRAV3, TRAJ10)
CAVRDMRAGGGNKLTF

SEQ ID NO: 168806 - protein, 14 aa, Homo sapiens
  CDR3 for beta chain variable domain of TCR clone 84403 (TRBV7-2, TRBJ1-4)
CASSVVEGGEKLVF

SEQ ID NO: 168807 - protein, 14 aa, Homo sapiens
  CDR3 for alpha chain variable domain of TCR clone 84404 (TRAV20, TRAJ56)
CAVQFGGANSKLTF

SEQ ID NO: 168808 - protein, 14 aa, Homo sapiens
  CDR3 for beta chain variable domain of TCR clone 84404 (TRBV20-1, TRBJ2-7)
CSAKRGRSSYKQYF

SEQ ID NO: 168809 - protein, 11 aa, Homo sapiens
  CDR3 for alpha chain variable domain of TCR clone 84405 (TRAV12-3, TRAJ49)
CAANTGNQFYF

SEQ ID NO: 168810 - protein, 13 aa, Homo sapiens
  CDR3 for beta chain variable domain of TCR clone 84405 (TRBV12-4, TRBJ2-7)
CASSPTETYEQYF

SEQ ID NO: 168811 - protein, 14 aa, Homo sapiens
  CDR3 for alpha chain variable domain of TCR clone 84406 (TRAV1-2, TRAJ8)
RAVREDTGFQKLVF

SEQ ID NO: 168812 - protein, 12 aa, Homo sapiens
  CDR3 for beta chain variable domain of TCR clone 84406 (TRBV7-8, TRBJ2-7)
CASSLGDREQYF

SEQ ID NO: 168813 - protein, 15 aa, Homo sapiens
  CDR3 for alpha chain variable domain of TCR clone 84407 (TRAV8-3, TRAJ11)
CAVGLLNSGYSTLTF

SEQ ID NO: 168814 - protein, 15 aa, Homo sapiens
  CDR3 for beta chain variable domain of TCR clone 84407 (TRBV7-9, TRBJ1-4)
CASSARTGGNEKLFF

SEQ ID NO: 168815 - protein, 12 aa, Homo sapiens
  CDR3 for alpha chain variable domain of TCR clone 84408 (TRAV12-1, TRAJ8)
CVVNKGFQKLVF

SEQ ID NO: 168816 - protein, 13 aa, Homo sapiens
  CDR3 for beta chain variable domain of TCR clone 84408 (TRBV19, TRBJ2-7)
CASSIDRTYEQYF

SEQ ID NO: 168817 - protein, 15 aa, Homo sapiens
  CDR3 for alpha chain variable domain of TCR clone 84409 (TRAV1-2, TRAJ15)
CAVDVMGSAGTALIF

SEQ ID NO: 168818 - protein, 13 aa, Homo sapiens
  CDR3 for beta chain variable domain of TCR clone 84409 (TRBV4-2, TRBJ1-1)
CASSQAGNTEAFF

SEQ ID NO: 168819 - protein, 16 aa, Homo sapiens
  CDR3 for alpha chain variable domain of TCR clone 84410 (TRAV3, TRAJ21)
CAERDIERGNFNKFYF

SEQ ID NO: 168820 - protein, 13 aa, Homo sapiens
  CDR3 for beta chain variable domain of TCR clone 84410 (TRBV27, TRBJ2-7)
CASSLTTGYEQYF

SEQ ID NO: 168821 - protein, 10 aa, Homo sapiens
  CDR3 for alpha chain variable domain of TCR clone 84411 (TRAV23/DV6, TRAJ31)
FARGGARLMF

SEQ ID NO: 168822 - protein, 14 aa, Homo sapiens
  CDR3 for beta chain variable domain of TCR clone 84411 (TRBV7-8, TRBJ1-2)
CASSPDSLSYGYTF

SEQ ID NO: 168823 - protein, 17 aa, Homo sapiens
  CDR3 for alpha chain variable domain of TCR clone 84412 (TRAV3, TRAJ42)
RAVRDRDYGGSQGNLIF

SEQ ID NO: 168824 - protein, 12 aa, Homo sapiens
  CDR3 for beta chain variable domain of TCR clone 84412 (TRBV11-2, TRBJ2-1)
CASSPGNNEQFF

SEQ ID NO: 168825 - protein, 17 aa, Homo sapiens
  CDR3 for alpha chain variable domain of TCR clone 84413 (TRAV27, TRAJ18)
CAGLHRGRGSTLGRLYF

SEQ ID NO: 168826 - protein, 13 aa, Homo sapiens
  CDR3 for beta chain variable domain of TCR clone 84413 (TRBV19, TRBJ1-2)
CASSVPGQDGYTF

SEQ ID NO: 168827 - protein, 14 aa, Homo sapiens
  CDR3 for alpha chain variable domain of TCR clone 84414 (TRAV13-1, TRAJ44)
CAAKATGSASKLTF

SEQ ID NO: 168828 - protein, 17 aa, Homo sapiens
  CDR3 for beta chain variable domain of TCR clone 84414 (TRBV7-3, TRBJ2-3)
RASSLMKRMRGADTQYF

SEQ ID NO: 168829 - protein, 15 aa, Homo sapiens
  CDR3 for alpha chain variable domain of TCR clone 84415 (TRAV27, TRAJ50)
CAVVGRGTSYDKVIF

SEQ ID NO: 168830 - protein, 14 aa, Homo sapiens
  CDR3 for beta chain variable domain of TCR clone 84415 (TRBV7-2, TRBJ1-1)
CASSFYDLNTEAFF

SEQ ID NO: 168831 - protein, 18 aa, Homo sapiens
  CDR3 for alpha chain variable domain of TCR clone 84416 (TRAV13-1, TRAJ52)
CAARNPNAGGTSYGKLTF

SEQ ID NO: 168832 - protein, 14 aa, Homo sapiens
  CDR3 for beta chain variable domain of TCR clone 84416 (TRBV6-5, TRBJ1-1)
CASSFGQGLTEAFF

SEQ ID NO: 168833 - protein, 14 aa, Homo sapiens
  CDR3 for alpha chain variable domain of TCR clone 84417 (TRAV8-2, TRAJ37)
CVVSISGNTGKLIF

SEQ ID NO: 168834 - protein, 13 aa, Homo sapiens
  CDR3 for beta chain variable domain of TCR clone 84417 (TRBV7-8, TRBJ2-7)
RRVRPTEMGEQYF

SEQ ID NO: 168835 - protein, 15 aa, Homo sapiens
  CDR3 for alpha chain variable domain of TCR clone 84418 (TRAV17, TRAJ4)
CATGTWSGGYNKLLF

SEQ ID NO: 168836 - protein, 15 aa, Homo sapiens
  CDR3 for beta chain variable domain of TCR clone 84418 (TRBV20-1, TRBJ2-7)
CSARDRVSGMDEQYF

SEQ ID NO: 168837 - protein, 11 aa, Homo sapiens
  CDR3 for alpha chain variable domain of TCR clone 84419 (TRAV8-4, TRAJ20)
CAVTNVLTTTS

SEQ ID NO: 168838 - protein, 17 aa, Homo sapiens
  CDR3 for beta chain variable domain of TCR clone 84419 (TRBV11-2, TRBJ2-1)
CASSLYPPGVEYNEQFF

SEQ ID NO: 168839 - protein, 13 aa, Homo sapiens
  CDR3 for alpha chain variable domain of TCR clone 84420 (TRAV8-3, TRAJ29)
CAVGAWGNTPLVF

SEQ ID NO: 168840 - protein, 17 aa, Homo sapiens
  CDR3 for beta chain variable domain of TCR clone 84420 (TRBV28, TRBJ2-1)
CASSSARQALTYNEQFF

SEQ ID NO: 168841 - protein, 14 aa, Homo sapiens
  CDR3 for alpha chain variable domain of TCR clone 84421 (TRAV1-2, TRAJ8)
CAVREDTGFQKLVF

SEQ ID NO: 168842 - protein, 15 aa, Homo sapiens
  CDR3 for beta chain variable domain of TCR clone 84421 (TRBV7-3, TRBJ2-2)
CASSETGQGTGELLF

SEQ ID NO: 168843 - protein, 12 aa, Homo sapiens
  CDR3 for alpha chain variable domain of TCR clone 84422 (TRAV27, TRAJ35)
CAGADFGNVLHC

SEQ ID NO: 168844 - protein, 16 aa, Homo sapiens
  CDR3 for beta chain variable domain of TCR clone 84422 (TRBV6-1, TRBJ2-1)
CASILRQGSSYNEQFI

SEQ ID NO: 168845 - protein, 16 aa, Homo sapiens
  CDR3 for alpha chain variable domain of TCR clone 84423 (TRAV19, TRAJ22)
CALSETPRGSARQLTF

SEQ ID NO: 168846 - protein, 14 aa, Homo sapiens
  CDR3 for beta chain variable domain of TCR clone 84423 (TRBV7-2, TRBJ2-7)
CASSPKTSFYEQYF

SEQ ID NO: 168847 - protein, 14 aa, Homo sapiens
  CDR3 for alpha chain variable domain of TCR clone 84424 (TRAV12-1, TRAJ9)
CVVNRRTGGFKTIF

SEQ ID NO: 168848 - protein, 14 aa, Homo sapiens
  CDR3 for beta chain variable domain of TCR clone 84424 (TRBV7-6, TRBJ2-3)
CASSLGTVTDTQYF

SEQ ID NO: 168849 - protein, 16 aa, Homo sapiens
  CDR3 for alpha chain variable domain of TCR clone 84425 (TRAV13-1, TRAJ10)
CAASNALTGGGNKLTF

SEQ ID NO: 168850 - protein, 16 aa, Homo sapiens
  CDR3 for beta chain variable domain of TCR clone 84425 (TRBV13, TRBJ2-2)
CASSPRTGEHTGELFF

SEQ ID NO: 168851 - protein, 15 aa, Homo sapiens
  CDR3 for alpha chain variable domain of TCR clone 84426 (TRAV17, TRAJ57)
CATGPSQGGSEKLVF

SEQ ID NO: 168852 - protein, 14 aa, Homo sapiens
  CDR3 for beta chain variable domain of TCR clone 84426 (TRBV5-4, TRBJ1-1)
CASSLDSRRDEAFF

SEQ ID NO: 168853 - protein, 14 aa, Homo sapiens
  CDR3 for alpha chain variable domain of TCR clone 84427 (TRAV35, TRAJ13)
CAGRSPGGYQKVTF

SEQ ID NO: 168854 - protein, 14 aa, Homo sapiens
  CDR3 for beta chain variable domain of TCR clone 84427 (TRBV19, TRBJ2-2)
CASSMVGLSGELVF

SEQ ID NO: 168855 - protein, 13 aa, Homo sapiens
  CDR3 for alpha chain variable domain of TCR clone 84428 (TRAV36/DV7, TRAJ53)
CALSGGSNYKLTF

SEQ ID NO: 168856 - protein, 14 aa, Homo sapiens
  CDR3 for beta chain variable domain of TCR clone 84428 (TRBV6-5, TRBJ2-7)
CASVASGGAHEQYF

SEQ ID NO: 168857 - protein, 14 aa, Homo sapiens
  CDR3 for alpha chain variable domain of TCR clone 84429 (TRAV12-2, TRAJ44)
CAVNPAGTASKLTF

SEQ ID NO: 168858 - protein, 17 aa, Homo sapiens
  CDR3 for beta chain variable domain of TCR clone 84429 (TRBV24-1, TRBJ2-1)
CATSDVSTSGTYNEQFF

SEQ ID NO: 168859 - protein, 13 aa, Homo sapiens
  CDR3 for alpha chain variable domain of TCR clone 84430 (TRAV30, TRAJ20)
CGTEDRSDYKLSF

SEQ ID NO: 168860 - protein, 15 aa, Homo sapiens
  CDR3 for beta chain variable domain of TCR clone 84430 (TRBV20-1, TRBJ1-1)
CSASRGVTGNTEAFF

SEQ ID NO: 168861 - protein, 14 aa, Homo sapiens
  CDR3 for alpha chain variable domain of TCR clone 84431 (TRAV12-2, TRAJ24)
CAVTPADSWGKLQV

SEQ ID NO: 168862 - protein, 16 aa, Homo sapiens
  CDR3 for beta chain variable domain of TCR clone 84431 (TRBV6-4, TRBJ2-3)
APSEGGRAWGTDTQYF

SEQ ID NO: 168863 - protein, 15 aa, Homo sapiens
  CDR3 for alpha chain variable domain of TCR clone 84432 (TRAV12-3, TRAJ6)
CAMSAASGGSYIPTF

SEQ ID NO: 168864 - protein, 13 aa, Homo sapiens
  CDR3 for beta chain variable domain of TCR clone 84432 (TRBV20-1, TRBJ1-2)
CSASTERIYGYTF

SEQ ID NO: 168865 - protein, 15 aa, Homo sapiens
  CDR3 for alpha chain variable domain of TCR clone 84433 (TRAV10, TRAJ6)
CVVRPRTGGSYVPTF

SEQ ID NO: 168866 - protein, 15 aa, Homo sapiens
  CDR3 for beta chain variable domain of TCR clone 84433 (TRBV20-1, TRBJ2-7)
CSARDRVSGMDEQYF

SEQ ID NO: 168867 - protein, 14 aa, Homo sapiens
  CDR3 for alpha chain variable domain of TCR clone 84434 (TRAV8-3, TRAJ35)
CAVVPQGFGNVLHC

SEQ ID NO: 168868 - protein, 15 aa, Homo sapiens
  CDR3 for beta chain variable domain of TCR clone 84434 (TRBV6-1, TRBJ2-2)
CASSAGLGYTGELFF

SEQ ID NO: 168869 - protein, 16 aa, Homo sapiens
  CDR3 for alpha chain variable domain of TCR clone 84435 (TRAV13-1, TRAJ10)
CAASNALTGGGNKLTF

SEQ ID NO: 168870 - protein, 12 aa, Homo sapiens
  CDR3 for beta chain variable domain of TCR clone 84435 (TRBV11-2, TRBJ2-2)
CASSLGGGELFF

SEQ ID NO: 168871 - protein, 13 aa, Homo sapiens
  CDR3 for alpha chain variable domain of TCR clone 84436 (TRAV1-2, TRAJ9)
CAALNTGGFKTIF

SEQ ID NO: 168872 - protein, 12 aa, Homo sapiens
  CDR3 for beta chain variable domain of TCR clone 84436 (TRBV11-2, TRBJ2-2)
CASSLGGGELLF

SEQ ID NO: 168873 - protein, 15 aa, Homo sapiens
  CDR3 for alpha chain variable domain of TCR clone 84437 (TRAV3, TRAJ22)
CAVRDRGGSARQLTF

SEQ ID NO: 168874 - protein, 10 aa, Homo sapiens
  CDR3 for beta chain variable domain of TCR clone 84437 (TRBV12-4, TRBJ2-7)
CASLTFEQYF

SEQ ID NO: 168875 - protein, 13 aa, Homo sapiens
  CDR3 for alpha chain variable domain of TCR clone 84438 (TRAV35, TRAJ42)
CAGFPGSQGNLIF

SEQ ID NO: 168876 - protein, 14 aa, Homo sapiens
  CDR3 for beta chain variable domain of TCR clone 84438 (TRBV7-6, TRBJ2-3)
CASSLGTVTDTQYF

SEQ ID NO: 168877 - protein, 12 aa, Homo sapiens
  CDR3 for alpha chain variable domain of TCR clone 84439 (TRAV38-2/DV8, TRAJ33)
CAYRSADYQLIW

SEQ ID NO: 168878 - protein, 16 aa, Homo sapiens
  CDR3 for beta chain variable domain of TCR clone 84439 (TRBV7-7, TRBJ2-1)
CASSLASGTSYNEQFF

SEQ ID NO: 168879 - protein, 12 aa, Homo sapiens
  CDR3 for alpha chain variable domain of TCR clone 84440 (TRAV13-1, TRAJ42)
VTYGGSQGNLIF

SEQ ID NO: 168880 - protein, 15 aa, Homo sapiens
  CDR3 for beta chain variable domain of TCR clone 84440 (TRBV20-1, TRBJ2-1)
CSASSAGSSYNEQFF

SEQ ID NO: 168881 - protein, 14 aa, Homo sapiens
  CDR3 for alpha chain variable domain of TCR clone 84441 (TRAV9-2, TRAJ39)
CALYIYNAGNMLPF

SEQ ID NO: 168882 - protein, 14 aa, Homo sapiens
  CDR3 for beta chain variable domain of TCR clone 84441 (TRBV12-5, TRBJ2-5)
CASGSRTHQETQYF

SEQ ID NO: 168883 - protein, 18 aa, Homo sapiens
  CDR3 for alpha chain variable domain of TCR clone 84442 (TRAV12-3, TRAJ52)
CAMSVGGAGGTSYGKLTF

SEQ ID NO: 168884 - protein, 15 aa, Homo sapiens
  CDR3 for beta chain variable domain of TCR clone 84442 (TRBV27, TRBJ1-6)
CASSFDRGLWSPLHF

SEQ ID NO: 168885 - protein, 12 aa, Homo sapiens
  CDR3 for alpha chain variable domain of TCR clone 84443 (TRAV13-2, TRAJ39)
CAENNAGNMLTF

SEQ ID NO: 168886 - protein, 12 aa, Homo sapiens
  CDR3 for beta chain variable domain of TCR clone 84443 (TRBV11-2, TRBJ2-2)
YASSLGGGELFF

SEQ ID NO: 168887 - protein, 15 aa, Homo sapiens
  CDR3 for alpha chain variable domain of TCR clone 84444 (TRAV29/DV5, TRAJ24)
CAASGATDSWGKFQF

SEQ ID NO: 168888 - protein, 16 aa, Homo sapiens
  CDR3 for beta chain variable domain of TCR clone 84444 (TRBV7-3, TRBJ2-2)
CASSLKRGTLSGELFF

SEQ ID NO: 168889 - protein, 14 aa, Homo sapiens
  CDR3 for alpha chain variable domain of TCR clone 84445 (TRAV8-3, TRAJ23)
CAVIIYNQGGKLNF

SEQ ID NO: 168890 - protein, 15 aa, Homo sapiens
  CDR3 for beta chain variable domain of TCR clone 84445 (TRBV18, TRBJ2-1)
CASSPPSASYNEQFF

SEQ ID NO: 168891 - protein, 18 aa, Homo sapiens
  CDR3 for alpha chain variable domain of TCR clone 84446 (TRAV26-1, TRAJ23)
CIVSVGLEVWNQGGKLIF

SEQ ID NO: 168892 - protein, 16 aa, Homo sapiens
  CDR3 for beta chain variable domain of TCR clone 84446 (TRBV12-4, TRBJ2-5)
CASSFFVRGRQETQYF

SEQ ID NO: 168893 - protein, 11 aa, Homo sapiens
  CDR3 for alpha chain variable domain of TCR clone 84447 (TRAV21, TRAJ48)
CAVDGNEKLTF

SEQ ID NO: 168894 - protein, 16 aa, Homo sapiens
  CDR3 for beta chain variable domain of TCR clone 84447 (TRBV7-3, TRBJ2-2)
CASSLKRGTLSGELFF

SEQ ID NO: 168895 - protein, 16 aa, Homo sapiens
  CDR3 for alpha chain variable domain of TCR clone 84448 (TRAV3, TRAJ10)
CAVRDMRAGGGNKLTF

SEQ ID NO: 168896 - protein, 15 aa, Homo sapiens
  CDR3 for beta chain variable domain of TCR clone 84448 (TRBV5-1, TRBJ2-1)
CASGPPRAPYNEQFF

SEQ ID NO: 168897 - protein, 12 aa, Homo sapiens
  CDR3 for alpha chain variable domain of TCR clone 84449 (TRAV21, TRAJ29)
CAVTSGNTPLVF

SEQ ID NO: 168898 - protein, 15 aa, Homo sapiens
  CDR3 for beta chain variable domain of TCR clone 84449 (TRBV12-4, TRBJ1-2)
CAGRLGVAGNYGYTF

SEQ ID NO: 168899 - protein, 14 aa, Homo sapiens
  CDR3 for alpha chain variable domain of TCR clone 84450 (TRAV1-2, TRAJ8)
CAVREDTGFQKLAF

SEQ ID NO: 168900 - protein, 12 aa, Homo sapiens
  CDR3 for beta chain variable domain of TCR clone 84450 (TRBV29-1, TRBJ2-3)
CSVTGGADTQYF

SEQ ID NO: 168901 - protein, 14 aa, Homo sapiens
  CDR3 for alpha chain variable domain of TCR clone 84451 (TRAV29/DV5, TRAJ36)
CAARRKTGANNLFF

SEQ ID NO: 168902 - protein, 14 aa, Homo sapiens
  CDR3 for beta chain variable domain of TCR clone 84451 (TRBV11-2, TRBJ1-2)
CASSLGTANYGYTF

SEQ ID NO: 168903 - protein, 14 aa, Homo sapiens
  CDR3 for alpha chain variable domain of TCR clone 84452 (TRAV13-1, TRAJ35)
CAASKGGFGNVLHC

SEQ ID NO: 168904 - protein, 13 aa, Homo sapiens
  CDR3 for beta chain variable domain of TCR clone 84452 (TRBV7-3, TRBJ2-1)
CASSPVAYNEQFF

SEQ ID NO: 168905 - protein, 23 aa, Homo sapiens
  CDR3 for alpha chain variable domain of TCR clone 84453 (TRAV1-2, )
CAVRDDGTGVSQNPDPAVYQLRD

SEQ ID NO: 168906 - protein, 16 aa, Homo sapiens
  CDR3 for beta chain variable domain of TCR clone 84453 (TRBV12-4, TRBJ2-5)
CASSLSTSGGKETQYF

SEQ ID NO: 168907 - protein, 14 aa, Homo sapiens
  CDR3 for alpha chain variable domain of TCR clone 84454 (TRAV2, TRAJ37)
CAVDFTSNTGKLIF

SEQ ID NO: 168908 - protein, 15 aa, Homo sapiens
  CDR3 for beta chain variable domain of TCR clone 84454 (TRBV18, TRBJ1-1)
CASSPRQGENTEAFF

SEQ ID NO: 168909 - protein, 14 aa, Homo sapiens
  CDR3 for alpha chain variable domain of TCR clone 84455 (TRAV19, TRAJ15)
CALSEDQAGTALIF

SEQ ID NO: 168910 - protein, 12 aa, Homo sapiens
  CDR3 for beta chain variable domain of TCR clone 84455 (TRBV12-4, TRBJ2-1)
CASSPGRNEQFF

SEQ ID NO: 168911 - protein, 11 aa, Homo sapiens
  CDR3 for alpha chain variable domain of TCR clone 84456 (TRAV4, TRAJ31)
CLVGDSARLMF

SEQ ID NO: 168912 - protein, 14 aa, Homo sapiens
  CDR3 for beta chain variable domain of TCR clone 84456 (TRBV4-1, TRBJ2-2)
CASSQAVNTGELFF

SEQ ID NO: 168913 - protein, 11 aa, Homo sapiens
  CDR3 for alpha chain variable domain of TCR clone 84457 (TRAV1-2, TRAJ20)
CAVANDYKLSF

SEQ ID NO: 168914 - protein, 16 aa, Homo sapiens
  CDR3 for beta chain variable domain of TCR clone 84457 (TRBV4-3, TRBJ1-6)
CASSQDLGVYNSPLHF

SEQ ID NO: 168915 - protein, 12 aa, Homo sapiens
  CDR3 for alpha chain variable domain of TCR clone 84458 (TRAV12-3, TRAJ20)
CAMVRGDYKLSF

SEQ ID NO: 168916 - protein, 15 aa, Homo sapiens
  CDR3 for beta chain variable domain of TCR clone 84458 (TRBV7-3, TRBJ2-2)
CASSETGQGTGELFF

SEQ ID NO: 168917 - protein, 16 aa, Homo sapiens
  CDR3 for alpha chain variable domain of TCR clone 84459 (TRAV30, TRAJ24)
CGTEIVDADSWGKFQF

SEQ ID NO: 168918 - protein, 13 aa, Homo sapiens
  CDR3 for beta chain variable domain of TCR clone 84459 (TRBV7-3, TRBJ1-1)
CASSLTQGTEAFF

SEQ ID NO: 168919 - protein, 15 aa, Homo sapiens
  CDR3 for alpha chain variable domain of TCR clone 84460 (TRAV13-2, TRAJ53)
CAERGSRGSNYKLTF

SEQ ID NO: 168920 - protein, 14 aa, Homo sapiens
  CDR3 for beta chain variable domain of TCR clone 84460 (TRBV4-1, TRBJ2-2)
CASSQCPDTGELFF

SEQ ID NO: 168921 - protein, 18 aa, Homo sapiens
  CDR3 for alpha chain variable domain of TCR clone 84461 (TRAV13-1, TRAJ52)
CAAKSPNAGGTSYRKLTF

SEQ ID NO: 168922 - protein, 16 aa, Homo sapiens
  CDR3 for beta chain variable domain of TCR clone 84461 (TRBV27, TRBJ2-2)
CASSFRGLVRTGELFF

SEQ ID NO: 168923 - protein, 13 aa, Homo sapiens
  CDR3 for alpha chain variable domain of TCR clone 84462 (TRAV8-6, TRAJ9)
CAVSDTGGFKTIF

SEQ ID NO: 168924 - protein, 14 aa, Homo sapiens
  CDR3 for beta chain variable domain of TCR clone 84462 (TRBV7-6, TRBJ2-3)
CASSVAGGTDTQYF

SEQ ID NO: 168925 - protein, 14 aa, Homo sapiens
  CDR3 for alpha chain variable domain of TCR clone 84463 (TRAV13-1, TRAJ35)
CAASKGGFGNVLHC

SEQ ID NO: 168926 - protein, 14 aa, Homo sapiens
  CDR3 for beta chain variable domain of TCR clone 84463 (TRBV2, TRBJ1-5)
CASSGAGFNQPQHF

SEQ ID NO: 168927 - protein, 15 aa, Homo sapiens
  CDR3 for alpha chain variable domain of TCR clone 84464 (TRAV12-3, TRAJ22)
CAMRTISGSARQLTF

SEQ ID NO: 168928 - protein, 17 aa, Homo sapiens
  CDR3 for beta chain variable domain of TCR clone 84464 (TRBV11-2, TRBJ2-1)
CASSLYPPGVEYNEQFF

SEQ ID NO: 168929 - protein, 14 aa, Homo sapiens
  CDR3 for alpha chain variable domain of TCR clone 84465 (TRAV16, TRAJ37)
CALDISANTGKLIF

SEQ ID NO: 168930 - protein, 14 aa, Homo sapiens
  CDR3 for beta chain variable domain of TCR clone 84465 (TRBV7-6, TRBJ2-7)
CASSFRQGADEQYF

SEQ ID NO: 168931 - protein, 17 aa, Homo sapiens
  CDR3 for alpha chain variable domain of TCR clone 84466 (TRAV12-2, TRAJ6)
CAPQGPPRAGGSYIPTF

SEQ ID NO: 168932 - protein, 16 aa, Homo sapiens
  CDR3 for beta chain variable domain of TCR clone 84466 (TRBV5-1, TRBJ2-1)
CASSPWTSGEYNEQFF

SEQ ID NO: 168933 - protein, 15 aa, Homo sapiens
  CDR3 for alpha chain variable domain of TCR clone 84467 (TRAV8-3, TRAJ45)
CASSYSGGGADGLTF

SEQ ID NO: 168934 - protein, 15 aa, Homo sapiens
  CDR3 for beta chain variable domain of TCR clone 84467 (TRBV11-2, TRBJ2-1)
CASSSPSTRYNEQFF

SEQ ID NO: 168935 - protein, 16 aa, Homo sapiens
  CDR3 for alpha chain variable domain of TCR clone 84468 (TRAV8-3, TRAJ44)
CAVVASNTGTASKLTF

SEQ ID NO: 168936 - protein, 15 aa, Homo sapiens
  CDR3 for beta chain variable domain of TCR clone 84468 (TRBV27, TRBJ1-5)
CASTFNRGSNQPQHF

SEQ ID NO: 168937 - protein, 14 aa, Homo sapiens
  CDR3 for alpha chain variable domain of TCR clone 84469 (TRAV20, TRAJ20)
CAVRRGYNDYKLSF

SEQ ID NO: 168938 - protein, 13 aa, Homo sapiens
  CDR3 for beta chain variable domain of TCR clone 84469 (TRBV19, TRBJ2-5)
CASRETAPETQYF

SEQ ID NO: 168939 - protein, 15 aa, Homo sapiens
  CDR3 for alpha chain variable domain of TCR clone 84470 (TRAV8-3, TRAJ15)
CAVGAPSQAGTALIF

SEQ ID NO: 168940 - protein, 14 aa, Homo sapiens
  CDR3 for beta chain variable domain of TCR clone 84470 (TRBV20-1, TRBJ2-1)
CSPNDEASYNEQFF

SEQ ID NO: 168941 - protein, 14 aa, Homo sapiens
  CDR3 for alpha chain variable domain of TCR clone 84471 (TRAV1-2, TRAJ8)
CAVREDTGFQKLVF

SEQ ID NO: 168942 - protein, 17 aa, Homo sapiens
  CDR3 for beta chain variable domain of TCR clone 84471 (TRBV11-2, TRBJ2-1)
CASSLFPPGVEYNEQFF

SEQ ID NO: 168943 - protein, 14 aa, Homo sapiens
  CDR3 for alpha chain variable domain of TCR clone 84472 (TRAV17, TRAJ39)
CAKDPVRAGNMLTF

SEQ ID NO: 168944 - protein, 15 aa, Homo sapiens
  CDR3 for beta chain variable domain of TCR clone 84472 (TRBV13, TRBJ1-5)
CASSFGQGGVQPQHF

SEQ ID NO: 168945 - protein, 13 aa, Homo sapiens
  CDR3 for alpha chain variable domain of TCR clone 84473 (TRAV2, TRAJ29)
CAAQNSGNTSLVF

SEQ ID NO: 168946 - protein, 14 aa, Homo sapiens
  CDR3 for beta chain variable domain of TCR clone 84473 (TRBV7-9, TRBJ2-4)
CASSIAMGGNIQYF

SEQ ID NO: 168947 - protein, 14 aa, Homo sapiens
  CDR3 for alpha chain variable domain of TCR clone 84474 (TRAV26-1, TRAJ34)
CFVRVAYNTDKLIF

SEQ ID NO: 168948 - protein, 15 aa, Homo sapiens
  CDR3 for beta chain variable domain of TCR clone 84474 (TRBV20-1, TRBJ2-7)
CSARVPAAYFYEQYF

SEQ ID NO: 168949 - protein, 12 aa, Homo sapiens
  CDR3 for alpha chain variable domain of TCR clone 84475 (TRAV21, TRAJ11)
CAVRGGNSTLTF

SEQ ID NO: 168950 - protein, 15 aa, Homo sapiens
  CDR3 for beta chain variable domain of TCR clone 84475 (TRBV6-1, TRBJ2-7)
CASSEPRAATTEQYF

SEQ ID NO: 168951 - protein, 15 aa, Homo sapiens
  CDR3 for alpha chain variable domain of TCR clone 84476 (TRAV21, TRAJ24)
CAARASTDSWGKLQF

SEQ ID NO: 168952 - protein, 15 aa, Homo sapiens
  CDR3 for beta chain variable domain of TCR clone 84476 (TRBV4-1, TRBJ2-7)
CASSQNTGRLYEQYF

SEQ ID NO: 168953 - protein, 15 aa, Homo sapiens
  CDR3 for alpha chain variable domain of TCR clone 84477 (TRAV27, TRAJ38)
CAARCNAGNNRKLIW

SEQ ID NO: 168954 - protein, 15 aa, Homo sapiens
  CDR3 for beta chain variable domain of TCR clone 84477 (TRBV11-2, TRBJ1-2)
CASSLEGVQRNGYTF

SEQ ID NO: 168955 - protein, 15 aa, Homo sapiens
  CDR3 for alpha chain variable domain of TCR clone 84478 (TRAV8-3, TRAJ11)
CAVGLLNPGYSTLTF

SEQ ID NO: 168956 - protein, 16 aa, Homo sapiens
  CDR3 for beta chain variable domain of TCR clone 84478 (TRBV7-9, TRBJ1-2)
CASSLGFSSGEDGYTF

SEQ ID NO: 168957 - protein, 14 aa, Homo sapiens
  CDR3 for alpha chain variable domain of TCR clone 84479 (TRAV13-1, TRAJ35)
CAASKGGFGNVLHC

SEQ ID NO: 168958 - protein, 13 aa, Homo sapiens
  CDR3 for beta chain variable domain of TCR clone 84479 (TRBV7-3, TRBJ1-1)
CASSQDWGAQAFF

SEQ ID NO: 168959 - protein, 17 aa, Homo sapiens
  CDR3 for alpha chain variable domain of TCR clone 84480 (TRAV13-1, TRAJ52)
CAAGRNAGGTSYGKLTF

SEQ ID NO: 168960 - protein, 12 aa, Homo sapiens
  CDR3 for beta chain variable domain of TCR clone 84480 (TRBV29-1, TRBJ1-3)
CSTRDSGNTIYC

SEQ ID NO: 168961 - protein, 12 aa, Homo sapiens
  CDR3 for alpha chain variable domain of TCR clone 84481 (TRAV8-3, TRAJ26)
CAGDNYGQNFVF

SEQ ID NO: 168962 - protein, 15 aa, Homo sapiens
  CDR3 for beta chain variable domain of TCR clone 84481 (TRBV7-9, TRBJ2-7)
CASSSSGLAVYEQYF

SEQ ID NO: 168963 - protein, 14 aa, Homo sapiens
  CDR3 for alpha chain variable domain of TCR clone 84482 (TRAV1-1, TRAJ30)
CAVRSLNRDDKIIF

SEQ ID NO: 168964 - protein, 15 aa, Homo sapiens
  CDR3 for beta chain variable domain of TCR clone 84482 (TRBV27, TRBJ1-4)
CASSAQQDLNENLFF

SEQ ID NO: 168965 - protein, 13 aa, Homo sapiens
  CDR3 for alpha chain variable domain of TCR clone 84483 (TRAV8-1, TRAJ30)
CAVIMNRDYKIIF

SEQ ID NO: 168966 - protein, 14 aa, Homo sapiens
  CDR3 for beta chain variable domain of TCR clone 84483 (TRBV7-2, TRBJ1-6)
CASSLQGANSPLHF

SEQ ID NO: 168967 - protein, 17 aa, Homo sapiens
  CDR3 for alpha chain variable domain of TCR clone 84484 (TRAV26-1, TRAJ10)
CIVSFRGFTGGGNKLTF

SEQ ID NO: 168968 - protein, 13 aa, Homo sapiens
  CDR3 for beta chain variable domain of TCR clone 84484 (TRBV20-1, TRBJ2-3)
CSASRQAADTQYF

SEQ ID NO: 168969 - protein, 13 aa, Homo sapiens
  CDR3 for alpha chain variable domain of TCR clone 84485 (TRAV30, TRAJ24)
CGTVTDSWGKLQF

SEQ ID NO: 168970 - protein, 20 aa, Homo sapiens
  CDR3 for beta chain variable domain of TCR clone 84485 (TRBV28, TRBJ2-1)
CASTPIGRSPGLAGGNEQFF

SEQ ID NO: 168971 - protein, 13 aa, Homo sapiens
  CDR3 for alpha chain variable domain of TCR clone 84486 (TRAV27, TRAJ41)
CAGEGNSGYALNF

SEQ ID NO: 168972 - protein, 14 aa, Homo sapiens
  CDR3 for beta chain variable domain of TCR clone 84486 (TRBV7-2, TRBJ1-1)
RASSSLTGTTEAFF

SEQ ID NO: 168973 - protein, 15 aa, Homo sapiens
  CDR3 for alpha chain variable domain of TCR clone 84487 (TRAV25, TRAJ53)
CAATGGGGGNYKLTF

SEQ ID NO: 168974 - protein, 19 aa, Homo sapiens
  CDR3 for beta chain variable domain of TCR clone 84487 (TRBV7-2, TRBJ2-3)
CASSFLSRNWGGGTDTQYF

SEQ ID NO: 168975 - protein, 15 aa, Homo sapiens
  CDR3 for alpha chain variable domain of TCR clone 84488 (TRAV8-3, TRAJ45)
CASSYSGGGADGLTF

SEQ ID NO: 168976 - protein, 15 aa, Homo sapiens
  CDR3 for beta chain variable domain of TCR clone 84488 (TRBV27, TRBJ1-4)
CASSPRHATNEKLSF

SEQ ID NO: 168977 - protein, 13 aa, Homo sapiens
  CDR3 for alpha chain variable domain of TCR clone 84489 (TRAV35, TRAJ36)
CAGPRIGANNLFF

SEQ ID NO: 168978 - protein, 16 aa, Homo sapiens
  CDR3 for beta chain variable domain of TCR clone 84489 (TRBV13, TRBJ2-2)
CASSPRTGEHTGELFF

SEQ ID NO: 168979 - protein, 11 aa, Homo sapiens
  CDR3 for alpha chain variable domain of TCR clone 84490 (TRAV21, TRAJ9)
CAVPGGVKTIF

SEQ ID NO: 168980 - protein, 12 aa, Homo sapiens
  CDR3 for beta chain variable domain of TCR clone 84490 (TRBV20-1, TRBJ2-3)
CSARVGTDTQYF

SEQ ID NO: 168981 - protein, 15 aa, Homo sapiens
  CDR3 for alpha chain variable domain of TCR clone 84491 (TRAV23/DV6, TRAJ57)
CAASSTLSPGGSEQL

SEQ ID NO: 168982 - protein, 14 aa, Homo sapiens
  CDR3 for beta chain variable domain of TCR clone 84491 (TRBV25-1, TRBJ1-1)
CASTHLGGNTEAFF

SEQ ID NO: 168983 - protein, 15 aa, Homo sapiens
  CDR3 for alpha chain variable domain of TCR clone 84492 (TRAV25, TRAJ53)
CAATGGGGSNYKLTF

SEQ ID NO: 168984 - protein, 14 aa, Homo sapiens
  CDR3 for beta chain variable domain of TCR clone 84492 (TRBV5-1, TRBJ2-5)
CASSLAGKQETQYF

SEQ ID NO: 168985 - protein, 13 aa, Homo sapiens
  CDR3 for alpha chain variable domain of TCR clone 84493 (TRAV12-3, TRAJ33)
CAMSVNSNYQLIW

SEQ ID NO: 168986 - protein, 13 aa, Homo sapiens
  CDR3 for beta chain variable domain of TCR clone 84493 (TRBV7-2, TRBJ2-2)
CASSLAVTVELFF

SEQ ID NO: 168987 - protein, 14 aa, Homo sapiens
  CDR3 for alpha chain variable domain of TCR clone 84494 (TRAV35, TRAJ50)
CAGHRKTSSDKVIF

SEQ ID NO: 168988 - protein, 13 aa, Homo sapiens
  CDR3 for beta chain variable domain of TCR clone 84494 (TRBV7-7, TRBJ2-3)
CASSLSRADTQYF

SEQ ID NO: 168989 - protein, 15 aa, Homo sapiens
  CDR3 for alpha chain variable domain of TCR clone 84495 (TRAV17, TRAJ22)
CATAALLGPARQLTF

SEQ ID NO: 168990 - protein, 13 aa, Homo sapiens
  CDR3 for beta chain variable domain of TCR clone 84495 (TRBV29-1, TRBJ2-3)
CSVVPQGGDTQYF

SEQ ID NO: 168991 - protein, 13 aa, Homo sapiens
  CDR3 for alpha chain variable domain of TCR clone 84496 (TRAV17, TRAJ26)
CATVDNYGQNLVF

SEQ ID NO: 168992 - protein, 16 aa, Homo sapiens
  CDR3 for beta chain variable domain of TCR clone 84496 (TRBV2, TRBJ2-1)
CASSVGGSLSYNEQFF

SEQ ID NO: 168993 - protein, 18 aa, Homo sapiens
  CDR3 for alpha chain variable domain of TCR clone 84497 (TRAV12-3, TRAJ52)
CAMSVGGAGGTSYGKLTF

SEQ ID NO: 168994 - protein, 15 aa, Homo sapiens
  CDR3 for beta chain variable domain of TCR clone 84497 (TRBV27, TRBJ1-6)
CASSFDRGLGSSLHF

SEQ ID NO: 168995 - protein, 12 aa, Homo sapiens
  CDR3 for alpha chain variable domain of TCR clone 84498 (TRAV12-3, TRAJ34)
CAMGYKTDKLIF

SEQ ID NO: 168996 - protein, 14 aa, Homo sapiens
  CDR3 for beta chain variable domain of TCR clone 84498 (TRBV5-7, TRBJ1-5)
CASSRTGGGQPQHF

SEQ ID NO: 168997 - protein, 11 aa, Homo sapiens
  CDR3 for alpha chain variable domain of TCR clone 84499 (TRAV2, TRAJ33)
CAVDSNYQLIW

SEQ ID NO: 168998 - protein, 17 aa, Homo sapiens
  CDR3 for beta chain variable domain of TCR clone 84499 (TRBV7-8, TRBJ2-6)
CASSAGTGGAGANVLTF

SEQ ID NO: 168999 - protein, 13 aa, Homo sapiens
  CDR3 for alpha chain variable domain of TCR clone 84500 (TRAV26-1, TRAJ33)
CIVRVEGNYQLIW

SEQ ID NO: 169000 - protein, 16 aa, Homo sapiens
  CDR3 for beta chain variable domain of TCR clone 84500 (TRBV15, TRBJ2-7)
CATSRDWGRRRGEQYF

SEQ ID NO: 169001 - protein, 17 aa, Homo sapiens
  CDR3 for alpha chain variable domain of TCR clone 84501 (TRAV26-1, TRAJ11)
CIVRVGQSNSGYSNLTF

SEQ ID NO: 169002 - protein, 15 aa, Homo sapiens
  CDR3 for beta chain variable domain of TCR clone 84501 (TRBV27, TRBJ2-5)
CASSLIPSGGETQYF

SEQ ID NO: 169003 - protein, 18 aa, Homo sapiens
  CDR3 for alpha chain variable domain of TCR clone 84502 (TRAV17, TRAJ28)
CATDPPRGSGAGIYQLTF

SEQ ID NO: 169004 - protein, 14 aa, Homo sapiens
  CDR3 for beta chain variable domain of TCR clone 84502 (TRBV13, TRBJ2-5)
CASSLDYPQETQYF

SEQ ID NO: 169005 - protein, 14 aa, Homo sapiens
  CDR3 for alpha chain variable domain of TCR clone 84503 (TRAV12-2, TRAJ13)
CAVKKTGGYQKVTF

SEQ ID NO: 169006 - protein, 15 aa, Homo sapiens
  CDR3 for beta chain variable domain of TCR clone 84503 (TRBV9, TRBJ1-6)
CASSVAGTGDSALHF

SEQ ID NO: 169007 - protein, 11 aa, Homo sapiens
  CDR3 for alpha chain variable domain of TCR clone 84504 (TRAV13-1, TRAJ6)
CATFGSYIPTF

SEQ ID NO: 169008 - protein, 12 aa, Homo sapiens
  CDR3 for beta chain variable domain of TCR clone 84504 (TRBV11-2, TRBJ2-1)
CASSPGNNEQFF

SEQ ID NO: 169009 - protein, 14 aa, Homo sapiens
  CDR3 for alpha chain variable domain of TCR clone 84505 (TRAV12-1, TRAJ4)
CGEPFSGGYNKLIF

SEQ ID NO: 169010 - protein, 13 aa, Homo sapiens
  CDR3 for beta chain variable domain of TCR clone 84505 (TRBV20-1, TRBJ1-2)
CSARGTADYGYTF

SEQ ID NO: 169011 - protein, 16 aa, Homo sapiens
  CDR3 for alpha chain variable domain of TCR clone 84506 (TRAV30, TRAJ24)
CGTEIVDADSWGKFQF

SEQ ID NO: 169012 - protein, 16 aa, Homo sapiens
  CDR3 for beta chain variable domain of TCR clone 84506 (TRBV6-5, TRBJ2-1)
CASSETLAGHYNEQFF

SEQ ID NO: 169013 - protein, 11 aa, Homo sapiens
  CDR3 for alpha chain variable domain of TCR clone 84507 (TRAV13-1, TRAJ52)
PVGTSYGKLTF

SEQ ID NO: 169014 - protein, 16 aa, Homo sapiens
  CDR3 for beta chain variable domain of TCR clone 84507 (TRBV28, TRBJ2-7)
CASSPWVATGDLSQYF

SEQ ID NO: 169015 - protein, 14 aa, Homo sapiens
  CDR3 for alpha chain variable domain of TCR clone 84508 (TRAV20, TRAJ42)
CAVQAGGSQGNLIF

SEQ ID NO: 169016 - protein, 15 aa, Homo sapiens
  CDR3 for beta chain variable domain of TCR clone 84508 (TRBV12-4, TRBJ2-5)
CASSPPTGLQETQYL

SEQ ID NO: 169017 - protein, 11 aa, Homo sapiens
  CDR3 for alpha chain variable domain of TCR clone 84509 (TRAV21, TRAJ34)
CAVTNTDKLIF

SEQ ID NO: 169018 - protein, 15 aa, Homo sapiens
  CDR3 for beta chain variable domain of TCR clone 84509 (TRBV18, TRBJ1-1)
CQLTGRGGRGGEAFF

SEQ ID NO: 169019 - protein, 16 aa, Homo sapiens
  CDR3 for alpha chain variable domain of TCR clone 84510 (TRAV30, TRAJ24)
CGTEIVDADSWGKFQF

SEQ ID NO: 169020 - protein, 14 aa, Homo sapiens
  CDR3 for beta chain variable domain of TCR clone 84510 (TRBV7-8, TRBJ2-5)
CASSATGGQETQYF

SEQ ID NO: 169021 - protein, 15 aa, Homo sapiens
  CDR3 for alpha chain variable domain of TCR clone 84511 (TRAV17, TRAJ56)
CATDANTGANSKLTF

SEQ ID NO: 169022 - protein, 10 aa, Homo sapiens
  CDR3 for beta chain variable domain of TCR clone 84511 (TRBV6-3, TRBJ1-1)
CASHGTEAFF

SEQ ID NO: 169023 - protein, 13 aa, Homo sapiens
  CDR3 for alpha chain variable domain of TCR clone 84512 (TRAV36/DV7, TRAJ54)
CAVDIKGAQKLVF

SEQ ID NO: 169024 - protein, 14 aa, Homo sapiens
  CDR3 for beta chain variable domain of TCR clone 84512 (TRBV19, TRBJ2-7)
CASNFRDTFTGMYF

SEQ ID NO: 169025 - protein, 11 aa, Homo sapiens
  CDR3 for alpha chain variable domain of TCR clone 84513 (TRAV12-1, TRAJ15)
CVVNAGTALIF

SEQ ID NO: 169026 - protein, 16 aa, Homo sapiens
  CDR3 for beta chain variable domain of TCR clone 84513 (TRBV28, TRBJ2-1)
CASSSRVRDAYNEQFF

SEQ ID NO: 169027 - protein, 13 aa, Homo sapiens
  CDR3 for alpha chain variable domain of TCR clone 84514 (TRAV21, TRAJ27)
CAARPGNAGKSTF

SEQ ID NO: 169028 - protein, 17 aa, Homo sapiens
  CDR3 for beta chain variable domain of TCR clone 84514 (TRBV28, TRBJ1-1)
CASSLSGTGYENTEAFF

SEQ ID NO: 169029 - protein, 14 aa, Homo sapiens
  CDR3 for alpha chain variable domain of TCR clone 84515 (TRAV1-2, TRAJ8)
CAVREDTGFQKLVF

SEQ ID NO: 169030 - protein, 17 aa, Homo sapiens
  CDR3 for beta chain variable domain of TCR clone 84515 (TRBV6-3, TRBJ2-7)
CASSSPGTVFSSSTSGR

SEQ ID NO: 169031 - protein, 16 aa, Homo sapiens
  CDR3 for alpha chain variable domain of TCR clone 84516 (TRAV12-2, TRAJ28)
CAVITDSGAGSYKITF

SEQ ID NO: 169032 - protein, 12 aa, Homo sapiens
  CDR3 for beta chain variable domain of TCR clone 84516 (TRBV9, TRBJ2-2)
CASSLVTGELFF

SEQ ID NO: 169033 - protein, 13 aa, Homo sapiens
  CDR3 for alpha chain variable domain of TCR clone 84517 (TRAV20, TRAJ42)
CAVQGGSHGNLIF

SEQ ID NO: 169034 - protein, 15 aa, Homo sapiens
  CDR3 for beta chain variable domain of TCR clone 84517 (TRBV10-1, TRBJ2-1)
CASSEWRGTYNEQFF

SEQ ID NO: 169035 - protein, 14 aa, Homo sapiens
  CDR3 for alpha chain variable domain of TCR clone 84518 (TRAV8-2, TRAJ4)
CVVSPSGGYNKLIF

SEQ ID NO: 169036 - protein, 14 aa, Homo sapiens
  CDR3 for beta chain variable domain of TCR clone 84518 (TRBV7-6, TRBJ2-3)
CASSLGTVTDTQYF

SEQ ID NO: 169037 - protein, 10 aa, Homo sapiens
  CDR3 for alpha chain variable domain of TCR clone 84519 (TRAV30, TRAJ48)
CGIGNEKLTF

SEQ ID NO: 169038 - protein, 15 aa, Homo sapiens
  CDR3 for beta chain variable domain of TCR clone 84519 (TRBV7-9, TRBJ1-6)
CASSSPGRGNSPLHF

SEQ ID NO: 169039 - protein, 18 aa, Homo sapiens
  CDR3 for alpha chain variable domain of TCR clone 84520 (TRAV1-2, TRAJ18)
CAVRDMGDRGSTLGRLYF

SEQ ID NO: 169040 - protein, 14 aa, Homo sapiens
  CDR3 for beta chain variable domain of TCR clone 84520 (TRBV19, TRBJ2-2)
CASSTLHRSGELFF

SEQ ID NO: 169041 - protein, 12 aa, Homo sapiens
  CDR3 for alpha chain variable domain of TCR clone 84521 (TRAV30, TRAJ43)
CGTEERGNDMRF

SEQ ID NO: 169042 - protein, 13 aa, Homo sapiens
  CDR3 for beta chain variable domain of TCR clone 84521 (TRBV12-4, TRBJ1-2)
CASSSGSKDGYTF

SEQ ID NO: 169043 - protein, 15 aa, Homo sapiens
  CDR3 for alpha chain variable domain of TCR clone 84522 (TRAV2, TRAJ13)
CATPSYSGGYQKVTF

SEQ ID NO: 169044 - protein, 13 aa, Homo sapiens
  CDR3 for beta chain variable domain of TCR clone 84522 (TRBV14, TRBJ1-5)
CASSQDRRGHQHF

SEQ ID NO: 169045 - protein, 14 aa, Homo sapiens
  CDR3 for alpha chain variable domain of TCR clone 84523 (TRAV12-3, TRAJ9)
CAMSPNTGGFKTIF

SEQ ID NO: 169046 - protein, 13 aa, Homo sapiens
  CDR3 for beta chain variable domain of TCR clone 84523 (TRBV7-9, TRBJ2-7)
CASSFAGAYEQYF

SEQ ID NO: 169047 - protein, 12 aa, Homo sapiens
  CDR3 for alpha chain variable domain of TCR clone 84524 (TRAV2, TRAJ3)
CAVRSSASKIIF

SEQ ID NO: 169048 - protein, 15 aa, Homo sapiens
  CDR3 for beta chain variable domain of TCR clone 84524 (TRBV20-1, TRBJ2-7)
CSARDRVSGMDEQYF

SEQ ID NO: 169049 - protein, 14 aa, Homo sapiens
  CDR3 for alpha chain variable domain of TCR clone 84525 (TRAV13-1, TRAJ20)
CAARPGSNDYKLTF

SEQ ID NO: 169050 - protein, 13 aa, Homo sapiens
  CDR3 for beta chain variable domain of TCR clone 84525 (TRBV20-1, TRBJ1-1)
CSAPPGGHTEAFF

SEQ ID NO: 169051 - protein, 13 aa, Homo sapiens
  CDR3 for alpha chain variable domain of TCR clone 84526 (TRAV3, TRAJ30)
CAVRDRGDDKIIF

SEQ ID NO: 169052 - protein, 16 aa, Homo sapiens
  CDR3 for beta chain variable domain of TCR clone 84526 (TRBV20-1, TRBJ1-2)
CSASMGQGVANYGYTF

SEQ ID NO: 169053 - protein, 13 aa, Homo sapiens
  CDR3 for alpha chain variable domain of TCR clone 84527 (TRAV3, TRAJ21)
CAVREPDFNKFYF

SEQ ID NO: 169054 - protein, 15 aa, Homo sapiens
  CDR3 for beta chain variable domain of TCR clone 84527 (TRBV20-1, TRBJ2-2)
CSARGGQGNTGELFF

SEQ ID NO: 169055 - protein, 14 aa, Homo sapiens
  CDR3 for alpha chain variable domain of TCR clone 84528 (TRAV17, TRAJ53)
CATDAGGSHYKLTF

SEQ ID NO: 169056 - protein, 16 aa, Homo sapiens
  CDR3 for beta chain variable domain of TCR clone 84528 (TRBV4-1, TRBJ1-1)
CASSQDAGMGNTEAFF

SEQ ID NO: 169057 - protein, 17 aa, Homo sapiens
  CDR3 for alpha chain variable domain of TCR clone 84529 (TRAV4, TRAJ18)
CPVVAAGRGSTLGRLYF

SEQ ID NO: 169058 - protein, 17 aa, Homo sapiens
  CDR3 for beta chain variable domain of TCR clone 84529 (TRBV28, TRBJ2-2)
CASSLATGMGDAGELFF

SEQ ID NO: 169059 - protein, 13 aa, Homo sapiens
  CDR3 for alpha chain variable domain of TCR clone 84530 (TRAV17, TRAJ6)
CATGFGGSYIPTF

SEQ ID NO: 169060 - protein, 14 aa, Homo sapiens
  CDR3 for beta chain variable domain of TCR clone 84530 (TRBV5-1, TRBJ2-5)
CASSCGGSQETQYF

SEQ ID NO: 169061 - protein, 15 aa, Homo sapiens
  CDR3 for alpha chain variable domain of TCR clone 84531 (TRAV12-1, TRAJ44)
CVVFVNTGTASKLTF

SEQ ID NO: 169062 - protein, 16 aa, Homo sapiens
  CDR3 for beta chain variable domain of TCR clone 84531 (TRBV7-8, TRBJ2-6)
CQQRRDRGAGANVLTF

SEQ ID NO: 169063 - protein, 13 aa, Homo sapiens
  CDR3 for alpha chain variable domain of TCR clone 84532 (TRAV26-1, TRAJ45)
CIVEGGGADGLTF

SEQ ID NO: 169064 - protein, 15 aa, Homo sapiens
  CDR3 for beta chain variable domain of TCR clone 84532 (TRBV20-1, TRBJ2-7)
CSARVPAAYFYEQYF

SEQ ID NO: 169065 - protein, 14 aa, Homo sapiens
  CDR3 for alpha chain variable domain of TCR clone 84533 (TRAV17, TRAJ35)
CATDRPGFGDVLHC

SEQ ID NO: 169066 - protein, 19 aa, Homo sapiens
  CDR3 for beta chain variable domain of TCR clone 84533 (TRBV11-3, TRBJ2-2)
CASSTRPGAKTTNTGELFF

SEQ ID NO: 169067 - protein, 14 aa, Homo sapiens
  CDR3 for alpha chain variable domain of TCR clone 84534 (TRAV26-1, TRAJ38)
CIADNAGNNRKLIW

SEQ ID NO: 169068 - protein, 15 aa, Homo sapiens
  CDR3 for beta chain variable domain of TCR clone 84534 (TRBV29-1, TRBJ2-1)
CSVEGGPASYNEQFF

SEQ ID NO: 169069 - protein, 17 aa, Homo sapiens
  CDR3 for alpha chain variable domain of TCR clone 84535 (TRAV12-1, TRAJ32)
CVVNMQGYGGATNKLIF

SEQ ID NO: 169070 - protein, 15 aa, Homo sapiens
  CDR3 for beta chain variable domain of TCR clone 84535 (TRBV7-2, TRBJ2-1)
CASSSGLAGGNEQFF

SEQ ID NO: 169071 - protein, 14 aa, Homo sapiens
  CDR3 for alpha chain variable domain of TCR clone 84536 (TRAV12-3, TRAJ29)
CAMSPYSGNTPLVF

SEQ ID NO: 169072 - protein, 12 aa, Homo sapiens
  CDR3 for beta chain variable domain of TCR clone 84536 (TRBV9, TRBJ2-1)
CASSVGGTDISF

SEQ ID NO: 169073 - protein, 12 aa, Homo sapiens
  CDR3 for alpha chain variable domain of TCR clone 84537 (TRAV12-3, TRAJ17)
CAITLTGNKLTF

SEQ ID NO: 169074 - protein, 13 aa, Homo sapiens
  CDR3 for beta chain variable domain of TCR clone 84537 (TRBV5-1, TRBJ1-1)
CASSADWDTEAFF

SEQ ID NO: 169075 - protein, 13 aa, Homo sapiens
  CDR3 for alpha chain variable domain of TCR clone 84538 (TRAV8-6, TRAJ49)
CAVITNTGNQFYF

SEQ ID NO: 169076 - protein, 13 aa, Homo sapiens
  CDR3 for beta chain variable domain of TCR clone 84538 (TRBV11-3, TRBJ2-3)
CASRPVLGDTQYF

SEQ ID NO: 169077 - protein, 14 aa, Homo sapiens
  CDR3 for alpha chain variable domain of TCR clone 84539 (TRAV1-2, TRAJ8)
CAVREDTGFQKLVF

SEQ ID NO: 169078 - protein, 10 aa, Homo sapiens
  CDR3 for beta chain variable domain of TCR clone 84539 (TRBV28, TRBJ1-2)
CASSSDRAVF

SEQ ID NO: 169079 - protein, 12 aa, Homo sapiens
  CDR3 for alpha chain variable domain of TCR clone 84540 (TRAV26-1, TRAJ36)
CIVRVRADNLFF

SEQ ID NO: 169080 - protein, 17 aa, Homo sapiens
  CDR3 for beta chain variable domain of TCR clone 84540 (TRBV7-9, TRBJ2-3)
CASSPTVAGDLTDTQYF

SEQ ID NO: 169081 - protein, 10 aa, Homo sapiens
  CDR3 for alpha chain variable domain of TCR clone 84541 (TRAV23/DV6, TRAJ22)
CAASSRGSRF

SEQ ID NO: 169082 - protein, 15 aa, Homo sapiens
  CDR3 for beta chain variable domain of TCR clone 84541 (TRBV10-3, TRBJ2-3)
CAIDTSGRRTDTQYF

SEQ ID NO: 169083 - protein, 15 aa, Homo sapiens
  CDR3 for alpha chain variable domain of TCR clone 84542 (TRAV20, TRAJ58)
CAVQDLEISGSRLTF

SEQ ID NO: 169084 - protein, 13 aa, Homo sapiens
  CDR3 for beta chain variable domain of TCR clone 84542 (TRBV20-1, TRBJ1-1)
CSARGGGNTEAFF

SEQ ID NO: 169085 - protein, 16 aa, Homo sapiens
  CDR3 for alpha chain variable domain of TCR clone 84543 (TRAV3, TRAJ37)
CAVRGKGSGNTGKQIF

SEQ ID NO: 169086 - protein, 13 aa, Homo sapiens
  CDR3 for beta chain variable domain of TCR clone 84543 (TRBV7-2, TRBJ2-2)
CASSSVRAGELFF

SEQ ID NO: 169087 - protein, 12 aa, Homo sapiens
  CDR3 for alpha chain variable domain of TCR clone 84544 (TRAV12-3, TRAJ17)
CAMTLKGNKLTF

SEQ ID NO: 169088 - protein, 12 aa, Homo sapiens
  CDR3 for beta chain variable domain of TCR clone 84544 (TRBV2, TRBJ2-1)
CAYGPPGNEQFF

SEQ ID NO: 169089 - protein, 13 aa, Homo sapiens
  CDR3 for alpha chain variable domain of TCR clone 84545 (TRAV12-1, TRAJ33)
CGDAPDSNYQLIW

SEQ ID NO: 169090 - protein, 10 aa, Homo sapiens
  CDR3 for beta chain variable domain of TCR clone 84545 (TRBV7-2, TRBJ2-2)
CASRRPGQNT

SEQ ID NO: 169091 - protein, 12 aa, Homo sapiens
  CDR3 for alpha chain variable domain of TCR clone 84546 (TRAV12-3, TRAJ17)
CAMTLTGNKLTF

SEQ ID NO: 169092 - protein, 14 aa, Homo sapiens
  CDR3 for beta chain variable domain of TCR clone 84546 (TRBV18, TRBJ1-2)
CASSLNRENYGYTF

SEQ ID NO: 169093 - protein, 14 aa, Homo sapiens
  CDR3 for alpha chain variable domain of TCR clone 84547 (TRAV1-2, TRAJ16)
CAVNRFSDGQKLLF

SEQ ID NO: 169094 - protein, 14 aa, Homo sapiens
  CDR3 for beta chain variable domain of TCR clone 84547 (TRBV28, TRBJ2-3)
CASSWRGRADTQYF

SEQ ID NO: 169095 - protein, 16 aa, Homo sapiens
  CDR3 for alpha chain variable domain of TCR clone 84548 (TRAV12-2, TRAJ48)
CAVNPTSSFGNEKLTF

SEQ ID NO: 169096 - protein, 12 aa, Homo sapiens
  CDR3 for beta chain variable domain of TCR clone 84548 (TRBV9, TRBJ2-3)
CASSLRAGTQYF

SEQ ID NO: 169097 - protein, 12 aa, Homo sapiens
  CDR3 for alpha chain variable domain of TCR clone 84549 (TRAV12-3, TRAJ42)
CAPGGSQGNLIF

SEQ ID NO: 169098 - protein, 13 aa, Homo sapiens
  CDR3 for beta chain variable domain of TCR clone 84549 (TRBV5-7, TRBJ2-6)
GASTSSGANVLTF

SEQ ID NO: 169099 - protein, 19 aa, Homo sapiens
  CDR3 for alpha chain variable domain of TCR clone 84550 (TRAV16, )
CALSGDIQNHDPAVYQLRD

SEQ ID NO: 169100 - protein, 16 aa, Homo sapiens
  CDR3 for beta chain variable domain of TCR clone 84550 (TRBV12-5, TRBJ2-5)
CASGPRTSGNQETQYF

SEQ ID NO: 169101 - protein, 14 aa, Homo sapiens
  CDR3 for alpha chain variable domain of TCR clone 84551 (TRAV27, TRAJ50)
CAGGMKTSYDKVIF

SEQ ID NO: 169102 - protein, 13 aa, Homo sapiens
  CDR3 for beta chain variable domain of TCR clone 84551 (TRBV11-2, TRBJ2-5)
CASSSTGEETQYF

SEQ ID NO: 169103 - protein, 13 aa, Homo sapiens
  CDR3 for alpha chain variable domain of TCR clone 84552 (TRAV8-3, TRAJ4)
WVFYSGGYNKLIF

SEQ ID NO: 169104 - protein, 14 aa, Homo sapiens
  CDR3 for beta chain variable domain of TCR clone 84552 (TRBV7-9, TRBJ2-3)
CASSLEDGTYTQYF

SEQ ID NO: 169105 - protein, 13 aa, Homo sapiens
  CDR3 for alpha chain variable domain of TCR clone 84553 (TRAV8-6, TRAJ50)
CAVIKTSYAKVIF

SEQ ID NO: 169106 - protein, 15 aa, Homo sapiens
  CDR3 for beta chain variable domain of TCR clone 84553 (TRBV7-2, TRBJ2-2)
CASRRPGQNTGELFF

SEQ ID NO: 169107 - protein, 11 aa, Homo sapiens
  CDR3 for alpha chain variable domain of TCR clone 84554 (TRAV26-1, TRAJ37)
CIVRVGGKLIF

SEQ ID NO: 169108 - protein, 13 aa, Homo sapiens
  CDR3 for beta chain variable domain of TCR clone 84554 (TRBV7-9, TRBJ1-2)
CASSLKQNYGYTF

SEQ ID NO: 169109 - protein, 14 aa, Homo sapiens
  CDR3 for alpha chain variable domain of TCR clone 84555 (TRAV12-1, TRAJ12)
CVVTRMDSSCKLIF

SEQ ID NO: 169110 - protein, 13 aa, Homo sapiens
  CDR3 for beta chain variable domain of TCR clone 84555 (TRBV20-1, TRBJ1-1)
CSARGGGNTEAFF

SEQ ID NO: 169111 - protein, 12 aa, Homo sapiens
  CDR3 for alpha chain variable domain of TCR clone 84556 (TRAV17, TRAJ39)
CATGAAGNMLTF

SEQ ID NO: 169112 - protein, 15 aa, Homo sapiens
  CDR3 for beta chain variable domain of TCR clone 84556 (TRBV7-9, TRBJ1-6)
CASSSPGRGNSPLHF

SEQ ID NO: 169113 - protein, 16 aa, Homo sapiens
  CDR3 for alpha chain variable domain of TCR clone 84557 (TRAV12-1, TRAJ42)
CVVTPYYGGSQGNLIF

SEQ ID NO: 169114 - protein, 20 aa, Homo sapiens
  CDR3 for beta chain variable domain of TCR clone 84557 (TRBV28, TRBJ2-1)
CASTPIGRSPGLAGGNEQFF

SEQ ID NO: 169115 - protein, 15 aa, Homo sapiens
  CDR3 for alpha chain variable domain of TCR clone 84558 (TRAV20, TRAJ43)
CAVQAGKSSNNDMRF

SEQ ID NO: 169116 - protein, 16 aa, Homo sapiens
  CDR3 for beta chain variable domain of TCR clone 84558 (TRBV19, TRBJ2-1)
CASSKAGPSSYNEQFF

SEQ ID NO: 169117 - protein, 14 aa, Homo sapiens
  CDR3 for alpha chain variable domain of TCR clone 84559 (TRAV12-3, TRAJ10)
SHLPLTGGGNKLTF

SEQ ID NO: 169118 - protein, 17 aa, Homo sapiens
  CDR3 for beta chain variable domain of TCR clone 84559 (TRBV7-2, TRBJ2-3)
CASSARSSGSPTDTQYF

SEQ ID NO: 169119 - protein, 14 aa, Homo sapiens
  CDR3 for alpha chain variable domain of TCR clone 84560 (TRAV26-1, TRAJ38)
CIADNAGNNRTLIW

SEQ ID NO: 169120 - protein, 13 aa, Homo sapiens
  CDR3 for beta chain variable domain of TCR clone 84560 (TRBV20-1, TRBJ1-1)
CSARGEGNTEAFF

SEQ ID NO: 169121 - protein, 15 aa, Homo sapiens
  CDR3 for alpha chain variable domain of TCR clone 84561 (TRAV2, TRAJ15)
CAVEDRGQAGTAQIF

SEQ ID NO: 169122 - protein, 13 aa, Homo sapiens
  CDR3 for beta chain variable domain of TCR clone 84561 (TRBV10-2, TRBJ2-7)
CASGASGGYEQYF

SEQ ID NO: 169123 - protein, 14 aa, Homo sapiens
  CDR3 for alpha chain variable domain of TCR clone 84562 (TRAV12-2, TRAJ17)
CAVLFKAAGNKLTF

SEQ ID NO: 169124 - protein, 15 aa, Homo sapiens
  CDR3 for beta chain variable domain of TCR clone 84562 (TRBV20-1, TRBJ2-7)
CSARVPAAYFYEQYF

SEQ ID NO: 169125 - protein, 13 aa, Homo sapiens
  CDR3 for alpha chain variable domain of TCR clone 84563 (TRAV17, TRAJ22)
CAHHSGSARQLTF

SEQ ID NO: 169126 - protein, 16 aa, Homo sapiens
  CDR3 for beta chain variable domain of TCR clone 84563 (TRBV19, TRBJ1-1)
CASSPTRFWPGTEAFF

SEQ ID NO: 169127 - protein, 17 aa, Homo sapiens
  CDR3 for alpha chain variable domain of TCR clone 84564 (TRAV3, TRAJ28)
CAVREAYSGAGSYQLTF

SEQ ID NO: 169128 - protein, 15 aa, Homo sapiens
  CDR3 for beta chain variable domain of TCR clone 84564 (TRBV10-2, TRBJ2-6)
CASSEQGTGANVLTF

SEQ ID NO: 169129 - protein, 14 aa, Homo sapiens
  CDR3 for alpha chain variable domain of TCR clone 84565 (TRAV26-1, TRAJ52)
CIPAGGTSYGKLTF

SEQ ID NO: 169130 - protein, 16 aa, Homo sapiens
  CDR3 for beta chain variable domain of TCR clone 84565 (TRBV19, TRBJ2-2)
CASTSGARAGAGELFF

SEQ ID NO: 169131 - protein, 15 aa, Homo sapiens
  CDR3 for alpha chain variable domain of TCR clone 84566 (TRAV20, TRAJ53)
CAVQASGGSNYKMTF

SEQ ID NO: 169132 - protein, 12 aa, Homo sapiens
  CDR3 for beta chain variable domain of TCR clone 84566 (TRBV7-8, TRBJ2-7)
CASSLGDREQYF

SEQ ID NO: 169133 - protein, 12 aa, Homo sapiens
  CDR3 for alpha chain variable domain of TCR clone 84567 (TRAV12-3, TRAJ20)
CAMVRGDYKLSF

SEQ ID NO: 169134 - protein, 13 aa, Homo sapiens
  CDR3 for beta chain variable domain of TCR clone 84567 (TRBV5-4, TRBJ1-1)
CASSVDLGTEAFF

SEQ ID NO: 169135 - protein, 14 aa, Homo sapiens
  CDR3 for alpha chain variable domain of TCR clone 84568 (TRAV12-3, TRAJ9)
CAMSPNTGGFKTIF

SEQ ID NO: 169136 - protein, 17 aa, Homo sapiens
  CDR3 for beta chain variable domain of TCR clone 84568 (TRBV11-2, TRBJ2-1)
CASSLYPPGVEYNEQFF

SEQ ID NO: 169137 - protein, 16 aa, Homo sapiens
  CDR3 for alpha chain variable domain of TCR clone 84569 (TRAV1-2, TRAJ10)
CAVRGVLTGGGNKLTF

SEQ ID NO: 169138 - protein, 15 aa, Homo sapiens
  CDR3 for beta chain variable domain of TCR clone 84569 (TRBV11-3, TRBJ2-3)
CASLKDGREGDTQYF

SEQ ID NO: 169139 - protein, 16 aa, Homo sapiens
  CDR3 for alpha chain variable domain of TCR clone 84570 (TRAV30, TRAJ24)
CGTEIVDADSWGKFQF

SEQ ID NO: 169140 - protein, 14 aa, Homo sapiens
  CDR3 for beta chain variable domain of TCR clone 84570 (TRBV5-7, TRBJ1-5)
CASSRTGGGQPQHF

SEQ ID NO: 169141 - protein, 15 aa, Homo sapiens
  CDR3 for alpha chain variable domain of TCR clone 84571 (TRAV3, TRAJ22)
CAVRDRGGSARQLTF

SEQ ID NO: 169142 - protein, 15 aa, Homo sapiens
  CDR3 for beta chain variable domain of TCR clone 84571 (TRBV5-7, TRBJ1-5)
CAGSYGKLWDQPQHF

SEQ ID NO: 169143 - protein, 13 aa, Homo sapiens
  CDR3 for alpha chain variable domain of TCR clone 84572 (TRAV13-2, TRAJ13)
CAERPGGYQKVTF

SEQ ID NO: 169144 - protein, 12 aa, Homo sapiens
  CDR3 for beta chain variable domain of TCR clone 84572 (TRBV11-2, TRBJ2-2)
CASSLGGGELFF

SEQ ID NO: 169145 - protein, 16 aa, Homo sapiens
  CDR3 for alpha chain variable domain of TCR clone 84573 (TRAV12-3, TRAJ53)
CAMSPGSGGSNYKLTF

SEQ ID NO: 169146 - protein, 16 aa, Homo sapiens
  CDR3 for beta chain variable domain of TCR clone 84573 (TRBV27, TRBJ2-1)
CASSSRLAGNYNEQFF

SEQ ID NO: 169147 - protein, 14 aa, Homo sapiens
  CDR3 for alpha chain variable domain of TCR clone 84574 (TRAV17, TRAJ57)
CATDPQGGSEKRVF

SEQ ID NO: 169148 - protein, 18 aa, Homo sapiens
  CDR3 for beta chain variable domain of TCR clone 84574 (TRBV6-6, TRBJ1-3)
CASSYSKWDSISGNTIYF

SEQ ID NO: 169149 - protein, 14 aa, Homo sapiens
  CDR3 for alpha chain variable domain of TCR clone 84575 (TRAV12-2, TRAJ17)
CAVLFKAAGNKLTF

SEQ ID NO: 169150 - protein, 13 aa, Homo sapiens
  CDR3 for beta chain variable domain of TCR clone 84575 (TRBV7-2, TRBJ2-2)
CASSLAVTGELFF

SEQ ID NO: 169151 - protein, 21 aa, Homo sapiens
  CDR3 for alpha chain variable domain of TCR clone 84576 (TRAV25, TRAJ47)
TATQTTDVGTYFWEYGNKLVF

SEQ ID NO: 169152 - protein, 15 aa, Homo sapiens
  CDR3 for beta chain variable domain of TCR clone 84576 (TRBV6-6, TRBJ2-1)
CQQLGGQGPYNEQFF

SEQ ID NO: 169153 - protein, 15 aa, Homo sapiens
  CDR3 for alpha chain variable domain of TCR clone 84577 (TRAV21, TRAJ37)
CAVRPTLCNTGKLIF

SEQ ID NO: 169154 - protein, 16 aa, Homo sapiens
  CDR3 for beta chain variable domain of TCR clone 84577 (TRBV24-1, TRBJ2-3)
CATSDRRQDLTDTQYF

SEQ ID NO: 169155 - protein, 14 aa, Homo sapiens
  CDR3 for alpha chain variable domain of TCR clone 84578 (TRAV8-3, TRAJ4)
CAVGAAGGYNKLIF

SEQ ID NO: 169156 - protein, 15 aa, Homo sapiens
  CDR3 for beta chain variable domain of TCR clone 84578 (TRBV6-5, TRBJ2-1)
CASSYDAGAGNEQFF

SEQ ID NO: 169157 - protein, 15 aa, Homo sapiens
  CDR3 for alpha chain variable domain of TCR clone 84579 (TRAV3, TRAJ17)
CAVSPKEAAGNKLTF

SEQ ID NO: 169158 - protein, 12 aa, Homo sapiens
  CDR3 for beta chain variable domain of TCR clone 84579 (TRBV7-9, TRBJ1-6)
CASSLMTSPLRF

SEQ ID NO: 169159 - protein, 12 aa, Homo sapiens
  CDR3 for alpha chain variable domain of TCR clone 84580 (TRAV1-2, TRAJ29)
CAVPSGNTPLVF

SEQ ID NO: 169160 - protein, 12 aa, Homo sapiens
  CDR3 for beta chain variable domain of TCR clone 84580 (TRBV7-9, TRBJ2-7)
CASSCGSYEQYF

SEQ ID NO: 169161 - protein, 14 aa, Homo sapiens
  CDR3 for alpha chain variable domain of TCR clone 84581 (TRAV1-2, TRAJ16)
CAVNRFSDGQKLPF

SEQ ID NO: 169162 - protein, 12 aa, Homo sapiens
  CDR3 for beta chain variable domain of TCR clone 84581 (TRBV28, TRBJ2-6)
CAIQAGANVLTF

SEQ ID NO: 169163 - protein, 18 aa, Homo sapiens
  CDR3 for alpha chain variable domain of TCR clone 84582 (TRAV21, TRAJ52)
CAVRPSPAGGTSYGKLTF

SEQ ID NO: 169164 - protein, 15 aa, Homo sapiens
  CDR3 for beta chain variable domain of TCR clone 84582 (TRBV7-9, TRBJ2-7)
CASSSSRLAVYEQYF

SEQ ID NO: 169165 - protein, 11 aa, Homo sapiens
  CDR3 for alpha chain variable domain of TCR clone 84583 (TRAV1-2, TRAJ40)
CAVLGTYKYIF

SEQ ID NO: 169166 - protein, 15 aa, Homo sapiens
  CDR3 for beta chain variable domain of TCR clone 84583 (TRBV7-9, TRBJ2-7)
CASSLALAEAYEQYF

SEQ ID NO: 169167 - protein, 14 aa, Homo sapiens
  CDR3 for alpha chain variable domain of TCR clone 84584 (TRAV35, TRAJ40)
CAGSTTSGTYKYIF

SEQ ID NO: 169168 - protein, 13 aa, Homo sapiens
  CDR3 for beta chain variable domain of TCR clone 84584 (TRBV20-1, TRBJ1-6)
RSAPLGVGSPLHF

SEQ ID NO: 169169 - protein, 15 aa, Homo sapiens
  CDR3 for alpha chain variable domain of TCR clone 84585 (TRAV12-1, TRAJ45)
CVVLSGGGGADGLTV

SEQ ID NO: 169170 - protein, 12 aa, Homo sapiens
  CDR3 for beta chain variable domain of TCR clone 84585 (TRBV12-5, TRBJ2-5)
CASGQGVETRYF

SEQ ID NO: 169171 - protein, 13 aa, Homo sapiens
  CDR3 for alpha chain variable domain of TCR clone 84586 (TRAV35, TRAJ36)
CAGPRIGANNLFF

SEQ ID NO: 169172 - protein, 15 aa, Homo sapiens
  CDR3 for beta chain variable domain of TCR clone 84586 (TRBV28, TRBJ2-5)
CASSPPWSYQETQCF

SEQ ID NO: 169173 - protein, 16 aa, Homo sapiens
  CDR3 for alpha chain variable domain of TCR clone 84587 (TRAV30, TRAJ24)
CGTEIVDADSWGKFQF

SEQ ID NO: 169174 - protein, 12 aa, Homo sapiens
  CDR3 for beta chain variable domain of TCR clone 84587 (TRBV7-3, TRBJ1-1)
CASSHGGTEAFF

SEQ ID NO: 169175 - protein, 16 aa, Homo sapiens
  CDR3 for alpha chain variable domain of TCR clone 84588 (TRAV1-1, TRAJ28)
CAVRDDSGAGRYQLTF

SEQ ID NO: 169176 - protein, 12 aa, Homo sapiens
  CDR3 for beta chain variable domain of TCR clone 84588 (TRBV11-2, TRBJ2-5)
CASSLDTQTQYF

SEQ ID NO: 169177 - protein, 12 aa, Homo sapiens
  CDR3 for alpha chain variable domain of TCR clone 84589 (TRAV3, TRAJ20)
CAVRDPDYNLSF

SEQ ID NO: 169178 - protein, 14 aa, Homo sapiens
  CDR3 for beta chain variable domain of TCR clone 84589 (TRBV4-2, TRBJ2-1)
CASGLDRAYNEQFF

SEQ ID NO: 169179 - protein, 14 aa, Homo sapiens
  CDR3 for alpha chain variable domain of TCR clone 84590 (TRAV2, TRAJ9)
CAVEDRSGGFKTIF

SEQ ID NO: 169180 - protein, 15 aa, Homo sapiens
  CDR3 for beta chain variable domain of TCR clone 84590 (TRBV19, TRBJ2-7)
CASSPAGSGEALRYF

SEQ ID NO: 169181 - protein, 15 aa, Homo sapiens
  CDR3 for alpha chain variable domain of TCR clone 84591 (TRAV16, TRAJ10)
CALEGLTGGGNKLAF

SEQ ID NO: 169182 - protein, 14 aa, Homo sapiens
  CDR3 for beta chain variable domain of TCR clone 84591 (TRBV7-6, TRBJ2-3)
CASSLGTVTDTQYF

SEQ ID NO: 169183 - protein, 12 aa, Homo sapiens
  CDR3 for alpha chain variable domain of TCR clone 84592 (TRAV21, TRAJ11)
CAATSGYSTLTF

SEQ ID NO: 169184 - protein, 14 aa, Homo sapiens
  CDR3 for beta chain variable domain of TCR clone 84592 (TRBV20-1, TRBJ2-7)
FSAPELAGVGEQYF

SEQ ID NO: 169185 - protein, 14 aa, Homo sapiens
  CDR3 for alpha chain variable domain of TCR clone 84593 (TRAV12-2, TRAJ24)
CAVTPADSWGKLQF

SEQ ID NO: 169186 - protein, 16 aa, Homo sapiens
  CDR3 for beta chain variable domain of TCR clone 84593 (TRBV20-1, TRBJ1-4)
CSAPGQGLLTNEKLFF

SEQ ID NO: 169187 - protein, 12 aa, Homo sapiens
  CDR3 for alpha chain variable domain of TCR clone 84594 (TRAV21, TRAJ58)
CALSASGSRFTF

SEQ ID NO: 169188 - protein, 15 aa, Homo sapiens
  CDR3 for beta chain variable domain of TCR clone 84594 (TRBV4-2, TRBJ1-2)
CASSQRTGGRDGYTF

SEQ ID NO: 169189 - protein, 14 aa, Homo sapiens
  CDR3 for alpha chain variable domain of TCR clone 84595 (TRAV8-3, TRAJ4)
CAVGASGGYNKPIF

SEQ ID NO: 169190 - protein, 13 aa, Homo sapiens
  CDR3 for beta chain variable domain of TCR clone 84595 (TRBV18, TRBJ2-5)
CASSLQGQETQYF

SEQ ID NO: 169191 - protein, 13 aa, Homo sapiens
  CDR3 for alpha chain variable domain of TCR clone 84596 (TRAV23/DV6, TRAJ34)
CAAIENNTDKLIF

SEQ ID NO: 169192 - protein, 17 aa, Homo sapiens
  CDR3 for beta chain variable domain of TCR clone 84596 (TRBV13, TRBJ2-3)
CASSLSRVAGGRNTQYF

SEQ ID NO: 169193 - protein, 14 aa, Homo sapiens
  CDR3 for alpha chain variable domain of TCR clone 84597 (TRAV23/DV6, TRAJ17)
CAARGRAAGNKLTF

SEQ ID NO: 169194 - protein, 12 aa, Homo sapiens
  CDR3 for beta chain variable domain of TCR clone 84597 (TRBV7-9, TRBJ2-3)
CASSLITDTQYF

SEQ ID NO: 169195 - protein, 14 aa, Homo sapiens
  CDR3 for alpha chain variable domain of TCR clone 84598 (TRAV12-2, TRAJ4)
RAEDLSGGYNKLIF

SEQ ID NO: 169196 - protein, 13 aa, Homo sapiens
  CDR3 for beta chain variable domain of TCR clone 84598 (TRBV7-9, TRBJ1-2)
CASSLKQNYGYTF

SEQ ID NO: 169197 - protein, 10 aa, Homo sapiens
  CDR3 for alpha chain variable domain of TCR clone 84599 (TRAV13-1, TRAJ30)
CAARDDKIIF

SEQ ID NO: 169198 - protein, 15 aa, Homo sapiens
  CDR3 for beta chain variable domain of TCR clone 84599 (TRBV7-9, TRBJ1-2)
CASSLDREPNYGYAF

SEQ ID NO: 169199 - protein, 14 aa, Homo sapiens
  CDR3 for alpha chain variable domain of TCR clone 84600 (TRAV38-1, TRAJ40)
CALRPTSGTNKYIF

SEQ ID NO: 169200 - protein, 14 aa, Homo sapiens
  CDR3 for beta chain variable domain of TCR clone 84600 (TRBV25-1, TRBJ1-1)
CASTHLGGNTEAFF

SEQ ID NO: 169201 - protein, 16 aa, Homo sapiens
  CDR3 for alpha chain variable domain of TCR clone 84601 (TRAV20, TRAJ22)
CAVQASSSGSARQLTF

SEQ ID NO: 169202 - protein, 13 aa, Homo sapiens
  CDR3 for beta chain variable domain of TCR clone 84601 (TRBV7-2, TRBJ2-5)
CASSKTSVETQYF

SEQ ID NO: 169203 - protein, 11 aa, Homo sapiens
  CDR3 for alpha chain variable domain of TCR clone 84602 (TRAV12-3, TRAJ27)
CAMANAGKSTF

SEQ ID NO: 169204 - protein, 15 aa, Homo sapiens
  CDR3 for beta chain variable domain of TCR clone 84602 (TRBV7-9, TRBJ1-5)
CASSQGHQPNQPQHF

SEQ ID NO: 169205 - protein, 14 aa, Homo sapiens
  CDR3 for alpha chain variable domain of TCR clone 84603 (TRAV25, TRAJ27)
GAGPGNTNAGKSTF

SEQ ID NO: 169206 - protein, 16 aa, Homo sapiens
  CDR3 for beta chain variable domain of TCR clone 84603 (TRBV4-1, TRBJ2-6)
CASSQDGGPGANVLTF

SEQ ID NO: 169207 - protein, 15 aa, Homo sapiens
  CDR3 for alpha chain variable domain of TCR clone 84604 (TRAV3, TRAJ3)
CAVRDRRSSASKIIF

SEQ ID NO: 169208 - protein, 16 aa, Homo sapiens
  CDR3 for beta chain variable domain of TCR clone 84604 (TRBV24-1, TRBJ2-3)
CATSDPGTGATDTQYF

SEQ ID NO: 169209 - protein, 15 aa, Homo sapiens
  CDR3 for alpha chain variable domain of TCR clone 84605 (TRAV8-3, TRAJ45)
CASSYSGGGADGLTF

SEQ ID NO: 169210 - protein, 13 aa, Homo sapiens
  CDR3 for beta chain variable domain of TCR clone 84605 (TRBV20-1, TRBJ2-2)
CSASAAGTGELFY

SEQ ID NO: 169211 - protein, 14 aa, Homo sapiens
  CDR3 for alpha chain variable domain of TCR clone 84606 (TRAV1-2, TRAJ16)
CAVNRFSEGQKLLF

SEQ ID NO: 169212 - protein, 11 aa, Homo sapiens
  CDR3 for beta chain variable domain of TCR clone 84606 (TRBV29-1, TRBJ2-5)
CSEDRTGTQYF

SEQ ID NO: 169213 - protein, 15 aa, Homo sapiens
  CDR3 for alpha chain variable domain of TCR clone 84607 (TRAV25, TRAJ52)
CAGRPGGTSYGKLTF

SEQ ID NO: 169214 - protein, 14 aa, Homo sapiens
  CDR3 for beta chain variable domain of TCR clone 84607 (TRBV7-3, TRBJ2-1)
CASSLSGSYNEQFF

SEQ ID NO: 169215 - protein, 13 aa, Homo sapiens
  CDR3 for alpha chain variable domain of TCR clone 84608 (TRAV13-2, TRAJ13)
CAERPGGYQKVTF

SEQ ID NO: 169216 - protein, 13 aa, Homo sapiens
  CDR3 for beta chain variable domain of TCR clone 84608 (TRBV10-3, TRBJ1-1)
CAIIPEGGTEAFF

SEQ ID NO: 169217 - protein, 16 aa, Homo sapiens
  CDR3 for alpha chain variable domain of TCR clone 84609 (TRAV30, TRAJ24)
CGTEIVDADSWGKFQF

SEQ ID NO: 169218 - protein, 15 aa, Homo sapiens
  CDR3 for beta chain variable domain of TCR clone 84609 (TRBV5-1, TRBJ1-1)
CASSLSDLGGTEAFF

SEQ ID NO: 169219 - protein, 12 aa, Homo sapiens
  CDR3 for alpha chain variable domain of TCR clone 84610 (TRAV20, TRAJ39)
CAVGNAGNMLTF

SEQ ID NO: 169220 - protein, 15 aa, Homo sapiens
  CDR3 for beta chain variable domain of TCR clone 84610 (TRBV27, TRBJ2-1)
CASSNGGGSSNEQFL

SEQ ID NO: 169221 - protein, 14 aa, Homo sapiens
  CDR3 for alpha chain variable domain of TCR clone 84611 (TRAV13-1, TRAJ35)
CAASKGGFGNVLHC

SEQ ID NO: 169222 - protein, 15 aa, Homo sapiens
  CDR3 for beta chain variable domain of TCR clone 84611 (TRBV2, TRBJ2-2)
CASSRQGPNTGELFF

SEQ ID NO: 169223 - protein, 14 aa, Homo sapiens
  CDR3 for alpha chain variable domain of TCR clone 84612 (TRAV12-2, TRAJ13)
CAVKKTGGYHKVTF

SEQ ID NO: 169224 - protein, 15 aa, Homo sapiens
  CDR3 for beta chain variable domain of TCR clone 84612 (TRBV7-2, TRBJ2-1)
CASSLASGRVNEQFF

SEQ ID NO: 169225 - protein, 15 aa, Homo sapiens
  CDR3 for alpha chain variable domain of TCR clone 84613 (TRAV17, TRAJ28)
CATVDSGAGSYHLTF

SEQ ID NO: 169226 - protein, 13 aa, Homo sapiens
  CDR3 for beta chain variable domain of TCR clone 84613 (TRBV5-4, TRBJ2-5)
CASSRQEGETQYF

SEQ ID NO: 169227 - protein, 11 aa, Homo sapiens
  CDR3 for alpha chain variable domain of TCR clone 84614 (TRAV2, TRAJ13)
CASGGYQKVTF

SEQ ID NO: 169228 - protein, 15 aa, Homo sapiens
  CDR3 for beta chain variable domain of TCR clone 84614 (TRBV7-3, TRBJ2-1)
CQQLQTSGRYNEQFF

SEQ ID NO: 169229 - protein, 13 aa, Homo sapiens
  CDR3 for alpha chain variable domain of TCR clone 84615 (TRAV2, TRAJ40)
CAVVTSGTYKYIF

SEQ ID NO: 169230 - protein, 15 aa, Homo sapiens
  CDR3 for beta chain variable domain of TCR clone 84615 (TRBV10-3, TRBJ2-3)
CAISLTSGGTDTQYF

SEQ ID NO: 169231 - protein, 13 aa, Homo sapiens
  CDR3 for alpha chain variable domain of TCR clone 84616 (TRAV36/DV7, TRAJ49)
CAVEANTGNQFYF

SEQ ID NO: 169232 - protein, 14 aa, Homo sapiens
  CDR3 for beta chain variable domain of TCR clone 84616 (TRBV7-2, TRBJ1-2)
CASSQTGSTYGYTF

SEQ ID NO: 169233 - protein, 12 aa, Homo sapiens
  CDR3 for alpha chain variable domain of TCR clone 84617 (TRAV29/DV5, TRAJ15)
CASNQAGTALIF

SEQ ID NO: 169234 - protein, 14 aa, Homo sapiens
  CDR3 for beta chain variable domain of TCR clone 84617 (TRBV20-1, TRBJ1-1)
CSAQTRIGGTEAFF

SEQ ID NO: 169235 - protein, 14 aa, Homo sapiens
  CDR3 for alpha chain variable domain of TCR clone 84618 (TRAV17, TRAJ40)
CATALTSGTYKYIF

SEQ ID NO: 169236 - protein, 13 aa, Homo sapiens
  CDR3 for beta chain variable domain of TCR clone 84618 (TRBV27, TRBJ2-1)
CAGSSGSYNEQFF

SEQ ID NO: 169237 - protein, 12 aa, Homo sapiens
  CDR3 for alpha chain variable domain of TCR clone 84619 (TRAV3, TRAJ20)
CAVRDGHYKLSF

SEQ ID NO: 169238 - protein, 13 aa, Homo sapiens
  CDR3 for beta chain variable domain of TCR clone 84619 (TRBV9, TRBJ2-1)
CASSVGQGGEQFF

SEQ ID NO: 169239 - protein, 13 aa, Homo sapiens
  CDR3 for alpha chain variable domain of TCR clone 84620 (TRAV21, TRAJ27)
CAARPGNAGKSTF

SEQ ID NO: 169240 - protein, 13 aa, Homo sapiens
  CDR3 for beta chain variable domain of TCR clone 84620 (TRBV7-6, TRBJ2-3)
CASSLGTVRYAVF

SEQ ID NO: 169241 - protein, 13 aa, Homo sapiens
  CDR3 for alpha chain variable domain of TCR clone 84621 (TRAV2, TRAJ21)
CAVEDLNFNKFYF

SEQ ID NO: 169242 - protein, 15 aa, Homo sapiens
  CDR3 for beta chain variable domain of TCR clone 84621 (TRBV28, TRBJ2-5)
CASSPGRGSIETQYF

SEQ ID NO: 169243 - protein, 13 aa, Homo sapiens
  CDR3 for alpha chain variable domain of TCR clone 84622 (TRAV27, TRAJ57)
CRSAQGGSEKLVF

SEQ ID NO: 169244 - protein, 17 aa, Homo sapiens
  CDR3 for beta chain variable domain of TCR clone 84622 (TRBV11-2, TRBJ2-1)
CASSLYPPGVEYTEQFF

SEQ ID NO: 169245 - protein, 18 aa, Homo sapiens
  CDR3 for alpha chain variable domain of TCR clone 84623 (TRAV12-3, TRAJ52)
CAMSRTNAGGTSYGKLTF

SEQ ID NO: 169246 - protein, 17 aa, Homo sapiens
  CDR3 for beta chain variable domain of TCR clone 84623 (TRBV7-3, TRBJ2-3)
YASSLMKRMRGADTQYF

SEQ ID NO: 169247 - protein, 11 aa, Homo sapiens
  CDR3 for alpha chain variable domain of TCR clone 84624 (TRAV8-3, TRAJ23)
CAVVYRGKLIF

SEQ ID NO: 169248 - protein, 14 aa, Homo sapiens
  CDR3 for beta chain variable domain of TCR clone 84624 (TRBV19, TRBJ2-1)
CASPTFVLSGEQFF

SEQ ID NO: 169249 - protein, 14 aa, Homo sapiens
  CDR3 for alpha chain variable domain of TCR clone 84625 (TRAV12-2, TRAJ13)
CAVKETGGYQKVTF

SEQ ID NO: 169250 - protein, 18 aa, Homo sapiens
  CDR3 for beta chain variable domain of TCR clone 84625 (TRBV11-2, TRBJ2-3)
CASSLGGASRGAPNTQYF

SEQ ID NO: 169251 - protein, 15 aa, Homo sapiens
  CDR3 for alpha chain variable domain of TCR clone 84626 (TRAV12-3, TRAJ27)
CAMRAYNTNAGKSTF

SEQ ID NO: 169252 - protein, 16 aa, Homo sapiens
  CDR3 for beta chain variable domain of TCR clone 84626 (TRBV7-7, TRBJ2-1)
CASSLASGTSYNEQFF

SEQ ID NO: 169253 - protein, 16 aa, Homo sapiens
  CDR3 for alpha chain variable domain of TCR clone 84627 (TRAV12-2, TRAJ6)
CAAHLAGSGGSYIPTF

SEQ ID NO: 169254 - protein, 10 aa, Homo sapiens
  CDR3 for beta chain variable domain of TCR clone 84627 (TRBV28, TRBJ1-2)
CASSSDRAVF

SEQ ID NO: 169255 - protein, 15 aa, Homo sapiens
  CDR3 for alpha chain variable domain of TCR clone 84628 (TRAV21, TRAJ37)
CAVRPTLSNTGKLIF

SEQ ID NO: 169256 - protein, 16 aa, Homo sapiens
  CDR3 for beta chain variable domain of TCR clone 84628 (TRBV19, TRBJ2-3)
CASSPGAASRTDTQYF

SEQ ID NO: 169257 - protein, 13 aa, Homo sapiens
  CDR3 for alpha chain variable domain of TCR clone 84629 (TRAV3, TRAJ21)
CAVREPDFNKFYF

SEQ ID NO: 169258 - protein, 13 aa, Homo sapiens
  CDR3 for beta chain variable domain of TCR clone 84629 (TRBV7-2, TRBJ2-2)
CASSLAVTGELFF

SEQ ID NO: 169259 - protein, 11 aa, Homo sapiens
  CDR3 for alpha chain variable domain of TCR clone 84630 (TRAV2, TRAJ13)
CASGGYQKVTF

SEQ ID NO: 169260 - protein, 14 aa, Homo sapiens
  CDR3 for beta chain variable domain of TCR clone 84630 (TRBV27, TRBJ2-5)
CQQFIPAGGETQYF

SEQ ID NO: 169261 - protein, 12 aa, Homo sapiens
  CDR3 for alpha chain variable domain of TCR clone 84631 (TRAV12-3, TRAJ3)
CCFYSSASKIIF

SEQ ID NO: 169262 - protein, 15 aa, Homo sapiens
  CDR3 for beta chain variable domain of TCR clone 84631 (TRBV20-1, TRBJ2-7)
CSARDRVSGMDEQYF

SEQ ID NO: 169263 - protein, 14 aa, Homo sapiens
  CDR3 for alpha chain variable domain of TCR clone 84632 (TRAV26-1, TRAJ38)
CIADNAGNNRKLIW

SEQ ID NO: 169264 - protein, 19 aa, Homo sapiens
  CDR3 for beta chain variable domain of TCR clone 84632 (TRBV25-1, TRBJ2-2)
CAILVYRVDRGRKTGELFY

SEQ ID NO: 169265 - protein, 10 aa, Homo sapiens
  CDR3 for alpha chain variable domain of TCR clone 84633 (TRAV1-2, TRAJ23)
CAAWAGKLIF

SEQ ID NO: 169266 - protein, 12 aa, Homo sapiens
  CDR3 for beta chain variable domain of TCR clone 84633 (TRBV11-2, TRBJ2-2)
CASSLGGGELFF

SEQ ID NO: 169267 - protein, 11 aa, Homo sapiens
  CDR3 for alpha chain variable domain of TCR clone 84634 (TRAV21, TRAJ49)
CAVITGNQFYF

SEQ ID NO: 169268 - protein, 12 aa, Homo sapiens
  CDR3 for beta chain variable domain of TCR clone 84634 (TRBV7-9, TRBJ2-7)
CASSLEGYEQYF

SEQ ID NO: 169269 - protein, 12 aa, Homo sapiens
  CDR3 for alpha chain variable domain of TCR clone 84635 (TRAV21, TRAJ13)
PGPSVGYQKVTF

SEQ ID NO: 169270 - protein, 13 aa, Homo sapiens
  CDR3 for beta chain variable domain of TCR clone 84635 (TRBV7-9, TRBJ1-2)
CASSLKQNYGYTF

SEQ ID NO: 169271 - protein, 17 aa, Homo sapiens
  CDR3 for alpha chain variable domain of TCR clone 84636 (TRAV16, TRAJ58)
CITVLSNGETSGSRVTF

SEQ ID NO: 169272 - protein, 17 aa, Homo sapiens
  CDR3 for beta chain variable domain of TCR clone 84636 (TRBV18, TRBJ2-1)
CASSKGLSGGADNEQFF

SEQ ID NO: 169273 - protein, 17 aa, Homo sapiens
  CDR3 for alpha chain variable domain of TCR clone 84637 (TRAV3, TRAJ42)
CAVRDRDYGGSQGNLIF

SEQ ID NO: 169274 - protein, 14 aa, Homo sapiens
  CDR3 for beta chain variable domain of TCR clone 84637 (TRBV19, TRBJ2-5)
CASSMTGQQETKYF

SEQ ID NO: 169275 - protein, 13 aa, Homo sapiens
  CDR3 for alpha chain variable domain of TCR clone 84638 (TRAV26-2, TRAJ43)
CILRAVNNNDMRF

SEQ ID NO: 169276 - protein, 15 aa, Homo sapiens
  CDR3 for beta chain variable domain of TCR clone 84638 (TRBV6-5, TRBJ1-2)
CASSYSPPRFYGYTF

SEQ ID NO: 169277 - protein, 18 aa, Homo sapiens
  CDR3 for alpha chain variable domain of TCR clone 84639 (TRAV21, TRAJ52)
CAVRPSPAGGTSYGKLTF

SEQ ID NO: 169278 - protein, 15 aa, Homo sapiens
  CDR3 for beta chain variable domain of TCR clone 84639 (TRBV7-9, TRBJ2-7)
CASSSSGLAVYEQDF

SEQ ID NO: 169279 - protein, 13 aa, Homo sapiens
  CDR3 for alpha chain variable domain of TCR clone 84640 (TRAV17, TRAJ9)
CATDYTGGFKTIF

SEQ ID NO: 169280 - protein, 12 aa, Homo sapiens
  CDR3 for beta chain variable domain of TCR clone 84640 (TRBV11-2, TRBJ2-2)
CASSLGGGELSF

SEQ ID NO: 169281 - protein, 14 aa, Homo sapiens
  CDR3 for alpha chain variable domain of TCR clone 84641 (TRAV12-2, TRAJ40)
CAVKIPSGTYKYIF

SEQ ID NO: 169282 - protein, 14 aa, Homo sapiens
  CDR3 for beta chain variable domain of TCR clone 84641 (TRBV20-1, TRBJ1-1)
CSVQTRIGGIEAFF

SEQ ID NO: 169283 - protein, 14 aa, Homo sapiens
  CDR3 for alpha chain variable domain of TCR clone 84642 (TRAV12-2, TRAJ6)
CVPLRPGGSYIPTF

SEQ ID NO: 169284 - protein, 14 aa, Homo sapiens
  CDR3 for beta chain variable domain of TCR clone 84642 (TRBV12-4, TRBJ1-1)
CASSLGTGGTEAFF

SEQ ID NO: 169285 - protein, 15 aa, Homo sapiens
  CDR3 for alpha chain variable domain of TCR clone 84643 (TRAV3, TRAJ36)
CDVRASQTGANNLFF

SEQ ID NO: 169286 - protein, 16 aa, Homo sapiens
  CDR3 for beta chain variable domain of TCR clone 84643 (TRBV19, TRBJ2-2)
CASRSPGTGATGELFF

SEQ ID NO: 169287 - protein, 12 aa, Homo sapiens
  CDR3 for alpha chain variable domain of TCR clone 84644 (TRAV13-1, TRAJ21)
CAAKEGVNKFYF

SEQ ID NO: 169288 - protein, 15 aa, Homo sapiens
  CDR3 for beta chain variable domain of TCR clone 84644 (TRBV28, TRBJ1-3)
CASSLAGSSGNTIYF

SEQ ID NO: 169289 - protein, 13 aa, Homo sapiens
  CDR3 for alpha chain variable domain of TCR clone 84645 (TRAV3, TRAJ15)
WAVRDQAGTALIF

SEQ ID NO: 169290 - protein, 15 aa, Homo sapiens
  CDR3 for beta chain variable domain of TCR clone 84645 (TRBV11-1, TRBJ2-7)
CASSLNYGASYEQYF

SEQ ID NO: 169291 - protein, 15 aa, Homo sapiens
  CDR3 for alpha chain variable domain of TCR clone 84646 (TRAV8-6, TRAJ10)
CAVSDQAGGGNKLTF

SEQ ID NO: 169292 - protein, 15 aa, Homo sapiens
  CDR3 for beta chain variable domain of TCR clone 84646 (TRBV3-1, TRBJ2-5)
CASSANLGGPDTQYF

SEQ ID NO: 169293 - protein, 12 aa, Homo sapiens
  CDR3 for alpha chain variable domain of TCR clone 84647 (TRAV12-2, TRAJ48)
CAVYFGNEKLTF

SEQ ID NO: 169294 - protein, 12 aa, Homo sapiens
  CDR3 for beta chain variable domain of TCR clone 84647 (TRBV11-2, TRBJ2-2)
CASSLGGGELFF

SEQ ID NO: 169295 - protein, 14 aa, Homo sapiens
  CDR3 for alpha chain variable domain of TCR clone 84648 (TRAV12-2, TRAJ6)
CASKWGGGSYIPTF

SEQ ID NO: 169296 - protein, 13 aa, Homo sapiens
  CDR3 for beta chain variable domain of TCR clone 84648 (TRBV2, TRBJ1-1)
CASREGGNTEAFF

SEQ ID NO: 169297 - protein, 15 aa, Homo sapiens
  CDR3 for alpha chain variable domain of TCR clone 84649 (TRAV3, TRAJ13)
CAVRDIAGGYQKVTF

SEQ ID NO: 169298 - protein, 13 aa, Homo sapiens
  CDR3 for beta chain variable domain of TCR clone 84649 (TRBV2, TRBJ2-2)
CAGSKKNTGELFF

SEQ ID NO: 169299 - protein, 15 aa, Homo sapiens
  CDR3 for alpha chain variable domain of TCR clone 84650 (TRAV23/DV6, TRAJ45)
CAAKNGGGGADGLTF

SEQ ID NO: 169300 - protein, 13 aa, Homo sapiens
  CDR3 for beta chain variable domain of TCR clone 84650 (TRBV20-1, TRBJ1-1)
CSARGGGNTEAVF

SEQ ID NO: 169301 - protein, 14 aa, Homo sapiens
  CDR3 for alpha chain variable domain of TCR clone 84651 (TRAV12-2, TRAJ24)
CAVTPADSWGKLQF

SEQ ID NO: 169302 - protein, 14 aa, Homo sapiens
  CDR3 for beta chain variable domain of TCR clone 84651 (TRBV6-1, TRBJ1-3)
CASVQGGGGNTIYF

SEQ ID NO: 169303 - protein, 13 aa, Homo sapiens
  CDR3 for alpha chain variable domain of TCR clone 84652 (TRAV8-3, TRAJ36)
CAMGATGANNLFF

SEQ ID NO: 169304 - protein, 16 aa, Homo sapiens
  CDR3 for beta chain variable domain of TCR clone 84652 (TRBV27, TRBJ2-2)
CASSFRGLVRTGELFF

SEQ ID NO: 169305 - protein, 14 aa, Homo sapiens
  CDR3 for alpha chain variable domain of TCR clone 84653 (TRAV17, TRAJ34)
CATDSLEGTDKLIF

SEQ ID NO: 169306 - protein, 13 aa, Homo sapiens
  CDR3 for beta chain variable domain of TCR clone 84653 (TRBV11-2, TRBJ2-7)
CASSGTRPYDQYF

SEQ ID NO: 169307 - protein, 13 aa, Homo sapiens
  CDR3 for alpha chain variable domain of TCR clone 84654 (TRAV12-1, TRAJ6)
CVVNRGGSYIPTF

SEQ ID NO: 169308 - protein, 20 aa, Homo sapiens
  CDR3 for beta chain variable domain of TCR clone 84654 (TRBV28, TRBJ2-1)
CASTPIGRSPGLAGGNEQFF

SEQ ID NO: 169309 - protein, 13 aa, Homo sapiens
  CDR3 for alpha chain variable domain of TCR clone 84655 (TRAV21, TRAJ27)
CAARPGNAGKSTC

SEQ ID NO: 169310 - protein, 13 aa, Homo sapiens
  CDR3 for beta chain variable domain of TCR clone 84655 (TRBV18, TRBJ2-7)
CASQSGGGYEQYF

SEQ ID NO: 169311 - protein, 16 aa, Homo sapiens
  CDR3 for alpha chain variable domain of TCR clone 84656 (TRAV21, TRAJ45)
CAVCWGSGGGADGLTF

SEQ ID NO: 169312 - protein, 14 aa, Homo sapiens
  CDR3 for beta chain variable domain of TCR clone 84656 (TRBV4-2, TRBJ1-2)
CASSPGGSNYGYTF

SEQ ID NO: 169313 - protein, 11 aa, Homo sapiens
  CDR3 for alpha chain variable domain of TCR clone 84657 (TRAV12-2, TRAJ33)
CAVGSNYQLIW

SEQ ID NO: 169314 - protein, 16 aa, Homo sapiens
  CDR3 for beta chain variable domain of TCR clone 84657 (TRBV19, TRBJ2-2)
CASRSPGTGATGELFF

SEQ ID NO: 169315 - protein, 15 aa, Homo sapiens
  CDR3 for alpha chain variable domain of TCR clone 84658 (TRAV25, TRAJ41)
CAGPWKSNSGYALNF

SEQ ID NO: 169316 - protein, 13 aa, Homo sapiens
  CDR3 for beta chain variable domain of TCR clone 84658 (TRBV15, TRBJ1-1)
CATSRGIQARAFF

SEQ ID NO: 169317 - protein, 12 aa, Homo sapiens
  CDR3 for alpha chain variable domain of TCR clone 84659 (TRAV17, TRAJ20)
CATQANDYKLSF

SEQ ID NO: 169318 - protein, 12 aa, Homo sapiens
  CDR3 for beta chain variable domain of TCR clone 84659 (TRBV6-1, TRBJ1-1)
RASNSPTAEAFF

SEQ ID NO: 169319 - protein, 14 aa, Homo sapiens
  CDR3 for alpha chain variable domain of TCR clone 84660 (TRAV13-1, TRAJ40)
CAASMTSGTYKYIF

SEQ ID NO: 169320 - protein, 15 aa, Homo sapiens
  CDR3 for beta chain variable domain of TCR clone 84660 (TRBV7-3, TRBJ2-1)
CASGPTGGGEVEQSF

SEQ ID NO: 169321 - protein, 16 aa, Homo sapiens
  CDR3 for alpha chain variable domain of TCR clone 84661 (TRAV12-2, TRAJ53)
CAMSPGRGGSNYKLTF

SEQ ID NO: 169322 - protein, 17 aa, Homo sapiens
  CDR3 for beta chain variable domain of TCR clone 84661 (TRBV20-1, TRBJ2-2)
CSASGSGQGGLTGELFF

SEQ ID NO: 169323 - protein, 18 aa, Homo sapiens
  CDR3 for alpha chain variable domain of TCR clone 84662 (TRAV13-1, TRAJ52)
CAASKRSAGGTSCGKLTF

SEQ ID NO: 169324 - protein, 14 aa, Homo sapiens
  CDR3 for beta chain variable domain of TCR clone 84662 (TRBV23-1, TRBJ2-5)
CASSFLRSQETQYF

SEQ ID NO: 169325 - protein, 14 aa, Homo sapiens
  CDR3 for alpha chain variable domain of TCR clone 84663 (TRAV17, TRAJ57)
CATDPQGGSEKLVF

SEQ ID NO: 169326 - protein, 14 aa, Homo sapiens
  CDR3 for beta chain variable domain of TCR clone 84663 (TRBV20-1, TRBJ2-2)
CSAPDTANTGELFF

SEQ ID NO: 169327 - protein, 15 aa, Homo sapiens
  CDR3 for alpha chain variable domain of TCR clone 84664 (TRAV3, TRAJ22)
CAVRDRGGSARQMTF

SEQ ID NO: 169328 - protein, 15 aa, Homo sapiens
  CDR3 for beta chain variable domain of TCR clone 84664 (TRBV19, TRBJ2-5)
CASSIVRASQETQYF

SEQ ID NO: 169329 - protein, 12 aa, Homo sapiens
  CDR3 for alpha chain variable domain of TCR clone 84665 (TRAV16, TRAJ5)
CSRTGGGNKLTF

SEQ ID NO: 169330 - protein, 13 aa, Homo sapiens
  CDR3 for beta chain variable domain of TCR clone 84665 (TRBV12-4, TRBJ2-7)
CASSPTETYEQYF

SEQ ID NO: 169331 - protein, 14 aa, Homo sapiens
  CDR3 for alpha chain variable domain of TCR clone 84666 (TRAV26-1, TRAJ45)
CIEVTGGGADGLTF

SEQ ID NO: 169332 - protein, 17 aa, Homo sapiens
  CDR3 for beta chain variable domain of TCR clone 84666 (TRBV3-1, TRBJ2-2)
CASSQFRDKVDTGELFF

SEQ ID NO: 169333 - protein, 14 aa, Homo sapiens
  CDR3 for alpha chain variable domain of TCR clone 84667 (TRAV1-2, TRAJ16)
CAVNRFSDGQKLLF

SEQ ID NO: 169334 - protein, 14 aa, Homo sapiens
  CDR3 for beta chain variable domain of TCR clone 84667 (TRBV25-1, TRBJ1-1)
CASTHLGGNSEAFF

SEQ ID NO: 169335 - protein, 14 aa, Homo sapiens
  CDR3 for alpha chain variable domain of TCR clone 84668 (TRAV2, TRAJ26)
CAGSPGRLWSEFCL

SEQ ID NO: 169336 - protein, 13 aa, Homo sapiens
  CDR3 for beta chain variable domain of TCR clone 84668 (TRBV7-9, TRBJ1-2)
CASSLKQNYGYTF

SEQ ID NO: 169337 - protein, 15 aa, Homo sapiens
  CDR3 for alpha chain variable domain of TCR clone 84669 (TRAV21, TRAJ53)
CATLNSGGSNYKLTF

SEQ ID NO: 169338 - protein, 16 aa, Homo sapiens
  CDR3 for beta chain variable domain of TCR clone 84669 (TRBV9, TRBJ2-1)
CASSVGGGGNDNEQFF

SEQ ID NO: 169339 - protein, 14 aa, Homo sapiens
  CDR3 for alpha chain variable domain of TCR clone 84670 (TRAV23/DV6, TRAJ37)
CAASTSSNTGKLIF

SEQ ID NO: 169340 - protein, 15 aa, Homo sapiens
  CDR3 for beta chain variable domain of TCR clone 84670 (TRBV5-1, TRBJ1-2)
CASSLGTGENYGYTF

SEQ ID NO: 169341 - protein, 11 aa, Homo sapiens
  CDR3 for alpha chain variable domain of TCR clone 84671 (TRAV21, TRAJ7)
CAAYGNNRLAF

SEQ ID NO: 169342 - protein, 14 aa, Homo sapiens
  CDR3 for beta chain variable domain of TCR clone 84671 (TRBV4-1, TRBJ2-7)
CASSRTGVAFKQYF

SEQ ID NO: 169343 - protein, 14 aa, Homo sapiens
  CDR3 for alpha chain variable domain of TCR clone 84672 (TRAV12-2, TRAJ6)
CASKWGGGSYIPTF

SEQ ID NO: 169344 - protein, 12 aa, Homo sapiens
  CDR3 for beta chain variable domain of TCR clone 84672 (TRBV7-9, TRBJ2-7)
CASSLEGYEQYF

SEQ ID NO: 169345 - protein, 11 aa, Homo sapiens
  CDR3 for alpha chain variable domain of TCR clone 84673 (TRAV12-3, TRAJ43)
CAMSVSNDMRF

SEQ ID NO: 169346 - protein, 12 aa, Homo sapiens
  CDR3 for beta chain variable domain of TCR clone 84673 (TRBV14, TRBJ2-5)
CASSQLKETQYF

SEQ ID NO: 169347 - protein, 14 aa, Homo sapiens
  CDR3 for alpha chain variable domain of TCR clone 84674 (TRAV3, TRAJ9)
CAVRLNTGGFKTIF

SEQ ID NO: 169348 - protein, 15 aa, Homo sapiens
  CDR3 for beta chain variable domain of TCR clone 84674 (TRBV7-2, TRBJ2-1)
CASSLSSGRVNEQFF

SEQ ID NO: 169349 - protein, 14 aa, Homo sapiens
  CDR3 for alpha chain variable domain of TCR clone 84675 (TRAV12-3, TRAJ15)
CAMIPPQSGTALIF

SEQ ID NO: 169350 - protein, 12 aa, Homo sapiens
  CDR3 for beta chain variable domain of TCR clone 84675 (TRBV11-2, TRBJ2-2)
CASSFGGGELFF

SEQ ID NO: 169351 - protein, 14 aa, Homo sapiens
  CDR3 for alpha chain variable domain of TCR clone 84676 (TRAV1-2, TRAJ16)
CAVNRFSDGQKLLF

SEQ ID NO: 169352 - protein, 14 aa, Homo sapiens
  CDR3 for beta chain variable domain of TCR clone 84676 (TRBV7-2, TRBJ2-5)
CASSPAGNQETQYF

SEQ ID NO: 169353 - protein, 14 aa, Homo sapiens
  CDR3 for alpha chain variable domain of TCR clone 84677 (TRAV27, TRAJ42)
CAGASGGSQGNLIF

SEQ ID NO: 169354 - protein, 15 aa, Homo sapiens
  CDR3 for beta chain variable domain of TCR clone 84677 (TRBV28, TRBJ1-3)
CASSMGWASGNTIYF

SEQ ID NO: 169355 - protein, 13 aa, Homo sapiens
  CDR3 for alpha chain variable domain of TCR clone 84678 (TRAV2, TRAJ40)
CAVVTSGTYKYIF

SEQ ID NO: 169356 - protein, 15 aa, Homo sapiens
  CDR3 for beta chain variable domain of TCR clone 84678 (TRBV7-6, TRBJ2-5)
CASSFPGGPQETQYF

SEQ ID NO: 169357 - protein, 14 aa, Homo sapiens
  CDR3 for alpha chain variable domain of TCR clone 84679 (TRAV12-2, TRAJ17)
CAVLFKAAGNNLTF

SEQ ID NO: 169358 - protein, 17 aa, Homo sapiens
  CDR3 for beta chain variable domain of TCR clone 84679 (TRBV11-2, TRBJ2-1)
CASSLYPPGVEYNEQFF

SEQ ID NO: 169359 - protein, 17 aa, Homo sapiens
  CDR3 for alpha chain variable domain of TCR clone 84680 (TRAV3, TRAJ6)
CAVRDGPRAGGSYIPTF

SEQ ID NO: 169360 - protein, 16 aa, Homo sapiens
  CDR3 for beta chain variable domain of TCR clone 84680 (TRBV28, TRBJ2-7)
CASSLFFETGGPEQYF

SEQ ID NO: 169361 - protein, 13 aa, Homo sapiens
  CDR3 for alpha chain variable domain of TCR clone 84681 (TRAV22, TRAJ29)
CAVGGSGNTPLVF

SEQ ID NO: 169362 - protein, 16 aa, Homo sapiens
  CDR3 for beta chain variable domain of TCR clone 84681 (TRBV12-5, TRBJ2-5)
CASGPRTSGNQETQYF

SEQ ID NO: 169363 - protein, 18 aa, Homo sapiens
  CDR3 for alpha chain variable domain of TCR clone 84682 (TRAV9-2, TRAJ52)
CALSRHNAGGTSYGKLTF

SEQ ID NO: 169364 - protein, 13 aa, Homo sapiens
  CDR3 for beta chain variable domain of TCR clone 84682 (TRBV7-9, TRBJ1-2)
CACSLKQNYGYTF

SEQ ID NO: 169365 - protein, 14 aa, Homo sapiens
  CDR3 for alpha chain variable domain of TCR clone 84683 (TRAV26-1, TRAJ26)
CIVRATFLGQNFVF

SEQ ID NO: 169366 - protein, 16 aa, Homo sapiens
  CDR3 for beta chain variable domain of TCR clone 84683 (TRBV12-4, TRBJ2-7)
CASRSTGTGPPYEQYF

SEQ ID NO: 169367 - protein, 13 aa, Homo sapiens
  CDR3 for alpha chain variable domain of TCR clone 84684 (TRAV21, TRAJ20)
CAVGLRVDYKLSF

SEQ ID NO: 169368 - protein, 16 aa, Homo sapiens
  CDR3 for beta chain variable domain of TCR clone 84684 (TRBV20-1, TRBJ1-1)
CSARALTQGMNTEAFF

SEQ ID NO: 169369 - protein, 11 aa, Homo sapiens
  CDR3 for alpha chain variable domain of TCR clone 84685 (TRAV2, TRAJ13)
CASGGYQKVTF

SEQ ID NO: 169370 - protein, 13 aa, Homo sapiens
  CDR3 for beta chain variable domain of TCR clone 84685 (TRBV20-1, TRBJ2-2)
CSASAAGTGEPFF

SEQ ID NO: 169371 - protein, 12 aa, Homo sapiens
  CDR3 for alpha chain variable domain of TCR clone 84686 (TRAV12-3, TRAJ17)
CAMTLTGNKLTF

SEQ ID NO: 169372 - protein, 13 aa, Homo sapiens
  CDR3 for beta chain variable domain of TCR clone 84686 (TRBV29-1, TRBJ1-1)
CSVGAGWSTEAFF

SEQ ID NO: 169373 - protein, 10 aa, Homo sapiens
  CDR3 for alpha chain variable domain of TCR clone 84687 (TRAV16, TRAJ22)
SAMYLRELTF

SEQ ID NO: 169374 - protein, 15 aa, Homo sapiens
  CDR3 for beta chain variable domain of TCR clone 84687 (TRBV7-9, TRBJ1-6)
CASSSPGRGNSPLHF

SEQ ID NO: 169375 - protein, 12 aa, Homo sapiens
  CDR3 for alpha chain variable domain of TCR clone 84688 (TRAV2, TRAJ31)
CAVEDNNARLMF

SEQ ID NO: 169376 - protein, 16 aa, Homo sapiens
  CDR3 for beta chain variable domain of TCR clone 84688 (TRBV10-3, TRBJ2-1)
CAISGVGDGGGWEQFF

SEQ ID NO: 169377 - protein, 14 aa, Homo sapiens
  CDR3 for alpha chain variable domain of TCR clone 84689 (TRAV36/DV7, TRAJ49)
CAVGDWNTGNQFYF

SEQ ID NO: 169378 - protein, 12 aa, Homo sapiens
  CDR3 for beta chain variable domain of TCR clone 84689 (TRBV28, TRBJ2-7)
CASSFSSYEQYF

SEQ ID NO: 169379 - protein, 13 aa, Homo sapiens
  CDR3 for alpha chain variable domain of TCR clone 84690 (TRAV12-2, TRAJ20)
CAVYPSNDYKLSF

SEQ ID NO: 169380 - protein, 14 aa, Homo sapiens
  CDR3 for beta chain variable domain of TCR clone 84690 (TRBV7-6, TRBJ2-3)
CASSLGTVTDTQYF

SEQ ID NO: 169381 - protein, 12 aa, Homo sapiens
  CDR3 for alpha chain variable domain of TCR clone 84691 (TRAV12-1, TRAJ40)
CVVYSGTYKYIF

SEQ ID NO: 169382 - protein, 13 aa, Homo sapiens
  CDR3 for beta chain variable domain of TCR clone 84691 (TRBV7-6, TRBJ2-1)
CPQLGGGADEQFF

SEQ ID NO: 169383 - protein, 13 aa, Homo sapiens
  CDR3 for alpha chain variable domain of TCR clone 84692 (TRAV8-3, TRAJ20)
CAVGRPNDYKLSF

SEQ ID NO: 169384 - protein, 14 aa, Homo sapiens
  CDR3 for beta chain variable domain of TCR clone 84692 (TRBV12-5, TRBJ2-5)
CASGSWTHQETQYF

SEQ ID NO: 169385 - protein, 12 aa, Homo sapiens
  CDR3 for alpha chain variable domain of TCR clone 84693 (TRAV21, TRAJ49)
CAVTNTGNQLYF

SEQ ID NO: 169386 - protein, 17 aa, Homo sapiens
  CDR3 for beta chain variable domain of TCR clone 84693 (TRBV13, TRBJ2-3)
CASSLSRVAGGRNTQYF

SEQ ID NO: 169387 - protein, 13 aa, Homo sapiens
  CDR3 for alpha chain variable domain of TCR clone 84694 (TRAV26-1, TRAJ35)
CIVSRRVGEMLHC

SEQ ID NO: 169388 - protein, 17 aa, Homo sapiens
  CDR3 for beta chain variable domain of TCR clone 84694 (TRBV7-9, TRBJ2-7)
CASSFAGSRGGAYEQYF

SEQ ID NO: 169389 - protein, 16 aa, Homo sapiens
  CDR3 for alpha chain variable domain of TCR clone 84695 (TRAV23/DV6, TRAJ9)
CAASIGGNTGGFKTIL

SEQ ID NO: 169390 - protein, 13 aa, Homo sapiens
  CDR3 for beta chain variable domain of TCR clone 84695 (TRBV7-9, TRBJ1-2)
CASSLKQNYGYTF

SEQ ID NO: 169391 - protein, 14 aa, Homo sapiens
  CDR3 for alpha chain variable domain of TCR clone 84696 (TRAV2, TRAJ37)
CAVDFTSNTGKLIF

SEQ ID NO: 169392 - protein, 15 aa, Homo sapiens
  CDR3 for beta chain variable domain of TCR clone 84696 (TRBV6-5, TRBJ2-1)
CASSYDAGAGNEQFF

SEQ ID NO: 169393 - protein, 11 aa, Homo sapiens
  CDR3 for alpha chain variable domain of TCR clone 84697 (TRAV12-2, TRAJ29)
CAVTLRRPLVF

SEQ ID NO: 169394 - protein, 16 aa, Homo sapiens
  CDR3 for beta chain variable domain of TCR clone 84697 (TRBV29-1, TRBJ2-2)
CSVETRASGNTGELFF

SEQ ID NO: 169395 - protein, 11 aa, Homo sapiens
  CDR3 for alpha chain variable domain of TCR clone 84698 (TRAV21, TRAJ30)
CVVNGQDKIIF

SEQ ID NO: 169396 - protein, 12 aa, Homo sapiens
  CDR3 for beta chain variable domain of TCR clone 84698 (TRBV27, TRBJ2-2)
CASKLFTGELFF

SEQ ID NO: 169397 - protein, 16 aa, Homo sapiens
  CDR3 for alpha chain variable domain of TCR clone 84699 (TRAV35, TRAJ28)
CAGQKYSGAGSYQLNF

SEQ ID NO: 169398 - protein, 13 aa, Homo sapiens
  CDR3 for beta chain variable domain of TCR clone 84699 (TRBV19, TRBJ1-2)
CASSQGQVYGYTF

SEQ ID NO: 169399 - protein, 14 aa, Homo sapiens
  CDR3 for alpha chain variable domain of TCR clone 84700 (TRAV21, TRAJ58)
CAVRRGRSGSRLTF

SEQ ID NO: 169400 - protein, 14 aa, Homo sapiens
  CDR3 for beta chain variable domain of TCR clone 84700 (TRBV2, TRBJ2-1)
CASSDRAYYNEQFF

SEQ ID NO: 169401 - protein, 11 aa, Homo sapiens
  CDR3 for alpha chain variable domain of TCR clone 84701 (TRAV2, TRAJ23)
CAVETRGKLIF

SEQ ID NO: 169402 - protein, 16 aa, Homo sapiens
  CDR3 for beta chain variable domain of TCR clone 84701 (TRBV12-4, TRBJ1-2)
CASSPTATGKTRGYTF

SEQ ID NO: 169403 - protein, 16 aa, Homo sapiens
  CDR3 for alpha chain variable domain of TCR clone 84702 (TRAV30, TRAJ24)
CGTEIVDADSWGNFEF

SEQ ID NO: 169404 - protein, 14 aa, Homo sapiens
  CDR3 for beta chain variable domain of TCR clone 84702 (TRBV12-5, TRBJ2-5)
CASGSRTHQETQYF

SEQ ID NO: 169405 - protein, 14 aa, Homo sapiens
  CDR3 for alpha chain variable domain of TCR clone 84703 (TRAV26-1, TRAJ48)
CIVRVGFGNEKLTF

SEQ ID NO: 169406 - protein, 13 aa, Homo sapiens
  CDR3 for beta chain variable domain of TCR clone 84703 (TRBV11-3, TRBJ2-3)
CASRHDTKDTQYF

SEQ ID NO: 169407 - protein, 19 aa, Homo sapiens
  CDR3 for alpha chain variable domain of TCR clone 84704 (TRAV2, TRAJ32)
TTVLSTPPSQGGAPNKLIF

SEQ ID NO: 169408 - protein, 12 aa, Homo sapiens
  CDR3 for beta chain variable domain of TCR clone 84704 (TRBV20-1, TRBJ2-7)
CSAITPTKEQYF

SEQ ID NO: 169409 - protein, 18 aa, Homo sapiens
  CDR3 for alpha chain variable domain of TCR clone 84705 (TRAV21, TRAJ52)
CAVRPSPAGGTSYGKLTF

SEQ ID NO: 169410 - protein, 16 aa, Homo sapiens
  CDR3 for beta chain variable domain of TCR clone 84705 (TRBV13, TRBJ2-3)
CASSLSRVAGGEYAVF

SEQ ID NO: 169411 - protein, 15 aa, Homo sapiens
  CDR3 for alpha chain variable domain of TCR clone 84706 (TRAV2, TRAJ9)
CAVEDRGTGGFKTIF

SEQ ID NO: 169412 - protein, 19 aa, Homo sapiens
  CDR3 for beta chain variable domain of TCR clone 84706 (TRBV7-9, TRBJ2-6)
CASSLESATVLPGANVLTF

SEQ ID NO: 169413 - protein, 16 aa, Homo sapiens
  CDR3 for alpha chain variable domain of TCR clone 84707 (TRAV27, TRAJ34)
CAGGGLGDYNTDKLIF

SEQ ID NO: 169414 - protein, 13 aa, Homo sapiens
  CDR3 for beta chain variable domain of TCR clone 84707 (TRBV15, TRBJ1-1)
CATSRIRNTEAFF

SEQ ID NO: 169415 - protein, 18 aa, Homo sapiens
  CDR3 for alpha chain variable domain of TCR clone 84708 (TRAV13-1, TRAJ52)
CAASKRSAGRTSYGKLTF

SEQ ID NO: 169416 - protein, 13 aa, Homo sapiens
  CDR3 for beta chain variable domain of TCR clone 84708 (TRBV12-4, TRBJ1-2)
CASSLRQGKGYTF

SEQ ID NO: 169417 - protein, 14 aa, Homo sapiens
  CDR3 for alpha chain variable domain of TCR clone 84709 (TRAV13-1, TRAJ35)
CAASKGGFGNVLHC

SEQ ID NO: 169418 - protein, 18 aa, Homo sapiens
  CDR3 for beta chain variable domain of TCR clone 84709 (TRBV7-9, TRBJ2-1)
CASSTGLAEGSSYNEQFF

SEQ ID NO: 169419 - protein, 16 aa, Homo sapiens
  CDR3 for alpha chain variable domain of TCR clone 84710 (TRAV27, TRAJ52)
CAGAPAGGTSYGKLKF

SEQ ID NO: 169420 - protein, 12 aa, Homo sapiens
  CDR3 for beta chain variable domain of TCR clone 84710 (TRBV27, TRBJ2-1)
CASRGFYNEQFF

SEQ ID NO: 169421 - protein, 15 aa, Homo sapiens
  CDR3 for alpha chain variable domain of TCR clone 84711 (TRAV21, TRAJ24)
CAARSSTDSWGKLQF

SEQ ID NO: 169422 - protein, 15 aa, Homo sapiens
  CDR3 for beta chain variable domain of TCR clone 84711 (TRBV5-1, TRBJ2-1)
CASSPPRAPYNEQLF

SEQ ID NO: 169423 - protein, 11 aa, Homo sapiens
  CDR3 for alpha chain variable domain of TCR clone 84712 (TRAV39, TRAJ49)
CAVDISTQFYF

SEQ ID NO: 169424 - protein, 11 aa, Homo sapiens
  CDR3 for beta chain variable domain of TCR clone 84712 (TRBV7-8, TRBJ2-7)
CASSVSLEQYF

SEQ ID NO: 169425 - protein, 14 aa, Homo sapiens
  CDR3 for alpha chain variable domain of TCR clone 84713 (TRAV26-1, TRAJ22)
FIVRVYGSARQLTF

SEQ ID NO: 169426 - protein, 17 aa, Homo sapiens
  CDR3 for beta chain variable domain of TCR clone 84713 (TRBV7-3, TRBJ2-3)
CASSPGGLAGFGDTQYF

SEQ ID NO: 169427 - protein, 14 aa, Homo sapiens
  CDR3 for alpha chain variable domain of TCR clone 84714 (TRAV30, TRAJ33)
CGTVAPPQQLSVNL

SEQ ID NO: 169428 - protein, 16 aa, Homo sapiens
  CDR3 for beta chain variable domain of TCR clone 84714 (TRBV3-1, TRBJ2-5)
CASSPGQFNGFGTQYF

SEQ ID NO: 169429 - protein, 13 aa, Homo sapiens
  CDR3 for alpha chain variable domain of TCR clone 84715 (TRAV12-2, TRAJ37)
CAGGSGNPGKLIF

SEQ ID NO: 169430 - protein, 14 aa, Homo sapiens
  CDR3 for beta chain variable domain of TCR clone 84715 (TRBV6-1, TRBJ2-6)
CASQQGAGANVLTF

SEQ ID NO: 169431 - protein, 15 aa, Homo sapiens
  CDR3 for alpha chain variable domain of TCR clone 84716 (TRAV9-2, TRAJ56)
CALSDVDGANSKLTF

SEQ ID NO: 169432 - protein, 16 aa, Homo sapiens
  CDR3 for beta chain variable domain of TCR clone 84716 (TRBV3-1, TRBJ1-6)
CASSQGLDGRHSPLHF

SEQ ID NO: 169433 - protein, 15 aa, Homo sapiens
  CDR3 for alpha chain variable domain of TCR clone 84717 (TRAV26-1, TRAJ22)
CIVRVSFWFCKATDL

SEQ ID NO: 169434 - protein, 13 aa, Homo sapiens
  CDR3 for beta chain variable domain of TCR clone 84717 (TRBV7-9, TRBJ1-2)
CASSLKLNYGYTF

SEQ ID NO: 169435 - protein, 15 aa, Homo sapiens
  CDR3 for alpha chain variable domain of TCR clone 84718 (TRAV17, TRAJ37)
CATDHGSSTTGKLIF

SEQ ID NO: 169436 - protein, 14 aa, Homo sapiens
  CDR3 for beta chain variable domain of TCR clone 84718 (TRBV7-2, TRBJ2-3)
CASSRTSGADTQYF

SEQ ID NO: 169437 - protein, 13 aa, Homo sapiens
  CDR3 for alpha chain variable domain of TCR clone 84719 (TRAV21, TRAJ20)
CAVGVFADYKLSF

SEQ ID NO: 169438 - protein, 11 aa, Homo sapiens
  CDR3 for beta chain variable domain of TCR clone 84719 (TRBV11-2, TRBJ2-2)
CASSLPGELFF

SEQ ID NO: 169439 - protein, 13 aa, Homo sapiens
  CDR3 for alpha chain variable domain of TCR clone 84720 (TRAV8-6, TRAJ50)
CAVIKTSYDKVIF

SEQ ID NO: 169440 - protein, 15 aa, Homo sapiens
  CDR3 for beta chain variable domain of TCR clone 84720 (TRBV7-2, TRBJ2-2)
CTSRRPGQNTGELFF

SEQ ID NO: 169441 - protein, 10 aa, Homo sapiens
  CDR3 for alpha chain variable domain of TCR clone 84721 (TRAV13-2, TRAJ43)
PTYNNNDMRF

SEQ ID NO: 169442 - protein, 15 aa, Homo sapiens
  CDR3 for beta chain variable domain of TCR clone 84721 (TRBV7-9, TRBJ2-2)
CASGPLDTFPGELFF

SEQ ID NO: 169443 - protein, 15 aa, Homo sapiens
  CDR3 for alpha chain variable domain of TCR clone 84722 (TRAV21, TRAJ24)
CAARSSTDSWGKLQF

SEQ ID NO: 169444 - protein, 12 aa, Homo sapiens
  CDR3 for beta chain variable domain of TCR clone 84722 (TRBV11-2, TRBJ2-2)
CASSLPTGELFF

SEQ ID NO: 169445 - protein, 17 aa, Homo sapiens
  CDR3 for alpha chain variable domain of TCR clone 84723 (TRAV3, TRAJ6)
CAVRDGPRAGGSDIPPF

SEQ ID NO: 169446 - protein, 14 aa, Homo sapiens
  CDR3 for beta chain variable domain of TCR clone 84723 (TRBV7-2, TRBJ2-7)
CASSPKTSFYEQYF

SEQ ID NO: 169447 - protein, 10 aa, Homo sapiens
  CDR3 for alpha chain variable domain of TCR clone 84724 (TRAV30, TRAJ48)
CGIGNEKLTF

SEQ ID NO: 169448 - protein, 14 aa, Homo sapiens
  CDR3 for beta chain variable domain of TCR clone 84724 (TRBV4-2, TRBJ2-1)
CASGLDRAYNEQFF

SEQ ID NO: 169449 - protein, 13 aa, Homo sapiens
  CDR3 for alpha chain variable domain of TCR clone 84725 (TRAV12-3, TRAJ13)
CATSSGGYQKVTF

SEQ ID NO: 169450 - protein, 13 aa, Homo sapiens
  CDR3 for beta chain variable domain of TCR clone 84725 (TRBV20-1, TRBJ1-1)
CSAPPGGHTEAFF

SEQ ID NO: 169451 - protein, 15 aa, Homo sapiens
  CDR3 for alpha chain variable domain of TCR clone 84726 (TRAV21, TRAJ13)
CAVRPTSGGYQKVTF

SEQ ID NO: 169452 - protein, 18 aa, Homo sapiens
  CDR3 for beta chain variable domain of TCR clone 84726 (TRBV11-3, TRBJ2-1)
CASSSCPGGRDSYNEQFF

SEQ ID NO: 169453 - protein, 12 aa, Homo sapiens
  CDR3 for alpha chain variable domain of TCR clone 84727 (TRAV35, TRAJ39)
LAPNNAGNMLTF

SEQ ID NO: 169454 - protein, 14 aa, Homo sapiens
  CDR3 for beta chain variable domain of TCR clone 84727 (TRBV12-5, TRBJ2-5)
CASGSRTHQETQYF

SEQ ID NO: 169455 - protein, 12 aa, Homo sapiens
  CDR3 for alpha chain variable domain of TCR clone 84728 (TRAV3, TRAJ27)
CAVRDGAGESTF

SEQ ID NO: 169456 - protein, 15 aa, Homo sapiens
  CDR3 for beta chain variable domain of TCR clone 84728 (TRBV28, TRBJ1-5)
CASSFPSGRNQPQHF

SEQ ID NO: 169457 - protein, 13 aa, Homo sapiens
  CDR3 for alpha chain variable domain of TCR clone 84729 (TRAV21, TRAJ36)
CAVIETGANNLFF

SEQ ID NO: 169458 - protein, 13 aa, Homo sapiens
  CDR3 for beta chain variable domain of TCR clone 84729 (TRBV29-1, TRBJ2-3)
CSATRGGRDTQYF

SEQ ID NO: 169459 - protein, 12 aa, Homo sapiens
  CDR3 for alpha chain variable domain of TCR clone 84730 (TRAV19, TRAJ26)
CSDVNCGQNFVF

SEQ ID NO: 169460 - protein, 14 aa, Homo sapiens
  CDR3 for beta chain variable domain of TCR clone 84730 (TRBV4-1, TRBJ1-1)
CASSRSGQSFEAFF

SEQ ID NO: 169461 - protein, 12 aa, Homo sapiens
  CDR3 for alpha chain variable domain of TCR clone 84731 (TRAV13-1, TRAJ21)
CAAKEGFNKFYF

SEQ ID NO: 169462 - protein, 18 aa, Homo sapiens
  CDR3 for beta chain variable domain of TCR clone 84731 (TRBV20-1, TRBJ2-6)
CSAETTPTNGSGANVLTF

SEQ ID NO: 169463 - protein, 14 aa, Homo sapiens
  CDR3 for alpha chain variable domain of TCR clone 84732 (TRAV12-2, TRAJ40)
CAVKIPSGTYKCIF

SEQ ID NO: 169464 - protein, 13 aa, Homo sapiens
  CDR3 for beta chain variable domain of TCR clone 84732 (TRBV7-9, TRBJ1-2)
CASSLKQNYGYTF

SEQ ID NO: 169465 - protein, 17 aa, Homo sapiens
  CDR3 for alpha chain variable domain of TCR clone 84733 (TRAV38-2/DV8, TRAJ38)
CAYRSARGAGNNRTLIW

SEQ ID NO: 169466 - protein, 13 aa, Homo sapiens
  CDR3 for beta chain variable domain of TCR clone 84733 (TRBV6-5, TRBJ2-1)
CASRGRVGNEQFF

SEQ ID NO: 169467 - protein, 13 aa, Homo sapiens
  CDR3 for alpha chain variable domain of TCR clone 84734 (TRAV16, TRAJ11)
CALTQSGYSTLTF

SEQ ID NO: 169468 - protein, 17 aa, Homo sapiens
  CDR3 for beta chain variable domain of TCR clone 84734 (TRBV5-1, TRBJ1-5)
CASSLAFLTRGNQPQHL

SEQ ID NO: 169469 - protein, 15 aa, Homo sapiens
  CDR3 for alpha chain variable domain of TCR clone 84735 (TRAV13-1, TRAJ5)
CAVSTIDTGRRALTF

SEQ ID NO: 169470 - protein, 18 aa, Homo sapiens
  CDR3 for beta chain variable domain of TCR clone 84735 (TRBV4-1, TRBJ2-2)
CASSFRTSGGEGPGELFF

SEQ ID NO: 169471 - protein, 14 aa, Homo sapiens
  CDR3 for alpha chain variable domain of TCR clone 84736 (TRAV1-2, TRAJ8)
CAVREDTGFQKLVF

SEQ ID NO: 169472 - protein, 16 aa, Homo sapiens
  CDR3 for beta chain variable domain of TCR clone 84736 (TRBV11-2, TRBJ2-1)
CQQLIPPGVEYNEQFF

SEQ ID NO: 169473 - protein, 16 aa, Homo sapiens
  CDR3 for alpha chain variable domain of TCR clone 84737 (TRAV23/DV6, TRAJ48)
CAASGVVNFGNEKLTL

SEQ ID NO: 169474 - protein, 15 aa, Homo sapiens
  CDR3 for beta chain variable domain of TCR clone 84737 (TRBV7-9, TRBJ2-1)
CASSLGWGRANEQFF

SEQ ID NO: 169475 - protein, 14 aa, Homo sapiens
  CDR3 for alpha chain variable domain of TCR clone 84738 (TRAV26-1, TRAJ38)
CIADNAGNNRKLIW

SEQ ID NO: 169476 - protein, 10 aa, Homo sapiens
  CDR3 for beta chain variable domain of TCR clone 84738 (TRBV20-1, TRBJ2-5)
CSARFETQYF

SEQ ID NO: 169477 - protein, 15 aa, Homo sapiens
  CDR3 for alpha chain variable domain of TCR clone 84739 (TRAV12-2, TRAJ53)
CAVNGGGGSNYKLTF

SEQ ID NO: 169478 - protein, 16 aa, Homo sapiens
  CDR3 for beta chain variable domain of TCR clone 84739 (TRBV2, TRBJ2-3)
CASSTSVEGVTDTQYF

SEQ ID NO: 169479 - protein, 11 aa, Homo sapiens
  CDR3 for alpha chain variable domain of TCR clone 84740 (TRAV1-2, TRAJ20)
CAVANDYKLSF

SEQ ID NO: 169480 - protein, 18 aa, Homo sapiens
  CDR3 for beta chain variable domain of TCR clone 84740 (TRBV20-1, TRBJ2-6)
CSAETTPTHGSGANVLTY

SEQ ID NO: 169481 - protein, 11 aa, Homo sapiens
  CDR3 for alpha chain variable domain of TCR clone 84741 (TRAV6, TRAJ41)
CALNSGYALNF

SEQ ID NO: 169482 - protein, 15 aa, Homo sapiens
  CDR3 for beta chain variable domain of TCR clone 84741 (TRBV20-1, TRBJ1-5)
CSAFKNGQRDQPQHF

SEQ ID NO: 169483 - protein, 14 aa, Homo sapiens
  CDR3 for alpha chain variable domain of TCR clone 84742 (TRAV12-2, TRAJ40)
CAVKIPSGTYKYSF

SEQ ID NO: 169484 - protein, 13 aa, Homo sapiens
  CDR3 for beta chain variable domain of TCR clone 84742 (TRBV7-9, TRBJ1-2)
CASSLKQNYGYTF

SEQ ID NO: 169485 - protein, 13 aa, Homo sapiens
  CDR3 for alpha chain variable domain of TCR clone 84743 (TRAV2, TRAJ23)
CAAMGNQGGKLIF

SEQ ID NO: 169486 - protein, 14 aa, Homo sapiens
  CDR3 for beta chain variable domain of TCR clone 84743 (TRBV11-2, TRBJ2-1)
CASSRATSYNEQFF

SEQ ID NO: 169487 - protein, 15 aa, Homo sapiens
  CDR3 for alpha chain variable domain of TCR clone 84744 (TRAV12-1, TRAJ4)
CVVNPFSGGYNKLIF

SEQ ID NO: 169488 - protein, 16 aa, Homo sapiens
  CDR3 for beta chain variable domain of TCR clone 84744 (TRBV5-1, TRBJ1-1)
CASSKTGAEVGTEAFF

SEQ ID NO: 169489 - protein, 14 aa, Homo sapiens
  CDR3 for alpha chain variable domain of TCR clone 84745 (TRAV1-2, TRAJ8)
CALREDTGFQKLVF

SEQ ID NO: 169490 - protein, 14 aa, Homo sapiens
  CDR3 for beta chain variable domain of TCR clone 84745 (TRBV11-2, TRBJ2-3)
CASSRLARTDTQYF

SEQ ID NO: 169491 - protein, 14 aa, Homo sapiens
  CDR3 for alpha chain variable domain of TCR clone 84746 (TRAV16, TRAJ33)
CSLSAMDSNYQLIW

SEQ ID NO: 169492 - protein, 17 aa, Homo sapiens
  CDR3 for beta chain variable domain of TCR clone 84746 (TRBV25-1, TRBJ2-7)
CASSDARVVFSSYEQYF

SEQ ID NO: 169493 - protein, 14 aa, Homo sapiens
  CDR3 for alpha chain variable domain of TCR clone 84747 (TRAV2, TRAJ9)
CAVEDRSGGFKTIF

SEQ ID NO: 169494 - protein, 13 aa, Homo sapiens
  CDR3 for beta chain variable domain of TCR clone 84747 (TRBV7-3, TRBJ1-1)
CACSQDWGAEAFF

SEQ ID NO: 169495 - protein, 15 aa, Homo sapiens
  CDR3 for alpha chain variable domain of TCR clone 84748 (TRAV35, TRAJ50)
CAGQLRKTSYDKVIF

SEQ ID NO: 169496 - protein, 12 aa, Homo sapiens
  CDR3 for beta chain variable domain of TCR clone 84748 (TRBV5-1, TRBJ2-5)
CASSLGLETQYV

SEQ ID NO: 169497 - protein, 13 aa, Homo sapiens
  CDR3 for alpha chain variable domain of TCR clone 84749 (TRAV17, TRAJ5)
CALRGTGRRALTF

SEQ ID NO: 169498 - protein, 13 aa, Homo sapiens
  CDR3 for beta chain variable domain of TCR clone 84749 (TRBV4-2, TRBJ1-1)
CASSQAGNTEAFL

SEQ ID NO: 169499 - protein, 11 aa, Homo sapiens
  CDR3 for alpha chain variable domain of TCR clone 84750 (TRAV23/DV6, TRAJ58)
CAARLLRGETS

SEQ ID NO: 169500 - protein, 17 aa, Homo sapiens
  CDR3 for beta chain variable domain of TCR clone 84750 (TRBV13, TRBJ2-3)
CASSSLGTSGLTDTQYF

SEQ ID NO: 169501 - protein, 17 aa, Homo sapiens
  CDR3 for alpha chain variable domain of TCR clone 84751 (TRAV20, TRAJ4)
CAVQLVLFFGGYNKLIF

SEQ ID NO: 169502 - protein, 20 aa, Homo sapiens
  CDR3 for beta chain variable domain of TCR clone 84751 (TRBV7-8, TRBJ2-2)
CASSHLFPGPTIHITGELFF

SEQ ID NO: 169503 - protein, 14 aa, Homo sapiens
  CDR3 for alpha chain variable domain of TCR clone 84752 (TRAV12-2, TRAJ45)
CAVNIGGGADGLTF

SEQ ID NO: 169504 - protein, 13 aa, Homo sapiens
  CDR3 for beta chain variable domain of TCR clone 84752 (TRBV19, TRBJ2-2)
CASSIWSTGELVF

SEQ ID NO: 169505 - protein, 13 aa, Homo sapiens
  CDR3 for alpha chain variable domain of TCR clone 84753 (TRAV29/DV5, TRAJ33)
CAAIVESNYQLIW

SEQ ID NO: 169506 - protein, 14 aa, Homo sapiens
  CDR3 for beta chain variable domain of TCR clone 84753 (TRBV11-2, TRBJ2-5)
CASSRTGGIETQYF

SEQ ID NO: 169507 - protein, 14 aa, Homo sapiens
  CDR3 for alpha chain variable domain of TCR clone 84754 (TRAV12-2, TRAJ40)
CAVKIPSGTYKYIF

SEQ ID NO: 169508 - protein, 15 aa, Homo sapiens
  CDR3 for beta chain variable domain of TCR clone 84754 (TRBV5-1, TRBJ2-3)
CASSSTSGSTDTQYF

SEQ ID NO: 169509 - protein, 18 aa, Homo sapiens
  CDR3 for alpha chain variable domain of TCR clone 84755 (TRAV26-2, TRAJ54)
CILRDVEVGIQGAQKLVF

SEQ ID NO: 169510 - protein, 16 aa, Homo sapiens
  CDR3 for beta chain variable domain of TCR clone 84755 (TRBV7-3, TRBJ2-2)
CASSLKRGTLSGELFF

SEQ ID NO: 169511 - protein, 18 aa, Homo sapiens
  CDR3 for alpha chain variable domain of TCR clone 84756 (TRAV21, TRAJ52)
CAVRPSPAGGTSYGKLTF

SEQ ID NO: 169512 - protein, 11 aa, Homo sapiens
  CDR3 for beta chain variable domain of TCR clone 84756 (TRBV10-3, TRBJ2-7)
CAISEGLEQYF

SEQ ID NO: 169513 - protein, 10 aa, Homo sapiens
  CDR3 for alpha chain variable domain of TCR clone 84757 (TRAV12-1, TRAJ37)
ARGNTGKLIF

SEQ ID NO: 169514 - protein, 13 aa, Homo sapiens
  CDR3 for beta chain variable domain of TCR clone 84757 (TRBV12-4, TRBJ2-2)
CASSITGFGELFF

SEQ ID NO: 169515 - protein, 11 aa, Homo sapiens
  CDR3 for alpha chain variable domain of TCR clone 84758 (TRAV13-1, TRAJ6)
CATLGSYIPTF

SEQ ID NO: 169516 - protein, 11 aa, Homo sapiens
  CDR3 for beta chain variable domain of TCR clone 84758 (TRBV11-2, TRBJ2-2)
CASSLPGELFF

SEQ ID NO: 169517 - protein, 15 aa, Homo sapiens
  CDR3 for alpha chain variable domain of TCR clone 84759 (TRAV14/DV4, TRAJ23)
CAMREGYNQGGKLIF

SEQ ID NO: 169518 - protein, 17 aa, Homo sapiens
  CDR3 for beta chain variable domain of TCR clone 84759 (TRBV11-2, TRBJ2-1)
CASSLYPPGVEYNEQFF

SEQ ID NO: 169519 - protein, 13 aa, Homo sapiens
  CDR3 for alpha chain variable domain of TCR clone 84760 (TRAV21, TRAJ3)
CAVTGSSASKIIF

SEQ ID NO: 169520 - protein, 15 aa, Homo sapiens
  CDR3 for beta chain variable domain of TCR clone 84760 (TRBV7-2, TRBJ2-3)
CASSLVVRGPDTQYF

SEQ ID NO: 169521 - protein, 14 aa, Homo sapiens
  CDR3 for alpha chain variable domain of TCR clone 84761 (TRAV12-2, TRAJ45)
CAVYSGGGADGLTF

SEQ ID NO: 169522 - protein, 16 aa, Homo sapiens
  CDR3 for beta chain variable domain of TCR clone 84761 (TRBV20-1, TRBJ2-2)
CSASASGIPGAGELFF

SEQ ID NO: 169523 - protein, 14 aa, Homo sapiens
  CDR3 for alpha chain variable domain of TCR clone 84762 (TRAV30, TRAJ33)
CGTVAPRSNYQLIW

SEQ ID NO: 169524 - protein, 18 aa, Homo sapiens
  CDR3 for beta chain variable domain of TCR clone 84762 (TRBV11-2, TRBJ2-3)
CANSLGGASRGAPNTQYF

SEQ ID NO: 169525 - protein, 14 aa, Homo sapiens
  CDR3 for alpha chain variable domain of TCR clone 84763 (TRAV26-1, TRAJ38)
CIADNAGNNRKLIW

SEQ ID NO: 169526 - protein, 13 aa, Homo sapiens
  CDR3 for beta chain variable domain of TCR clone 84763 (TRBV7-2, TRBJ1-1)
CASNLKGAKVAFF

SEQ ID NO: 169527 - protein, 16 aa, Homo sapiens
  CDR3 for alpha chain variable domain of TCR clone 84764 (TRAV12-3, TRAJ53)
CAMSPVSGGSNYKLTF

SEQ ID NO: 169528 - protein, 16 aa, Homo sapiens
  CDR3 for beta chain variable domain of TCR clone 84764 (TRBV4-2, TRBJ1-1)
CASSQAGFGMNTEAFF

SEQ ID NO: 169529 - protein, 13 aa, Homo sapiens
  CDR3 for alpha chain variable domain of TCR clone 84765 (TRAV36/DV7, TRAJ37)
CAVFSSNTGKLIF

SEQ ID NO: 169530 - protein, 12 aa, Homo sapiens
  CDR3 for beta chain variable domain of TCR clone 84765 (TRBV11-2, TRBJ2-2)
CASSRGGGELFF

SEQ ID NO: 169531 - protein, 12 aa, Homo sapiens
  CDR3 for alpha chain variable domain of TCR clone 84766 (TRAV20, TRAJ39)
CTVGNAGNMLTF

SEQ ID NO: 169532 - protein, 17 aa, Homo sapiens
  CDR3 for beta chain variable domain of TCR clone 84766 (TRBV4-1, TRBJ2-3)
CASSQGYVSGGTDTQYF

SEQ ID NO: 169533 - protein, 13 aa, Homo sapiens
  CDR3 for alpha chain variable domain of TCR clone 84767 (TRAV26-1, TRAJ48)
CIVRVVGDEKLTF

SEQ ID NO: 169534 - protein, 17 aa, Homo sapiens
  CDR3 for beta chain variable domain of TCR clone 84767 (TRBV5-1, TRBJ1-1)
CASRPIRTGGVNTEAFF

SEQ ID NO: 169535 - protein, 12 aa, Homo sapiens
  CDR3 for alpha chain variable domain of TCR clone 84768 (TRAV1-2, TRAJ33)
CAALDSNYQLIW

SEQ ID NO: 169536 - protein, 15 aa, Homo sapiens
  CDR3 for beta chain variable domain of TCR clone 84768 (TRBV12-4, TRBJ2-5)
CASSPPTGLQETQYF

SEQ ID NO: 169537 - protein, 21 aa, Homo sapiens
  CDR3 for alpha chain variable domain of TCR clone 84769 (TRAV12-1, TRAJ6)
CVVFPGEATYLHLEEEPALLF

SEQ ID NO: 169538 - protein, 14 aa, Homo sapiens
  CDR3 for beta chain variable domain of TCR clone 84769 (TRBV20-1, TRBJ1-3)
CSASPTGAGNTIYF

SEQ ID NO: 169539 - protein, 23 aa, Homo sapiens
  CDR3 for alpha chain variable domain of TCR clone 84770 (TRAV8-3, )
CAVGASNAVNNHIQNPDPAVYQL

SEQ ID NO: 169540 - protein, 15 aa, Homo sapiens
  CDR3 for beta chain variable domain of TCR clone 84770 (TRBV11-3, TRBJ1-3)
CASSLFGPSGNTIYF

SEQ ID NO: 169541 - protein, 10 aa, Homo sapiens
  CDR3 for alpha chain variable domain of TCR clone 84771 (TRAV1-2, TRAJ31)
CAFFDARLMF

SEQ ID NO: 169542 - protein, 14 aa, Homo sapiens
  CDR3 for beta chain variable domain of TCR clone 84771 (TRBV7-9, TRBJ2-1)
CASSPRDSLYEQFF

SEQ ID NO: 169543 - protein, 17 aa, Homo sapiens
  CDR3 for alpha chain variable domain of TCR clone 84772 (TRAV3, TRAJ6)
CAVRDGPRAGGSYIPTF

SEQ ID NO: 169544 - protein, 11 aa, Homo sapiens
  CDR3 for beta chain variable domain of TCR clone 84772 (TRBV10-3, TRBJ2-7)
CAISEGLEQYF

SEQ ID NO: 169545 - protein, 18 aa, Homo sapiens
  CDR3 for alpha chain variable domain of TCR clone 84773 (TRAV21, TRAJ52)
CAVRPSPAGGTSYGKLTF

SEQ ID NO: 169546 - protein, 16 aa, Homo sapiens
  CDR3 for beta chain variable domain of TCR clone 84773 (TRBV27, TRBJ2-5)
CASSSQTSGFQETQYF

SEQ ID NO: 169547 - protein, 14 aa, Homo sapiens
  CDR3 for alpha chain variable domain of TCR clone 84774 (TRAV12-2, TRAJ15)
CSPHTGQAGTALIF

SEQ ID NO: 169548 - protein, 14 aa, Homo sapiens
  CDR3 for beta chain variable domain of TCR clone 84774 (TRBV7-2, TRBJ2-7)
CASSPKTSFYEQYF

SEQ ID NO: 169549 - protein, 13 aa, Homo sapiens
  CDR3 for alpha chain variable domain of TCR clone 84775 (TRAV29/DV5, TRAJ31)
CAASRNNNARLMF

SEQ ID NO: 169550 - protein, 16 aa, Homo sapiens
  CDR3 for beta chain variable domain of TCR clone 84775 (TRBV19, TRBJ2-3)
CASSPGAASRTDTQYF

SEQ ID NO: 169551 - protein, 14 aa, Homo sapiens
  CDR3 for alpha chain variable domain of TCR clone 84776 (TRAV13-1, TRAJ35)
CAASKGGFGNVLHC

SEQ ID NO: 169552 - protein, 14 aa, Homo sapiens
  CDR3 for beta chain variable domain of TCR clone 84776 (TRBV2, TRBJ1-5)
CASSGTVSNQPQHF

SEQ ID NO: 169553 - protein, 13 aa, Homo sapiens
  CDR3 for alpha chain variable domain of TCR clone 84777 (TRAV12-3, TRAJ40)
FAMSDSGTYKYIF

SEQ ID NO: 169554 - protein, 14 aa, Homo sapiens
  CDR3 for beta chain variable domain of TCR clone 84777 (TRBV7-2, TRBJ1-5)
CASSTQGAGQPQHF

SEQ ID NO: 169555 - protein, 16 aa, Homo sapiens
  CDR3 for alpha chain variable domain of TCR clone 84778 (TRAV30, TRAJ24)
CGTEIVDAGSWGKFQF

SEQ ID NO: 169556 - protein, 12 aa, Homo sapiens
  CDR3 for beta chain variable domain of TCR clone 84778 (TRBV11-2, TRBJ2-2)
CASSLGGGELFF

SEQ ID NO: 169557 - protein, 15 aa, Homo sapiens
  CDR3 for alpha chain variable domain of TCR clone 84779 (TRAV2, TRAJ15)
CAVEDREQAGTALIC

SEQ ID NO: 169558 - protein, 13 aa, Homo sapiens
  CDR3 for beta chain variable domain of TCR clone 84779 (TRBV10-2, TRBJ2-3)
CASSESGDHTQYF

SEQ ID NO: 169559 - protein, 16 aa, Homo sapiens
  CDR3 for alpha chain variable domain of TCR clone 84780 (TRAV1-2, TRAJ10)
CAVRGVLTGGGNKLTF

SEQ ID NO: 169560 - protein, 12 aa, Homo sapiens
  CDR3 for beta chain variable domain of TCR clone 84780 (TRBV7-8, TRBJ2-7)
CASSLGDREQFF

SEQ ID NO: 169561 - protein, 15 aa, Homo sapiens
  CDR3 for alpha chain variable domain of TCR clone 84781 (TRAV1-2, TRAJ38)
CAVSENAGNNRKLIW

SEQ ID NO: 169562 - protein, 16 aa, Homo sapiens
  CDR3 for beta chain variable domain of TCR clone 84781 (TRBV4-1, TRBJ2-7)
CASSLTAGQATYEQYF

SEQ ID NO: 169563 - protein, 16 aa, Homo sapiens
  CDR3 for alpha chain variable domain of TCR clone 84782 (TRAV20, TRAJ10)
CAVLRGLTGGGNKLTF

SEQ ID NO: 169564 - protein, 14 aa, Homo sapiens
  CDR3 for beta chain variable domain of TCR clone 84782 (TRBV11-3, TRBJ2-1)
CASSATTSGSIQFF

SEQ ID NO: 169565 - protein, 13 aa, Homo sapiens
  CDR3 for alpha chain variable domain of TCR clone 84783 (TRAV29/DV5, TRAJ31)
CAASRNNNARLMF

SEQ ID NO: 169566 - protein, 14 aa, Homo sapiens
  CDR3 for beta chain variable domain of TCR clone 84783 (TRBV19, TRBJ2-7)
CASSIFAGTYEQYF

SEQ ID NO: 169567 - protein, 15 aa, Homo sapiens
  CDR3 for alpha chain variable domain of TCR clone 84784 (TRAV27, TRAJ38)
CAARRNAGNNRKLLW

SEQ ID NO: 169568 - protein, 13 aa, Homo sapiens
  CDR3 for beta chain variable domain of TCR clone 84784 (TRBV10-3, TRBJ2-7)
CASKLAVNYEQYF

SEQ ID NO: 169569 - protein, 16 aa, Homo sapiens
  CDR3 for alpha chain variable domain of TCR clone 84785 (TRAV12-2, TRAJ32)
CAVNLGQGGATNKLIF

SEQ ID NO: 169570 - protein, 13 aa, Homo sapiens
  CDR3 for beta chain variable domain of TCR clone 84785 (TRBV9, TRBJ2-2)
CDSSPRPAGELFF

SEQ ID NO: 169571 - protein, 15 aa, Homo sapiens
  CDR3 for alpha chain variable domain of TCR clone 84786 (TRAV35, TRAJ23)
CAGPLGNNQGGKLTF

SEQ ID NO: 169572 - protein, 14 aa, Homo sapiens
  CDR3 for beta chain variable domain of TCR clone 84786 (TRBV7-9, TRBJ1-1)
CASTPLQSYTEAFF

SEQ ID NO: 169573 - protein, 13 aa, Homo sapiens
  CDR3 for alpha chain variable domain of TCR clone 84787 (TRAV12-2, TRAJ20)
CAVYPSNDYKLSF

SEQ ID NO: 169574 - protein, 15 aa, Homo sapiens
  CDR3 for beta chain variable domain of TCR clone 84787 (TRBV27, TRBJ2-5)
CASSFYPRGGETQYF

SEQ ID NO: 169575 - protein, 12 aa, Homo sapiens
  CDR3 for alpha chain variable domain of TCR clone 84788 (TRAV8-1, TRAJ26)
CAVKNYGQNFVF

SEQ ID NO: 169576 - protein, 12 aa, Homo sapiens
  CDR3 for beta chain variable domain of TCR clone 84788 (TRBV5-5, TRBJ2-5)
CASSYFGETQYF

SEQ ID NO: 169577 - protein, 14 aa, Homo sapiens
  CDR3 for alpha chain variable domain of TCR clone 84789 (TRAV1-2, TRAJ8)
CAVREDTGFQKLLF

SEQ ID NO: 169578 - protein, 14 aa, Homo sapiens
  CDR3 for beta chain variable domain of TCR clone 84789 (TRBV15, TRBJ2-3)
CATRSGTSTDTQYF

SEQ ID NO: 169579 - protein, 13 aa, Homo sapiens
  CDR3 for alpha chain variable domain of TCR clone 84790 (TRAV13-2, TRAJ13)
CAERIWGYQKVTF

SEQ ID NO: 169580 - protein, 12 aa, Homo sapiens
  CDR3 for beta chain variable domain of TCR clone 84790 (TRBV11-2, TRBJ2-2)
CASSLPTGELFF

SEQ ID NO: 169581 - protein, 21 aa, Homo sapiens
  CDR3 for alpha chain variable domain of TCR clone 84791 (TRAV8-3, TRAJ32)
CAVEVVLQTSSSLELALCLLP

SEQ ID NO: 169582 - protein, 12 aa, Homo sapiens
  CDR3 for beta chain variable domain of TCR clone 84791 (TRBV7-8, TRBJ2-7)
CASSLGDREQYF

SEQ ID NO: 169583 - protein, 16 aa, Homo sapiens
  CDR3 for alpha chain variable domain of TCR clone 84792 (TRAV3, TRAJ37)
CAVRGKGSGNTGKRIF

SEQ ID NO: 169584 - protein, 15 aa, Homo sapiens
  CDR3 for beta chain variable domain of TCR clone 84792 (TRBV20-1, TRBJ2-1)
CSARGGTRYYNEQFF

SEQ ID NO: 169585 - protein, 15 aa, Homo sapiens
  CDR3 for alpha chain variable domain of TCR clone 84793 (TRAV12-2, TRAJ43)
CAFDMRFGAGTRLTV

SEQ ID NO: 169586 - protein, 13 aa, Homo sapiens
  CDR3 for beta chain variable domain of TCR clone 84793 (TRBV19, TRBJ1-2)
CASSVPGQDGYTF

SEQ ID NO: 169587 - protein, 13 aa, Homo sapiens
  CDR3 for alpha chain variable domain of TCR clone 84794 (TRAV8-3, TRAJ36)
CAVGATGANNLFF

SEQ ID NO: 169588 - protein, 15 aa, Homo sapiens
  CDR3 for beta chain variable domain of TCR clone 84794 (TRBV29-1, TRBJ2-1)
CSVGRHALFYNEQFF

SEQ ID NO: 169589 - protein, 14 aa, Homo sapiens
  CDR3 for alpha chain variable domain of TCR clone 84795 (TRAV17, TRAJ57)
CATDPQGGSEQLVF

SEQ ID NO: 169590 - protein, 18 aa, Homo sapiens
  CDR3 for beta chain variable domain of TCR clone 84795 (TRBV6-6, TRBJ1-3)
CASSYSKWDSISGNTIYF

SEQ ID NO: 169591 - protein, 14 aa, Homo sapiens
  CDR3 for alpha chain variable domain of TCR clone 84796 (TRAV12-3, TRAJ42)
CAMNYGGSQGNPIF

SEQ ID NO: 169592 - protein, 15 aa, Homo sapiens
  CDR3 for beta chain variable domain of TCR clone 84796 (TRBV5-7, TRBJ1-5)
CASSYGKLWDQAQHF

SEQ ID NO: 169593 - protein, 15 aa, Homo sapiens
  CDR3 for alpha chain variable domain of TCR clone 84797 (TRAV30, TRAJ13)
CGTQGATGGYQEVTF

SEQ ID NO: 169594 - protein, 17 aa, Homo sapiens
  CDR3 for beta chain variable domain of TCR clone 84797 (TRBV20-1, TRBJ2-2)
CSARVKRTHVRSGELFF

SEQ ID NO: 169595 - protein, 16 aa, Homo sapiens
  CDR3 for alpha chain variable domain of TCR clone 84798 (TRAV8-3, TRAJ8)
CAVPRDGNTGFQKLVF

SEQ ID NO: 169596 - protein, 14 aa, Homo sapiens
  CDR3 for beta chain variable domain of TCR clone 84798 (TRBV28, TRBJ1-1)
CASSESGRGTDAFF

SEQ ID NO: 169597 - protein, 14 aa, Homo sapiens
  CDR3 for alpha chain variable domain of TCR clone 84799 (TRAV12-1, TRAJ17)
CVVNYKAAGNKLAF

SEQ ID NO: 169598 - protein, 14 aa, Homo sapiens
  CDR3 for beta chain variable domain of TCR clone 84799 (TRBV7-2, TRBJ2-7)
CASRSQGAAYEQYF

SEQ ID NO: 169599 - protein, 17 aa, Homo sapiens
  CDR3 for alpha chain variable domain of TCR clone 84800 (TRAV26-1, TRAJ36)
CIVRPPGDQTGANNPFF

SEQ ID NO: 169600 - protein, 15 aa, Homo sapiens
  CDR3 for beta chain variable domain of TCR clone 84800 (TRBV10-3, TRBJ2-6)
CATPAAASGANVLTF

SEQ ID NO: 169601 - protein, 13 aa, Homo sapiens
  CDR3 for alpha chain variable domain of TCR clone 84801 (TRAV26-2, TRAJ54)
CIPRVGGAKKLVF

SEQ ID NO: 169602 - protein, 16 aa, Homo sapiens
  CDR3 for beta chain variable domain of TCR clone 84801 (TRBV4-1, TRBJ1-1)
CASSSMSERPNTEAFF

SEQ ID NO: 169603 - protein, 16 aa, Homo sapiens
  CDR3 for alpha chain variable domain of TCR clone 84802 (TRAV27, TRAJ13)
CAGAKSDSGGYQKVTF

SEQ ID NO: 169604 - protein, 15 aa, Homo sapiens
  CDR3 for beta chain variable domain of TCR clone 84802 (TRBV29-1, TRBJ2-1)
CSVGRHALFYNEHFF

SEQ ID NO: 169605 - protein, 13 aa, Homo sapiens
  CDR3 for alpha chain variable domain of TCR clone 84803 (TRAV21, TRAJ58)
CSVKESSGSRLTF

SEQ ID NO: 169606 - protein, 17 aa, Homo sapiens
  CDR3 for beta chain variable domain of TCR clone 84803 (TRBV5-1, TRBJ2-3)
CASSLAGWGSVVDTQYF

SEQ ID NO: 169607 - protein, 12 aa, Homo sapiens
  CDR3 for alpha chain variable domain of TCR clone 84804 (TRAV13-1, TRAJ21)
CAAKEGFNKFYF

SEQ ID NO: 169608 - protein, 14 aa, Homo sapiens
  CDR3 for beta chain variable domain of TCR clone 84804 (TRBV7-2, TRBJ2-7)
CASSPKASFYEQYF

SEQ ID NO: 169609 - protein, 16 aa, Homo sapiens
  CDR3 for alpha chain variable domain of TCR clone 84805 (TRAV20, TRAJ22)
CAVQASSSGSARQLTF

SEQ ID NO: 169610 - protein, 13 aa, Homo sapiens
  CDR3 for beta chain variable domain of TCR clone 84805 (TRBV7-2, TRBJ2-5)
CASSQTSVETQCF

SEQ ID NO: 169611 - protein, 12 aa, Homo sapiens
  CDR3 for alpha chain variable domain of TCR clone 84806 (TRAV16, TRAJ21)
CALLGNFNKFYF

SEQ ID NO: 169612 - protein, 13 aa, Homo sapiens
  CDR3 for beta chain variable domain of TCR clone 84806 (TRBV19, TRBJ2-7)
CASRKAGGSEQYF

SEQ ID NO: 169613 - protein, 15 aa, Homo sapiens
  CDR3 for alpha chain variable domain of TCR clone 84807 (TRAV20, TRAJ43)
CAVQAGQSSNNDMRF

SEQ ID NO: 169614 - protein, 13 aa, Homo sapiens
  CDR3 for beta chain variable domain of TCR clone 84807 (TRBV27, TRBJ1-1)
CASSLSIGAEAFF

SEQ ID NO: 169615 - protein, 21 aa, Homo sapiens
  CDR3 for alpha chain variable domain of TCR clone 84808 (TRAV6, TRAJ36)
CARQTTSSLGLERDSPLFPIS

SEQ ID NO: 169616 - protein, 15 aa, Homo sapiens
  CDR3 for beta chain variable domain of TCR clone 84808 (TRBV28, TRBJ1-5)
CASSRTGGYVQPQHF

SEQ ID NO: 169617 - protein, 13 aa, Homo sapiens
  CDR3 for alpha chain variable domain of TCR clone 84809 (TRAV3, TRAJ20)
CSVRDTPRYKLSF

SEQ ID NO: 169618 - protein, 14 aa, Homo sapiens
  CDR3 for beta chain variable domain of TCR clone 84809 (TRBV11-1, TRBJ2-7)
CASTFAVPSYEQYF

SEQ ID NO: 169619 - protein, 12 aa, Homo sapiens
  CDR3 for alpha chain variable domain of TCR clone 84810 (TRAV21, TRAJ30)
CAVMNRDDKIIL

SEQ ID NO: 169620 - protein, 17 aa, Homo sapiens
  CDR3 for beta chain variable domain of TCR clone 84810 (TRBV5-1, TRBJ1-1)
CASRPIRTGGVNTEAFF

SEQ ID NO: 169621 - protein, 16 aa, Homo sapiens
  CDR3 for alpha chain variable domain of TCR clone 84811 (TRAV30, TRAJ24)
CGTEIVDADSWGKFKF

SEQ ID NO: 169622 - protein, 14 aa, Homo sapiens
  CDR3 for beta chain variable domain of TCR clone 84811 (TRBV7-2, TRBJ1-2)
CASSQTGSTYGYTF

SEQ ID NO: 169623 - protein, 11 aa, Homo sapiens
  CDR3 for alpha chain variable domain of TCR clone 84812 (TRAV17, TRAJ43)
CATPRSNDMRL

SEQ ID NO: 169624 - protein, 15 aa, Homo sapiens
  CDR3 for beta chain variable domain of TCR clone 84812 (TRBV11-2, TRBJ2-1)
CASSLGTSGLNEQFF

SEQ ID NO: 169625 - protein, 13 aa, Homo sapiens
  CDR3 for alpha chain variable domain of TCR clone 84813 (TRAV23/DV6, TRAJ21)
CAASIGNFNKFYF

SEQ ID NO: 169626 - protein, 16 aa, Homo sapiens
  CDR3 for beta chain variable domain of TCR clone 84813 (TRBV19, TRBJ2-1)
CASSKAGPSSYNEQFF

SEQ ID NO: 169627 - protein, 14 aa, Homo sapiens
  CDR3 for alpha chain variable domain of TCR clone 84814 (TRAV12-2, TRAJ17)
CAVLFKAAGNKLTF

SEQ ID NO: 169628 - protein, 17 aa, Homo sapiens
  CDR3 for beta chain variable domain of TCR clone 84814 (TRBV18, TRBJ2-2)
CASSPSDPWQNTGELFF

SEQ ID NO: 169629 - protein, 15 aa, Homo sapiens
  CDR3 for alpha chain variable domain of TCR clone 84815 (TRAV8-3, TRAJ11)
CAVGLLNSGYSTLTF

SEQ ID NO: 169630 - protein, 14 aa, Homo sapiens
  CDR3 for beta chain variable domain of TCR clone 84815 (TRBV20-1, TRBJ2-5)
CSATGLAVQETQYF

SEQ ID NO: 169631 - protein, 14 aa, Homo sapiens
  CDR3 for alpha chain variable domain of TCR clone 84816 (TRAV12-2, TRAJ13)
CAVKKTGGYQKVTF

SEQ ID NO: 169632 - protein, 14 aa, Homo sapiens
  CDR3 for beta chain variable domain of TCR clone 84816 (TRBV7-2, TRBJ2-7)
CASSPKTSFYEQYV

SEQ ID NO: 169633 - protein, 12 aa, Homo sapiens
  CDR3 for alpha chain variable domain of TCR clone 84817 (TRAV1-1, TRAJ43)
CAPRVSSNDMRF

SEQ ID NO: 169634 - protein, 15 aa, Homo sapiens
  CDR3 for beta chain variable domain of TCR clone 84817 (TRBV5-1, TRBJ2-7)
CASSSGDFTTYEQYF

SEQ ID NO: 169635 - protein, 15 aa, Homo sapiens
  CDR3 for alpha chain variable domain of TCR clone 84818 (TRAV27, TRAJ50)
CAGVGRGTSYDTVIF

SEQ ID NO: 169636 - protein, 14 aa, Homo sapiens
  CDR3 for beta chain variable domain of TCR clone 84818 (TRBV7-2, TRBJ1-1)
CASSFYDLNTEAFF

SEQ ID NO: 169637 - protein, 17 aa, Homo sapiens
  CDR3 for alpha chain variable domain of TCR clone 84819 (TRAV16, TRAJ58)
CITVLSNGETSGSRWTF

SEQ ID NO: 169638 - protein, 17 aa, Homo sapiens
  CDR3 for beta chain variable domain of TCR clone 84819 (TRBV18, TRBJ2-1)
CASSKGLSGGADNEQFF

SEQ ID NO: 169639 - protein, 13 aa, Homo sapiens
  CDR3 for alpha chain variable domain of TCR clone 84820 (TRAV21, TRAJ27)
CAARPGNAGKSTF

SEQ ID NO: 169640 - protein, 14 aa, Homo sapiens
  CDR3 for beta chain variable domain of TCR clone 84820 (TRBV28, TRBJ2-3)
CASSWRGRADTQYF

SEQ ID NO: 169641 - protein, 17 aa, Homo sapiens
  CDR3 for alpha chain variable domain of TCR clone 84821 (TRAV13-1, TRAJ52)
CAASAGAGGTSYGKLTF

SEQ ID NO: 169642 - protein, 15 aa, Homo sapiens
  CDR3 for beta chain variable domain of TCR clone 84821 (TRBV2, TRBJ2-1)
CASSELAGSYNEQFF

SEQ ID NO: 169643 - protein, 14 aa, Homo sapiens
  CDR3 for alpha chain variable domain of TCR clone 84822 (TRAV12-2, TRAJ53)
CAVKGGGSNSKLTF

SEQ ID NO: 169644 - protein, 14 aa, Homo sapiens
  CDR3 for beta chain variable domain of TCR clone 84822 (TRBV7-7, TRBJ2-2)
CATRQDSDTGELFF

SEQ ID NO: 169645 - protein, 16 aa, Homo sapiens
  CDR3 for alpha chain variable domain of TCR clone 84823 (TRAV12-3, TRAJ53)
CAMSQGSGGSNYKLTF

SEQ ID NO: 169646 - protein, 13 aa, Homo sapiens
  CDR3 for beta chain variable domain of TCR clone 84823 (TRBV7-2, TRBJ2-5)
CASSQTSVETQYF

SEQ ID NO: 169647 - protein, 15 aa, Homo sapiens
  CDR3 for alpha chain variable domain of TCR clone 84824 (TRAV23/DV6, TRAJ18)
CAARYRGSTLGSLYF

SEQ ID NO: 169648 - protein, 13 aa, Homo sapiens
  CDR3 for beta chain variable domain of TCR clone 84824 (TRBV7-2, TRBJ2-7)
CASSSPSGSEQYF

SEQ ID NO: 169649 - protein, 17 aa, Homo sapiens
  CDR3 for alpha chain variable domain of TCR clone 84825 (TRAV3, TRAJ6)
CAVRDGPRAGGSYLLTF

SEQ ID NO: 169650 - protein, 20 aa, Homo sapiens
  CDR3 for beta chain variable domain of TCR clone 84825 (TRBV28, TRBJ2-1)
CASTPIGRSPGLAGGNEQFF

SEQ ID NO: 169651 - protein, 12 aa, Homo sapiens
  CDR3 for alpha chain variable domain of TCR clone 84826 (TRAV8-3, TRAJ26)
CAGDNYGQNFVF

SEQ ID NO: 169652 - protein, 17 aa, Homo sapiens
  CDR3 for beta chain variable domain of TCR clone 84826 (TRBV18, TRBJ2-1)
CASSKGLSGGADNEQFF

SEQ ID NO: 169653 - protein, 14 aa, Homo sapiens
  CDR3 for alpha chain variable domain of TCR clone 84827 (TRAV17, TRAJ16)
CATADFSDGQKLLF

SEQ ID NO: 169654 - protein, 14 aa, Homo sapiens
  CDR3 for beta chain variable domain of TCR clone 84827 (TRBV7-9, TRBJ2-7)
CASSLDRPTDEQYF

SEQ ID NO: 169655 - protein, 14 aa, Homo sapiens
  CDR3 for alpha chain variable domain of TCR clone 84828 (TRAV17, TRAJ56)
CATVPAGANSKLTF

SEQ ID NO: 169656 - protein, 13 aa, Homo sapiens
  CDR3 for beta chain variable domain of TCR clone 84828 (TRBV19, TRBJ1-2)
CASSVPGQDGYTF

SEQ ID NO: 169657 - protein, 16 aa, Homo sapiens
  CDR3 for alpha chain variable domain of TCR clone 84829 (TRAV3, TRAJ21)
CAVRDIERGNFNKFYF

SEQ ID NO: 169658 - protein, 13 aa, Homo sapiens
  CDR3 for beta chain variable domain of TCR clone 84829 (TRBV27, TRBJ2-7)
CAISLTTGYEQYF

SEQ ID NO: 169659 - protein, 13 aa, Homo sapiens
  CDR3 for alpha chain variable domain of TCR clone 84830 (TRAV2, TRAJ40)
CAVVTSGTYKYIF

SEQ ID NO: 169660 - protein, 13 aa, Homo sapiens
  CDR3 for beta chain variable domain of TCR clone 84830 (TRBV28, TRBJ2-5)
CASSFAGGETQYF

SEQ ID NO: 169661 - protein, 12 aa, Homo sapiens
  CDR3 for alpha chain variable domain of TCR clone 84831 (TRAV12-3, TRAJ17)
CAMTLTGNKLTL

SEQ ID NO: 169662 - protein, 15 aa, Homo sapiens
  CDR3 for beta chain variable domain of TCR clone 84831 (TRBV20-1, TRBJ2-7)
CSARDWVSGMDEQYF

SEQ ID NO: 169663 - protein, 13 aa, Homo sapiens
  CDR3 for alpha chain variable domain of TCR clone 84832 (TRAV27, TRAJ40)
CAGPPSGTYKYIF

SEQ ID NO: 169664 - protein, 15 aa, Homo sapiens
  CDR3 for beta chain variable domain of TCR clone 84832 (TRBV20-1, TRBJ2-7)
CSARDRVSGMDEQYF

SEQ ID NO: 169665 - protein, 15 aa, Homo sapiens
  CDR3 for alpha chain variable domain of TCR clone 84833 (TRAV3, TRAJ4)
CAVRDGTGGYNKLIF

SEQ ID NO: 169666 - protein, 16 aa, Homo sapiens
  CDR3 for beta chain variable domain of TCR clone 84833 (TRBV27, TRBJ2-2)
CASSSIGVSNTGELFF

SEQ ID NO: 169667 - protein, 14 aa, Homo sapiens
  CDR3 for alpha chain variable domain of TCR clone 84834 (TRAV2, TRAJ39)
CAVEGDNAGNMLTF

SEQ ID NO: 169668 - protein, 14 aa, Homo sapiens
  CDR3 for beta chain variable domain of TCR clone 84834 (TRBV28, TRBJ2-7)
CARSLRARGNEQYF

SEQ ID NO: 169669 - protein, 13 aa, Homo sapiens
  CDR3 for alpha chain variable domain of TCR clone 84835 (TRAV30, TRAJ34)
WGTVGYNTDKLIF

SEQ ID NO: 169670 - protein, 16 aa, Homo sapiens
  CDR3 for beta chain variable domain of TCR clone 84835 (TRBV7-9, TRBJ1-2)
CASSLGFSSGEDGYTF

SEQ ID NO: 169671 - protein, 12 aa, Homo sapiens
  CDR3 for alpha chain variable domain of TCR clone 84836 (TRAV12-3, TRAJ17)
CAMTLTGNKLTF

SEQ ID NO: 169672 - protein, 15 aa, Homo sapiens
  CDR3 for beta chain variable domain of TCR clone 84836 (TRBV18, TRBJ2-1)
CASLPDRGRDNEQFF

SEQ ID NO: 169673 - protein, 17 aa, Homo sapiens
  CDR3 for alpha chain variable domain of TCR clone 84837 (TRAV8-6, TRAJ58)
CPVSSWVGETSGSRLTF

SEQ ID NO: 169674 - protein, 14 aa, Homo sapiens
  CDR3 for beta chain variable domain of TCR clone 84837 (TRBV4-2, TRBJ2-1)
CASGLDRAYNEQFF

SEQ ID NO: 169675 - protein, 16 aa, Homo sapiens
  CDR3 for alpha chain variable domain of TCR clone 84838 (TRAV12-3, TRAJ58)
CAMTDTEETSGSRFTF

SEQ ID NO: 169676 - protein, 22 aa, Homo sapiens
  CDR3 for beta chain variable domain of TCR clone 84838 (TRBV23-1, TRBJ2-7)
CASSRRLDSGQGYVGGGYEQYF

SEQ ID NO: 169677 - protein, 14 aa, Homo sapiens
  CDR3 for alpha chain variable domain of TCR clone 84839 (TRAV1-2, TRAJ8)
CAVREDTGFQKLVF

SEQ ID NO: 169678 - protein, 12 aa, Homo sapiens
  CDR3 for beta chain variable domain of TCR clone 84839 (TRBV7-9, TRBJ2-2)
CASSLDTGELFF

SEQ ID NO: 169679 - protein, 14 aa, Homo sapiens
  CDR3 for alpha chain variable domain of TCR clone 84840 (TRAV2, TRAJ37)
CAVDFTSNTGKLIF

SEQ ID NO: 169680 - protein, 13 aa, Homo sapiens
  CDR3 for beta chain variable domain of TCR clone 84840 (TRBV24-1, TRBJ2-3)
CATSTGGTDTQYF

SEQ ID NO: 169681 - protein, 13 aa, Homo sapiens
  CDR3 for alpha chain variable domain of TCR clone 84841 (TRAV13-1, TRAJ23)
CAANQDQGGKLIF

SEQ ID NO: 169682 - protein, 14 aa, Homo sapiens
  CDR3 for beta chain variable domain of TCR clone 84841 (TRBV7-2, TRBJ2-7)
CASSPKTSFYEQYF

SEQ ID NO: 169683 - protein, 14 aa, Homo sapiens
  CDR3 for alpha chain variable domain of TCR clone 84842 (TRAV2, TRAJ9)
CAVEDRSGGFKTIF

SEQ ID NO: 169684 - protein, 15 aa, Homo sapiens
  CDR3 for beta chain variable domain of TCR clone 84842 (TRBV27, TRBJ2-7)
CASSTAGTGSYEQYF

SEQ ID NO: 169685 - protein, 13 aa, Homo sapiens
  CDR3 for alpha chain variable domain of TCR clone 84843 (TRAV12-2, TRAJ30)
CAVNLNRDDKIIF

SEQ ID NO: 169686 - protein, 14 aa, Homo sapiens
  CDR3 for beta chain variable domain of TCR clone 84843 (TRBV7-2, TRBJ2-7)
CASSLGRASYEQYF

SEQ ID NO: 169687 - protein, 15 aa, Homo sapiens
  CDR3 for alpha chain variable domain of TCR clone 84844 (TRAV9-2, TRAJ23)
CALSDLYNQGGKLIF

SEQ ID NO: 169688 - protein, 13 aa, Homo sapiens
  CDR3 for beta chain variable domain of TCR clone 84844 (TRBV19, TRBJ2-7)
CASSPRQSYEQYF

SEQ ID NO: 169689 - protein, 16 aa, Homo sapiens
  CDR3 for alpha chain variable domain of TCR clone 84845 (TRAV26-1, TRAJ22)
CIVSLNFFWFCMATDL

SEQ ID NO: 169690 - protein, 15 aa, Homo sapiens
  CDR3 for beta chain variable domain of TCR clone 84845 (TRBV4-2, TRBJ1-2)
CASSQRTGGRDGYTF

SEQ ID NO: 169691 - protein, 15 aa, Homo sapiens
  CDR3 for alpha chain variable domain of TCR clone 84846 (TRAV3, TRAJ5)
CAVRDLDTGRGALTF

SEQ ID NO: 169692 - protein, 14 aa, Homo sapiens
  CDR3 for beta chain variable domain of TCR clone 84846 (TRBV25-1, TRBJ1-1)
CASTHLGGNTEAFF

SEQ ID NO: 169693 - protein, 16 aa, Homo sapiens
  CDR3 for alpha chain variable domain of TCR clone 84847 (TRAV16, TRAJ4)
CSLSRMFSGGYNKLIF

SEQ ID NO: 169694 - protein, 14 aa, Homo sapiens
  CDR3 for beta chain variable domain of TCR clone 84847 (TRBV4-1, TRBJ2-2)
CASSQAVNTGELFF

SEQ ID NO: 169695 - protein, 10 aa, Homo sapiens
  CDR3 for alpha chain variable domain of TCR clone 84848 (TRAV35, TRAJ48)
CAGTNIKLTF

SEQ ID NO: 169696 - protein, 14 aa, Homo sapiens
  CDR3 for beta chain variable domain of TCR clone 84848 (TRBV11-2, TRBJ2-7)
CASSLGAGAYEQYF

SEQ ID NO: 169697 - protein, 13 aa, Homo sapiens
  CDR3 for alpha chain variable domain of TCR clone 84849 (TRAV20, TRAJ45)
CAVKKSRCRRTHL

SEQ ID NO: 169698 - protein, 14 aa, Homo sapiens
  CDR3 for beta chain variable domain of TCR clone 84849 (TRBV15, TRBJ2-5)
CATSIGGLGETQYF

SEQ ID NO: 169699 - protein, 20 aa, Homo sapiens
  CDR3 for alpha chain variable domain of TCR clone 84850 (TRAV26-1, TRAJ42)
CCVLLHRQTYYGGSQGNLIF

SEQ ID NO: 169700 - protein, 16 aa, Homo sapiens
  CDR3 for beta chain variable domain of TCR clone 84850 (TRBV7-3, TRBJ2-2)
FASSLKRGTLSGELFF

SEQ ID NO: 169701 - protein, 14 aa, Homo sapiens
  CDR3 for alpha chain variable domain of TCR clone 84851 (TRAV3, TRAJ21)
CAVRDKYNFNKFYF

SEQ ID NO: 169702 - protein, 13 aa, Homo sapiens
  CDR3 for beta chain variable domain of TCR clone 84851 (TRBV20-1, TRBJ2-2)
CSASAAGTGELFF

SEQ ID NO: 169703 - protein, 13 aa, Homo sapiens
  CDR3 for alpha chain variable domain of TCR clone 84852 (TRAV13-1, TRAJ13)
CAASKGGYKKVTF

SEQ ID NO: 169704 - protein, 16 aa, Homo sapiens
  CDR3 for beta chain variable domain of TCR clone 84852 (TRBV18, TRBJ1-2)
CASSPPERVTIYGYTF

SEQ ID NO: 169705 - protein, 13 aa, Homo sapiens
  CDR3 for alpha chain variable domain of TCR clone 84853 (TRAV12-3, TRAJ31)
CAMSANNSARLMF

SEQ ID NO: 169706 - protein, 16 aa, Homo sapiens
  CDR3 for beta chain variable domain of TCR clone 84853 (TRBV7-9, TRBJ1-2)
CASSLGFSSGEDGYTF

SEQ ID NO: 169707 - protein, 14 aa, Homo sapiens
  CDR3 for alpha chain variable domain of TCR clone 84854 (TRAV8-3, TRAJ7)
CAAIELYGNNRLAF

SEQ ID NO: 169708 - protein, 15 aa, Homo sapiens
  CDR3 for beta chain variable domain of TCR clone 84854 (TRBV3-1, TRBJ2-1)
CASSTGDTNYNEQFL

SEQ ID NO: 169709 - protein, 13 aa, Homo sapiens
  CDR3 for alpha chain variable domain of TCR clone 84855 (TRAV13-1, TRAJ5)
CAARVTGRRALTF

SEQ ID NO: 169710 - protein, 15 aa, Homo sapiens
  CDR3 for beta chain variable domain of TCR clone 84855 (TRBV7-9, TRBJ2-7)
SASSPGGGLTYEQYF

SEQ ID NO: 169711 - protein, 14 aa, Homo sapiens
  CDR3 for alpha chain variable domain of TCR clone 84856 (TRAV12-2, TRAJ6)
CASKWGGGSYIPTF

SEQ ID NO: 169712 - protein, 13 aa, Homo sapiens
  CDR3 for beta chain variable domain of TCR clone 84856 (TRBV2, TRBJ1-1)
CASSEGGNTEALF

SEQ ID NO: 169713 - protein, 19 aa, Homo sapiens
  CDR3 for alpha chain variable domain of TCR clone 84857 (TRAV26-1, TRAJ52)
CIVRAHRNAGGTSYGKLTF

SEQ ID NO: 169714 - protein, 15 aa, Homo sapiens
  CDR3 for beta chain variable domain of TCR clone 84857 (TRBV29-1, TRBJ2-1)
CSRRDRKSSYNEQFF

SEQ ID NO: 169715 - protein, 16 aa, Homo sapiens
  CDR3 for alpha chain variable domain of TCR clone 84858 (TRAV30, TRAJ24)
CGTEIVDADSWGKFQF

SEQ ID NO: 169716 - protein, 16 aa, Homo sapiens
  CDR3 for beta chain variable domain of TCR clone 84858 (TRBV7-3, TRBJ2-2)
CASSLKRWTLSGELFF

SEQ ID NO: 169717 - protein, 14 aa, Homo sapiens
  CDR3 for alpha chain variable domain of TCR clone 84859 (TRAV9-2, TRAJ39)
CALYIYNAGNMLTF

SEQ ID NO: 169718 - protein, 14 aa, Homo sapiens
  CDR3 for beta chain variable domain of TCR clone 84859 (TRBV20-1, TRBJ2-3)
CSARGGTSTDTQYF

SEQ ID NO: 169719 - protein, 14 aa, Homo sapiens
  CDR3 for alpha chain variable domain of TCR clone 84860 (TRAV12-2, TRAJ13)
CAVKKTGGYQKVTL

SEQ ID NO: 169720 - protein, 15 aa, Homo sapiens
  CDR3 for beta chain variable domain of TCR clone 84860 (TRBV6-3, TRBJ2-7)
CASSSPGTVFYEQYF

SEQ ID NO: 169721 - protein, 12 aa, Homo sapiens
  CDR3 for alpha chain variable domain of TCR clone 84861 (TRAV41, TRAJ58)
CAVETSGSRLTF

SEQ ID NO: 169722 - protein, 12 aa, Homo sapiens
  CDR3 for beta chain variable domain of TCR clone 84861 (TRBV11-2, TRBJ2-2)
CASSLGGGELFF

SEQ ID NO: 169723 - protein, 13 aa, Homo sapiens
  CDR3 for alpha chain variable domain of TCR clone 84862 (TRAV17, TRAJ40)
CATRPSGTYKYIF

SEQ ID NO: 169724 - protein, 16 aa, Homo sapiens
  CDR3 for beta chain variable domain of TCR clone 84862 (TRBV11-2, TRBJ2-7)
CASSPTTGGVSYEQYF

SEQ ID NO: 169725 - protein, 12 aa, Homo sapiens
  CDR3 for alpha chain variable domain of TCR clone 84863 (TRAV21, TRAJ13)
PVPSGGYQKVTF

SEQ ID NO: 169726 - protein, 15 aa, Homo sapiens
  CDR3 for beta chain variable domain of TCR clone 84863 (TRBV20-1, TRBJ2-7)
CSARDRVSGMDEQYF

SEQ ID NO: 169727 - protein, 15 aa, Homo sapiens
  CDR3 for alpha chain variable domain of TCR clone 84864 (TRAV8-3, TRAJ21)
CAVGALPPRGYKFSF

SEQ ID NO: 169728 - protein, 15 aa, Homo sapiens
  CDR3 for beta chain variable domain of TCR clone 84864 (TRBV7-8, TRBJ1-5)
CASSLERRGLEPQHF

SEQ ID NO: 169729 - protein, 14 aa, Homo sapiens
  CDR3 for alpha chain variable domain of TCR clone 84865 (TRAV8-4, TRAJ13)
CAVTLSGGYQKVTF

SEQ ID NO: 169730 - protein, 14 aa, Homo sapiens
  CDR3 for beta chain variable domain of TCR clone 84865 (TRBV7-2, TRBJ1-2)
CASSQTASTYGYTF

SEQ ID NO: 169731 - protein, 17 aa, Homo sapiens
  CDR3 for alpha chain variable domain of TCR clone 84866 (TRAV26-1, TRAJ53)
CIVRVDDSGGSNYKLTF

SEQ ID NO: 169732 - protein, 19 aa, Homo sapiens
  CDR3 for beta chain variable domain of TCR clone 84866 (TRBV25-1, TRBJ2-2)
CAILVCRVDRGRKTGELFF

SEQ ID NO: 169733 - protein, 10 aa, Homo sapiens
  CDR3 for alpha chain variable domain of TCR clone 84867 (TRAV23/DV6, TRAJ57)
CAASSTLSQG

SEQ ID NO: 169734 - protein, 12 aa, Homo sapiens
  CDR3 for beta chain variable domain of TCR clone 84867 (TRBV4-3, TRBJ2-1)
CASSLSGYEQFF

SEQ ID NO: 169735 - protein, 13 aa, Homo sapiens
  CDR3 for alpha chain variable domain of TCR clone 84868 (TRAV13-1, TRAJ43)
CAASKDNNNDMRF

SEQ ID NO: 169736 - protein, 14 aa, Homo sapiens
  CDR3 for beta chain variable domain of TCR clone 84868 (TRBV14, TRBJ2-1)
CASSQVQGRGEQFF

SEQ ID NO: 169737 - protein, 18 aa, Homo sapiens
  CDR3 for alpha chain variable domain of TCR clone 84869 (TRAV29/DV5, TRAJ52)
CAAGFRGAGGTSYGKLTF

SEQ ID NO: 169738 - protein, 14 aa, Homo sapiens
  CDR3 for beta chain variable domain of TCR clone 84869 (TRBV5-5, TRBJ1-5)
CASSGQGVDQPQHF

SEQ ID NO: 169739 - protein, 14 aa, Homo sapiens
  CDR3 for alpha chain variable domain of TCR clone 84870 (TRAV8-4, TRAJ54)
CAVSEVLGAQKLVF

SEQ ID NO: 169740 - protein, 16 aa, Homo sapiens
  CDR3 for beta chain variable domain of TCR clone 84870 (TRBV12-5, TRBJ2-5)
CASGPRTSGNQETQYF

SEQ ID NO: 169741 - protein, 15 aa, Homo sapiens
  CDR3 for alpha chain variable domain of TCR clone 84871 (TRAV8-3, TRAJ45)
CASSYPGGGADGLTF

SEQ ID NO: 169742 - protein, 15 aa, Homo sapiens
  CDR3 for beta chain variable domain of TCR clone 84871 (TRBV20-1, TRBJ2-7)
CSARDRVSGMDEQYF

SEQ ID NO: 169743 - protein, 13 aa, Homo sapiens
  CDR3 for alpha chain variable domain of TCR clone 84872 (TRAV8-1, TRAJ30)
CAVIMNRDDKIIF

SEQ ID NO: 169744 - protein, 14 aa, Homo sapiens
  CDR3 for beta chain variable domain of TCR clone 84872 (TRBV7-2, TRBJ1-6)
CASSLQGANAPLHF

SEQ ID NO: 169745 - protein, 18 aa, Homo sapiens
  CDR3 for alpha chain variable domain of TCR clone 84873 (TRAV26-1, TRAJ5)
CIVRIVPPRDTGRRALTF

SEQ ID NO: 169746 - protein, 15 aa, Homo sapiens
  CDR3 for beta chain variable domain of TCR clone 84873 (TRBV7-9, TRBJ2-7)
CASSLPMGQANEQYF

SEQ ID NO: 169747 - protein, 14 aa, Homo sapiens
  CDR3 for alpha chain variable domain of TCR clone 84874 (TRAV17, TRAJ54)
CATDANPGAQKLVF

SEQ ID NO: 169748 - protein, 12 aa, Homo sapiens
  CDR3 for beta chain variable domain of TCR clone 84874 (TRBV7-9, TRBJ2-7)
CASSIKREEQYF

SEQ ID NO: 169749 - protein, 11 aa, Homo sapiens
  CDR3 for alpha chain variable domain of TCR clone 84875 (TRAV13-1, TRAJ49)
CACVGGNQFYF

SEQ ID NO: 169750 - protein, 16 aa, Homo sapiens
  CDR3 for beta chain variable domain of TCR clone 84875 (TRBV11-3, TRBJ2-2)
CASSLRTGNLIGELFF

SEQ ID NO: 169751 - protein, 11 aa, Homo sapiens
  CDR3 for alpha chain variable domain of TCR clone 84876 (TRAV13-1, TRAJ33)
CAANSNYQLIW

SEQ ID NO: 169752 - protein, 15 aa, Homo sapiens
  CDR3 for beta chain variable domain of TCR clone 84876 (TRBV7-2, TRBJ2-3)
CASSLGGGGRDTQYF

SEQ ID NO: 169753 - protein, 14 aa, Homo sapiens
  CDR3 for alpha chain variable domain of TCR clone 84877 (TRAV12-2, TRAJ17)
CAVLFKAAGNKLTF

SEQ ID NO: 169754 - protein, 14 aa, Homo sapiens
  CDR3 for beta chain variable domain of TCR clone 84877 (TRBV5-1, TRBJ2-7)
CASSLTGSGYEQYF

SEQ ID NO: 169755 - protein, 17 aa, Homo sapiens
  CDR3 for alpha chain variable domain of TCR clone 84878 (TRAV3, TRAJ12)
CAVRDGGRMDSSYRLIF

SEQ ID NO: 169756 - protein, 13 aa, Homo sapiens
  CDR3 for beta chain variable domain of TCR clone 84878 (TRBV15, TRBJ1-6)
CATSGGLNSPLHF

SEQ ID NO: 169757 - protein, 12 aa, Homo sapiens
  CDR3 for alpha chain variable domain of TCR clone 84879 (TRAV26-2, TRAJ21)
CILQGNFNKFYF

SEQ ID NO: 169758 - protein, 14 aa, Homo sapiens
  CDR3 for beta chain variable domain of TCR clone 84879 (TRBV12-4, TRBJ1-1)
CASSLGTGGTEAFF

SEQ ID NO: 169759 - protein, 11 aa, Homo sapiens
  CDR3 for alpha chain variable domain of TCR clone 84880 (TRAV12-3, TRAJ20)
CAMSYDYKISF

SEQ ID NO: 169760 - protein, 14 aa, Homo sapiens
  CDR3 for beta chain variable domain of TCR clone 84880 (TRBV7-2, TRBJ2-7)
CASSPKTSFYEQYF

SEQ ID NO: 169761 - protein, 23 aa, Homo sapiens
  CDR3 for alpha chain variable domain of TCR clone 84881 (TRAV8-3, TRAJ38)
CAVGASNAGNNHIKNPDPAVYQL

SEQ ID NO: 169762 - protein, 15 aa, Homo sapiens
  CDR3 for beta chain variable domain of TCR clone 84881 (TRBV11-3, TRBJ1-3)
CASSLFGPSGNTIYF

SEQ ID NO: 169763 - protein, 15 aa, Homo sapiens
  CDR3 for alpha chain variable domain of TCR clone 84882 (TRAV3, TRAJ5)
CAVRDRKTGRRALTF

SEQ ID NO: 169764 - protein, 15 aa, Homo sapiens
  CDR3 for beta chain variable domain of TCR clone 84882 (TRBV9, TRBJ1-6)
CASSVAGTGDSPLHF

SEQ ID NO: 169765 - protein, 10 aa, Homo sapiens
  CDR3 for alpha chain variable domain of TCR clone 84883 (TRAV17, TRAJ52)
SATSYGKLTF

SEQ ID NO: 169766 - protein, 13 aa, Homo sapiens
  CDR3 for beta chain variable domain of TCR clone 84883 (TRBV29-1, TRBJ2-5)
CGVGGTSAETQYF

SEQ ID NO: 169767 - protein, 13 aa, Homo sapiens
  CDR3 for alpha chain variable domain of TCR clone 84884 (TRAV8-3, TRAJ28)
CAVGAVGSYQLTF

SEQ ID NO: 169768 - protein, 15 aa, Homo sapiens
  CDR3 for beta chain variable domain of TCR clone 84884 (TRBV7-2, TRBJ2-1)
CASSSDSLNYNEQFF

SEQ ID NO: 169769 - protein, 10 aa, Homo sapiens
  CDR3 for alpha chain variable domain of TCR clone 84885 (TRAV25, TRAJ42)
CAGSQGNLIF

SEQ ID NO: 169770 - protein, 13 aa, Homo sapiens
  CDR3 for beta chain variable domain of TCR clone 84885 (TRBV10-3, TRBJ2-7)
CASKLAVNYEQYF

SEQ ID NO: 169771 - protein, 14 aa, Homo sapiens
  CDR3 for alpha chain variable domain of TCR clone 84886 (TRAV17, TRAJ57)
CATDPQGGSEKLVF

SEQ ID NO: 169772 - protein, 17 aa, Homo sapiens
  CDR3 for beta chain variable domain of TCR clone 84886 (TRBV5-1, TRBJ2-2)
CASSLAGLSEGTGELFF

SEQ ID NO: 169773 - protein, 13 aa, Homo sapiens
  CDR3 for alpha chain variable domain of TCR clone 84887 (TRAV13-1, TRAJ39)
CAASIWAGNMLTF

SEQ ID NO: 169774 - protein, 12 aa, Homo sapiens
  CDR3 for beta chain variable domain of TCR clone 84887 (TRBV12-4, TRBJ2-7)
CASSLGGYEQYF

SEQ ID NO: 169775 - protein, 13 aa, Homo sapiens
  CDR3 for alpha chain variable domain of TCR clone 84888 (TRAV1-2, TRAJ24)
CAVTTDSWGKLQF

SEQ ID NO: 169776 - protein, 14 aa, Homo sapiens
  CDR3 for beta chain variable domain of TCR clone 84888 (TRBV18, TRBJ1-5)
CASSPGNSNQPQHF

SEQ ID NO: 169777 - protein, 12 aa, Homo sapiens
  CDR3 for alpha chain variable domain of TCR clone 84889 (TRAV35, TRAJ43)
CAGAYNNNDMRV

SEQ ID NO: 169778 - protein, 14 aa, Homo sapiens
  CDR3 for beta chain variable domain of TCR clone 84889 (TRBV2, TRBJ2-2)
CASSWQGATGELFF

SEQ ID NO: 169779 - protein, 22 aa, Homo sapiens
  CDR3 for alpha chain variable domain of TCR clone 84890 (TRAV3, TRAJ38)
CAVRDCLNAGNNHIQKPDPAVY

SEQ ID NO: 169780 - protein, 14 aa, Homo sapiens
  CDR3 for beta chain variable domain of TCR clone 84890 (TRBV5-5, TRBJ1-5)
CASSGQGVDQPQHF

SEQ ID NO: 169781 - protein, 13 aa, Homo sapiens
  CDR3 for alpha chain variable domain of TCR clone 84891 (TRAV20, TRAJ20)
CAVRWVRDYKPSF

SEQ ID NO: 169782 - protein, 14 aa, Homo sapiens
  CDR3 for beta chain variable domain of TCR clone 84891 (TRBV19, TRBJ2-2)
CASTVTANTGELFF

SEQ ID NO: 169783 - protein, 16 aa, Homo sapiens
  CDR3 for alpha chain variable domain of TCR clone 84892 (TRAV30, TRAJ24)
CGTGIVDADSWGKFQF

SEQ ID NO: 169784 - protein, 15 aa, Homo sapiens
  CDR3 for beta chain variable domain of TCR clone 84892 (TRBV12-4, TRBJ2-2)
CASSPNDSGTGELFF

SEQ ID NO: 169785 - protein, 19 aa, Homo sapiens
  CDR3 for alpha chain variable domain of TCR clone 84893 (TRAV38-1, TRAJ53)
CAFMKHGLESVGSNYKLTF

SEQ ID NO: 169786 - protein, 13 aa, Homo sapiens
  CDR3 for beta chain variable domain of TCR clone 84893 (TRBV19, TRBJ2-7)
CASSPRQSYEQYF

SEQ ID NO: 169787 - protein, 14 aa, Homo sapiens
  CDR3 for alpha chain variable domain of TCR clone 84894 (TRAV26-1, TRAJ34)
CIVRVAYNTDKLIF

SEQ ID NO: 169788 - protein, 15 aa, Homo sapiens
  CDR3 for beta chain variable domain of TCR clone 84894 (TRBV20-1, TRBJ2-7)
CSARVPAAYFYKQYF

SEQ ID NO: 169789 - protein, 12 aa, Homo sapiens
  CDR3 for alpha chain variable domain of TCR clone 84895 (TRAV8-3, TRAJ20)
CAVGANDYKLSF

SEQ ID NO: 169790 - protein, 20 aa, Homo sapiens
  CDR3 for beta chain variable domain of TCR clone 84895 (TRBV19, TRBJ2-1)
CASSISRTVTSTRLNNEQFF

SEQ ID NO: 169791 - protein, 19 aa, Homo sapiens
  CDR3 for alpha chain variable domain of TCR clone 84896 (TRAV13-1, TRAJ52)
CAASPYQNAGGTSYGKLTF

SEQ ID NO: 169792 - protein, 14 aa, Homo sapiens
  CDR3 for beta chain variable domain of TCR clone 84896 (TRBV7-8, TRBJ1-2)
CASSPDSLSYGYTF

SEQ ID NO: 169793 - protein, 11 aa, Homo sapiens
  CDR3 for alpha chain variable domain of TCR clone 84897 (TRAV21, TRAJ34)
CAHYNTDKLIF

SEQ ID NO: 169794 - protein, 18 aa, Homo sapiens
  CDR3 for beta chain variable domain of TCR clone 84897 (TRBV18, TRBJ2-2)
CASSPRRTGGIGTGELFF

SEQ ID NO: 169795 - protein, 12 aa, Homo sapiens
  CDR3 for alpha chain variable domain of TCR clone 84898 (TRAV13-1, TRAJ15)
CAASPAGTALIF

SEQ ID NO: 169796 - protein, 14 aa, Homo sapiens
  CDR3 for beta chain variable domain of TCR clone 84898 (TRBV19, TRBJ2-2)
CASSTLHRSGELFF

SEQ ID NO: 169797 - protein, 13 aa, Homo sapiens
  CDR3 for alpha chain variable domain of TCR clone 84899 (TRAV8-3, TRAJ28)
CAVGAVGSYQLTF

SEQ ID NO: 169798 - protein, 14 aa, Homo sapiens
  CDR3 for beta chain variable domain of TCR clone 84899 (TRBV7-3, TRBJ2-1)
CASSLAGGTNEQFF

SEQ ID NO: 169799 - protein, 15 aa, Homo sapiens
  CDR3 for alpha chain variable domain of TCR clone 84900 (TRAV3, TRAJ5)
CAVRDFDTGRRELTF

SEQ ID NO: 169800 - protein, 13 aa, Homo sapiens
  CDR3 for beta chain variable domain of TCR clone 84900 (TRBV12-4, TRBJ2-7)
CASSPTETYEQYF

SEQ ID NO: 169801 - protein, 14 aa, Homo sapiens
  CDR3 for alpha chain variable domain of TCR clone 84901 (TRAV12-1, TRAJ17)
CVVNYKAAGNKLTF

SEQ ID NO: 169802 - protein, 13 aa, Homo sapiens
  CDR3 for beta chain variable domain of TCR clone 84901 (TRBV20-1, TRBJ2-5)
CSARGDYQETQYF

SEQ ID NO: 169803 - protein, 13 aa, Homo sapiens
  CDR3 for alpha chain variable domain of TCR clone 84902 (TRAV1-2, TRAJ36)
CAVDQTGANNLFF

SEQ ID NO: 169804 - protein, 14 aa, Homo sapiens
  CDR3 for beta chain variable domain of TCR clone 84902 (TRBV20-1, TRBJ2-5)
CSAREMTKQETQYF

SEQ ID NO: 169805 - protein, 11 aa, Homo sapiens
  CDR3 for alpha chain variable domain of TCR clone 84903 (TRAV3, TRAJ32)
CAVREGIMVVL

SEQ ID NO: 169806 - protein, 13 aa, Homo sapiens
  CDR3 for beta chain variable domain of TCR clone 84903 (TRBV2, TRBJ1-1)
CASSEGGNTEAVF

SEQ ID NO: 169807 - protein, 11 aa, Homo sapiens
  CDR3 for alpha chain variable domain of TCR clone 84904 (TRAV21, TRAJ9)
CAVPGGFKTIF

SEQ ID NO: 169808 - protein, 12 aa, Homo sapiens
  CDR3 for beta chain variable domain of TCR clone 84904 (TRBV7-9, TRBJ2-5)
CATSGGARDQYF

SEQ ID NO: 169809 - protein, 13 aa, Homo sapiens
  CDR3 for alpha chain variable domain of TCR clone 84905 (TRAV13-2, TRAJ53)
CAENMGSNYKLTF

SEQ ID NO: 169810 - protein, 13 aa, Homo sapiens
  CDR3 for beta chain variable domain of TCR clone 84905 (TRBV4-1, TRBJ2-2)
CASSQVNTGELFF

SEQ ID NO: 169811 - protein, 12 aa, Homo sapiens
  CDR3 for alpha chain variable domain of TCR clone 84906 (TRAV8-3, TRAJ26)
CAGDNYGQNFVF

SEQ ID NO: 169812 - protein, 14 aa, Homo sapiens
  CDR3 for beta chain variable domain of TCR clone 84906 (TRBV19, TRBJ2-1)
CASSMGSGATEQFF

SEQ ID NO: 169813 - protein, 17 aa, Homo sapiens
  CDR3 for alpha chain variable domain of TCR clone 84907 (TRAV4, TRAJ18)
CLVGERSVGSTLGRLYF

SEQ ID NO: 169814 - protein, 14 aa, Homo sapiens
  CDR3 for beta chain variable domain of TCR clone 84907 (TRBV6-5, TRBJ1-2)
CASSYSGQGGGYTF

SEQ ID NO: 169815 - protein, 11 aa, Homo sapiens
  CDR3 for alpha chain variable domain of TCR clone 84908 (TRAV23/DV6, TRAJ58)
CAARLLRGETS

SEQ ID NO: 169816 - protein, 13 aa, Homo sapiens
  CDR3 for beta chain variable domain of TCR clone 84908 (TRBV11-2, TRBJ2-7)
CASSTSRSLEQYF

SEQ ID NO: 169817 - protein, 13 aa, Homo sapiens
  CDR3 for alpha chain variable domain of TCR clone 84909 (TRAV27, TRAJ39)
CAGVNNAGDMLTF

SEQ ID NO: 169818 - protein, 19 aa, Homo sapiens
  CDR3 for beta chain variable domain of TCR clone 84909 (TRBV5-1, TRBJ2-3)
CASSLWLAGGITTTDTQYF

SEQ ID NO: 169819 - protein, 16 aa, Homo sapiens
  CDR3 for alpha chain variable domain of TCR clone 84910 (TRAV12-3, TRAJ53)
CAMSPGSGGSNYKVTF

SEQ ID NO: 169820 - protein, 11 aa, Homo sapiens
  CDR3 for beta chain variable domain of TCR clone 84910 (TRBV29-1, TRBJ2-5)
CSEDRTGTQYF

SEQ ID NO: 169821 - protein, 15 aa, Homo sapiens
  CDR3 for alpha chain variable domain of TCR clone 84911 (TRAV12-1, TRAJ44)
CVADLPTGNASKLTF

SEQ ID NO: 169822 - protein, 13 aa, Homo sapiens
  CDR3 for beta chain variable domain of TCR clone 84911 (TRBV6-5, TRBJ2-5)
CASSPQGGETQYF

SEQ ID NO: 169823 - protein, 12 aa, Homo sapiens
  CDR3 for alpha chain variable domain of TCR clone 84912 (TRAV12-2, TRAJ34)
CAVSYNTAKLIF

SEQ ID NO: 169824 - protein, 16 aa, Homo sapiens
  CDR3 for beta chain variable domain of TCR clone 84912 (TRBV27, TRBJ2-5)
CASSYGPGGQKETQYF

SEQ ID NO: 169825 - protein, 18 aa, Homo sapiens
  CDR3 for alpha chain variable domain of TCR clone 84913 (TRAV21, TRAJ52)
CAVRPSPAGGTSYGKLTF

SEQ ID NO: 169826 - protein, 12 aa, Homo sapiens
  CDR3 for beta chain variable domain of TCR clone 84913 (TRBV29-1, TRBJ2-3)
CSVVLGADTQYF

SEQ ID NO: 169827 - protein, 15 aa, Homo sapiens
  CDR3 for alpha chain variable domain of TCR clone 84914 (TRAV21, TRAJ53)
CATLNSGGSNYKLTF

SEQ ID NO: 169828 - protein, 15 aa, Homo sapiens
  CDR3 for beta chain variable domain of TCR clone 84914 (TRBV28, TRBJ2-1)
CASSIIAGGRSEQFF

SEQ ID NO: 169829 - protein, 16 aa, Homo sapiens
  CDR3 for alpha chain variable domain of TCR clone 84915 (TRAV30, TRAJ24)
CGTEIVDADSWGKFQF

SEQ ID NO: 169830 - protein, 15 aa, Homo sapiens
  CDR3 for beta chain variable domain of TCR clone 84915 (TRBV3-1, TRBJ2-5)
CASSANLGGPETQYF

SEQ ID NO: 169831 - protein, 12 aa, Homo sapiens
  CDR3 for alpha chain variable domain of TCR clone 84916 (TRAV16, TRAJ10)
CSRTGGGNKLTF

SEQ ID NO: 169832 - protein, 16 aa, Homo sapiens
  CDR3 for beta chain variable domain of TCR clone 84916 (TRBV24-1, TRBJ2-3)
CATSDPGTGATDTQYF

SEQ ID NO: 169833 - protein, 12 aa, Homo sapiens
  CDR3 for alpha chain variable domain of TCR clone 84917 (TRAV17, TRAJ20)
CATLANEYKLSF

SEQ ID NO: 169834 - protein, 14 aa, Homo sapiens
  CDR3 for beta chain variable domain of TCR clone 84917 (TRBV10-3, TRBJ1-2)
CAISEDTPYYGYTF

SEQ ID NO: 169835 - protein, 12 aa, Homo sapiens
  CDR3 for alpha chain variable domain of TCR clone 84918 (TRAV21, TRAJ49)
CAVRNTGHQFYF

SEQ ID NO: 169836 - protein, 12 aa, Homo sapiens
  CDR3 for beta chain variable domain of TCR clone 84918 (TRBV7-9, TRBJ2-7)
CATRTDAYEQYF

SEQ ID NO: 169837 - protein, 21 aa, Homo sapiens
  CDR3 for alpha chain variable domain of TCR clone 84919 (TRAV17, TRAJ53)
TASRAADTASQGGGSNYKLTF

SEQ ID NO: 169838 - protein, 16 aa, Homo sapiens
  CDR3 for beta chain variable domain of TCR clone 84919 (TRBV11-2, TRBJ1-2)
CASSLDTGGADYGYTF

SEQ ID NO: 169839 - protein, 14 aa, Homo sapiens
  CDR3 for alpha chain variable domain of TCR clone 84920 (TRAV8-3, TRAJ4)
CAVGASGGYNKLIF

SEQ ID NO: 169840 - protein, 16 aa, Homo sapiens
  CDR3 for beta chain variable domain of TCR clone 84920 (TRBV4-3, TRBJ2-2)
CASSHLQGSGTGELFL

SEQ ID NO: 169841 - protein, 15 aa, Homo sapiens
  CDR3 for alpha chain variable domain of TCR clone 84921 (TRAV13-1, TRAJ44)
CAASRNTGTASKLTF

SEQ ID NO: 169842 - protein, 14 aa, Homo sapiens
  CDR3 for beta chain variable domain of TCR clone 84921 (TRBV28, TRBJ1-5)
CASSGQALYQPQHF

SEQ ID NO: 169843 - protein, 17 aa, Homo sapiens
  CDR3 for alpha chain variable domain of TCR clone 84922 (TRAV3, TRAJ12)
CAVRDGGRMDSSYKLIF

SEQ ID NO: 169844 - protein, 13 aa, Homo sapiens
  CDR3 for beta chain variable domain of TCR clone 84922 (TRBV15, TRBJ1-6)
CAASGGLNSPLHF

SEQ ID NO: 169845 - protein, 15 aa, Homo sapiens
  CDR3 for alpha chain variable domain of TCR clone 84923 (TRAV38-2/DV8, TRAJ48)
CAYRSGGFGNEKLTL

SEQ ID NO: 169846 - protein, 16 aa, Homo sapiens
  CDR3 for beta chain variable domain of TCR clone 84923 (TRBV28, TRBJ2-7)
CASSPWVATGDLSQYF

SEQ ID NO: 169847 - protein, 15 aa, Homo sapiens
  CDR3 for alpha chain variable domain of TCR clone 84924 (TRAV26-1, TRAJ9)
CIVRESNTGGFKTIF

SEQ ID NO: 169848 - protein, 11 aa, Homo sapiens
  CDR3 for beta chain variable domain of TCR clone 84924 (TRBV7-6, TRBJ2-5)
CASSFQETQFF

SEQ ID NO: 169849 - protein, 14 aa, Homo sapiens
  CDR3 for alpha chain variable domain of TCR clone 84925 (TRAV25, TRAJ27)
CAGPGNTNAGKSNF

SEQ ID NO: 169850 - protein, 16 aa, Homo sapiens
  CDR3 for beta chain variable domain of TCR clone 84925 (TRBV4-1, TRBJ2-6)
CASSQDGGPGANVLTF

SEQ ID NO: 169851 - protein, 15 aa, Homo sapiens
  CDR3 for alpha chain variable domain of TCR clone 84926 (TRAV34, TRAJ38)
CGADFTPGNNRKLIW

SEQ ID NO: 169852 - protein, 16 aa, Homo sapiens
  CDR3 for beta chain variable domain of TCR clone 84926 (TRBV6-1, TRBJ2-3)
CASSEVIGQGTDTQYF

SEQ ID NO: 169853 - protein, 12 aa, Homo sapiens
  CDR3 for alpha chain variable domain of TCR clone 84927 (TRAV12-2, TRAJ31)
FAVNTPDARLMF

SEQ ID NO: 169854 - protein, 15 aa, Homo sapiens
  CDR3 for beta chain variable domain of TCR clone 84927 (TRBV4-2, TRBJ1-1)
CASSQDQGLNTEAFF

SEQ ID NO: 169855 - protein, 12 aa, Homo sapiens
  CDR3 for alpha chain variable domain of TCR clone 84928 (TRAV26-1, TRAJ26)
CIVYNYGQNFVF

SEQ ID NO: 169856 - protein, 15 aa, Homo sapiens
  CDR3 for beta chain variable domain of TCR clone 84928 (TRBV7-2, TRBJ2-3)
CASSLRGGSTDTQYC

SEQ ID NO: 169857 - protein, 16 aa, Homo sapiens
  CDR3 for alpha chain variable domain of TCR clone 84929 (TRAV14/DV4, TRAJ15)
CAMREGPAQAGTALIF

SEQ ID NO: 169858 - protein, 12 aa, Homo sapiens
  CDR3 for beta chain variable domain of TCR clone 84929 (TRBV28, TRBJ2-6)
CASQAGANVLTF

SEQ ID NO: 169859 - protein, 16 aa, Homo sapiens
  CDR3 for alpha chain variable domain of TCR clone 84930 (TRAV8-3, TRAJ44)
CAVGASNTGTASKLTF

SEQ ID NO: 169860 - protein, 15 aa, Homo sapiens
  CDR3 for beta chain variable domain of TCR clone 84930 (TRBV27, TRBJ1-5)
CASTFNRGSNQPQYF

SEQ ID NO: 169861 - protein, 13 aa, Homo sapiens
  CDR3 for alpha chain variable domain of TCR clone 84931 (TRAV27, TRAJ8)
CAGGPTGFQKLVF

SEQ ID NO: 169862 - protein, 15 aa, Homo sapiens
  CDR3 for beta chain variable domain of TCR clone 84931 (TRBV6-1, TRBJ2-7)
CASSESMGDFYEQCF

SEQ ID NO: 169863 - protein, 14 aa, Homo sapiens
  CDR3 for alpha chain variable domain of TCR clone 84932 (TRAV12-2, TRAJ13)
CAVKKTGGYQKVTF

SEQ ID NO: 169864 - protein, 13 aa, Homo sapiens
  CDR3 for beta chain variable domain of TCR clone 84932 (TRBV12-4, TRBJ1-5)
CASSPDRAQPQHF

SEQ ID NO: 169865 - protein, 14 aa, Homo sapiens
  CDR3 for alpha chain variable domain of TCR clone 84933 (TRAV26-1, TRAJ38)
CIADNAGNNRKLIW

SEQ ID NO: 169866 - protein, 14 aa, Homo sapiens
  CDR3 for beta chain variable domain of TCR clone 84933 (TRBV4-1, TRBJ2-2)
CASSQAVNNGELFF

SEQ ID NO: 169867 - protein, 12 aa, Homo sapiens
  CDR3 for alpha chain variable domain of TCR clone 84934 (TRAV2, TRAJ37)
CAVAGNTGKLIF

SEQ ID NO: 169868 - protein, 17 aa, Homo sapiens
  CDR3 for beta chain variable domain of TCR clone 84934 (TRBV28, TRBJ2-5)
CASSAPEGDALQETQYF

SEQ ID NO: 169869 - protein, 11 aa, Homo sapiens
  CDR3 for alpha chain variable domain of TCR clone 84935 (TRAV12-3, TRAJ17)
CAMTLTGNLTF

SEQ ID NO: 169870 - protein, 15 aa, Homo sapiens
  CDR3 for beta chain variable domain of TCR clone 84935 (TRBV20-1, TRBJ2-7)
CSARDRVSGMDEQYF

SEQ ID NO: 169871 - protein, 10 aa, Homo sapiens
  CDR3 for alpha chain variable domain of TCR clone 84936 (TRAV13-1, TRAJ30)
CAARDDKIIF

SEQ ID NO: 169872 - protein, 16 aa, Homo sapiens
  CDR3 for beta chain variable domain of TCR clone 84936 (TRBV7-3, TRBJ2-1)
CASSKPLAGGYNEQFF

SEQ ID NO: 169873 - protein, 13 aa, Homo sapiens
  CDR3 for alpha chain variable domain of TCR clone 84937 (TRAV1-1, TRAJ9)
WAAKNTGGFKTIF

SEQ ID NO: 169874 - protein, 14 aa, Homo sapiens
  CDR3 for beta chain variable domain of TCR clone 84937 (TRBV20-1, TRBJ2-1)
CSAQIGGSANEQFF

SEQ ID NO: 169875 - protein, 10 aa, Homo sapiens
  CDR3 for alpha chain variable domain of TCR clone 84938 (TRAV12-3, TRAJ49)
RAMNDDRFYF

SEQ ID NO: 169876 - protein, 13 aa, Homo sapiens
  CDR3 for beta chain variable domain of TCR clone 84938 (TRBV12-4, TRBJ1-1)
CASSPGTGFEAFF

SEQ ID NO: 169877 - protein, 18 aa, Homo sapiens
  CDR3 for alpha chain variable domain of TCR clone 84939 (TRAV12-3, TRAJ52)
CAMSVGGAGGTSYGKLTF

SEQ ID NO: 169878 - protein, 10 aa, Homo sapiens
  CDR3 for beta chain variable domain of TCR clone 84939 (TRBV7-6, TRBJ2-1)
CQINYNEQFF

SEQ ID NO: 169879 - protein, 13 aa, Homo sapiens
  CDR3 for alpha chain variable domain of TCR clone 84940 (TRAV35, TRAJ57)
CAGSQGGSEKLVF

SEQ ID NO: 169880 - protein, 15 aa, Homo sapiens
  CDR3 for beta chain variable domain of TCR clone 84940 (TRBV20-1, TRBJ1-1)
CSASRGVTGNTEAFF

SEQ ID NO: 169881 - protein, 22 aa, Homo sapiens
  CDR3 for alpha chain variable domain of TCR clone 84941 (TRAV21, )
CAVRQDAGNNHIQNPDPAVYQL

SEQ ID NO: 169882 - protein, 16 aa, Homo sapiens
  CDR3 for beta chain variable domain of TCR clone 84941 (TRBV4-2, TRBJ1-1)
CDSRPLDGGGDTEAFF

SEQ ID NO: 169883 - protein, 14 aa, Homo sapiens
  CDR3 for alpha chain variable domain of TCR clone 84942 (TRAV29/DV5, TRAJ12)
CAATRMDSSYKLIF

SEQ ID NO: 169884 - protein, 13 aa, Homo sapiens
  CDR3 for beta chain variable domain of TCR clone 84942 (TRBV7-2, TRBJ2-5)
CARSYWTGETQYF

SEQ ID NO: 169885 - protein, 12 aa, Homo sapiens
  CDR3 for alpha chain variable domain of TCR clone 84943 (TRAV27, TRAJ13)
CAGVRGYQEVTF

SEQ ID NO: 169886 - protein, 16 aa, Homo sapiens
  CDR3 for beta chain variable domain of TCR clone 84943 (TRBV28, TRBJ2-1)
CASSSSYSGSLNEQFF

SEQ ID NO: 169887 - protein, 12 aa, Homo sapiens
  CDR3 for alpha chain variable domain of TCR clone 84944 (TRAV3, TRAJ20)
CAVRYHDYKLSF

SEQ ID NO: 169888 - protein, 15 aa, Homo sapiens
  CDR3 for beta chain variable domain of TCR clone 84944 (TRBV9, TRBJ1-6)
CASSVAGTGDSPLHF

SEQ ID NO: 169889 - protein, 10 aa, Homo sapiens
  CDR3 for alpha chain variable domain of TCR clone 84945 (TRAV1-2, TRAJ20)
CACNDYKLSF

SEQ ID NO: 169890 - protein, 14 aa, Homo sapiens
  CDR3 for beta chain variable domain of TCR clone 84945 (TRBV20-1, TRBJ1-1)
CSAQTRVGGTEAFF

SEQ ID NO: 169891 - protein, 12 aa, Homo sapiens
  CDR3 for alpha chain variable domain of TCR clone 84946 (TRAV12-3, TRAJ17)
CAMTLTGNKLTF

SEQ ID NO: 169892 - protein, 15 aa, Homo sapiens
  CDR3 for beta chain variable domain of TCR clone 84946 (TRBV12-4, TRBJ2-5)
CASSPGSSRQGTQYF

SEQ ID NO: 169893 - protein, 13 aa, Homo sapiens
  CDR3 for alpha chain variable domain of TCR clone 84947 (TRAV2, TRAJ40)
CAVVTSGTYKYIF

SEQ ID NO: 169894 - protein, 14 aa, Homo sapiens
  CDR3 for beta chain variable domain of TCR clone 84947 (TRBV7-2, TRBJ2-7)
CASSLPPGQGPQYF

SEQ ID NO: 169895 - protein, 14 aa, Homo sapiens
  CDR3 for alpha chain variable domain of TCR clone 84948 (TRAV23/DV6, TRAJ6)
CAASRSGGSYVPTF

SEQ ID NO: 169896 - protein, 17 aa, Homo sapiens
  CDR3 for beta chain variable domain of TCR clone 84948 (TRBV20-1, TRBJ2-1)
CSASASGLAGSYNEQFF

SEQ ID NO: 169897 - protein, 15 aa, Homo sapiens
  CDR3 for alpha chain variable domain of TCR clone 84949 (TRAV21, TRAJ24)
CAARSSTDSWGKLQF

SEQ ID NO: 169898 - protein, 13 aa, Homo sapiens
  CDR3 for beta chain variable domain of TCR clone 84949 (TRBV11-2, TRBJ2-7)
CASSSTGEETQYF

SEQ ID NO: 169899 - protein, 15 aa, Homo sapiens
  CDR3 for alpha chain variable domain of TCR clone 84950 (TRAV21, TRAJ24)
CAARSSTDSWGKLQF

SEQ ID NO: 169900 - protein, 13 aa, Homo sapiens
  CDR3 for beta chain variable domain of TCR clone 84950 (TRBV11-2, TRBJ2-1)
CASSSTGEETQYF

SEQ ID NO: 169901 - protein, 12 aa, Homo sapiens
  CDR3 for alpha chain variable domain of TCR clone 84951 (TRAV12-3, TRAJ17)
CAMTLTGNELTF

SEQ ID NO: 169902 - protein, 15 aa, Homo sapiens
  CDR3 for beta chain variable domain of TCR clone 84951 (TRBV20-1, TRBJ2-7)
CSARYRVSGMDEQYF

SEQ ID NO: 169903 - protein, 12 aa, Homo sapiens
  CDR3 for alpha chain variable domain of TCR clone 84952 (TRAV3, TRAJ31)
CAAQRANASLMF

SEQ ID NO: 169904 - protein, 16 aa, Homo sapiens
  CDR3 for beta chain variable domain of TCR clone 84952 (TRBV4-2, TRBJ1-1)
CASSPSPGRAAPEAFF

SEQ ID NO: 169905 - protein, 14 aa, Homo sapiens
  CDR3 for alpha chain variable domain of TCR clone 84953 (TRAV17, TRAJ15)
CATTTNQAGTALIF

SEQ ID NO: 169906 - protein, 16 aa, Homo sapiens
  CDR3 for beta chain variable domain of TCR clone 84953 (TRBV4-1, TRBJ2-7)
CASSRGDILNSYEHYF

SEQ ID NO: 169907 - protein, 12 aa, Homo sapiens
  CDR3 for alpha chain variable domain of TCR clone 84954 (TRAV8-6, TRAJ43)
CAVSNDNNDMRF

SEQ ID NO: 169908 - protein, 15 aa, Homo sapiens
  CDR3 for beta chain variable domain of TCR clone 84954 (TRBV7-3, TRBJ2-6)
CASSLGGSGANVLTF

SEQ ID NO: 169909 - protein, 14 aa, Homo sapiens
  CDR3 for alpha chain variable domain of TCR clone 84955 (TRAV1-2, TRAJ15)
CAVRDRQAGTALIF

SEQ ID NO: 169910 - protein, 14 aa, Homo sapiens
  CDR3 for beta chain variable domain of TCR clone 84955 (TRBV19, TRBJ2-1)
CASPTFVLSGEQFF

SEQ ID NO: 169911 - protein, 19 aa, Homo sapiens
  CDR3 for alpha chain variable domain of TCR clone 84956 (TRAV26-1, TRAJ52)
CIVRAHRNAGGTSCGKLTF

SEQ ID NO: 169912 - protein, 15 aa, Homo sapiens
  CDR3 for beta chain variable domain of TCR clone 84956 (TRBV29-1, TRBJ2-1)
CSGRDRKSSYNEQFF

SEQ ID NO: 169913 - protein, 14 aa, Homo sapiens
  CDR3 for alpha chain variable domain of TCR clone 84957 (TRAV12-2, TRAJ17)
CAALFKPAGNKLTF

SEQ ID NO: 169914 - protein, 16 aa, Homo sapiens
  CDR3 for beta chain variable domain of TCR clone 84957 (TRBV20-1, TRBJ2-2)
CSASASGIPGAGELFF

SEQ ID NO: 169915 - protein, 11 aa, Homo sapiens
  CDR3 for alpha chain variable domain of TCR clone 84958 (TRAV2, TRAJ33)
CAVESNYQLIW

SEQ ID NO: 169916 - protein, 15 aa, Homo sapiens
  CDR3 for beta chain variable domain of TCR clone 84958 (TRBV4-1, TRBJ2-7)
CASSQNTGRLYEQYF

SEQ ID NO: 169917 - protein, 10 aa, Homo sapiens
  CDR3 for alpha chain variable domain of TCR clone 84959 (TRAV38-2/DV8, TRAJ40)
CASGTYKYIF

SEQ ID NO: 169918 - protein, 15 aa, Homo sapiens
  CDR3 for beta chain variable domain of TCR clone 84959 (TRBV7-9, TRBJ1-6)
CASSSPGRGNSPLHF

SEQ ID NO: 169919 - protein, 12 aa, Homo sapiens
  CDR3 for alpha chain variable domain of TCR clone 84960 (TRAV16, TRAJ56)
CAPTGANSKLTF

SEQ ID NO: 169920 - protein, 17 aa, Homo sapiens
  CDR3 for beta chain variable domain of TCR clone 84960 (TRBV27, TRBJ2-6)
CASSLTGFASGSNVLTF

SEQ ID NO: 169921 - protein, 12 aa, Homo sapiens
  CDR3 for alpha chain variable domain of TCR clone 84961 (TRAV13-1, TRAJ49)
CAASPMGNQFYF

SEQ ID NO: 169922 - protein, 13 aa, Homo sapiens
  CDR3 for beta chain variable domain of TCR clone 84961 (TRBV19, TRBJ1-3)
CASRLSLGNTIYF

SEQ ID NO: 169923 - protein, 14 aa, Homo sapiens
  CDR3 for alpha chain variable domain of TCR clone 84962 (TRAV1-2, TRAJ16)
CAVNRFSVGQKLLF

SEQ ID NO: 169924 - protein, 13 aa, Homo sapiens
  CDR3 for beta chain variable domain of TCR clone 84962 (TRBV29-1, TRBJ1-1)
CSVGDSRNTEAFF

SEQ ID NO: 169925 - protein, 10 aa, Homo sapiens
  CDR3 for alpha chain variable domain of TCR clone 84963 (TRAV13-1, TRAJ27)
CAPLARQINL

SEQ ID NO: 169926 - protein, 13 aa, Homo sapiens
  CDR3 for beta chain variable domain of TCR clone 84963 (TRBV28, TRBJ1-1)
CASSKHGWTEAFS

SEQ ID NO: 169927 - protein, 13 aa, Homo sapiens
  CDR3 for alpha chain variable domain of TCR clone 84964 (TRAV23/DV6, TRAJ27)
CAASKPTQANQPL

SEQ ID NO: 169928 - protein, 14 aa, Homo sapiens
  CDR3 for beta chain variable domain of TCR clone 84964 (TRBV5-4, TRBJ1-1)
CASSLDSRRDEAFF

SEQ ID NO: 169929 - protein, 13 aa, Homo sapiens
  CDR3 for alpha chain variable domain of TCR clone 84965 (TRAV27, TRAJ6)
CAGGTRGSYIPTF

SEQ ID NO: 169930 - protein, 13 aa, Homo sapiens
  CDR3 for beta chain variable domain of TCR clone 84965 (TRBV20-1, TRBJ1-1)
CSARGGGNTEAFF

SEQ ID NO: 169931 - protein, 15 aa, Homo sapiens
  CDR3 for alpha chain variable domain of TCR clone 84966 (TRAV12-2, TRAJ57)
CAVSRGQGRSEKLVF

SEQ ID NO: 169932 - protein, 14 aa, Homo sapiens
  CDR3 for beta chain variable domain of TCR clone 84966 (TRBV20-1, TRBJ2-1)
CSAHPGLPYNEQFF

SEQ ID NO: 169933 - protein, 12 aa, Homo sapiens
  CDR3 for alpha chain variable domain of TCR clone 84967 (TRAV17, TRAJ30)
CVPERRADKIIF

SEQ ID NO: 169934 - protein, 14 aa, Homo sapiens
  CDR3 for beta chain variable domain of TCR clone 84967 (TRBV7-7, TRBJ2-2)
CASSRDRSTGELFF

SEQ ID NO: 169935 - protein, 17 aa, Homo sapiens
  CDR3 for alpha chain variable domain of TCR clone 84968 (TRAV12-3, TRAJ6)
FAMSARGGAGGSYIPTF

SEQ ID NO: 169936 - protein, 12 aa, Homo sapiens
  CDR3 for beta chain variable domain of TCR clone 84968 (TRBV12-4, TRBJ2-3)
CASSTLPDTQYF

SEQ ID NO: 169937 - protein, 12 aa, Homo sapiens
  CDR3 for alpha chain variable domain of TCR clone 84969 (TRAV21, TRAJ6)
CAVKGGSYIPTF

SEQ ID NO: 169938 - protein, 13 aa, Homo sapiens
  CDR3 for beta chain variable domain of TCR clone 84969 (TRBV11-2, TRBJ1-1)
CASSFTENTEAFL

SEQ ID NO: 169939 - protein, 16 aa, Homo sapiens
  CDR3 for alpha chain variable domain of TCR clone 84970 (TRAV2, TRAJ13)
CCGDFMNSGGYQKVTF

SEQ ID NO: 169940 - protein, 14 aa, Homo sapiens
  CDR3 for beta chain variable domain of TCR clone 84970 (TRBV11-2, TRBJ2-7)
CASSLGAGAYEQYF

SEQ ID NO: 169941 - protein, 13 aa, Homo sapiens
  CDR3 for alpha chain variable domain of TCR clone 84971 (TRAV2, TRAJ40)
CAVVTSGTYKYIF

SEQ ID NO: 169942 - protein, 16 aa, Homo sapiens
  CDR3 for beta chain variable domain of TCR clone 84971 (TRBV7-3, TRBJ2-1)
CASSLEGYRSDNEQFF

SEQ ID NO: 169943 - protein, 22 aa, Homo sapiens
  CDR3 for alpha chain variable domain of TCR clone 84972 (TRAV12-1, TRAJ30)
CVVNIGGEMTRSSLEKGHDFIF

SEQ ID NO: 169944 - protein, 15 aa, Homo sapiens
  CDR3 for beta chain variable domain of TCR clone 84972 (TRBV18, TRBJ1-2)
CASSPSNTPNYGYTF

SEQ ID NO: 169945 - protein, 16 aa, Homo sapiens
  CDR3 for alpha chain variable domain of TCR clone 84973 (TRAV3, TRAJ37)
CAVRPHGSGHTGKLIF

SEQ ID NO: 169946 - protein, 16 aa, Homo sapiens
  CDR3 for beta chain variable domain of TCR clone 84973 (TRBV7-9, TRBJ2-3)
CASSPWREVGTDTQYF

SEQ ID NO: 169947 - protein, 14 aa, Homo sapiens
  CDR3 for alpha chain variable domain of TCR clone 84974 (TRAV8-3, TRAJ17)
CAVGAQTAGNKLTF

SEQ ID NO: 169948 - protein, 15 aa, Homo sapiens
  CDR3 for beta chain variable domain of TCR clone 84974 (TRBV6-3, TRBJ2-7)
CASSSPGTVFYEQYF

SEQ ID NO: 169949 - protein, 14 aa, Homo sapiens
  CDR3 for alpha chain variable domain of TCR clone 84975 (TRAV26-1, TRAJ38)
CIADNAGNNRKLIW

SEQ ID NO: 169950 - protein, 13 aa, Homo sapiens
  CDR3 for beta chain variable domain of TCR clone 84975 (TRBV27, TRBJ2-7)
CASSFSQGYEQYF

SEQ ID NO: 169951 - protein, 12 aa, Homo sapiens
  CDR3 for alpha chain variable domain of TCR clone 84976 (TRAV4, TRAJ26)
CLVGDYGQNFVF

SEQ ID NO: 169952 - protein, 13 aa, Homo sapiens
  CDR3 for beta chain variable domain of TCR clone 84976 (TRBV7-7, TRBJ2-5)
CASSRSGQETQYF

SEQ ID NO: 169953 - protein, 16 aa, Homo sapiens
  CDR3 for alpha chain variable domain of TCR clone 84977 (TRAV26-1, TRAJ37)
CIVRGDGSGNTGKLIF

SEQ ID NO: 169954 - protein, 15 aa, Homo sapiens
  CDR3 for beta chain variable domain of TCR clone 84977 (TRBV9, TRBJ1-6)
CASSVAGTGDSPLHF

SEQ ID NO: 169955 - protein, 12 aa, Homo sapiens
  CDR3 for alpha chain variable domain of TCR clone 84978 (TRAV20, TRAJ39)
CAVGNAGNMLTF

SEQ ID NO: 169956 - protein, 16 aa, Homo sapiens
  CDR3 for beta chain variable domain of TCR clone 84978 (TRBV15, TRBJ1-2)
CATSRGPRTGGGSYTF

SEQ ID NO: 169957 - protein, 14 aa, Homo sapiens
  CDR3 for alpha chain variable domain of TCR clone 84979 (TRAV12-1, TRAJ12)
CVVTRMDSSYKLIF

SEQ ID NO: 169958 - protein, 13 aa, Homo sapiens
  CDR3 for beta chain variable domain of TCR clone 84979 (TRBV20-1, TRBJ1-1)
SAVLGGGNTEAFF

SEQ ID NO: 169959 - protein, 12 aa, Homo sapiens
  CDR3 for alpha chain variable domain of TCR clone 84980 (TRAV25, TRAJ11)
CAGYSGYSTLTF

SEQ ID NO: 169960 - protein, 15 aa, Homo sapiens
  CDR3 for beta chain variable domain of TCR clone 84980 (TRBV4-1, TRBJ1-4)
CASSDTGGTNEKLFF

SEQ ID NO: 169961 - protein, 14 aa, Homo sapiens
  CDR3 for alpha chain variable domain of TCR clone 84981 (TRAV17, TRAJ42)
CATAGRGSQGNLIF

SEQ ID NO: 169962 - protein, 14 aa, Homo sapiens
  CDR3 for beta chain variable domain of TCR clone 84981 (TRBV7-2, TRBJ2-3)
CASRFSRPSDTQYF

SEQ ID NO: 169963 - protein, 14 aa, Homo sapiens
  CDR3 for alpha chain variable domain of TCR clone 84982 (TRAV20, TRAJ56)
CAVQFGGANSKLTF

SEQ ID NO: 169964 - protein, 14 aa, Homo sapiens
  CDR3 for beta chain variable domain of TCR clone 84982 (TRBV7-2, TRBJ1-1)
CASSFLTGTTEALF

SEQ ID NO: 169965 - protein, 10 aa, Homo sapiens
  CDR3 for alpha chain variable domain of TCR clone 84983 (TRAV3, TRAJ30)
CAVREIEIIF

SEQ ID NO: 169966 - protein, 13 aa, Homo sapiens
  CDR3 for beta chain variable domain of TCR clone 84983 (TRBV4-2, TRBJ1-1)
CASSQAGNTEAFF

SEQ ID NO: 169967 - protein, 13 aa, Homo sapiens
  CDR3 for alpha chain variable domain of TCR clone 84984 (TRAV21, TRAJ27)
CAARPGNAGKSTF

SEQ ID NO: 169968 - protein, 14 aa, Homo sapiens
  CDR3 for beta chain variable domain of TCR clone 84984 (TRBV7-6, TRBJ2-3)
CASSVAGGTDTQYF

SEQ ID NO: 169969 - protein, 14 aa, Homo sapiens
  CDR3 for alpha chain variable domain of TCR clone 84985 (TRAV20, TRAJ36)
CAVQARTGANNLFF

SEQ ID NO: 169970 - protein, 15 aa, Homo sapiens
  CDR3 for beta chain variable domain of TCR clone 84985 (TRBV6-5, TRBJ2-7)
CASSYSTSGNYEQYF

SEQ ID NO: 169971 - protein, 17 aa, Homo sapiens
  CDR3 for alpha chain variable domain of TCR clone 84986 (TRAV13-1, TRAJ31)
CAPRDRLMFGDGPQLGV

SEQ ID NO: 169972 - protein, 12 aa, Homo sapiens
  CDR3 for beta chain variable domain of TCR clone 84986 (TRBV7-9, TRBJ2-7)
CASSLEGYEQYF

SEQ ID NO: 169973 - protein, 14 aa, Homo sapiens
  CDR3 for alpha chain variable domain of TCR clone 84987 (TRAV25, TRAJ27)
CAGPGNTNSGKSTF

SEQ ID NO: 169974 - protein, 16 aa, Homo sapiens
  CDR3 for beta chain variable domain of TCR clone 84987 (TRBV4-1, TRBJ2-6)
CASSQDGGPGANVLTF

SEQ ID NO: 169975 - protein, 14 aa, Homo sapiens
  CDR3 for alpha chain variable domain of TCR clone 84988 (TRAV23/DV6, TRAJ27)
CAASRDTNAGKSTF

SEQ ID NO: 169976 - protein, 14 aa, Homo sapiens
  CDR3 for beta chain variable domain of TCR clone 84988 (TRBV12-5, TRBJ2-5)
CASGSRTHQETQYF

SEQ ID NO: 169977 - protein, 15 aa, Homo sapiens
  CDR3 for alpha chain variable domain of TCR clone 84989 (TRAV2, TRAJ15)
CAVEDRGQAGTARIF

SEQ ID NO: 169978 - protein, 13 aa, Homo sapiens
  CDR3 for beta chain variable domain of TCR clone 84989 (TRBV10-2, TRBJ2-7)
CASGASGGYEQYF

SEQ ID NO: 169979 - protein, 12 aa, Homo sapiens
  CDR3 for alpha chain variable domain of TCR clone 84990 (TRAV12-3, TRAJ41)
CAMSYSGYALKF

SEQ ID NO: 169980 - protein, 13 aa, Homo sapiens
  CDR3 for beta chain variable domain of TCR clone 84990 (TRBV7-3, TRBJ2-1)
CASSLDSYNEQFF

SEQ ID NO: 169981 - protein, 17 aa, Homo sapiens
  CDR3 for alpha chain variable domain of TCR clone 84991 (TRAV3, TRAJ28)
CAVREAYSVAGSYQLTF

SEQ ID NO: 169982 - protein, 18 aa, Homo sapiens
  CDR3 for beta chain variable domain of TCR clone 84991 (TRBV27, TRBJ2-1)
CASGNRAVGVGSKNEQFF

SEQ ID NO: 169983 - protein, 15 aa, Homo sapiens
  CDR3 for alpha chain variable domain of TCR clone 84992 (TRAV2, TRAJ13)
CCLLLCFRGLPEVTF

SEQ ID NO: 169984 - protein, 16 aa, Homo sapiens
  CDR3 for beta chain variable domain of TCR clone 84992 (TRBV6-1, TRBJ2-5)
CASSETLDRGAETQYF

SEQ ID NO: 169985 - protein, 16 aa, Homo sapiens
  CDR3 for alpha chain variable domain of TCR clone 84993 (TRAV27, TRAJ13)
CAGAKSDSGGYQKVTF

SEQ ID NO: 169986 - protein, 15 aa, Homo sapiens
  CDR3 for beta chain variable domain of TCR clone 84993 (TRBV29-1, TRBJ2-1)
CSLGRHALFYNEQFF

SEQ ID NO: 169987 - protein, 14 aa, Homo sapiens
  CDR3 for alpha chain variable domain of TCR clone 84994 (TRAV38-1, TRAJ39)
CAFAYNNAGNMPTF

SEQ ID NO: 169988 - protein, 15 aa, Homo sapiens
  CDR3 for beta chain variable domain of TCR clone 84994 (TRBV19, TRBJ2-6)
CASSIGPSGANVLTF

SEQ ID NO: 169989 - protein, 15 aa, Homo sapiens
  CDR3 for alpha chain variable domain of TCR clone 84995 (TRAV16, TRAJ16)
CALQGGGSDGQKLLF

SEQ ID NO: 169990 - protein, 16 aa, Homo sapiens
  CDR3 for beta chain variable domain of TCR clone 84995 (TRBV7-3, TRBJ2-2)
CASSLKRGTLSGELFF

SEQ ID NO: 169991 - protein, 12 aa, Homo sapiens
  CDR3 for alpha chain variable domain of TCR clone 84996 (TRAV1-1, TRAJ39)
CAVPVVGNMLTF

SEQ ID NO: 169992 - protein, 17 aa, Homo sapiens
  CDR3 for beta chain variable domain of TCR clone 84996 (TRBV13, TRBJ2-3)
CASSLSRVAGGRNTQYF

SEQ ID NO: 169993 - protein, 15 aa, Homo sapiens
  CDR3 for alpha chain variable domain of TCR clone 84997 (TRAV21, TRAJ24)
CAARSSTDSWGKLQF

SEQ ID NO: 169994 - protein, 15 aa, Homo sapiens
  CDR3 for beta chain variable domain of TCR clone 84997 (TRBV4-1, TRBJ2-7)
CASSHNTGRLYEQYF

SEQ ID NO: 169995 - protein, 15 aa, Homo sapiens
  CDR3 for alpha chain variable domain of TCR clone 84998 (TRAV8-1, TRAJ6)
CAVNTPPGVSYIPTF

SEQ ID NO: 169996 - protein, 14 aa, Homo sapiens
  CDR3 for beta chain variable domain of TCR clone 84998 (TRBV12-4, TRBJ2-1)
CASSLGQGASEQFF

SEQ ID NO: 169997 - protein, 13 aa, Homo sapiens
  CDR3 for alpha chain variable domain of TCR clone 84999 (TRAV3, TRAJ41)
CAVSSNSGYALNF

SEQ ID NO: 169998 - protein, 14 aa, Homo sapiens
  CDR3 for beta chain variable domain of TCR clone 84999 (TRBV7-2, TRBJ2-7)
CASSPKTSCYEQYF

SEQ ID NO: 169999 - protein, 15 aa, Homo sapiens
  CDR3 for alpha chain variable domain of TCR clone 85000 (TRAV26-1, TRAJ22)
CIVRVSFWFCKATEL

SEQ ID NO: 170000 - protein, 15 aa, Homo sapiens
  CDR3 for beta chain variable domain of TCR clone 85000 (TRBV20-1, TRBJ2-7)
CSARDRVSGMDEQYF

SEQ ID NO: 170001 - protein, 16 aa, Homo sapiens
  CDR3 for alpha chain variable domain of TCR clone 85001 (TRAV3, TRAJ4)
CAVRTSPSGGYNKLIF

SEQ ID NO: 170002 - protein, 12 aa, Homo sapiens
  CDR3 for beta chain variable domain of TCR clone 85001 (TRBV7-9, TRBJ2-7)
CASSQGVYEQYF

SEQ ID NO: 170003 - protein, 11 aa, Homo sapiens
  CDR3 for alpha chain variable domain of TCR clone 85002 (TRAV12-3, TRAJ43)
CAMSVSNDMRF

SEQ ID NO: 170004 - protein, 16 aa, Homo sapiens
  CDR3 for beta chain variable domain of TCR clone 85002 (TRBV20-1, TRBJ2-1)
CSARDSLGAVYNEQLF

SEQ ID NO: 170005 - protein, 13 aa, Homo sapiens
  CDR3 for alpha chain variable domain of TCR clone 85003 (TRAV8-2, TRAJ26)
CVVSLGYGQNFVF

SEQ ID NO: 170006 - protein, 15 aa, Homo sapiens
  CDR3 for beta chain variable domain of TCR clone 85003 (TRBV7-6, TRBJ1-2)
CASSSGGRGGYGYTF

SEQ ID NO: 170007 - protein, 14 aa, Homo sapiens
  CDR3 for alpha chain variable domain of TCR clone 85004 (TRAV27, TRAJ22)
CAGLPSGSARQLTF

SEQ ID NO: 170008 - protein, 16 aa, Homo sapiens
  CDR3 for beta chain variable domain of TCR clone 85004 (TRBV7-3, TRBJ2-2)
CASSLQRGTLSGELFF

SEQ ID NO: 170009 - protein, 17 aa, Homo sapiens
  CDR3 for alpha chain variable domain of TCR clone 85005 (TRAV3, TRAJ6)
CAVRDGPRAGGSYIPTF

SEQ ID NO: 170010 - protein, 13 aa, Homo sapiens
  CDR3 for beta chain variable domain of TCR clone 85005 (TRBV7-7, TRBJ1-1)
CASSLGANTEAFF

SEQ ID NO: 170011 - protein, 16 aa, Homo sapiens
  CDR3 for alpha chain variable domain of TCR clone 85006 (TRAV6, TRAJ37)
CSLAFRGSGNTGKLIF

SEQ ID NO: 170012 - protein, 18 aa, Homo sapiens
  CDR3 for beta chain variable domain of TCR clone 85006 (TRBV4-3, TRBJ1-2)
CASSQDGQSAPSDYGYTF

SEQ ID NO: 170013 - protein, 14 aa, Homo sapiens
  CDR3 for alpha chain variable domain of TCR clone 85007 (TRAV13-2, TRAJ17)
CAENSKAAGNKLNF

SEQ ID NO: 170014 - protein, 11 aa, Homo sapiens
  CDR3 for beta chain variable domain of TCR clone 85007 (TRBV6-3, TRBJ2-3)
CATGQADTQYF

SEQ ID NO: 170015 - protein, 14 aa, Homo sapiens
  CDR3 for alpha chain variable domain of TCR clone 85008 (TRAV9-2, TRAJ39)
CALYIYNAGNMLTF

SEQ ID NO: 170016 - protein, 14 aa, Homo sapiens
  CDR3 for beta chain variable domain of TCR clone 85008 (TRBV2, TRBJ2-5)
CASKRDGTTETQYF

SEQ ID NO: 170017 - protein, 12 aa, Homo sapiens
  CDR3 for alpha chain variable domain of TCR clone 85009 (TRAV13-1, TRAJ21)
FAAKEGFNKFYF

SEQ ID NO: 170018 - protein, 20 aa, Homo sapiens
  CDR3 for beta chain variable domain of TCR clone 85009 (TRBV28, TRBJ2-1)
CASTPIGRSPGLAGGNEQFF

SEQ ID NO: 170019 - protein, 13 aa, Homo sapiens
  CDR3 for alpha chain variable domain of TCR clone 85010 (TRAV21, TRAJ36)
CAVIKTGANNLFF

SEQ ID NO: 170020 - protein, 13 aa, Homo sapiens
  CDR3 for beta chain variable domain of TCR clone 85010 (TRBV29-1, TRBJ2-3)
CSATRGGRDTQCF

SEQ ID NO: 170021 - protein, 11 aa, Homo sapiens
  CDR3 for alpha chain variable domain of TCR clone 85011 (TRAV4, TRAJ31)
CLVGLNARLMF

SEQ ID NO: 170022 - protein, 16 aa, Homo sapiens
  CDR3 for beta chain variable domain of TCR clone 85011 (TRBV15, TRBJ2-6)
CATSVNGGFLADVLTF

SEQ ID NO: 170023 - protein, 16 aa, Homo sapiens
  CDR3 for alpha chain variable domain of TCR clone 85012 (TRAV20, TRAJ53)
CAVQAESGGSNYKLTF

SEQ ID NO: 170024 - protein, 13 aa, Homo sapiens
  CDR3 for beta chain variable domain of TCR clone 85012 (TRBV5-1, TRBJ2-1)
CASRPFGYNEQFF

SEQ ID NO: 170025 - protein, 12 aa, Homo sapiens
  CDR3 for alpha chain variable domain of TCR clone 85013 (TRAV21, TRAJ49)
CAVRNTGNQFYF

SEQ ID NO: 170026 - protein, 12 aa, Homo sapiens
  CDR3 for beta chain variable domain of TCR clone 85013 (TRBV7-9, TRBJ2-7)
CATRADAYEQYF

SEQ ID NO: 170027 - protein, 14 aa, Homo sapiens
  CDR3 for alpha chain variable domain of TCR clone 85014 (TRAV12-2, TRAJ17)
CAVLFKAAGNMLTF

SEQ ID NO: 170028 - protein, 17 aa, Homo sapiens
  CDR3 for beta chain variable domain of TCR clone 85014 (TRBV20-1, TRBJ2-2)
CSASGSGQGGLTGELFF

SEQ ID NO: 170029 - protein, 13 aa, Homo sapiens
  CDR3 for alpha chain variable domain of TCR clone 85015 (TRAV39, TRAJ33)
CAVDRDSNYQLIW

SEQ ID NO: 170030 - protein, 12 aa, Homo sapiens
  CDR3 for beta chain variable domain of TCR clone 85015 (TRBV14, TRBJ1-1)
CASSQLKGLAFF

SEQ ID NO: 170031 - protein, 15 aa, Homo sapiens
  CDR3 for alpha chain variable domain of TCR clone 85016 (TRAV29/DV5, TRAJ42)
CAAKTDGGSQGNPIF

SEQ ID NO: 170032 - protein, 15 aa, Homo sapiens
  CDR3 for beta chain variable domain of TCR clone 85016 (TRBV5-1, TRBJ2-2)
CASSSQGGNTGELFF

SEQ ID NO: 170033 - protein, 13 aa, Homo sapiens
  CDR3 for alpha chain variable domain of TCR clone 85017 (TRAV1-2, TRAJ11)
CAVRRERYSTLTF

SEQ ID NO: 170034 - protein, 14 aa, Homo sapiens
  CDR3 for beta chain variable domain of TCR clone 85017 (TRBV14, TRBJ2-7)
CASRHRDKPYEQYF

SEQ ID NO: 170035 - protein, 14 aa, Homo sapiens
  CDR3 for alpha chain variable domain of TCR clone 85018 (TRAV8-6, TRAJ53)
FAALVLGSNYKLTF

SEQ ID NO: 170036 - protein, 15 aa, Homo sapiens
  CDR3 for beta chain variable domain of TCR clone 85018 (TRBV20-1, TRBJ2-3)
CSAEPLAGHGDTQYF

SEQ ID NO: 170037 - protein, 14 aa, Homo sapiens
  CDR3 for alpha chain variable domain of TCR clone 85019 (TRAV12-1, TRAJ9)
CVVTGYTGGFKTIF

SEQ ID NO: 170038 - protein, 12 aa, Homo sapiens
  CDR3 for beta chain variable domain of TCR clone 85019 (TRBV7-8, TRBJ2-1)
CASSLGHNEQFF

SEQ ID NO: 170039 - protein, 21 aa, Homo sapiens
  CDR3 for alpha chain variable domain of TCR clone 85020 (TRAV36/DV7, TRAJ39)
TATQTGDSAIYLPNAGNMLTF

SEQ ID NO: 170040 - protein, 13 aa, Homo sapiens
  CDR3 for beta chain variable domain of TCR clone 85020 (TRBV12-4, TRBJ2-2)
CASSITGSGELFF

SEQ ID NO: 170041 - protein, 12 aa, Homo sapiens
  CDR3 for alpha chain variable domain of TCR clone 85021 (TRAV12-3, TRAJ5)
CAMDTGRRALTF

SEQ ID NO: 170042 - protein, 14 aa, Homo sapiens
  CDR3 for beta chain variable domain of TCR clone 85021 (TRBV7-6, TRBJ2-3)
CASSLGTVTDTQYF

SEQ ID NO: 170043 - protein, 19 aa, Homo sapiens
  CDR3 for alpha chain variable domain of TCR clone 85022 (TRAV3, TRAJ6)
CAVRDRYPSRSGGSYIPTF

SEQ ID NO: 170044 - protein, 15 aa, Homo sapiens
  CDR3 for beta chain variable domain of TCR clone 85022 (TRBV18, TRBJ2-7)
CASSPTFMDSYEQYF

SEQ ID NO: 170045 - protein, 15 aa, Homo sapiens
  CDR3 for alpha chain variable domain of TCR clone 85023 (TRAV20, TRAJ53)
CAVQASGGSNYKLTF

SEQ ID NO: 170046 - protein, 12 aa, Homo sapiens
  CDR3 for beta chain variable domain of TCR clone 85023 (TRBV7-6, TRBJ2-5)
CASSLSKETQYF

SEQ ID NO: 170047 - protein, 14 aa, Homo sapiens
  CDR3 for alpha chain variable domain of TCR clone 85024 (TRAV1-2, TRAJ16)
CAVNRFSDGQKLLF

SEQ ID NO: 170048 - protein, 12 aa, Homo sapiens
  CDR3 for beta chain variable domain of TCR clone 85024 (TRBV28, TRBJ2-6)
CAIQAGANVLIF

SEQ ID NO: 170049 - protein, 13 aa, Homo sapiens
  CDR3 for alpha chain variable domain of TCR clone 85025 (TRAV2, TRAJ39)
TTVHNTAGNMLTF

SEQ ID NO: 170050 - protein, 16 aa, Homo sapiens
  CDR3 for beta chain variable domain of TCR clone 85025 (TRBV24-1, TRBJ2-3)
CATSGYRDRDTDTQYF

SEQ ID NO: 170051 - protein, 14 aa, Homo sapiens
  CDR3 for alpha chain variable domain of TCR clone 85026 (TRAV1-2, TRAJ8)
CAVREDTGFQKLVF

SEQ ID NO: 170052 - protein, 16 aa, Homo sapiens
  CDR3 for beta chain variable domain of TCR clone 85026 (TRBV4-3, TRBJ2-1)
RASSPALDRGVNEQFF

SEQ ID NO: 170053 - protein, 15 aa, Homo sapiens
  CDR3 for alpha chain variable domain of TCR clone 85027 (TRAV3, TRAJ22)
CAVRDRGGSARQLTF

SEQ ID NO: 170054 - protein, 10 aa, Homo sapiens
  CDR3 for beta chain variable domain of TCR clone 85027 (TRBV12-4, TRBJ1-2)
CASSFIWRHL

SEQ ID NO: 170055 - protein, 13 aa, Homo sapiens
  CDR3 for alpha chain variable domain of TCR clone 85028 (TRAV17, TRAJ34)
CATDLYNTYKLIF

SEQ ID NO: 170056 - protein, 12 aa, Homo sapiens
  CDR3 for beta chain variable domain of TCR clone 85028 (TRBV11-2, TRBJ2-2)
CASSLGGGELFF

SEQ ID NO: 170057 - protein, 12 aa, Homo sapiens
  CDR3 for alpha chain variable domain of TCR clone 85029 (TRAV8-3, TRAJ20)
CAVGANDYKLSF

SEQ ID NO: 170058 - protein, 14 aa, Homo sapiens
  CDR3 for beta chain variable domain of TCR clone 85029 (TRBV19, TRBJ2-2)
CASSGQGIAGELFF

SEQ ID NO: 170059 - protein, 15 aa, Homo sapiens
  CDR3 for alpha chain variable domain of TCR clone 85030 (TRAV2, TRAJ15)
CAVEDRGQAGTALIF

SEQ ID NO: 170060 - protein, 15 aa, Homo sapiens
  CDR3 for beta chain variable domain of TCR clone 85030 (TRBV4-1, TRBJ2-5)
CASSQWDLYQETQYF

SEQ ID NO: 170061 - protein, 14 aa, Homo sapiens
  CDR3 for alpha chain variable domain of TCR clone 85031 (TRAV26-1, TRAJ34)
CIFRVAYNTDKLIF

SEQ ID NO: 170062 - protein, 15 aa, Homo sapiens
  CDR3 for beta chain variable domain of TCR clone 85031 (TRBV20-1, TRBJ2-7)
CSARVPAAYFYEQYF

SEQ ID NO: 170063 - protein, 21 aa, Homo sapiens
  CDR3 for alpha chain variable domain of TCR clone 85032 (TRAV1-1, TRAJ6)
CLILLRCERLERTGGSYIPTF

SEQ ID NO: 170064 - protein, 13 aa, Homo sapiens
  CDR3 for beta chain variable domain of TCR clone 85032 (TRBV7-3, TRBJ1-1)
CASSQDWGAEAFF

SEQ ID NO: 170065 - protein, 15 aa, Homo sapiens
  CDR3 for alpha chain variable domain of TCR clone 85033 (TRAV12-3, TRAJ6)
CAMSATTGGSYIPTF

SEQ ID NO: 170066 - protein, 19 aa, Homo sapiens
  CDR3 for beta chain variable domain of TCR clone 85033 (TRBV25-1, TRBJ2-2)
CAILVYRVDRGRKTGELLF

SEQ ID NO: 170067 - protein, 12 aa, Homo sapiens
  CDR3 for alpha chain variable domain of TCR clone 85034 (TRAV12-3, TRAJ32)
RAGGGATNKLIF

SEQ ID NO: 170068 - protein, 15 aa, Homo sapiens
  CDR3 for beta chain variable domain of TCR clone 85034 (TRBV4-3, TRBJ2-1)
CASSQESAIYNEQFF

SEQ ID NO: 170069 - protein, 15 aa, Homo sapiens
  CDR3 for alpha chain variable domain of TCR clone 85035 (TRAV8-3, TRAJ23)
CAVGDRYNQGGKLIF

SEQ ID NO: 170070 - protein, 22 aa, Homo sapiens
  CDR3 for beta chain variable domain of TCR clone 85035 (TRBV29-1, TRBJ2-5)
TVSNMSPEDSSIYLCSAGTQYV

SEQ ID NO: 170071 - protein, 13 aa, Homo sapiens
  CDR3 for alpha chain variable domain of TCR clone 85036 (TRAV12-1, TRAJ21)
CVVTLYNFNKFYS

SEQ ID NO: 170072 - protein, 20 aa, Homo sapiens
  CDR3 for beta chain variable domain of TCR clone 85036 (TRBV7-8, TRBJ2-1)
CASSLAHRLAGVRSYNEQFF

SEQ ID NO: 170073 - protein, 11 aa, Homo sapiens
  CDR3 for alpha chain variable domain of TCR clone 85037 (TRAV13-1, TRAJ6)
CATLGSYIPTF

SEQ ID NO: 170074 - protein, 13 aa, Homo sapiens
  CDR3 for beta chain variable domain of TCR clone 85037 (TRBV6-6, TRBJ2-1)
CASSLHQCDEQFF

SEQ ID NO: 170075 - protein, 16 aa, Homo sapiens
  CDR3 for alpha chain variable domain of TCR clone 85038 (TRAV1-2, TRAJ10)
CAVRGVLTGGGNKLDF

SEQ ID NO: 170076 - protein, 12 aa, Homo sapiens
  CDR3 for beta chain variable domain of TCR clone 85038 (TRBV7-8, TRBJ2-7)
CASSLGDREQYF

SEQ ID NO: 170077 - protein, 13 aa, Homo sapiens
  CDR3 for alpha chain variable domain of TCR clone 85039 (TRAV30, TRAJ34)
CGTVGYNTDKLIF

SEQ ID NO: 170078 - protein, 16 aa, Homo sapiens
  CDR3 for beta chain variable domain of TCR clone 85039 (TRBV7-9, TRBJ1-2)
CASSLGFSSGEVGYTF

SEQ ID NO: 170079 - protein, 15 aa, Homo sapiens
  CDR3 for alpha chain variable domain of TCR clone 85040 (TRAV27, TRAJ38)
CAARRNAGNNRKLSW

SEQ ID NO: 170080 - protein, 13 aa, Homo sapiens
  CDR3 for beta chain variable domain of TCR clone 85040 (TRBV12-5, TRBJ2-3)
CASGDRQSDTQYL

SEQ ID NO: 170081 - protein, 20 aa, Homo sapiens
  CDR3 for alpha chain variable domain of TCR clone 85041 (TRAV3, TRAJ7)
CAVREEEREQQTRSWEGEPS

SEQ ID NO: 170082 - protein, 12 aa, Homo sapiens
  CDR3 for beta chain variable domain of TCR clone 85041 (TRBV7-8, TRBJ2-7)
CASSLGDREQYF

SEQ ID NO: 170083 - protein, 13 aa, Homo sapiens
  CDR3 for alpha chain variable domain of TCR clone 85042 (TRAV12-1, TRAJ40)
CVVPISGTYKYIF

SEQ ID NO: 170084 - protein, 13 aa, Homo sapiens
  CDR3 for beta chain variable domain of TCR clone 85042 (TRBV4-2, TRBJ1-1)
CASSQAGNTEAFF

SEQ ID NO: 170085 - protein, 15 aa, Homo sapiens
  CDR3 for alpha chain variable domain of TCR clone 85043 (TRAV1-1, TRAJ23)
CLLLLRCAPGGKLIF

SEQ ID NO: 170086 - protein, 20 aa, Homo sapiens
  CDR3 for beta chain variable domain of TCR clone 85043 (TRBV7-8, TRBJ2-2)
CASSHLFPGPTIHITGELFF

SEQ ID NO: 170087 - protein, 20 aa, Homo sapiens
  CDR3 for alpha chain variable domain of TCR clone 85044 (TRAV12-3, TRAJ41)
SLFIRDSQPSDSATPEALNF

SEQ ID NO: 170088 - protein, 14 aa, Homo sapiens
  CDR3 for beta chain variable domain of TCR clone 85044 (TRBV25-1, TRBJ1-1)
CASTHLGGNTEAFF

SEQ ID NO: 170089 - protein, 14 aa, Homo sapiens
  CDR3 for alpha chain variable domain of TCR clone 85045 (TRAV9-2, TRAJ38)
CALSRAGNNRKLIW

SEQ ID NO: 170090 - protein, 14 aa, Homo sapiens
  CDR3 for beta chain variable domain of TCR clone 85045 (TRBV19, TRBJ2-1)
CASPTFVLSGEQFF

SEQ ID NO: 170091 - protein, 14 aa, Homo sapiens
  CDR3 for alpha chain variable domain of TCR clone 85046 (TRAV23/DV6, TRAJ8)
CAASKATGFHKLVF

SEQ ID NO: 170092 - protein, 15 aa, Homo sapiens
  CDR3 for beta chain variable domain of TCR clone 85046 (TRBV28, TRBJ2-3)
CASSPDRQGANTQYF

SEQ ID NO: 170093 - protein, 13 aa, Homo sapiens
  CDR3 for alpha chain variable domain of TCR clone 85047 (TRAV2, TRAJ40)
CAVVTSGTYKYIF

SEQ ID NO: 170094 - protein, 15 aa, Homo sapiens
  CDR3 for beta chain variable domain of TCR clone 85047 (TRBV28, TRBJ2-1)
CASSGSAEVDNEQFF

SEQ ID NO: 170095 - protein, 15 aa, Homo sapiens
  CDR3 for alpha chain variable domain of TCR clone 85048 (TRAV12-1, TRAJ48)
CVVNPLGFGNEKLTF

SEQ ID NO: 170096 - protein, 15 aa, Homo sapiens
  CDR3 for beta chain variable domain of TCR clone 85048 (TRBV5-1, TRBJ1-4)
FAPAAWKDGNEKLFF

SEQ ID NO: 170097 - protein, 14 aa, Homo sapiens
  CDR3 for alpha chain variable domain of TCR clone 85049 (TRAV13-1, TRAJ35)
CAASKGGFGNVLHC

SEQ ID NO: 170098 - protein, 15 aa, Homo sapiens
  CDR3 for beta chain variable domain of TCR clone 85049 (TRBV2, TRBJ2-7)
CASTLLGSGATEQYF

SEQ ID NO: 170099 - protein, 14 aa, Homo sapiens
  CDR3 for alpha chain variable domain of TCR clone 85050 (TRAV8-4, TRAJ38)
CARLNAGNNRKLIW

SEQ ID NO: 170100 - protein, 15 aa, Homo sapiens
  CDR3 for beta chain variable domain of TCR clone 85050 (TRBV19, TRBJ1-1)
CASTSGQIQNTEAFF

SEQ ID NO: 170101 - protein, 16 aa, Homo sapiens
  CDR3 for alpha chain variable domain of TCR clone 85051 (TRAV12-3, TRAJ53)
CAMSPGSGGSNYKLTF

SEQ ID NO: 170102 - protein, 13 aa, Homo sapiens
  CDR3 for beta chain variable domain of TCR clone 85051 (TRBV7-7, TRBJ1-1)
CASSLGANTEAFF

SEQ ID NO: 170103 - protein, 16 aa, Homo sapiens
  CDR3 for alpha chain variable domain of TCR clone 85052 (TRAV30, TRAJ24)
CGTEIVDADSWGKFQV

SEQ ID NO: 170104 - protein, 16 aa, Homo sapiens
  CDR3 for beta chain variable domain of TCR clone 85052 (TRBV2, TRBJ1-3)
CASSGGAGRSGNTIYF

SEQ ID NO: 170105 - protein, 14 aa, Homo sapiens
  CDR3 for alpha chain variable domain of TCR clone 85053 (TRAV26-1, TRAJ38)
CIADNAGNNRKPIW

SEQ ID NO: 170106 - protein, 13 aa, Homo sapiens
  CDR3 for beta chain variable domain of TCR clone 85053 (TRBV15, TRBJ1-6)
CATSGGLNSPLHF

SEQ ID NO: 170107 - protein, 14 aa, Homo sapiens
  CDR3 for alpha chain variable domain of TCR clone 85054 (TRAV2, TRAJ20)
CAVEDGTNDYKPSF

SEQ ID NO: 170108 - protein, 13 aa, Homo sapiens
  CDR3 for beta chain variable domain of TCR clone 85054 (TRBV7-2, TRBJ1-1)
CASSRNTNTEAFF

SEQ ID NO: 170109 - protein, 14 aa, Homo sapiens
  CDR3 for alpha chain variable domain of TCR clone 85055 (TRAV8-1, TRAJ49)
CASSIANTGNQFYF

SEQ ID NO: 170110 - protein, 13 aa, Homo sapiens
  CDR3 for beta chain variable domain of TCR clone 85055 (TRBV19, TRBJ2-5)
CASSGRAGETQYF

SEQ ID NO: 170111 - protein, 16 aa, Homo sapiens
  CDR3 for alpha chain variable domain of TCR clone 85056 (TRAV3, TRAJ8)
CAVRDYPNTGFQKLVF

SEQ ID NO: 170112 - protein, 14 aa, Homo sapiens
  CDR3 for beta chain variable domain of TCR clone 85056 (TRBV6-6, TRBJ2-7)
CASSYATGRDEQYF

SEQ ID NO: 170113 - protein, 12 aa, Homo sapiens
  CDR3 for alpha chain variable domain of TCR clone 85057 (TRAV12-3, TRAJ20)
CAMVRGDYKLSF

SEQ ID NO: 170114 - protein, 12 aa, Homo sapiens
  CDR3 for beta chain variable domain of TCR clone 85057 (TRBV6-1, TRBJ2-7)
CAISDYSYEQYF

SEQ ID NO: 170115 - protein, 14 aa, Homo sapiens
  CDR3 for alpha chain variable domain of TCR clone 85058 (TRAV17, TRAJ45)
CATASGGGADGLTF

SEQ ID NO: 170116 - protein, 13 aa, Homo sapiens
  CDR3 for beta chain variable domain of TCR clone 85058 (TRBV27, TRBJ2-7)
CASGRGGAYEQYF

SEQ ID NO: 170117 - protein, 13 aa, Homo sapiens
  CDR3 for alpha chain variable domain of TCR clone 85059 (TRAV13-2, TRAJ53)
CAGNMGSNYKLTF

SEQ ID NO: 170118 - protein, 13 aa, Homo sapiens
  CDR3 for beta chain variable domain of TCR clone 85059 (TRBV4-1, TRBJ2-2)
CASSQENTGELLF

SEQ ID NO: 170119 - protein, 18 aa, Homo sapiens
  CDR3 for alpha chain variable domain of TCR clone 85060 (TRAV17, TRAJ45)
CATSLDLYLGGGADGLTF

SEQ ID NO: 170120 - protein, 15 aa, Homo sapiens
  CDR3 for beta chain variable domain of TCR clone 85060 (TRBV11-2, TRBJ2-1)
CASSKNRGLIYEQFF

SEQ ID NO: 170121 - protein, 13 aa, Homo sapiens
  CDR3 for alpha chain variable domain of TCR clone 85061 (TRAV35, TRAJ43)
CAGYPYNNNAMRF

SEQ ID NO: 170122 - protein, 15 aa, Homo sapiens
  CDR3 for beta chain variable domain of TCR clone 85061 (TRBV25-1, TRBJ1-4)
CASSKRIATNEKLFF

SEQ ID NO: 170123 - protein, 16 aa, Homo sapiens
  CDR3 for alpha chain variable domain of TCR clone 85062 (TRAV27, TRAJ52)
CAGATAGGTSYGKLTF

SEQ ID NO: 170124 - protein, 12 aa, Homo sapiens
  CDR3 for beta chain variable domain of TCR clone 85062 (TRBV27, TRBJ2-1)
CASRGFYNEQFF

SEQ ID NO: 170125 - protein, 14 aa, Homo sapiens
  CDR3 for alpha chain variable domain of TCR clone 85063 (TRAV1-1, TRAJ27)
CAFSETPMQANQPL

SEQ ID NO: 170126 - protein, 12 aa, Homo sapiens
  CDR3 for beta chain variable domain of TCR clone 85063 (TRBV28, TRBJ2-6)
CAIQAGANVLTF

SEQ ID NO: 170127 - protein, 16 aa, Homo sapiens
  CDR3 for alpha chain variable domain of TCR clone 85064 (TRAV26-1, TRAJ53)
CIVRVAMGGSNYKLTF

SEQ ID NO: 170128 - protein, 13 aa, Homo sapiens
  CDR3 for beta chain variable domain of TCR clone 85064 (TRBV19, TRBJ1-2)
CASSVPGQDGYTF

SEQ ID NO: 170129 - protein, 15 aa, Homo sapiens
  CDR3 for alpha chain variable domain of TCR clone 85065 (TRAV3, TRAJ5)
CAVRDLDTGRRALTF

SEQ ID NO: 170130 - protein, 13 aa, Homo sapiens
  CDR3 for beta chain variable domain of TCR clone 85065 (TRBV12-4, TRBJ2-7)
CASSPSETYEQYF

SEQ ID NO: 170131 - protein, 16 aa, Homo sapiens
  CDR3 for alpha chain variable domain of TCR clone 85066 (TRAV3, TRAJ10)
CAVRDMRAGGGNKLTF

SEQ ID NO: 170132 - protein, 13 aa, Homo sapiens
  CDR3 for beta chain variable domain of TCR clone 85066 (TRBV7-7, TRBJ1-1)
CASSLGANTEAFF

SEQ ID NO: 170133 - protein, 18 aa, Homo sapiens
  CDR3 for alpha chain variable domain of TCR clone 85067 (TRAV13-1, TRAJ20)
CAAKRRLQAQLWSRNHSN

SEQ ID NO: 170134 - protein, 13 aa, Homo sapiens
  CDR3 for beta chain variable domain of TCR clone 85067 (TRBV12-4, TRBJ1-1)
CASSLIGDTEAFF

SEQ ID NO: 170135 - protein, 13 aa, Homo sapiens
  CDR3 for alpha chain variable domain of TCR clone 85068 (TRAV39, TRAJ48)
CAAVNFGNEKLTF

SEQ ID NO: 170136 - protein, 12 aa, Homo sapiens
  CDR3 for beta chain variable domain of TCR clone 85068 (TRBV5-5, TRBJ2-5)
CASSCFGETQYF

SEQ ID NO: 170137 - protein, 12 aa, Homo sapiens
  CDR3 for alpha chain variable domain of TCR clone 85069 (TRAV1-1, TRAJ9)
CAVDTGGFKTIF

SEQ ID NO: 170138 - protein, 14 aa, Homo sapiens
  CDR3 for beta chain variable domain of TCR clone 85069 (TRBV25-1, TRBJ1-1)
CASTHLGGNTEAFF

SEQ ID NO: 170139 - protein, 14 aa, Homo sapiens
  CDR3 for alpha chain variable domain of TCR clone 85070 (TRAV13-1, TRAJ9)
CAASALTGGFTTIF

SEQ ID NO: 170140 - protein, 16 aa, Homo sapiens
  CDR3 for beta chain variable domain of TCR clone 85070 (TRBV7-8, TRBJ2-4)
CASSAERTLAKNIQYF

SEQ ID NO: 170141 - protein, 10 aa, Homo sapiens
  CDR3 for alpha chain variable domain of TCR clone 85071 (TRAV36/DV7, TRAJ56)
CAGPAVELTF

SEQ ID NO: 170142 - protein, 13 aa, Homo sapiens
  CDR3 for beta chain variable domain of TCR clone 85071 (TRBV7-9, TRBJ2-7)
CAGSFWSSYEQYF

SEQ ID NO: 170143 - protein, 12 aa, Homo sapiens
  CDR3 for alpha chain variable domain of TCR clone 85072 (TRAV26-1, TRAJ13)
CIVSRGYQKVTF

SEQ ID NO: 170144 - protein, 16 aa, Homo sapiens
  CDR3 for beta chain variable domain of TCR clone 85072 (TRBV27, TRBJ2-1)
CARSLSKGFGLDEQFF

SEQ ID NO: 170145 - protein, 13 aa, Homo sapiens
  CDR3 for alpha chain variable domain of TCR clone 85073 (TRAV12-3, TRAJ48)
CAMSLVGNEKLTF

SEQ ID NO: 170146 - protein, 16 aa, Homo sapiens
  CDR3 for beta chain variable domain of TCR clone 85073 (TRBV18, TRBJ1-5)
CASSPSTGNSNQPQHF

SEQ ID NO: 170147 - protein, 14 aa, Homo sapiens
  CDR3 for alpha chain variable domain of TCR clone 85074 (TRAV12-2, TRAJ40)
CAVKIPSGTYKYIF

SEQ ID NO: 170148 - protein, 14 aa, Homo sapiens
  CDR3 for beta chain variable domain of TCR clone 85074 (TRBV20-1, TRBJ1-1)
CSAQTRIGGTQAFF

SEQ ID NO: 170149 - protein, 11 aa, Homo sapiens
  CDR3 for alpha chain variable domain of TCR clone 85075 (TRAV3, TRAJ21)
CAVGNFNNFYF

SEQ ID NO: 170150 - protein, 12 aa, Homo sapiens
  CDR3 for beta chain variable domain of TCR clone 85075 (TRBV29-1, TRBJ2-3)
CSVTGGADTQYF

SEQ ID NO: 170151 - protein, 14 aa, Homo sapiens
  CDR3 for alpha chain variable domain of TCR clone 85076 (TRAV38-1, TRAJ45)
CASHSGGGADGLPF

SEQ ID NO: 170152 - protein, 15 aa, Homo sapiens
  CDR3 for beta chain variable domain of TCR clone 85076 (TRBV10-2, TRBJ2-6)
CASSEQGTGANVLTF

SEQ ID NO: 170153 - protein, 10 aa, Homo sapiens
  CDR3 for alpha chain variable domain of TCR clone 85077 (TRAV12-1, TRAJ24)
CVVNRGKFQF

SEQ ID NO: 170154 - protein, 15 aa, Homo sapiens
  CDR3 for beta chain variable domain of TCR clone 85077 (TRBV7-9, TRBJ1-6)
CASSSPGRGNSPLHF

SEQ ID NO: 170155 - protein, 16 aa, Homo sapiens
  CDR3 for alpha chain variable domain of TCR clone 85078 (TRAV12-2, TRAJ32)
CAVNLGQGGATNKLIF

SEQ ID NO: 170156 - protein, 13 aa, Homo sapiens
  CDR3 for beta chain variable domain of TCR clone 85078 (TRBV4-2, TRBJ1-1)
CASSQAGNTEAFF

SEQ ID NO: 170157 - protein, 14 aa, Homo sapiens
  CDR3 for alpha chain variable domain of TCR clone 85079 (TRAV8-3, TRAJ23)
CAVIIYNQGGKLIF

SEQ ID NO: 170158 - protein, 16 aa, Homo sapiens
  CDR3 for beta chain variable domain of TCR clone 85079 (TRBV19, TRBJ2-1)
CASSKAGPSSYNEQFF

SEQ ID NO: 170159 - protein, 15 aa, Homo sapiens
  CDR3 for alpha chain variable domain of TCR clone 85080 (TRAV8-3, TRAJ40)
CAAPSLGSGTYRYIF

SEQ ID NO: 170160 - protein, 16 aa, Homo sapiens
  CDR3 for beta chain variable domain of TCR clone 85080 (TRBV7-3, TRBJ2-3)
RASSLSGYRPEDTQYF

SEQ ID NO: 170161 - protein, 13 aa, Homo sapiens
  CDR3 for alpha chain variable domain of TCR clone 85081 (TRAV21, TRAJ27)
CAARPGNAGKSNF

SEQ ID NO: 170162 - protein, 13 aa, Homo sapiens
  CDR3 for beta chain variable domain of TCR clone 85081 (TRBV18, TRBJ2-7)
CASQSGGGYEQYF

SEQ ID NO: 170163 - protein, 12 aa, Homo sapiens
  CDR3 for alpha chain variable domain of TCR clone 85082 (TRAV26-1, TRAJ13)
CIVSRGYQKVTF

SEQ ID NO: 170164 - protein, 14 aa, Homo sapiens
  CDR3 for beta chain variable domain of TCR clone 85082 (TRBV5-1, TRBJ1-4)
CASSRGGTDEKLFF

SEQ ID NO: 170165 - protein, 13 aa, Homo sapiens
  CDR3 for alpha chain variable domain of TCR clone 85083 (TRAV35, TRAJ32)
CAGVGGATNKLIF

SEQ ID NO: 170166 - protein, 12 aa, Homo sapiens
  CDR3 for beta chain variable domain of TCR clone 85083 (TRBV7-9, TRBJ2-7)
CASSIKREEQYF

SEQ ID NO: 170167 - protein, 15 aa, Homo sapiens
  CDR3 for alpha chain variable domain of TCR clone 85084 (TRAV8-6, TRAJ10)
CAVSDQAGGGNKLTF

SEQ ID NO: 170168 - protein, 14 aa, Homo sapiens
  CDR3 for beta chain variable domain of TCR clone 85084 (TRBV11-2, TRBJ2-7)
CASSLGAGAYEQYF

SEQ ID NO: 170169 - protein, 12 aa, Homo sapiens
  CDR3 for alpha chain variable domain of TCR clone 85085 (TRAV12-3, TRAJ20)
CAMVRGDYKLSF

SEQ ID NO: 170170 - protein, 12 aa, Homo sapiens
  CDR3 for beta chain variable domain of TCR clone 85085 (TRBV20-1, TRBJ2-5)
CSAGGAGETQYF

SEQ ID NO: 170171 - protein, 11 aa, Homo sapiens
  CDR3 for alpha chain variable domain of TCR clone 85086 (TRAV2, TRAJ33)
CAVESNYQLIW

SEQ ID NO: 170172 - protein, 14 aa, Homo sapiens
  CDR3 for beta chain variable domain of TCR clone 85086 (TRBV15, TRBJ2-3)
CATRSGTSTDTQYF

SEQ ID NO: 170173 - protein, 14 aa, Homo sapiens
  CDR3 for alpha chain variable domain of TCR clone 85087 (TRAV8-3, TRAJ4)
CAVGASGGYNKLIV

SEQ ID NO: 170174 - protein, 17 aa, Homo sapiens
  CDR3 for beta chain variable domain of TCR clone 85087 (TRBV11-2, TRBJ2-1)
CASSLYPPGVEYNEQFF

SEQ ID NO: 170175 - protein, 14 aa, Homo sapiens
  CDR3 for alpha chain variable domain of TCR clone 85088 (TRAV1-2, TRAJ16)
CAVNRFSDGQKPLF

SEQ ID NO: 170176 - protein, 16 aa, Homo sapiens
  CDR3 for beta chain variable domain of TCR clone 85088 (TRBV7-9, TRBJ2-1)
CASSDVAGGSYNEQFF

SEQ ID NO: 170177 - protein, 15 aa, Homo sapiens
  CDR3 for alpha chain variable domain of TCR clone 85089 (TRAV3, TRAJ22)
CAVRDRGGFARQLTF

SEQ ID NO: 170178 - protein, 13 aa, Homo sapiens
  CDR3 for beta chain variable domain of TCR clone 85089 (TRBV20-1, TRBJ1-1)
CSARVGGNTEAFF

SEQ ID NO: 170179 - protein, 15 aa, Homo sapiens
  CDR3 for alpha chain variable domain of TCR clone 85090 (TRAV17, TRAJ57)
CATGPSPGGSEKLVF

SEQ ID NO: 170180 - protein, 18 aa, Homo sapiens
  CDR3 for beta chain variable domain of TCR clone 85090 (TRBV7-9, TRBJ2-7)
CASSLTTSGSRTWYEQYF

SEQ ID NO: 170181 - protein, 14 aa, Homo sapiens
  CDR3 for alpha chain variable domain of TCR clone 85091 (TRAV17, TRAJ57)
CASDPQGGSEKLVF

SEQ ID NO: 170182 - protein, 18 aa, Homo sapiens
  CDR3 for beta chain variable domain of TCR clone 85091 (TRBV6-6, TRBJ1-3)
CASSYSKWDSISGNTIYF

SEQ ID NO: 170183 - protein, 11 aa, Homo sapiens
  CDR3 for alpha chain variable domain of TCR clone 85092 (TRAV1-2, TRAJ20)
CAVANDYKHSF

SEQ ID NO: 170184 - protein, 18 aa, Homo sapiens
  CDR3 for beta chain variable domain of TCR clone 85092 (TRBV20-1, TRBJ2-6)
CSAETTPTHGSGANVLTF

SEQ ID NO: 170185 - protein, 13 aa, Homo sapiens
  CDR3 for alpha chain variable domain of TCR clone 85093 (TRAV8-3, TRAJ8)
WDPMNTGFQKLVF

SEQ ID NO: 170186 - protein, 15 aa, Homo sapiens
  CDR3 for beta chain variable domain of TCR clone 85093 (TRBV3-1, TRBJ2-5)
CASSANLGGPETQYF

SEQ ID NO: 170187 - protein, 13 aa, Homo sapiens
  CDR3 for alpha chain variable domain of TCR clone 85094 (TRAV17, TRAJ5)
CAPMDTGRRALTF

SEQ ID NO: 170188 - protein, 20 aa, Homo sapiens
  CDR3 for beta chain variable domain of TCR clone 85094 (TRBV7-8, TRBJ2-2)
CASSHLFPGPTIHITGELFF

SEQ ID NO: 170189 - protein, 15 aa, Homo sapiens
  CDR3 for alpha chain variable domain of TCR clone 85095 (TRAV17, TRAJ57)
CATGPSQGGSEKLVF

SEQ ID NO: 170190 - protein, 15 aa, Homo sapiens
  CDR3 for beta chain variable domain of TCR clone 85095 (TRBV12-4, TRBJ1-5)
CQQPTGRGVQSAQHF

SEQ ID NO: 170191 - protein, 14 aa, Homo sapiens
  CDR3 for alpha chain variable domain of TCR clone 85096 (TRAV29/DV5, TRAJ49)
CAASLSNTGNQSYF

SEQ ID NO: 170192 - protein, 15 aa, Homo sapiens
  CDR3 for beta chain variable domain of TCR clone 85096 (TRBV20-1, TRBJ2-1)
CSARGIGGTYNEQFF

SEQ ID NO: 170193 - protein, 15 aa, Homo sapiens
  CDR3 for alpha chain variable domain of TCR clone 85097 (TRAV3, TRAJ22)
CAVRDRGGSARQLTF

SEQ ID NO: 170194 - protein, 15 aa, Homo sapiens
  CDR3 for beta chain variable domain of TCR clone 85097 (TRBV7-9, TRBJ2-7)
CASSPTGLRTYEQYF

SEQ ID NO: 170195 - protein, 16 aa, Homo sapiens
  CDR3 for alpha chain variable domain of TCR clone 85098 (TRAV3, TRAJ28)
CAVLPGSGAGSYQLTF

SEQ ID NO: 170196 - protein, 16 aa, Homo sapiens
  CDR3 for beta chain variable domain of TCR clone 85098 (TRBV20-1, TRBJ1-4)
CSAPGQGLLTNEKLFF

SEQ ID NO: 170197 - protein, 13 aa, Homo sapiens
  CDR3 for alpha chain variable domain of TCR clone 85099 (TRAV12-1, TRAJ16)
CVVNGPDGQKLLF

SEQ ID NO: 170198 - protein, 13 aa, Homo sapiens
  CDR3 for beta chain variable domain of TCR clone 85099 (TRBV2, TRBJ1-1)
CARTPTGGFHAFF

SEQ ID NO: 170199 - protein, 13 aa, Homo sapiens
  CDR3 for alpha chain variable domain of TCR clone 85100 (TRAV2, TRAJ40)
CAVVTSVTYKYIF

SEQ ID NO: 170200 - protein, 14 aa, Homo sapiens
  CDR3 for beta chain variable domain of TCR clone 85100 (TRBV7-2, TRBJ1-1)
CASSFLTGTTEAFF

SEQ ID NO: 170201 - protein, 15 aa, Homo sapiens
  CDR3 for alpha chain variable domain of TCR clone 85101 (TRAV17, TRAJ23)
CATDAEDNQGGKLIF

SEQ ID NO: 170202 - protein, 12 aa, Homo sapiens
  CDR3 for beta chain variable domain of TCR clone 85101 (TRBV2, TRBJ2-1)
CAKREGYNEQIF

SEQ ID NO: 170203 - protein, 14 aa, Homo sapiens
  CDR3 for alpha chain variable domain of TCR clone 85102 (TRAV13-1, TRAJ40)
CAASMTSGTYKYIF

SEQ ID NO: 170204 - protein, 17 aa, Homo sapiens
  CDR3 for beta chain variable domain of TCR clone 85102 (TRBV19, TRBJ2-2)
CASSIGTGGANTGELFF

SEQ ID NO: 170205 - protein, 18 aa, Homo sapiens
  CDR3 for alpha chain variable domain of TCR clone 85103 (TRAV13-1, TRAJ52)
CAASKSSAGGTSYGKLTF

SEQ ID NO: 170206 - protein, 13 aa, Homo sapiens
  CDR3 for beta chain variable domain of TCR clone 85103 (TRBV10-3, TRBJ2-7)
CASKLAVNYEQYF

SEQ ID NO: 170207 - protein, 14 aa, Homo sapiens
  CDR3 for alpha chain variable domain of TCR clone 85104 (TRAV12-2, TRAJ11)
CAVNRESGYSTLTP

SEQ ID NO: 170208 - protein, 10 aa, Homo sapiens
  CDR3 for beta chain variable domain of TCR clone 85104 (TRBV20-1, TRBJ2-5)
CSARFETQYF

SEQ ID NO: 170209 - protein, 13 aa, Homo sapiens
  CDR3 for alpha chain variable domain of TCR clone 85105 (TRAV17, TRAJ39)
CATGDNAGNMLTF

SEQ ID NO: 170210 - protein, 12 aa, Homo sapiens
  CDR3 for beta chain variable domain of TCR clone 85105 (TRBV7-8, TRBJ2-7)
CASSLGDREQYF

SEQ ID NO: 170211 - protein, 14 aa, Homo sapiens
  CDR3 for alpha chain variable domain of TCR clone 85106 (TRAV2, TRAJ9)
CAVEDRSGGFKTIF

SEQ ID NO: 170212 - protein, 13 aa, Homo sapiens
  CDR3 for beta chain variable domain of TCR clone 85106 (TRBV11-2, TRBJ2-1)
CASSLGLAGGRFF

SEQ ID NO: 170213 - protein, 15 aa, Homo sapiens
  CDR3 for alpha chain variable domain of TCR clone 85107 (TRAV25, TRAJ52)
CAGRPGGTSYGKLTF

SEQ ID NO: 170214 - protein, 12 aa, Homo sapiens
  CDR3 for beta chain variable domain of TCR clone 85107 (TRBV18, TRBJ2-1)
CASSSDEDEQFF

SEQ ID NO: 170215 - protein, 10 aa, Homo sapiens
  CDR3 for alpha chain variable domain of TCR clone 85108 (TRAV13-1, TRAJ42)
CAASLETTIL

SEQ ID NO: 170216 - protein, 12 aa, Homo sapiens
  CDR3 for beta chain variable domain of TCR clone 85108 (TRBV24-1, TRBJ2-3)
CATSDSTDTQYF

SEQ ID NO: 170217 - protein, 18 aa, Homo sapiens
  CDR3 for alpha chain variable domain of TCR clone 85109 (TRAV1-2, TRAJ18)
CAVRDMGDRGSTLGRLYF

SEQ ID NO: 170218 - protein, 16 aa, Homo sapiens
  CDR3 for beta chain variable domain of TCR clone 85109 (TRBV29-1, TRBJ1-2)
SSVEANRDIANYGYTF

SEQ ID NO: 170219 - protein, 13 aa, Homo sapiens
  CDR3 for alpha chain variable domain of TCR clone 85110 (TRAV20, TRAJ49)
CAVQARTGNQFYF

SEQ ID NO: 170220 - protein, 14 aa, Homo sapiens
  CDR3 for beta chain variable domain of TCR clone 85110 (TRBV7-2, TRBJ2-7)
CASSPKTSFYGQYF

SEQ ID NO: 170221 - protein, 15 aa, Homo sapiens
  CDR3 for alpha chain variable domain of TCR clone 85111 (TRAV12-2, TRAJ56)
CAVNPFTGANSKLTF

SEQ ID NO: 170222 - protein, 13 aa, Homo sapiens
  CDR3 for beta chain variable domain of TCR clone 85111 (TRBV20-1, TRBJ1-2)
CSARDRVYGGYSF

SEQ ID NO: 170223 - protein, 15 aa, Homo sapiens
  CDR3 for alpha chain variable domain of TCR clone 85112 (TRAV2, TRAJ11)
CAVGGRNSGYSTLTF

SEQ ID NO: 170224 - protein, 17 aa, Homo sapiens
  CDR3 for beta chain variable domain of TCR clone 85112 (TRBV11-2, TRBJ2-1)
CASSLYPPGVEYNEQFF

SEQ ID NO: 170225 - protein, 12 aa, Homo sapiens
  CDR3 for alpha chain variable domain of TCR clone 85113 (TRAV21, TRAJ33)
CAKMDSNYQLIW

SEQ ID NO: 170226 - protein, 17 aa, Homo sapiens
  CDR3 for beta chain variable domain of TCR clone 85113 (TRBV20-1, TRBJ2-2)
CSASGSGQVGLTGELFF

SEQ ID NO: 170227 - protein, 16 aa, Homo sapiens
  CDR3 for alpha chain variable domain of TCR clone 85114 (TRAV21, TRAJ17)
CAVRPGEEAAGNKLTF

SEQ ID NO: 170228 - protein, 16 aa, Homo sapiens
  CDR3 for beta chain variable domain of TCR clone 85114 (TRBV2, TRBJ2-7)
CASSAPWTGPSYEQYF

SEQ ID NO: 170229 - protein, 13 aa, Homo sapiens
  CDR3 for alpha chain variable domain of TCR clone 85115 (TRAV16, TRAJ26)
CITVLCLGQNFVF

SEQ ID NO: 170230 - protein, 12 aa, Homo sapiens
  CDR3 for beta chain variable domain of TCR clone 85115 (TRBV11-2, TRBJ2-1)
CASSPGNNEQYF

SEQ ID NO: 170231 - protein, 13 aa, Homo sapiens
  CDR3 for alpha chain variable domain of TCR clone 85116 (TRAV36/DV7, TRAJ7)
CAGTRYGNNRLAF

SEQ ID NO: 170232 - protein, 14 aa, Homo sapiens
  CDR3 for beta chain variable domain of TCR clone 85116 (TRBV19, TRBJ2-1)
CASPTFVLSGEEFF

SEQ ID NO: 170233 - protein, 12 aa, Homo sapiens
  CDR3 for alpha chain variable domain of TCR clone 85117 (TRAV17, TRAJ53)
CAGGGSNYKLTF

SEQ ID NO: 170234 - protein, 14 aa, Homo sapiens
  CDR3 for beta chain variable domain of TCR clone 85117 (TRBV7-8, TRBJ2-7)
CASSPGLADYEQYF

SEQ ID NO: 170235 - protein, 14 aa, Homo sapiens
  CDR3 for alpha chain variable domain of TCR clone 85118 (TRAV16, TRAJ31)
CSKWRRGDNARLMF

SEQ ID NO: 170236 - protein, 15 aa, Homo sapiens
  CDR3 for beta chain variable domain of TCR clone 85118 (TRBV2, TRBJ2-1)
CASSEARSAYNEQFF

SEQ ID NO: 170237 - protein, 14 aa, Homo sapiens
  CDR3 for alpha chain variable domain of TCR clone 85119 (TRAV12-1, TRAJ17)
CVVNYKAAGNKLTF

SEQ ID NO: 170238 - protein, 17 aa, Homo sapiens
  CDR3 for beta chain variable domain of TCR clone 85119 (TRBV20-1, TRBJ2-1)
CSASSAGLAGAYNEQFF

SEQ ID NO: 170239 - protein, 13 aa, Homo sapiens
  CDR3 for alpha chain variable domain of TCR clone 85120 (TRAV26-1, TRAJ48)
GIVRVVGDEKLTF

SEQ ID NO: 170240 - protein, 19 aa, Homo sapiens
  CDR3 for beta chain variable domain of TCR clone 85120 (TRBV11-3, TRBJ2-2)
CASSTRPGAKTTNTGELFF

SEQ ID NO: 170241 - protein, 17 aa, Homo sapiens
  CDR3 for alpha chain variable domain of TCR clone 85121 (TRAV3, TRAJ38)
CAVRDCLNAGNNRKRIW

SEQ ID NO: 170242 - protein, 16 aa, Homo sapiens
  CDR3 for beta chain variable domain of TCR clone 85121 (TRBV20-1, TRBJ1-4)
CSARPYGGELNEKLFF

SEQ ID NO: 170243 - protein, 11 aa, Homo sapiens
  CDR3 for alpha chain variable domain of TCR clone 85122 (TRAV20, TRAJ34)
CTRDNTDKLIF

SEQ ID NO: 170244 - protein, 15 aa, Homo sapiens
  CDR3 for beta chain variable domain of TCR clone 85122 (TRBV2, TRBJ2-1)
CASSVTSQGTDEQFF

SEQ ID NO: 170245 - protein, 14 aa, Homo sapiens
  CDR3 for alpha chain variable domain of TCR clone 85123 (TRAV38-1, TRAJ45)
CAYYSGGGADGLTF

SEQ ID NO: 170246 - protein, 11 aa, Homo sapiens
  CDR3 for beta chain variable domain of TCR clone 85123 (TRBV25-1, TRBJ1-1)
PTWGGNTEAFF

SEQ ID NO: 170247 - protein, 13 aa, Homo sapiens
  CDR3 for alpha chain variable domain of TCR clone 85124 (TRAV21, TRAJ27)
CAARPGNAGKSTF

SEQ ID NO: 170248 - protein, 13 aa, Homo sapiens
  CDR3 for beta chain variable domain of TCR clone 85124 (TRBV5-1, TRBJ2-1)
CASSLGSYNEQFF

SEQ ID NO: 170249 - protein, 13 aa, Homo sapiens
  CDR3 for alpha chain variable domain of TCR clone 85125 (TRAV21, TRAJ27)
CAARPGNAGKSTS

SEQ ID NO: 170250 - protein, 12 aa, Homo sapiens
  CDR3 for beta chain variable domain of TCR clone 85125 (TRBV6-3, TRBJ2-7)
CASSLTPYEQYF

SEQ ID NO: 170251 - protein, 13 aa, Homo sapiens
  CDR3 for alpha chain variable domain of TCR clone 85126 (TRAV36/DV7, TRAJ49)
CAVEANTGNKFYF

SEQ ID NO: 170252 - protein, 14 aa, Homo sapiens
  CDR3 for beta chain variable domain of TCR clone 85126 (TRBV20-1, TRBJ2-5)
CSASSGRAAETQYF

SEQ ID NO: 170253 - protein, 17 aa, Homo sapiens
  CDR3 for alpha chain variable domain of TCR clone 85127 (TRAV14/DV4, TRAJ28)
CAMREVSSGAGSYQLTF

SEQ ID NO: 170254 - protein, 15 aa, Homo sapiens
  CDR3 for beta chain variable domain of TCR clone 85127 (TRBV11-2, TRBJ1-6)
CASALRETGNSPLHF

SEQ ID NO: 170255 - protein, 14 aa, Homo sapiens
  CDR3 for alpha chain variable domain of TCR clone 85128 (TRAV17, TRAJ29)
CATDGGFRKHTSCL

SEQ ID NO: 170256 - protein, 18 aa, Homo sapiens
  CDR3 for beta chain variable domain of TCR clone 85128 (TRBV4-1, TRBJ2-7)
CASSQAPGTGTLGDEQYF

SEQ ID NO: 170257 - protein, 13 aa, Homo sapiens
  CDR3 for alpha chain variable domain of TCR clone 85129 (TRAV13-2, TRAJ13)
CAERPGGNQKVTF

SEQ ID NO: 170258 - protein, 16 aa, Homo sapiens
  CDR3 for beta chain variable domain of TCR clone 85129 (TRBV18, TRBJ2-5)
CASSPPSSGGAKTQYF

SEQ ID NO: 170259 - protein, 12 aa, Homo sapiens
  CDR3 for alpha chain variable domain of TCR clone 85130 (TRAV12-3, TRAJ17)
CAMTLTGNKLTF

SEQ ID NO: 170260 - protein, 15 aa, Homo sapiens
  CDR3 for beta chain variable domain of TCR clone 85130 (TRBV19, TRBJ1-5)
CASSIVWADNQPQHF

SEQ ID NO: 170261 - protein, 13 aa, Homo sapiens
  CDR3 for alpha chain variable domain of TCR clone 85131 (TRAV3, TRAJ29)
CAVRDIIDTPLVF

SEQ ID NO: 170262 - protein, 14 aa, Homo sapiens
  CDR3 for beta chain variable domain of TCR clone 85131 (TRBV27, TRBJ2-1)
CDSSATGGYNEQFF

SEQ ID NO: 170263 - protein, 12 aa, Homo sapiens
  CDR3 for alpha chain variable domain of TCR clone 85132 (TRAV27, TRAJ35)
CAGADFGNVQHC

SEQ ID NO: 170264 - protein, 16 aa, Homo sapiens
  CDR3 for beta chain variable domain of TCR clone 85132 (TRBV6-1, TRBJ2-1)
CASILRQGSSYNEQFF

SEQ ID NO: 170265 - protein, 13 aa, Homo sapiens
  CDR3 for alpha chain variable domain of TCR clone 85133 (TRAV8-3, TRAJ48)
CAVVPFGNEKLTF

SEQ ID NO: 170266 - protein, 15 aa, Homo sapiens
  CDR3 for beta chain variable domain of TCR clone 85133 (TRBV11-2, TRBJ2-1)
CASSSPSIRYNEQFF

SEQ ID NO: 170267 - protein, 16 aa, Homo sapiens
  CDR3 for alpha chain variable domain of TCR clone 85134 (TRAV8-3, TRAJ8)
CAVPRDGNTGFQKLGF

SEQ ID NO: 170268 - protein, 14 aa, Homo sapiens
  CDR3 for beta chain variable domain of TCR clone 85134 (TRBV4-1, TRBJ2-2)
CASSQAVNTGELFF

SEQ ID NO: 170269 - protein, 15 aa, Homo sapiens
  CDR3 for alpha chain variable domain of TCR clone 85135 (TRAV10, TRAJ39)
CVVSASGNAGNMLTF

SEQ ID NO: 170270 - protein, 13 aa, Homo sapiens
  CDR3 for beta chain variable domain of TCR clone 85135 (TRBV18, TRBJ2-7)
CASQSGGGYEQHF

SEQ ID NO: 170271 - protein, 14 aa, Homo sapiens
  CDR3 for alpha chain variable domain of TCR clone 85136 (TRAV12-3, TRAJ10)
SHLPLTGGGNKLTF

SEQ ID NO: 170272 - protein, 14 aa, Homo sapiens
  CDR3 for beta chain variable domain of TCR clone 85136 (TRBV19, TRBJ2-7)
CASSIFAGTYEQYF

SEQ ID NO: 170273 - protein, 12 aa, Homo sapiens
  CDR3 for alpha chain variable domain of TCR clone 85137 (TRAV2, TRAJ31)
CAVEDSNARLMF

SEQ ID NO: 170274 - protein, 14 aa, Homo sapiens
  CDR3 for beta chain variable domain of TCR clone 85137 (TRBV7-3, TRBJ1-1)
CASSLGTGYTEAFF

SEQ ID NO: 170275 - protein, 13 aa, Homo sapiens
  CDR3 for alpha chain variable domain of TCR clone 85138 (TRAV12-2, TRAJ42)
CAVKRGSQGNLIF

SEQ ID NO: 170276 - protein, 14 aa, Homo sapiens
  CDR3 for beta chain variable domain of TCR clone 85138 (TRBV7-2, TRBJ2-7)
CASSSQTGPYEQYF

SEQ ID NO: 170277 - protein, 17 aa, Homo sapiens
  CDR3 for alpha chain variable domain of TCR clone 85139 (TRAV8-6, TRAJ58)
CAVSSWVGETSGSRLTF

SEQ ID NO: 170278 - protein, 15 aa, Homo sapiens
  CDR3 for beta chain variable domain of TCR clone 85139 (TRBV6-5, TRBJ2-1)
CASGYDAGAGNEQFF

SEQ ID NO: 170279 - protein, 13 aa, Homo sapiens
  CDR3 for alpha chain variable domain of TCR clone 85140 (TRAV38-2/DV8, TRAJ34)
CAYRTWNTDKLIF

SEQ ID NO: 170280 - protein, 14 aa, Homo sapiens
  CDR3 for beta chain variable domain of TCR clone 85140 (TRBV4-1, TRBJ2-7)
CASSPVAGGDEQYF

SEQ ID NO: 170281 - protein, 17 aa, Homo sapiens
  CDR3 for alpha chain variable domain of TCR clone 85141 (TRAV3, TRAJ42)
CAVRDRDYGGCQGNLIF

SEQ ID NO: 170282 - protein, 15 aa, Homo sapiens
  CDR3 for beta chain variable domain of TCR clone 85141 (TRBV2, TRBJ2-7)
CASSEGLARSYEQYF

SEQ ID NO: 170283 - protein, 12 aa, Homo sapiens
  CDR3 for alpha chain variable domain of TCR clone 85142 (TRAV12-3, TRAJ17)
CAMTLTGNKLTF

SEQ ID NO: 170284 - protein, 15 aa, Homo sapiens
  CDR3 for beta chain variable domain of TCR clone 85142 (TRBV20-1, TRBJ2-7)
GSARDWVSGMDEQYF

SEQ ID NO: 170285 - protein, 14 aa, Homo sapiens
  CDR3 for alpha chain variable domain of TCR clone 85143 (TRAV1-2, TRAJ8)
CAVREDTGFQKLVF

SEQ ID NO: 170286 - protein, 14 aa, Homo sapiens
  CDR3 for beta chain variable domain of TCR clone 85143 (TRBV18, TRBJ2-7)
CASSPPGQPYEQYF

SEQ ID NO: 170287 - protein, 12 aa, Homo sapiens
  CDR3 for alpha chain variable domain of TCR clone 85144 (TRAV35, TRAJ49)
CAGWNTGNQFYF

SEQ ID NO: 170288 - protein, 17 aa, Homo sapiens
  CDR3 for beta chain variable domain of TCR clone 85144 (TRBV7-3, TRBJ2-3)
RASSLMKRMRGADTQYF

SEQ ID NO: 170289 - protein, 15 aa, Homo sapiens
  CDR3 for alpha chain variable domain of TCR clone 85145 (TRAV12-2, TRAJ43)
CAFDMRFGAGTRLTV

SEQ ID NO: 170290 - protein, 18 aa, Homo sapiens
  CDR3 for beta chain variable domain of TCR clone 85145 (TRBV11-2, TRBJ2-3)
CASSLGGASRGAPNTQYF

SEQ ID NO: 170291 - protein, 17 aa, Homo sapiens
  CDR3 for alpha chain variable domain of TCR clone 85146 (TRAV3, TRAJ12)
CAVRDGGRRDSSYKLIF

SEQ ID NO: 170292 - protein, 14 aa, Homo sapiens
  CDR3 for beta chain variable domain of TCR clone 85146 (TRBV7-9, TRBJ1-2)
CASSRQGANYGYTF

SEQ ID NO: 170293 - protein, 15 aa, Homo sapiens
  CDR3 for alpha chain variable domain of TCR clone 85147 (TRAV1-2, TRAJ30)
CAVRPHGNRDDKIIF

SEQ ID NO: 170294 - protein, 13 aa, Homo sapiens
  CDR3 for beta chain variable domain of TCR clone 85147 (TRBV4-1, TRBJ2-7)
CASSQGQTYEQYF

SEQ ID NO: 170295 - protein, 14 aa, Homo sapiens
  CDR3 for alpha chain variable domain of TCR clone 85148 (TRAV1-2, TRAJ8)
CAVIEDTGFQKLVF

SEQ ID NO: 170296 - protein, 15 aa, Homo sapiens
  CDR3 for beta chain variable domain of TCR clone 85148 (TRBV12-4, TRBJ2-5)
CASSPPTGLQETQYF

SEQ ID NO: 170297 - protein, 11 aa, Homo sapiens
  CDR3 for alpha chain variable domain of TCR clone 85149 (TRAV17, TRAJ31)
CATSNSARLMF

SEQ ID NO: 170298 - protein, 16 aa, Homo sapiens
  CDR3 for beta chain variable domain of TCR clone 85149 (TRBV7-8, TRBJ2-4)
CASSAERTLAKNIQYF

SEQ ID NO: 170299 - protein, 14 aa, Homo sapiens
  CDR3 for alpha chain variable domain of TCR clone 85150 (TRAV1-2, TRAJ8)
CAVREDTGFQKLVF

SEQ ID NO: 170300 - protein, 13 aa, Homo sapiens
  CDR3 for beta chain variable domain of TCR clone 85150 (TRBV6-4, TRBJ1-5)
CASCADLNQPQHF

SEQ ID NO: 170301 - protein, 13 aa, Homo sapiens
  CDR3 for alpha chain variable domain of TCR clone 85151 (TRAV21, TRAJ15)
CAVANQAGTALIF

SEQ ID NO: 170302 - protein, 14 aa, Homo sapiens
  CDR3 for beta chain variable domain of TCR clone 85151 (TRBV20-1, TRBJ1-1)
CSAQTRIGGTEAFF

SEQ ID NO: 170303 - protein, 14 aa, Homo sapiens
  CDR3 for alpha chain variable domain of TCR clone 85152 (TRAV21, TRAJ35)
CAVMPMGFGNVLHC

SEQ ID NO: 170304 - protein, 12 aa, Homo sapiens
  CDR3 for beta chain variable domain of TCR clone 85152 (TRBV7-9, TRBJ2-7)
CASSIKREEQYF

SEQ ID NO: 170305 - protein, 14 aa, Homo sapiens
  CDR3 for alpha chain variable domain of TCR clone 85153 (TRAV13-2, TRAJ42)
CGEWVGGSQGNLIF

SEQ ID NO: 170306 - protein, 12 aa, Homo sapiens
  CDR3 for beta chain variable domain of TCR clone 85153 (TRBV7-8, TRBJ2-7)
CASSLGDREQYF

SEQ ID NO: 170307 - protein, 15 aa, Homo sapiens
  CDR3 for alpha chain variable domain of TCR clone 85154 (TRAV25, TRAJ52)
CAGTSGGTSNGKLTF

SEQ ID NO: 170308 - protein, 13 aa, Homo sapiens
  CDR3 for beta chain variable domain of TCR clone 85154 (TRBV6-5, TRBJ2-5)
CASSPQGGETQYF

SEQ ID NO: 170309 - protein, 12 aa, Homo sapiens
  CDR3 for alpha chain variable domain of TCR clone 85155 (TRAV27, TRAJ35)
CAGADFGNVLHC

SEQ ID NO: 170310 - protein, 17 aa, Homo sapiens
  CDR3 for beta chain variable domain of TCR clone 85155 (TRBV19, TRBJ2-7)
CASSISFYDSYPYEQYF

SEQ ID NO: 170311 - protein, 14 aa, Homo sapiens
  CDR3 for alpha chain variable domain of TCR clone 85156 (TRAV13-1, TRAJ9)
CAASALTGGVKTIF

SEQ ID NO: 170312 - protein, 13 aa, Homo sapiens
  CDR3 for beta chain variable domain of TCR clone 85156 (TRBV20-1, TRBJ1-1)
CSAGTVGNTEAFF

SEQ ID NO: 170313 - protein, 17 aa, Homo sapiens
  CDR3 for alpha chain variable domain of TCR clone 85157 (TRAV3, TRAJ6)
CAVRDGPRAGGSDIPTS

SEQ ID NO: 170314 - protein, 14 aa, Homo sapiens
  CDR3 for beta chain variable domain of TCR clone 85157 (TRBV7-2, TRBJ2-7)
CASSPKTSFYEQYF

SEQ ID NO: 170315 - protein, 14 aa, Homo sapiens
  CDR3 for alpha chain variable domain of TCR clone 85158 (TRAV13-2, TRAJ43)
CAEIPTYNNNDMRF

SEQ ID NO: 170316 - protein, 15 aa, Homo sapiens
  CDR3 for beta chain variable domain of TCR clone 85158 (TRBV7-9, TRBJ2-2)
CASGPLDTFTGELFF

SEQ ID NO: 170317 - protein, 15 aa, Homo sapiens
  CDR3 for alpha chain variable domain of TCR clone 85159 (TRAV38-1, TRAJ37)
CAFIFGSGNTGKLIF

SEQ ID NO: 170318 - protein, 12 aa, Homo sapiens
  CDR3 for beta chain variable domain of TCR clone 85159 (TRBV7-9, TRBJ2-7)
CASSLEGYEQHF

SEQ ID NO: 170319 - protein, 14 aa, Homo sapiens
  CDR3 for alpha chain variable domain of TCR clone 85160 (TRAV12-3, TRAJ10)
SHLPLTGGGNKLTF

SEQ ID NO: 170320 - protein, 15 aa, Homo sapiens
  CDR3 for beta chain variable domain of TCR clone 85160 (TRBV29-1, TRBJ2-7)
CSVEFFDKGSYEQYF

SEQ ID NO: 170321 - protein, 16 aa, Homo sapiens
  CDR3 for alpha chain variable domain of TCR clone 85161 (TRAV12-3, TRAJ20)
CAMDKLSFGAGTTVTV

SEQ ID NO: 170322 - protein, 14 aa, Homo sapiens
  CDR3 for beta chain variable domain of TCR clone 85161 (TRBV5-4, TRBJ2-2)
CASSLTSRTGELFF

SEQ ID NO: 170323 - protein, 14 aa, Homo sapiens
  CDR3 for alpha chain variable domain of TCR clone 85162 (TRAV12-3, TRAJ42)
CAMNYGGSQGNLIF

SEQ ID NO: 170324 - protein, 14 aa, Homo sapiens
  CDR3 for beta chain variable domain of TCR clone 85162 (TRBV7-2, TRBJ2-7)
CASSPKTSFYEQYF

SEQ ID NO: 170325 - protein, 14 aa, Homo sapiens
  CDR3 for alpha chain variable domain of TCR clone 85163 (TRAV13-2, TRAJ17)
CAENSKAAGNKLTF

SEQ ID NO: 170326 - protein, 14 aa, Homo sapiens
  CDR3 for beta chain variable domain of TCR clone 85163 (TRBV19, TRBJ2-1)
CASSTFVLSGEQFF

SEQ ID NO: 170327 - protein, 14 aa, Homo sapiens
  CDR3 for alpha chain variable domain of TCR clone 85164 (TRAV8-3, TRAJ9)
CAVVYNTGGFKTIF

SEQ ID NO: 170328 - protein, 15 aa, Homo sapiens
  CDR3 for beta chain variable domain of TCR clone 85164 (TRBV9, TRBJ1-6)
CASSVAGTGDSPLHF

SEQ ID NO: 170329 - protein, 13 aa, Homo sapiens
  CDR3 for alpha chain variable domain of TCR clone 85165 (TRAV13-1, TRAJ21)
CAASIYNFNKFYF

SEQ ID NO: 170330 - protein, 12 aa, Homo sapiens
  CDR3 for beta chain variable domain of TCR clone 85165 (TRBV7-8, TRBJ2-7)
CASSLGDREQYF

SEQ ID NO: 170331 - protein, 13 aa, Homo sapiens
  CDR3 for alpha chain variable domain of TCR clone 85166 (TRAV3, TRAJ27)
CAVRPLGAGKSTF

SEQ ID NO: 170332 - protein, 12 aa, Homo sapiens
  CDR3 for beta chain variable domain of TCR clone 85166 (TRBV5-5, TRBJ2-5)
CASSYFGETQYF

SEQ ID NO: 170333 - protein, 14 aa, Homo sapiens
  CDR3 for alpha chain variable domain of TCR clone 85167 (TRAV13-1, TRAJ35)
CAASKGGFGNVLHC

SEQ ID NO: 170334 - protein, 15 aa, Homo sapiens
  CDR3 for beta chain variable domain of TCR clone 85167 (TRBV7-9, TRBJ1-5)
CASSQGHQPNQPQHF

SEQ ID NO: 170335 - protein, 12 aa, Homo sapiens
  CDR3 for alpha chain variable domain of TCR clone 85168 (TRAV13-1, TRAJ53)
CAAGGSNYKLTF

SEQ ID NO: 170336 - protein, 11 aa, Homo sapiens
  CDR3 for beta chain variable domain of TCR clone 85168 (TRBV2, TRBJ1-1)
CASREGTEALF

SEQ ID NO: 170337 - protein, 15 aa, Homo sapiens
  CDR3 for alpha chain variable domain of TCR clone 85169 (TRAV17, TRAJ34)
CATDPRMVDTDKLIF

SEQ ID NO: 170338 - protein, 12 aa, Homo sapiens
  CDR3 for beta chain variable domain of TCR clone 85169 (TRBV10-2, TRBJ2-3)
CASSEGPGHRYF

SEQ ID NO: 170339 - protein, 13 aa, Homo sapiens
  CDR3 for alpha chain variable domain of TCR clone 85170 (TRAV9-2, TRAJ53)
CALSGGSNYNLTF

SEQ ID NO: 170340 - protein, 17 aa, Homo sapiens
  CDR3 for beta chain variable domain of TCR clone 85170 (TRBV11-2, TRBJ2-1)
CASSLYPPGVEYNEQFF

SEQ ID NO: 170341 - protein, 12 aa, Homo sapiens
  CDR3 for alpha chain variable domain of TCR clone 85171 (TRAV8-3, TRAJ20)
CAVGANDYKLSF

SEQ ID NO: 170342 - protein, 16 aa, Homo sapiens
  CDR3 for beta chain variable domain of TCR clone 85171 (TRBV19, TRBJ2-2)
CASRSPGTGATGELFF

SEQ ID NO: 170343 - protein, 18 aa, Homo sapiens
  CDR3 for alpha chain variable domain of TCR clone 85172 (TRAV21, TRAJ52)
CAVRPSPAGGTSYGKLTF

SEQ ID NO: 170344 - protein, 15 aa, Homo sapiens
  CDR3 for beta chain variable domain of TCR clone 85172 (TRBV2, TRBJ2-1)
CASSEEREGDNEQFF

SEQ ID NO: 170345 - protein, 17 aa, Homo sapiens
  CDR3 for alpha chain variable domain of TCR clone 85173 (TRAV1-2, TRAJ8)
CAVRDPAENTGFQKLVF

SEQ ID NO: 170346 - protein, 16 aa, Homo sapiens
  CDR3 for beta chain variable domain of TCR clone 85173 (TRBV7-9, TRBJ2-2)
CASSGFGGANTGELFF

SEQ ID NO: 170347 - protein, 15 aa, Homo sapiens
  CDR3 for alpha chain variable domain of TCR clone 85174 (TRAV27, TRAJ38)
CAARRNAGNNRKLIW

SEQ ID NO: 170348 - protein, 14 aa, Homo sapiens
  CDR3 for beta chain variable domain of TCR clone 85174 (TRBV6-6, TRBJ2-7)
CASSIAGGVDEQYF

SEQ ID NO: 170349 - protein, 13 aa, Homo sapiens
  CDR3 for alpha chain variable domain of TCR clone 85175 (TRAV3, TRAJ27)
CAVRPLGAGKSTF

SEQ ID NO: 170350 - protein, 16 aa, Homo sapiens
  CDR3 for beta chain variable domain of TCR clone 85175 (TRBV7-9, TRBJ2-7)
CASSSPSANTVNEQYF

SEQ ID NO: 170351 - protein, 15 aa, Homo sapiens
  CDR3 for alpha chain variable domain of TCR clone 85176 (TRAV17, TRAJ56)
CATEPFTGANSKLTF

SEQ ID NO: 170352 - protein, 12 aa, Homo sapiens
  CDR3 for beta chain variable domain of TCR clone 85176 (TRBV5-4, TRBJ2-5)
CASSSTRETQYF

SEQ ID NO: 170353 - protein, 13 aa, Homo sapiens
  CDR3 for alpha chain variable domain of TCR clone 85177 (TRAV23/DV6, TRAJ22)
CAPYSGSARQLTF

SEQ ID NO: 170354 - protein, 15 aa, Homo sapiens
  CDR3 for beta chain variable domain of TCR clone 85177 (TRBV11-2, TRBJ1-6)
CACSLDPWAVSPLHF

SEQ ID NO: 170355 - protein, 12 aa, Homo sapiens
  CDR3 for alpha chain variable domain of TCR clone 85178 (TRAV21, TRAJ11)
CAATSGYSTLTF

SEQ ID NO: 170356 - protein, 14 aa, Homo sapiens
  CDR3 for beta chain variable domain of TCR clone 85178 (TRBV20-1, TRBJ2-7)
CSAPGRAGVGEQYF

SEQ ID NO: 170357 - protein, 15 aa, Homo sapiens
  CDR3 for alpha chain variable domain of TCR clone 85179 (TRAV38-2/DV8, TRAJ48)
CAFRSGGFGNEKLTF

SEQ ID NO: 170358 - protein, 16 aa, Homo sapiens
  CDR3 for beta chain variable domain of TCR clone 85179 (TRBV28, TRBJ2-7)
CASSPWVATGDLSQYF

SEQ ID NO: 170359 - protein, 14 aa, Homo sapiens
  CDR3 for alpha chain variable domain of TCR clone 85180 (TRAV1-2, TRAJ8)
CAVREDTGFQKLVF

SEQ ID NO: 170360 - protein, 15 aa, Homo sapiens
  CDR3 for beta chain variable domain of TCR clone 85180 (TRBV7-9, TRBJ1-6)
CASSSPGPGNSPLHF

SEQ ID NO: 170361 - protein, 16 aa, Homo sapiens
  CDR3 for alpha chain variable domain of TCR clone 85181 (TRAV30, TRAJ24)
CGTEIVDADSWGKFQF

SEQ ID NO: 170362 - protein, 15 aa, Homo sapiens
  CDR3 for beta chain variable domain of TCR clone 85181 (TRBV20-1, TRBJ2-4)
CSARDLTGGANIQYF

SEQ ID NO: 170363 - protein, 13 aa, Homo sapiens
  CDR3 for alpha chain variable domain of TCR clone 85182 (TRAV8-3, TRAJ28)
CAVGAVGSYQLTF

SEQ ID NO: 170364 - protein, 14 aa, Homo sapiens
  CDR3 for beta chain variable domain of TCR clone 85182 (TRBV7-2, TRBJ2-7)
CASSLWTGGYEQYF

SEQ ID NO: 170365 - protein, 16 aa, Homo sapiens
  CDR3 for alpha chain variable domain of TCR clone 85183 (TRAV3, TRAJ37)
CAVRGTGSGNTGKLIF

SEQ ID NO: 170366 - protein, 15 aa, Homo sapiens
  CDR3 for beta chain variable domain of TCR clone 85183 (TRBV7-3, TRBJ2-2)
CASSETGQGTGELFF

SEQ ID NO: 170367 - protein, 14 aa, Homo sapiens
  CDR3 for alpha chain variable domain of TCR clone 85184 (TRAV17, TRAJ22)
CATSPSGSARQLTF

SEQ ID NO: 170368 - protein, 13 aa, Homo sapiens
  CDR3 for beta chain variable domain of TCR clone 85184 (TRBV15, TRBJ2-7)
CATSTTGHYEQYF

SEQ ID NO: 170369 - protein, 12 aa, Homo sapiens
  CDR3 for alpha chain variable domain of TCR clone 85185 (TRAV35, TRAJ30)
CAGQLADDKIIF

SEQ ID NO: 170370 - protein, 14 aa, Homo sapiens
  CDR3 for beta chain variable domain of TCR clone 85185 (TRBV7-9, TRBJ2-7)
CASSLEAVGDEQYF

SEQ ID NO: 170371 - protein, 15 aa, Homo sapiens
  CDR3 for alpha chain variable domain of TCR clone 85186 (TRAV3, TRAJ22)
CAVRDRGGSARQLTV

SEQ ID NO: 170372 - protein, 14 aa, Homo sapiens
  CDR3 for beta chain variable domain of TCR clone 85186 (TRBV19, TRBJ2-1)
CASSRLASINEQFF

SEQ ID NO: 170373 - protein, 12 aa, Homo sapiens
  CDR3 for alpha chain variable domain of TCR clone 85187 (TRAV13-1, TRAJ53)
AASGGSNYKLTF

SEQ ID NO: 170374 - protein, 12 aa, Homo sapiens
  CDR3 for beta chain variable domain of TCR clone 85187 (TRBV28, TRBJ2-3)
CASSLYRDTQYF

SEQ ID NO: 170375 - protein, 16 aa, Homo sapiens
  CDR3 for alpha chain variable domain of TCR clone 85188 (TRAV21, TRAJ52)
CAVTNAGGTSYGKLTF

SEQ ID NO: 170376 - protein, 13 aa, Homo sapiens
  CDR3 for beta chain variable domain of TCR clone 85188 (TRBV20-1, TRBJ2-3)
CSARLVGTDTQYF

SEQ ID NO: 170377 - protein, 13 aa, Homo sapiens
  CDR3 for alpha chain variable domain of TCR clone 85189 (TRAV8-3, TRAJ47)
CAVSMEYGNKLVF

SEQ ID NO: 170378 - protein, 14 aa, Homo sapiens
  CDR3 for beta chain variable domain of TCR clone 85189 (TRBV2, TRBJ1-5)
FASSGTGFNQPQHF

SEQ ID NO: 170379 - protein, 15 aa, Homo sapiens
  CDR3 for alpha chain variable domain of TCR clone 85190 (TRAV8-3, TRAJ7)
CAVGSISYGNNRLAF

SEQ ID NO: 170380 - protein, 14 aa, Homo sapiens
  CDR3 for beta chain variable domain of TCR clone 85190 (TRBV7-6, TRBJ2-3)
CASSLGTVTDTQYF

SEQ ID NO: 170381 - protein, 17 aa, Homo sapiens
  CDR3 for alpha chain variable domain of TCR clone 85191 (TRAV13-1, TRAJ52)
CAASSSAGGTSYGKLTF

SEQ ID NO: 170382 - protein, 15 aa, Homo sapiens
  CDR3 for beta chain variable domain of TCR clone 85191 (TRBV28, TRBJ2-4)
CAAGSGTLLMGIQYF

SEQ ID NO: 170383 - protein, 18 aa, Homo sapiens
  CDR3 for alpha chain variable domain of TCR clone 85192 (TRAV21, TRAJ52)
CAVRPSPAGGTSYGKLTF

SEQ ID NO: 170384 - protein, 16 aa, Homo sapiens
  CDR3 for beta chain variable domain of TCR clone 85192 (TRBV27, TRBJ2-2)
CASSSSGVSNTGELFF

SEQ ID NO: 170385 - protein, 14 aa, Homo sapiens
  CDR3 for alpha chain variable domain of TCR clone 85193 (TRAV12-2, TRAJ45)
CALPERGGADGLTF

SEQ ID NO: 170386 - protein, 16 aa, Homo sapiens
  CDR3 for beta chain variable domain of TCR clone 85193 (TRBV7-8, TRBJ2-4)
CASSAERTLAKNIQYF

SEQ ID NO: 170387 - protein, 14 aa, Homo sapiens
  CDR3 for alpha chain variable domain of TCR clone 85194 (TRAV2, TRAJ23)
CAVGLRNQGGKLIF

SEQ ID NO: 170388 - protein, 12 aa, Homo sapiens
  CDR3 for beta chain variable domain of TCR clone 85194 (TRBV11-2, TRBJ2-2)
CASSLGGGELFF

SEQ ID NO: 170389 - protein, 17 aa, Homo sapiens
  CDR3 for alpha chain variable domain of TCR clone 85195 (TRAV3, TRAJ42)
CAVRDRDYGGSQGNLIF

SEQ ID NO: 170390 - protein, 15 aa, Homo sapiens
  CDR3 for beta chain variable domain of TCR clone 85195 (TRBV7-8, TRBJ2-1)
CASSLADSLYNEQFF

SEQ ID NO: 170391 - protein, 12 aa, Homo sapiens
  CDR3 for alpha chain variable domain of TCR clone 85196 (TRAV2, TRAJ33)
CAFMDSNYQLIW

SEQ ID NO: 170392 - protein, 16 aa, Homo sapiens
  CDR3 for beta chain variable domain of TCR clone 85196 (TRBV2, TRBJ2-7)
CASSEPWTGTSYEQYF

SEQ ID NO: 170393 - protein, 13 aa, Homo sapiens
  CDR3 for alpha chain variable domain of TCR clone 85197 (TRAV12-3, TRAJ39)
CAMIDDAGNMLTF

SEQ ID NO: 170394 - protein, 18 aa, Homo sapiens
  CDR3 for beta chain variable domain of TCR clone 85197 (TRBV9, TRBJ2-5)
CASSVAEGTNAFGETQYF

SEQ ID NO: 170395 - protein, 14 aa, Homo sapiens
  CDR3 for alpha chain variable domain of TCR clone 85198 (TRAV12-2, TRAJ13)
CAVKKTGGYQKVTF

SEQ ID NO: 170396 - protein, 16 aa, Homo sapiens
  CDR3 for beta chain variable domain of TCR clone 85198 (TRBV6-1, TRBJ1-3)
CASVQGGVETPYILER

SEQ ID NO: 170397 - protein, 12 aa, Homo sapiens
  CDR3 for alpha chain variable domain of TCR clone 85199 (TRAV13-1, TRAJ21)
CAAKEGFNKFYF

SEQ ID NO: 170398 - protein, 16 aa, Homo sapiens
  CDR3 for beta chain variable domain of TCR clone 85199 (TRBV7-3, TRBJ2-1)
CASSKPLAGGYNEQFF

SEQ ID NO: 170399 - protein, 11 aa, Homo sapiens
  CDR3 for alpha chain variable domain of TCR clone 85200 (TRAV12-1, TRAJ43)
CVEYDNNDMRF

SEQ ID NO: 170400 - protein, 15 aa, Homo sapiens
  CDR3 for beta chain variable domain of TCR clone 85200 (TRBV18, TRBJ2-5)
CANSPRASEAETQYF

SEQ ID NO: 170401 - protein, 16 aa, Homo sapiens
  CDR3 for alpha chain variable domain of TCR clone 85201 (TRAV3, TRAJ37)
CAVRGKWSGNTGKLIF

SEQ ID NO: 170402 - protein, 16 aa, Homo sapiens
  CDR3 for beta chain variable domain of TCR clone 85201 (TRBV12-4, TRBJ1-5)
CASSRPVGGSNQPQHF

SEQ ID NO: 170403 - protein, 14 aa, Homo sapiens
  CDR3 for alpha chain variable domain of TCR clone 85202 (TRAV9-2, TRAJ39)
CALYIYNAGNMLTF

SEQ ID NO: 170404 - protein, 15 aa, Homo sapiens
  CDR3 for beta chain variable domain of TCR clone 85202 (TRBV29-1, TRBJ1-2)
CSVVLEAGSNYGYTF

SEQ ID NO: 170405 - protein, 14 aa, Homo sapiens
  CDR3 for alpha chain variable domain of TCR clone 85203 (TRAV8-1, TRAJ5)
CAVSMDTGRRALTF

SEQ ID NO: 170406 - protein, 15 aa, Homo sapiens
  CDR3 for beta chain variable domain of TCR clone 85203 (TRBV19, TRBJ1-2)
CASGVGQVLNYGYTF

SEQ ID NO: 170407 - protein, 16 aa, Homo sapiens
  CDR3 for alpha chain variable domain of TCR clone 85204 (TRAV1-2, TRAJ10)
CAVRGVLTGGGNKLTF

SEQ ID NO: 170408 - protein, 20 aa, Homo sapiens
  CDR3 for beta chain variable domain of TCR clone 85204 (TRBV7-8, TRBJ2-2)
CASSHLFPGPTIQITGELFF

SEQ ID NO: 170409 - protein, 17 aa, Homo sapiens
  CDR3 for alpha chain variable domain of TCR clone 85205 (TRAV13-1, )
CAANIQNPDPAVYQLRD

SEQ ID NO: 170410 - protein, 20 aa, Homo sapiens
  CDR3 for beta chain variable domain of TCR clone 85205 (TRBV7-8, TRBJ2-2)
CASSHLFPGPTIHITGELFF

SEQ ID NO: 170411 - protein, 16 aa, Homo sapiens
  CDR3 for alpha chain variable domain of TCR clone 85206 (TRAV16, TRAJ52)
CALSAAGGTSYGKLTF

SEQ ID NO: 170412 - protein, 12 aa, Homo sapiens
  CDR3 for beta chain variable domain of TCR clone 85206 (TRBV12-4, TRBJ1-3)
CSSSFSGNTIYF

SEQ ID NO: 170413 - protein, 15 aa, Homo sapiens
  CDR3 for alpha chain variable domain of TCR clone 85207 (TRAV20, TRAJ50)
CAVRQMKTSYDKVIF

SEQ ID NO: 170414 - protein, 15 aa, Homo sapiens
  CDR3 for beta chain variable domain of TCR clone 85207 (TRBV7-9, TRBJ1-6)
CASSSPGRGNSPLHF

SEQ ID NO: 170415 - protein, 11 aa, Homo sapiens
  CDR3 for alpha chain variable domain of TCR clone 85208 (TRAV1-2, TRAJ31)
CAVNNNARLMF

SEQ ID NO: 170416 - protein, 14 aa, Homo sapiens
  CDR3 for beta chain variable domain of TCR clone 85208 (TRBV18, TRBJ2-5)
CASSPGVSQETQYF

SEQ ID NO: 170417 - protein, 15 aa, Homo sapiens
  CDR3 for alpha chain variable domain of TCR clone 85209 (TRAV12-2, TRAJ53)
CAVNGGGGSNYKLTF

SEQ ID NO: 170418 - protein, 17 aa, Homo sapiens
  CDR3 for beta chain variable domain of TCR clone 85209 (TRBV7-3, TRBJ2-3)
CASSLMKGMRGADTQYF

SEQ ID NO: 170419 - protein, 17 aa, Homo sapiens
  CDR3 for alpha chain variable domain of TCR clone 85210 (TRAV4, TRAJ42)
CLVGVLNYGGSQGNLIF

SEQ ID NO: 170420 - protein, 12 aa, Homo sapiens
  CDR3 for beta chain variable domain of TCR clone 85210 (TRBV20-1, TRBJ2-1)
CSAQYTYDEQFF

SEQ ID NO: 170421 - protein, 15 aa, Homo sapiens
  CDR3 for alpha chain variable domain of TCR clone 85211 (TRAV23/DV6, TRAJ12)
CAAIDLGAMDSSYNL

SEQ ID NO: 170422 - protein, 12 aa, Homo sapiens
  CDR3 for beta chain variable domain of TCR clone 85211 (TRBV10-3, TRBJ2-2)
CAIRENTGELFF

SEQ ID NO: 170423 - protein, 12 aa, Homo sapiens
  CDR3 for alpha chain variable domain of TCR clone 85212 (TRAV2, TRAJ24)
CAATDSWGKFQF

SEQ ID NO: 170424 - protein, 16 aa, Homo sapiens
  CDR3 for beta chain variable domain of TCR clone 85212 (TRBV7-3, TRBJ2-2)
CASSLKRGTLSGELFF

SEQ ID NO: 170425 - protein, 15 aa, Homo sapiens
  CDR3 for alpha chain variable domain of TCR clone 85213 (TRAV38-2/DV8, TRAJ57)
CAYKSGLGGSEKLVF

SEQ ID NO: 170426 - protein, 16 aa, Homo sapiens
  CDR3 for beta chain variable domain of TCR clone 85213 (TRBV28, TRBJ1-5)
CASSFRGGYINQPQHF

SEQ ID NO: 170427 - protein, 13 aa, Homo sapiens
  CDR3 for alpha chain variable domain of TCR clone 85214 (TRAV8-2, TRAJ36)
CVVSHLPTNNLFF

SEQ ID NO: 170428 - protein, 18 aa, Homo sapiens
  CDR3 for beta chain variable domain of TCR clone 85214 (TRBV7-9, TRBJ2-6)
CASSFPGAGSSGANVLTF

SEQ ID NO: 170429 - protein, 14 aa, Homo sapiens
  CDR3 for alpha chain variable domain of TCR clone 85215 (TRAV8-2, TRAJ11)
CVVSEKSGYSTLTF

SEQ ID NO: 170430 - protein, 14 aa, Homo sapiens
  CDR3 for beta chain variable domain of TCR clone 85215 (TRBV4-2, TRBJ2-1)
CASGLDRAYNEQFF

SEQ ID NO: 170431 - protein, 14 aa, Homo sapiens
  CDR3 for alpha chain variable domain of TCR clone 85216 (TRAV1-2, TRAJ16)
CAVNRFSDGQKLLF

SEQ ID NO: 170432 - protein, 16 aa, Homo sapiens
  CDR3 for beta chain variable domain of TCR clone 85216 (TRBV20-1, TRBJ2-1)
CSASLAGGPGYNEQFF

SEQ ID NO: 170433 - protein, 13 aa, Homo sapiens
  CDR3 for alpha chain variable domain of TCR clone 85217 (TRAV12-3, TRAJ5)
CAMRPTARRALTF

SEQ ID NO: 170434 - protein, 13 aa, Homo sapiens
  CDR3 for beta chain variable domain of TCR clone 85217 (TRBV2, TRBJ2-7)
CASSVVEAYEQYF

SEQ ID NO: 170435 - protein, 17 aa, Homo sapiens
  CDR3 for alpha chain variable domain of TCR clone 85218 (TRAV3, TRAJ38)
CAVRDCLNAGNNRKLIL

SEQ ID NO: 170436 - protein, 15 aa, Homo sapiens
  CDR3 for beta chain variable domain of TCR clone 85218 (TRBV27, TRBJ2-1)
CASSNGGGSSNEQFF

SEQ ID NO: 170437 - protein, 17 aa, Homo sapiens
  CDR3 for alpha chain variable domain of TCR clone 85219 (TRAV26-1, TRAJ37)
CIVRVITVSSNTGKLIF

SEQ ID NO: 170438 - protein, 13 aa, Homo sapiens
  CDR3 for beta chain variable domain of TCR clone 85219 (TRBV24-1, TRBJ2-2)
CATTATRTGELFF

SEQ ID NO: 170439 - protein, 17 aa, Homo sapiens
  CDR3 for alpha chain variable domain of TCR clone 85220 (TRAV26-1, TRAJ11)
CIVRVGQSNSGYSTLTF

SEQ ID NO: 170440 - protein, 15 aa, Homo sapiens
  CDR3 for beta chain variable domain of TCR clone 85220 (TRBV7-9, TRBJ1-4)
CASSARTGGNEKLFF

SEQ ID NO: 170441 - protein, 18 aa, Homo sapiens
  CDR3 for alpha chain variable domain of TCR clone 85221 (TRAV21, TRAJ45)
CCGGPQVGSGGGADGLTF

SEQ ID NO: 170442 - protein, 10 aa, Homo sapiens
  CDR3 for beta chain variable domain of TCR clone 85221 (TRBV4-1, TRBJ2-7)
SRGDRHEQYF

SEQ ID NO: 170443 - protein, 13 aa, Homo sapiens
  CDR3 for alpha chain variable domain of TCR clone 85222 (TRAV1-2, TRAJ20)
CDVRDGNDYKLSF

SEQ ID NO: 170444 - protein, 16 aa, Homo sapiens
  CDR3 for beta chain variable domain of TCR clone 85222 (TRBV12-5, TRBJ2-5)
CASGPRTSGNQETQYF

SEQ ID NO: 170445 - protein, 12 aa, Homo sapiens
  CDR3 for alpha chain variable domain of TCR clone 85223 (TRAV8-3, TRAJ26)
CAGDNYGQNFVF

SEQ ID NO: 170446 - protein, 16 aa, Homo sapiens
  CDR3 for beta chain variable domain of TCR clone 85223 (TRBV20-1, TRBJ1-4)
CSATGQGLLTNEKLFF

SEQ ID NO: 170447 - protein, 17 aa, Homo sapiens
  CDR3 for alpha chain variable domain of TCR clone 85224 (TRAV12-2, TRAJ39)
CAVNNMLTFGGGTRLMV

SEQ ID NO: 170448 - protein, 16 aa, Homo sapiens
  CDR3 for beta chain variable domain of TCR clone 85224 (TRBV5-3, TRBJ2-2)
CARSFGTGTNTGELVF

SEQ ID NO: 170449 - protein, 13 aa, Homo sapiens
  CDR3 for alpha chain variable domain of TCR clone 85225 (TRAV36/DV7, TRAJ37)
CAVFSSNTGKLIF

SEQ ID NO: 170450 - protein, 16 aa, Homo sapiens
  CDR3 for beta chain variable domain of TCR clone 85225 (TRBV3-1, TRBJ2-5)
CASSPGQFSGFGTQYF

SEQ ID NO: 170451 - protein, 14 aa, Homo sapiens
  CDR3 for alpha chain variable domain of TCR clone 85226 (TRAV23/DV6, TRAJ22)
CAASVSGSARQLIF

SEQ ID NO: 170452 - protein, 16 aa, Homo sapiens
  CDR3 for beta chain variable domain of TCR clone 85226 (TRBV19, TRBJ2-2)
CASSFPGQGLAGELFF

SEQ ID NO: 170453 - protein, 15 aa, Homo sapiens
  CDR3 for alpha chain variable domain of TCR clone 85227 (TRAV35, TRAJ40)
CAGQLGQAGTYKNIF

SEQ ID NO: 170454 - protein, 14 aa, Homo sapiens
  CDR3 for beta chain variable domain of TCR clone 85227 (TRBV7-3, TRBJ2-1)
CASSLTGGANEQFF

SEQ ID NO: 170455 - protein, 18 aa, Homo sapiens
  CDR3 for alpha chain variable domain of TCR clone 85228 (TRAV21, TRAJ53)
CAVKGGENSGGSNYKLTF

SEQ ID NO: 170456 - protein, 13 aa, Homo sapiens
  CDR3 for beta chain variable domain of TCR clone 85228 (TRBV6-1, TRBJ1-1)
CASSRQGNTEAFF

SEQ ID NO: 170457 - protein, 11 aa, Homo sapiens
  CDR3 for alpha chain variable domain of TCR clone 85229 (TRAV2, TRAJ13)
CASGGYQKVTF

SEQ ID NO: 170458 - protein, 14 aa, Homo sapiens
  CDR3 for beta chain variable domain of TCR clone 85229 (TRBV11-2, TRBJ1-5)
CASSLDRGRQPQHF

SEQ ID NO: 170459 - protein, 16 aa, Homo sapiens
  CDR3 for alpha chain variable domain of TCR clone 85230 (TRAV3, TRAJ37)
CTVRPHGSGNTGKLIF

SEQ ID NO: 170460 - protein, 14 aa, Homo sapiens
  CDR3 for beta chain variable domain of TCR clone 85230 (TRBV25-1, TRBJ1-1)
CAGTHLGGNTEAFF

SEQ ID NO: 170461 - protein, 15 aa, Homo sapiens
  CDR3 for alpha chain variable domain of TCR clone 85231 (TRAV13-1, TRAJ44)
CAASRNTGTASKLTF

SEQ ID NO: 170462 - protein, 14 aa, Homo sapiens
  CDR3 for beta chain variable domain of TCR clone 85231 (TRBV11-2, TRBJ1-2)
CASSLYRGKYGYTF

SEQ ID NO: 170463 - protein, 14 aa, Homo sapiens
  CDR3 for alpha chain variable domain of TCR clone 85232 (TRAV12-1, TRAJ3)
CVVILYSSASKIIF

SEQ ID NO: 170464 - protein, 17 aa, Homo sapiens
  CDR3 for beta chain variable domain of TCR clone 85232 (TRBV20-1, TRBJ2-1)
CSASSLGLAGSYNEQFF

SEQ ID NO: 170465 - protein, 13 aa, Homo sapiens
  CDR3 for alpha chain variable domain of TCR clone 85233 (TRAV27, TRAJ6)
WAGGTRGSYIPTF

SEQ ID NO: 170466 - protein, 13 aa, Homo sapiens
  CDR3 for beta chain variable domain of TCR clone 85233 (TRBV4-1, TRBJ2-2)
CASSQENTGELFF

SEQ ID NO: 170467 - protein, 15 aa, Homo sapiens
  CDR3 for alpha chain variable domain of TCR clone 85234 (TRAV8-4, TRAJ7)
CAVRGGNYGNNRLAF

SEQ ID NO: 170468 - protein, 11 aa, Homo sapiens
  CDR3 for beta chain variable domain of TCR clone 85234 (TRBV20-1, TRBJ2-1)
CSLSSGSEQFF

SEQ ID NO: 170469 - protein, 14 aa, Homo sapiens
  CDR3 for alpha chain variable domain of TCR clone 85235 (TRAV8-2, TRAJ37)
CVVSISGNTGKIIF

SEQ ID NO: 170470 - protein, 16 aa, Homo sapiens
  CDR3 for beta chain variable domain of TCR clone 85235 (TRBV27, TRBJ2-2)
CASSSSGVSNTGELFF

SEQ ID NO: 170471 - protein, 12 aa, Homo sapiens
  CDR3 for alpha chain variable domain of TCR clone 85236 (TRAV12-2, TRAJ8)
CAVNTGFQKLVF

SEQ ID NO: 170472 - protein, 15 aa, Homo sapiens
  CDR3 for beta chain variable domain of TCR clone 85236 (TRBV7-8, TRBJ1-5)
CASSLERRGLEPQHV

SEQ ID NO: 170473 - protein, 16 aa, Homo sapiens
  CDR3 for alpha chain variable domain of TCR clone 85237 (TRAV8-4, TRAJ5)
CAVSPLTDTGRRALTF

SEQ ID NO: 170474 - protein, 14 aa, Homo sapiens
  CDR3 for beta chain variable domain of TCR clone 85237 (TRBV19, TRBJ1-6)
CASSTDGWNSTLHF

SEQ ID NO: 170475 - protein, 16 aa, Homo sapiens
  CDR3 for alpha chain variable domain of TCR clone 85238 (TRAV1-2, TRAJ10)
CAVRGVLTGGGDKLTF

SEQ ID NO: 170476 - protein, 20 aa, Homo sapiens
  CDR3 for beta chain variable domain of TCR clone 85238 (TRBV7-8, TRBJ2-2)
CASSHLFPGPTIHITGELFF

SEQ ID NO: 170477 - protein, 15 aa, Homo sapiens
  CDR3 for alpha chain variable domain of TCR clone 85239 (TRAV1-2, TRAJ28)
CAVQYSGAGIYQLTF

SEQ ID NO: 170478 - protein, 13 aa, Homo sapiens
  CDR3 for beta chain variable domain of TCR clone 85239 (TRBV20-1, TRBJ2-7)
CSATHTSGYEQYF

SEQ ID NO: 170479 - protein, 12 aa, Homo sapiens
  CDR3 for alpha chain variable domain of TCR clone 85240 (TRAV25, TRAJ36)
CAEQTGANNLFF

SEQ ID NO: 170480 - protein, 17 aa, Homo sapiens
  CDR3 for beta chain variable domain of TCR clone 85240 (TRBV7-8, TRBJ2-6)
CASSAGTGGAGANVLTF

SEQ ID NO: 170481 - protein, 14 aa, Homo sapiens
  CDR3 for alpha chain variable domain of TCR clone 85241 (TRAV4, TRAJ17)
CLVGDMAAGNKRTF

SEQ ID NO: 170482 - protein, 14 aa, Homo sapiens
  CDR3 for beta chain variable domain of TCR clone 85241 (TRBV4-1, TRBJ2-7)
CASSPVAGGDEQYF

SEQ ID NO: 170483 - protein, 15 aa, Homo sapiens
  CDR3 for alpha chain variable domain of TCR clone 85242 (TRAV3, TRAJ9)
CAVRDSNTGGFKTIF

SEQ ID NO: 170484 - protein, 16 aa, Homo sapiens
  CDR3 for beta chain variable domain of TCR clone 85242 (TRBV15, TRBJ2-5)
CATSPTTGQGMETQYV

SEQ ID NO: 170485 - protein, 12 aa, Homo sapiens
  CDR3 for alpha chain variable domain of TCR clone 85243 (TRAV21, TRAJ49)
CAVRNTGNQFYF

SEQ ID NO: 170486 - protein, 13 aa, Homo sapiens
  CDR3 for beta chain variable domain of TCR clone 85243 (TRBV20-1, TRBJ2-2)
CSASAAGTGELFF

SEQ ID NO: 170487 - protein, 14 aa, Homo sapiens
  CDR3 for alpha chain variable domain of TCR clone 85244 (TRAV16, TRAJ29)
CALTRNSGNTPLVF

SEQ ID NO: 170488 - protein, 12 aa, Homo sapiens
  CDR3 for beta chain variable domain of TCR clone 85244 (TRBV2, TRBJ2-1)
CATREGYNEQFF

SEQ ID NO: 170489 - protein, 12 aa, Homo sapiens
  CDR3 for alpha chain variable domain of TCR clone 85245 (TRAV12-3, TRAJ20)
CAMVRGDYKLSF

SEQ ID NO: 170490 - protein, 12 aa, Homo sapiens
  CDR3 for beta chain variable domain of TCR clone 85245 (TRBV6-1, TRBJ2-7)
CASRDYSYEQYF

SEQ ID NO: 170491 - protein, 14 aa, Homo sapiens
  CDR3 for alpha chain variable domain of TCR clone 85246 (TRAV12-2, TRAJ3)
CAVSLYSSASKIIF

SEQ ID NO: 170492 - protein, 14 aa, Homo sapiens
  CDR3 for beta chain variable domain of TCR clone 85246 (TRBV27, TRBJ2-1)
CAGSIAETYNEQSF

SEQ ID NO: 170493 - protein, 13 aa, Homo sapiens
  CDR3 for alpha chain variable domain of TCR clone 85247 (TRAV27, TRAJ40)
CAGPPSGTYKYIF

SEQ ID NO: 170494 - protein, 11 aa, Homo sapiens
  CDR3 for beta chain variable domain of TCR clone 85247 (TRBV19, TRBJ1-1)
CASSIGSEAFF

SEQ ID NO: 170495 - protein, 14 aa, Homo sapiens
  CDR3 for alpha chain variable domain of TCR clone 85248 (TRAV20, TRAJ9)
CAVQASTGGFKTIF

SEQ ID NO: 170496 - protein, 13 aa, Homo sapiens
  CDR3 for beta chain variable domain of TCR clone 85248 (TRBV12-4, TRBJ1-1)
CASSPGTGFEAFF

SEQ ID NO: 170497 - protein, 16 aa, Homo sapiens
  CDR3 for alpha chain variable domain of TCR clone 85249 (TRAV30, TRAJ24)
CGTEIVDADSWGKFQF

SEQ ID NO: 170498 - protein, 15 aa, Homo sapiens
  CDR3 for beta chain variable domain of TCR clone 85249 (TRBV20-1, TRBJ2-4)
CSARDLTGGPNNQYF

SEQ ID NO: 170499 - protein, 14 aa, Homo sapiens
  CDR3 for alpha chain variable domain of TCR clone 85250 (TRAV12-2, TRAJ13)
GAVKKTGGYQKVTF

SEQ ID NO: 170500 - protein, 16 aa, Homo sapiens
  CDR3 for beta chain variable domain of TCR clone 85250 (TRBV12-5, TRBJ2-5)
CASGPRTSGNQETQYF

SEQ ID NO: 170501 - protein, 14 aa, Homo sapiens
  CDR3 for alpha chain variable domain of TCR clone 85251 (TRAV17, TRAJ34)
CATVPTYNTDKLIF

SEQ ID NO: 170502 - protein, 20 aa, Homo sapiens
  CDR3 for beta chain variable domain of TCR clone 85251 (TRBV7-8, TRBJ2-2)
CASSHLFPGPTIHITGELFF

SEQ ID NO: 170503 - protein, 12 aa, Homo sapiens
  CDR3 for alpha chain variable domain of TCR clone 85252 (TRAV12-2, TRAJ42)
CAVGGSQGNLIF

SEQ ID NO: 170504 - protein, 13 aa, Homo sapiens
  CDR3 for beta chain variable domain of TCR clone 85252 (TRBV19, TRBJ1-5)
CASSMRGYQPQHF

SEQ ID NO: 170505 - protein, 13 aa, Homo sapiens
  CDR3 for alpha chain variable domain of TCR clone 85253 (TRAV12-2, TRAJ4)
CAGFSGGYNKLIV

SEQ ID NO: 170506 - protein, 14 aa, Homo sapiens
  CDR3 for beta chain variable domain of TCR clone 85253 (TRBV24-1, TRBJ1-1)
CATSIPRGDTEAFF

SEQ ID NO: 170507 - protein, 13 aa, Homo sapiens
  CDR3 for alpha chain variable domain of TCR clone 85254 (TRAV13-1, TRAJ6)
CAASRGGSYIPTF

SEQ ID NO: 170508 - protein, 14 aa, Homo sapiens
  CDR3 for beta chain variable domain of TCR clone 85254 (TRBV7-2, TRBJ2-5)
CASSVGGAQETQYF

SEQ ID NO: 170509 - protein, 17 aa, Homo sapiens
  CDR3 for alpha chain variable domain of TCR clone 85255 (TRAV27, TRAJ18)
CAGLHRGRGLTLGRLYF

SEQ ID NO: 170510 - protein, 14 aa, Homo sapiens
  CDR3 for beta chain variable domain of TCR clone 85255 (TRBV20-1, TRBJ1-5)
CSARGRGSNQPQHF

SEQ ID NO: 170511 - protein, 15 aa, Homo sapiens
  CDR3 for alpha chain variable domain of TCR clone 85256 (TRAV17, TRAJ10)
CATVLLTGGGNKLTF

SEQ ID NO: 170512 - protein, 15 aa, Homo sapiens
  CDR3 for beta chain variable domain of TCR clone 85256 (TRBV5-1, TRBJ2-5)
CASSLGLAEQETQYF

SEQ ID NO: 170513 - protein, 13 aa, Homo sapiens
  CDR3 for alpha chain variable domain of TCR clone 85257 (TRAV3, TRAJ21)
CAVREPDFNKFYF

SEQ ID NO: 170514 - protein, 17 aa, Homo sapiens
  CDR3 for beta chain variable domain of TCR clone 85257 (TRBV7-3, TRBJ2-2)
CASSLSGTSGGTGELFF

SEQ ID NO: 170515 - protein, 14 aa, Homo sapiens
  CDR3 for alpha chain variable domain of TCR clone 85258 (TRAV38-1, TRAJ45)
CASHSGGGADGLTF

SEQ ID NO: 170516 - protein, 13 aa, Homo sapiens
  CDR3 for beta chain variable domain of TCR clone 85258 (TRBV10-3, TRBJ1-2)
CAISEREGYGYTF

SEQ ID NO: 170517 - protein, 13 aa, Homo sapiens
  CDR3 for alpha chain variable domain of TCR clone 85259 (TRAV3, TRAJ21)
CAVREPDFNKFYF

SEQ ID NO: 170518 - protein, 13 aa, Homo sapiens
  CDR3 for beta chain variable domain of TCR clone 85259 (TRBV9, TRBJ2-1)
CASSPCGGNEQFF

SEQ ID NO: 170519 - protein, 16 aa, Homo sapiens
  CDR3 for alpha chain variable domain of TCR clone 85260 (TRAV30, TRAJ24)
CGTEIVDADSWGKFQF

SEQ ID NO: 170520 - protein, 14 aa, Homo sapiens
  CDR3 for beta chain variable domain of TCR clone 85260 (TRBV7-2, TRBJ2-7)
CASNPKTSFYEQYF

SEQ ID NO: 170521 - protein, 17 aa, Homo sapiens
  CDR3 for alpha chain variable domain of TCR clone 85261 (TRAV16, TRAJ58)
CITVLSNGETSGSRLTF

SEQ ID NO: 170522 - protein, 17 aa, Homo sapiens
  CDR3 for beta chain variable domain of TCR clone 85261 (TRBV18, TRBJ2-1)
CASSKGLSRGADNEQFF

SEQ ID NO: 170523 - protein, 16 aa, Homo sapiens
  CDR3 for alpha chain variable domain of TCR clone 85262 (TRAV12-2, TRAJ10)
CAVNRVLTGGGNKLTF

SEQ ID NO: 170524 - protein, 14 aa, Homo sapiens
  CDR3 for beta chain variable domain of TCR clone 85262 (TRBV7-9, TRBJ2-1)
CASSPRDSLYEQFF

SEQ ID NO: 170525 - protein, 12 aa, Homo sapiens
  CDR3 for alpha chain variable domain of TCR clone 85263 (TRAV17, TRAJ28)
WYSGAGSYQLTF

SEQ ID NO: 170526 - protein, 13 aa, Homo sapiens
  CDR3 for beta chain variable domain of TCR clone 85263 (TRBV11-3, TRBJ1-1)
CASSRQPNTEAFF

SEQ ID NO: 170527 - protein, 15 aa, Homo sapiens
  CDR3 for alpha chain variable domain of TCR clone 85264 (TRAV23/DV6, TRAJ18)
CAARYRGSTLGRLYF

SEQ ID NO: 170528 - protein, 13 aa, Homo sapiens
  CDR3 for beta chain variable domain of TCR clone 85264 (TRBV7-2, TRBJ2-7)
CASSSLSGSEQYF

SEQ ID NO: 170529 - protein, 15 aa, Homo sapiens
  CDR3 for alpha chain variable domain of TCR clone 85265 (TRAV17, TRAJ28)
CATDPSGAGSYQLTF

SEQ ID NO: 170530 - protein, 15 aa, Homo sapiens
  CDR3 for beta chain variable domain of TCR clone 85265 (TRBV7-8, TRBJ1-1)
CASSLGDSRNTEAFF

SEQ ID NO: 170531 - protein, 11 aa, Homo sapiens
  CDR3 for alpha chain variable domain of TCR clone 85266 (TRAV13-1, TRAJ39)
CASHAGNMLTF

SEQ ID NO: 170532 - protein, 14 aa, Homo sapiens
  CDR3 for beta chain variable domain of TCR clone 85266 (TRBV11-2, TRBJ1-5)
CASSFDRGRQPQHF

SEQ ID NO: 170533 - protein, 14 aa, Homo sapiens
  CDR3 for alpha chain variable domain of TCR clone 85267 (TRAV8-3, TRAJ4)
CAVGAAGGYNKLIF

SEQ ID NO: 170534 - protein, 17 aa, Homo sapiens
  CDR3 for beta chain variable domain of TCR clone 85267 (TRBV5-1, TRBJ2-5)
CASSLLGLAANQETQYF

SEQ ID NO: 170535 - protein, 16 aa, Homo sapiens
  CDR3 for alpha chain variable domain of TCR clone 85268 (TRAV21, TRAJ45)
CAVSWGSGGGADGLTF

SEQ ID NO: 170536 - protein, 13 aa, Homo sapiens
  CDR3 for beta chain variable domain of TCR clone 85268 (TRBV12-4, TRBJ2-5)
CASSLFRRETQYF

SEQ ID NO: 170537 - protein, 16 aa, Homo sapiens
  CDR3 for alpha chain variable domain of TCR clone 85269 (TRAV20, TRAJ22)
CAVQASSSGSARQLTF

SEQ ID NO: 170538 - protein, 13 aa, Homo sapiens
  CDR3 for beta chain variable domain of TCR clone 85269 (TRBV27, TRBJ1-1)
CASSLSIGAEAFF

SEQ ID NO: 170539 - protein, 14 aa, Homo sapiens
  CDR3 for alpha chain variable domain of TCR clone 85270 (TRAV14/DV4, TRAJ20)
CAMRESLNDYKLSF

SEQ ID NO: 170540 - protein, 12 aa, Homo sapiens
  CDR3 for beta chain variable domain of TCR clone 85270 (TRBV12-4, TRBJ1-2)
CASSFIWLHLRF

SEQ ID NO: 170541 - protein, 15 aa, Homo sapiens
  CDR3 for alpha chain variable domain of TCR clone 85271 (TRAV21, TRAJ53)
CATLNSGGSNYKPTF

SEQ ID NO: 170542 - protein, 17 aa, Homo sapiens
  CDR3 for beta chain variable domain of TCR clone 85271 (TRBV20-1, TRBJ2-2)
CSASGSGQGGLTGELFF

SEQ ID NO: 170543 - protein, 13 aa, Homo sapiens
  CDR3 for alpha chain variable domain of TCR clone 85272 (TRAV2, TRAJ40)
CAVVTAGTYKYIF

SEQ ID NO: 170544 - protein, 16 aa, Homo sapiens
  CDR3 for beta chain variable domain of TCR clone 85272 (TRBV19, TRBJ2-2)
CASRSPGTGATGELFF

SEQ ID NO: 170545 - protein, 13 aa, Homo sapiens
  CDR3 for alpha chain variable domain of TCR clone 85273 (TRAV13-1, TRAJ39)
CSKYSNAGNMLTF

SEQ ID NO: 170546 - protein, 16 aa, Homo sapiens
  CDR3 for beta chain variable domain of TCR clone 85273 (TRBV20-1, TRBJ1-4)
CSAPGQGLLTNERLFF

SEQ ID NO: 170547 - protein, 15 aa, Homo sapiens
  CDR3 for alpha chain variable domain of TCR clone 85274 (TRAV17, TRAJ57)
CATGPSQGGFEKLVF

SEQ ID NO: 170548 - protein, 14 aa, Homo sapiens
  CDR3 for beta chain variable domain of TCR clone 85274 (TRBV12-5, TRBJ2-5)
CASGSRTHQETQYF

SEQ ID NO: 170549 - protein, 13 aa, Homo sapiens
  CDR3 for alpha chain variable domain of TCR clone 85275 (TRAV13-1, TRAJ43)
CAASKNNNNDMRF

SEQ ID NO: 170550 - protein, 12 aa, Homo sapiens
  CDR3 for beta chain variable domain of TCR clone 85275 (TRBV14, TRBJ2-5)
CASSQLKETQYF

SEQ ID NO: 170551 - protein, 11 aa, Homo sapiens
  CDR3 for alpha chain variable domain of TCR clone 85276 (TRAV12-1, TRAJ30)
CVVNGQDKIIF

SEQ ID NO: 170552 - protein, 16 aa, Homo sapiens
  CDR3 for beta chain variable domain of TCR clone 85276 (TRBV12-5, TRBJ2-5)
CASGPRTSGNQETQYF

SEQ ID NO: 170553 - protein, 13 aa, Homo sapiens
  CDR3 for alpha chain variable domain of TCR clone 85277 (TRAV29/DV5, TRAJ31)
CAASRNNNARLMF

SEQ ID NO: 170554 - protein, 11 aa, Homo sapiens
  CDR3 for beta chain variable domain of TCR clone 85277 (TRBV11-2, TRBJ1-1)
CASSINTEAFF

SEQ ID NO: 170555 - protein, 12 aa, Homo sapiens
  CDR3 for alpha chain variable domain of TCR clone 85278 (TRAV21, TRAJ11)
CAATSGYSTLTF

SEQ ID NO: 170556 - protein, 16 aa, Homo sapiens
  CDR3 for beta chain variable domain of TCR clone 85278 (TRBV28, TRBJ2-2)
CASSVEGGSNTGELFF

SEQ ID NO: 170557 - protein, 13 aa, Homo sapiens
  CDR3 for alpha chain variable domain of TCR clone 85279 (TRAV3, TRAJ20)
CAVRSLNDYKLRF

SEQ ID NO: 170558 - protein, 12 aa, Homo sapiens
  CDR3 for beta chain variable domain of TCR clone 85279 (TRBV6-1, TRBJ2-1)
CASYSTYNEQFF

SEQ ID NO: 170559 - protein, 16 aa, Homo sapiens
  CDR3 for alpha chain variable domain of TCR clone 85280 (TRAV30, TRAJ24)
CGTEIVDADSWGKFQF

SEQ ID NO: 170560 - protein, 13 aa, Homo sapiens
  CDR3 for beta chain variable domain of TCR clone 85280 (TRBV14, TRBJ1-1)
CASSQEAGTEAFF

SEQ ID NO: 170561 - protein, 13 aa, Homo sapiens
  CDR3 for alpha chain variable domain of TCR clone 85281 (TRAV35, TRAJ43)
CAGYPYNKNDMRF

SEQ ID NO: 170562 - protein, 15 aa, Homo sapiens
  CDR3 for beta chain variable domain of TCR clone 85281 (TRBV25-1, TRBJ1-4)
CASSKRIATNEKLFF

SEQ ID NO: 170563 - protein, 20 aa, Homo sapiens
  CDR3 for alpha chain variable domain of TCR clone 85282 (TRAV12-1, TRAJ42)
SSVIQPPTSLKGGSQGNLIF

SEQ ID NO: 170564 - protein, 18 aa, Homo sapiens
  CDR3 for beta chain variable domain of TCR clone 85282 (TRBV11-2, TRBJ2-3)
CASSLGGASRGAPNTQYF

SEQ ID NO: 170565 - protein, 14 aa, Homo sapiens
  CDR3 for alpha chain variable domain of TCR clone 85283 (TRAV1-2, TRAJ8)
CAVREDTGFQKLVF

SEQ ID NO: 170566 - protein, 17 aa, Homo sapiens
  CDR3 for beta chain variable domain of TCR clone 85283 (TRBV28, TRBJ2-1)
CASSSARQALTYNEQFF

SEQ ID NO: 170567 - protein, 13 aa, Homo sapiens
  CDR3 for alpha chain variable domain of TCR clone 85284 (TRAV20, TRAJ29)
CAVQAVGNTPLVF

SEQ ID NO: 170568 - protein, 15 aa, Homo sapiens
  CDR3 for beta chain variable domain of TCR clone 85284 (TRBV10-2, TRBJ2-5)
CASRGSEGPQETQYF

SEQ ID NO: 170569 - protein, 16 aa, Homo sapiens
  CDR3 for alpha chain variable domain of TCR clone 85285 (TRAV4, TRAJ9)
CLVGDPNRPGGFKTIF

SEQ ID NO: 170570 - protein, 16 aa, Homo sapiens
  CDR3 for beta chain variable domain of TCR clone 85285 (TRBV28, TRBJ1-4)
CASSPPYKGRSEKLFF

SEQ ID NO: 170571 - protein, 12 aa, Homo sapiens
  CDR3 for alpha chain variable domain of TCR clone 85286 (TRAV20, TRAJ56)
CAVTGANSELTF

SEQ ID NO: 170572 - protein, 14 aa, Homo sapiens
  CDR3 for beta chain variable domain of TCR clone 85286 (TRBV20-1, TRBJ2-5)
CSALVPGYQETQYF

SEQ ID NO: 170573 - protein, 14 aa, Homo sapiens
  CDR3 for alpha chain variable domain of TCR clone 85287 (TRAV12-3, TRAJ10)
SHLPLTGGGNKLTF

SEQ ID NO: 170574 - protein, 12 aa, Homo sapiens
  CDR3 for beta chain variable domain of TCR clone 85287 (TRBV28, TRBJ2-7)
CASSFSSYEQYF

SEQ ID NO: 170575 - protein, 16 aa, Homo sapiens
  CDR3 for alpha chain variable domain of TCR clone 85288 (TRAV23/DV6, TRAJ52)
CAASPSGGTSYGKLTF

SEQ ID NO: 170576 - protein, 13 aa, Homo sapiens
  CDR3 for beta chain variable domain of TCR clone 85288 (TRBV7-9, TRBJ1-1)
CASSLSGETEAFF

SEQ ID NO: 170577 - protein, 14 aa, Homo sapiens
  CDR3 for alpha chain variable domain of TCR clone 85289 (TRAV13-2, TRAJ17)
CAENSKAAGNKLTF

SEQ ID NO: 170578 - protein, 13 aa, Homo sapiens
  CDR3 for beta chain variable domain of TCR clone 85289 (TRBV11-2, TRBJ2-7)
CASSLDLGYEQYF

SEQ ID NO: 170579 - protein, 17 aa, Homo sapiens
  CDR3 for alpha chain variable domain of TCR clone 85290 (TRAV3, TRAJ38)
CAVRDCLNAGNKRKLIW

SEQ ID NO: 170580 - protein, 15 aa, Homo sapiens
  CDR3 for beta chain variable domain of TCR clone 85290 (TRBV27, TRBJ2-1)
CASSNGGGSSNEQFF

SEQ ID NO: 170581 - protein, 15 aa, Homo sapiens
  CDR3 for alpha chain variable domain of TCR clone 85291 (TRAV2, TRAJ9)
CAVAALNTGGFKTIF

SEQ ID NO: 170582 - protein, 14 aa, Homo sapiens
  CDR3 for beta chain variable domain of TCR clone 85291 (TRBV7-8, TRBJ2-5)
CASSATGGQETHYF

SEQ ID NO: 170583 - protein, 13 aa, Homo sapiens
  CDR3 for alpha chain variable domain of TCR clone 85292 (TRAV21, TRAJ27)
CAALNTNAGKSTF

SEQ ID NO: 170584 - protein, 18 aa, Homo sapiens
  CDR3 for beta chain variable domain of TCR clone 85292 (TRBV20-1, TRBJ2-6)
CSARTLAGGPSGANVLTF

SEQ ID NO: 170585 - protein, 14 aa, Homo sapiens
  CDR3 for alpha chain variable domain of TCR clone 85293 (TRAV12-1, TRAJ9)
CVVTGDTGGFKTIF

SEQ ID NO: 170586 - protein, 16 aa, Homo sapiens
  CDR3 for beta chain variable domain of TCR clone 85293 (TRBV29-1, TRBJ1-2)
CGVEANRDIANYGYTF

SEQ ID NO: 170587 - protein, 14 aa, Homo sapiens
  CDR3 for alpha chain variable domain of TCR clone 85294 (TRAV38-1, TRAJ29)
CAFITPSGNTPLVF

SEQ ID NO: 170588 - protein, 17 aa, Homo sapiens
  CDR3 for beta chain variable domain of TCR clone 85294 (TRBV20-1, TRBJ2-1)
CSAPPRLAGTRYNEQFF

SEQ ID NO: 170589 - protein, 12 aa, Homo sapiens
  CDR3 for alpha chain variable domain of TCR clone 85295 (TRAV12-3, TRAJ20)
CAMVRGDYKLSF

SEQ ID NO: 170590 - protein, 12 aa, Homo sapiens
  CDR3 for beta chain variable domain of TCR clone 85295 (TRBV18, TRBJ2-1)
CASSPGTSEGFF

SEQ ID NO: 170591 - protein, 16 aa, Homo sapiens
  CDR3 for alpha chain variable domain of TCR clone 85296 (TRAV3, TRAJ10)
CAVRDMRAGGGNKLTF

SEQ ID NO: 170592 - protein, 19 aa, Homo sapiens
  CDR3 for beta chain variable domain of TCR clone 85296 (TRBV6-3, TRBJ1-2)
RASSYSKGRTGPPNYGYTF

SEQ ID NO: 170593 - protein, 16 aa, Homo sapiens
  CDR3 for alpha chain variable domain of TCR clone 85297 (TRAV30, TRAJ24)
CGTEIVDADSWGKFQF

SEQ ID NO: 170594 - protein, 15 aa, Homo sapiens
  CDR3 for beta chain variable domain of TCR clone 85297 (TRBV6-1, TRBJ1-3)
CASSDFGFSGNTIYF

SEQ ID NO: 170595 - protein, 13 aa, Homo sapiens
  CDR3 for alpha chain variable domain of TCR clone 85298 (TRAV12-3, TRAJ47)
CAMKKEYGNKLVF

SEQ ID NO: 170596 - protein, 15 aa, Homo sapiens
  CDR3 for beta chain variable domain of TCR clone 85298 (TRBV28, TRBJ2-5)
CASSSGRTIQETQYF

SEQ ID NO: 170597 - protein, 14 aa, Homo sapiens
  CDR3 for alpha chain variable domain of TCR clone 85299 (TRAV2, TRAJ29)
CAGPFQYGNTPLVF

SEQ ID NO: 170598 - protein, 11 aa, Homo sapiens
  CDR3 for beta chain variable domain of TCR clone 85299 (TRBV29-1, TRBJ2-5)
CSVDRTGTQYF

SEQ ID NO: 170599 - protein, 14 aa, Homo sapiens
  CDR3 for alpha chain variable domain of TCR clone 85300 (TRAV9-2, TRAJ39)
CALYIHNAGNMLTF

SEQ ID NO: 170600 - protein, 12 aa, Homo sapiens
  CDR3 for beta chain variable domain of TCR clone 85300 (TRBV11-2, TRBJ2-2)
CASSLGGGELFF

SEQ ID NO: 170601 - protein, 13 aa, Homo sapiens
  CDR3 for alpha chain variable domain of TCR clone 85301 (TRAV17, TRAJ26)
CATVDNYGQNFVF

SEQ ID NO: 170602 - protein, 22 aa, Homo sapiens
  CDR3 for beta chain variable domain of TCR clone 85301 (TRBV6-1, TRBJ1-3)
CASVQGGGWKHHIFWRGKLAHC

SEQ ID NO: 170603 - protein, 14 aa, Homo sapiens
  CDR3 for alpha chain variable domain of TCR clone 85302 (TRAV23/DV6, TRAJ6)
CAASRLGGSYIPTF

SEQ ID NO: 170604 - protein, 17 aa, Homo sapiens
  CDR3 for beta chain variable domain of TCR clone 85302 (TRBV20-1, TRBJ2-1)
CSASASGLAGSYNEQFF

SEQ ID NO: 170605 - protein, 16 aa, Homo sapiens
  CDR3 for alpha chain variable domain of TCR clone 85303 (TRAV38-1, TRAJ32)
CAFMKGGGGGTNKLIF

SEQ ID NO: 170606 - protein, 13 aa, Homo sapiens
  CDR3 for beta chain variable domain of TCR clone 85303 (TRBV20-1, TRBJ2-5)
CSAREAFQETQYF

SEQ ID NO: 170607 - protein, 14 aa, Homo sapiens
  CDR3 for alpha chain variable domain of TCR clone 85304 (TRAV38-1, TRAJ40)
CALRPSSGTYKYIF

SEQ ID NO: 170608 - protein, 14 aa, Homo sapiens
  CDR3 for beta chain variable domain of TCR clone 85304 (TRBV25-1, TRBJ1-1)
CASTHLGGNTEAFF

SEQ ID NO: 170609 - protein, 11 aa, Homo sapiens
  CDR3 for alpha chain variable domain of TCR clone 85305 (TRAV12-2, TRAJ43)
CASPIGNDMRF

SEQ ID NO: 170610 - protein, 16 aa, Homo sapiens
  CDR3 for beta chain variable domain of TCR clone 85305 (TRBV3-1, TRBJ2-5)
CASSSQRGYAPETQYF

SEQ ID NO: 170611 - protein, 15 aa, Homo sapiens
  CDR3 for alpha chain variable domain of TCR clone 85306 (TRAV26-1, TRAJ29)
CIVRVEGSGNTPLVF

SEQ ID NO: 170612 - protein, 14 aa, Homo sapiens
  CDR3 for beta chain variable domain of TCR clone 85306 (TRBV18, TRBJ2-5)
CASPPGVSQEAQYF

SEQ ID NO: 170613 - protein, 14 aa, Homo sapiens
  CDR3 for alpha chain variable domain of TCR clone 85307 (TRAV12-2, TRAJ17)
CAALFKAAGNKLTF

SEQ ID NO: 170614 - protein, 16 aa, Homo sapiens
  CDR3 for beta chain variable domain of TCR clone 85307 (TRBV20-1, TRBJ2-2)
CSASAGGIPGAGELFF

SEQ ID NO: 170615 - protein, 13 aa, Homo sapiens
  CDR3 for alpha chain variable domain of TCR clone 85308 (TRAV38-1, TRAJ42)
CARWGGSQRNLIF

SEQ ID NO: 170616 - protein, 17 aa, Homo sapiens
  CDR3 for beta chain variable domain of TCR clone 85308 (TRBV20-1, TRBJ2-1)
CSARDPLAGVWDNEQFF

SEQ ID NO: 170617 - protein, 13 aa, Homo sapiens
  CDR3 for alpha chain variable domain of TCR clone 85309 (TRAV23/DV6, TRAJ58)
CAATGTSGSRLTF

SEQ ID NO: 170618 - protein, 13 aa, Homo sapiens
  CDR3 for beta chain variable domain of TCR clone 85309 (TRBV5-5, TRBJ1-2)
CASSFWRGEDDTF

SEQ ID NO: 170619 - protein, 13 aa, Homo sapiens
  CDR3 for alpha chain variable domain of TCR clone 85310 (TRAV20, TRAJ31)
CAVQAIGVARLMF

SEQ ID NO: 170620 - protein, 14 aa, Homo sapiens
  CDR3 for beta chain variable domain of TCR clone 85310 (TRBV2, TRBJ1-5)
CASSGTVSNQPQHF

SEQ ID NO: 170621 - protein, 10 aa, Homo sapiens
  CDR3 for alpha chain variable domain of TCR clone 85311 (TRAV1-2, TRAJ31)
CVPEDARLMF

SEQ ID NO: 170622 - protein, 14 aa, Homo sapiens
  CDR3 for beta chain variable domain of TCR clone 85311 (TRBV19, TRBJ2-1)
CASPTFVLSGEQFF

SEQ ID NO: 170623 - protein, 13 aa, Homo sapiens
  CDR3 for alpha chain variable domain of TCR clone 85312 (TRAV13-2, TRAJ13)
CAERPGGYQKVTF

SEQ ID NO: 170624 - protein, 15 aa, Homo sapiens
  CDR3 for beta chain variable domain of TCR clone 85312 (TRBV2, TRBJ2-7)
CASSEGLARSYEQYF

SEQ ID NO: 170625 - protein, 16 aa, Homo sapiens
  CDR3 for alpha chain variable domain of TCR clone 85313 (TRAV8-3, TRAJ13)
CAVGAYPSGGDQKVTF

SEQ ID NO: 170626 - protein, 15 aa, Homo sapiens
  CDR3 for beta chain variable domain of TCR clone 85313 (TRBV19, TRBJ1-5)
CASSIVWADNQPQHF

SEQ ID NO: 170627 - protein, 13 aa, Homo sapiens
  CDR3 for alpha chain variable domain of TCR clone 85314 (TRAV13-2, TRAJ53)
CAENMGSNYKLTF

SEQ ID NO: 170628 - protein, 14 aa, Homo sapiens
  CDR3 for beta chain variable domain of TCR clone 85314 (TRBV20-1, TRBJ2-5)
CSAHRQGLWETQYF

SEQ ID NO: 170629 - protein, 18 aa, Homo sapiens
  CDR3 for alpha chain variable domain of TCR clone 85315 (TRAV26-1, TRAJ23)
CIVRVGLEVWNQGGKLIF

SEQ ID NO: 170630 - protein, 16 aa, Homo sapiens
  CDR3 for beta chain variable domain of TCR clone 85315 (TRBV12-4, TRBJ2-5)
CASSFFVRWRQETQYF

SEQ ID NO: 170631 - protein, 14 aa, Homo sapiens
  CDR3 for alpha chain variable domain of TCR clone 85316 (TRAV12-1, TRAJ12)
CVVTRMDSSYKLIF

SEQ ID NO: 170632 - protein, 13 aa, Homo sapiens
  CDR3 for beta chain variable domain of TCR clone 85316 (TRBV29-1, TRBJ2-1)
CSVEGGRVNEQFF

SEQ ID NO: 170633 - protein, 11 aa, Homo sapiens
  CDR3 for alpha chain variable domain of TCR clone 85317 (TRAV3, TRAJ21)
CAVGNFNKFYL

SEQ ID NO: 170634 - protein, 16 aa, Homo sapiens
  CDR3 for beta chain variable domain of TCR clone 85317 (TRBV19, TRBJ2-1)
CASSKAGPGSYNEQFF

SEQ ID NO: 170635 - protein, 13 aa, Homo sapiens
  CDR3 for alpha chain variable domain of TCR clone 85318 (TRAV17, TRAJ29)
CATDAFRKHTSCL

SEQ ID NO: 170636 - protein, 13 aa, Homo sapiens
  CDR3 for beta chain variable domain of TCR clone 85318 (TRBV5-7, TRBJ2-6)
CASTSSGANVLSF

SEQ ID NO: 170637 - protein, 14 aa, Homo sapiens
  CDR3 for alpha chain variable domain of TCR clone 85319 (TRAV20, TRAJ56)
CAVQFGGANSKLTF

SEQ ID NO: 170638 - protein, 16 aa, Homo sapiens
  CDR3 for beta chain variable domain of TCR clone 85319 (TRBV12-4, TRBJ2-5)
CASSFFVRGRQETQYF

SEQ ID NO: 170639 - protein, 13 aa, Homo sapiens
  CDR3 for alpha chain variable domain of TCR clone 85320 (TRAV12-3, TRAJ31)
CAMSANNNARLMF

SEQ ID NO: 170640 - protein, 16 aa, Homo sapiens
  CDR3 for beta chain variable domain of TCR clone 85320 (TRBV7-9, TRBJ1-2)
CARSLGFSSGEDGYTF

SEQ ID NO: 170641 - protein, 12 aa, Homo sapiens
  CDR3 for alpha chain variable domain of TCR clone 85321 (TRAV36/DV7, TRAJ48)
CAGNFGNEKLTF

SEQ ID NO: 170642 - protein, 14 aa, Homo sapiens
  CDR3 for beta chain variable domain of TCR clone 85321 (TRBV13, TRBJ1-1)
CASTVITVNTEAFF

SEQ ID NO: 170643 - protein, 12 aa, Homo sapiens
  CDR3 for alpha chain variable domain of TCR clone 85322 (TRAV36/DV7, TRAJ54)
CAVVRGAQKLVF

SEQ ID NO: 170644 - protein, 13 aa, Homo sapiens
  CDR3 for beta chain variable domain of TCR clone 85322 (TRBV7-8, TRBJ2-1)
CASTRDAVDEQFF

SEQ ID NO: 170645 - protein, 11 aa, Homo sapiens
  CDR3 for alpha chain variable domain of TCR clone 85323 (TRAV12-3, TRAJ43)
CAMSVSHDMRF

SEQ ID NO: 170646 - protein, 13 aa, Homo sapiens
  CDR3 for beta chain variable domain of TCR clone 85323 (TRBV20-1, TRBJ1-1)
CSAPLGGGTEAFF

SEQ ID NO: 170647 - protein, 15 aa, Homo sapiens
  CDR3 for alpha chain variable domain of TCR clone 85324 (TRAV13-1, TRAJ8)
CAASIPNTGFQKLVF

SEQ ID NO: 170648 - protein, 14 aa, Homo sapiens
  CDR3 for beta chain variable domain of TCR clone 85324 (TRBV7-6, TRBJ2-3)
CASSLGTVTDTQYF

SEQ ID NO: 170649 - protein, 15 aa, Homo sapiens
  CDR3 for alpha chain variable domain of TCR clone 85325 (TRAV21, TRAJ24)
CAARSSTDSWGKLQF

SEQ ID NO: 170650 - protein, 13 aa, Homo sapiens
  CDR3 for beta chain variable domain of TCR clone 85325 (TRBV11-2, TRBJ2-5)
CASSSTEEETQYF

SEQ ID NO: 170651 - protein, 15 aa, Homo sapiens
  CDR3 for alpha chain variable domain of TCR clone 85326 (TRAV4, TRAJ39)
CLVGPNNNAGNMLTF

SEQ ID NO: 170652 - protein, 13 aa, Homo sapiens
  CDR3 for beta chain variable domain of TCR clone 85326 (TRBV11-2, TRBJ2-5)
YASSSTGEETQYF

SEQ ID NO: 170653 - protein, 16 aa, Homo sapiens
  CDR3 for alpha chain variable domain of TCR clone 85327 (TRAV30, TRAJ24)
CGTEIVDADSWGKCQC

SEQ ID NO: 170654 - protein, 14 aa, Homo sapiens
  CDR3 for beta chain variable domain of TCR clone 85327 (TRBV12-5, TRBJ2-5)
CASGSRTHQETQYF

SEQ ID NO: 170655 - protein, 14 aa, Homo sapiens
  CDR3 for alpha chain variable domain of TCR clone 85328 (TRAV12-3, TRAJ10)
SHLPLPGGGNKLTF

SEQ ID NO: 170656 - protein, 14 aa, Homo sapiens
  CDR3 for beta chain variable domain of TCR clone 85328 (TRBV7-2, TRBJ2-2)
CASSLNSNTGELFF

SEQ ID NO: 170657 - protein, 18 aa, Homo sapiens
  CDR3 for alpha chain variable domain of TCR clone 85329 (TRAV29/DV5, TRAJ52)
CAAGFRGAGGPSYGKLTF

SEQ ID NO: 170658 - protein, 16 aa, Homo sapiens
  CDR3 for beta chain variable domain of TCR clone 85329 (TRBV7-3, TRBJ2-2)
CASSLKRGTLSGELFF

SEQ ID NO: 170659 - protein, 14 aa, Homo sapiens
  CDR3 for alpha chain variable domain of TCR clone 85330 (TRAV16, TRAJ42)
CALLAGGSQGNLIF

SEQ ID NO: 170660 - protein, 14 aa, Homo sapiens
  CDR3 for beta chain variable domain of TCR clone 85330 (TRBV27, TRBJ2-2)
CASRPGVNTGELFF

SEQ ID NO: 170661 - protein, 13 aa, Homo sapiens
  CDR3 for alpha chain variable domain of TCR clone 85331 (TRAV12-2, TRAJ52)
CAVGGTSYGKLTF

SEQ ID NO: 170662 - protein, 15 aa, Homo sapiens
  CDR3 for beta chain variable domain of TCR clone 85331 (TRBV6-3, TRBJ2-7)
CASSSPGTVFYEQYF

SEQ ID NO: 170663 - protein, 11 aa, Homo sapiens
  CDR3 for alpha chain variable domain of TCR clone 85332 (TRAV12-1, TRAJ34)
CVVNKGRELIF

SEQ ID NO: 170664 - protein, 16 aa, Homo sapiens
  CDR3 for beta chain variable domain of TCR clone 85332 (TRBV12-5, TRBJ2-5)
CASGPRTSGNQETQYF

SEQ ID NO: 170665 - protein, 15 aa, Homo sapiens
  CDR3 for alpha chain variable domain of TCR clone 85333 (TRAV35, TRAJ58)
CAGRRQETSGSRLTF

SEQ ID NO: 170666 - protein, 16 aa, Homo sapiens
  CDR3 for beta chain variable domain of TCR clone 85333 (TRBV12-5, TRBJ2-5)
CASGPRTSGNQETQYF

SEQ ID NO: 170667 - protein, 11 aa, Homo sapiens
  CDR3 for alpha chain variable domain of TCR clone 85334 (TRAV23/DV6, TRAJ49)
CAVAPVTSSIL

SEQ ID NO: 170668 - protein, 14 aa, Homo sapiens
  CDR3 for beta chain variable domain of TCR clone 85334 (TRBV7-9, TRBJ2-7)
CASSLGGSSYEQYF

SEQ ID NO: 170669 - protein, 17 aa, Homo sapiens
  CDR3 for alpha chain variable domain of TCR clone 85335 (TRAV3, TRAJ38)
CAVRDCLNAGNNRKLIW

SEQ ID NO: 170670 - protein, 15 aa, Homo sapiens
  CDR3 for beta chain variable domain of TCR clone 85335 (TRBV5-4, TRBJ2-3)
CATKSSGGALDTQYF

SEQ ID NO: 170671 - protein, 15 aa, Homo sapiens
  CDR3 for alpha chain variable domain of TCR clone 85336 (TRAV25, TRAJ10)
CAGPLLTGGGNKLTF

SEQ ID NO: 170672 - protein, 14 aa, Homo sapiens
  CDR3 for beta chain variable domain of TCR clone 85336 (TRBV7-2, TRBJ1-1)
CASSFLTGTTEAFF

SEQ ID NO: 170673 - protein, 13 aa, Homo sapiens
  CDR3 for alpha chain variable domain of TCR clone 85337 (TRAV29/DV5, TRAJ31)
CAASRNNNARLML

SEQ ID NO: 170674 - protein, 16 aa, Homo sapiens
  CDR3 for beta chain variable domain of TCR clone 85337 (TRBV20-1, TRBJ1-4)
CSAPGQGLLTNEKLFF

SEQ ID NO: 170675 - protein, 15 aa, Homo sapiens
  CDR3 for alpha chain variable domain of TCR clone 85338 (TRAV3, TRAJ3)
CAVRDMSSSASKIIF

SEQ ID NO: 170676 - protein, 16 aa, Homo sapiens
  CDR3 for beta chain variable domain of TCR clone 85338 (TRBV10-3, TRBJ2-1)
CAISGVGDGGGGEQFF

SEQ ID NO: 170677 - protein, 13 aa, Homo sapiens
  CDR3 for alpha chain variable domain of TCR clone 85339 (TRAV20, TRAJ21)
CAVEGYNFNKFYF

SEQ ID NO: 170678 - protein, 14 aa, Homo sapiens
  CDR3 for beta chain variable domain of TCR clone 85339 (TRBV7-7, TRBJ2-5)
CASSLRTGQETQYF

SEQ ID NO: 170679 - protein, 17 aa, Homo sapiens
  CDR3 for alpha chain variable domain of TCR clone 85340 (TRAV3, TRAJ6)
CAVRDGPRAGGSDIPTF

SEQ ID NO: 170680 - protein, 15 aa, Homo sapiens
  CDR3 for beta chain variable domain of TCR clone 85340 (TRBV29-1, TRBJ2-5)
CSVEGLAVNQETQYF

SEQ ID NO: 170681 - protein, 14 aa, Homo sapiens
  CDR3 for alpha chain variable domain of TCR clone 85341 (TRAV8-3, TRAJ9)
CAVVYNTGGFKTIL

SEQ ID NO: 170682 - protein, 14 aa, Homo sapiens
  CDR3 for beta chain variable domain of TCR clone 85341 (TRBV7-3, TRBJ2-2)
CASSSGGYTGELFF

SEQ ID NO: 170683 - protein, 16 aa, Homo sapiens
  CDR3 for alpha chain variable domain of TCR clone 85342 (TRAV1-2, TRAJ10)
CAVRGVLTGGGNKLTF

SEQ ID NO: 170684 - protein, 18 aa, Homo sapiens
  CDR3 for beta chain variable domain of TCR clone 85342 (TRBV12-4, TRBJ2-4)
CASSRTGAVDVAKNIQYF

SEQ ID NO: 170685 - protein, 14 aa, Homo sapiens
  CDR3 for alpha chain variable domain of TCR clone 85343 (TRAV3, TRAJ21)
CAVESQANFNKFYF

SEQ ID NO: 170686 - protein, 13 aa, Homo sapiens
  CDR3 for beta chain variable domain of TCR clone 85343 (TRBV7-9, TRBJ2-1)
CASSLDVGNEQFF

SEQ ID NO: 170687 - protein, 17 aa, Homo sapiens
  CDR3 for alpha chain variable domain of TCR clone 85344 (TRAV3, TRAJ28)
CAVREAYSGAGSYQLTF

SEQ ID NO: 170688 - protein, 18 aa, Homo sapiens
  CDR3 for beta chain variable domain of TCR clone 85344 (TRBV27, TRBJ2-1)
CASGNRAVGVGSENEQFF

SEQ ID NO: 170689 - protein, 11 aa, Homo sapiens
  CDR3 for alpha chain variable domain of TCR clone 85345 (TRAV26-1, TRAJ37)
CIVRVGRKLVF

SEQ ID NO: 170690 - protein, 13 aa, Homo sapiens
  CDR3 for beta chain variable domain of TCR clone 85345 (TRBV14, TRBJ1-2)
CASSEDRRYGYTF

SEQ ID NO: 170691 - protein, 21 aa, Homo sapiens
  CDR3 for alpha chain variable domain of TCR clone 85346 (TRAV1-1, TRAJ30)
CLLLLRCEREGGENRDDKIIF

SEQ ID NO: 170692 - protein, 14 aa, Homo sapiens
  CDR3 for beta chain variable domain of TCR clone 85346 (TRBV9, TRBJ2-7)
CASSVGVGSYEQYF

SEQ ID NO: 170693 - protein, 16 aa, Homo sapiens
  CDR3 for alpha chain variable domain of TCR clone 85347 (TRAV3, TRAJ28)
CAVLPRSGAGSYQLTF

SEQ ID NO: 170694 - protein, 15 aa, Homo sapiens
  CDR3 for beta chain variable domain of TCR clone 85347 (TRBV23-1, TRBJ2-7)
RQQSIQENGFHEQYF

SEQ ID NO: 170695 - protein, 15 aa, Homo sapiens
  CDR3 for alpha chain variable domain of TCR clone 85348 (TRAV3, TRAJ20)
CAVRDIKLSDYKLSF

SEQ ID NO: 170696 - protein, 17 aa, Homo sapiens
  CDR3 for beta chain variable domain of TCR clone 85348 (TRBV11-2, TRBJ2-1)
CASSLYPPGVEYNEQFF

SEQ ID NO: 170697 - protein, 15 aa, Homo sapiens
  CDR3 for alpha chain variable domain of TCR clone 85349 (TRAV26-2, TRAJ37)
CILRGGLRNTGKLIF

SEQ ID NO: 170698 - protein, 14 aa, Homo sapiens
  CDR3 for beta chain variable domain of TCR clone 85349 (TRBV25-1, TRBJ1-1)
CASTHLGGNTEAFF

SEQ ID NO: 170699 - protein, 15 aa, Homo sapiens
  CDR3 for alpha chain variable domain of TCR clone 85350 (TRAV12-2, TRAJ53)
CAVNGGGGSNYKLTF

SEQ ID NO: 170700 - protein, 17 aa, Homo sapiens
  CDR3 for beta chain variable domain of TCR clone 85350 (TRBV7-3, TRBJ2-3)
CSSSLMKRMRGADTQYF

SEQ ID NO: 170701 - protein, 15 aa, Homo sapiens
  CDR3 for alpha chain variable domain of TCR clone 85351 (TRAV12-2, TRAJ53)
CAVNGGGGSNSKLTF

SEQ ID NO: 170702 - protein, 13 aa, Homo sapiens
  CDR3 for beta chain variable domain of TCR clone 85351 (TRBV3-1, TRBJ1-1)
CASSPGVITEAFF

SEQ ID NO: 170703 - protein, 13 aa, Homo sapiens
  CDR3 for alpha chain variable domain of TCR clone 85352 (TRAV3, TRAJ21)
CAVREPDFNKFYF

SEQ ID NO: 170704 - protein, 12 aa, Homo sapiens
  CDR3 for beta chain variable domain of TCR clone 85352 (TRBV14, TRBJ2-5)
CASSQLKETQYF

SEQ ID NO: 170705 - protein, 15 aa, Homo sapiens
  CDR3 for alpha chain variable domain of TCR clone 85353 (TRAV3, TRAJ13)
FAVRVYSGGYQKVTF

SEQ ID NO: 170706 - protein, 15 aa, Homo sapiens
  CDR3 for beta chain variable domain of TCR clone 85353 (TRBV7-2, TRBJ2-1)
CASSSGLAGGNEQFF

SEQ ID NO: 170707 - protein, 15 aa, Homo sapiens
  CDR3 for alpha chain variable domain of TCR clone 85354 (TRAV3, TRAJ5)
CAVRDLDTGRRALTF

SEQ ID NO: 170708 - protein, 13 aa, Homo sapiens
  CDR3 for beta chain variable domain of TCR clone 85354 (TRBV12-4, TRBJ1-2)
CASSLRQGKGYTF

SEQ ID NO: 170709 - protein, 14 aa, Homo sapiens
  CDR3 for alpha chain variable domain of TCR clone 85355 (TRAV12-1, TRAJ9)
CVVTGDTGGCKTIF

SEQ ID NO: 170710 - protein, 16 aa, Homo sapiens
  CDR3 for beta chain variable domain of TCR clone 85355 (TRBV29-1, TRBJ1-2)
CSVEANRDIANYGYTF

SEQ ID NO: 170711 - protein, 13 aa, Homo sapiens
  CDR3 for alpha chain variable domain of TCR clone 85356 (TRAV12-1, TRAJ21)
CVVTLYNFNKFYF

SEQ ID NO: 170712 - protein, 20 aa, Homo sapiens
  CDR3 for beta chain variable domain of TCR clone 85356 (TRBV7-8, TRBJ2-1)
CASSLAHRPAGVRSYNEQFF

SEQ ID NO: 170713 - protein, 15 aa, Homo sapiens
  CDR3 for alpha chain variable domain of TCR clone 85357 (TRAV4, TRAJ36)
CLVGARQTGANNLFF

SEQ ID NO: 170714 - protein, 15 aa, Homo sapiens
  CDR3 for beta chain variable domain of TCR clone 85357 (TRBV7-6, TRBJ2-1)
CASSSLAGEGNEQFF

SEQ ID NO: 170715 - protein, 17 aa, Homo sapiens
  CDR3 for alpha chain variable domain of TCR clone 85358 (TRAV13-1, TRAJ52)
CAASSGAGGTSYGKLIF

SEQ ID NO: 170716 - protein, 15 aa, Homo sapiens
  CDR3 for beta chain variable domain of TCR clone 85358 (TRBV2, TRBJ2-1)
CASSELAGSYNEQFF

SEQ ID NO: 170717 - protein, 18 aa, Homo sapiens
  CDR3 for alpha chain variable domain of TCR clone 85359 (TRAV21, TRAJ52)
CAVRPSPAGGTSYGKLTF

SEQ ID NO: 170718 - protein, 13 aa, Homo sapiens
  CDR3 for beta chain variable domain of TCR clone 85359 (TRBV29-1, TRBJ2-2)
CSVYREETGELFF

SEQ ID NO: 170719 - protein, 14 aa, Homo sapiens
  CDR3 for alpha chain variable domain of TCR clone 85360 (TRAV13-2, TRAJ9)
CAENSFTGGFKTIF

SEQ ID NO: 170720 - protein, 14 aa, Homo sapiens
  CDR3 for beta chain variable domain of TCR clone 85360 (TRBV7-3, TRBJ2-7)
CASSLKADSYEQYF

SEQ ID NO: 170721 - protein, 10 aa, Homo sapiens
  CDR3 for alpha chain variable domain of TCR clone 85361 (TRAV1-2, TRAJ20)
CACNDYKLSF

SEQ ID NO: 170722 - protein, 16 aa, Homo sapiens
  CDR3 for beta chain variable domain of TCR clone 85361 (TRBV20-1, TRBJ2-1)
CSARDLKHGMNNEQFF

SEQ ID NO: 170723 - protein, 14 aa, Homo sapiens
  CDR3 for alpha chain variable domain of TCR clone 85362 (TRAV1-2, TRAJ16)
CAVNWFSDGQKLLF

SEQ ID NO: 170724 - protein, 13 aa, Homo sapiens
  CDR3 for beta chain variable domain of TCR clone 85362 (TRBV7-9, TRBJ1-2)
CASSLKQNYGYTF

SEQ ID NO: 170725 - protein, 15 aa, Homo sapiens
  CDR3 for alpha chain variable domain of TCR clone 85363 (TRAV38-1, TRAJ57)
CAFMDSQGGSEKLVF

SEQ ID NO: 170726 - protein, 16 aa, Homo sapiens
  CDR3 for beta chain variable domain of TCR clone 85363 (TRBV7-3, TRBJ2-1)
CASSLVSGSSNNEQFF

SEQ ID NO: 170727 - protein, 11 aa, Homo sapiens
  CDR3 for alpha chain variable domain of TCR clone 85364 (TRAV1-1, TRAJ23)
CAVRQGGKLIF

SEQ ID NO: 170728 - protein, 11 aa, Homo sapiens
  CDR3 for beta chain variable domain of TCR clone 85364 (TRBV19, TRBJ1-1)
CASSIGSEAFF

SEQ ID NO: 170729 - protein, 12 aa, Homo sapiens
  CDR3 for alpha chain variable domain of TCR clone 85365 (TRAV29/DV5, TRAJ15)
CASNQAGTALIF

SEQ ID NO: 170730 - protein, 15 aa, Homo sapiens
  CDR3 for beta chain variable domain of TCR clone 85365 (TRBV11-2, TRBJ2-2)
CASSSDRVNAGELFF

SEQ ID NO: 170731 - protein, 18 aa, Homo sapiens
  CDR3 for alpha chain variable domain of TCR clone 85366 (TRAV17, TRAJ52)
CATDSSNAGGTSYGKLTF

SEQ ID NO: 170732 - protein, 15 aa, Homo sapiens
  CDR3 for beta chain variable domain of TCR clone 85366 (TRBV7-3, TRBJ2-1)
CASSPTGGGEVEQFF

SEQ ID NO: 170733 - protein, 13 aa, Homo sapiens
  CDR3 for alpha chain variable domain of TCR clone 85367 (TRAV3, TRAJ21)
CAVREPDFNKFYF

SEQ ID NO: 170734 - protein, 15 aa, Homo sapiens
  CDR3 for beta chain variable domain of TCR clone 85367 (TRBV2, TRBJ2-1)
CASSELAGSYNEQFF

SEQ ID NO: 170735 - protein, 13 aa, Homo sapiens
  CDR3 for alpha chain variable domain of TCR clone 85368 (TRAV2, TRAJ40)
CAVVTSGTYKYIF

SEQ ID NO: 170736 - protein, 15 aa, Homo sapiens
  CDR3 for beta chain variable domain of TCR clone 85368 (TRBV5-1, TRBJ2-1)
CASTGSGRTYNEQFF

SEQ ID NO: 170737 - protein, 19 aa, Homo sapiens
  CDR3 for alpha chain variable domain of TCR clone 85369 (TRAV29/DV5, TRAJ49)
CSVLLYSKLTVDTGNQFYF

SEQ ID NO: 170738 - protein, 17 aa, Homo sapiens
  CDR3 for beta chain variable domain of TCR clone 85369 (TRBV13, TRBJ2-3)
CASSLSRVAGGRNTQYF

SEQ ID NO: 170739 - protein, 15 aa, Homo sapiens
  CDR3 for alpha chain variable domain of TCR clone 85370 (TRAV26-1, TRAJ48)
CIARWSWFGNEKLTF

SEQ ID NO: 170740 - protein, 12 aa, Homo sapiens
  CDR3 for beta chain variable domain of TCR clone 85370 (TRBV19, TRBJ2-5)
CASRISEETQYF

SEQ ID NO: 170741 - protein, 15 aa, Homo sapiens
  CDR3 for alpha chain variable domain of TCR clone 85371 (TRAV12-2, TRAJ53)
CAVNGGGGSNYKLTF

SEQ ID NO: 170742 - protein, 14 aa, Homo sapiens
  CDR3 for beta chain variable domain of TCR clone 85371 (TRBV23-1, TRBJ2-5)
CASSFLRSQETQYF

SEQ ID NO: 170743 - protein, 12 aa, Homo sapiens
  CDR3 for alpha chain variable domain of TCR clone 85372 (TRAV12-3, TRAJ17)
CAMTLTGNQLTF

SEQ ID NO: 170744 - protein, 17 aa, Homo sapiens
  CDR3 for beta chain variable domain of TCR clone 85372 (TRBV7-3, TRBJ2-3)
CASSLMKRMRGADTQYF

SEQ ID NO: 170745 - protein, 14 aa, Homo sapiens
  CDR3 for alpha chain variable domain of TCR clone 85373 (TRAV12-2, TRAJ13)
CAVKKTGGYQKVTF

SEQ ID NO: 170746 - protein, 13 aa, Homo sapiens
  CDR3 for beta chain variable domain of TCR clone 85373 (TRBV24-1, TRBJ2-1)
CATSAGPYNEQFF

SEQ ID NO: 170747 - protein, 11 aa, Homo sapiens
  CDR3 for alpha chain variable domain of TCR clone 85374 (TRAV29/DV5, TRAJ49)
CAAVPGNQFYF

SEQ ID NO: 170748 - protein, 11 aa, Homo sapiens
  CDR3 for beta chain variable domain of TCR clone 85374 (TRBV29-1, TRBJ2-5)
CSEDRTGTQYF

SEQ ID NO: 170749 - protein, 14 aa, Homo sapiens
  CDR3 for alpha chain variable domain of TCR clone 85375 (TRAV9-2, TRAJ39)
CALYIYNAGNMLTF

SEQ ID NO: 170750 - protein, 17 aa, Homo sapiens
  CDR3 for beta chain variable domain of TCR clone 85375 (TRBV15, TRBJ1-4)
CATSRYGTGDPNEKLFF

SEQ ID NO: 170751 - protein, 12 aa, Homo sapiens
  CDR3 for alpha chain variable domain of TCR clone 85376 (TRAV27, TRAJ34)
CAEPYNTDKLIF

SEQ ID NO: 170752 - protein, 14 aa, Homo sapiens
  CDR3 for beta chain variable domain of TCR clone 85376 (TRBV7-8, TRBJ2-7)
CASSPGLADYEQYF

SEQ ID NO: 170753 - protein, 15 aa, Homo sapiens
  CDR3 for alpha chain variable domain of TCR clone 85377 (TRAV40, TRAJ45)
CLLGDLGGGADGLTF

SEQ ID NO: 170754 - protein, 13 aa, Homo sapiens
  CDR3 for beta chain variable domain of TCR clone 85377 (TRBV7-9, TRBJ1-2)
CAISLKQNYGYAF

SEQ ID NO: 170755 - protein, 14 aa, Homo sapiens
  CDR3 for alpha chain variable domain of TCR clone 85378 (TRAV8-3, TRAJ35)
CAVVPQGFGNVLHC

SEQ ID NO: 170756 - protein, 14 aa, Homo sapiens
  CDR3 for beta chain variable domain of TCR clone 85378 (TRBV19, TRBJ2-1)
CASPTFVLSGEQFF

SEQ ID NO: 170757 - protein, 13 aa, Homo sapiens
  CDR3 for alpha chain variable domain of TCR clone 85379 (TRAV27, TRAJ49)
CAPRPYTGNQFYF

SEQ ID NO: 170758 - protein, 16 aa, Homo sapiens
  CDR3 for beta chain variable domain of TCR clone 85379 (TRBV10-3, TRBJ2-1)
CAISGVGDGGGGEQFF

SEQ ID NO: 170759 - protein, 15 aa, Homo sapiens
  CDR3 for alpha chain variable domain of TCR clone 85380 (TRAV21, TRAJ53)
CATLNSGGSNYKLTF

SEQ ID NO: 170760 - protein, 15 aa, Homo sapiens
  CDR3 for beta chain variable domain of TCR clone 85380 (TRBV9, TRBJ2-1)
CSSVGGGGNYNEQFF

SEQ ID NO: 170761 - protein, 13 aa, Homo sapiens
  CDR3 for alpha chain variable domain of TCR clone 85381 (TRAV3, TRAJ26)
CAVRGAEGQNFVF

SEQ ID NO: 170762 - protein, 13 aa, Homo sapiens
  CDR3 for beta chain variable domain of TCR clone 85381 (TRBV15, TRBJ2-7)
CATSTTGHYEQYF

SEQ ID NO: 170763 - protein, 11 aa, Homo sapiens
  CDR3 for alpha chain variable domain of TCR clone 85382 (TRAV3, TRAJ17)
CAEAAGNKLTF

SEQ ID NO: 170764 - protein, 15 aa, Homo sapiens
  CDR3 for beta chain variable domain of TCR clone 85382 (TRBV11-3, TRBJ2-3)
CASLKDGREGDTQYF

SEQ ID NO: 170765 - protein, 13 aa, Homo sapiens
  CDR3 for alpha chain variable domain of TCR clone 85383 (TRAV2, TRAJ15)
CAVASQAGTSLIF

SEQ ID NO: 170766 - protein, 16 aa, Homo sapiens
  CDR3 for beta chain variable domain of TCR clone 85383 (TRBV5-1, TRBJ1-1)
CASSSGGNSLNTEAFF

SEQ ID NO: 170767 - protein, 12 aa, Homo sapiens
  CDR3 for alpha chain variable domain of TCR clone 85384 (TRAV22, TRAJ29)
CAPPSGNTPLVF

SEQ ID NO: 170768 - protein, 14 aa, Homo sapiens
  CDR3 for beta chain variable domain of TCR clone 85384 (TRBV11-2, TRBJ2-7)
CAISLGAGAYEQYF

SEQ ID NO: 170769 - protein, 15 aa, Homo sapiens
  CDR3 for alpha chain variable domain of TCR clone 85385 (TRAV23/DV6, TRAJ30)
CAASSQESSDDKIIF

SEQ ID NO: 170770 - protein, 17 aa, Homo sapiens
  CDR3 for beta chain variable domain of TCR clone 85385 (TRBV4-3, TRBJ2-1)
CASSQFSSGRASGEQFF

SEQ ID NO: 170771 - protein, 14 aa, Homo sapiens
  CDR3 for alpha chain variable domain of TCR clone 85386 (TRAV23/DV6, TRAJ13)
CAASETRGYQKVTF

SEQ ID NO: 170772 - protein, 13 aa, Homo sapiens
  CDR3 for beta chain variable domain of TCR clone 85386 (TRBV29-1, TRBJ2-1)
CSVEGGRVNEQFF

SEQ ID NO: 170773 - protein, 14 aa, Homo sapiens
  CDR3 for alpha chain variable domain of TCR clone 85387 (TRAV9-2, TRAJ39)
CALYIYNAGNMLTF

SEQ ID NO: 170774 - protein, 14 aa, Homo sapiens
  CDR3 for beta chain variable domain of TCR clone 85387 (TRBV20-1, TRBJ2-1)
CSAHPGLPYNEQFF

SEQ ID NO: 170775 - protein, 14 aa, Homo sapiens
  CDR3 for alpha chain variable domain of TCR clone 85388 (TRAV21, TRAJ37)
CAVKGSSNKGKLIF

SEQ ID NO: 170776 - protein, 14 aa, Homo sapiens
  CDR3 for beta chain variable domain of TCR clone 85388 (TRBV7-2, TRBJ2-1)
CASSRGGARNEQFF

SEQ ID NO: 170777 - protein, 14 aa, Homo sapiens
  CDR3 for alpha chain variable domain of TCR clone 85389 (TRAV8-6, TRAJ57)
CAVSSKGGSEKLVF

SEQ ID NO: 170778 - protein, 13 aa, Homo sapiens
  CDR3 for beta chain variable domain of TCR clone 85389 (TRBV27, TRBJ1-1)
CASSLSIGAEAFF

SEQ ID NO: 170779 - protein, 13 aa, Homo sapiens
  CDR3 for alpha chain variable domain of TCR clone 85390 (TRAV20, TRAJ21)
CAVEGNNFNKFYF

SEQ ID NO: 170780 - protein, 14 aa, Homo sapiens
  CDR3 for beta chain variable domain of TCR clone 85390 (TRBV3-1, TRBJ2-5)
CASSQGPDQETQYF

SEQ ID NO: 170781 - protein, 13 aa, Homo sapiens
  CDR3 for alpha chain variable domain of TCR clone 85391 (TRAV8-3, TRAJ12)
CAVGPGSSYKLTF

SEQ ID NO: 170782 - protein, 12 aa, Homo sapiens
  CDR3 for beta chain variable domain of TCR clone 85391 (TRBV11-2, TRBJ2-1)
CASSPGNNEQFF

SEQ ID NO: 170783 - protein, 15 aa, Homo sapiens
  CDR3 for alpha chain variable domain of TCR clone 85392 (TRAV8-4, TRAJ7)
CSVSGGNYGNNRLAF

SEQ ID NO: 170784 - protein, 11 aa, Homo sapiens
  CDR3 for beta chain variable domain of TCR clone 85392 (TRBV20-1, TRBJ2-1)
CSLSSGSEQFF

SEQ ID NO: 170785 - protein, 13 aa, Homo sapiens
  CDR3 for alpha chain variable domain of TCR clone 85393 (TRAV8-3, TRAJ36)
CAVGATGANHLFF

SEQ ID NO: 170786 - protein, 15 aa, Homo sapiens
  CDR3 for beta chain variable domain of TCR clone 85393 (TRBV7-2, TRBJ1-2)
CASSPRAGWNYGYTF

SEQ ID NO: 170787 - protein, 13 aa, Homo sapiens
  CDR3 for alpha chain variable domain of TCR clone 85394 (TRAV8-6, TRAJ49)
CAVITNTGNQFYF

SEQ ID NO: 170788 - protein, 13 aa, Homo sapiens
  CDR3 for beta chain variable domain of TCR clone 85394 (TRBV28, TRBJ2-5)
CASSFAGGETQYF

SEQ ID NO: 170789 - protein, 13 aa, Homo sapiens
  CDR3 for alpha chain variable domain of TCR clone 85395 (TRAV20, TRAJ21)
CAVEGYNFNKFYF

SEQ ID NO: 170790 - protein, 14 aa, Homo sapiens
  CDR3 for beta chain variable domain of TCR clone 85395 (TRBV3-1, TRBJ2-5)
CASSQGPGQETQYF

SEQ ID NO: 170791 - protein, 14 aa, Homo sapiens
  CDR3 for alpha chain variable domain of TCR clone 85396 (TRAV26-1, TRAJ38)
CIADNAGNNRKLIW

SEQ ID NO: 170792 - protein, 14 aa, Homo sapiens
  CDR3 for beta chain variable domain of TCR clone 85396 (TRBV18, TRBJ2-7)
CASSPRGGSYEQYF

SEQ ID NO: 170793 - protein, 11 aa, Homo sapiens
  CDR3 for alpha chain variable domain of TCR clone 85397 (TRAV2, TRAJ13)
CASGGYQKVTF

SEQ ID NO: 170794 - protein, 15 aa, Homo sapiens
  CDR3 for beta chain variable domain of TCR clone 85397 (TRBV25-1, TRBJ2-4)
CASSETESAKNIQYF

SEQ ID NO: 170795 - protein, 14 aa, Homo sapiens
  CDR3 for alpha chain variable domain of TCR clone 85398 (TRAV12-1, TRAJ9)
CVVNKGAGGFKTIF

SEQ ID NO: 170796 - protein, 16 aa, Homo sapiens
  CDR3 for beta chain variable domain of TCR clone 85398 (TRBV4-3, TRBJ2-2)
CASSQDRGSDTGELFF

SEQ ID NO: 170797 - protein, 15 aa, Homo sapiens
  CDR3 for alpha chain variable domain of TCR clone 85399 (TRAV12-3, TRAJ6)
CAMSATSGGSYIPTF

SEQ ID NO: 170798 - protein, 15 aa, Homo sapiens
  CDR3 for beta chain variable domain of TCR clone 85399 (TRBV7-3, TRBJ2-1)
CASSPTGGGEVEQFF

SEQ ID NO: 170799 - protein, 12 aa, Homo sapiens
  CDR3 for alpha chain variable domain of TCR clone 85400 (TRAV12-2, TRAJ7)
CAVMRGNNRLAF

SEQ ID NO: 170800 - protein, 11 aa, Homo sapiens
  CDR3 for beta chain variable domain of TCR clone 85400 (TRBV7-8, TRBJ2-7)
CASSLSLEQYF

SEQ ID NO: 170801 - protein, 16 aa, Homo sapiens
  CDR3 for alpha chain variable domain of TCR clone 85401 (TRAV12-3, TRAJ53)
CAKSPGSGGSNYKLTF

SEQ ID NO: 170802 - protein, 11 aa, Homo sapiens
  CDR3 for beta chain variable domain of TCR clone 85401 (TRBV29-1, TRBJ2-5)
CSEDRTGTQYF

SEQ ID NO: 170803 - protein, 13 aa, Homo sapiens
  CDR3 for alpha chain variable domain of TCR clone 85402 (TRAV29/DV5, TRAJ44)
CAASTGTASKLTS

SEQ ID NO: 170804 - protein, 13 aa, Homo sapiens
  CDR3 for beta chain variable domain of TCR clone 85402 (TRBV19, TRBJ2-7)
CASRKAGGSEQYF

SEQ ID NO: 170805 - protein, 15 aa, Homo sapiens
  CDR3 for alpha chain variable domain of TCR clone 85403 (TRAV26-1, TRAJ23)
CIVRVAGYQGGKLIF

SEQ ID NO: 170806 - protein, 18 aa, Homo sapiens
  CDR3 for beta chain variable domain of TCR clone 85403 (TRBV28, TRBJ2-1)
CASSSTSGMANSYNEQFF

SEQ ID NO: 170807 - protein, 12 aa, Homo sapiens
  CDR3 for alpha chain variable domain of TCR clone 85404 (TRAV4, TRAJ26)
CLVGAYGQNFVF

SEQ ID NO: 170808 - protein, 16 aa, Homo sapiens
  CDR3 for beta chain variable domain of TCR clone 85404 (TRBV7-2, TRBJ1-2)
CASSSNQDRRGHGYTF

SEQ ID NO: 170809 - protein, 12 aa, Homo sapiens
  CDR3 for alpha chain variable domain of TCR clone 85405 (TRAV12-1, TRAJ40)
CGAYLRNLQYIF

SEQ ID NO: 170810 - protein, 13 aa, Homo sapiens
  CDR3 for beta chain variable domain of TCR clone 85405 (TRBV4-2, TRBJ1-1)
CASSQAGNTEAFF

SEQ ID NO: 170811 - protein, 14 aa, Homo sapiens
  CDR3 for alpha chain variable domain of TCR clone 85406 (TRAV23/DV6, TRAJ4)
CAANLSGGYNKLIF

SEQ ID NO: 170812 - protein, 11 aa, Homo sapiens
  CDR3 for beta chain variable domain of TCR clone 85406 (TRBV7-9, TRBJ2-3)
CASSPTDKQYF

SEQ ID NO: 170813 - protein, 11 aa, Homo sapiens
  CDR3 for alpha chain variable domain of TCR clone 85407 (TRAV21, TRAJ11)
CAVNGYSTLTF

SEQ ID NO: 170814 - protein, 13 aa, Homo sapiens
  CDR3 for beta chain variable domain of TCR clone 85407 (TRBV12-5, TRBJ2-3)
CASGDRQSDTQYF

SEQ ID NO: 170815 - protein, 16 aa, Homo sapiens
  CDR3 for alpha chain variable domain of TCR clone 85408 (TRAV30, TRAJ24)
CGTEIVDADSWGKFQF

SEQ ID NO: 170816 - protein, 14 aa, Homo sapiens
  CDR3 for beta chain variable domain of TCR clone 85408 (TRBV20-1, TRBJ1-1)
CSAQRRIGGTEAFF

SEQ ID NO: 170817 - protein, 13 aa, Homo sapiens
  CDR3 for alpha chain variable domain of TCR clone 85409 (TRAV16, TRAJ27)
CALRRTNAGKSTF

SEQ ID NO: 170818 - protein, 15 aa, Homo sapiens
  CDR3 for beta chain variable domain of TCR clone 85409 (TRBV18, TRBJ2-1)
CASSPPSTSYNEQFF

SEQ ID NO: 170819 - protein, 15 aa, Homo sapiens
  CDR3 for alpha chain variable domain of TCR clone 85410 (TRAV17, TRAJ57)
CATGPSQGGSEKLVF

SEQ ID NO: 170820 - protein, 13 aa, Homo sapiens
  CDR3 for beta chain variable domain of TCR clone 85410 (TRBV12-4, TRBJ2-5)
CASSPGTEETQYF

SEQ ID NO: 170821 - protein, 20 aa, Homo sapiens
  CDR3 for alpha chain variable domain of TCR clone 85411 (TRAV1-1, TRAJ38)
CASNAGNNHIQNPDPAVYQL

SEQ ID NO: 170822 - protein, 14 aa, Homo sapiens
  CDR3 for beta chain variable domain of TCR clone 85411 (TRBV15, TRBJ2-1)
CATSGVEDYNEQFF

SEQ ID NO: 170823 - protein, 12 aa, Homo sapiens
  CDR3 for alpha chain variable domain of TCR clone 85412 (TRAV3, TRAJ20)
CAVRDPDYKLSF

SEQ ID NO: 170824 - protein, 15 aa, Homo sapiens
  CDR3 for beta chain variable domain of TCR clone 85412 (TRBV4-1, TRBJ1-4)
CASSDTGGTNEKLFF

SEQ ID NO: 170825 - protein, 12 aa, Homo sapiens
  CDR3 for alpha chain variable domain of TCR clone 85413 (TRAV17, TRAJ57)
CATDGGSEKLVF

SEQ ID NO: 170826 - protein, 10 aa, Homo sapiens
  CDR3 for beta chain variable domain of TCR clone 85413 (TRBV12-4, TRBJ1-2)
CASSFIWLHL

SEQ ID NO: 170827 - protein, 12 aa, Homo sapiens
  CDR3 for alpha chain variable domain of TCR clone 85414 (TRAV21, TRAJ11)
CAATSGYSTLTF

SEQ ID NO: 170828 - protein, 12 aa, Homo sapiens
  CDR3 for beta chain variable domain of TCR clone 85414 (TRBV11-2, TRBJ2-2)
CASSLPTGELFF

SEQ ID NO: 170829 - protein, 14 aa, Homo sapiens
  CDR3 for alpha chain variable domain of TCR clone 85415 (TRAV3, TRAJ21)
CAVRDAYNFNKFYF

SEQ ID NO: 170830 - protein, 17 aa, Homo sapiens
  CDR3 for beta chain variable domain of TCR clone 85415 (TRBV20-1, TRBJ1-6)
CSARGGHTFSYNSPLHF

SEQ ID NO: 170831 - protein, 15 aa, Homo sapiens
  CDR3 for alpha chain variable domain of TCR clone 85416 (TRAV20, TRAJ45)
RAVQETGGGADGLTF

SEQ ID NO: 170832 - protein, 11 aa, Homo sapiens
  CDR3 for beta chain variable domain of TCR clone 85416 (TRBV12-4, TRBJ2-3)
CASTATDTQYF

SEQ ID NO: 170833 - protein, 17 aa, Homo sapiens
  CDR3 for alpha chain variable domain of TCR clone 85417 (TRAV3, TRAJ38)
CAVRDCLNAGNNRTLIW

SEQ ID NO: 170834 - protein, 15 aa, Homo sapiens
  CDR3 for beta chain variable domain of TCR clone 85417 (TRBV27, TRBJ2-1)
CASSNGGGSSNEQFF

SEQ ID NO: 170835 - protein, 18 aa, Homo sapiens
  CDR3 for alpha chain variable domain of TCR clone 85418 (TRAV9-2, TRAJ52)
CALSRHNAGGTSYGKLTF

SEQ ID NO: 170836 - protein, 15 aa, Homo sapiens
  CDR3 for beta chain variable domain of TCR clone 85418 (TRBV5-1, TRBJ2-3)
CASSVTSGSTDTQYF

SEQ ID NO: 170837 - protein, 18 aa, Homo sapiens
  CDR3 for alpha chain variable domain of TCR clone 85419 (TRAV21, TRAJ52)
CAVGPSPAGGTSYGKLTF

SEQ ID NO: 170838 - protein, 13 aa, Homo sapiens
  CDR3 for beta chain variable domain of TCR clone 85419 (TRBV29-1, TRBJ2-1)
CSVEGGRVNEQFF

SEQ ID NO: 170839 - protein, 16 aa, Homo sapiens
  CDR3 for alpha chain variable domain of TCR clone 85420 (TRAV12-3, TRAJ53)
CAMSPGSGGSNYKLTF

SEQ ID NO: 170840 - protein, 15 aa, Homo sapiens
  CDR3 for beta chain variable domain of TCR clone 85420 (TRBV6-6, TRBJ2-7)
CASSYSYGGSYEQYF

SEQ ID NO: 170841 - protein, 13 aa, Homo sapiens
  CDR3 for alpha chain variable domain of TCR clone 85421 (TRAV8-6, TRAJ49)
CAVITNTGNQIYF

SEQ ID NO: 170842 - protein, 12 aa, Homo sapiens
  CDR3 for beta chain variable domain of TCR clone 85421 (TRBV11-2, TRBJ2-2)
CASSLGGGELFF

SEQ ID NO: 170843 - protein, 16 aa, Homo sapiens
  CDR3 for alpha chain variable domain of TCR clone 85422 (TRAV35, TRAJ28)
CAGQRYSGAGSYQLTF

SEQ ID NO: 170844 - protein, 14 aa, Homo sapiens
  CDR3 for beta chain variable domain of TCR clone 85422 (TRBV18, TRBJ2-7)
RASSPRGGAYEQYF

SEQ ID NO: 170845 - protein, 15 aa, Homo sapiens
  CDR3 for alpha chain variable domain of TCR clone 85423 (TRAV13-2, TRAJ10)
CAENRDTGGGNKLTF

SEQ ID NO: 170846 - protein, 16 aa, Homo sapiens
  CDR3 for beta chain variable domain of TCR clone 85423 (TRBV4-2, TRBJ1-1)
CASGQAGFGMNTEAFF

SEQ ID NO: 170847 - protein, 11 aa, Homo sapiens
  CDR3 for alpha chain variable domain of TCR clone 85424 (TRAV21, TRAJ39)
LLVNAGNMLTF

SEQ ID NO: 170848 - protein, 16 aa, Homo sapiens
  CDR3 for beta chain variable domain of TCR clone 85424 (TRBV27, TRBJ1-1)
CASSLLAGTGETEAFF

SEQ ID NO: 170849 - protein, 14 aa, Homo sapiens
  CDR3 for alpha chain variable domain of TCR clone 85425 (TRAV12-3, TRAJ10)
SLLPLTGGGNKLTF

SEQ ID NO: 170850 - protein, 12 aa, Homo sapiens
  CDR3 for beta chain variable domain of TCR clone 85425 (TRBV7-9, TRBJ2-7)
CASSIKREEQYF

SEQ ID NO: 170851 - protein, 14 aa, Homo sapiens
  CDR3 for alpha chain variable domain of TCR clone 85426 (TRAV12-3, TRAJ33)
CAMSVPGSNYQLIW

SEQ ID NO: 170852 - protein, 12 aa, Homo sapiens
  CDR3 for beta chain variable domain of TCR clone 85426 (TRBV7-8, TRBJ2-7)
CASSLGDRERYF

SEQ ID NO: 170853 - protein, 13 aa, Homo sapiens
  CDR3 for alpha chain variable domain of TCR clone 85427 (TRAV21, TRAJ20)
CAVGLRVDYKLSF

SEQ ID NO: 170854 - protein, 13 aa, Homo sapiens
  CDR3 for beta chain variable domain of TCR clone 85427 (TRBV29-1, TRBJ2-1)
CSVEGGGVNEQFF

SEQ ID NO: 170855 - protein, 16 aa, Homo sapiens
  CDR3 for alpha chain variable domain of TCR clone 85428 (TRAV35, TRAJ54)
SDVGIYPLQGAQKLVF

SEQ ID NO: 170856 - protein, 11 aa, Homo sapiens
  CDR3 for beta chain variable domain of TCR clone 85428 (TRBV12-4, TRBJ2-3)
CASTATDTQYF

SEQ ID NO: 170857 - protein, 13 aa, Homo sapiens
  CDR3 for alpha chain variable domain of TCR clone 85429 (TRAV12-1, TRAJ9)
CGEINTGGFKTIF

SEQ ID NO: 170858 - protein, 14 aa, Homo sapiens
  CDR3 for beta chain variable domain of TCR clone 85429 (TRBV7-2, TRBJ2-7)
CASSPKTSFYEQYF

SEQ ID NO: 170859 - protein, 14 aa, Homo sapiens
  CDR3 for alpha chain variable domain of TCR clone 85430 (TRAV38-1, TRAJ45)
CASHSGGGAVGLTF

SEQ ID NO: 170860 - protein, 13 aa, Homo sapiens
  CDR3 for beta chain variable domain of TCR clone 85430 (TRBV10-3, TRBJ1-2)
CAISERDSYGYTF

SEQ ID NO: 170861 - protein, 12 aa, Homo sapiens
  CDR3 for alpha chain variable domain of TCR clone 85431 (TRAV12-3, TRAJ40)
CAMSSGTYKYIF

SEQ ID NO: 170862 - protein, 15 aa, Homo sapiens
  CDR3 for beta chain variable domain of TCR clone 85431 (TRBV7-3, TRBJ2-2)
CASSETGQGPGELFF

SEQ ID NO: 170863 - protein, 13 aa, Homo sapiens
  CDR3 for alpha chain variable domain of TCR clone 85432 (TRAV21, TRAJ27)
CAARPGNAGKSTF

SEQ ID NO: 170864 - protein, 12 aa, Homo sapiens
  CDR3 for beta chain variable domain of TCR clone 85432 (TRBV2, TRBJ1-5)
CAFGEYDQPQHF

SEQ ID NO: 170865 - protein, 14 aa, Homo sapiens
  CDR3 for alpha chain variable domain of TCR clone 85433 (TRAV12-1, TRAJ17)
CVVNYKAAGNKLTF

SEQ ID NO: 170866 - protein, 17 aa, Homo sapiens
  CDR3 for beta chain variable domain of TCR clone 85433 (TRBV20-1, TRBJ2-1)
CSASSSGLAGSYNEPFF

SEQ ID NO: 170867 - protein, 15 aa, Homo sapiens
  CDR3 for alpha chain variable domain of TCR clone 85434 (TRAV13-1, TRAJ10)
CAATIHTGGGNKLTF

SEQ ID NO: 170868 - protein, 15 aa, Homo sapiens
  CDR3 for beta chain variable domain of TCR clone 85434 (TRBV2, TRBJ2-7)
CASTLLGSGATEQYF

SEQ ID NO: 170869 - protein, 14 aa, Homo sapiens
  CDR3 for alpha chain variable domain of TCR clone 85435 (TRAV17, TRAJ56)
CATVPAGSNSKLTF

SEQ ID NO: 170870 - protein, 13 aa, Homo sapiens
  CDR3 for beta chain variable domain of TCR clone 85435 (TRBV12-4, TRBJ2-2)
CASSITGSGELFF

SEQ ID NO: 170871 - protein, 17 aa, Homo sapiens
  CDR3 for alpha chain variable domain of TCR clone 85436 (TRAV3, TRAJ7)
CAVRDMSPLEGTTDSLL

SEQ ID NO: 170872 - protein, 17 aa, Homo sapiens
  CDR3 for beta chain variable domain of TCR clone 85436 (TRBV15, TRBJ1-2)
CATSGREIDVVNYGCTF

SEQ ID NO: 170873 - protein, 16 aa, Homo sapiens
  CDR3 for alpha chain variable domain of TCR clone 85437 (TRAV21, TRAJ33)
FAVSPASMDSNYQLIW

SEQ ID NO: 170874 - protein, 17 aa, Homo sapiens
  CDR3 for beta chain variable domain of TCR clone 85437 (TRBV2, TRBJ1-4)
CASSKRELTQGEEKLFF

SEQ ID NO: 170875 - protein, 14 aa, Homo sapiens
  CDR3 for alpha chain variable domain of TCR clone 85438 (TRAV27, TRAJ22)
CAVLPSGSARQLTF

SEQ ID NO: 170876 - protein, 16 aa, Homo sapiens
  CDR3 for beta chain variable domain of TCR clone 85438 (TRBV7-3, TRBJ2-2)
CASSLKRGTLSGELFF

SEQ ID NO: 170877 - protein, 16 aa, Homo sapiens
  CDR3 for alpha chain variable domain of TCR clone 85439 (TRAV8-6, TRAJ32)
CAVSDPYGGATNKLIF

SEQ ID NO: 170878 - protein, 18 aa, Homo sapiens
  CDR3 for beta chain variable domain of TCR clone 85439 (TRBV4-2, TRBJ2-6)
CASSQLQGVLAGANVLTF

SEQ ID NO: 170879 - protein, 13 aa, Homo sapiens
  CDR3 for alpha chain variable domain of TCR clone 85440 (TRAV3, TRAJ27)
CAVRPLGAGKSTF

SEQ ID NO: 170880 - protein, 11 aa, Homo sapiens
  CDR3 for beta chain variable domain of TCR clone 85440 (TRBV12-4, TRBJ2-3)
CASTATDTQYF

SEQ ID NO: 170881 - protein, 13 aa, Homo sapiens
  CDR3 for alpha chain variable domain of TCR clone 85441 (TRAV12-1, TRAJ16)
CVVNTRNGQKLLF

SEQ ID NO: 170882 - protein, 12 aa, Homo sapiens
  CDR3 for beta chain variable domain of TCR clone 85441 (TRBV11-2, TRBJ2-2)
CASSLGGGELFF

SEQ ID NO: 170883 - protein, 14 aa, Homo sapiens
  CDR3 for alpha chain variable domain of TCR clone 85442 (TRAV12-2, TRAJ17)
CAVLFKAACNKLTF

SEQ ID NO: 170884 - protein, 17 aa, Homo sapiens
  CDR3 for beta chain variable domain of TCR clone 85442 (TRBV11-2, TRBJ2-1)
CASSLYPPGVEYNEQFF

SEQ ID NO: 170885 - protein, 15 aa, Homo sapiens
  CDR3 for alpha chain variable domain of TCR clone 85443 (TRAV12-2, TRAJ57)
CAVSRGQGGSDKLVF

SEQ ID NO: 170886 - protein, 14 aa, Homo sapiens
  CDR3 for beta chain variable domain of TCR clone 85443 (TRBV20-1, TRBJ2-1)
CSAHPGLPYNEQFF

SEQ ID NO: 170887 - protein, 13 aa, Homo sapiens
  CDR3 for alpha chain variable domain of TCR clone 85444 (TRAV8-3, TRAJ48)
CAVVPFGNEKLNF

SEQ ID NO: 170888 - protein, 12 aa, Homo sapiens
  CDR3 for beta chain variable domain of TCR clone 85444 (TRBV11-2, TRBJ2-2)
CASSLGGGELFF

SEQ ID NO: 170889 - protein, 14 aa, Homo sapiens
  CDR3 for alpha chain variable domain of TCR clone 85445 (TRAV17, TRAJ16)
CATADFSDGQKLLF

SEQ ID NO: 170890 - protein, 14 aa, Homo sapiens
  CDR3 for beta chain variable domain of TCR clone 85445 (TRBV7-9, TRBJ2-1)
CASSPRDSLYEQFF

SEQ ID NO: 170891 - protein, 12 aa, Homo sapiens
  CDR3 for alpha chain variable domain of TCR clone 85446 (TRAV8-3, TRAJ20)
CAVGANDYKLSF

SEQ ID NO: 170892 - protein, 15 aa, Homo sapiens
  CDR3 for beta chain variable domain of TCR clone 85446 (TRBV10-3, TRBJ2-3)
CAISLTSGGTDTQYF

SEQ ID NO: 170893 - protein, 13 aa, Homo sapiens
  CDR3 for alpha chain variable domain of TCR clone 85447 (TRAV13-1, TRAJ21)
CAASIYNFNKFYL

SEQ ID NO: 170894 - protein, 13 aa, Homo sapiens
  CDR3 for beta chain variable domain of TCR clone 85447 (TRBV27, TRBJ1-4)
CASSLMGDEKLLF

SEQ ID NO: 170895 - protein, 16 aa, Homo sapiens
  CDR3 for alpha chain variable domain of TCR clone 85448 (TRAV3, TRAJ10)
CAVRDMRAGGGNKLPF

SEQ ID NO: 170896 - protein, 15 aa, Homo sapiens
  CDR3 for beta chain variable domain of TCR clone 85448 (TRBV11-2, TRBJ1-6)
CASTGFGTAVSPLHF

SEQ ID NO: 170897 - protein, 13 aa, Homo sapiens
  CDR3 for alpha chain variable domain of TCR clone 85449 (TRAV27, TRAJ8)
CAGGPTGFQKLVF

SEQ ID NO: 170898 - protein, 17 aa, Homo sapiens
  CDR3 for beta chain variable domain of TCR clone 85449 (TRBV11-2, TRBJ2-1)
CASSLYPPGVEYNEQFF

SEQ ID NO: 170899 - protein, 13 aa, Homo sapiens
  CDR3 for alpha chain variable domain of TCR clone 85450 (TRAV27, TRAJ6)
CAGGTRGGYIPTF

SEQ ID NO: 170900 - protein, 13 aa, Homo sapiens
  CDR3 for beta chain variable domain of TCR clone 85450 (TRBV4-1, TRBJ2-2)
CASSQENTGELFF

SEQ ID NO: 170901 - protein, 16 aa, Homo sapiens
  CDR3 for alpha chain variable domain of TCR clone 85451 (TRAV12-3, TRAJ53)
CAMSPGSGGSNYKLPF

SEQ ID NO: 170902 - protein, 13 aa, Homo sapiens
  CDR3 for beta chain variable domain of TCR clone 85451 (TRBV7-3, TRBJ1-1)
CASSQDWGAEAFF

SEQ ID NO: 170903 - protein, 12 aa, Homo sapiens
  CDR3 for alpha chain variable domain of TCR clone 85452 (TRAV8-3, TRAJ26)
CGGDNYGQNFVF

SEQ ID NO: 170904 - protein, 15 aa, Homo sapiens
  CDR3 for beta chain variable domain of TCR clone 85452 (TRBV9, TRBJ2-1)
CASSLAGSSYNEQFF

SEQ ID NO: 170905 - protein, 12 aa, Homo sapiens
  CDR3 for alpha chain variable domain of TCR clone 85453 (TRAV16, TRAJ9)
CALRAGGFKTIF

SEQ ID NO: 170906 - protein, 13 aa, Homo sapiens
  CDR3 for beta chain variable domain of TCR clone 85453 (TRBV10-3, TRBJ2-7)
CASKLAVNYEQYF

SEQ ID NO: 170907 - protein, 14 aa, Homo sapiens
  CDR3 for alpha chain variable domain of TCR clone 85454 (TRAV8-2, TRAJ5)
CVVDMGTGRRALTF

SEQ ID NO: 170908 - protein, 15 aa, Homo sapiens
  CDR3 for beta chain variable domain of TCR clone 85454 (TRBV5-7, TRBJ2-1)
CASSYISGRGNEQFF

SEQ ID NO: 170909 - protein, 17 aa, Homo sapiens
  CDR3 for alpha chain variable domain of TCR clone 85455 (TRAV26-1, TRAJ10)
CIVSFRGLTGGGNKLNF

SEQ ID NO: 170910 - protein, 13 aa, Homo sapiens
  CDR3 for beta chain variable domain of TCR clone 85455 (TRBV20-1, TRBJ2-3)
CSASRQAADTQYF

SEQ ID NO: 170911 - protein, 14 aa, Homo sapiens
  CDR3 for alpha chain variable domain of TCR clone 85456 (TRAV1-2, TRAJ8)
CAVREDTGFQKLVF

SEQ ID NO: 170912 - protein, 16 aa, Homo sapiens
  CDR3 for beta chain variable domain of TCR clone 85456 (TRBV20-1, TRBJ1-4)
CSAPGQGLSTNEKLFF

SEQ ID NO: 170913 - protein, 15 aa, Homo sapiens
  CDR3 for alpha chain variable domain of TCR clone 85457 (TRAV21, TRAJ45)
CAVSYSGGGADGLTF

SEQ ID NO: 170914 - protein, 13 aa, Homo sapiens
  CDR3 for beta chain variable domain of TCR clone 85457 (TRBV20-1, TRBJ2-5)
CSAATELQEAQYF

SEQ ID NO: 170915 - protein, 12 aa, Homo sapiens
  CDR3 for alpha chain variable domain of TCR clone 85458 (TRAV26-1, TRAJ54)
CIGGWGAQKLVL

SEQ ID NO: 170916 - protein, 14 aa, Homo sapiens
  CDR3 for beta chain variable domain of TCR clone 85458 (TRBV11-2, TRBJ1-2)
CASSSGQAGDGYTF

SEQ ID NO: 170917 - protein, 15 aa, Homo sapiens
  CDR3 for alpha chain variable domain of TCR clone 85459 (TRAV12-2, TRAJ53)
CAVNGGGGGNYKLTF

SEQ ID NO: 170918 - protein, 14 aa, Homo sapiens
  CDR3 for beta chain variable domain of TCR clone 85459 (TRBV25-1, TRBJ1-1)
CASTHLGGNTEAFF

SEQ ID NO: 170919 - protein, 11 aa, Homo sapiens
  CDR3 for alpha chain variable domain of TCR clone 85460 (TRAV16, TRAJ33)
CALHSNYQLIW

SEQ ID NO: 170920 - protein, 15 aa, Homo sapiens
  CDR3 for beta chain variable domain of TCR clone 85460 (TRBV4-1, TRBJ1-4)
CASSDTGGTNEKLFF

SEQ ID NO: 170921 - protein, 16 aa, Homo sapiens
  CDR3 for alpha chain variable domain of TCR clone 85461 (TRAV3, TRAJ10)
CAVRDMRAGGGNKLTF

SEQ ID NO: 170922 - protein, 14 aa, Homo sapiens
  CDR3 for beta chain variable domain of TCR clone 85461 (TRBV7-2, TRBJ1-1)
CASSFVTGTTEAFF

SEQ ID NO: 170923 - protein, 16 aa, Homo sapiens
  CDR3 for alpha chain variable domain of TCR clone 85462 (TRAV23/DV6, TRAJ21)
CAASGGGGTTSTNFTL

SEQ ID NO: 170924 - protein, 11 aa, Homo sapiens
  CDR3 for beta chain variable domain of TCR clone 85462 (TRBV7-8, TRBJ2-7)
CASSLSLEQYF

SEQ ID NO: 170925 - protein, 11 aa, Homo sapiens
  CDR3 for alpha chain variable domain of TCR clone 85463 (TRAV3, TRAJ17)
PRGAAGNKLTF

SEQ ID NO: 170926 - protein, 16 aa, Homo sapiens
  CDR3 for beta chain variable domain of TCR clone 85463 (TRBV20-1, TRBJ1-4)
CSAPGQGLLTNEKLFF

SEQ ID NO: 170927 - protein, 16 aa, Homo sapiens
  CDR3 for alpha chain variable domain of TCR clone 85464 (TRAV38-1, TRAJ56)
CAFMKRQTGANSKLTF

SEQ ID NO: 170928 - protein, 13 aa, Homo sapiens
  CDR3 for beta chain variable domain of TCR clone 85464 (TRBV6-4, TRBJ1-5)
CASSADLNQPQHF

SEQ ID NO: 170929 - protein, 17 aa, Homo sapiens
  CDR3 for alpha chain variable domain of TCR clone 85465 (TRAV3, TRAJ42)
CAVRDRDYGGSQGNLIF

SEQ ID NO: 170930 - protein, 15 aa, Homo sapiens
  CDR3 for beta chain variable domain of TCR clone 85465 (TRBV28, TRBJ2-1)
CASSIIAGGRSEQFF

SEQ ID NO: 170931 - protein, 14 aa, Homo sapiens
  CDR3 for alpha chain variable domain of TCR clone 85466 (TRAV17, TRAJ54)
CATDANQGAQKLVF

SEQ ID NO: 170932 - protein, 12 aa, Homo sapiens
  CDR3 for beta chain variable domain of TCR clone 85466 (TRBV11-2, TRBJ2-1)
CASSPGNNEQFF

SEQ ID NO: 170933 - protein, 21 aa, Homo sapiens
  CDR3 for alpha chain variable domain of TCR clone 85467 (TRAV17, TRAJ7)
TASRAADTASYFCATLGRLAF

SEQ ID NO: 170934 - protein, 13 aa, Homo sapiens
  CDR3 for beta chain variable domain of TCR clone 85467 (TRBV12-4, TRBJ2-7)
CASSLERVREQYF

SEQ ID NO: 170935 - protein, 11 aa, Homo sapiens
  CDR3 for alpha chain variable domain of TCR clone 85468 (TRAV21, TRAJ20)
CAVDGDYKLSF

SEQ ID NO: 170936 - protein, 15 aa, Homo sapiens
  CDR3 for beta chain variable domain of TCR clone 85468 (TRBV20-1, TRBJ2-7)
CSAESGTSGAYEQYF

SEQ ID NO: 170937 - protein, 12 aa, Homo sapiens
  CDR3 for alpha chain variable domain of TCR clone 85469 (TRAV1-1, TRAJ39)
CAVPVVGNMLTF

SEQ ID NO: 170938 - protein, 15 aa, Homo sapiens
  CDR3 for beta chain variable domain of TCR clone 85469 (TRBV19, TRBJ1-6)
CASSTKGAVGSPLHF

SEQ ID NO: 170939 - protein, 16 aa, Homo sapiens
  CDR3 for alpha chain variable domain of TCR clone 85470 (TRAV21, TRAJ52)
CAVTNAGGTSYGKLTF

SEQ ID NO: 170940 - protein, 15 aa, Homo sapiens
  CDR3 for beta chain variable domain of TCR clone 85470 (TRBV7-9, TRBJ2-7)
CASSLALAEAYEQYF

SEQ ID NO: 170941 - protein, 11 aa, Homo sapiens
  CDR3 for alpha chain variable domain of TCR clone 85471 (TRAV2, TRAJ33)
CAVDSYYQLIW

SEQ ID NO: 170942 - protein, 14 aa, Homo sapiens
  CDR3 for beta chain variable domain of TCR clone 85471 (TRBV11-2, TRBJ2-3)
CASSRLARTDTQYF

SEQ ID NO: 170943 - protein, 17 aa, Homo sapiens
  CDR3 for alpha chain variable domain of TCR clone 85472 (TRAV3, TRAJ28)
CAVREAYSGAGSYQLTF

SEQ ID NO: 170944 - protein, 16 aa, Homo sapiens
  CDR3 for beta chain variable domain of TCR clone 85472 (TRBV7-8, TRBJ2-4)
CASSAERTLAKNIQYF

SEQ ID NO: 170945 - protein, 13 aa, Homo sapiens
  CDR3 for alpha chain variable domain of TCR clone 85473 (TRAV2, TRAJ40)
CAVVTTGTYKYIF

SEQ ID NO: 170946 - protein, 20 aa, Homo sapiens
  CDR3 for beta chain variable domain of TCR clone 85473 (TRBV7-8, TRBJ2-2)
CASSHLFPGPTIHITGELFF

SEQ ID NO: 170947 - protein, 14 aa, Homo sapiens
  CDR3 for alpha chain variable domain of TCR clone 85474 (TRAV12-2, TRAJ24)
CAVTPADSWGKLQF

SEQ ID NO: 170948 - protein, 14 aa, Homo sapiens
  CDR3 for beta chain variable domain of TCR clone 85474 (TRBV20-1, TRBJ1-1)
CSAMGGTANTEAFF

SEQ ID NO: 170949 - protein, 13 aa, Homo sapiens
  CDR3 for alpha chain variable domain of TCR clone 85475 (TRAV13-1, TRAJ43)
CAASKNNNNDMRF

SEQ ID NO: 170950 - protein, 13 aa, Homo sapiens
  CDR3 for beta chain variable domain of TCR clone 85475 (TRBV7-9, TRBJ1-2)
CASSLKQNYGYTF

SEQ ID NO: 170951 - protein, 11 aa, Homo sapiens
  CDR3 for alpha chain variable domain of TCR clone 85476 (TRAV2, TRAJ13)
CASGGYQKVTF

SEQ ID NO: 170952 - protein, 18 aa, Homo sapiens
  CDR3 for beta chain variable domain of TCR clone 85476 (TRBV11-2, TRBJ2-3)
CASSLGGASRGAPKTQYF

SEQ ID NO: 170953 - protein, 20 aa, Homo sapiens
  CDR3 for alpha chain variable domain of TCR clone 85477 (TRAV26-1, TRAJ38)
CIADNAGNNHIQNPDPAVSQ

SEQ ID NO: 170954 - protein, 13 aa, Homo sapiens
  CDR3 for beta chain variable domain of TCR clone 85477 (TRBV20-1, TRBJ1-1)
CSARGGGNTEAFF

SEQ ID NO: 170955 - protein, 14 aa, Homo sapiens
  CDR3 for alpha chain variable domain of TCR clone 85478 (TRAV12-2, TRAJ36)
CAVNPPTVANNLFF

SEQ ID NO: 170956 - protein, 13 aa, Homo sapiens
  CDR3 for beta chain variable domain of TCR clone 85478 (TRBV20-1, TRBJ1-6)
CSAPTGLGSPLHF

SEQ ID NO: 170957 - protein, 12 aa, Homo sapiens
  CDR3 for alpha chain variable domain of TCR clone 85479 (TRAV30, TRAJ43)
CGTEERGNDMHF

SEQ ID NO: 170958 - protein, 13 aa, Homo sapiens
  CDR3 for beta chain variable domain of TCR clone 85479 (TRBV27, TRBJ2-7)
CASSFSQGYEQYF

SEQ ID NO: 170959 - protein, 13 aa, Homo sapiens
  CDR3 for alpha chain variable domain of TCR clone 85480 (TRAV1-1, TRAJ9)
CAAKNTGGFKTIF

SEQ ID NO: 170960 - protein, 16 aa, Homo sapiens
  CDR3 for beta chain variable domain of TCR clone 85480 (TRBV4-3, TRBJ2-1)
CASSKVASGSYNEQFF

SEQ ID NO: 170961 - protein, 14 aa, Homo sapiens
  CDR3 for alpha chain variable domain of TCR clone 85481 (TRAV12-2, TRAJ40)
CAVKIPSGTYKYIF

SEQ ID NO: 170962 - protein, 17 aa, Homo sapiens
  CDR3 for beta chain variable domain of TCR clone 85481 (TRBV20-1, TRBJ2-2)
CSARDRTSGRHTGELFF

SEQ ID NO: 170963 - protein, 14 aa, Homo sapiens
  CDR3 for alpha chain variable domain of TCR clone 85482 (TRAV1-2, TRAJ16)
CAVNRFSDVQKLLF

SEQ ID NO: 170964 - protein, 14 aa, Homo sapiens
  CDR3 for beta chain variable domain of TCR clone 85482 (TRBV12-5, TRBJ2-5)
CASGSRTHQETQYF

SEQ ID NO: 170965 - protein, 20 aa, Homo sapiens
  CDR3 for alpha chain variable domain of TCR clone 85483 (TRAV4, TRAJ22)
CCVLLPRGDLYSGSARQLTF

SEQ ID NO: 170966 - protein, 16 aa, Homo sapiens
  CDR3 for beta chain variable domain of TCR clone 85483 (TRBV7-9, TRBJ2-1)
CASSDVAGGSYNEQFF

SEQ ID NO: 170967 - protein, 16 aa, Homo sapiens
  CDR3 for alpha chain variable domain of TCR clone 85484 (TRAV3, TRAJ21)
CAVRDIVRGNFNKFYF

SEQ ID NO: 170968 - protein, 13 aa, Homo sapiens
  CDR3 for beta chain variable domain of TCR clone 85484 (TRBV27, TRBJ2-7)
CASSLTTGYEQYF

SEQ ID NO: 170969 - protein, 15 aa, Homo sapiens
  CDR3 for alpha chain variable domain of TCR clone 85485 (TRAV3, TRAJ24)
CAVRDKMTAGGNGSL

SEQ ID NO: 170970 - protein, 14 aa, Homo sapiens
  CDR3 for beta chain variable domain of TCR clone 85485 (TRBV7-2, TRBJ2-3)
CASSQTGSSYTQYF

SEQ ID NO: 170971 - protein, 15 aa, Homo sapiens
  CDR3 for alpha chain variable domain of TCR clone 85486 (TRAV8-3, TRAJ15)
CAVGAPNQAGTAMIF

SEQ ID NO: 170972 - protein, 14 aa, Homo sapiens
  CDR3 for beta chain variable domain of TCR clone 85486 (TRBV20-1, TRBJ2-1)
CSPNDEASYNEQFF

SEQ ID NO: 170973 - protein, 16 aa, Homo sapiens
  CDR3 for alpha chain variable domain of TCR clone 85487 (TRAV14/DV4, TRAJ54)
CAMREGRIQGAQKLVF

SEQ ID NO: 170974 - protein, 14 aa, Homo sapiens
  CDR3 for beta chain variable domain of TCR clone 85487 (TRBV7-2, TRBJ1-6)
CASSLQGANSPLHF

SEQ ID NO: 170975 - protein, 15 aa, Homo sapiens
  CDR3 for alpha chain variable domain of TCR clone 85488 (TRAV13-2, TRAJ50)
CAEEPLKTSYDKVIF

SEQ ID NO: 170976 - protein, 15 aa, Homo sapiens
  CDR3 for beta chain variable domain of TCR clone 85488 (TRBV20-1, TRBJ1-5)
CSARGSMDSNQPQHF

SEQ ID NO: 170977 - protein, 15 aa, Homo sapiens
  CDR3 for alpha chain variable domain of TCR clone 85489 (TRAV16, TRAJ10)
CALEGLTGGGNKLTF

SEQ ID NO: 170978 - protein, 14 aa, Homo sapiens
  CDR3 for beta chain variable domain of TCR clone 85489 (TRBV7-6, TRBJ2-3)
CASSLGTVTDTQYL

SEQ ID NO: 170979 - protein, 17 aa, Homo sapiens
  CDR3 for alpha chain variable domain of TCR clone 85490 (TRAV3, TRAJ42)
CAVRDRDYGGSQGNLTF

SEQ ID NO: 170980 - protein, 12 aa, Homo sapiens
  CDR3 for beta chain variable domain of TCR clone 85490 (TRBV11-2, TRBJ2-1)
CASSPGDNEQFF

SEQ ID NO: 170981 - protein, 13 aa, Homo sapiens
  CDR3 for alpha chain variable domain of TCR clone 85491 (TRAV8-3, TRAJ6)
CAARRGGSYIPTF

SEQ ID NO: 170982 - protein, 15 aa, Homo sapiens
  CDR3 for beta chain variable domain of TCR clone 85491 (TRBV4-1, TRBJ2-3)
CASSNLAGGARYAVF

SEQ ID NO: 170983 - protein, 15 aa, Homo sapiens
  CDR3 for alpha chain variable domain of TCR clone 85492 (TRAV3, TRAJ22)
CAVRDRGGSARQLTF

SEQ ID NO: 170984 - protein, 13 aa, Homo sapiens
  CDR3 for beta chain variable domain of TCR clone 85492 (TRBV15, TRBJ1-6)
CATSGGLNSPLHF

SEQ ID NO: 170985 - protein, 15 aa, Homo sapiens
  CDR3 for alpha chain variable domain of TCR clone 85493 (TRAV20, TRAJ43)
CAVQAGKSSNNYMRF

SEQ ID NO: 170986 - protein, 16 aa, Homo sapiens
  CDR3 for beta chain variable domain of TCR clone 85493 (TRBV19, TRBJ2-1)
CASSKAGPSSYNEQFF

SEQ ID NO: 170987 - protein, 13 aa, Homo sapiens
  CDR3 for alpha chain variable domain of TCR clone 85494 (TRAV1-2, TRAJ11)
CAVRDSGYSTLTF

SEQ ID NO: 170988 - protein, 13 aa, Homo sapiens
  CDR3 for beta chain variable domain of TCR clone 85494 (TRBV10-3, TRBJ2-7)
CASKLAVNYEQYF

SEQ ID NO: 170989 - protein, 14 aa, Homo sapiens
  CDR3 for alpha chain variable domain of TCR clone 85495 (TRAV13-2, TRAJ6)
CAERGSGGSYIPTF

SEQ ID NO: 170990 - protein, 15 aa, Homo sapiens
  CDR3 for beta chain variable domain of TCR clone 85495 (TRBV20-1, TRBJ2-7)
CSARKGLAESYEQYF

SEQ ID NO: 170991 - protein, 14 aa, Homo sapiens
  CDR3 for alpha chain variable domain of TCR clone 85496 (TRAV16, TRAJ26)
CALSGCNYGPNFVF

SEQ ID NO: 170992 - protein, 15 aa, Homo sapiens
  CDR3 for beta chain variable domain of TCR clone 85496 (TRBV6-3, TRBJ2-7)
CASSSPGTVFYEQYF

SEQ ID NO: 170993 - protein, 13 aa, Homo sapiens
  CDR3 for alpha chain variable domain of TCR clone 85497 (TRAV20, TRAJ54)
CAVQAGGAQKLVF

SEQ ID NO: 170994 - protein, 14 aa, Homo sapiens
  CDR3 for beta chain variable domain of TCR clone 85497 (TRBV20-1, TRBJ2-7)
CSAKTGTGGYEQYS

SEQ ID NO: 170995 - protein, 11 aa, Homo sapiens
  CDR3 for alpha chain variable domain of TCR clone 85498 (TRAV3, TRAJ21)
CAVGNFDKFYF

SEQ ID NO: 170996 - protein, 17 aa, Homo sapiens
  CDR3 for beta chain variable domain of TCR clone 85498 (TRBV24-1, TRBJ2-1)
CATSDVSTSGTYNEQFF

SEQ ID NO: 170997 - protein, 14 aa, Homo sapiens
  CDR3 for alpha chain variable domain of TCR clone 85499 (TRAV26-1, TRAJ38)
CIADNAGNNRKLIW

SEQ ID NO: 170998 - protein, 15 aa, Homo sapiens
  CDR3 for beta chain variable domain of TCR clone 85499 (TRBV7-6, TRBJ1-4)
CASSLGAGAGEKLLF

SEQ ID NO: 170999 - protein, 14 aa, Homo sapiens
  CDR3 for alpha chain variable domain of TCR clone 85500 (TRAV1-2, TRAJ33)
CAVRAPDSNYQLIW

SEQ ID NO: 171000 - protein, 14 aa, Homo sapiens
  CDR3 for beta chain variable domain of TCR clone 85500 (TRBV11-3, TRBJ1-6)
CASSLSGGDSPFHF

SEQ ID NO: 171001 - protein, 12 aa, Homo sapiens
  CDR3 for alpha chain variable domain of TCR clone 85501 (TRAV12-3, TRAJ34)
CAMGYNNDKLIF

SEQ ID NO: 171002 - protein, 15 aa, Homo sapiens
  CDR3 for beta chain variable domain of TCR clone 85501 (TRBV28, TRBJ2-1)
CASSIIAGGRSEQFF

SEQ ID NO: 171003 - protein, 10 aa, Homo sapiens
  CDR3 for alpha chain variable domain of TCR clone 85502 (TRAV20, TRAJ22)
CAAPARQLTF

SEQ ID NO: 171004 - protein, 14 aa, Homo sapiens
  CDR3 for beta chain variable domain of TCR clone 85502 (TRBV19, TRBJ2-1)
CASSMGSGATEQFL

SEQ ID NO: 171005 - protein, 16 aa, Homo sapiens
  CDR3 for alpha chain variable domain of TCR clone 85503 (TRAV3, TRAJ37)
YAVRGKGSGNTGKLIF

SEQ ID NO: 171006 - protein, 16 aa, Homo sapiens
  CDR3 for beta chain variable domain of TCR clone 85503 (TRBV12-5, TRBJ2-5)
CASGPRTSGNQETQYF

SEQ ID NO: 171007 - protein, 15 aa, Homo sapiens
  CDR3 for alpha chain variable domain of TCR clone 85504 (TRAV12-1, TRAJ44)
CVVFVNTGTASKLTF

SEQ ID NO: 171008 - protein, 16 aa, Homo sapiens
  CDR3 for beta chain variable domain of TCR clone 85504 (TRBV20-1, TRBJ2-5)
CSPRGTSGGYMETQYF

SEQ ID NO: 171009 - protein, 14 aa, Homo sapiens
  CDR3 for alpha chain variable domain of TCR clone 85505 (TRAV12-2, TRAJ15)
CAPHTGQAGTALIF

SEQ ID NO: 171010 - protein, 17 aa, Homo sapiens
  CDR3 for beta chain variable domain of TCR clone 85505 (TRBV5-5, TRBJ1-2)
CASSLWSLDGQSEGYTF

SEQ ID NO: 171011 - protein, 12 aa, Homo sapiens
  CDR3 for alpha chain variable domain of TCR clone 85506 (TRAV25, TRAJ26)
CAGDSYGQNFVF

SEQ ID NO: 171012 - protein, 14 aa, Homo sapiens
  CDR3 for beta chain variable domain of TCR clone 85506 (TRBV5-1, TRBJ2-7)
CASSRGESLYEQYF

SEQ ID NO: 171013 - protein, 16 aa, Homo sapiens
  CDR3 for alpha chain variable domain of TCR clone 85507 (TRAV30, TRAJ57)
CGTGWAPQGGSEKLVF

SEQ ID NO: 171014 - protein, 14 aa, Homo sapiens
  CDR3 for beta chain variable domain of TCR clone 85507 (TRBV18, TRBJ1-1)
CASSPGFQGVEDFF

SEQ ID NO: 171015 - protein, 14 aa, Homo sapiens
  CDR3 for alpha chain variable domain of TCR clone 85508 (TRAV21, TRAJ35)
CAVMPIGFGNVLPC

SEQ ID NO: 171016 - protein, 12 aa, Homo sapiens
  CDR3 for beta chain variable domain of TCR clone 85508 (TRBV7-9, TRBJ2-7)
CASSIKREEQYF

SEQ ID NO: 171017 - protein, 13 aa, Homo sapiens
  CDR3 for alpha chain variable domain of TCR clone 85509 (TRAV12-2, TRAJ18)
CAVRGSTLGRLYF

SEQ ID NO: 171018 - protein, 13 aa, Homo sapiens
  CDR3 for beta chain variable domain of TCR clone 85509 (TRBV10-3, TRBJ2-7)
CASKLAVNYEQYF

SEQ ID NO: 171019 - protein, 15 aa, Homo sapiens
  CDR3 for alpha chain variable domain of TCR clone 85510 (TRAV13-2, TRAJ10)
CAENRDTGGGNKLTF

SEQ ID NO: 171020 - protein, 14 aa, Homo sapiens
  CDR3 for beta chain variable domain of TCR clone 85510 (TRBV19, TRBJ2-1)
CASPTFVLSGEQFF

SEQ ID NO: 171021 - protein, 16 aa, Homo sapiens
  CDR3 for alpha chain variable domain of TCR clone 85511 (TRAV3, TRAJ10)
CAVRDMRAGGGNKLTF

SEQ ID NO: 171022 - protein, 13 aa, Homo sapiens
  CDR3 for beta chain variable domain of TCR clone 85511 (TRBV7-9, TRBJ1-2)
CASSLKQNYGYSF

SEQ ID NO: 171023 - protein, 16 aa, Homo sapiens
  CDR3 for alpha chain variable domain of TCR clone 85512 (TRAV30, TRAJ24)
CGTAIVDADSWGKFQF

SEQ ID NO: 171024 - protein, 14 aa, Homo sapiens
  CDR3 for beta chain variable domain of TCR clone 85512 (TRBV7-2, TRBJ1-2)
CASSQTGSTYGYTF

SEQ ID NO: 171025 - protein, 13 aa, Homo sapiens
  CDR3 for alpha chain variable domain of TCR clone 85513 (TRAV29/DV5, TRAJ31)
CAASRNNNARLMF

SEQ ID NO: 171026 - protein, 13 aa, Homo sapiens
  CDR3 for beta chain variable domain of TCR clone 85513 (TRBV11-2, TRBJ2-5)
CASSSTGEETQYF

SEQ ID NO: 171027 - protein, 13 aa, Homo sapiens
  CDR3 for alpha chain variable domain of TCR clone 85514 (TRAV13-1, TRAJ21)
CAASIYNFNKFYF

SEQ ID NO: 171028 - protein, 16 aa, Homo sapiens
  CDR3 for beta chain variable domain of TCR clone 85514 (TRBV29-1, TRBJ2-5)
CSVEGLAGDYQETQYF

SEQ ID NO: 171029 - protein, 14 aa, Homo sapiens
  CDR3 for alpha chain variable domain of TCR clone 85515 (TRAV8-4, TRAJ34)
CAVSDPGATDKLIF

SEQ ID NO: 171030 - protein, 14 aa, Homo sapiens
  CDR3 for beta chain variable domain of TCR clone 85515 (TRBV20-1, TRBJ2-5)
CSARDGRAGETQYF

SEQ ID NO: 171031 - protein, 14 aa, Homo sapiens
  CDR3 for alpha chain variable domain of TCR clone 85516 (TRAV20, TRAJ33)
CAVLTRDSNYQLIW

SEQ ID NO: 171032 - protein, 13 aa, Homo sapiens
  CDR3 for beta chain variable domain of TCR clone 85516 (TRBV10-2, TRBJ1-1)
CASNDQMNTEAFF

SEQ ID NO: 171033 - protein, 14 aa, Homo sapiens
  CDR3 for alpha chain variable domain of TCR clone 85517 (TRAV8-3, TRAJ9)
WAVVYNTGGFKTIF

SEQ ID NO: 171034 - protein, 16 aa, Homo sapiens
  CDR3 for beta chain variable domain of TCR clone 85517 (TRBV7-3, TRBJ2-2)
CASSLKRGTLSGELFF

SEQ ID NO: 171035 - protein, 15 aa, Homo sapiens
  CDR3 for alpha chain variable domain of TCR clone 85518 (TRAV25, TRAJ52)
CAGTSGGTIYGKLTF

SEQ ID NO: 171036 - protein, 16 aa, Homo sapiens
  CDR3 for beta chain variable domain of TCR clone 85518 (TRBV15, TRBJ1-2)
CATSRGPRTGGGGYTF

SEQ ID NO: 171037 - protein, 14 aa, Homo sapiens
  CDR3 for alpha chain variable domain of TCR clone 85519 (TRAV1-2, TRAJ8)
CAVREDTGFQKLVF

SEQ ID NO: 171038 - protein, 17 aa, Homo sapiens
  CDR3 for beta chain variable domain of TCR clone 85519 (TRBV24-1, TRBJ2-1)
CATSDVSTSGTYNEQFF

SEQ ID NO: 171039 - protein, 17 aa, Homo sapiens
  CDR3 for alpha chain variable domain of TCR clone 85520 (TRAV3, TRAJ6)
CAVRDGPRAGGSYITTL

SEQ ID NO: 171040 - protein, 14 aa, Homo sapiens
  CDR3 for beta chain variable domain of TCR clone 85520 (TRBV7-2, TRBJ2-7)
CASSPKTSFYEQYF

SEQ ID NO: 171041 - protein, 16 aa, Homo sapiens
  CDR3 for alpha chain variable domain of TCR clone 85521 (TRAV8-3, TRAJ10)
CAVGPILTGGGNKHTF

SEQ ID NO: 171042 - protein, 16 aa, Homo sapiens
  CDR3 for beta chain variable domain of TCR clone 85521 (TRBV7-2, TRBJ2-5)
CASSSKWLSGQETQYF

SEQ ID NO: 171043 - protein, 14 aa, Homo sapiens
  CDR3 for alpha chain variable domain of TCR clone 85522 (TRAV23/DV6, TRAJ40)
CAASLTSGTYKYIF

SEQ ID NO: 171044 - protein, 13 aa, Homo sapiens
  CDR3 for beta chain variable domain of TCR clone 85522 (TRBV7-9, TRBJ2-3)
CASSPGSTDTQYF

SEQ ID NO: 171045 - protein, 13 aa, Homo sapiens
  CDR3 for alpha chain variable domain of TCR clone 85523 (TRAV12-3, TRAJ13)
CAMSSGGYQKVTF

SEQ ID NO: 171046 - protein, 16 aa, Homo sapiens
  CDR3 for beta chain variable domain of TCR clone 85523 (TRBV4-1, TRBJ2-7)
CASRRGDILNSYEQYF

SEQ ID NO: 171047 - protein, 14 aa, Homo sapiens
  CDR3 for alpha chain variable domain of TCR clone 85524 (TRAV2, TRAJ9)
CAVEDRSGGFKSIF

SEQ ID NO: 171048 - protein, 12 aa, Homo sapiens
  CDR3 for beta chain variable domain of TCR clone 85524 (TRBV11-2, TRBJ2-1)
CASSPGNNEQFF

SEQ ID NO: 171049 - protein, 14 aa, Homo sapiens
  CDR3 for alpha chain variable domain of TCR clone 85525 (TRAV3, TRAJ28)
CAVRRGAGSYQLTF

SEQ ID NO: 171050 - protein, 16 aa, Homo sapiens
  CDR3 for beta chain variable domain of TCR clone 85525 (TRBV4-1, TRBJ2-7)
CASSQEWTSGPLEQDF

SEQ ID NO: 171051 - protein, 13 aa, Homo sapiens
  CDR3 for alpha chain variable domain of TCR clone 85526 (TRAV1-1, TRAJ9)
CAAKNTGGFKTIF

SEQ ID NO: 171052 - protein, 15 aa, Homo sapiens
  CDR3 for beta chain variable domain of TCR clone 85526 (TRBV12-4, TRBJ2-5)
CASSPPTGLQETQYF

SEQ ID NO: 171053 - protein, 17 aa, Homo sapiens
  CDR3 for alpha chain variable domain of TCR clone 85527 (TRAV4, TRAJ42)
CLVGVLNYGGSQGNLMF

SEQ ID NO: 171054 - protein, 12 aa, Homo sapiens
  CDR3 for beta chain variable domain of TCR clone 85527 (TRBV20-1, TRBJ2-1)
CSAQYTYNEQFF

SEQ ID NO: 171055 - protein, 14 aa, Homo sapiens
  CDR3 for alpha chain variable domain of TCR clone 85528 (TRAV8-2, TRAJ5)
CVVDMDTGRRALTF

SEQ ID NO: 171056 - protein, 15 aa, Homo sapiens
  CDR3 for beta chain variable domain of TCR clone 85528 (TRBV5-6, TRBJ2-1)
CASSYISGRGNEQFF

SEQ ID NO: 171057 - protein, 11 aa, Homo sapiens
  CDR3 for alpha chain variable domain of TCR clone 85529 (TRAV2, TRAJ13)
CASGGYQKVTF

SEQ ID NO: 171058 - protein, 14 aa, Homo sapiens
  CDR3 for beta chain variable domain of TCR clone 85529 (TRBV7-6, TRBJ2-3)
CASSVAGGTDTQYF

SEQ ID NO: 171059 - protein, 13 aa, Homo sapiens
  CDR3 for alpha chain variable domain of TCR clone 85530 (TRAV8-3, TRAJ44)
CAVVPGPASKLTF

SEQ ID NO: 171060 - protein, 14 aa, Homo sapiens
  CDR3 for beta chain variable domain of TCR clone 85530 (TRBV11-2, TRBJ2-3)
CASSRLARTDTQHF

SEQ ID NO: 171061 - protein, 11 aa, Homo sapiens
  CDR3 for alpha chain variable domain of TCR clone 85531 (TRAV12-2, TRAJ49)
CALQGGNQFYF

SEQ ID NO: 171062 - protein, 13 aa, Homo sapiens
  CDR3 for beta chain variable domain of TCR clone 85531 (TRBV4-1, TRBJ1-1)
CASSQLGTEEAFF

SEQ ID NO: 171063 - protein, 12 aa, Homo sapiens
  CDR3 for alpha chain variable domain of TCR clone 85532 (TRAV13-2, TRAJ23)
FAERHRGGKLIF

SEQ ID NO: 171064 - protein, 15 aa, Homo sapiens
  CDR3 for beta chain variable domain of TCR clone 85532 (TRBV6-3, TRBJ2-7)
CASSSPGTVFYEQYF

SEQ ID NO: 171065 - protein, 14 aa, Homo sapiens
  CDR3 for alpha chain variable domain of TCR clone 85533 (TRAV1-2, TRAJ16)
CAVNRFSDGQKLLF

SEQ ID NO: 171066 - protein, 14 aa, Homo sapiens
  CDR3 for beta chain variable domain of TCR clone 85533 (TRBV11-2, TRBJ2-7)
CASSLELEGYEQYF

SEQ ID NO: 171067 - protein, 11 aa, Homo sapiens
  CDR3 for alpha chain variable domain of TCR clone 85534 (TRAV13-1, TRAJ20)
CAASNDYKLSF

SEQ ID NO: 171068 - protein, 15 aa, Homo sapiens
  CDR3 for beta chain variable domain of TCR clone 85534 (TRBV6-3, TRBJ2-7)
CARSSPGTVFYEQYF

SEQ ID NO: 171069 - protein, 13 aa, Homo sapiens
  CDR3 for alpha chain variable domain of TCR clone 85535 (TRAV29/DV5, TRAJ31)
CAASRNNNARLMF

SEQ ID NO: 171070 - protein, 13 aa, Homo sapiens
  CDR3 for beta chain variable domain of TCR clone 85535 (TRBV6-3, TRBJ2-1)
CASSYDNYNEQFF

SEQ ID NO: 171071 - protein, 14 aa, Homo sapiens
  CDR3 for alpha chain variable domain of TCR clone 85536 (TRAV12-2, TRAJ13)
CAVKKTGGYQKVTF

SEQ ID NO: 171072 - protein, 13 aa, Homo sapiens
  CDR3 for beta chain variable domain of TCR clone 85536 (TRBV10-3, TRBJ2-7)
CASKRAVNYEQYF

SEQ ID NO: 171073 - protein, 11 aa, Homo sapiens
  CDR3 for alpha chain variable domain of TCR clone 85537 (TRAV17, TRAJ9)
CATTGGFKTIF

SEQ ID NO: 171074 - protein, 14 aa, Homo sapiens
  CDR3 for beta chain variable domain of TCR clone 85537 (TRBV12-5, TRBJ2-5)
RASGSRTHQETQYF

SEQ ID NO: 171075 - protein, 14 aa, Homo sapiens
  CDR3 for alpha chain variable domain of TCR clone 85538 (TRAV12-2, TRAJ13)
CAVKKTGGYLKVIF

SEQ ID NO: 171076 - protein, 18 aa, Homo sapiens
  CDR3 for beta chain variable domain of TCR clone 85538 (TRBV7-8, TRBJ2-1)
CASSPAEGLAGGLNEQFF

SEQ ID NO: 171077 - protein, 14 aa, Homo sapiens
  CDR3 for alpha chain variable domain of TCR clone 85539 (TRAV8-2, TRAJ11)
CVVSEKSGYSTLTF

SEQ ID NO: 171078 - protein, 16 aa, Homo sapiens
  CDR3 for beta chain variable domain of TCR clone 85539 (TRBV28, TRBJ2-1)
CASSSPEYTRDNEQFF

SEQ ID NO: 171079 - protein, 15 aa, Homo sapiens
  CDR3 for alpha chain variable domain of TCR clone 85540 (TRAV17, TRAJ35)
CATAFVIGFGNVLHC

SEQ ID NO: 171080 - protein, 16 aa, Homo sapiens
  CDR3 for beta chain variable domain of TCR clone 85540 (TRBV9, TRBJ2-5)
CASSPRTGYDEETQYF

SEQ ID NO: 171081 - protein, 14 aa, Homo sapiens
  CDR3 for alpha chain variable domain of TCR clone 85541 (TRAV12-1, TRAJ34)
CVVNLDYNTDKLIF

SEQ ID NO: 171082 - protein, 13 aa, Homo sapiens
  CDR3 for beta chain variable domain of TCR clone 85541 (TRBV7-3, TRBJ1-1)
CASSQDWGAEAFF

SEQ ID NO: 171083 - protein, 14 aa, Homo sapiens
  CDR3 for alpha chain variable domain of TCR clone 85542 (TRAV16, TRAJ15)
CALSGPKAGTALIF

SEQ ID NO: 171084 - protein, 12 aa, Homo sapiens
  CDR3 for beta chain variable domain of TCR clone 85542 (TRBV18, TRBJ2-5)
CASSPSKETQYF

SEQ ID NO: 171085 - protein, 15 aa, Homo sapiens
  CDR3 for alpha chain variable domain of TCR clone 85543 (TRAV3, TRAJ22)
CAVRDRGGSARQLTF

SEQ ID NO: 171086 - protein, 18 aa, Homo sapiens
  CDR3 for beta chain variable domain of TCR clone 85543 (TRBV28, TRBJ2-1)
CASSPTSGRANSYNEQFF

SEQ ID NO: 171087 - protein, 16 aa, Homo sapiens
  CDR3 for alpha chain variable domain of TCR clone 85544 (TRAV26-1, TRAJ36)
CTVRAIGRSGANNLFF

SEQ ID NO: 171088 - protein, 14 aa, Homo sapiens
  CDR3 for beta chain variable domain of TCR clone 85544 (TRBV25-1, TRBJ2-1)
CASSKTGGYNEQFF

SEQ ID NO: 171089 - protein, 14 aa, Homo sapiens
  CDR3 for alpha chain variable domain of TCR clone 85545 (TRAV6, TRAJ6)
CALPTSGGSYIPTF

SEQ ID NO: 171090 - protein, 17 aa, Homo sapiens
  CDR3 for beta chain variable domain of TCR clone 85545 (TRBV5-1, TRBJ2-5)
CASSPVALGQSQETQYF

SEQ ID NO: 171091 - protein, 12 aa, Homo sapiens
  CDR3 for alpha chain variable domain of TCR clone 85546 (TRAV12-1, TRAJ40)
CVVYSGTYKYIF

SEQ ID NO: 171092 - protein, 17 aa, Homo sapiens
  CDR3 for beta chain variable domain of TCR clone 85546 (TRBV11-3, TRBJ1-5)
CASSPLTGLRGNQPQHV

SEQ ID NO: 171093 - protein, 13 aa, Homo sapiens
  CDR3 for alpha chain variable domain of TCR clone 85547 (TRAV27, TRAJ57)
CRSAQGGSEKLVF

SEQ ID NO: 171094 - protein, 11 aa, Homo sapiens
  CDR3 for beta chain variable domain of TCR clone 85547 (TRBV11-2, TRBJ1-1)
CASSINTEACF

SEQ ID NO: 171095 - protein, 23 aa, Homo sapiens
  CDR3 for alpha chain variable domain of TCR clone 85548 (TRAV12-2, TRAJ36)
SLLIRDSQPSDSATLERANNLFF

SEQ ID NO: 171096 - protein, 15 aa, Homo sapiens
  CDR3 for beta chain variable domain of TCR clone 85548 (TRBV20-1, TRBJ2-7)
CSARDRVSGMDEQYF

SEQ ID NO: 171097 - protein, 11 aa, Homo sapiens
  CDR3 for alpha chain variable domain of TCR clone 85549 (TRAV3, TRAJ21)
CAVGNFNKFYF

SEQ ID NO: 171098 - protein, 12 aa, Homo sapiens
  CDR3 for beta chain variable domain of TCR clone 85549 (TRBV19, TRBJ2-3)
CATTSSTDTQYF

SEQ ID NO: 171099 - protein, 16 aa, Homo sapiens
  CDR3 for alpha chain variable domain of TCR clone 85550 (TRAV36/DV7, TRAJ28)
CAGTLYSGAGSYQLTF

SEQ ID NO: 171100 - protein, 13 aa, Homo sapiens
  CDR3 for beta chain variable domain of TCR clone 85550 (TRBV7-9, TRBJ1-2)
CASSLKQNYGYTF

SEQ ID NO: 171101 - protein, 11 aa, Homo sapiens
  CDR3 for alpha chain variable domain of TCR clone 85551 (TRAV2, TRAJ13)
CASGGYQKVTF

SEQ ID NO: 171102 - protein, 18 aa, Homo sapiens
  CDR3 for beta chain variable domain of TCR clone 85551 (TRBV25-1, TRBJ1-2)
CASSGLQNGQGLIFGYTF

SEQ ID NO: 171103 - protein, 11 aa, Homo sapiens
  CDR3 for alpha chain variable domain of TCR clone 85552 (TRAV3, TRAJ21)
CAVGNFNKFYF

SEQ ID NO: 171104 - protein, 14 aa, Homo sapiens
  CDR3 for beta chain variable domain of TCR clone 85552 (TRBV18, TRBJ2-5)
CASSPRASSETQYF

SEQ ID NO: 171105 - protein, 12 aa, Homo sapiens
  CDR3 for alpha chain variable domain of TCR clone 85553 (TRAV8-3, TRAJ20)
CAVGANDYKLSF

SEQ ID NO: 171106 - protein, 16 aa, Homo sapiens
  CDR3 for beta chain variable domain of TCR clone 85553 (TRBV15, TRBJ2-3)
CATRLSGGRAPDTQYF

SEQ ID NO: 171107 - protein, 16 aa, Homo sapiens
  CDR3 for alpha chain variable domain of TCR clone 85554 (TRAV3, TRAJ37)
YAVRPHGSGNTGKLIF

SEQ ID NO: 171108 - protein, 16 aa, Homo sapiens
  CDR3 for beta chain variable domain of TCR clone 85554 (TRBV9, TRBJ1-2)
CASSVEEKVSPYGYTF

SEQ ID NO: 171109 - protein, 16 aa, Homo sapiens
  CDR3 for alpha chain variable domain of TCR clone 85555 (TRAV12-3, TRAJ50)
CAMREPMKTSYDKVIF

SEQ ID NO: 171110 - protein, 13 aa, Homo sapiens
  CDR3 for beta chain variable domain of TCR clone 85555 (TRBV4-1, TRBJ2-3)
CASSLDFTDTQYF

SEQ ID NO: 171111 - protein, 16 aa, Homo sapiens
  CDR3 for alpha chain variable domain of TCR clone 85556 (TRAV30, TRAJ24)
CGTEIVDADSWGKFQF

SEQ ID NO: 171112 - protein, 18 aa, Homo sapiens
  CDR3 for beta chain variable domain of TCR clone 85556 (TRBV11-2, TRBJ2-6)
CASSLNPCLGTGANVLTF

SEQ ID NO: 171113 - protein, 13 aa, Homo sapiens
  CDR3 for alpha chain variable domain of TCR clone 85557 (TRAV3, TRAJ36)
CAVRDTGANNLFF

SEQ ID NO: 171114 - protein, 15 aa, Homo sapiens
  CDR3 for beta chain variable domain of TCR clone 85557 (TRBV24-1, TRBJ2-1)
CASSGSGGFYNEQFF

SEQ ID NO: 171115 - protein, 13 aa, Homo sapiens
  CDR3 for alpha chain variable domain of TCR clone 85558 (TRAV12-2, TRAJ18)
YAVRGSTLGRLYF

SEQ ID NO: 171116 - protein, 18 aa, Homo sapiens
  CDR3 for beta chain variable domain of TCR clone 85558 (TRBV27, TRBJ2-3)
CASSLSGTSGRGTDTQYF

SEQ ID NO: 171117 - protein, 14 aa, Homo sapiens
  CDR3 for alpha chain variable domain of TCR clone 85559 (TRAV29/DV5, TRAJ36)
CAARRKTGANNLFF

SEQ ID NO: 171118 - protein, 13 aa, Homo sapiens
  CDR3 for beta chain variable domain of TCR clone 85559 (TRBV9, TRBJ2-7)
CASSASDSYEQYF

SEQ ID NO: 171119 - protein, 14 aa, Homo sapiens
  CDR3 for alpha chain variable domain of TCR clone 85560 (TRAV35, TRAJ40)
CAGSTTSVTYKYIF

SEQ ID NO: 171120 - protein, 13 aa, Homo sapiens
  CDR3 for beta chain variable domain of TCR clone 85560 (TRBV20-1, TRBJ1-6)
CSAPLGVGSPLHF

SEQ ID NO: 171121 - protein, 12 aa, Homo sapiens
  CDR3 for alpha chain variable domain of TCR clone 85561 (TRAV13-1, TRAJ20)
CAAPMGFTSSAF

SEQ ID NO: 171122 - protein, 14 aa, Homo sapiens
  CDR3 for beta chain variable domain of TCR clone 85561 (TRBV28, TRBJ2-5)
CASTGAGGVETQYF

SEQ ID NO: 171123 - protein, 14 aa, Homo sapiens
  CDR3 for alpha chain variable domain of TCR clone 85562 (TRAV2, TRAJ9)
CAVEDRSGGFKTIF

SEQ ID NO: 171124 - protein, 17 aa, Homo sapiens
  CDR3 for beta chain variable domain of TCR clone 85562 (TRBV4-1, TRBJ2-1)
CASSHRDSGSSYNEQFF

SEQ ID NO: 171125 - protein, 22 aa, Homo sapiens
  CDR3 for alpha chain variable domain of TCR clone 85563 (TRAV27, TRAJ38)
CAGRFNAGNNHIQNPDPAVYQL

SEQ ID NO: 171126 - protein, 15 aa, Homo sapiens
  CDR3 for beta chain variable domain of TCR clone 85563 (TRBV20-1, TRBJ2-7)
CSARDRVSGMDEQYF

SEQ ID NO: 171127 - protein, 10 aa, Homo sapiens
  CDR3 for alpha chain variable domain of TCR clone 85564 (TRAV8-2, TRAJ29)
CTGGNTPLVF

SEQ ID NO: 171128 - protein, 14 aa, Homo sapiens
  CDR3 for beta chain variable domain of TCR clone 85564 (TRBV7-9, TRBJ2-3)
CASSLEDGTDTQYF

SEQ ID NO: 171129 - protein, 15 aa, Homo sapiens
  CDR3 for alpha chain variable domain of TCR clone 85565 (TRAV3, TRAJ22)
CAARDRGGSARQLTF

SEQ ID NO: 171130 - protein, 12 aa, Homo sapiens
  CDR3 for beta chain variable domain of TCR clone 85565 (TRBV12-4, TRBJ1-2)
CASSFIWLHLRF

SEQ ID NO: 171131 - protein, 15 aa, Homo sapiens
  CDR3 for alpha chain variable domain of TCR clone 85566 (TRAV3, TRAJ5)
CAVRHLDTGRRALTF

SEQ ID NO: 171132 - protein, 13 aa, Homo sapiens
  CDR3 for beta chain variable domain of TCR clone 85566 (TRBV12-4, TRBJ2-7)
CASSPTETYEQYF

SEQ ID NO: 171133 - protein, 13 aa, Homo sapiens
  CDR3 for alpha chain variable domain of TCR clone 85567 (TRAV36/DV7, TRAJ38)
CVANAGNNRKLIW

SEQ ID NO: 171134 - protein, 14 aa, Homo sapiens
  CDR3 for beta chain variable domain of TCR clone 85567 (TRBV7-2, TRBJ2-7)
CASSLRWEVNEQYF

SEQ ID NO: 171135 - protein, 11 aa, Homo sapiens
  CDR3 for alpha chain variable domain of TCR clone 85568 (TRAV12-1, TRAJ21)
CVVNNFNKFYF

SEQ ID NO: 171136 - protein, 16 aa, Homo sapiens
  CDR3 for beta chain variable domain of TCR clone 85568 (TRBV12-5, TRBJ2-5)
CASGPRTSGNQETQYF

SEQ ID NO: 171137 - protein, 15 aa, Homo sapiens
  CDR3 for alpha chain variable domain of TCR clone 85569 (TRAV12-1, TRAJ6)
CVVNSPSGGSYIPTF

SEQ ID NO: 171138 - protein, 15 aa, Homo sapiens
  CDR3 for beta chain variable domain of TCR clone 85569 (TRBV18, TRBJ1-1)
CVSSGRTGEVTEAFF

SEQ ID NO: 171139 - protein, 15 aa, Homo sapiens
  CDR3 for alpha chain variable domain of TCR clone 85570 (TRAV3, TRAJ30)
CAVRGEYGRDDKIIF

SEQ ID NO: 171140 - protein, 16 aa, Homo sapiens
  CDR3 for beta chain variable domain of TCR clone 85570 (TRBV5-1, TRBJ2-5)
CASSLANHRGRETQYF

SEQ ID NO: 171141 - protein, 11 aa, Homo sapiens
  CDR3 for alpha chain variable domain of TCR clone 85571 (TRAV1-2, TRAJ20)
CAVANDYKLSF

SEQ ID NO: 171142 - protein, 13 aa, Homo sapiens
  CDR3 for beta chain variable domain of TCR clone 85571 (TRBV27, TRBJ2-7)
CASSVVSSYEQYF

SEQ ID NO: 171143 - protein, 13 aa, Homo sapiens
  CDR3 for alpha chain variable domain of TCR clone 85572 (TRAV2, TRAJ24)
CAVPTDSWGKLQF

SEQ ID NO: 171144 - protein, 14 aa, Homo sapiens
  CDR3 for beta chain variable domain of TCR clone 85572 (TRBV19, TRBJ2-1)
CASPTFVLSGEQFF

SEQ ID NO: 171145 - protein, 14 aa, Homo sapiens
  CDR3 for alpha chain variable domain of TCR clone 85573 (TRAV16, TRAJ39)
CALSKNNAGNMLTF

SEQ ID NO: 171146 - protein, 16 aa, Homo sapiens
  CDR3 for beta chain variable domain of TCR clone 85573 (TRBV6-6, TRBJ2-1)
CASSYSFAGSYNEQFF

SEQ ID NO: 171147 - protein, 15 aa, Homo sapiens
  CDR3 for alpha chain variable domain of TCR clone 85574 (TRAV21, TRAJ24)
CAARSSTDSWGKLQF

SEQ ID NO: 171148 - protein, 14 aa, Homo sapiens
  CDR3 for beta chain variable domain of TCR clone 85574 (TRBV4-2, TRBJ2-1)
CASGLDRAYNEQFF

SEQ ID NO: 171149 - protein, 18 aa, Homo sapiens
  CDR3 for alpha chain variable domain of TCR clone 85575 (TRAV12-3, TRAJ52)
CAMSRTNAGGTSYGKLTF

SEQ ID NO: 171150 - protein, 14 aa, Homo sapiens
  CDR3 for beta chain variable domain of TCR clone 85575 (TRBV5-7, TRBJ1-2)
CASSLVRGDYGYTF

SEQ ID NO: 171151 - protein, 16 aa, Homo sapiens
  CDR3 for alpha chain variable domain of TCR clone 85576 (TRAV12-3, TRAJ45)
CAIGWGSGGGADGLTF

SEQ ID NO: 171152 - protein, 15 aa, Homo sapiens
  CDR3 for beta chain variable domain of TCR clone 85576 (TRBV3-1, TRBJ1-2)
CASSHPGTPGYGYTF

SEQ ID NO: 171153 - protein, 18 aa, Homo sapiens
  CDR3 for alpha chain variable domain of TCR clone 85577 (TRAV13-1, TRAJ52)
CAAKNPNAGGTSYGKLTF

SEQ ID NO: 171154 - protein, 12 aa, Homo sapiens
  CDR3 for beta chain variable domain of TCR clone 85577 (TRBV27, TRBJ2-7)
CASSGGFYEQYF

SEQ ID NO: 171155 - protein, 13 aa, Homo sapiens
  CDR3 for alpha chain variable domain of TCR clone 85578 (TRAV13-1, TRAJ39)
CSKYSNAGNMLTF

SEQ ID NO: 171156 - protein, 16 aa, Homo sapiens
  CDR3 for beta chain variable domain of TCR clone 85578 (TRBV11-2, TRBJ2-5)
CASSGQGYSPQETQYF

SEQ ID NO: 171157 - protein, 16 aa, Homo sapiens
  CDR3 for alpha chain variable domain of TCR clone 85579 (TRAV23/DV6, TRAJ34)
CAASGALSYNTDKLIF

SEQ ID NO: 171158 - protein, 14 aa, Homo sapiens
  CDR3 for beta chain variable domain of TCR clone 85579 (TRBV4-1, TRBJ2-2)
CASSQAVNTGELFF

SEQ ID NO: 171159 - protein, 15 aa, Homo sapiens
  CDR3 for alpha chain variable domain of TCR clone 85580 (TRAV9-2, TRAJ8)
CALRGLNTGFQKLVF

SEQ ID NO: 171160 - protein, 14 aa, Homo sapiens
  CDR3 for beta chain variable domain of TCR clone 85580 (TRBV12-4, TRBJ1-1)
CASSLGTGGTEAFF

SEQ ID NO: 171161 - protein, 13 aa, Homo sapiens
  CDR3 for alpha chain variable domain of TCR clone 85581 (TRAV26-1, TRAJ54)
CIVRVKGAQKLVF

SEQ ID NO: 171162 - protein, 15 aa, Homo sapiens
  CDR3 for beta chain variable domain of TCR clone 85581 (TRBV20-1, TRBJ2-1)
CSAHPGGGPYNEQFF

SEQ ID NO: 171163 - protein, 14 aa, Homo sapiens
  CDR3 for alpha chain variable domain of TCR clone 85582 (TRAV12-1, TRAJ23)
CVVIVYNQGGKLIF

SEQ ID NO: 171164 - protein, 12 aa, Homo sapiens
  CDR3 for beta chain variable domain of TCR clone 85582 (TRBV29-1, TRBJ2-2)
CSVDKYTGELFF

SEQ ID NO: 171165 - protein, 13 aa, Homo sapiens
  CDR3 for alpha chain variable domain of TCR clone 85583 (TRAV21, TRAJ27)
CAARPGNAGKSTF

SEQ ID NO: 171166 - protein, 17 aa, Homo sapiens
  CDR3 for beta chain variable domain of TCR clone 85583 (TRBV20-1, TRBJ2-1)
CSASSSGLAGSYNEQFF

SEQ ID NO: 171167 - protein, 12 aa, Homo sapiens
  CDR3 for alpha chain variable domain of TCR clone 85584 (TRAV17, TRAJ39)
CATGAAGNMLTF

SEQ ID NO: 171168 - protein, 11 aa, Homo sapiens
  CDR3 for beta chain variable domain of TCR clone 85584 (TRBV7-2, TRBJ2-2)
CASSIRGELFF

SEQ ID NO: 171169 - protein, 12 aa, Homo sapiens
  CDR3 for alpha chain variable domain of TCR clone 85585 (TRAV16, TRAJ10)
CSRTGGGNKLTF

SEQ ID NO: 171170 - protein, 12 aa, Homo sapiens
  CDR3 for beta chain variable domain of TCR clone 85585 (TRBV11-3, TRBJ1-1)
CASSHQQGEAFF

SEQ ID NO: 171171 - protein, 15 aa, Homo sapiens
  CDR3 for alpha chain variable domain of TCR clone 85586 (TRAV3, TRAJ3)
CAVRDRDSCASKIIF

SEQ ID NO: 171172 - protein, 18 aa, Homo sapiens
  CDR3 for beta chain variable domain of TCR clone 85586 (TRBV25-1, TRBJ1-2)
CASSGLQNGQGLIFGYTF

SEQ ID NO: 171173 - protein, 12 aa, Homo sapiens
  CDR3 for alpha chain variable domain of TCR clone 85587 (TRAV1-1, TRAJ39)
CAVPVVGNMLTF

SEQ ID NO: 171174 - protein, 16 aa, Homo sapiens
  CDR3 for beta chain variable domain of TCR clone 85587 (TRBV5-1, TRBJ2-1)
CASSLTLAGGRNEQFF

SEQ ID NO: 171175 - protein, 11 aa, Homo sapiens
  CDR3 for alpha chain variable domain of TCR clone 85588 (TRAV21, TRAJ48)
CAVDGNEKLTF

SEQ ID NO: 171176 - protein, 16 aa, Homo sapiens
  CDR3 for beta chain variable domain of TCR clone 85588 (TRBV12-4, TRBJ1-5)
CASSSGPRVSNQPQHF

SEQ ID NO: 171177 - protein, 14 aa, Homo sapiens
  CDR3 for alpha chain variable domain of TCR clone 85589 (TRAV23/DV6, TRAJ40)
CAASLTSGTYKYIL

SEQ ID NO: 171178 - protein, 14 aa, Homo sapiens
  CDR3 for beta chain variable domain of TCR clone 85589 (TRBV5-1, TRBJ2-3)
CASSRGQGGGTQYF

SEQ ID NO: 171179 - protein, 13 aa, Homo sapiens
  CDR3 for alpha chain variable domain of TCR clone 85590 (TRAV26-1, TRAJ36)
CIVVGTGANNLFF

SEQ ID NO: 171180 - protein, 15 aa, Homo sapiens
  CDR3 for beta chain variable domain of TCR clone 85590 (TRBV19, TRBJ1-2)
CASSVGQVLNYGYTF

SEQ ID NO: 171181 - protein, 16 aa, Homo sapiens
  CDR3 for alpha chain variable domain of TCR clone 85591 (TRAV12-2, TRAJ10)
CAVNRVLTGGGNKLTF

SEQ ID NO: 171182 - protein, 12 aa, Homo sapiens
  CDR3 for beta chain variable domain of TCR clone 85591 (TRBV7-8, TRBJ2-7)
CASSLGDREQYF

SEQ ID NO: 171183 - protein, 13 aa, Homo sapiens
  CDR3 for alpha chain variable domain of TCR clone 85592 (TRAV35, TRAJ42)
CAGFPGSQGNLIF

SEQ ID NO: 171184 - protein, 14 aa, Homo sapiens
  CDR3 for beta chain variable domain of TCR clone 85592 (TRBV19, TRBJ2-1)
CASPTFVLSGGQFF

SEQ ID NO: 171185 - protein, 15 aa, Homo sapiens
  CDR3 for alpha chain variable domain of TCR clone 85593 (TRAV2, TRAJ22)
CAVPSRGGFCKATDL

SEQ ID NO: 171186 - protein, 11 aa, Homo sapiens
  CDR3 for beta chain variable domain of TCR clone 85593 (TRBV27, TRBJ2-3)
CASSLGDTQYF

SEQ ID NO: 171187 - protein, 14 aa, Homo sapiens
  CDR3 for alpha chain variable domain of TCR clone 85594 (TRAV25, TRAJ35)
CARRMEGFGNVLHC

SEQ ID NO: 171188 - protein, 13 aa, Homo sapiens
  CDR3 for beta chain variable domain of TCR clone 85594 (TRBV7-2, TRBJ1-4)
CASSLAGLEKPFF

SEQ ID NO: 171189 - protein, 17 aa, Homo sapiens
  CDR3 for alpha chain variable domain of TCR clone 85595 (TRAV4, TRAJ13)
CLVGVQGSSGGYQKVTF

SEQ ID NO: 171190 - protein, 18 aa, Homo sapiens
  CDR3 for beta chain variable domain of TCR clone 85595 (TRBV15, TRBJ2-3)
CATSRDCARSWDTDTQYF

SEQ ID NO: 171191 - protein, 14 aa, Homo sapiens
  CDR3 for alpha chain variable domain of TCR clone 85596 (TRAV13-1, TRAJ13)
CAAIPLVGYQKVTF

SEQ ID NO: 171192 - protein, 14 aa, Homo sapiens
  CDR3 for beta chain variable domain of TCR clone 85596 (TRBV25-1, TRBJ1-1)
CASTHLGGNTEAFF

SEQ ID NO: 171193 - protein, 14 aa, Homo sapiens
  CDR3 for alpha chain variable domain of TCR clone 85597 (TRAV13-1, TRAJ35)
CAASKGGFGNVLHC

SEQ ID NO: 171194 - protein, 15 aa, Homo sapiens
  CDR3 for beta chain variable domain of TCR clone 85597 (TRBV7-2, TRBJ2-2)
CASSPTGANTGELFF

SEQ ID NO: 171195 - protein, 16 aa, Homo sapiens
  CDR3 for alpha chain variable domain of TCR clone 85598 (TRAV8-1, TRAJ42)
CAVTSRYGGSPGNLIF

SEQ ID NO: 171196 - protein, 12 aa, Homo sapiens
  CDR3 for beta chain variable domain of TCR clone 85598 (TRBV6-3, TRBJ2-7)
CASSLGRRGLYF

SEQ ID NO: 171197 - protein, 11 aa, Homo sapiens
  CDR3 for alpha chain variable domain of TCR clone 85599 (TRAV2, TRAJ21)
CAVFNFNKFYF

SEQ ID NO: 171198 - protein, 14 aa, Homo sapiens
  CDR3 for beta chain variable domain of TCR clone 85599 (TRBV7-9, TRBJ2-4)
CASSLAMGGNIQYF

SEQ ID NO: 171199 - protein, 12 aa, Homo sapiens
  CDR3 for alpha chain variable domain of TCR clone 85600 (TRAV12-3, TRAJ17)
CAMTHTGNKLTF

SEQ ID NO: 171200 - protein, 18 aa, Homo sapiens
  CDR3 for beta chain variable domain of TCR clone 85600 (TRBV4-3, TRBJ1-6)
CASSQETPASSYNSPLHF

SEQ ID NO: 171201 - protein, 16 aa, Homo sapiens
  CDR3 for alpha chain variable domain of TCR clone 85601 (TRAV1-2, TRAJ6)
CAVRDQGTGGSYIPTC

SEQ ID NO: 171202 - protein, 13 aa, Homo sapiens
  CDR3 for beta chain variable domain of TCR clone 85601 (TRBV28, TRBJ2-7)
CASTPGLAGEQYF

SEQ ID NO: 171203 - protein, 13 aa, Homo sapiens
  CDR3 for alpha chain variable domain of TCR clone 85602 (TRAV8-3, TRAJ43)
CAVVPYNNNDMRF

SEQ ID NO: 171204 - protein, 17 aa, Homo sapiens
  CDR3 for beta chain variable domain of TCR clone 85602 (TRBV7-7, TRBJ1-1)
CASIGDRPDLGVTEAFF

SEQ ID NO: 171205 - protein, 20 aa, Homo sapiens
  CDR3 for alpha chain variable domain of TCR clone 85603 (TRAV12-1, TRAJ42)
SSVIQPPTSVKGGSQGNLIF

SEQ ID NO: 171206 - protein, 15 aa, Homo sapiens
  CDR3 for beta chain variable domain of TCR clone 85603 (TRBV4-3, TRBJ1-1)
CASSQELGRGTEAFF

SEQ ID NO: 171207 - protein, 15 aa, Homo sapiens
  CDR3 for alpha chain variable domain of TCR clone 85604 (TRAV26-2, TRAJ54)
CILRDVGQGAQKLEF

SEQ ID NO: 171208 - protein, 13 aa, Homo sapiens
  CDR3 for beta chain variable domain of TCR clone 85604 (TRBV7-9, TRBJ1-1)
CASSLAGVTEAFF

SEQ ID NO: 171209 - protein, 11 aa, Homo sapiens
  CDR3 for alpha chain variable domain of TCR clone 85605 (TRAV12-3, TRAJ27)
CAMANAGKSTF

SEQ ID NO: 171210 - protein, 14 aa, Homo sapiens
  CDR3 for beta chain variable domain of TCR clone 85605 (TRBV4-2, TRBJ2-1)
CASGLDRAYNEQFF

SEQ ID NO: 171211 - protein, 12 aa, Homo sapiens
  CDR3 for alpha chain variable domain of TCR clone 85606 (TRAV3, TRAJ20)
CAVRDPDYKLSF

SEQ ID NO: 171212 - protein, 13 aa, Homo sapiens
  CDR3 for beta chain variable domain of TCR clone 85606 (TRBV9, TRBJ2-1)
CASSVGRGGEQFF

SEQ ID NO: 171213 - protein, 13 aa, Homo sapiens
  CDR3 for alpha chain variable domain of TCR clone 85607 (TRAV2, TRAJ40)
CAVVTSGTYKYTF

SEQ ID NO: 171214 - protein, 14 aa, Homo sapiens
  CDR3 for beta chain variable domain of TCR clone 85607 (TRBV19, TRBJ2-1)
CASPAFVLSGEQFF

SEQ ID NO: 171215 - protein, 13 aa, Homo sapiens
  CDR3 for alpha chain variable domain of TCR clone 85608 (TRAV16, TRAJ26)
CITALCLGQNFVF

SEQ ID NO: 171216 - protein, 12 aa, Homo sapiens
  CDR3 for beta chain variable domain of TCR clone 85608 (TRBV11-2, TRBJ2-1)
CASSPGNNEQFF

SEQ ID NO: 171217 - protein, 16 aa, Homo sapiens
  CDR3 for alpha chain variable domain of TCR clone 85609 (TRAV1-2, TRAJ10)
CAVRGVLTGGGNKLTF

SEQ ID NO: 171218 - protein, 12 aa, Homo sapiens
  CDR3 for beta chain variable domain of TCR clone 85609 (TRBV11-2, TRBJ2-1)
CASSPGNNEQFL

SEQ ID NO: 171219 - protein, 14 aa, Homo sapiens
  CDR3 for alpha chain variable domain of TCR clone 85610 (TRAV23/DV6, TRAJ8)
CAASKATGFQTLVF

SEQ ID NO: 171220 - protein, 15 aa, Homo sapiens
  CDR3 for beta chain variable domain of TCR clone 85610 (TRBV28, TRBJ2-3)
CASSPDRQGANTQYF

SEQ ID NO: 171221 - protein, 15 aa, Homo sapiens
  CDR3 for alpha chain variable domain of TCR clone 85611 (TRAV17, TRAJ22)
CATVAPSGSARQLTF

SEQ ID NO: 171222 - protein, 15 aa, Homo sapiens
  CDR3 for beta chain variable domain of TCR clone 85611 (TRBV27, TRBJ1-6)
CASSCDRGLGSPLHF

SEQ ID NO: 171223 - protein, 14 aa, Homo sapiens
  CDR3 for alpha chain variable domain of TCR clone 85612 (TRAV17, TRAJ34)
CATDSLEGTDKLIF

SEQ ID NO: 171224 - protein, 15 aa, Homo sapiens
  CDR3 for beta chain variable domain of TCR clone 85612 (TRBV27, TRBJ2-1)
CASSNGGGSSNEQFF

SEQ ID NO: 171225 - protein, 11 aa, Homo sapiens
  CDR3 for alpha chain variable domain of TCR clone 85613 (TRAV3, TRAJ21)
CAVGNFNKFYF

SEQ ID NO: 171226 - protein, 16 aa, Homo sapiens
  CDR3 for beta chain variable domain of TCR clone 85613 (TRBV11-2, TRBJ1-2)
CASSPSGREANYGYTF

SEQ ID NO: 171227 - protein, 13 aa, Homo sapiens
  CDR3 for alpha chain variable domain of TCR clone 85614 (TRAV12-2, TRAJ39)
FAVNNNAGNMLTF

SEQ ID NO: 171228 - protein, 13 aa, Homo sapiens
  CDR3 for beta chain variable domain of TCR clone 85614 (TRBV2, TRBJ1-5)
CATAGPGNQPQHF

SEQ ID NO: 171229 - protein, 14 aa, Homo sapiens
  CDR3 for alpha chain variable domain of TCR clone 85615 (TRAV25, TRAJ22)
CAVRSSGSARQLTF

SEQ ID NO: 171230 - protein, 16 aa, Homo sapiens
  CDR3 for beta chain variable domain of TCR clone 85615 (TRBV4-2, TRBJ1-1)
CASSPSPGRTAPEAFF

SEQ ID NO: 171231 - protein, 14 aa, Homo sapiens
  CDR3 for alpha chain variable domain of TCR clone 85616 (TRAV12-1, TRAJ46)
CVVTAKSSGDKLTF

SEQ ID NO: 171232 - protein, 17 aa, Homo sapiens
  CDR3 for beta chain variable domain of TCR clone 85616 (TRBV4-1, TRBJ2-3)
SASSQDPAGGPLDTQYF

SEQ ID NO: 171233 - protein, 14 aa, Homo sapiens
  CDR3 for alpha chain variable domain of TCR clone 85617 (TRAV2, TRAJ9)
CAVEDRSGGFKTIF

SEQ ID NO: 171234 - protein, 12 aa, Homo sapiens
  CDR3 for beta chain variable domain of TCR clone 85617 (TRBV12-4, TRBJ2-4)
CPSSSSGNIQYF

SEQ ID NO: 171235 - protein, 16 aa, Homo sapiens
  CDR3 for alpha chain variable domain of TCR clone 85618 (TRAV20, TRAJ53)
CAVQDQPRGSNYKLTF

SEQ ID NO: 171236 - protein, 18 aa, Homo sapiens
  CDR3 for beta chain variable domain of TCR clone 85618 (TRBV20-1, TRBJ2-3)
CSASGLAGGPGTTDTQYF

SEQ ID NO: 171237 - protein, 12 aa, Homo sapiens
  CDR3 for alpha chain variable domain of TCR clone 85619 (TRAV12-3, TRAJ17)
CAITLTGNKLTF

SEQ ID NO: 171238 - protein, 16 aa, Homo sapiens
  CDR3 for beta chain variable domain of TCR clone 85619 (TRBV12-4, TRBJ2-5)
CASSFFVRGRQETQYF

SEQ ID NO: 171239 - protein, 14 aa, Homo sapiens
  CDR3 for alpha chain variable domain of TCR clone 85620 (TRAV12-2, TRAJ40)
CAVKIPSGTYKYIF

SEQ ID NO: 171240 - protein, 18 aa, Homo sapiens
  CDR3 for beta chain variable domain of TCR clone 85620 (TRBV20-1, TRBJ2-6)
CSAETTPTHGSGANDLTF

SEQ ID NO: 171241 - protein, 16 aa, Homo sapiens
  CDR3 for alpha chain variable domain of TCR clone 85621 (TRAV12-3, TRAJ53)
CAMSPGSGGSNYKLTF

SEQ ID NO: 171242 - protein, 16 aa, Homo sapiens
  CDR3 for beta chain variable domain of TCR clone 85621 (TRBV4-2, TRBJ1-1)
CASSHAGFGMNTEAFF

SEQ ID NO: 171243 - protein, 13 aa, Homo sapiens
  CDR3 for alpha chain variable domain of TCR clone 85622 (TRAV36/DV7, TRAJ33)
CAGDMDSNYQLIW

SEQ ID NO: 171244 - protein, 16 aa, Homo sapiens
  CDR3 for beta chain variable domain of TCR clone 85622 (TRBV15, TRBJ2-3)
CATRLSGGRAPDTQYF

SEQ ID NO: 171245 - protein, 15 aa, Homo sapiens
  CDR3 for alpha chain variable domain of TCR clone 85623 (TRAV16, TRAJ29)
CALSDQPFRKHTSCL

SEQ ID NO: 171246 - protein, 15 aa, Homo sapiens
  CDR3 for beta chain variable domain of TCR clone 85623 (TRBV10-3, TRBJ2-1)
CATNGGPGQGDEQFF

SEQ ID NO: 171247 - protein, 14 aa, Homo sapiens
  CDR3 for alpha chain variable domain of TCR clone 85624 (TRAV8-4, TRAJ54)
CAVSEVLGAQKLLF

SEQ ID NO: 171248 - protein, 13 aa, Homo sapiens
  CDR3 for beta chain variable domain of TCR clone 85624 (TRBV27, TRBJ2-7)
CASSFVSSYEQYF

SEQ ID NO: 171249 - protein, 12 aa, Homo sapiens
  CDR3 for alpha chain variable domain of TCR clone 85625 (TRAV3, TRAJ20)
CAVRDSDYKLSF

SEQ ID NO: 171250 - protein, 14 aa, Homo sapiens
  CDR3 for beta chain variable domain of TCR clone 85625 (TRBV4-2, TRBJ2-1)
CASGLDRAYNEQFF

SEQ ID NO: 171251 - protein, 13 aa, Homo sapiens
  CDR3 for alpha chain variable domain of TCR clone 85626 (TRAV26-1, TRAJ36)
CIVVGTGAHNLFF

SEQ ID NO: 171252 - protein, 13 aa, Homo sapiens
  CDR3 for beta chain variable domain of TCR clone 85626 (TRBV6-5, TRBJ2-6)
CASSTSGPLRLDF

SEQ ID NO: 171253 - protein, 13 aa, Homo sapiens
  CDR3 for alpha chain variable domain of TCR clone 85627 (TRAV21, TRAJ57)
CAVTQGGSDKLVF

SEQ ID NO: 171254 - protein, 17 aa, Homo sapiens
  CDR3 for beta chain variable domain of TCR clone 85627 (TRBV10-3, TRBJ2-6)
CAISELAESSGANVLTF

SEQ ID NO: 171255 - protein, 16 aa, Homo sapiens
  CDR3 for alpha chain variable domain of TCR clone 85628 (TRAV30, TRAJ24)
CGTEIVDADSWGKFQF

SEQ ID NO: 171256 - protein, 15 aa, Homo sapiens
  CDR3 for beta chain variable domain of TCR clone 85628 (TRBV20-1, TRBJ2-4)
CSARDLAGGPNIQYF

SEQ ID NO: 171257 - protein, 15 aa, Homo sapiens
  CDR3 for alpha chain variable domain of TCR clone 85629 (TRAV4, TRAJ8)
CLVGEQHTGFQKLVF

SEQ ID NO: 171258 - protein, 15 aa, Homo sapiens
  CDR3 for beta chain variable domain of TCR clone 85629 (TRBV7-9, TRBJ2-5)
CASSNRDYVQETQYF

SEQ ID NO: 171259 - protein, 14 aa, Homo sapiens
  CDR3 for alpha chain variable domain of TCR clone 85630 (TRAV26-1, TRAJ17)
CIVRVEAAGNKLTF

SEQ ID NO: 171260 - protein, 17 aa, Homo sapiens
  CDR3 for beta chain variable domain of TCR clone 85630 (TRBV13, TRBJ2-3)
CASSLSRVAGGRNTQYF

SEQ ID NO: 171261 - protein, 17 aa, Homo sapiens
  CDR3 for alpha chain variable domain of TCR clone 85631 (TRAV2, TRAJ22)
ILQVREADAAEQRQLTF

SEQ ID NO: 171262 - protein, 16 aa, Homo sapiens
  CDR3 for beta chain variable domain of TCR clone 85631 (TRBV2, TRBJ2-5)
CASSKTQGVGEETQYF

SEQ ID NO: 171263 - protein, 14 aa, Homo sapiens
  CDR3 for alpha chain variable domain of TCR clone 85632 (TRAV12-2, TRAJ24)
CAVTPADSWGKLQC

SEQ ID NO: 171264 - protein, 16 aa, Homo sapiens
  CDR3 for beta chain variable domain of TCR clone 85632 (TRBV6-4, TRBJ2-3)
APSEGGRAWGTDTQYF

SEQ ID NO: 171265 - protein, 14 aa, Homo sapiens
  CDR3 for alpha chain variable domain of TCR clone 85633 (TRAV17, TRAJ31)
CATVLRNNNARLMF

SEQ ID NO: 171266 - protein, 13 aa, Homo sapiens
  CDR3 for beta chain variable domain of TCR clone 85633 (TRBV12-4, TRBJ2-5)
CQQFMAETRDQYF

SEQ ID NO: 171267 - protein, 17 aa, Homo sapiens
  CDR3 for alpha chain variable domain of TCR clone 85634 (TRAV1-1, TRAJ3)
CLLLLRCPYSSASKIIF

SEQ ID NO: 171268 - protein, 13 aa, Homo sapiens
  CDR3 for beta chain variable domain of TCR clone 85634 (TRBV20-1, TRBJ1-1)
CSASAGGNTEAFF

SEQ ID NO: 171269 - protein, 17 aa, Homo sapiens
  CDR3 for alpha chain variable domain of TCR clone 85635 (TRAV3, TRAJ42)
CAVRDRDYGGSQGNHIF

SEQ ID NO: 171270 - protein, 15 aa, Homo sapiens
  CDR3 for beta chain variable domain of TCR clone 85635 (TRBV2, TRBJ2-7)
CASSEGLARSYEQYF

SEQ ID NO: 171271 - protein, 13 aa, Homo sapiens
  CDR3 for alpha chain variable domain of TCR clone 85636 (TRAV20, TRAJ49)
CAVQARTGNQFYL

SEQ ID NO: 171272 - protein, 14 aa, Homo sapiens
  CDR3 for beta chain variable domain of TCR clone 85636 (TRBV5-1, TRBJ1-1)
CASSLQGASTEAFF

SEQ ID NO: 171273 - protein, 17 aa, Homo sapiens
  CDR3 for alpha chain variable domain of TCR clone 85637 (TRAV3, TRAJ6)
CAVRDGPRAGGSYIPTF

SEQ ID NO: 171274 - protein, 15 aa, Homo sapiens
  CDR3 for beta chain variable domain of TCR clone 85637 (TRBV7-2, TRBJ2-2)
CASSLVAGSAGELFF

SEQ ID NO: 171275 - protein, 20 aa, Homo sapiens
  CDR3 for alpha chain variable domain of TCR clone 85638 (TRAV1-1, TRAJ4)
CLLLLRCEGFLSGGYNKLIF

SEQ ID NO: 171276 - protein, 16 aa, Homo sapiens
  CDR3 for beta chain variable domain of TCR clone 85638 (TRBV28, TRAJ15)
CASSPPCRGRSEKLFF

SEQ ID NO: 171277 - protein, 12 aa, Homo sapiens
  CDR3 for alpha chain variable domain of TCR clone 85639 (TRAV13-1, TRAJ21)
CAAFFNFNKFYF

SEQ ID NO: 171278 - protein, 14 aa, Homo sapiens
  CDR3 for beta chain variable domain of TCR clone 85639 (TRBV7-2, TRBJ2-7)
CASSPKTSFYEQYF

SEQ ID NO: 171279 - protein, 11 aa, Homo sapiens
  CDR3 for alpha chain variable domain of TCR clone 85640 (TRAV12-2, TRAJ29)
CAVTLRSPLVF

SEQ ID NO: 171280 - protein, 14 aa, Homo sapiens
  CDR3 for beta chain variable domain of TCR clone 85640 (TRBV19, TRBJ2-7)
CASSIFAGTYEQYF

SEQ ID NO: 171281 - protein, 12 aa, Homo sapiens
  CDR3 for alpha chain variable domain of TCR clone 85641 (TRAV9-2, TRAJ26)
CALRGYGQNFVF

SEQ ID NO: 171282 - protein, 12 aa, Homo sapiens
  CDR3 for beta chain variable domain of TCR clone 85641 (TRBV29-1, TRBJ2-3)
CSVTGGADTQYL

SEQ ID NO: 171283 - protein, 15 aa, Homo sapiens
  CDR3 for alpha chain variable domain of TCR clone 85642 (TRAV26-1, TRAJ29)
CTVRVEGSGNTPLVF

SEQ ID NO: 171284 - protein, 15 aa, Homo sapiens
  CDR3 for beta chain variable domain of TCR clone 85642 (TRBV28, TRBJ2-5)
CASSPGQGSIETQYF

SEQ ID NO: 171285 - protein, 14 aa, Homo sapiens
  CDR3 for alpha chain variable domain of TCR clone 85643 (TRAV12-1, TRAJ17)
CVVNYKAAGNKLTF

SEQ ID NO: 171286 - protein, 16 aa, Homo sapiens
  CDR3 for beta chain variable domain of TCR clone 85643 (TRBV20-1, TRBJ2-1)
CSARDLKQGMNNEQFF

SEQ ID NO: 171287 - protein, 11 aa, Homo sapiens
  CDR3 for alpha chain variable domain of TCR clone 85644 (TRAV12-1, TRAJ15)
CVVTAGTALIF

SEQ ID NO: 171288 - protein, 16 aa, Homo sapiens
  CDR3 for beta chain variable domain of TCR clone 85644 (TRBV28, TRBJ2-1)
CASSSRVRDSYNEQFF

SEQ ID NO: 171289 - protein, 16 aa, Homo sapiens
  CDR3 for alpha chain variable domain of TCR clone 85645 (TRAV17, TRAJ9)
CATGEWGGTGGFNTIF

SEQ ID NO: 171290 - protein, 15 aa, Homo sapiens
  CDR3 for beta chain variable domain of TCR clone 85645 (TRBV20-1, TRBJ1-2)
CSARDSRGRNYGYTF

SEQ ID NO: 171291 - protein, 13 aa, Homo sapiens
  CDR3 for alpha chain variable domain of TCR clone 85646 (TRAV27, TRAJ11)
CAGGGSGYSTLTF

SEQ ID NO: 171292 - protein, 15 aa, Homo sapiens
  CDR3 for beta chain variable domain of TCR clone 85646 (TRBV5-1, TRBJ1-1)
CASSLGQGGFAEAFF

SEQ ID NO: 171293 - protein, 11 aa, Homo sapiens
  CDR3 for alpha chain variable domain of TCR clone 85647 (TRAV12-3, TRAJ27)
CAMANAAKSTF

SEQ ID NO: 171294 - protein, 13 aa, Homo sapiens
  CDR3 for beta chain variable domain of TCR clone 85647 (TRBV20-1, TRBJ1-1)
CSARVGGNTEAFF

SEQ ID NO: 171295 - protein, 14 aa, Homo sapiens
  CDR3 for alpha chain variable domain of TCR clone 85648 (TRAV38-1, TRAJ45)
CAYYSGGGADGLTF

SEQ ID NO: 171296 - protein, 15 aa, Homo sapiens
  CDR3 for beta chain variable domain of TCR clone 85648 (TRBV9, TRBJ1-6)
CASSVAGTGDSPLHF

SEQ ID NO: 171297 - protein, 13 aa, Homo sapiens
  CDR3 for alpha chain variable domain of TCR clone 85649 (TRAV25, TRAJ48)
CAGPKGGNEKLTF

SEQ ID NO: 171298 - protein, 15 aa, Homo sapiens
  CDR3 for beta chain variable domain of TCR clone 85649 (TRBV9, TRBJ2-6)
CASSVLWNGANVLTS

SEQ ID NO: 171299 - protein, 11 aa, Homo sapiens
  CDR3 for alpha chain variable domain of TCR clone 85650 (TRAV1-1, TRAJ23)
CAVRQGGKLIF

SEQ ID NO: 171300 - protein, 20 aa, Homo sapiens
  CDR3 for beta chain variable domain of TCR clone 85650 (TRBV7-8, TRBJ2-2)
CASSHLFPGPTIHVTGGLFF

SEQ ID NO: 171301 - protein, 14 aa, Homo sapiens
  CDR3 for alpha chain variable domain of TCR clone 85651 (TRAV2, TRAJ9)
CAVEDRSGGFKTIF

SEQ ID NO: 171302 - protein, 17 aa, Homo sapiens
  CDR3 for beta chain variable domain of TCR clone 85651 (TRBV7-2, TRBJ2-2)
CASSPRGAGEGTGELFF

SEQ ID NO: 171303 - protein, 11 aa, Homo sapiens
  CDR3 for alpha chain variable domain of TCR clone 85652 (TRAV1-1, TRAJ23)
CAVRQGGKLIF

SEQ ID NO: 171304 - protein, 12 aa, Homo sapiens
  CDR3 for beta chain variable domain of TCR clone 85652 (TRBV2, TRBJ2-1)
CAYGPPGNEQFF

SEQ ID NO: 171305 - protein, 14 aa, Homo sapiens
  CDR3 for alpha chain variable domain of TCR clone 85653 (TRAV12-2, TRAJ13)
CAVKKTGGYQKVTF

SEQ ID NO: 171306 - protein, 14 aa, Homo sapiens
  CDR3 for beta chain variable domain of TCR clone 85653 (TRBV12-5, TRBJ2-5)
CASGSRTQQETQYF

SEQ ID NO: 171307 - protein, 12 aa, Homo sapiens
  CDR3 for alpha chain variable domain of TCR clone 85654 (TRAV27, TRAJ41)
CAGRNSGYALNF

SEQ ID NO: 171308 - protein, 14 aa, Homo sapiens
  CDR3 for beta chain variable domain of TCR clone 85654 (TRBV7-2, TRBJ2-7)
CASRSQGAAYEQYF

SEQ ID NO: 171309 - protein, 13 aa, Homo sapiens
  CDR3 for alpha chain variable domain of TCR clone 85655 (TRAV12-2, TRAJ20)
CAVYPSNDYKLSF

SEQ ID NO: 171310 - protein, 14 aa, Homo sapiens
  CDR3 for beta chain variable domain of TCR clone 85655 (TRBV28, TRBJ1-2)
CASRIQGANYGYTF

SEQ ID NO: 171311 - protein, 15 aa, Homo sapiens
  CDR3 for alpha chain variable domain of TCR clone 85656 (TRAV12-3, TRAJ49)
CAMAVTPNTGNPFYF

SEQ ID NO: 171312 - protein, 14 aa, Homo sapiens
  CDR3 for beta chain variable domain of TCR clone 85656 (TRBV7-8, TRBJ2-3)
CASSLEAGTDTQYF

SEQ ID NO: 171313 - protein, 12 aa, Homo sapiens
  CDR3 for alpha chain variable domain of TCR clone 85657 (TRAV21, TRAJ33)
CAKMDSNYQLIW

SEQ ID NO: 171314 - protein, 23 aa, Homo sapiens
  CDR3 for beta chain variable domain of TCR clone 85657 (TRBV4-2, TRBJ2-3)
CASSQDPPRASSISGGRGDTQYF

SEQ ID NO: 171315 - protein, 14 aa, Homo sapiens
  CDR3 for alpha chain variable domain of TCR clone 85658 (TRAV12-2, TRAJ44)
CAVNPAGTASKLTF

SEQ ID NO: 171316 - protein, 16 aa, Homo sapiens
  CDR3 for beta chain variable domain of TCR clone 85658 (TRBV19, TRBJ2-1)
CASSKAGPSSYNEQFF

SEQ ID NO: 171317 - protein, 10 aa, Homo sapiens
  CDR3 for alpha chain variable domain of TCR clone 85659 (TRAV23/DV6, TRAJ57)
CSASSTLSQG

SEQ ID NO: 171318 - protein, 14 aa, Homo sapiens
  CDR3 for beta chain variable domain of TCR clone 85659 (TRBV25-1, TRBJ1-1)
CASTHLGGNTEAFL

SEQ ID NO: 171319 - protein, 14 aa, Homo sapiens
  CDR3 for alpha chain variable domain of TCR clone 85660 (TRAV17, TRAJ6)
CATDASGGSYIPTF

SEQ ID NO: 171320 - protein, 14 aa, Homo sapiens
  CDR3 for beta chain variable domain of TCR clone 85660 (TRBV4-1, TRBJ2-2)
CASSQAVNTGELFF

SEQ ID NO: 171321 - protein, 14 aa, Homo sapiens
  CDR3 for alpha chain variable domain of TCR clone 85661 (TRAV17, TRAJ16)
CATADFSDAQKLLF

SEQ ID NO: 171322 - protein, 15 aa, Homo sapiens
  CDR3 for beta chain variable domain of TCR clone 85661 (TRBV18, TRBJ2-1)
CASSPPSASYNEQFF

SEQ ID NO: 171323 - protein, 14 aa, Homo sapiens
  CDR3 for alpha chain variable domain of TCR clone 85662 (TRAV35, TRAJ13)
CAGSPSGGYQKVTF

SEQ ID NO: 171324 - protein, 17 aa, Homo sapiens
  CDR3 for beta chain variable domain of TCR clone 85662 (TRBV18, TRBJ1-5)
CQLTTCPVRQNNQPQHF

SEQ ID NO: 171325 - protein, 14 aa, Homo sapiens
  CDR3 for alpha chain variable domain of TCR clone 85663 (TRAV3, TRAJ20)
YAVRDSFNDYKLSF

SEQ ID NO: 171326 - protein, 14 aa, Homo sapiens
  CDR3 for beta chain variable domain of TCR clone 85663 (TRBV19, TRBJ2-1)
CASPTFVLSGEQFF

SEQ ID NO: 171327 - protein, 13 aa, Homo sapiens
  CDR3 for alpha chain variable domain of TCR clone 85664 (TRAV13-1, TRAJ39)
CAASIWAGNMLTF

SEQ ID NO: 171328 - protein, 15 aa, Homo sapiens
  CDR3 for beta chain variable domain of TCR clone 85664 (TRBV2, TRBJ1-2)
CASSESRTVNYGYTF

SEQ ID NO: 171329 - protein, 11 aa, Homo sapiens
  CDR3 for alpha chain variable domain of TCR clone 85665 (TRAV13-2, TRAJ45)
VTGGGADGLTF

SEQ ID NO: 171330 - protein, 17 aa, Homo sapiens
  CDR3 for beta chain variable domain of TCR clone 85665 (TRBV19, TRBJ1-1)
CASSIAGRGLMNTEAFF

SEQ ID NO: 171331 - protein, 14 aa, Homo sapiens
  CDR3 for alpha chain variable domain of TCR clone 85666 (TRAV35, TRAJ50)
CAGHRKTSYDKVIF

SEQ ID NO: 171332 - protein, 15 aa, Homo sapiens
  CDR3 for beta chain variable domain of TCR clone 85666 (TRBV18, TRBJ2-7)
CASSPRSGTAYEQYF

SEQ ID NO: 171333 - protein, 14 aa, Homo sapiens
  CDR3 for alpha chain variable domain of TCR clone 85667 (TRAV21, TRAJ58)
CAVRRGRRGSRLTF

SEQ ID NO: 171334 - protein, 13 aa, Homo sapiens
  CDR3 for beta chain variable domain of TCR clone 85667 (TRBV7-2, TRBJ1-6)
CASSLKFDSPLHF

SEQ ID NO: 171335 - protein, 14 aa, Homo sapiens
  CDR3 for alpha chain variable domain of TCR clone 85668 (TRAV3, TRAJ9)
CAVRLNTGGFKTIF

SEQ ID NO: 171336 - protein, 14 aa, Homo sapiens
  CDR3 for beta chain variable domain of TCR clone 85668 (TRBV19, TRBJ2-1)
CASPTFVLSGEQFF

SEQ ID NO: 171337 - protein, 14 aa, Homo sapiens
  CDR3 for alpha chain variable domain of TCR clone 85669 (TRAV16, TRAJ37)
CALDISVNTGKLIF

SEQ ID NO: 171338 - protein, 14 aa, Homo sapiens
  CDR3 for beta chain variable domain of TCR clone 85669 (TRBV7-6, TRBJ2-7)
CASSFRQGADEQYF

SEQ ID NO: 171339 - protein, 15 aa, Homo sapiens
  CDR3 for alpha chain variable domain of TCR clone 85670 (TRAV8-1, TRAJ6)
CAVNTPPGGIYIPTF

SEQ ID NO: 171340 - protein, 14 aa, Homo sapiens
  CDR3 for beta chain variable domain of TCR clone 85670 (TRBV12-4, TRBJ2-1)
CASSLGQGASEQFF

SEQ ID NO: 171341 - protein, 12 aa, Homo sapiens
  CDR3 for alpha chain variable domain of TCR clone 85671 (TRAV2, TRAJ9)
FAVGAGGFKTIF

SEQ ID NO: 171342 - protein, 16 aa, Homo sapiens
  CDR3 for beta chain variable domain of TCR clone 85671 (TRBV13, TRBJ2-2)
CASSPRTGEHTGELFF

SEQ ID NO: 171343 - protein, 14 aa, Homo sapiens
  CDR3 for alpha chain variable domain of TCR clone 85672 (TRAV38-1, TRAJ45)
CASHSGGGADGLTF

SEQ ID NO: 171344 - protein, 15 aa, Homo sapiens
  CDR3 for beta chain variable domain of TCR clone 85672 (TRBV10-3, TRBJ2-3)
CAISLTSGGTDTQYF

SEQ ID NO: 171345 - protein, 13 aa, Homo sapiens
  CDR3 for alpha chain variable domain of TCR clone 85673 (TRAV21, TRAJ57)
CAVTQGGSEKLVF

SEQ ID NO: 171346 - protein, 13 aa, Homo sapiens
  CDR3 for beta chain variable domain of TCR clone 85673 (TRBV15, TRBJ1-6)
CATSGGLNSPLHF

SEQ ID NO: 171347 - protein, 14 aa, Homo sapiens
  CDR3 for alpha chain variable domain of TCR clone 85674 (TRAV9-2, TRAJ39)
CALYIYNAGNMLTF

SEQ ID NO: 171348 - protein, 14 aa, Homo sapiens
  CDR3 for beta chain variable domain of TCR clone 85674 (TRBV5-5, TRBJ1-2)
CASSFGQINYGYTF

SEQ ID NO: 171349 - protein, 13 aa, Homo sapiens
  CDR3 for alpha chain variable domain of TCR clone 85675 (TRAV12-3, TRAJ9)
CAMRNTGGFKTIF

SEQ ID NO: 171350 - protein, 12 aa, Homo sapiens
  CDR3 for beta chain variable domain of TCR clone 85675 (TRBV20-1, TRBJ2-1)
CSAQYTYNEQFF

SEQ ID NO: 171351 - protein, 12 aa, Homo sapiens
  CDR3 for alpha chain variable domain of TCR clone 85676 (TRAV16, TRAJ10)
CSRTGGGNKLTF

SEQ ID NO: 171352 - protein, 16 aa, Homo sapiens
  CDR3 for beta chain variable domain of TCR clone 85676 (TRBV7-3, TRBJ2-1)
CASSLEGYRSYNEQFF

SEQ ID NO: 171353 - protein, 11 aa, Homo sapiens
  CDR3 for alpha chain variable domain of TCR clone 85677 (TRAV2, TRAJ13)
CASGGYQKVTF

SEQ ID NO: 171354 - protein, 16 aa, Homo sapiens
  CDR3 for beta chain variable domain of TCR clone 85677 (TRBV6-1, TRBJ2-5)
CASGETLDRGAETQHF

SEQ ID NO: 171355 - protein, 15 aa, Homo sapiens
  CDR3 for alpha chain variable domain of TCR clone 85678 (TRAV14/DV4, TRAJ26)
CAMREGQNYGQNFVF

SEQ ID NO: 171356 - protein, 13 aa, Homo sapiens
  CDR3 for beta chain variable domain of TCR clone 85678 (TRBV24-1, TRBJ2-2)
CATSDWSTGELSF

SEQ ID NO: 171357 - protein, 14 aa, Homo sapiens
  CDR3 for alpha chain variable domain of TCR clone 85679 (TRAV8-4, TRAJ9)
CAVRINTGGFKTIF

SEQ ID NO: 171358 - protein, 15 aa, Homo sapiens
  CDR3 for beta chain variable domain of TCR clone 85679 (TRBV10-2, TRBJ2-6)
CASSEQWTGANVLTF

SEQ ID NO: 171359 - protein, 22 aa, Homo sapiens
  CDR3 for alpha chain variable domain of TCR clone 85680 (TRAV2, TRAJ22)
FSSLLILQVREADAAEQRQLTF

SEQ ID NO: 171360 - protein, 16 aa, Homo sapiens
  CDR3 for beta chain variable domain of TCR clone 85680 (TRBV2, TRBJ2-5)
CASSETQGVGEETQYF

SEQ ID NO: 171361 - protein, 11 aa, Homo sapiens
  CDR3 for alpha chain variable domain of TCR clone 85681 (TRAV4, TRAJ31)
CLVGLNARRMF

SEQ ID NO: 171362 - protein, 16 aa, Homo sapiens
  CDR3 for beta chain variable domain of TCR clone 85681 (TRBV15, TRBJ2-6)
CATSVNGGFLANVLTF

SEQ ID NO: 171363 - protein, 14 aa, Homo sapiens
  CDR3 for alpha chain variable domain of TCR clone 85682 (TRAV2, TRAJ22)
CAVGRGGSARQLNF

SEQ ID NO: 171364 - protein, 12 aa, Homo sapiens
  CDR3 for beta chain variable domain of TCR clone 85682 (TRBV19, TRBJ2-1)
CASSMQDTEQFF

SEQ ID NO: 171365 - protein, 15 aa, Homo sapiens
  CDR3 for alpha chain variable domain of TCR clone 85683 (TRAV14/DV4, TRAJ26)
CAMREGQNYGQNFVF

SEQ ID NO: 171366 - protein, 20 aa, Homo sapiens
  CDR3 for beta chain variable domain of TCR clone 85683 (TRBV7-8, TRBJ2-2)
CASSHLFPGPTIHITGELFF

SEQ ID NO: 171367 - protein, 14 aa, Homo sapiens
  CDR3 for alpha chain variable domain of TCR clone 85684 (TRAV29/DV5, TRAJ36)
CAARRKTGANNPFF

SEQ ID NO: 171368 - protein, 15 aa, Homo sapiens
  CDR3 for beta chain variable domain of TCR clone 85684 (TRBV20-1, TRBJ2-7)
CSARDRVSGMDEQYF

SEQ ID NO: 171369 - protein, 15 aa, Homo sapiens
  CDR3 for alpha chain variable domain of TCR clone 85685 (TRAV17, TRAJ57)
CATGPSQGGSEKLVF

SEQ ID NO: 171370 - protein, 16 aa, Homo sapiens
  CDR3 for beta chain variable domain of TCR clone 85685 (TRBV4-2, TRBJ1-2)
CASSQEIGGASYGYTF

SEQ ID NO: 171371 - protein, 15 aa, Homo sapiens
  CDR3 for alpha chain variable domain of TCR clone 85686 (TRAV26-1, TRAJ44)
CIARVPFGTASKLPF

SEQ ID NO: 171372 - protein, 17 aa, Homo sapiens
  CDR3 for beta chain variable domain of TCR clone 85686 (TRBV24-1, TRBJ2-4)
CATSDAEARGVRNIQYF

SEQ ID NO: 171373 - protein, 15 aa, Homo sapiens
  CDR3 for alpha chain variable domain of TCR clone 85687 (TRAV29/DV5, TRAJ24)
CAASGATDSWGKFQV

SEQ ID NO: 171374 - protein, 20 aa, Homo sapiens
  CDR3 for beta chain variable domain of TCR clone 85687 (TRBV11-2, TRBJ2-2)
LRTRPCISVPAASLPGSCFF

SEQ ID NO: 171375 - protein, 13 aa, Homo sapiens
  CDR3 for alpha chain variable domain of TCR clone 85688 (TRAV26-1, TRAJ34)
CIVRPWITDNLIF

SEQ ID NO: 171376 - protein, 14 aa, Homo sapiens
  CDR3 for beta chain variable domain of TCR clone 85688 (TRBV7-2, TRBJ2-7)
CASRSQGAAYEQYF

SEQ ID NO: 171377 - protein, 14 aa, Homo sapiens
  CDR3 for alpha chain variable domain of TCR clone 85689 (TRAV9-2, TRAJ6)
CALSDPGGSYIPPF

SEQ ID NO: 171378 - protein, 16 aa, Homo sapiens
  CDR3 for beta chain variable domain of TCR clone 85689 (TRBV19, TRBJ2-2)
CASRSPGTGATGELFF

SEQ ID NO: 171379 - protein, 12 aa, Homo sapiens
  CDR3 for alpha chain variable domain of TCR clone 85690 (TRAV17, TRAJ53)
CATEGSNYKLTF

SEQ ID NO: 171380 - protein, 19 aa, Homo sapiens
  CDR3 for beta chain variable domain of TCR clone 85690 (TRBV5-1, TRBJ2-3)
CASSLWTSEGITTPDTQYF

SEQ ID NO: 171381 - protein, 11 aa, Homo sapiens
  CDR3 for alpha chain variable domain of TCR clone 85691 (TRAV21, TRAJ11)
CAVNGYSTLTF

SEQ ID NO: 171382 - protein, 11 aa, Homo sapiens
  CDR3 for beta chain variable domain of TCR clone 85691 (TRBV19, TRBJ1-1)
CASSIGSGDFF

SEQ ID NO: 171383 - protein, 12 aa, Homo sapiens
  CDR3 for alpha chain variable domain of TCR clone 85692 (TRAV21, TRAJ29)
CAVTSGNTPLVF

SEQ ID NO: 171384 - protein, 15 aa, Homo sapiens
  CDR3 for beta chain variable domain of TCR clone 85692 (TRBV12-4, TRBJ1-2)
CASRLGVAGNYGNTF

SEQ ID NO: 171385 - protein, 12 aa, Homo sapiens
  CDR3 for alpha chain variable domain of TCR clone 85693 (TRAV17, TRAJ20)
CTTDRYDYKLSF

SEQ ID NO: 171386 - protein, 14 aa, Homo sapiens
  CDR3 for beta chain variable domain of TCR clone 85693 (TRBV19, TRBJ2-1)
CASPTFVLSGEQFF

SEQ ID NO: 171387 - protein, 12 aa, Homo sapiens
  CDR3 for alpha chain variable domain of TCR clone 85694 (TRAV13-2, TRAJ23)
CAERHRGGKLIF

SEQ ID NO: 171388 - protein, 13 aa, Homo sapiens
  CDR3 for beta chain variable domain of TCR clone 85694 (TRBV5-5, TRBJ1-2)
CASSFWRGEDYTF

SEQ ID NO: 171389 - protein, 14 aa, Homo sapiens
  CDR3 for alpha chain variable domain of TCR clone 85695 (TRAV12-3, TRAJ10)
SHLHLTGGGNKLTF

SEQ ID NO: 171390 - protein, 15 aa, Homo sapiens
  CDR3 for beta chain variable domain of TCR clone 85695 (TRBV7-9, TRBJ1-6)
CASSSPGRGNSPLHF

SEQ ID NO: 171391 - protein, 12 aa, Homo sapiens
  CDR3 for alpha chain variable domain of TCR clone 85696 (TRAV21, TRAJ33)
CAKMDSNYQLIW

SEQ ID NO: 171392 - protein, 13 aa, Homo sapiens
  CDR3 for beta chain variable domain of TCR clone 85696 (TRBV2, TRBJ2-7)
CQQPTSGGYEQYF

SEQ ID NO: 171393 - protein, 14 aa, Homo sapiens
  CDR3 for alpha chain variable domain of TCR clone 85697 (TRAV17, TRAJ45)
CATASGGGADGLTF

SEQ ID NO: 171394 - protein, 14 aa, Homo sapiens
  CDR3 for beta chain variable domain of TCR clone 85697 (TRBV7-8, TRBJ2-3)
CASSLEAGTDTQYF

SEQ ID NO: 171395 - protein, 13 aa, Homo sapiens
  CDR3 for alpha chain variable domain of TCR clone 85698 (TRAV26-1, TRAJ30)
CIVNMNRDDKIIL

SEQ ID NO: 171396 - protein, 16 aa, Homo sapiens
  CDR3 for beta chain variable domain of TCR clone 85698 (TRBV16, TRBJ2-7)
CASSRPAGGSSYEQYF

SEQ ID NO: 171397 - protein, 14 aa, Homo sapiens
  CDR3 for alpha chain variable domain of TCR clone 85699 (TRAV13-2, TRAJ22)
CADGTLGSARQLTF

SEQ ID NO: 171398 - protein, 14 aa, Homo sapiens
  CDR3 for beta chain variable domain of TCR clone 85699 (TRBV19, TRBJ2-1)
CASPTFVLSGEQFF

SEQ ID NO: 171399 - protein, 12 aa, Homo sapiens
  CDR3 for alpha chain variable domain of TCR clone 85700 (TRAV8-3, TRAJ20)
CAVGANDYKLSF

SEQ ID NO: 171400 - protein, 20 aa, Homo sapiens
  CDR3 for beta chain variable domain of TCR clone 85700 (TRBV7-9, TRBJ2-7)
QRTEQGDSAMYLCAWGEQYF

SEQ ID NO: 171401 - protein, 14 aa, Homo sapiens
  CDR3 for alpha chain variable domain of TCR clone 85701 (TRAV13-1, TRAJ13)
CAASRVGGYQKVTF

SEQ ID NO: 171402 - protein, 16 aa, Homo sapiens
  CDR3 for beta chain variable domain of TCR clone 85701 (TRBV12-5, TRBJ2-5)
CASGPRTSGNQETQYF

SEQ ID NO: 171403 - protein, 12 aa, Homo sapiens
  CDR3 for alpha chain variable domain of TCR clone 85702 (TRAV12-3, TRAJ20)
CAMVRGDYKLSF

SEQ ID NO: 171404 - protein, 14 aa, Homo sapiens
  CDR3 for beta chain variable domain of TCR clone 85702 (TRBV20-1, TRBJ2-1)
CSAWDRLSYNEQFF

SEQ ID NO: 171405 - protein, 12 aa, Homo sapiens
  CDR3 for alpha chain variable domain of TCR clone 85703 (TRAV13-1, TRAJ21)
CAAKEGFNKFYF

SEQ ID NO: 171406 - protein, 15 aa, Homo sapiens
  CDR3 for beta chain variable domain of TCR clone 85703 (TRBV20-1, TRBJ1-4)
CSARREWGVNEKLFF

SEQ ID NO: 171407 - protein, 14 aa, Homo sapiens
  CDR3 for alpha chain variable domain of TCR clone 85704 (TRAV12-3, TRAJ10)
SHLPLTGGGNKLTF

SEQ ID NO: 171408 - protein, 15 aa, Homo sapiens
  CDR3 for beta chain variable domain of TCR clone 85704 (TRBV4-3, TRBJ1-1)
CASSQEPGRGTEAFF

SEQ ID NO: 171409 - protein, 14 aa, Homo sapiens
  CDR3 for alpha chain variable domain of TCR clone 85705 (TRAV1-2, TRAJ6)
CAVSLSGGSYIPTF

SEQ ID NO: 171410 - protein, 17 aa, Homo sapiens
  CDR3 for beta chain variable domain of TCR clone 85705 (TRBV28, TRBJ2-7)
CASSPGGRGFTSSTSGR

SEQ ID NO: 171411 - protein, 13 aa, Homo sapiens
  CDR3 for alpha chain variable domain of TCR clone 85706 (TRAV8-3, TRAJ20)
CAVGRPNDYKLSF

SEQ ID NO: 171412 - protein, 14 aa, Homo sapiens
  CDR3 for beta chain variable domain of TCR clone 85706 (TRBV12-5, TRBJ2-5)
RASGSRTHQETQYF

SEQ ID NO: 171413 - protein, 14 aa, Homo sapiens
  CDR3 for alpha chain variable domain of TCR clone 85707 (TRAV8-3, TRAJ30)
CAVGDMNRDDTIIF

SEQ ID NO: 171414 - protein, 17 aa, Homo sapiens
  CDR3 for beta chain variable domain of TCR clone 85707 (TRBV19, TRBJ2-2)
CASSRNPGGFGTGELFF

SEQ ID NO: 171415 - protein, 20 aa, Homo sapiens
  CDR3 for alpha chain variable domain of TCR clone 85708 (TRAV1-2, TRAJ34)
LLKELQMKDSASPNTDKLIF

SEQ ID NO: 171416 - protein, 20 aa, Homo sapiens
  CDR3 for beta chain variable domain of TCR clone 85708 (TRBV7-8, TRBJ2-2)
CASSHLFPGPTIHITGELFF

SEQ ID NO: 171417 - protein, 13 aa, Homo sapiens
  CDR3 for alpha chain variable domain of TCR clone 85709 (TRAV27, TRAJ49)
CAPRPYTGNQFYF

SEQ ID NO: 171418 - protein, 16 aa, Homo sapiens
  CDR3 for beta chain variable domain of TCR clone 85709 (TRBV4-1, TRBJ1-2)
CASSQDAGQVLYGYNF

SEQ ID NO: 171419 - protein, 15 aa, Homo sapiens
  CDR3 for alpha chain variable domain of TCR clone 85710 (TRAV8-2, TRAJ15)
CVVTMGNQAGTALIF

SEQ ID NO: 171420 - protein, 15 aa, Homo sapiens
  CDR3 for beta chain variable domain of TCR clone 85710 (TRBV5-1, TRBJ2-1)
CASSPPRAPYNEQFF

SEQ ID NO: 171421 - protein, 14 aa, Homo sapiens
  CDR3 for alpha chain variable domain of TCR clone 85711 (TRAV12-3, TRAJ10)
SHLPLTGGGNKLTF

SEQ ID NO: 171422 - protein, 15 aa, Homo sapiens
  CDR3 for beta chain variable domain of TCR clone 85711 (TRBV20-1, TRBJ2-3)
CSAEPLAGHGDTQYF

SEQ ID NO: 171423 - protein, 16 aa, Homo sapiens
  CDR3 for alpha chain variable domain of TCR clone 85712 (TRAV16, TRAJ4)
CALSRMFSGGYNKLIF

SEQ ID NO: 171424 - protein, 17 aa, Homo sapiens
  CDR3 for beta chain variable domain of TCR clone 85712 (TRBV20-1, TRBJ2-2)
CSASGSGQGGLTGELFF

SEQ ID NO: 171425 - protein, 13 aa, Homo sapiens
  CDR3 for alpha chain variable domain of TCR clone 85713 (TRAV17, TRAJ5)
CAPMDTGRRALTF

SEQ ID NO: 171426 - protein, 13 aa, Homo sapiens
  CDR3 for beta chain variable domain of TCR clone 85713 (TRBV10-2, TRBJ2-7)
CASGTSGGYEQYF

SEQ ID NO: 171427 - protein, 13 aa, Homo sapiens
  CDR3 for alpha chain variable domain of TCR clone 85714 (TRAV3, TRAJ43)
CAVKARNNNDMRF

SEQ ID NO: 171428 - protein, 13 aa, Homo sapiens
  CDR3 for beta chain variable domain of TCR clone 85714 (TRBV7-9, TRBJ1-2)
CASSLKQNYGYTF

SEQ ID NO: 171429 - protein, 15 aa, Homo sapiens
  CDR3 for alpha chain variable domain of TCR clone 85715 (TRAV19, TRAJ9)
CALSLPDTGGFKTIF

SEQ ID NO: 171430 - protein, 17 aa, Homo sapiens
  CDR3 for beta chain variable domain of TCR clone 85715 (TRBV20-1, TRBJ2-1)
CSARDPLAGVWDNEQSF

SEQ ID NO: 171431 - protein, 17 aa, Homo sapiens
  CDR3 for alpha chain variable domain of TCR clone 85716 (TRAV13-2, TRAJ5)
CAESVVIVGHGQESTYF

SEQ ID NO: 171432 - protein, 18 aa, Homo sapiens
  CDR3 for beta chain variable domain of TCR clone 85716 (TRBV4-1, TRBJ2-3)
CASSHQLAGGRSTGTQYF

SEQ ID NO: 171433 - protein, 13 aa, Homo sapiens
  CDR3 for alpha chain variable domain of TCR clone 85717 (TRAV13-1, TRAJ21)
CAASIYNFNKFYF

SEQ ID NO: 171434 - protein, 13 aa, Homo sapiens
  CDR3 for beta chain variable domain of TCR clone 85717 (TRBV7-2, TRBJ2-7)
CASSSPSGSEQYF

SEQ ID NO: 171435 - protein, 12 aa, Homo sapiens
  CDR3 for alpha chain variable domain of TCR clone 85718 (TRAV12-3, TRAJ17)
CAMTLTGNKLTF

SEQ ID NO: 171436 - protein, 15 aa, Homo sapiens
  CDR3 for beta chain variable domain of TCR clone 85718 (TRBV5-1, TRBJ2-7)
CASSLDLTSSYEQYF

SEQ ID NO: 171437 - protein, 13 aa, Homo sapiens
  CDR3 for alpha chain variable domain of TCR clone 85719 (TRAV12-1, TRAJ6)
CVVYPGGSYIPSF

SEQ ID NO: 171438 - protein, 13 aa, Homo sapiens
  CDR3 for beta chain variable domain of TCR clone 85719 (TRBV4-2, TRBJ1-1)
CASSQAGNTEAFF

SEQ ID NO: 171439 - protein, 16 aa, Homo sapiens
  CDR3 for alpha chain variable domain of TCR clone 85720 (TRAV8-3, TRAJ52)
CAVQPAGGTSYGKLKF

SEQ ID NO: 171440 - protein, 15 aa, Homo sapiens
  CDR3 for beta chain variable domain of TCR clone 85720 (TRBV11-2, TRBJ2-7)
CASSLAGGVATEQYF

SEQ ID NO: 171441 - protein, 12 aa, Homo sapiens
  CDR3 for alpha chain variable domain of TCR clone 85721 (TRAV8-3, TRAJ9)
CCLNTGGFKTIF

SEQ ID NO: 171442 - protein, 16 aa, Homo sapiens
  CDR3 for beta chain variable domain of TCR clone 85721 (TRBV7-9, TRBJ2-5)
CASSPSGQGVKGTQYF

SEQ ID NO: 171443 - protein, 16 aa, Homo sapiens
  CDR3 for alpha chain variable domain of TCR clone 85722 (TRAV3, TRAJ37)
CAVRPHGSGNTGKLIF

SEQ ID NO: 171444 - protein, 16 aa, Homo sapiens
  CDR3 for beta chain variable domain of TCR clone 85722 (TRBV9, TRBJ1-2)
SASSVEEKVSPYGYTF

SEQ ID NO: 171445 - protein, 12 aa, Homo sapiens
  CDR3 for alpha chain variable domain of TCR clone 85723 (TRAV8-4, TRAJ43)
CAVSVNNNDMRF

SEQ ID NO: 171446 - protein, 15 aa, Homo sapiens
  CDR3 for beta chain variable domain of TCR clone 85723 (TRBV11-3, TRBJ2-3)
CASLKDGREGDTQYF

SEQ ID NO: 171447 - protein, 14 aa, Homo sapiens
  CDR3 for alpha chain variable domain of TCR clone 85724 (TRAV16, TRAJ33)
CALSAMDSNYQLIW

SEQ ID NO: 171448 - protein, 12 aa, Homo sapiens
  CDR3 for beta chain variable domain of TCR clone 85724 (TRBV5-1, TRBJ1-2)
CASSQDTYGYIF

SEQ ID NO: 171449 - protein, 11 aa, Homo sapiens
  CDR3 for alpha chain variable domain of TCR clone 85725 (TRAV21, TRAJ39)
LPVNAGNMLTF

SEQ ID NO: 171450 - protein, 18 aa, Homo sapiens
  CDR3 for beta chain variable domain of TCR clone 85725 (TRBV7-2, TRBJ2-7)
CASSLSGRGLAGGYEQYF

SEQ ID NO: 171451 - protein, 15 aa, Homo sapiens
  CDR3 for alpha chain variable domain of TCR clone 85726 (TRAV2, TRAJ15)
CAVEDREEAGTALIF

SEQ ID NO: 171452 - protein, 13 aa, Homo sapiens
  CDR3 for beta chain variable domain of TCR clone 85726 (TRBV10-2, TRBJ2-3)
CASSESGDHTQYF

SEQ ID NO: 171453 - protein, 11 aa, Homo sapiens
  CDR3 for alpha chain variable domain of TCR clone 85727 (TRAV12-3, TRAJ43)
CAMSVSNDMRF

SEQ ID NO: 171454 - protein, 16 aa, Homo sapiens
  CDR3 for beta chain variable domain of TCR clone 85727 (TRBV19, TRBJ2-3)
CASSPEWDRGTDTQYF

SEQ ID NO: 171455 - protein, 16 aa, Homo sapiens
  CDR3 for alpha chain variable domain of TCR clone 85728 (TRAV3, TRAJ10)
CAVRDMRAGGGNKLTF

SEQ ID NO: 171456 - protein, 12 aa, Homo sapiens
  CDR3 for beta chain variable domain of TCR clone 85728 (TRBV28, TRBJ2-1)
CASKTSGNEQFF

SEQ ID NO: 171457 - protein, 15 aa, Homo sapiens
  CDR3 for alpha chain variable domain of TCR clone 85729 (TRAV36/DV7, TRAJ53)
WEGENSGGSNYKLTF

SEQ ID NO: 171458 - protein, 16 aa, Homo sapiens
  CDR3 for beta chain variable domain of TCR clone 85729 (TRBV20-1, TRBJ1-2)
CSASMGQGVANYGYTF

SEQ ID NO: 171459 - protein, 12 aa, Homo sapiens
  CDR3 for alpha chain variable domain of TCR clone 85730 (TRAV27, TRAJ42)
CAGGGRQGNLIF

SEQ ID NO: 171460 - protein, 13 aa, Homo sapiens
  CDR3 for beta chain variable domain of TCR clone 85730 (TRBV19, TRBJ2-7)
CASSIRSSYEQYF

SEQ ID NO: 171461 - protein, 13 aa, Homo sapiens
  CDR3 for alpha chain variable domain of TCR clone 85731 (TRAV10, TRAJ40)
CVVSALGTYKYIS

SEQ ID NO: 171462 - protein, 13 aa, Homo sapiens
  CDR3 for beta chain variable domain of TCR clone 85731 (TRBV20-1, TRBJ2-3)
CSARLAGTDTQYF

SEQ ID NO: 171463 - protein, 13 aa, Homo sapiens
  CDR3 for alpha chain variable domain of TCR clone 85732 (TRAV23/DV6, TRAJ15)
CASLPAGRNCSDL

SEQ ID NO: 171464 - protein, 14 aa, Homo sapiens
  CDR3 for beta chain variable domain of TCR clone 85732 (TRBV7-9, TRBJ1-2)
CASSRQGANYGYTF

SEQ ID NO: 171465 - protein, 18 aa, Homo sapiens
  CDR3 for alpha chain variable domain of TCR clone 85733 (TRAV21, TRAJ52)
CAVRPSPAGGTSYGKLTF

SEQ ID NO: 171466 - protein, 15 aa, Homo sapiens
  CDR3 for beta chain variable domain of TCR clone 85733 (TRBV19, TRBJ2-1)
CASSIQATSYNEQFF

SEQ ID NO: 171467 - protein, 16 aa, Homo sapiens
  CDR3 for alpha chain variable domain of TCR clone 85734 (TRAV21, TRAJ52)
CAVTNAGGTSYGKLTF

SEQ ID NO: 171468 - protein, 11 aa, Homo sapiens
  CDR3 for beta chain variable domain of TCR clone 85734 (TRBV2, TRBJ1-1)
CASREGTEDFF

SEQ ID NO: 171469 - protein, 15 aa, Homo sapiens
  CDR3 for alpha chain variable domain of TCR clone 85735 (TRAV2, TRAJ9)
CAVEDRGTGGFQTIF

SEQ ID NO: 171470 - protein, 13 aa, Homo sapiens
  CDR3 for beta chain variable domain of TCR clone 85735 (TRBV20-1, TRBJ1-1)
CSARGGGNTEAFF

SEQ ID NO: 171471 - protein, 13 aa, Homo sapiens
  CDR3 for alpha chain variable domain of TCR clone 85736 (TRAV27, TRAJ53)
CAGQGGSNYKLTF

SEQ ID NO: 171472 - protein, 11 aa, Homo sapiens
  CDR3 for beta chain variable domain of TCR clone 85736 (TRBV29-1, TRBJ2-5)
CSEDRTGTQYF

SEQ ID NO: 171473 - protein, 13 aa, Homo sapiens
  CDR3 for alpha chain variable domain of TCR clone 85737 (TRAV12-2, TRAJ10)
CAVPTGGGNKLTF

SEQ ID NO: 171474 - protein, 13 aa, Homo sapiens
  CDR3 for beta chain variable domain of TCR clone 85737 (TRBV7-9, TRBJ1-4)
CATQIGPNEKLFF

SEQ ID NO: 171475 - protein, 16 aa, Homo sapiens
  CDR3 for alpha chain variable domain of TCR clone 85738 (TRAV17, TRAJ45)
CATEGYSGGGADGLTF

SEQ ID NO: 171476 - protein, 15 aa, Homo sapiens
  CDR3 for beta chain variable domain of TCR clone 85738 (TRBV5-1, TRBJ1-2)
CASSWTGQGVYGYTF

SEQ ID NO: 171477 - protein, 15 aa, Homo sapiens
  CDR3 for alpha chain variable domain of TCR clone 85739 (TRAV36/DV7, TRAJ54)
CAVEKPVQVAQKLVF

SEQ ID NO: 171478 - protein, 14 aa, Homo sapiens
  CDR3 for beta chain variable domain of TCR clone 85739 (TRBV4-3, TRBJ2-2)
CASSQGHVTGELFF

SEQ ID NO: 171479 - protein, 17 aa, Homo sapiens
  CDR3 for alpha chain variable domain of TCR clone 85740 (TRAV3, TRAJ6)
CAVRDGPRAGGSYIPTF

SEQ ID NO: 171480 - protein, 17 aa, Homo sapiens
  CDR3 for beta chain variable domain of TCR clone 85740 (TRBV28, TRBJ2-7)
CASSPLPAGGKSYEQYF

SEQ ID NO: 171481 - protein, 13 aa, Homo sapiens
  CDR3 for alpha chain variable domain of TCR clone 85741 (TRAV8-3, TRAJ48)
CAVVPFGNEKLTF

SEQ ID NO: 171482 - protein, 14 aa, Homo sapiens
  CDR3 for beta chain variable domain of TCR clone 85741 (TRBV18, TRBJ2-7)
CASSPRGGAYEQHF

SEQ ID NO: 171483 - protein, 13 aa, Homo sapiens
  CDR3 for alpha chain variable domain of TCR clone 85742 (TRAV20, TRAJ21)
CAVEGYNFNKFYF

SEQ ID NO: 171484 - protein, 15 aa, Homo sapiens
  CDR3 for beta chain variable domain of TCR clone 85742 (TRBV7-9, TRBJ1-5)
CASSQGHQPNQPQHF

SEQ ID NO: 171485 - protein, 12 aa, Homo sapiens
  CDR3 for alpha chain variable domain of TCR clone 85743 (TRAV12-3, TRAJ16)
CAMGCRSCSLQG

SEQ ID NO: 171486 - protein, 12 aa, Homo sapiens
  CDR3 for beta chain variable domain of TCR clone 85743 (TRBV12-4, TRBJ2-7)
CASSLGGYEQYF

SEQ ID NO: 171487 - protein, 14 aa, Homo sapiens
  CDR3 for alpha chain variable domain of TCR clone 85744 (TRAV1-2, TRAJ16)
CAVNRFSDGQKLLF

SEQ ID NO: 171488 - protein, 20 aa, Homo sapiens
  CDR3 for beta chain variable domain of TCR clone 85744 (TRBV4-1, TRBJ2-2)
CASSQASPPGLASNTGELFF

SEQ ID NO: 171489 - protein, 14 aa, Homo sapiens
  CDR3 for alpha chain variable domain of TCR clone 85745 (TRAV12-3, TRAJ54)
CAMRGIQGAQKLVF

SEQ ID NO: 171490 - protein, 11 aa, Homo sapiens
  CDR3 for beta chain variable domain of TCR clone 85745 (TRBV29-1, TRBJ2-5)
CSEDRTGTQYF

SEQ ID NO: 171491 - protein, 15 aa, Homo sapiens
  CDR3 for alpha chain variable domain of TCR clone 85746 (TRAV12-3, TRAJ6)
CAMSPASGGSYIPTF

SEQ ID NO: 171492 - protein, 12 aa, Homo sapiens
  CDR3 for beta chain variable domain of TCR clone 85746 (TRBV11-2, TRBJ2-2)
CASSLGGGELFF

SEQ ID NO: 171493 - protein, 12 aa, Homo sapiens
  CDR3 for alpha chain variable domain of TCR clone 85747 (TRAV25, TRAJ9)
CAGNTGGFKTIF

SEQ ID NO: 171494 - protein, 15 aa, Homo sapiens
  CDR3 for beta chain variable domain of TCR clone 85747 (TRBV7-9, TRBJ2-1)
CASSLGWGRANEQFF

SEQ ID NO: 171495 - protein, 17 aa, Homo sapiens
  CDR3 for alpha chain variable domain of TCR clone 85748 (TRAV3, TRAJ12)
CAVRDGGRMDSSYKLIL

SEQ ID NO: 171496 - protein, 12 aa, Homo sapiens
  CDR3 for beta chain variable domain of TCR clone 85748 (TRBV11-2, TRBJ2-2)
CASSLGGGELFF

SEQ ID NO: 171497 - protein, 16 aa, Homo sapiens
  CDR3 for alpha chain variable domain of TCR clone 85749 (TRAV30, TRAJ24)
CGTEIVDADSWGKFQF

SEQ ID NO: 171498 - protein, 14 aa, Homo sapiens
  CDR3 for beta chain variable domain of TCR clone 85749 (TRBV7-2, TRBJ1-6)
CASSLQGANSPLHF

SEQ ID NO: 171499 - protein, 14 aa, Homo sapiens
  CDR3 for alpha chain variable domain of TCR clone 85750 (TRAV12-2, TRAJ40)
CAVKIPPGTYKYIF

SEQ ID NO: 171500 - protein, 15 aa, Homo sapiens
  CDR3 for beta chain variable domain of TCR clone 85750 (TRBV6-3, TRBJ2-7)
CASSSPGTVFYEQYF

SEQ ID NO: 171501 - protein, 14 aa, Homo sapiens
  CDR3 for alpha chain variable domain of TCR clone 85751 (TRAV35, TRAJ33)
CAGSSQDSNYQLIW

SEQ ID NO: 171502 - protein, 16 aa, Homo sapiens
  CDR3 for beta chain variable domain of TCR clone 85751 (TRBV27, TRBJ2-1)
CASSLSKGFGLDEQFF

SEQ ID NO: 171503 - protein, 18 aa, Homo sapiens
  CDR3 for alpha chain variable domain of TCR clone 85752 (TRAV12-3, TRAJ52)
CAMSVGGAGGTSYGKLTF

SEQ ID NO: 171504 - protein, 16 aa, Homo sapiens
  CDR3 for beta chain variable domain of TCR clone 85752 (TRBV28, TRBJ2-7)
CASSPWVATGDLSQYF

SEQ ID NO: 171505 - protein, 14 aa, Homo sapiens
  CDR3 for alpha chain variable domain of TCR clone 85753 (TRAV26-1, TRAJ38)
CIADNAGNNRKPIL

SEQ ID NO: 171506 - protein, 13 aa, Homo sapiens
  CDR3 for beta chain variable domain of TCR clone 85753 (TRBV20-1, TRBJ1-1)
CSARGGGNTEAFF

SEQ ID NO: 171507 - protein, 12 aa, Homo sapiens
  CDR3 for alpha chain variable domain of TCR clone 85754 (TRAV12-3, TRAJ17)
CAMTLTGNKLTF

SEQ ID NO: 171508 - protein, 13 aa, Homo sapiens
  CDR3 for beta chain variable domain of TCR clone 85754 (TRBV6-1, TRBJ1-5)
CASTSVGDQPQHF

SEQ ID NO: 171509 - protein, 13 aa, Homo sapiens
  CDR3 for alpha chain variable domain of TCR clone 85755 (TRAV26-2, TRAJ54)
CIPRVGEAQKLVF

SEQ ID NO: 171510 - protein, 16 aa, Homo sapiens
  CDR3 for beta chain variable domain of TCR clone 85755 (TRBV4-1, TRBJ1-1)
CASSSMSERPNTEAFF

SEQ ID NO: 171511 - protein, 13 aa, Homo sapiens
  CDR3 for alpha chain variable domain of TCR clone 85756 (TRAV8-3, TRAJ4)
WVFYSSGYNKLIF

SEQ ID NO: 171512 - protein, 16 aa, Homo sapiens
  CDR3 for beta chain variable domain of TCR clone 85756 (TRBV7-8, TRBJ2-3)
CASSTEGQRETDTQYF

SEQ ID NO: 171513 - protein, 10 aa, Homo sapiens
  CDR3 for alpha chain variable domain of TCR clone 85757 (TRAV1-2, TRAJ31)
CAFFDARLMF

SEQ ID NO: 171514 - protein, 13 aa, Homo sapiens
  CDR3 for beta chain variable domain of TCR clone 85757 (TRBV12-4, TRBJ2-5)
CASSLGGSRTQYF

SEQ ID NO: 171515 - protein, 12 aa, Homo sapiens
  CDR3 for alpha chain variable domain of TCR clone 85758 (TRAV21, TRAJ58)
CAAETSGSRLTF

SEQ ID NO: 171516 - protein, 15 aa, Homo sapiens
  CDR3 for beta chain variable domain of TCR clone 85758 (TRBV20-1, TRBJ2-7)
CSARDPVEGEGEQYF

SEQ ID NO: 171517 - protein, 12 aa, Homo sapiens
  CDR3 for alpha chain variable domain of TCR clone 85759 (TRAV21, TRAJ11)
CAATSGYSTLTF

SEQ ID NO: 171518 - protein, 15 aa, Homo sapiens
  CDR3 for beta chain variable domain of TCR clone 85759 (TRBV5-1, TRBJ2-1)
CASSPPRAPYNEQFF

SEQ ID NO: 171519 - protein, 12 aa, Homo sapiens
  CDR3 for alpha chain variable domain of TCR clone 85760 (TRAV12-3, TRAJ20)
CAMVRGDYKLSF

SEQ ID NO: 171520 - protein, 16 aa, Homo sapiens
  CDR3 for beta chain variable domain of TCR clone 85760 (TRBV5-1, TRBJ1-5)
FAPAACLDRDNQPQHF

SEQ ID NO: 171521 - protein, 12 aa, Homo sapiens
  CDR3 for alpha chain variable domain of TCR clone 85761 (TRAV35, TRAJ43)
CAGAYNNNDMRF

SEQ ID NO: 171522 - protein, 13 aa, Homo sapiens
  CDR3 for beta chain variable domain of TCR clone 85761 (TRBV20-1, TRBJ2-5)
CSAREAFQEAQYF

SEQ ID NO: 171523 - protein, 15 aa, Homo sapiens
  CDR3 for alpha chain variable domain of TCR clone 85762 (TRAV26-1, TRAJ12)
IASSELMDSSYKLIF

SEQ ID NO: 171524 - protein, 11 aa, Homo sapiens
  CDR3 for beta chain variable domain of TCR clone 85762 (TRBV7-9, TRBJ2-3)
CASSPPDTKYF

SEQ ID NO: 171525 - protein, 13 aa, Homo sapiens
  CDR3 for alpha chain variable domain of TCR clone 85763 (TRAV17, TRAJ5)
CALRGTGRRALTF

SEQ ID NO: 171526 - protein, 11 aa, Homo sapiens
  CDR3 for beta chain variable domain of TCR clone 85763 (TRBV11-2, TRBJ2-2)
CASSLPGELFF

SEQ ID NO: 171527 - protein, 12 aa, Homo sapiens
  CDR3 for alpha chain variable domain of TCR clone 85764 (TRAV17, TRAJ49)
CATVTTGNQFYF

SEQ ID NO: 171528 - protein, 11 aa, Homo sapiens
  CDR3 for beta chain variable domain of TCR clone 85764 (TRBV7-2, TRBJ2-3)
CASSSSDTQYF

SEQ ID NO: 171529 - protein, 13 aa, Homo sapiens
  CDR3 for alpha chain variable domain of TCR clone 85765 (TRAV8-3, TRAJ31)
CVVGARNNARLMF

SEQ ID NO: 171530 - protein, 14 aa, Homo sapiens
  CDR3 for beta chain variable domain of TCR clone 85765 (TRBV12-5, TRBJ2-5)
CASGSRTHQETQYF

SEQ ID NO: 171531 - protein, 15 aa, Homo sapiens
  CDR3 for alpha chain variable domain of TCR clone 85766 (TRAV26-1, TRAJ44)
CIVRANTGTASKLTF

SEQ ID NO: 171532 - protein, 15 aa, Homo sapiens
  CDR3 for beta chain variable domain of TCR clone 85766 (TRBV10-2, TRBJ2-6)
CASSEQGTGANVLTF

SEQ ID NO: 171533 - protein, 15 aa, Homo sapiens
  CDR3 for alpha chain variable domain of TCR clone 85767 (TRAV8-6, TRAJ6)
CAVRDASGGSYIPTF

SEQ ID NO: 171534 - protein, 13 aa, Homo sapiens
  CDR3 for beta chain variable domain of TCR clone 85767 (TRBV7-9, TRBJ1-2)
CASSLKQNYGYTF

SEQ ID NO: 171535 - protein, 16 aa, Homo sapiens
  CDR3 for alpha chain variable domain of TCR clone 85768 (TRAV30, TRAJ24)
CGTEIVDADSWGKFQF

SEQ ID NO: 171536 - protein, 14 aa, Homo sapiens
  CDR3 for beta chain variable domain of TCR clone 85768 (TRBV7-3, TRBJ2-3)
CASSPGASRDTQYF

SEQ ID NO: 171537 - protein, 12 aa, Homo sapiens
  CDR3 for alpha chain variable domain of TCR clone 85769 (TRAV13-1, TRAJ21)
CAAKEGFNKFYF

SEQ ID NO: 171538 - protein, 14 aa, Homo sapiens
  CDR3 for beta chain variable domain of TCR clone 85769 (TRBV5-1, TRBJ1-1)
CASSLQGASTEAFF

SEQ ID NO: 171539 - protein, 17 aa, Homo sapiens
  CDR3 for alpha chain variable domain of TCR clone 85770 (TRAV27, TRAJ57)
CAGERGCTQGGSEKLVF

SEQ ID NO: 171540 - protein, 15 aa, Homo sapiens
  CDR3 for beta chain variable domain of TCR clone 85770 (TRBV27, TRBJ1-6)
CASSFDRGLGSPLHF

SEQ ID NO: 171541 - protein, 16 aa, Homo sapiens
  CDR3 for alpha chain variable domain of TCR clone 85771 (TRAV8-3, TRAJ13)
CAVGAYPSGGYQKVTF

SEQ ID NO: 171542 - protein, 15 aa, Homo sapiens
  CDR3 for beta chain variable domain of TCR clone 85771 (TRBV19, TRBJ1-5)
CASSIAWADNQPQHF

SEQ ID NO: 171543 - protein, 15 aa, Homo sapiens
  CDR3 for alpha chain variable domain of TCR clone 85772 (TRAV4, TRAJ39)
CLVGPNNNAGNMLTF

SEQ ID NO: 171544 - protein, 13 aa, Homo sapiens
  CDR3 for beta chain variable domain of TCR clone 85772 (TRBV11-2, TRBJ2-5)
CASSSTGVETQYF

SEQ ID NO: 171545 - protein, 15 aa, Homo sapiens
  CDR3 for alpha chain variable domain of TCR clone 85773 (TRAV35, TRAJ44)
CAGQFKAGTASKLTF

SEQ ID NO: 171546 - protein, 15 aa, Homo sapiens
  CDR3 for beta chain variable domain of TCR clone 85773 (TRBV9, TRBJ1-6)
CASSVAGTGDSPLHF

SEQ ID NO: 171547 - protein, 14 aa, Homo sapiens
  CDR3 for alpha chain variable domain of TCR clone 85774 (TRAV12-2, TRAJ3)
CAVNGYSSASKIIF

SEQ ID NO: 171548 - protein, 12 aa, Homo sapiens
  CDR3 for beta chain variable domain of TCR clone 85774 (TRBV29-1, TRBJ2-3)
CSVTGGADTQYF

SEQ ID NO: 171549 - protein, 14 aa, Homo sapiens
  CDR3 for alpha chain variable domain of TCR clone 85775 (TRAV27, TRAJ44)
CAGARTGTASKLTF

SEQ ID NO: 171550 - protein, 12 aa, Homo sapiens
  CDR3 for beta chain variable domain of TCR clone 85775 (TRBV11-2, TRBJ2-2)
CASSLGGGELFF

SEQ ID NO: 171551 - protein, 15 aa, Homo sapiens
  CDR3 for alpha chain variable domain of TCR clone 85776 (TRAV13-2, TRAJ23)
CAETALWGQGGKLIF

SEQ ID NO: 171552 - protein, 17 aa, Homo sapiens
  CDR3 for beta chain variable domain of TCR clone 85776 (TRBV13, TRBJ2-3)
CASSLSRVAGGRNTQYF

SEQ ID NO: 171553 - protein, 14 aa, Homo sapiens
  CDR3 for alpha chain variable domain of TCR clone 85777 (TRAV19, TRAJ15)
CALSEDQAGTALIF

SEQ ID NO: 171554 - protein, 16 aa, Homo sapiens
  CDR3 for beta chain variable domain of TCR clone 85777 (TRBV7-9, TRBJ2-3)
CASSAWREVGTDTQYF

SEQ ID NO: 171555 - protein, 11 aa, Homo sapiens
  CDR3 for alpha chain variable domain of TCR clone 85778 (TRAV21, TRAJ41)
CALRSGYALNF

SEQ ID NO: 171556 - protein, 13 aa, Homo sapiens
  CDR3 for beta chain variable domain of TCR clone 85778 (TRBV7-9, TRBJ1-2)
CASSLKQNYGYTF

SEQ ID NO: 171557 - protein, 15 aa, Homo sapiens
  CDR3 for alpha chain variable domain of TCR clone 85779 (TRAV21, TRAJ53)
CAVRQSGGGNYKLTF

SEQ ID NO: 171558 - protein, 14 aa, Homo sapiens
  CDR3 for beta chain variable domain of TCR clone 85779 (TRBV18, TRBJ2-5)
CASSPGVSQETQYF

SEQ ID NO: 171559 - protein, 14 aa, Homo sapiens
  CDR3 for alpha chain variable domain of TCR clone 85780 (TRAV1-2, TRAJ16)
CAVNRFSDGQKLLF

SEQ ID NO: 171560 - protein, 15 aa, Homo sapiens
  CDR3 for beta chain variable domain of TCR clone 85780 (TRBV7-7, TRBJ2-2)
CATSKLAKNTGELFF

SEQ ID NO: 171561 - protein, 12 aa, Homo sapiens
  CDR3 for alpha chain variable domain of TCR clone 85781 (TRAV1-1, TRAJ30)
CAVRGRDDEIIF

SEQ ID NO: 171562 - protein, 13 aa, Homo sapiens
  CDR3 for beta chain variable domain of TCR clone 85781 (TRBV11-3, TRBJ2-7)
CASSLDKLYEQYF

SEQ ID NO: 171563 - protein, 13 aa, Homo sapiens
  CDR3 for alpha chain variable domain of TCR clone 85782 (TRAV20, TRAJ37)
CAGCSSNTGKLIF

SEQ ID NO: 171564 - protein, 15 aa, Homo sapiens
  CDR3 for beta chain variable domain of TCR clone 85782 (TRBV7-9, TRBJ1-4)
CASSRTGGFNEKLFF

SEQ ID NO: 171565 - protein, 16 aa, Homo sapiens
  CDR3 for alpha chain variable domain of TCR clone 85783 (TRAV8-6, TRAJ37)
CAVSGLGSSNTGKLIF

SEQ ID NO: 171566 - protein, 15 aa, Homo sapiens
  CDR3 for beta chain variable domain of TCR clone 85783 (TRBV20-1, TRBJ1-5)
CSARSGHSMNQPQHF

SEQ ID NO: 171567 - protein, 16 aa, Homo sapiens
  CDR3 for alpha chain variable domain of TCR clone 85784 (TRAV3, TRAJ37)
CAVRGRGSGNTGKLIF

SEQ ID NO: 171568 - protein, 17 aa, Homo sapiens
  CDR3 for beta chain variable domain of TCR clone 85784 (TRBV11-2, TRBJ2-1)
CASSLYPPGVEYNEQFF

SEQ ID NO: 171569 - protein, 14 aa, Homo sapiens
  CDR3 for alpha chain variable domain of TCR clone 85785 (TRAV12-2, TRAJ13)
WAVKKTGGYQKVTL

SEQ ID NO: 171570 - protein, 15 aa, Homo sapiens
  CDR3 for beta chain variable domain of TCR clone 85785 (TRBV27, TRBJ2-1)
CASSNGGGSSNEQFF

SEQ ID NO: 171571 - protein, 15 aa, Homo sapiens
  CDR3 for alpha chain variable domain of TCR clone 85786 (TRAV35, TRAJ50)
CAGQLRKTSYDKVIF

SEQ ID NO: 171572 - protein, 12 aa, Homo sapiens
  CDR3 for beta chain variable domain of TCR clone 85786 (TRBV5-1, TRBJ2-5)
CASSLGLETQFF

SEQ ID NO: 171573 - protein, 17 aa, Homo sapiens
  CDR3 for alpha chain variable domain of TCR clone 85787 (TRAV3, TRAJ6)
CAVRDGPRAGGSYIPTF

SEQ ID NO: 171574 - protein, 15 aa, Homo sapiens
  CDR3 for beta chain variable domain of TCR clone 85787 (TRBV28, TRBJ2-5)
CASSSGRVIQETQYF

SEQ ID NO: 171575 - protein, 15 aa, Homo sapiens
  CDR3 for alpha chain variable domain of TCR clone 85788 (TRAV29/DV5, TRAJ24)
CAASGATDSWGKFQF

SEQ ID NO: 171576 - protein, 15 aa, Homo sapiens
  CDR3 for beta chain variable domain of TCR clone 85788 (TRBV19, TRBJ1-1)
CASTSGQIQNTEAFF

SEQ ID NO: 171577 - protein, 13 aa, Homo sapiens
  CDR3 for alpha chain variable domain of TCR clone 85789 (TRAV2, TRAJ29)
RAAQNSGNTPLVF

SEQ ID NO: 171578 - protein, 14 aa, Homo sapiens
  CDR3 for beta chain variable domain of TCR clone 85789 (TRBV7-9, TRBJ2-4)
CASSLAMGGNIQYF

SEQ ID NO: 171579 - protein, 14 aa, Homo sapiens
  CDR3 for alpha chain variable domain of TCR clone 85790 (TRAV2, TRAJ37)
CAVDFTSNTGKLIF

SEQ ID NO: 171580 - protein, 15 aa, Homo sapiens
  CDR3 for beta chain variable domain of TCR clone 85790 (TRBV20-1, TRBJ2-7)
CSAESGTSGAYEQYF

SEQ ID NO: 171581 - protein, 15 aa, Homo sapiens
  CDR3 for alpha chain variable domain of TCR clone 85791 (TRAV13-1, TRAJ57)
CAESNTQGGSEKLVF

SEQ ID NO: 171582 - protein, 13 aa, Homo sapiens
  CDR3 for beta chain variable domain of TCR clone 85791 (TRBV7-6, TRBJ1-5)
CASSQGPNRPQHF

SEQ ID NO: 171583 - protein, 13 aa, Homo sapiens
  CDR3 for alpha chain variable domain of TCR clone 85792 (TRAV1-2, TRAJ9)
CAALNAGGFKTIF

SEQ ID NO: 171584 - protein, 14 aa, Homo sapiens
  CDR3 for beta chain variable domain of TCR clone 85792 (TRBV13, TRBJ2-3)
CASSSGSPTDTQYF

SEQ ID NO: 171585 - protein, 15 aa, Homo sapiens
  CDR3 for alpha chain variable domain of TCR clone 85793 (TRAV3, TRAJ22)
CAVRDRGGSARQLTF

SEQ ID NO: 171586 - protein, 16 aa, Homo sapiens
  CDR3 for beta chain variable domain of TCR clone 85793 (TRBV5-4, TRBJ2-3)
CACQQPGAGGADTQYF

SEQ ID NO: 171587 - protein, 14 aa, Homo sapiens
  CDR3 for alpha chain variable domain of TCR clone 85794 (TRAV12-2, TRAJ11)
CAVGGGSGYSTLTF

SEQ ID NO: 171588 - protein, 16 aa, Homo sapiens
  CDR3 for beta chain variable domain of TCR clone 85794 (TRBV6-1, TRBJ1-2)
CASSGAWQGRSHGYTF

SEQ ID NO: 171589 - protein, 13 aa, Homo sapiens
  CDR3 for alpha chain variable domain of TCR clone 85795 (TRAV2, TRAJ15)
CAVASQAGTALIF

SEQ ID NO: 171590 - protein, 14 aa, Homo sapiens
  CDR3 for beta chain variable domain of TCR clone 85795 (TRBV6-3, TRBJ1-1)
CASSYQRRDTEAFF

SEQ ID NO: 171591 - protein, 11 aa, Homo sapiens
  CDR3 for alpha chain variable domain of TCR clone 85796 (TRAV1-2, TRAJ20)
CAVSNDYKLSF

SEQ ID NO: 171592 - protein, 13 aa, Homo sapiens
  CDR3 for beta chain variable domain of TCR clone 85796 (TRBV7-9, TRBJ1-2)
CASSLKQNYGYAF

SEQ ID NO: 171593 - protein, 14 aa, Homo sapiens
  CDR3 for alpha chain variable domain of TCR clone 85797 (TRAV12-1, TRAJ22)
CVVKRAGSARQLTF

SEQ ID NO: 171594 - protein, 15 aa, Homo sapiens
  CDR3 for beta chain variable domain of TCR clone 85797 (TRBV27, TRBJ1-6)
CASSFDRGLGSPLHF

SEQ ID NO: 171595 - protein, 15 aa, Homo sapiens
  CDR3 for alpha chain variable domain of TCR clone 85798 (TRAV23/DV6, TRAJ18)
CAARYKGSTLGRLYF

SEQ ID NO: 171596 - protein, 13 aa, Homo sapiens
  CDR3 for beta chain variable domain of TCR clone 85798 (TRBV7-2, TRBJ2-7)
CASSSPSGSEQYF

SEQ ID NO: 171597 - protein, 11 aa, Homo sapiens
  CDR3 for alpha chain variable domain of TCR clone 85799 (TRAV2, TRAJ13)
CASGGYQKVTS

SEQ ID NO: 171598 - protein, 16 aa, Homo sapiens
  CDR3 for beta chain variable domain of TCR clone 85799 (TRBV27, TRBJ2-2)
CASSLSGFWVTGELFF

SEQ ID NO: 171599 - protein, 13 aa, Homo sapiens
  CDR3 for alpha chain variable domain of TCR clone 85800 (TRAV35, TRAJ42)
CAGFPGSQGNLIF

SEQ ID NO: 171600 - protein, 15 aa, Homo sapiens
  CDR3 for beta chain variable domain of TCR clone 85800 (TRBV12-4, TRBJ1-4)
CASSVRDSSIEKLFF

SEQ ID NO: 171601 - protein, 19 aa, Homo sapiens
  CDR3 for alpha chain variable domain of TCR clone 85801 (TRAV1-2, TRAJ18)
CLLPLCCERRGSTLVRLYF

SEQ ID NO: 171602 - protein, 13 aa, Homo sapiens
  CDR3 for beta chain variable domain of TCR clone 85801 (TRBV20-1, TRBJ1-1)
CSARVGGNTEAFF

SEQ ID NO: 171603 - protein, 14 aa, Homo sapiens
  CDR3 for alpha chain variable domain of TCR clone 85802 (TRAV12-1, TRAJ12)
CVVTSGDSSYKLIF

SEQ ID NO: 171604 - protein, 14 aa, Homo sapiens
  CDR3 for beta chain variable domain of TCR clone 85802 (TRBV12-4, TRBJ1-1)
CASSLGTGGTEAFF

SEQ ID NO: 171605 - protein, 16 aa, Homo sapiens
  CDR3 for alpha chain variable domain of TCR clone 85803 (TRAV3, TRAJ37)
CAVRGKGSGNTGKLIL

SEQ ID NO: 171606 - protein, 15 aa, Homo sapiens
  CDR3 for beta chain variable domain of TCR clone 85803 (TRBV7-3, TRBJ2-2)
CASSETGQGTGELFF

SEQ ID NO: 171607 - protein, 13 aa, Homo sapiens
  CDR3 for alpha chain variable domain of TCR clone 85804 (TRAV17, TRAJ5)
CAPMDTGRRALTF

SEQ ID NO: 171608 - protein, 15 aa, Homo sapiens
  CDR3 for beta chain variable domain of TCR clone 85804 (TRBV6-6, TRBJ2-5)
CASSPGGGLGETQYF

SEQ ID NO: 171609 - protein, 13 aa, Homo sapiens
  CDR3 for alpha chain variable domain of TCR clone 85805 (TRAV35, TRAJ33)
CAGQPYGVYQLIW

SEQ ID NO: 171610 - protein, 14 aa, Homo sapiens
  CDR3 for beta chain variable domain of TCR clone 85805 (TRBV7-2, TRBJ1-1)
CASSLGGAGTEAFF

SEQ ID NO: 171611 - protein, 12 aa, Homo sapiens
  CDR3 for alpha chain variable domain of TCR clone 85806 (TRAV21, TRAJ3)
CCFYSSVSKIIF

SEQ ID NO: 171612 - protein, 16 aa, Homo sapiens
  CDR3 for beta chain variable domain of TCR clone 85806 (TRBV19, TRBJ2-1)
CASSKAGPSSYNEQFF

SEQ ID NO: 171613 - protein, 14 aa, Homo sapiens
  CDR3 for alpha chain variable domain of TCR clone 85807 (TRAV12-2, TRAJ48)
YAVNAFFGNEKLTF

SEQ ID NO: 171614 - protein, 13 aa, Homo sapiens
  CDR3 for beta chain variable domain of TCR clone 85807 (TRBV28, TRBJ2-7)
CAGAQQGLDEQYF

SEQ ID NO: 171615 - protein, 15 aa, Homo sapiens
  CDR3 for alpha chain variable domain of TCR clone 85808 (TRAV12-3, TRAJ6)
CAMSATTGGSYIPTF

SEQ ID NO: 171616 - protein, 13 aa, Homo sapiens
  CDR3 for beta chain variable domain of TCR clone 85808 (TRBV20-1, TRBJ1-1)
CSARGGGNTEAFF

SEQ ID NO: 171617 - protein, 23 aa, Homo sapiens
  CDR3 for alpha chain variable domain of TCR clone 85809 (TRAV26-1, TRAJ38)
CIADNAGNNHIQNPDPAVYQLRD

SEQ ID NO: 171618 - protein, 17 aa, Homo sapiens
  CDR3 for beta chain variable domain of TCR clone 85809 (TRBV11-2, TRBJ2-1)
CASSLYPPGVEYNEQFF

SEQ ID NO: 171619 - protein, 12 aa, Homo sapiens
  CDR3 for alpha chain variable domain of TCR clone 85810 (TRAV29/DV5, TRAJ34)
CAASGNTDKLIF

SEQ ID NO: 171620 - protein, 20 aa, Homo sapiens
  CDR3 for beta chain variable domain of TCR clone 85810 (TRBV7-8, TRBJ2-2)
CASSHLFPGPTIHITGELFF

SEQ ID NO: 171621 - protein, 11 aa, Homo sapiens
  CDR3 for alpha chain variable domain of TCR clone 85811 (TRAV2, TRAJ21)
CAVFNFNKFYF

SEQ ID NO: 171622 - protein, 14 aa, Homo sapiens
  CDR3 for beta chain variable domain of TCR clone 85811 (TRBV15, TRBJ2-3)
CATRSGTSTDTQDF

SEQ ID NO: 171623 - protein, 13 aa, Homo sapiens
  CDR3 for alpha chain variable domain of TCR clone 85812 (TRAV21, TRAJ27)
CDARPGNAGKSTF

SEQ ID NO: 171624 - protein, 14 aa, Homo sapiens
  CDR3 for beta chain variable domain of TCR clone 85812 (TRBV7-6, TRBJ2-3)
RASSLGTVTDTQYF

SEQ ID NO: 171625 - protein, 14 aa, Homo sapiens
  CDR3 for alpha chain variable domain of TCR clone 85813 (TRAV4, TRAJ12)
CLVGDADSSYKLIF

SEQ ID NO: 171626 - protein, 15 aa, Homo sapiens
  CDR3 for beta chain variable domain of TCR clone 85813 (TRBV18, TRBJ2-7)
CASSPLQGRTYEQYF

SEQ ID NO: 171627 - protein, 18 aa, Homo sapiens
  CDR3 for alpha chain variable domain of TCR clone 85814 (TRAV12-3, TRAJ52)
CAMSRTNAGGTSYGKLTF

SEQ ID NO: 171628 - protein, 14 aa, Homo sapiens
  CDR3 for beta chain variable domain of TCR clone 85814 (TRBV12-5, TRBJ2-5)
CASGSRTHQETQYF

SEQ ID NO: 171629 - protein, 14 aa, Homo sapiens
  CDR3 for alpha chain variable domain of TCR clone 85815 (TRAV13-2, TRAJ11)
CAETGNSGYSTLTF

SEQ ID NO: 171630 - protein, 14 aa, Homo sapiens
  CDR3 for beta chain variable domain of TCR clone 85815 (TRBV3-1, TRBJ2-5)
CASSQGPDQETQYF

SEQ ID NO: 171631 - protein, 15 aa, Homo sapiens
  CDR3 for alpha chain variable domain of TCR clone 85816 (TRAV3, TRAJ22)
CAVRDWGGSARQLTF

SEQ ID NO: 171632 - protein, 15 aa, Homo sapiens
  CDR3 for beta chain variable domain of TCR clone 85816 (TRBV12-4, TRBJ2-5)
CASTLNSGRGETQYF

SEQ ID NO: 171633 - protein, 11 aa, Homo sapiens
  CDR3 for alpha chain variable domain of TCR clone 85817 (TRAV17, TRAJ9)
CGFTGGFKTIF

SEQ ID NO: 171634 - protein, 14 aa, Homo sapiens
  CDR3 for beta chain variable domain of TCR clone 85817 (TRBV7-9, TRBJ2-2)
CASSLVQDTGELFV

SEQ ID NO: 171635 - protein, 16 aa, Homo sapiens
  CDR3 for alpha chain variable domain of TCR clone 85818 (TRAV23/DV6, TRAJ52)
CAARPSGGTSYGKLTF

SEQ ID NO: 171636 - protein, 13 aa, Homo sapiens
  CDR3 for beta chain variable domain of TCR clone 85818 (TRBV7-9, TRBJ1-1)
CASSLSGESEAFF

SEQ ID NO: 171637 - protein, 22 aa, Homo sapiens
  CDR3 for alpha chain variable domain of TCR clone 85819 (TRAV12-2, TRAJ32)
CSSETPSPVIQPPKSATNKLIF

SEQ ID NO: 171638 - protein, 14 aa, Homo sapiens
  CDR3 for beta chain variable domain of TCR clone 85819 (TRBV7-3, TRBJ2-1)
CASSLSGSYNEQLF

SEQ ID NO: 171639 - protein, 18 aa, Homo sapiens
  CDR3 for alpha chain variable domain of TCR clone 85820 (TRAV21, TRAJ52)
CAVRPSPAGGTGYGKLTF

SEQ ID NO: 171640 - protein, 12 aa, Homo sapiens
  CDR3 for beta chain variable domain of TCR clone 85820 (TRBV11-2, TRBJ2-2)
CASSLGGGELFF

SEQ ID NO: 171641 - protein, 14 aa, Homo sapiens
  CDR3 for alpha chain variable domain of TCR clone 85821 (TRAV29/DV5, TRAJ36)
CAARRKTGANNLFF

SEQ ID NO: 171642 - protein, 15 aa, Homo sapiens
  CDR3 for beta chain variable domain of TCR clone 85821 (TRBV10-2, TRBJ2-6)
CASSEQGTGANVLTF

SEQ ID NO: 171643 - protein, 14 aa, Homo sapiens
  CDR3 for alpha chain variable domain of TCR clone 85822 (TRAV1-2, TRAJ8)
CAVREDTGFHKLLF

SEQ ID NO: 171644 - protein, 15 aa, Homo sapiens
  CDR3 for beta chain variable domain of TCR clone 85822 (TRBV6-3, TRBJ2-7)
CASSSPGTVFYEQYF

SEQ ID NO: 171645 - protein, 14 aa, Homo sapiens
  CDR3 for alpha chain variable domain of TCR clone 85823 (TRAV13-1, TRAJ26)
CAASSAHYGQNFVF

SEQ ID NO: 171646 - protein, 17 aa, Homo sapiens
  CDR3 for beta chain variable domain of TCR clone 85823 (TRBV25-1, TRBJ2-5)
CASGRRGGRGGQETQYF

SEQ ID NO: 171647 - protein, 17 aa, Homo sapiens
  CDR3 for alpha chain variable domain of TCR clone 85824 (TRAV38-1, TRAJ28)
CAFIPAYSGAGSYQLTF

SEQ ID NO: 171648 - protein, 14 aa, Homo sapiens
  CDR3 for beta chain variable domain of TCR clone 85824 (TRBV7-2, TRBJ2-7)
CASSPKTSFYEQYF

SEQ ID NO: 171649 - protein, 12 aa, Homo sapiens
  CDR3 for alpha chain variable domain of TCR clone 85825 (TRAV17, TRAJ57)
CATDGGSEKLVF

SEQ ID NO: 171650 - protein, 13 aa, Homo sapiens
  CDR3 for beta chain variable domain of TCR clone 85825 (TRBV7-9, TRBJ2-3)
CASSPGSTDTQYF

SEQ ID NO: 171651 - protein, 14 aa, Homo sapiens
  CDR3 for alpha chain variable domain of TCR clone 85826 (TRAV4, TRAJ20)
CLVGRRSNDYKLSF

SEQ ID NO: 171652 - protein, 18 aa, Homo sapiens
  CDR3 for beta chain variable domain of TCR clone 85826 (TRBV2, TRBJ2-5)
CAGSGDPQGRGAQETQYF

SEQ ID NO: 171653 - protein, 17 aa, Homo sapiens
  CDR3 for alpha chain variable domain of TCR clone 85827 (TRAV26-1, TRAJ53)
CIVRVDDSGGSNYKLTF

SEQ ID NO: 171654 - protein, 15 aa, Homo sapiens
  CDR3 for beta chain variable domain of TCR clone 85827 (TRBV20-1, TRBJ2-7)
CSARVPAAYCYEQYF

SEQ ID NO: 171655 - protein, 11 aa, Homo sapiens
  CDR3 for alpha chain variable domain of TCR clone 85828 (TRAV3, TRAJ26)
CAVRLWSEFCL

SEQ ID NO: 171656 - protein, 16 aa, Homo sapiens
  CDR3 for beta chain variable domain of TCR clone 85828 (TRBV11-2, TRBJ1-2)
CASSPSGREANYGYTF

SEQ ID NO: 171657 - protein, 14 aa, Homo sapiens
  CDR3 for alpha chain variable domain of TCR clone 85829 (TRAV1-2, TRAJ16)
CAVNRFSDGRKLLF

SEQ ID NO: 171658 - protein, 16 aa, Homo sapiens
  CDR3 for beta chain variable domain of TCR clone 85829 (TRBV12-4, TRBJ1-5)
CASSRPVGGSNQPQHF

SEQ ID NO: 171659 - protein, 13 aa, Homo sapiens
  CDR3 for alpha chain variable domain of TCR clone 85830 (TRAV27, TRAJ54)
CAGAGQGAQKLVF

SEQ ID NO: 171660 - protein, 15 aa, Homo sapiens
  CDR3 for beta chain variable domain of TCR clone 85830 (TRBV18, TRBJ2-6)
CASSPSYAGANVLIF

SEQ ID NO: 171661 - protein, 12 aa, Homo sapiens
  CDR3 for alpha chain variable domain of TCR clone 85831 (TRAV1-2, TRAJ33)
CAALDSNYQLIC

SEQ ID NO: 171662 - protein, 13 aa, Homo sapiens
  CDR3 for beta chain variable domain of TCR clone 85831 (TRBV19, TRBJ2-7)
CASRKAGGSEQYF

SEQ ID NO: 171663 - protein, 10 aa, Homo sapiens
  CDR3 for alpha chain variable domain of TCR clone 85832 (TRAV25, TRAJ20)
CAVNDYKLSF

SEQ ID NO: 171664 - protein, 18 aa, Homo sapiens
  CDR3 for beta chain variable domain of TCR clone 85832 (TRBV20-1, TRBJ2-6)
CSAETTPTHGSGANVLSF

SEQ ID NO: 171665 - protein, 14 aa, Homo sapiens
  CDR3 for alpha chain variable domain of TCR clone 85833 (TRAV16, TRAJ15)
CALSFNQAGTALIF

SEQ ID NO: 171666 - protein, 15 aa, Homo sapiens
  CDR3 for beta chain variable domain of TCR clone 85833 (TRBV2, TRBJ2-1)
CASSELAGSYNEQFF

SEQ ID NO: 171667 - protein, 12 aa, Homo sapiens
  CDR3 for alpha chain variable domain of TCR clone 85834 (TRAV13-2, TRAJ8)
CAPWLGFQKLVF

SEQ ID NO: 171668 - protein, 13 aa, Homo sapiens
  CDR3 for beta chain variable domain of TCR clone 85834 (TRBV12-4, TRBJ1-5)
CASSLDRAQPQHF

SEQ ID NO: 171669 - protein, 15 aa, Homo sapiens
  CDR3 for alpha chain variable domain of TCR clone 85835 (TRAV3, TRAJ22)
CAVRDRGGSARQLTF

SEQ ID NO: 171670 - protein, 17 aa, Homo sapiens
  CDR3 for beta chain variable domain of TCR clone 85835 (TRBV13, TRBJ2-3)
CASSLSRLAGGRNTQYF

SEQ ID NO: 171671 - protein, 13 aa, Homo sapiens
  CDR3 for alpha chain variable domain of TCR clone 85836 (TRAV1-2, TRAJ9)
CAALNTGGFKTIL

SEQ ID NO: 171672 - protein, 13 aa, Homo sapiens
  CDR3 for beta chain variable domain of TCR clone 85836 (TRBV4-1, TRBJ2-1)
CASSQAGGDEQFF

SEQ ID NO: 171673 - protein, 13 aa, Homo sapiens
  CDR3 for alpha chain variable domain of TCR clone 85837 (TRAV36/DV7, TRAJ38)
CVANAGNNRKLIW

SEQ ID NO: 171674 - protein, 14 aa, Homo sapiens
  CDR3 for beta chain variable domain of TCR clone 85837 (TRBV7-2, TRBJ2-7)
CASRSQGAAYEQYF

SEQ ID NO: 171675 - protein, 12 aa, Homo sapiens
  CDR3 for alpha chain variable domain of TCR clone 85838 (TRAV10, TRAJ34)
CVVSGKHRQAHL

SEQ ID NO: 171676 - protein, 14 aa, Homo sapiens
  CDR3 for beta chain variable domain of TCR clone 85838 (TRBV19, TRBJ2-1)
CASPTFVLSGEQFV

SEQ ID NO: 171677 - protein, 14 aa, Homo sapiens
  CDR3 for alpha chain variable domain of TCR clone 85839 (TRAV16, TRAJ17)
CAPRIKAAGNKLTF

SEQ ID NO: 171678 - protein, 17 aa, Homo sapiens
  CDR3 for beta chain variable domain of TCR clone 85839 (TRBV28, TRBJ1-1)
CASSLSGTGYENTEAFF

SEQ ID NO: 171679 - protein, 22 aa, Homo sapiens
  CDR3 for alpha chain variable domain of TCR clone 85840 (TRAV39, TRAJ49)
PCMTSLPPTSVPWTNTGNQFYF

SEQ ID NO: 171680 - protein, 17 aa, Homo sapiens
  CDR3 for beta chain variable domain of TCR clone 85840 (TRBV20-1, TRBJ2-1)
CSARDRRRASSHNEQFF

SEQ ID NO: 171681 - protein, 11 aa, Homo sapiens
  CDR3 for alpha chain variable domain of TCR clone 85841 (TRAV1-2, TRAJ20)
CAVANDYKLSF

SEQ ID NO: 171682 - protein, 12 aa, Homo sapiens
  CDR3 for beta chain variable domain of TCR clone 85841 (TRBV7-3, TRBJ1-2)
CASSKKGVPVTF

SEQ ID NO: 171683 - protein, 13 aa, Homo sapiens
  CDR3 for alpha chain variable domain of TCR clone 85842 (TRAV2, TRAJ15)
CAVASQAGTALIF

SEQ ID NO: 171684 - protein, 14 aa, Homo sapiens
  CDR3 for beta chain variable domain of TCR clone 85842 (TRBV2, TRBJ2-7)
CASSLTSGGYEQYF

SEQ ID NO: 171685 - protein, 14 aa, Homo sapiens
  CDR3 for alpha chain variable domain of TCR clone 85843 (TRAV16, TRAJ17)
CAPRIKAAGNKLTF

SEQ ID NO: 171686 - protein, 16 aa, Homo sapiens
  CDR3 for beta chain variable domain of TCR clone 85843 (TRBV5-1, TRBJ2-7)
CASSYASTSSGGEQYF

SEQ ID NO: 171687 - protein, 14 aa, Homo sapiens
  CDR3 for alpha chain variable domain of TCR clone 85844 (TRAV4, TRAJ17)
CLVGDMAVGNKLTF

SEQ ID NO: 171688 - protein, 13 aa, Homo sapiens
  CDR3 for beta chain variable domain of TCR clone 85844 (TRBV18, TRBJ2-7)
CASQSGGGYEQYF

SEQ ID NO: 171689 - protein, 15 aa, Homo sapiens
  CDR3 for alpha chain variable domain of TCR clone 85845 (TRAV25, TRAJ53)
CAATGGGGSNYKLTF

SEQ ID NO: 171690 - protein, 17 aa, Homo sapiens
  CDR3 for beta chain variable domain of TCR clone 85845 (TRBV11-2, TRBJ2-1)
CASSLYPPGVEYNEQFF

SEQ ID NO: 171691 - protein, 14 aa, Homo sapiens
  CDR3 for alpha chain variable domain of TCR clone 85846 (TRAV38-2/DV8, TRAJ29)
CAYRSRSGNTPLVF

SEQ ID NO: 171692 - protein, 16 aa, Homo sapiens
  CDR3 for beta chain variable domain of TCR clone 85846 (TRBV12-4, TRBJ1-5)
CASSRPVGGSNQPQHF

SEQ ID NO: 171693 - protein, 19 aa, Homo sapiens
  CDR3 for alpha chain variable domain of TCR clone 85847 (TRAV26-1, TRAJ50)
CCVLLHRQNPKTSYDKVIF

SEQ ID NO: 171694 - protein, 15 aa, Homo sapiens
  CDR3 for beta chain variable domain of TCR clone 85847 (TRBV27, TRBJ1-5)
CASSLGTGFDQPQHF

SEQ ID NO: 171695 - protein, 14 aa, Homo sapiens
  CDR3 for alpha chain variable domain of TCR clone 85848 (TRAV12-2, TRAJ17)
CAVLFKAAGNKLTF

SEQ ID NO: 171696 - protein, 16 aa, Homo sapiens
  CDR3 for beta chain variable domain of TCR clone 85848 (TRBV29-1, TRBJ2-7)
CSVEVVGTSGSYEQYF

SEQ ID NO: 171697 - protein, 18 aa, Homo sapiens
  CDR3 for alpha chain variable domain of TCR clone 85849 (TRAV14/DV4, TRAJ15)
CAMREFPPTGQAGTALIF

SEQ ID NO: 171698 - protein, 15 aa, Homo sapiens
  CDR3 for beta chain variable domain of TCR clone 85849 (TRBV7-9, TRBJ1-6)
CASSSPGRGNSPLHF

SEQ ID NO: 171699 - protein, 14 aa, Homo sapiens
  CDR3 for alpha chain variable domain of TCR clone 85850 (TRAV12-3, TRAJ42)
CAMNYGGSQGNLIF

SEQ ID NO: 171700 - protein, 12 aa, Homo sapiens
  CDR3 for beta chain variable domain of TCR clone 85850 (TRBV12-4, TRBJ1-3)
CASSFSGNTIYF

SEQ ID NO: 171701 - protein, 10 aa, Homo sapiens
  CDR3 for alpha chain variable domain of TCR clone 85851 (TRAV23/DV6, TRAJ57)
CAASSTLSQG

SEQ ID NO: 171702 - protein, 18 aa, Homo sapiens
  CDR3 for beta chain variable domain of TCR clone 85851 (TRBV12-4, TRBJ2-2)
CASSLVAGTRGRTGELFF

SEQ ID NO: 171703 - protein, 12 aa, Homo sapiens
  CDR3 for alpha chain variable domain of TCR clone 85852 (TRAV3, TRAJ27)
CAVRDGAGKSNF

SEQ ID NO: 171704 - protein, 13 aa, Homo sapiens
  CDR3 for beta chain variable domain of TCR clone 85852 (TRBV10-3, TRBJ1-2)
CAINADLNYGYTF

SEQ ID NO: 171705 - protein, 14 aa, Homo sapiens
  CDR3 for alpha chain variable domain of TCR clone 85853 (TRAV26-1, TRAJ39)
CIVRGSRAGNMLTF

SEQ ID NO: 171706 - protein, 15 aa, Homo sapiens
  CDR3 for beta chain variable domain of TCR clone 85853 (TRBV7-9, TRBJ1-5)
CASSQGHQPNQPQHS

SEQ ID NO: 171707 - protein, 14 aa, Homo sapiens
  CDR3 for alpha chain variable domain of TCR clone 85854 (TRAV12-2, TRAJ13)
CAVKKTGGYQKVTF

SEQ ID NO: 171708 - protein, 12 aa, Homo sapiens
  CDR3 for beta chain variable domain of TCR clone 85854 (TRBV6-3, TRBJ1-1)
CASSYFQAEAFF

SEQ ID NO: 171709 - protein, 13 aa, Homo sapiens
  CDR3 for alpha chain variable domain of TCR clone 85855 (TRAV8-6, TRAJ49)
CAVITNTGNQFYF

SEQ ID NO: 171710 - protein, 14 aa, Homo sapiens
  CDR3 for beta chain variable domain of TCR clone 85855 (TRBV19, TRBJ2-1)
CASPTFVSSGEQFF

SEQ ID NO: 171711 - protein, 14 aa, Homo sapiens
  CDR3 for alpha chain variable domain of TCR clone 85856 (TRAV12-2, TRAJ44)
CAVNKAGTASKLTF

SEQ ID NO: 171712 - protein, 15 aa, Homo sapiens
  CDR3 for beta chain variable domain of TCR clone 85856 (TRBV24-1, TRBJ1-4)
CATSDPQGADEKLFF

SEQ ID NO: 171713 - protein, 17 aa, Homo sapiens
  CDR3 for alpha chain variable domain of TCR clone 85857 (TRAV4, TRAJ18)
CLVGERSVGSTLGRLYF

SEQ ID NO: 171714 - protein, 16 aa, Homo sapiens
  CDR3 for beta chain variable domain of TCR clone 85857 (TRBV15, TRBJ1-4)
CAISRDSPPGREKLFF

SEQ ID NO: 171715 - protein, 16 aa, Homo sapiens
  CDR3 for alpha chain variable domain of TCR clone 85858 (TRAV30, TRAJ24)
CGTEIVDADSWGKFQF

SEQ ID NO: 171716 - protein, 16 aa, Homo sapiens
  CDR3 for beta chain variable domain of TCR clone 85858 (TRBV7-3, TRBJ2-2)
CASSVKRGTLSGELFF

SEQ ID NO: 171717 - protein, 10 aa, Homo sapiens
  CDR3 for alpha chain variable domain of TCR clone 85859 (TRAV12-3, TRAJ49)
CAMNDDQFYF

SEQ ID NO: 171718 - protein, 15 aa, Homo sapiens
  CDR3 for beta chain variable domain of TCR clone 85859 (TRBV7-9, TRBJ1-6)
CASSSPGRGNSPLHF

SEQ ID NO: 171719 - protein, 14 aa, Homo sapiens
  CDR3 for alpha chain variable domain of TCR clone 85860 (TRAV35, TRAJ42)
CCVPYGGSQGNLIF

SEQ ID NO: 171720 - protein, 18 aa, Homo sapiens
  CDR3 for beta chain variable domain of TCR clone 85860 (TRBV13, TRBJ2-6)
CSSSPMTSGGSGANVLTF

SEQ ID NO: 171721 - protein, 14 aa, Homo sapiens
  CDR3 for alpha chain variable domain of TCR clone 85861 (TRAV16, TRAJ33)
CALSAMDSNYQLIW

SEQ ID NO: 171722 - protein, 13 aa, Homo sapiens
  CDR3 for beta chain variable domain of TCR clone 85861 (TRBV6-1, TRBJ1-1)
CASSWTVDTEAFF

SEQ ID NO: 171723 - protein, 16 aa, Homo sapiens
  CDR3 for alpha chain variable domain of TCR clone 85862 (TRAV1-2, TRAJ10)
CAVRGVLTGGGKKLTF

SEQ ID NO: 171724 - protein, 13 aa, Homo sapiens
  CDR3 for beta chain variable domain of TCR clone 85862 (TRBV20-1, TRBJ1-6)
CSAPLGVGSPLHF

SEQ ID NO: 171725 - protein, 11 aa, Homo sapiens
  CDR3 for alpha chain variable domain of TCR clone 85863 (TRAV13-1, TRAJ23)
CAASSRGKLIF

SEQ ID NO: 171726 - protein, 12 aa, Homo sapiens
  CDR3 for beta chain variable domain of TCR clone 85863 (TRBV12-4, TRBJ1-3)
CASSFSGNTIYF

SEQ ID NO: 171727 - protein, 12 aa, Homo sapiens
  CDR3 for alpha chain variable domain of TCR clone 85864 (TRAV12-3, TRAJ17)
CAMTLTGNKLTF

SEQ ID NO: 171728 - protein, 13 aa, Homo sapiens
  CDR3 for beta chain variable domain of TCR clone 85864 (TRBV12-4, TRBJ2-5)
CASSPGTEETQYF

SEQ ID NO: 171729 - protein, 13 aa, Homo sapiens
  CDR3 for alpha chain variable domain of TCR clone 85865 (TRAV13-1, TRAJ10)
CAALEGGGNKLTF

SEQ ID NO: 171730 - protein, 10 aa, Homo sapiens
  CDR3 for beta chain variable domain of TCR clone 85865 (TRBV7-3, TRBJ2-2)
CASSLSGTSG

SEQ ID NO: 171731 - protein, 12 aa, Homo sapiens
  CDR3 for alpha chain variable domain of TCR clone 85866 (TRAV17, TRAJ20)
CATDGDDYKLSF

SEQ ID NO: 171732 - protein, 14 aa, Homo sapiens
  CDR3 for beta chain variable domain of TCR clone 85866 (TRBV18, TRBJ2-7)
CASSPRGGAYEQYF

SEQ ID NO: 171733 - protein, 14 aa, Homo sapiens
  CDR3 for alpha chain variable domain of TCR clone 85867 (TRAV36/DV7, TRAJ40)
CAVEGASGTYKYIF

SEQ ID NO: 171734 - protein, 16 aa, Homo sapiens
  CDR3 for beta chain variable domain of TCR clone 85867 (TRBV7-9, TRBJ1-2)
CASSLGFSSGEDGYTF

SEQ ID NO: 171735 - protein, 16 aa, Homo sapiens
  CDR3 for alpha chain variable domain of TCR clone 85868 (TRAV3, TRAJ21)
CAVRDIERGNFNKFYF

SEQ ID NO: 171736 - protein, 16 aa, Homo sapiens
  CDR3 for beta chain variable domain of TCR clone 85868 (TRBV12-4, TRBJ1-5)
CARSRPVGGSNQPQHF

SEQ ID NO: 171737 - protein, 14 aa, Homo sapiens
  CDR3 for alpha chain variable domain of TCR clone 85869 (TRAV2, TRAJ9)
CAVEDRSGGFKTIF

SEQ ID NO: 171738 - protein, 15 aa, Homo sapiens
  CDR3 for beta chain variable domain of TCR clone 85869 (TRBV6-5, TRBJ1-5)
CASSYSWDSNQPQHF

SEQ ID NO: 171739 - protein, 15 aa, Homo sapiens
  CDR3 for alpha chain variable domain of TCR clone 85870 (TRAV26-1, TRAJ29)
CIVRVEGSGNTPLVF

SEQ ID NO: 171740 - protein, 14 aa, Homo sapiens
  CDR3 for beta chain variable domain of TCR clone 85870 (TRBV7-2, TRBJ2-5)
CASSFTQGQETQYF

SEQ ID NO: 171741 - protein, 12 aa, Homo sapiens
  CDR3 for alpha chain variable domain of TCR clone 85871 (TRAV13-1, TRAJ48)
CAANFGNEKLTF

SEQ ID NO: 171742 - protein, 14 aa, Homo sapiens
  CDR3 for beta chain variable domain of TCR clone 85871 (TRBV4-1, TRBJ2-7)
CASRLTSGSYEQYF

SEQ ID NO: 171743 - protein, 11 aa, Homo sapiens
  CDR3 for alpha chain variable domain of TCR clone 85872 (TRAV4, TRAJ23)
CLVAPGGQLIF

SEQ ID NO: 171744 - protein, 15 aa, Homo sapiens
  CDR3 for beta chain variable domain of TCR clone 85872 (TRBV7-2, TRBJ2-1)
CASSFQADEYNEQFF

SEQ ID NO: 171745 - protein, 11 aa, Homo sapiens
  CDR3 for alpha chain variable domain of TCR clone 85873 (TRAV3, TRAJ21)
CAVGNFNKFYF

SEQ ID NO: 171746 - protein, 17 aa, Homo sapiens
  CDR3 for beta chain variable domain of TCR clone 85873 (TRBV4-3, TRBJ1-5)
CASSQWGDGGPNQPQHF

SEQ ID NO: 171747 - protein, 12 aa, Homo sapiens
  CDR3 for alpha chain variable domain of TCR clone 85874 (TRAV38-2/DV8, TRAJ48)
CALLSGNEKLTF

SEQ ID NO: 171748 - protein, 17 aa, Homo sapiens
  CDR3 for beta chain variable domain of TCR clone 85874 (TRBV11-2, TRBJ2-1)
CASSLYPPGVEYNEQFF

SEQ ID NO: 171749 - protein, 18 aa, Homo sapiens
  CDR3 for alpha chain variable domain of TCR clone 85875 (TRAV21, TRAJ52)
CAVRPSPAGGTSYGKLTF

SEQ ID NO: 171750 - protein, 13 aa, Homo sapiens
  CDR3 for beta chain variable domain of TCR clone 85875 (TRBV29-1, TRBJ2-2)
CSVYREDTGELFF

SEQ ID NO: 171751 - protein, 13 aa, Homo sapiens
  CDR3 for alpha chain variable domain of TCR clone 85876 (TRAV17, TRAJ40)
CATAFSGTYKYIF

SEQ ID NO: 171752 - protein, 14 aa, Homo sapiens
  CDR3 for beta chain variable domain of TCR clone 85876 (TRBV7-3, TRBJ2-2)
CASSSGGYTGELFF

SEQ ID NO: 171753 - protein, 11 aa, Homo sapiens
  CDR3 for alpha chain variable domain of TCR clone 85877 (TRAV17, TRAJ43)
CATPRSNDMRF

SEQ ID NO: 171754 - protein, 14 aa, Homo sapiens
  CDR3 for beta chain variable domain of TCR clone 85877 (TRBV6-1, TRBJ1-3)
CAGVQGGGGNTIYF

SEQ ID NO: 171755 - protein, 10 aa, Homo sapiens
  CDR3 for alpha chain variable domain of TCR clone 85878 (TRAV8-3, TRAJ43)
CAVALADMRF

SEQ ID NO: 171756 - protein, 13 aa, Homo sapiens
  CDR3 for beta chain variable domain of TCR clone 85878 (TRBV12-5, TRBJ2-3)
CASGDRQSDTQYF

SEQ ID NO: 171757 - protein, 15 aa, Homo sapiens
  CDR3 for alpha chain variable domain of TCR clone 85879 (TRAV8-1, TRAJ12)
CAVNTLMDSSYKLIF

SEQ ID NO: 171758 - protein, 12 aa, Homo sapiens
  CDR3 for beta chain variable domain of TCR clone 85879 (TRBV7-9, TRBJ1-1)
CASSLVRGEAFF

SEQ ID NO: 171759 - protein, 11 aa, Homo sapiens
  CDR3 for alpha chain variable domain of TCR clone 85880 (TRAV2, TRAJ13)
CASGGYQKVTF

SEQ ID NO: 171760 - protein, 16 aa, Homo sapiens
  CDR3 for beta chain variable domain of TCR clone 85880 (TRBV4-2, TRBJ2-5)
CASSQELVGSQETQYF

SEQ ID NO: 171761 - protein, 14 aa, Homo sapiens
  CDR3 for alpha chain variable domain of TCR clone 85881 (TRAV9-2, TRAJ39)
CALYIYNAGNMLTF

SEQ ID NO: 171762 - protein, 15 aa, Homo sapiens
  CDR3 for beta chain variable domain of TCR clone 85881 (TRBV5-8, TRBJ1-5)
CASSLVRTGNQPQHF

SEQ ID NO: 171763 - protein, 14 aa, Homo sapiens
  CDR3 for alpha chain variable domain of TCR clone 85882 (TRAV17, TRAJ16)
CATADFSDGQKLLF

SEQ ID NO: 171764 - protein, 15 aa, Homo sapiens
  CDR3 for beta chain variable domain of TCR clone 85882 (TRBV18, TRBJ2-1)
FASSPPSASYNEQFF

SEQ ID NO: 171765 - protein, 17 aa, Homo sapiens
  CDR3 for alpha chain variable domain of TCR clone 85883 (TRAV3, TRAJ38)
CAVRDCLNAGNNRKLIW

SEQ ID NO: 171766 - protein, 12 aa, Homo sapiens
  CDR3 for beta chain variable domain of TCR clone 85883 (TRBV11-2, TRBJ2-1)
CASSPGNNEQFF

SEQ ID NO: 171767 - protein, 13 aa, Homo sapiens
  CDR3 for alpha chain variable domain of TCR clone 85884 (TRAV23/DV6, TRAJ15)
CAALPAGRNCSDL

SEQ ID NO: 171768 - protein, 14 aa, Homo sapiens
  CDR3 for beta chain variable domain of TCR clone 85884 (TRBV7-9, TRBJ1-2)
CASSRQGAKYGYTF

SEQ ID NO: 171769 - protein, 13 aa, Homo sapiens
  CDR3 for alpha chain variable domain of TCR clone 85885 (TRAV26-2, TRAJ43)
CILRAVNNNDMRF

SEQ ID NO: 171770 - protein, 13 aa, Homo sapiens
  CDR3 for beta chain variable domain of TCR clone 85885 (TRBV7-9, TRBJ2-3)
CASSPGSTDTQYF

SEQ ID NO: 171771 - protein, 15 aa, Homo sapiens
  CDR3 for alpha chain variable domain of TCR clone 85886 (TRAV21, TRAJ57)
CAVITTQGGSEKLVF

SEQ ID NO: 171772 - protein, 17 aa, Homo sapiens
  CDR3 for beta chain variable domain of TCR clone 85886 (TRBV20-1, TRBJ2-2)
CSASGSGQGGLTGELFF

SEQ ID NO: 171773 - protein, 13 aa, Homo sapiens
  CDR3 for alpha chain variable domain of TCR clone 85887 (TRAV20, TRAJ34)
RAVSSYNTDKLIF

SEQ ID NO: 171774 - protein, 15 aa, Homo sapiens
  CDR3 for beta chain variable domain of TCR clone 85887 (TRBV20-1, TRBJ1-2)
CSAAGEGARIYGYTF

SEQ ID NO: 171775 - protein, 15 aa, Homo sapiens
  CDR3 for alpha chain variable domain of TCR clone 85888 (TRAV3, TRAJ29)
CAVRDLYSGNTPLVF

SEQ ID NO: 171776 - protein, 17 aa, Homo sapiens
  CDR3 for beta chain variable domain of TCR clone 85888 (TRBV20-1, TRBJ2-1)
CSARDTLAGVWDNEQFF

SEQ ID NO: 171777 - protein, 14 aa, Homo sapiens
  CDR3 for alpha chain variable domain of TCR clone 85889 (TRAV1-2, TRAJ27)
CAVRSGTNAGNSTF

SEQ ID NO: 171778 - protein, 15 aa, Homo sapiens
  CDR3 for beta chain variable domain of TCR clone 85889 (TRBV18, TRBJ2-7)
CASSPLQGRTYEQYF

SEQ ID NO: 171779 - protein, 14 aa, Homo sapiens
  CDR3 for alpha chain variable domain of TCR clone 85890 (TRAV8-1, TRAJ4)
CAVKFSGGYNKLIF

SEQ ID NO: 171780 - protein, 13 aa, Homo sapiens
  CDR3 for beta chain variable domain of TCR clone 85890 (TRBV9, TRBJ2-1)
CASSPSGGNEQFF

SEQ ID NO: 171781 - protein, 14 aa, Homo sapiens
  CDR3 for alpha chain variable domain of TCR clone 85891 (TRAV17, TRAJ54)
CATDANQGAQKLVF

SEQ ID NO: 171782 - protein, 14 aa, Homo sapiens
  CDR3 for beta chain variable domain of TCR clone 85891 (TRBV19, TRBJ2-3)
CASSAPRGTDTQYF

SEQ ID NO: 171783 - protein, 11 aa, Homo sapiens
  CDR3 for alpha chain variable domain of TCR clone 85892 (TRAV8-3, TRAJ3)
CAATLKQCFRD

SEQ ID NO: 171784 - protein, 16 aa, Homo sapiens
  CDR3 for beta chain variable domain of TCR clone 85892 (TRBV6-5, TRBJ2-3)
CASRFHRGEGSDTQYF

SEQ ID NO: 171785 - protein, 15 aa, Homo sapiens
  CDR3 for alpha chain variable domain of TCR clone 85893 (TRAV12-3, TRAJ6)
CAKSATTGGSYIPTF

SEQ ID NO: 171786 - protein, 16 aa, Homo sapiens
  CDR3 for beta chain variable domain of TCR clone 85893 (TRBV20-1, TRBJ1-2)
CSASMGQGVANYGYTF

SEQ ID NO: 171787 - protein, 11 aa, Homo sapiens
  CDR3 for alpha chain variable domain of TCR clone 85894 (TRAV27, TRAJ40)
SLTSGTYKYIL

SEQ ID NO: 171788 - protein, 13 aa, Homo sapiens
  CDR3 for beta chain variable domain of TCR clone 85894 (TRBV2, TRBJ2-5)
CASGTPYQETQYF

SEQ ID NO: 171789 - protein, 12 aa, Homo sapiens
  CDR3 for alpha chain variable domain of TCR clone 85895 (TRAV21, TRAJ13)
PGPSGGYQKVTF

SEQ ID NO: 171790 - protein, 15 aa, Homo sapiens
  CDR3 for beta chain variable domain of TCR clone 85895 (TRBV7-9, TRBJ1-5)
CASSQGHQPNQPQHF

SEQ ID NO: 171791 - protein, 13 aa, Homo sapiens
  CDR3 for alpha chain variable domain of TCR clone 85896 (TRAV20, TRAJ37)
CVGCSSNTGRLIF

SEQ ID NO: 171792 - protein, 11 aa, Homo sapiens
  CDR3 for beta chain variable domain of TCR clone 85896 (TRBV12-4, TRBJ2-3)
CASTATDTQYF

SEQ ID NO: 171793 - protein, 22 aa, Homo sapiens
  CDR3 for alpha chain variable domain of TCR clone 85897 (TRAV21, )
CAVRQDAGNNHIQNPDPAVYQL

SEQ ID NO: 171794 - protein, 16 aa, Homo sapiens
  CDR3 for beta chain variable domain of TCR clone 85897 (TRBV4-2, TRBJ1-1)
CASRLLDGGGDTEASF

SEQ ID NO: 171795 - protein, 17 aa, Homo sapiens
  CDR3 for alpha chain variable domain of TCR clone 85898 (TRAV3, TRAJ42)
CAVSDRDYGGSQGNLIF

SEQ ID NO: 171796 - protein, 13 aa, Homo sapiens
  CDR3 for beta chain variable domain of TCR clone 85898 (TRBV10-3, TRBJ2-7)
CASKLAVNYEQYF

SEQ ID NO: 171797 - protein, 13 aa, Homo sapiens
  CDR3 for alpha chain variable domain of TCR clone 85899 (TRAV2, TRAJ40)
CAVVTSGTYKYII

SEQ ID NO: 171798 - protein, 15 aa, Homo sapiens
  CDR3 for beta chain variable domain of TCR clone 85899 (TRBV11-3, TRBJ2-3)
CASLKDGREGDTQYF

SEQ ID NO: 171799 - protein, 15 aa, Homo sapiens
  CDR3 for alpha chain variable domain of TCR clone 85900 (TRAV8-4, TRAJ47)
CALSDPEEYGNKLVF

SEQ ID NO: 171800 - protein, 15 aa, Homo sapiens
  CDR3 for beta chain variable domain of TCR clone 85900 (TRBV11-2, TRBJ2-1)
CASSLGPDSYNEQFF

SEQ ID NO: 171801 - protein, 15 aa, Homo sapiens
  CDR3 for alpha chain variable domain of TCR clone 85901 (TRAV12-2, TRAJ53)
CAVNGGGGSNYKLTF

SEQ ID NO: 171802 - protein, 17 aa, Homo sapiens
  CDR3 for beta chain variable domain of TCR clone 85901 (TRBV7-3, TRBJ2-3)
RASSLRKRMRGADTQYF

SEQ ID NO: 171803 - protein, 12 aa, Homo sapiens
  CDR3 for alpha chain variable domain of TCR clone 85902 (TRAV25, TRAJ11)
CAGYSGYSTLTF

SEQ ID NO: 171804 - protein, 13 aa, Homo sapiens
  CDR3 for beta chain variable domain of TCR clone 85902 (TRBV7-9, TRBJ1-2)
FASSLKQNYGYTF

SEQ ID NO: 171805 - protein, 15 aa, Homo sapiens
  CDR3 for alpha chain variable domain of TCR clone 85903 (TRAV17, TRAJ10)
CATDASGGGGNKLTF

SEQ ID NO: 171806 - protein, 14 aa, Homo sapiens
  CDR3 for beta chain variable domain of TCR clone 85903 (TRBV20-1, TRBJ2-5)
CSVPYRGRAETQYC

SEQ ID NO: 171807 - protein, 14 aa, Homo sapiens
  CDR3 for alpha chain variable domain of TCR clone 85904 (TRAV13-1, TRAJ6)
CAAVAYIWKRNQPY

SEQ ID NO: 171808 - protein, 14 aa, Homo sapiens
  CDR3 for beta chain variable domain of TCR clone 85904 (TRBV28, TRBJ2-3)
CASSLTDLLDTQYF

SEQ ID NO: 171809 - protein, 12 aa, Homo sapiens
  CDR3 for alpha chain variable domain of TCR clone 85905 (TRAV1-2, TRAJ33)
CAALDSNYQLIW

SEQ ID NO: 171810 - protein, 17 aa, Homo sapiens
  CDR3 for beta chain variable domain of TCR clone 85905 (TRBV28, TRBJ1-1)
CASSLSGTGYENTEAFF

SEQ ID NO: 171811 - protein, 10 aa, Homo sapiens
  CDR3 for alpha chain variable domain of TCR clone 85906 (TRAV1-2, TRAJ31)
CAFFDARLMF

SEQ ID NO: 171812 - protein, 17 aa, Homo sapiens
  CDR3 for beta chain variable domain of TCR clone 85906 (TRBV4-1, TRBJ2-3)
CASSQGYVSGGTDTQYF

SEQ ID NO: 171813 - protein, 13 aa, Homo sapiens
  CDR3 for alpha chain variable domain of TCR clone 85907 (TRAV2, TRAJ40)
CAVVTSGTYKYIF

SEQ ID NO: 171814 - protein, 14 aa, Homo sapiens
  CDR3 for beta chain variable domain of TCR clone 85907 (TRBV20-1, TRBJ2-5)
CSALVPGYQETQYF

SEQ ID NO: 171815 - protein, 10 aa, Homo sapiens
  CDR3 for alpha chain variable domain of TCR clone 85908 (TRAV13-1, TRAJ35)
CAASKGGFGK

SEQ ID NO: 171816 - protein, 13 aa, Homo sapiens
  CDR3 for beta chain variable domain of TCR clone 85908 (TRBV7-3, TRBJ1-1)
CASSQDWGAEAFF

SEQ ID NO: 171817 - protein, 11 aa, Homo sapiens
  CDR3 for alpha chain variable domain of TCR clone 85909 (TRAV2, TRAJ13)
CASGGYQKVTF

SEQ ID NO: 171818 - protein, 14 aa, Homo sapiens
  CDR3 for beta chain variable domain of TCR clone 85909 (TRBV10-3, TRBJ2-1)
CAISSDLAYNEQFF

SEQ ID NO: 171819 - protein, 14 aa, Homo sapiens
  CDR3 for alpha chain variable domain of TCR clone 85910 (TRAV1-2, TRAJ8)
CAVREDTGFQKLVF

SEQ ID NO: 171820 - protein, 16 aa, Homo sapiens
  CDR3 for beta chain variable domain of TCR clone 85910 (TRBV7-8, TRBJ2-4)
CASSAERTLAKNIQYF

SEQ ID NO: 171821 - protein, 17 aa, Homo sapiens
  CDR3 for alpha chain variable domain of TCR clone 85911 (TRAV23/DV6, TRAJ58)
CAARLLRGETSGARLTF

SEQ ID NO: 171822 - protein, 13 aa, Homo sapiens
  CDR3 for beta chain variable domain of TCR clone 85911 (TRBV6-4, TRBJ1-5)
CASSADLNQPQHF

SEQ ID NO: 171823 - protein, 14 aa, Homo sapiens
  CDR3 for alpha chain variable domain of TCR clone 85912 (TRAV38-1, TRAJ29)
CAFITPSGNTPLVF

SEQ ID NO: 171824 - protein, 14 aa, Homo sapiens
  CDR3 for beta chain variable domain of TCR clone 85912 (TRBV18, TRBJ2-1)
CASSPRGGAYEQYF

SEQ ID NO: 171825 - protein, 13 aa, Homo sapiens
  CDR3 for alpha chain variable domain of TCR clone 85913 (TRAV12-2, TRAJ52)
CNAGGTSYGKLTF

SEQ ID NO: 171826 - protein, 13 aa, Homo sapiens
  CDR3 for beta chain variable domain of TCR clone 85913 (TRBV12-4, TRBJ2-7)
CASSPTETYEQYF

SEQ ID NO: 171827 - protein, 14 aa, Homo sapiens
  CDR3 for alpha chain variable domain of TCR clone 85914 (TRAV12-3, TRAJ10)
SHLPLTEGGNKLTF

SEQ ID NO: 171828 - protein, 14 aa, Homo sapiens
  CDR3 for beta chain variable domain of TCR clone 85914 (TRBV6-1, TRBJ1-3)
CASVQGGGGNTIYF

SEQ ID NO: 171829 - protein, 10 aa, Homo sapiens
  CDR3 for alpha chain variable domain of TCR clone 85915 (TRAV36/DV7, TRAJ48)
CAVGNEKLTF

SEQ ID NO: 171830 - protein, 14 aa, Homo sapiens
  CDR3 for beta chain variable domain of TCR clone 85915 (TRBV5-1, TRBJ2-7)
CASSRGESLYEQYF

SEQ ID NO: 171831 - protein, 16 aa, Homo sapiens
  CDR3 for alpha chain variable domain of TCR clone 85916 (TRAV26-1, TRAJ22)
CIVRVPSSGSARQLTF

SEQ ID NO: 171832 - protein, 18 aa, Homo sapiens
  CDR3 for beta chain variable domain of TCR clone 85916 (TRBV18, TRBJ1-3)
CASSPRGGAGPSGNTIYF

SEQ ID NO: 171833 - protein, 18 aa, Homo sapiens
  CDR3 for alpha chain variable domain of TCR clone 85917 (TRAV13-1, TRAJ52)
CAAKNPNAGGTSYGKLTF

SEQ ID NO: 171834 - protein, 18 aa, Homo sapiens
  CDR3 for beta chain variable domain of TCR clone 85917 (TRBV12-4, TRBJ2-4)
CASSRTGAVYVAKNIQYF

SEQ ID NO: 171835 - protein, 13 aa, Homo sapiens
  CDR3 for alpha chain variable domain of TCR clone 85918 (TRAV8-6, TRAJ9)
CAVWDTRGFKTIF

SEQ ID NO: 171836 - protein, 13 aa, Homo sapiens
  CDR3 for beta chain variable domain of TCR clone 85918 (TRBV27, TRBJ1-1)
CASSLSIGAEAFF

SEQ ID NO: 171837 - protein, 14 aa, Homo sapiens
  CDR3 for alpha chain variable domain of TCR clone 85919 (TRAV1-2, TRAJ8)
CAGREDTGFQKLVF

SEQ ID NO: 171838 - protein, 14 aa, Homo sapiens
  CDR3 for beta chain variable domain of TCR clone 85919 (TRBV6-1, TRBJ2-5)
CASSPRTAQGTQYF

SEQ ID NO: 171839 - protein, 15 aa, Homo sapiens
  CDR3 for alpha chain variable domain of TCR clone 85920 (TRAV12-3, TRAJ27)
CAMRAYNTNAGKSIF

SEQ ID NO: 171840 - protein, 13 aa, Homo sapiens
  CDR3 for beta chain variable domain of TCR clone 85920 (TRBV11-2, TRBJ2-5)
CASSRGPSETQYF

SEQ ID NO: 171841 - protein, 14 aa, Homo sapiens
  CDR3 for alpha chain variable domain of TCR clone 85921 (TRAV1-2, TRAJ8)
CAVREDTGFQKLVF

SEQ ID NO: 171842 - protein, 16 aa, Homo sapiens
  CDR3 for beta chain variable domain of TCR clone 85921 (TRBV7-3, TRBJ2-2)
CAGSLKRGTLSGELFF

SEQ ID NO: 171843 - protein, 15 aa, Homo sapiens
  CDR3 for alpha chain variable domain of TCR clone 85922 (TRAV8-3, TRAJ11)
CAVGLLNSGYSTLTF

SEQ ID NO: 171844 - protein, 14 aa, Homo sapiens
  CDR3 for beta chain variable domain of TCR clone 85922 (TRBV4-1, TRBJ2-5)
CASSRSGSGETQYY

SEQ ID NO: 171845 - protein, 12 aa, Homo sapiens
  CDR3 for alpha chain variable domain of TCR clone 85923 (TRAV17, TRAJ39)
CATGAAGNMLTF

SEQ ID NO: 171846 - protein, 14 aa, Homo sapiens
  CDR3 for beta chain variable domain of TCR clone 85923 (TRBV7-9, TRBJ1-2)
CASNRQGANYGYTF

SEQ ID NO: 171847 - protein, 15 aa, Homo sapiens
  CDR3 for alpha chain variable domain of TCR clone 85924 (TRAV8-2, TRAJ15)
CVVTMGNQAGTALIF

SEQ ID NO: 171848 - protein, 17 aa, Homo sapiens
  CDR3 for beta chain variable domain of TCR clone 85924 (TRBV13, TRBJ2-3)
CASSLSRVAGGRNTQYF

SEQ ID NO: 171849 - protein, 14 aa, Homo sapiens
  CDR3 for alpha chain variable domain of TCR clone 85925 (TRAV12-1, TRAJ44)
CGRLTYGTASKLTF

SEQ ID NO: 171850 - protein, 13 aa, Homo sapiens
  CDR3 for beta chain variable domain of TCR clone 85925 (TRBV6-5, TRBJ2-5)
CASSPQGGETQYF

SEQ ID NO: 171851 - protein, 11 aa, Homo sapiens
  CDR3 for alpha chain variable domain of TCR clone 85926 (TRAV1-1, TRAJ23)
CAVRQGGKLIF

SEQ ID NO: 171852 - protein, 13 aa, Homo sapiens
  CDR3 for beta chain variable domain of TCR clone 85926 (TRBV7-3, TRBJ1-1)
CASSQDWGAEAVF

SEQ ID NO: 171853 - protein, 14 aa, Homo sapiens
  CDR3 for alpha chain variable domain of TCR clone 85927 (TRAV1-2, TRAJ16)
CAVNRFSDGQKLLF

SEQ ID NO: 171854 - protein, 12 aa, Homo sapiens
  CDR3 for beta chain variable domain of TCR clone 85927 (TRBV11-2, TRBJ2-2)
CASSLGGGELFL

SEQ ID NO: 171855 - protein, 14 aa, Homo sapiens
  CDR3 for alpha chain variable domain of TCR clone 85928 (TRAV29/DV5, TRAJ36)
CAARRKTGANNLFF

SEQ ID NO: 171856 - protein, 14 aa, Homo sapiens
  CDR3 for beta chain variable domain of TCR clone 85928 (TRBV7-2, TRBJ2-5)
CAGSFTQGQETQYF

SEQ ID NO: 171857 - protein, 14 aa, Homo sapiens
  CDR3 for alpha chain variable domain of TCR clone 85929 (TRAV29/DV5, TRAJ36)
SAARRKTGANNLFF

SEQ ID NO: 171858 - protein, 14 aa, Homo sapiens
  CDR3 for beta chain variable domain of TCR clone 85929 (TRBV12-5, TRBJ2-5)
CASGSRTHQETQYF

SEQ ID NO: 171859 - protein, 14 aa, Homo sapiens
  CDR3 for alpha chain variable domain of TCR clone 85930 (TRAV2, TRAJ37)
CAVDFTSNTGKPIF

SEQ ID NO: 171860 - protein, 15 aa, Homo sapiens
  CDR3 for beta chain variable domain of TCR clone 85930 (TRBV7-3, TRBJ2-1)
CASSPTGGGEVEQFF

SEQ ID NO: 171861 - protein, 13 aa, Homo sapiens
  CDR3 for alpha chain variable domain of TCR clone 85931 (TRAV2, TRAJ40)
CAVATSGTYKYIF

SEQ ID NO: 171862 - protein, 14 aa, Homo sapiens
  CDR3 for beta chain variable domain of TCR clone 85931 (TRBV19, TRBJ2-1)
CASPTFVLSGERFF

SEQ ID NO: 171863 - protein, 15 aa, Homo sapiens
  CDR3 for alpha chain variable domain of TCR clone 85932 (TRAV3, TRAJ22)
CAVRDRGGSARQTTF

SEQ ID NO: 171864 - protein, 16 aa, Homo sapiens
  CDR3 for beta chain variable domain of TCR clone 85932 (TRBV5-4, TRBJ2-3)
CASQQPGAGGADTQYF

SEQ ID NO: 171865 - protein, 14 aa, Homo sapiens
  CDR3 for alpha chain variable domain of TCR clone 85933 (TRAV1-2, TRAJ8)
CAVRGDTGFQKLVF

SEQ ID NO: 171866 - protein, 19 aa, Homo sapiens
  CDR3 for beta chain variable domain of TCR clone 85933 (TRBV14, TRBJ2-1)
CASSQDQLWEAPEYNEQFF

SEQ ID NO: 171867 - protein, 15 aa, Homo sapiens
  CDR3 for alpha chain variable domain of TCR clone 85934 (TRAV38-2/DV8, TRAJ48)
CAYRSWGFGNEKLTF

SEQ ID NO: 171868 - protein, 16 aa, Homo sapiens
  CDR3 for beta chain variable domain of TCR clone 85934 (TRBV28, TRBJ2-7)
CASSPWVATGDLSQYF

SEQ ID NO: 171869 - protein, 12 aa, Homo sapiens
  CDR3 for alpha chain variable domain of TCR clone 85935 (TRAV13-1, TRAJ49)
CAAPNTGNQFYF

SEQ ID NO: 171870 - protein, 17 aa, Homo sapiens
  CDR3 for beta chain variable domain of TCR clone 85935 (TRBV25-1, TRBJ2-7)
CTSSDARVVFSSYEQYF

SEQ ID NO: 171871 - protein, 15 aa, Homo sapiens
  CDR3 for alpha chain variable domain of TCR clone 85936 (TRAV13-1, TRAJ17)
CVASIERAAGNKLTF

SEQ ID NO: 171872 - protein, 15 aa, Homo sapiens
  CDR3 for beta chain variable domain of TCR clone 85936 (TRBV6-1, TRBJ2-3)
CASSERGGITDTQYF

SEQ ID NO: 171873 - protein, 13 aa, Homo sapiens
  CDR3 for alpha chain variable domain of TCR clone 85937 (TRAV20, TRAJ49)
CAVQARTGNQLYF

SEQ ID NO: 171874 - protein, 14 aa, Homo sapiens
  CDR3 for beta chain variable domain of TCR clone 85937 (TRBV5-1, TRBJ1-1)
CAGSLQGASTEAFF

SEQ ID NO: 171875 - protein, 13 aa, Homo sapiens
  CDR3 for alpha chain variable domain of TCR clone 85938 (TRAV2, TRAJ40)
CAVVTLGTYKYIF

SEQ ID NO: 171876 - protein, 13 aa, Homo sapiens
  CDR3 for beta chain variable domain of TCR clone 85938 (TRBV7-9, TRBJ2-5)
CASLPSGRETQYF

SEQ ID NO: 171877 - protein, 10 aa, Homo sapiens
  CDR3 for alpha chain variable domain of TCR clone 85939 (TRAV23/DV6, TRAJ43)
CAAAVAALEQ

SEQ ID NO: 171878 - protein, 16 aa, Homo sapiens
  CDR3 for beta chain variable domain of TCR clone 85939 (TRBV24-1, TRBJ2-3)
CATSDPGTGATDTQYF

SEQ ID NO: 171879 - protein, 11 aa, Homo sapiens
  CDR3 for alpha chain variable domain of TCR clone 85940 (TRAV2, TRAJ13)
CASGGYQKVTF

SEQ ID NO: 171880 - protein, 15 aa, Homo sapiens
  CDR3 for beta chain variable domain of TCR clone 85940 (TRBV18, TRBJ1-1)
CASSPRQGENTEAFF

SEQ ID NO: 171881 - protein, 15 aa, Homo sapiens
  CDR3 for alpha chain variable domain of TCR clone 85941 (TRAV20, TRAJ52)
CAVQAKGTSYGKLTF

SEQ ID NO: 171882 - protein, 15 aa, Homo sapiens
  CDR3 for beta chain variable domain of TCR clone 85941 (TRBV7-2, TRBJ1-5)
CASSSGQGHAQPQHF

SEQ ID NO: 171883 - protein, 16 aa, Homo sapiens
  CDR3 for alpha chain variable domain of TCR clone 85942 (TRAV16, TRAJ24)
CALSGGSTDSWGKLQV

SEQ ID NO: 171884 - protein, 15 aa, Homo sapiens
  CDR3 for beta chain variable domain of TCR clone 85942 (TRBV27, TRBJ2-1)
CASSNGGGSSNEQFF

SEQ ID NO: 171885 - protein, 16 aa, Homo sapiens
  CDR3 for alpha chain variable domain of TCR clone 85943 (TRAV12-3, TRAJ53)
CAMSPGSGGSNYKLTF

SEQ ID NO: 171886 - protein, 17 aa, Homo sapiens
  CDR3 for beta chain variable domain of TCR clone 85943 (TRBV28, TRBJ2-5)
CASSRQGGLAGAETQYF

SEQ ID NO: 171887 - protein, 17 aa, Homo sapiens
  CDR3 for alpha chain variable domain of TCR clone 85944 (TRAV12-2, TRAJ48)
CASNEKLAFGTGTRLTI

SEQ ID NO: 171888 - protein, 16 aa, Homo sapiens
  CDR3 for beta chain variable domain of TCR clone 85944 (TRBV7-3, TRBJ2-2)
CASSLKRGTLSGELFF

SEQ ID NO: 171889 - protein, 15 aa, Homo sapiens
  CDR3 for alpha chain variable domain of TCR clone 85945 (TRAV12-1, TRAJ45)
CVVLSGGGGADGLTF

SEQ ID NO: 171890 - protein, 14 aa, Homo sapiens
  CDR3 for beta chain variable domain of TCR clone 85945 (TRBV11-2, TRBJ2-5)
CASSRTGGIGTQYF

SEQ ID NO: 171891 - protein, 15 aa, Homo sapiens
  CDR3 for alpha chain variable domain of TCR clone 85946 (TRAV34, TRAJ38)
CGADFTPGNNRKLIW

SEQ ID NO: 171892 - protein, 14 aa, Homo sapiens
  CDR3 for beta chain variable domain of TCR clone 85946 (TRBV28, TRBJ1-2)
CASYSGIPNYGYTF

SEQ ID NO: 171893 - protein, 12 aa, Homo sapiens
  CDR3 for alpha chain variable domain of TCR clone 85947 (TRAV13-1, TRAJ49)
CAASPMGNQFYI

SEQ ID NO: 171894 - protein, 13 aa, Homo sapiens
  CDR3 for beta chain variable domain of TCR clone 85947 (TRBV20-1, TRBJ2-2)
CSASAAGTGELFF

SEQ ID NO: 171895 - protein, 13 aa, Homo sapiens
  CDR3 for alpha chain variable domain of TCR clone 85948 (TRAV38-1, TRAJ42)
SARWGGSQGNLIF

SEQ ID NO: 171896 - protein, 17 aa, Homo sapiens
  CDR3 for beta chain variable domain of TCR clone 85948 (TRBV20-1, TRBJ2-1)
CSARDPLAGVWDNEQFF

SEQ ID NO: 171897 - protein, 14 aa, Homo sapiens
  CDR3 for alpha chain variable domain of TCR clone 85949 (TRAV1-1, TRAJ28)
CAAPSGAGSYQLTF

SEQ ID NO: 171898 - protein, 15 aa, Homo sapiens
  CDR3 for beta chain variable domain of TCR clone 85949 (TRBV7-2, TRBJ1-2)
CAGSLVSGGDYGYTF

SEQ ID NO: 171899 - protein, 16 aa, Homo sapiens
  CDR3 for alpha chain variable domain of TCR clone 85950 (TRAV3, TRAJ3)
CAVRDRAKSSASKILF

SEQ ID NO: 171900 - protein, 16 aa, Homo sapiens
  CDR3 for beta chain variable domain of TCR clone 85950 (TRBV20-1, TRBJ2-4)
CSATSLAELAKNIQYF

SEQ ID NO: 171901 - protein, 12 aa, Homo sapiens
  CDR3 for alpha chain variable domain of TCR clone 85951 (TRAV12-1, TRAJ34)
CVVAGATDKLIF

SEQ ID NO: 171902 - protein, 16 aa, Homo sapiens
  CDR3 for beta chain variable domain of TCR clone 85951 (TRBV7-2, TRBJ1-2)
CASSSNQDRRGHGDTF

SEQ ID NO: 171903 - protein, 13 aa, Homo sapiens
  CDR3 for alpha chain variable domain of TCR clone 85952 (TRAV12-1, TRAJ31)
CVVNMNNNARLMF

SEQ ID NO: 171904 - protein, 15 aa, Homo sapiens
  CDR3 for beta chain variable domain of TCR clone 85952 (TRBV4-1, TRBJ1-2)
CASSQGQGAAYGYSF

SEQ ID NO: 171905 - protein, 12 aa, Homo sapiens
  CDR3 for alpha chain variable domain of TCR clone 85953 (TRAV1-1, TRAJ8)
CAGGTDFQKLVF

SEQ ID NO: 171906 - protein, 15 aa, Homo sapiens
  CDR3 for beta chain variable domain of TCR clone 85953 (TRBV7-2, TRBJ2-3)
CASSLEQGGTDTQYF

SEQ ID NO: 171907 - protein, 21 aa, Homo sapiens
  CDR3 for alpha chain variable domain of TCR clone 85954 (TRAV1-1, TRAJ6)
CLLLLRCERLEWTGGSYIPTF

SEQ ID NO: 171908 - protein, 13 aa, Homo sapiens
  CDR3 for beta chain variable domain of TCR clone 85954 (TRBV10-2, TRBJ2-7)
CASGASGGYEQYF

SEQ ID NO: 171909 - protein, 15 aa, Homo sapiens
  CDR3 for alpha chain variable domain of TCR clone 85955 (TRAV2, TRAJ9)
CAVEDRGTGGFKTIF

SEQ ID NO: 171910 - protein, 15 aa, Homo sapiens
  CDR3 for beta chain variable domain of TCR clone 85955 (TRBV27, TRBJ2-1)
CASSNGGGSSNEQFF

SEQ ID NO: 171911 - protein, 11 aa, Homo sapiens
  CDR3 for alpha chain variable domain of TCR clone 85956 (TRAV2, TRAJ13)
CASGGYQKVTF

SEQ ID NO: 171912 - protein, 16 aa, Homo sapiens
  CDR3 for beta chain variable domain of TCR clone 85956 (TRBV5-1, TRBJ2-2)
CASSSRTGGRTGELFF

SEQ ID NO: 171913 - protein, 12 aa, Homo sapiens
  CDR3 for alpha chain variable domain of TCR clone 85957 (TRAV12-3, TRAJ17)
CAMTLTGNKLTF

SEQ ID NO: 171914 - protein, 16 aa, Homo sapiens
  CDR3 for beta chain variable domain of TCR clone 85957 (TRBV7-3, TRBJ2-1)
CASSLEGYRAYNEQFF

SEQ ID NO: 171915 - protein, 12 aa, Homo sapiens
  CDR3 for alpha chain variable domain of TCR clone 85958 (TRAV2, TRAJ31)
CAVEDNNARLMF

SEQ ID NO: 171916 - protein, 16 aa, Homo sapiens
  CDR3 for beta chain variable domain of TCR clone 85958 (TRBV10-3, TRBJ2-1)
CAISGGGDGGGGEQFF

SEQ ID NO: 171917 - protein, 11 aa, Homo sapiens
  CDR3 for alpha chain variable domain of TCR clone 85959 (TRAV13-1, TRAJ6)
CATLGSYIPTF

SEQ ID NO: 171918 - protein, 15 aa, Homo sapiens
  CDR3 for beta chain variable domain of TCR clone 85959 (TRBV28, TRBJ2-3)
CASSPDRQGANTQYF

SEQ ID NO: 171919 - protein, 14 aa, Homo sapiens
  CDR3 for alpha chain variable domain of TCR clone 85960 (TRAV12-2, TRAJ26)
CAVNKGNYGQNFVF

SEQ ID NO: 171920 - protein, 16 aa, Homo sapiens
  CDR3 for beta chain variable domain of TCR clone 85960 (TRBV19, TRBJ2-1)
CASSKAGPSSYNEQFF

SEQ ID NO: 171921 - protein, 13 aa, Homo sapiens
  CDR3 for alpha chain variable domain of TCR clone 85961 (TRAV3, TRAJ20)
CCEAFCNAYKLSF

SEQ ID NO: 171922 - protein, 15 aa, Homo sapiens
  CDR3 for beta chain variable domain of TCR clone 85961 (TRBV19, TRBJ2-6)
CASVRRDSGANVLTF

SEQ ID NO: 171923 - protein, 10 aa, Homo sapiens
  CDR3 for alpha chain variable domain of TCR clone 85962 (TRAV8-2, TRAJ29)
CTGGNTPLVF

SEQ ID NO: 171924 - protein, 17 aa, Homo sapiens
  CDR3 for beta chain variable domain of TCR clone 85962 (TRBV2, TRBJ2-7)
CASSQALTGWDSYEQYL

SEQ ID NO: 171925 - protein, 14 aa, Homo sapiens
  CDR3 for alpha chain variable domain of TCR clone 85963 (TRAV38-1, TRAJ29)
CAFITPSGNTPLVF

SEQ ID NO: 171926 - protein, 12 aa, Homo sapiens
  CDR3 for beta chain variable domain of TCR clone 85963 (TRBV5-1, TRBJ2-5)
CASSLGLETQYF

SEQ ID NO: 171927 - protein, 13 aa, Homo sapiens
  CDR3 for alpha chain variable domain of TCR clone 85964 (TRAV12-2, TRAJ10)
CAVPTGGGNKLTF

SEQ ID NO: 171928 - protein, 16 aa, Homo sapiens
  CDR3 for beta chain variable domain of TCR clone 85964 (TRBV4-2, TRBJ2-7)
CASSQDGVERGYEQYF

SEQ ID NO: 171929 - protein, 13 aa, Homo sapiens
  CDR3 for alpha chain variable domain of TCR clone 85965 (TRAV29/DV5, TRAJ49)
CAASTNTGNPFYF

SEQ ID NO: 171930 - protein, 13 aa, Homo sapiens
  CDR3 for beta chain variable domain of TCR clone 85965 (TRBV7-2, TRBJ1-4)
CASSLAGLEKLFF

SEQ ID NO: 171931 - protein, 14 aa, Homo sapiens
  CDR3 for alpha chain variable domain of TCR clone 85966 (TRAV20, TRAJ42)
CAVQAGGSQGNLIF

SEQ ID NO: 171932 - protein, 14 aa, Homo sapiens
  CDR3 for beta chain variable domain of TCR clone 85966 (TRBV28, TRBJ1-2)
CASRIQGADYGYTF

SEQ ID NO: 171933 - protein, 14 aa, Homo sapiens
  CDR3 for alpha chain variable domain of TCR clone 85967 (TRAV12-2, TRAJ40)
CAVKIPSRTYKYIF

SEQ ID NO: 171934 - protein, 20 aa, Homo sapiens
  CDR3 for beta chain variable domain of TCR clone 85967 (TRBV28, TRBJ2-1)
CASTPIGRSPGLAGGNEQFF

SEQ ID NO: 171935 - protein, 11 aa, Homo sapiens
  CDR3 for alpha chain variable domain of TCR clone 85968 (TRAV1-2, TRAJ31)
CASHNNARLMF

SEQ ID NO: 171936 - protein, 13 aa, Homo sapiens
  CDR3 for beta chain variable domain of TCR clone 85968 (TRBV7-9, TRBJ2-7)
CASSPFNHYEQYF

SEQ ID NO: 171937 - protein, 11 aa, Homo sapiens
  CDR3 for alpha chain variable domain of TCR clone 85969 (TRAV3, TRAJ3)
CAVGNFNKFYF

SEQ ID NO: 171938 - protein, 15 aa, Homo sapiens
  CDR3 for beta chain variable domain of TCR clone 85969 (TRBV20-1, TRBJ2-7)
CSARDRVSGMDEQYF

SEQ ID NO: 171939 - protein, 14 aa, Homo sapiens
  CDR3 for alpha chain variable domain of TCR clone 85970 (TRAV8-4, TRAJ9)
CAVRINTGGFKTIF

SEQ ID NO: 171940 - protein, 15 aa, Homo sapiens
  CDR3 for beta chain variable domain of TCR clone 85970 (TRBV10-2, TRBJ2-6)
CASSEQGTGANVLIF

SEQ ID NO: 171941 - protein, 11 aa, Homo sapiens
  CDR3 for alpha chain variable domain of TCR clone 85971 (TRAV12-1, TRAJ43)
CVEYDNNDMRF

SEQ ID NO: 171942 - protein, 15 aa, Homo sapiens
  CDR3 for beta chain variable domain of TCR clone 85971 (TRBV20-1, TRBJ2-7)
CSARDRVSGMDEQYF

SEQ ID NO: 171943 - protein, 16 aa, Homo sapiens
  CDR3 for alpha chain variable domain of TCR clone 85972 (TRAV3, TRAJ10)
CAVRDMRAGGGNKLTF

SEQ ID NO: 171944 - protein, 15 aa, Homo sapiens
  CDR3 for beta chain variable domain of TCR clone 85972 (TRBV11-2, TRBJ2-1)
CASSLGPDSYNEQFF

SEQ ID NO: 171945 - protein, 12 aa, Homo sapiens
  CDR3 for alpha chain variable domain of TCR clone 85973 (TRAV12-1, TRAJ34)
CVVTFNTDKLIF

SEQ ID NO: 171946 - protein, 14 aa, Homo sapiens
  CDR3 for beta chain variable domain of TCR clone 85973 (TRBV19, TRBJ1-1)
CARLRTGLNTEAFF

SEQ ID NO: 171947 - protein, 15 aa, Homo sapiens
  CDR3 for alpha chain variable domain of TCR clone 85974 (TRAV12-3, TRAJ6)
CAMSATTGGSYIPTF

SEQ ID NO: 171948 - protein, 16 aa, Homo sapiens
  CDR3 for beta chain variable domain of TCR clone 85974 (TRBV29-1, TRBJ2-7)
CSVEVVGTSGSYEQYF

SEQ ID NO: 171949 - protein, 13 aa, Homo sapiens
  CDR3 for alpha chain variable domain of TCR clone 85975 (TRAV8-3, TRAJ21)
CAVGIYNFNKFYF

SEQ ID NO: 171950 - protein, 13 aa, Homo sapiens
  CDR3 for beta chain variable domain of TCR clone 85975 (TRBV7-7, TRBJ2-5)
CAGSLRAIETQYF

SEQ ID NO: 171951 - protein, 15 aa, Homo sapiens
  CDR3 for alpha chain variable domain of TCR clone 85976 (TRAV25, TRAJ52)
CAGRPGGTSYGKLTF

SEQ ID NO: 171952 - protein, 17 aa, Homo sapiens
  CDR3 for beta chain variable domain of TCR clone 85976 (TRBV20-1, TRBJ2-1)
CSARDPLAGVWDNEQFF

SEQ ID NO: 171953 - protein, 14 aa, Homo sapiens
  CDR3 for alpha chain variable domain of TCR clone 85977 (TRAV14/DV4, TRAJ11)
CAMSSNSGYSTLTF

SEQ ID NO: 171954 - protein, 11 aa, Homo sapiens
  CDR3 for beta chain variable domain of TCR clone 85977 (TRBV7-9, TRBJ2-3)
CASSGPDTQHF

SEQ ID NO: 171955 - protein, 13 aa, Homo sapiens
  CDR3 for alpha chain variable domain of TCR clone 85978 (TRAV13-1, TRAJ11)
CAAVLAGYSTLTF

SEQ ID NO: 171956 - protein, 17 aa, Homo sapiens
  CDR3 for beta chain variable domain of TCR clone 85978 (TRBV25-1, TRBJ2-7)
RASSDARVVFSSYEQYF

SEQ ID NO: 171957 - protein, 15 aa, Homo sapiens
  CDR3 for alpha chain variable domain of TCR clone 85979 (TRAV21, TRAJ24)
CAARSSTDSWGKLQF

SEQ ID NO: 171958 - protein, 12 aa, Homo sapiens
  CDR3 for beta chain variable domain of TCR clone 85979 (TRBV12-5, TRBJ2-5)
CASGQGVETQYF

SEQ ID NO: 171959 - protein, 15 aa, Homo sapiens
  CDR3 for alpha chain variable domain of TCR clone 85980 (TRAV29/DV5, TRAJ42)
CAAKTDGGSQGNIIF

SEQ ID NO: 171960 - protein, 12 aa, Homo sapiens
  CDR3 for beta chain variable domain of TCR clone 85980 (TRBV11-2, TRBJ2-1)
CASSPGNNEQFF

SEQ ID NO: 171961 - protein, 13 aa, Homo sapiens
  CDR3 for alpha chain variable domain of TCR clone 85981 (TRAV23/DV6, TRAJ12)
CAPRVDSSYKLIF

SEQ ID NO: 171962 - protein, 14 aa, Homo sapiens
  CDR3 for beta chain variable domain of TCR clone 85981 (TRBV7-2, TRBJ2-7)
CASSPKTSFYEQYF

SEQ ID NO: 171963 - protein, 13 aa, Homo sapiens
  CDR3 for alpha chain variable domain of TCR clone 85982 (TRAV16, TRAJ5)
CALTNTGRRALTF

SEQ ID NO: 171964 - protein, 15 aa, Homo sapiens
  CDR3 for beta chain variable domain of TCR clone 85982 (TRBV11-2, TRBJ2-4)
CASSRTGTGINIQYF

SEQ ID NO: 171965 - protein, 15 aa, Homo sapiens
  CDR3 for alpha chain variable domain of TCR clone 85983 (TRAV4, TRAJ17)
CLVGDLGAAGNKLTF

SEQ ID NO: 171966 - protein, 14 aa, Homo sapiens
  CDR3 for beta chain variable domain of TCR clone 85983 (TRBV6-3, TRBJ2-7)
CASSYSVRVYEQYF

SEQ ID NO: 171967 - protein, 15 aa, Homo sapiens
  CDR3 for alpha chain variable domain of TCR clone 85984 (TRAV13-1, TRAJ17)
CAASIERAAGNKLTF

SEQ ID NO: 171968 - protein, 15 aa, Homo sapiens
  CDR3 for beta chain variable domain of TCR clone 85984 (TRBV3-1, TRBJ1-2)
CASSPTRLPEGGYTF

SEQ ID NO: 171969 - protein, 18 aa, Homo sapiens
  CDR3 for alpha chain variable domain of TCR clone 85985 (TRAV21, TRAJ52)
CAVRPSPAGGISYGKLTF

SEQ ID NO: 171970 - protein, 13 aa, Homo sapiens
  CDR3 for beta chain variable domain of TCR clone 85985 (TRBV7-3, TRBJ1-1)
CASSQDWGAEAFF

SEQ ID NO: 171971 - protein, 12 aa, Homo sapiens
  CDR3 for alpha chain variable domain of TCR clone 85986 (TRAV8-4, TRAJ22)
CAATGSARQLTF

SEQ ID NO: 171972 - protein, 19 aa, Homo sapiens
  CDR3 for beta chain variable domain of TCR clone 85986 (TRBV25-1, TRBJ2-2)
CAILVYRVDRGRKTGELFF

SEQ ID NO: 171973 - protein, 12 aa, Homo sapiens
  CDR3 for alpha chain variable domain of TCR clone 85987 (TRAV8-3, TRAJ27)
CAVGEEAGKSTF

SEQ ID NO: 171974 - protein, 14 aa, Homo sapiens
  CDR3 for beta chain variable domain of TCR clone 85987 (TRBV2, TRBJ2-1)
CASRLIVGHDEQFF

SEQ ID NO: 171975 - protein, 12 aa, Homo sapiens
  CDR3 for alpha chain variable domain of TCR clone 85988 (TRAV17, TRAJ57)
CATDGGSEKLVF

SEQ ID NO: 171976 - protein, 15 aa, Homo sapiens
  CDR3 for beta chain variable domain of TCR clone 85988 (TRBV6-1, TRBJ2-4)
CASSEAVWTINIQYF

SEQ ID NO: 171977 - protein, 16 aa, Homo sapiens
  CDR3 for alpha chain variable domain of TCR clone 85989 (TRAV16, TRAJ52)
CALSAAGGTSYGKLTF

SEQ ID NO: 171978 - protein, 13 aa, Homo sapiens
  CDR3 for beta chain variable domain of TCR clone 85989 (TRBV7-3, TRBJ1-1)
CASSQDWGAEAFF

SEQ ID NO: 171979 - protein, 20 aa, Homo sapiens
  CDR3 for alpha chain variable domain of TCR clone 85990 (TRAV12-1, TRAJ42)
SSVIQPPTSVKGGSQGNVIF

SEQ ID NO: 171980 - protein, 18 aa, Homo sapiens
  CDR3 for beta chain variable domain of TCR clone 85990 (TRBV11-2, TRBJ2-3)
CASSLGGASRGAPNTQYF

SEQ ID NO: 171981 - protein, 16 aa, Homo sapiens
  CDR3 for alpha chain variable domain of TCR clone 85991 (TRAV20, TRAJ38)
CAVQASNAGNNRKLIW

SEQ ID NO: 171982 - protein, 16 aa, Homo sapiens
  CDR3 for beta chain variable domain of TCR clone 85991 (TRBV7-8, TRBJ2-6)
CASRVGGSSGANVLTF

SEQ ID NO: 171983 - protein, 13 aa, Homo sapiens
  CDR3 for alpha chain variable domain of TCR clone 85992 (TRAV21, TRAJ37)
CAVSSGNTGKLIF

SEQ ID NO: 171984 - protein, 15 aa, Homo sapiens
  CDR3 for beta chain variable domain of TCR clone 85992 (TRBV28, TRBJ1-4)
CASSVSGSGLEKLFF

SEQ ID NO: 171985 - protein, 14 aa, Homo sapiens
  CDR3 for alpha chain variable domain of TCR clone 85993 (TRAV38-1, TRAJ45)
CAYYSGGGADGLTF

SEQ ID NO: 171986 - protein, 12 aa, Homo sapiens
  CDR3 for beta chain variable domain of TCR clone 85993 (TRBV12-4, TRBJ2-7)
CASSLGGYEQYF

SEQ ID NO: 171987 - protein, 11 aa, Homo sapiens
  CDR3 for alpha chain variable domain of TCR clone 85994 (TRAV12-2, TRAJ43)
CAAYNNNDMRF

SEQ ID NO: 171988 - protein, 14 aa, Homo sapiens
  CDR3 for beta chain variable domain of TCR clone 85994 (TRBV7-8, TRBJ1-2)
CASSAGTAIYGYSF

SEQ ID NO: 171989 - protein, 14 aa, Homo sapiens
  CDR3 for alpha chain variable domain of TCR clone 85995 (TRAV12-2, TRAJ9)
CAVNALEGGFKTIF

SEQ ID NO: 171990 - protein, 13 aa, Homo sapiens
  CDR3 for beta chain variable domain of TCR clone 85995 (TRBV19, TRBJ2-7)
CASSPRQSYEQYF

SEQ ID NO: 171991 - protein, 12 aa, Homo sapiens
  CDR3 for alpha chain variable domain of TCR clone 85996 (TRAV10, TRAJ34)
CVVSCKHRQAHL

SEQ ID NO: 171992 - protein, 14 aa, Homo sapiens
  CDR3 for beta chain variable domain of TCR clone 85996 (TRBV19, TRBJ2-1)
CASPTFVLSGEQFF

SEQ ID NO: 171993 - protein, 12 aa, Homo sapiens
  CDR3 for alpha chain variable domain of TCR clone 85997 (TRAV3, TRAJ20)
CAVRDHDYKLSF

SEQ ID NO: 171994 - protein, 13 aa, Homo sapiens
  CDR3 for beta chain variable domain of TCR clone 85997 (TRBV9, TRBJ2-1)
CASSVGQGGEQFF

SEQ ID NO: 171995 - protein, 13 aa, Homo sapiens
  CDR3 for alpha chain variable domain of TCR clone 85998 (TRAV3, TRAJ15)
CAVRDQAGTALIF

SEQ ID NO: 171996 - protein, 16 aa, Homo sapiens
  CDR3 for beta chain variable domain of TCR clone 85998 (TRBV12-5, TRBJ2-5)
CASGPRTSGNQETQYF

SEQ ID NO: 171997 - protein, 18 aa, Homo sapiens
  CDR3 for alpha chain variable domain of TCR clone 85999 (TRAV29/DV5, TRAJ52)
QCTSVQQADGTSYGKLTF

SEQ ID NO: 171998 - protein, 12 aa, Homo sapiens
  CDR3 for beta chain variable domain of TCR clone 85999 (TRBV7-2, TRBJ1-1)
CQQSKGAKVAFF

SEQ ID NO: 171999 - protein, 14 aa, Homo sapiens
  CDR3 for alpha chain variable domain of TCR clone 86000 (TRAV12-1, TRAJ12)
CVVTRMDSSYKLIF

SEQ ID NO: 172000 - protein, 13 aa, Homo sapiens
  CDR3 for beta chain variable domain of TCR clone 86000 (TRBV20-1, TRBJ1-1)
CSARGGGNTESFF

SEQ ID NO: 172001 - protein, 14 aa, Homo sapiens
  CDR3 for alpha chain variable domain of TCR clone 86001 (TRAV8-1, TRAJ5)
CAVRTDTGRRALNF

SEQ ID NO: 172002 - protein, 12 aa, Homo sapiens
  CDR3 for beta chain variable domain of TCR clone 86001 (TRBV11-2, TRBJ2-1)
CASSPGNNEQFF

SEQ ID NO: 172003 - protein, 15 aa, Homo sapiens
  CDR3 for alpha chain variable domain of TCR clone 86002 (TRAV21, TRAJ53)
CATLNSGGSNYKLTF

SEQ ID NO: 172004 - protein, 14 aa, Homo sapiens
  CDR3 for beta chain variable domain of TCR clone 86002 (TRBV5-5, TRBJ1-2)
CASSLDPYNYGYTF

SEQ ID NO: 172005 - protein, 14 aa, Homo sapiens
  CDR3 for alpha chain variable domain of TCR clone 86003 (TRAV8-2, TRAJ4)
CVVSPSGGYNKLIF

SEQ ID NO: 172006 - protein, 12 aa, Homo sapiens
  CDR3 for beta chain variable domain of TCR clone 86003 (TRBV5-1, TRBJ2-5)
CASSLGLETQYF

SEQ ID NO: 172007 - protein, 14 aa, Homo sapiens
  CDR3 for alpha chain variable domain of TCR clone 86004 (TRAV3, TRAJ33)
CAVRDMDSNYQLIW

SEQ ID NO: 172008 - protein, 19 aa, Homo sapiens
  CDR3 for beta chain variable domain of TCR clone 86004 (TRBV7-3, TRBJ1-2)
CASSFPQGNDGELRLHLRF

SEQ ID NO: 172009 - protein, 15 aa, Homo sapiens
  CDR3 for alpha chain variable domain of TCR clone 86005 (TRAV35, TRAJ40)
CAGKLGTSGTYKYIF

SEQ ID NO: 172010 - protein, 14 aa, Homo sapiens
  CDR3 for beta chain variable domain of TCR clone 86005 (TRBV7-3, TRBJ2-1)
CASSLAGGTNEQFF

SEQ ID NO: 172011 - protein, 13 aa, Homo sapiens
  CDR3 for alpha chain variable domain of TCR clone 86006 (TRAV13-1, TRAJ39)
CSKYSNAGNMLTF

SEQ ID NO: 172012 - protein, 16 aa, Homo sapiens
  CDR3 for beta chain variable domain of TCR clone 86006 (TRBV20-1, TRBJ1-4)
CSAPGQGLLTSEKLFF

SEQ ID NO: 172013 - protein, 13 aa, Homo sapiens
  CDR3 for alpha chain variable domain of TCR clone 86007 (TRAV22, TRAJ11)
CAPPGGGYSTLTF

SEQ ID NO: 172014 - protein, 17 aa, Homo sapiens
  CDR3 for beta chain variable domain of TCR clone 86007 (TRBV13, TRBJ2-3)
CASSLSRVAGGRNTQYF

SEQ ID NO: 172015 - protein, 14 aa, Homo sapiens
  CDR3 for alpha chain variable domain of TCR clone 86008 (TRAV2, TRAJ9)
CAVEDRRGGFKTIF

SEQ ID NO: 172016 - protein, 13 aa, Homo sapiens
  CDR3 for beta chain variable domain of TCR clone 86008 (TRBV7-3, TRBJ1-1)
CASSQDWGAEAFF

SEQ ID NO: 172017 - protein, 14 aa, Homo sapiens
  CDR3 for alpha chain variable domain of TCR clone 86009 (TRAV1-2, TRAJ16)
CAVNRFSDGQKLLF

SEQ ID NO: 172018 - protein, 17 aa, Homo sapiens
  CDR3 for beta chain variable domain of TCR clone 86009 (TRBV4-1, TRBJ2-3)
CASSQDPAGGPLDTQYF

SEQ ID NO: 172019 - protein, 16 aa, Homo sapiens
  CDR3 for alpha chain variable domain of TCR clone 86010 (TRAV4, TRAJ28)
CITAFLSGAGSYQLTF

SEQ ID NO: 172020 - protein, 14 aa, Homo sapiens
  CDR3 for beta chain variable domain of TCR clone 86010 (TRBV7-9, TRBJ2-5)
CASSLDTAQETQYF

SEQ ID NO: 172021 - protein, 13 aa, Homo sapiens
  CDR3 for alpha chain variable domain of TCR clone 86011 (TRAV12-1, TRAJ40)
CVVPTSGTYKYIF

SEQ ID NO: 172022 - protein, 18 aa, Homo sapiens
  CDR3 for beta chain variable domain of TCR clone 86011 (TRBV7-6, TRBJ2-1)
CASSPRTSGMSSYNEQFV

SEQ ID NO: 172023 - protein, 11 aa, Homo sapiens
  CDR3 for alpha chain variable domain of TCR clone 86012 (TRAV2, TRAJ13)
CASGGYQKVTF

SEQ ID NO: 172024 - protein, 15 aa, Homo sapiens
  CDR3 for beta chain variable domain of TCR clone 86012 (TRBV4-1, TRBJ2-5)
CASSQASGEYETQYF

SEQ ID NO: 172025 - protein, 13 aa, Homo sapiens
  CDR3 for alpha chain variable domain of TCR clone 86013 (TRAV8-3, TRAJ43)
CAVGPDNNNDMRF

SEQ ID NO: 172026 - protein, 12 aa, Homo sapiens
  CDR3 for beta chain variable domain of TCR clone 86013 (TRBV7-2, TRBJ1-6)
CASSLSSSPLHF

SEQ ID NO: 172027 - protein, 17 aa, Homo sapiens
  CDR3 for alpha chain variable domain of TCR clone 86014 (TRAV8-6, TRAJ58)
CAVSSWVGETSGSRLTF

SEQ ID NO: 172028 - protein, 16 aa, Homo sapiens
  CDR3 for beta chain variable domain of TCR clone 86014 (TRBV4-1, TRBJ1-2)
CASSQDAGQVLYGYTF

SEQ ID NO: 172029 - protein, 16 aa, Homo sapiens
  CDR3 for alpha chain variable domain of TCR clone 86015 (TRAV3, TRAJ10)
CAVRDMRAGGGNKLTL

SEQ ID NO: 172030 - protein, 15 aa, Homo sapiens
  CDR3 for beta chain variable domain of TCR clone 86015 (TRBV6-3, TRBJ2-7)
CASSSPGTVFYEQYF

SEQ ID NO: 172031 - protein, 13 aa, Homo sapiens
  CDR3 for alpha chain variable domain of TCR clone 86016 (TRAV30, TRAJ39)
CGTERNAGNMLTF

SEQ ID NO: 172032 - protein, 17 aa, Homo sapiens
  CDR3 for beta chain variable domain of TCR clone 86016 (TRBV7-3, TRBJ2-3)
CASSLMKRMRGADTQYF

SEQ ID NO: 172033 - protein, 11 aa, Homo sapiens
  CDR3 for alpha chain variable domain of TCR clone 86017 (TRAV3, TRAJ17)
PRGAAGNKLTL

SEQ ID NO: 172034 - protein, 16 aa, Homo sapiens
  CDR3 for beta chain variable domain of TCR clone 86017 (TRBV7-6, TRBJ2-1)
CASSAPGPSSYNEQFF

SEQ ID NO: 172035 - protein, 13 aa, Homo sapiens
  CDR3 for alpha chain variable domain of TCR clone 86018 (TRAV12-2, TRAJ6)
CAVNVSRKLHTYI

SEQ ID NO: 172036 - protein, 13 aa, Homo sapiens
  CDR3 for beta chain variable domain of TCR clone 86018 (TRBV4-2, TRBJ1-1)
CASSQAGNTEAFF

SEQ ID NO: 172037 - protein, 15 aa, Homo sapiens
  CDR3 for alpha chain variable domain of TCR clone 86019 (TRAV26-1, TRAJ38)
CIGRAEGGNNRKLIW

SEQ ID NO: 172038 - protein, 14 aa, Homo sapiens
  CDR3 for beta chain variable domain of TCR clone 86019 (TRBV7-6, TRBJ2-5)
CASSSPSGSETQYF

SEQ ID NO: 172039 - protein, 16 aa, Homo sapiens
  CDR3 for alpha chain variable domain of TCR clone 86020 (TRAV3, TRAJ37)
CAVRPHGSGNTGKLIF

SEQ ID NO: 172040 - protein, 15 aa, Homo sapiens
  CDR3 for beta chain variable domain of TCR clone 86020 (TRBV27, TRBJ1-6)
CASSFDRGLGSPLHF

SEQ ID NO: 172041 - protein, 16 aa, Homo sapiens
  CDR3 for alpha chain variable domain of TCR clone 86021 (TRAV3, TRAJ5)
CAVRNLMDTGRRALTF

SEQ ID NO: 172042 - protein, 16 aa, Homo sapiens
  CDR3 for beta chain variable domain of TCR clone 86021 (TRBV4-2, TRBJ2-7)
CASSREGLANSYEQYF

SEQ ID NO: 172043 - protein, 13 aa, Homo sapiens
  CDR3 for alpha chain variable domain of TCR clone 86022 (TRAV17, TRAJ9)
FATDGTGGFKTIF

SEQ ID NO: 172044 - protein, 17 aa, Homo sapiens
  CDR3 for beta chain variable domain of TCR clone 86022 (TRBV6-5, TRBJ2-7)
CASSYSFWGQGSYEQYF

SEQ ID NO: 172045 - protein, 19 aa, Homo sapiens
  CDR3 for alpha chain variable domain of TCR clone 86023 (TRAV25, TRAJ20)
TATQTTDVGILPHDYKLSF

SEQ ID NO: 172046 - protein, 13 aa, Homo sapiens
  CDR3 for beta chain variable domain of TCR clone 86023 (TRBV20-1, TRBJ1-1)
CSAPLGGGTEAFF

SEQ ID NO: 172047 - protein, 12 aa, Homo sapiens
  CDR3 for alpha chain variable domain of TCR clone 86024 (TRAV21, TRAJ31)
CAAWGNNARLLF

SEQ ID NO: 172048 - protein, 16 aa, Homo sapiens
  CDR3 for beta chain variable domain of TCR clone 86024 (TRBV27, TRBJ2-5)
CASSYGPGGQKETQYF

SEQ ID NO: 172049 - protein, 15 aa, Homo sapiens
  CDR3 for alpha chain variable domain of TCR clone 86025 (TRAV21, TRAJ53)
CATLNSGGSNYKLTF

SEQ ID NO: 172050 - protein, 14 aa, Homo sapiens
  CDR3 for beta chain variable domain of TCR clone 86025 (TRBV7-3, TRBJ2-2)
CASSSGGYTGELFF

SEQ ID NO: 172051 - protein, 16 aa, Homo sapiens
  CDR3 for alpha chain variable domain of TCR clone 86026 (TRAV30, TRAJ24)
CGTEIVDADSWGKFQF

SEQ ID NO: 172052 - protein, 15 aa, Homo sapiens
  CDR3 for beta chain variable domain of TCR clone 86026 (TRBV24-1, TRBJ2-2)
TSVPPVIGPPGSCFF

SEQ ID NO: 172053 - protein, 10 aa, Homo sapiens
  CDR3 for alpha chain variable domain of TCR clone 86027 (TRAV12-3, TRAJ49)
CAMNDDQFYF

SEQ ID NO: 172054 - protein, 18 aa, Homo sapiens
  CDR3 for beta chain variable domain of TCR clone 86027 (TRBV6-5, TRBJ1-1)
CASSYSAPGGTGGTEAFF

SEQ ID NO: 172055 - protein, 15 aa, Homo sapiens
  CDR3 for alpha chain variable domain of TCR clone 86028 (TRAV2, TRAJ42)
CAVEGYGGSQGNLIF

SEQ ID NO: 172056 - protein, 14 aa, Homo sapiens
  CDR3 for beta chain variable domain of TCR clone 86028 (TRBV7-2, TRBJ2-7)
CASSPKTSFYEQYF

SEQ ID NO: 172057 - protein, 17 aa, Homo sapiens
  CDR3 for alpha chain variable domain of TCR clone 86029 (TRAV3, TRAJ6)
CAVRDGPRAGGSYIPTF

SEQ ID NO: 172058 - protein, 15 aa, Homo sapiens
  CDR3 for beta chain variable domain of TCR clone 86029 (TRBV20-1, TRBJ2-7)
CSARVPAAYFYEQYF

SEQ ID NO: 172059 - protein, 12 aa, Homo sapiens
  CDR3 for alpha chain variable domain of TCR clone 86030 (TRAV12-3, TRAJ20)
CAMVRGDYKLSF

SEQ ID NO: 172060 - protein, 14 aa, Homo sapiens
  CDR3 for beta chain variable domain of TCR clone 86030 (TRBV11-2, TRBJ2-3)
CASSRLARTDTQYF

SEQ ID NO: 172061 - protein, 17 aa, Homo sapiens
  CDR3 for alpha chain variable domain of TCR clone 86031 (TRAV3, TRAJ42)
CAVRDRDYGGSQGNLIF

SEQ ID NO: 172062 - protein, 15 aa, Homo sapiens
  CDR3 for beta chain variable domain of TCR clone 86031 (TRBV6-6, TRBJ2-3)
CASSYSYGGSYEQYF

SEQ ID NO: 172063 - protein, 17 aa, Homo sapiens
  CDR3 for alpha chain variable domain of TCR clone 86032 (TRAV3, TRAJ6)
CAVRDGPRAGGSYIPTF

SEQ ID NO: 172064 - protein, 14 aa, Homo sapiens
  CDR3 for beta chain variable domain of TCR clone 86032 (TRBV7-9, TRBJ1-2)
CASSRQGANYGYTF

SEQ ID NO: 172065 - protein, 16 aa, Homo sapiens
  CDR3 for alpha chain variable domain of TCR clone 86033 (TRAV26-2, TRAJ45)
CTTASPIGGGADGLTF

SEQ ID NO: 172066 - protein, 20 aa, Homo sapiens
  CDR3 for beta chain variable domain of TCR clone 86033 (TRBV28, TRBJ2-1)
CASTPNGRSPGLAGGNEQFF

SEQ ID NO: 172067 - protein, 16 aa, Homo sapiens
  CDR3 for alpha chain variable domain of TCR clone 86034 (TRAV26-1, TRAJ22)
IASPEYRSGSARQLTF

SEQ ID NO: 172068 - protein, 13 aa, Homo sapiens
  CDR3 for beta chain variable domain of TCR clone 86034 (TRBV7-9, TRBJ1-2)
CASSLKQNYGYTF

SEQ ID NO: 172069 - protein, 12 aa, Homo sapiens
  CDR3 for alpha chain variable domain of TCR clone 86035 (TRAV26-1, TRAJ36)
YIVRVRADNLFF

SEQ ID NO: 172070 - protein, 13 aa, Homo sapiens
  CDR3 for beta chain variable domain of TCR clone 86035 (TRBV11-2, TRBJ2-5)
CASSRGPSETQYF

SEQ ID NO: 172071 - protein, 14 aa, Homo sapiens
  CDR3 for alpha chain variable domain of TCR clone 86036 (TRAV20, TRAJ37)
CAVQAASNTGKLIF

SEQ ID NO: 172072 - protein, 14 aa, Homo sapiens
  CDR3 for beta chain variable domain of TCR clone 86036 (TRBV2, TRBJ1-5)
CASSENRGGQPQHF

SEQ ID NO: 172073 - protein, 15 aa, Homo sapiens
  CDR3 for alpha chain variable domain of TCR clone 86037 (TRAV17, TRAJ37)
CATDNGSSNTGKLIF

SEQ ID NO: 172074 - protein, 14 aa, Homo sapiens
  CDR3 for beta chain variable domain of TCR clone 86037 (TRBV7-2, TRBJ2-3)
CASSRTSGADTQYF

SEQ ID NO: 172075 - protein, 13 aa, Homo sapiens
  CDR3 for alpha chain variable domain of TCR clone 86038 (TRAV2, TRAJ15)
CAVASQAGTALIF

SEQ ID NO: 172076 - protein, 16 aa, Homo sapiens
  CDR3 for beta chain variable domain of TCR clone 86038 (TRBV2, TRBJ2-3)
CASSTSVEGVTDTQYF

SEQ ID NO: 172077 - protein, 16 aa, Homo sapiens
  CDR3 for alpha chain variable domain of TCR clone 86039 (TRAV3, TRAJ21)
CAVRDIERGNFNKFYF

SEQ ID NO: 172078 - protein, 15 aa, Homo sapiens
  CDR3 for beta chain variable domain of TCR clone 86039 (TRBV7-9, TRBJ1-3)
CASSFRGSPGNTIYF

SEQ ID NO: 172079 - protein, 13 aa, Homo sapiens
  CDR3 for alpha chain variable domain of TCR clone 86040 (TRAV2, TRAJ40)
CAVVTSGTYKYIF

SEQ ID NO: 172080 - protein, 13 aa, Homo sapiens
  CDR3 for beta chain variable domain of TCR clone 86040 (TRBV19, TRBJ2-7)
CASSPRQSYEQYF

SEQ ID NO: 172081 - protein, 14 aa, Homo sapiens
  CDR3 for alpha chain variable domain of TCR clone 86041 (TRAV3, TRAJ17)
CAVRDAAAGNKLTF

SEQ ID NO: 172082 - protein, 13 aa, Homo sapiens
  CDR3 for beta chain variable domain of TCR clone 86041 (TRBV2, TRBJ1-1)
CASSVSGYTEAFL

SEQ ID NO: 172083 - protein, 12 aa, Homo sapiens
  CDR3 for alpha chain variable domain of TCR clone 86042 (TRAV16, TRAJ10)
CSRTGGGNKLTF

SEQ ID NO: 172084 - protein, 15 aa, Homo sapiens
  CDR3 for beta chain variable domain of TCR clone 86042 (TRBV6-3, TRBJ2-7)
CASSSPGTVFYEQYV

SEQ ID NO: 172085 - protein, 14 aa, Homo sapiens
  CDR3 for alpha chain variable domain of TCR clone 86043 (TRAV13-1, TRAJ44)
CAAKATGTASKLTF

SEQ ID NO: 172086 - protein, 17 aa, Homo sapiens
  CDR3 for beta chain variable domain of TCR clone 86043 (TRBV7-3, TRBJ2-3)
CASSLMKRMRGADTQYL

SEQ ID NO: 172087 - protein, 16 aa, Homo sapiens
  CDR3 for alpha chain variable domain of TCR clone 86044 (TRAV3, TRAJ10)
CSVRDMRAGGGNKLTF

SEQ ID NO: 172088 - protein, 15 aa, Homo sapiens
  CDR3 for beta chain variable domain of TCR clone 86044 (TRBV11-2, TRBJ1-6)
CASTGFGTAVSPLHF

SEQ ID NO: 172089 - protein, 14 aa, Homo sapiens
  CDR3 for alpha chain variable domain of TCR clone 86045 (TRAV12-2, TRAJ40)
CAVKIPSGTYKYIF

SEQ ID NO: 172090 - protein, 17 aa, Homo sapiens
  CDR3 for beta chain variable domain of TCR clone 86045 (TRBV7-8, TRBJ2-6)
CASSAGTGGAGANVLTV

SEQ ID NO: 172091 - protein, 15 aa, Homo sapiens
  CDR3 for alpha chain variable domain of TCR clone 86046 (TRAV2, TRAJ9)
CAVEDRGTGGFKTIF

SEQ ID NO: 172092 - protein, 13 aa, Homo sapiens
  CDR3 for beta chain variable domain of TCR clone 86046 (TRBV19, TRBJ2-2)
CASSIWSTGELFF

SEQ ID NO: 172093 - protein, 15 aa, Homo sapiens
  CDR3 for alpha chain variable domain of TCR clone 86047 (TRAV2, TRAJ22)
CAVPSRGGSARQLTF

SEQ ID NO: 172094 - protein, 13 aa, Homo sapiens
  CDR3 for beta chain variable domain of TCR clone 86047 (TRBV19, TRBJ1-2)
CASSVPGQDGYTF

SEQ ID NO: 172095 - protein, 16 aa, Homo sapiens
  CDR3 for alpha chain variable domain of TCR clone 86048 (TRAV12-2, TRAJ28)
CAVITDSGAGSYQLTF

SEQ ID NO: 172096 - protein, 13 aa, Homo sapiens
  CDR3 for beta chain variable domain of TCR clone 86048 (TRBV7-9, TRBJ1-2)
CASSLKQNYGYTF

SEQ ID NO: 172097 - protein, 15 aa, Homo sapiens
  CDR3 for alpha chain variable domain of TCR clone 86049 (TRAV17, TRAJ57)
CATGPSQGGSETLVF

SEQ ID NO: 172098 - protein, 16 aa, Homo sapiens
  CDR3 for beta chain variable domain of TCR clone 86049 (TRBV12-4, TRBJ1-5)
CASSRPVGGANQPQHF

SEQ ID NO: 172099 - protein, 16 aa, Homo sapiens
  CDR3 for alpha chain variable domain of TCR clone 86050 (TRAV1-2, TRAJ10)
CAVRGVLTGGGNKLTF

SEQ ID NO: 172100 - protein, 12 aa, Homo sapiens
  CDR3 for beta chain variable domain of TCR clone 86050 (TRBV7-8, TRBJ2-7)
CASSLGDTEQYF

SEQ ID NO: 172101 - protein, 15 aa, Homo sapiens
  CDR3 for alpha chain variable domain of TCR clone 86051 (TRAV12-1, TRAJ6)
CVVNCPLRRKLHTYI

SEQ ID NO: 172102 - protein, 15 aa, Homo sapiens
  CDR3 for beta chain variable domain of TCR clone 86051 (TRBV6-3, TRBJ1-4)
CASSSPGQENEKLFF

SEQ ID NO: 172103 - protein, 23 aa, Homo sapiens
  CDR3 for alpha chain variable domain of TCR clone 86052 (TRAV26-1, TRAJ38)
CIADNAGNNHIQNPDPAVYQLRD

SEQ ID NO: 172104 - protein, 13 aa, Homo sapiens
  CDR3 for beta chain variable domain of TCR clone 86052 (TRBV20-1, TRBJ1-1)
CSARGGENTEAFF

SEQ ID NO: 172105 - protein, 16 aa, Homo sapiens
  CDR3 for alpha chain variable domain of TCR clone 86053 (TRAV38-1, TRAJ45)
CAFMKGSGGGADGLTF

SEQ ID NO: 172106 - protein, 15 aa, Homo sapiens
  CDR3 for beta chain variable domain of TCR clone 86053 (TRBV20-1, TRBJ2-7)
CSAREGRDSIYEQYF

SEQ ID NO: 172107 - protein, 12 aa, Homo sapiens
  CDR3 for alpha chain variable domain of TCR clone 86054 (TRAV21, TRAJ11)
CAATSGYSTLTF

SEQ ID NO: 172108 - protein, 13 aa, Homo sapiens
  CDR3 for beta chain variable domain of TCR clone 86054 (TRBV20-1, TRBJ1-1)
CSARGGGNTEAVF

SEQ ID NO: 172109 - protein, 14 aa, Homo sapiens
  CDR3 for alpha chain variable domain of TCR clone 86055 (TRAV12-2, TRAJ13)
CAVKKTGGYQKVTF

SEQ ID NO: 172110 - protein, 15 aa, Homo sapiens
  CDR3 for beta chain variable domain of TCR clone 86055 (TRBV5-1, TRBJ2-1)
CASSFRTPTYNEQFF

SEQ ID NO: 172111 - protein, 17 aa, Homo sapiens
  CDR3 for alpha chain variable domain of TCR clone 86056 (TRAV38-1, TRAJ28)
CAFMKPTSGAGSYHLTF

SEQ ID NO: 172112 - protein, 15 aa, Homo sapiens
  CDR3 for beta chain variable domain of TCR clone 86056 (TRBV5-1, TRBJ2-4)
CASSLGGGGSYIQYF

SEQ ID NO: 172113 - protein, 12 aa, Homo sapiens
  CDR3 for alpha chain variable domain of TCR clone 86057 (TRAV13-1, TRAJ17)
CAARTAGNKPTF

SEQ ID NO: 172114 - protein, 15 aa, Homo sapiens
  CDR3 for beta chain variable domain of TCR clone 86057 (TRBV7-6, TRBJ1-1)
CASSPQGGANTEAFF

SEQ ID NO: 172115 - protein, 13 aa, Homo sapiens
  CDR3 for alpha chain variable domain of TCR clone 86058 (TRAV13-2, TRAJ13)
CAERPGGYQKVTF

SEQ ID NO: 172116 - protein, 17 aa, Homo sapiens
  CDR3 for beta chain variable domain of TCR clone 86058 (TRBV7-2, TRBJ2-2)
CASSPRGAGEGTGELFF

SEQ ID NO: 172117 - protein, 12 aa, Homo sapiens
  CDR3 for alpha chain variable domain of TCR clone 86059 (TRAV13-2, TRAJ8)
CAPWLCFQKLVF

SEQ ID NO: 172118 - protein, 15 aa, Homo sapiens
  CDR3 for beta chain variable domain of TCR clone 86059 (TRBV12-4, TRBJ2-5)
CASSLSGAFQETQYF

SEQ ID NO: 172119 - protein, 15 aa, Homo sapiens
  CDR3 for alpha chain variable domain of TCR clone 86060 (TRAV12-2, TRAJ11)
CAVNLRNSGYSTLTF

SEQ ID NO: 172120 - protein, 17 aa, Homo sapiens
  CDR3 for beta chain variable domain of TCR clone 86060 (TRBV11-2, TRBJ2-1)
CASSLYPPGVEYNEQFF

SEQ ID NO: 172121 - protein, 11 aa, Homo sapiens
  CDR3 for alpha chain variable domain of TCR clone 86061 (TRAV12-3, TRAJ27)
CAMANAGKSTF

SEQ ID NO: 172122 - protein, 13 aa, Homo sapiens
  CDR3 for beta chain variable domain of TCR clone 86061 (TRBV20-1, TRBJ1-1)
RGARVGGNTEAFF

SEQ ID NO: 172123 - protein, 12 aa, Homo sapiens
  CDR3 for alpha chain variable domain of TCR clone 86062 (TRAV13-1, TRAJ48)
CAANFGNEKLTF

SEQ ID NO: 172124 - protein, 13 aa, Homo sapiens
  CDR3 for beta chain variable domain of TCR clone 86062 (TRBV7-3, TRBJ1-1)
CASSQYWGAEAFF

SEQ ID NO: 172125 - protein, 13 aa, Homo sapiens
  CDR3 for alpha chain variable domain of TCR clone 86063 (TRAV5, TRAJ30)
CAAIANRDDKIIF

SEQ ID NO: 172126 - protein, 14 aa, Homo sapiens
  CDR3 for beta chain variable domain of TCR clone 86063 (TRBV4-1, TRBJ2-2)
CASSQAVNTGELFF

SEQ ID NO: 172127 - protein, 18 aa, Homo sapiens
  CDR3 for alpha chain variable domain of TCR clone 86064 (TRAV21, TRAJ52)
CAVRPSPAGGTSYGKLTF

SEQ ID NO: 172128 - protein, 16 aa, Homo sapiens
  CDR3 for beta chain variable domain of TCR clone 86064 (TRBV27, TRBJ1-5)
CASSFGQGGPRQPQHF

SEQ ID NO: 172129 - protein, 18 aa, Homo sapiens
  CDR3 for alpha chain variable domain of TCR clone 86065 (TRAV13-1, TRAJ52)
CAAKNPNAGGTSYGKLTF

SEQ ID NO: 172130 - protein, 13 aa, Homo sapiens
  CDR3 for beta chain variable domain of TCR clone 86065 (TRBV20-1, TRBJ1-1)
CSAVDGTLNEAFF

SEQ ID NO: 172131 - protein, 12 aa, Homo sapiens
  CDR3 for alpha chain variable domain of TCR clone 86066 (TRAV13-1, TRAJ27)
CAAHTNAGKSTF

SEQ ID NO: 172132 - protein, 15 aa, Homo sapiens
  CDR3 for beta chain variable domain of TCR clone 86066 (TRBV7-9, TRBJ1-6)
CASSSPGRGNSTLHF

SEQ ID NO: 172133 - protein, 13 aa, Homo sapiens
  CDR3 for alpha chain variable domain of TCR clone 86067 (TRAV36/DV7, TRAJ37)
CAVFSSNTGKLIF

SEQ ID NO: 172134 - protein, 15 aa, Homo sapiens
  CDR3 for beta chain variable domain of TCR clone 86067 (TRBV5-1, TRBJ1-4)
FAPAAWKDGNEKLFF

SEQ ID NO: 172135 - protein, 11 aa, Homo sapiens
  CDR3 for alpha chain variable domain of TCR clone 86068 (TRAV2, TRAJ13)
CASGGYQKVTF

SEQ ID NO: 172136 - protein, 16 aa, Homo sapiens
  CDR3 for beta chain variable domain of TCR clone 86068 (TRBV19, TRBJ2-1)
CASSKAGPSFYNEQFF

SEQ ID NO: 172137 - protein, 14 aa, Homo sapiens
  CDR3 for alpha chain variable domain of TCR clone 86069 (TRAV38-1, TRAJ40)
CALRRTSGTYKYIF

SEQ ID NO: 172138 - protein, 14 aa, Homo sapiens
  CDR3 for beta chain variable domain of TCR clone 86069 (TRBV25-1, TRBJ1-1)
CASTHLGGNTEAFF

SEQ ID NO: 172139 - protein, 11 aa, Homo sapiens
  CDR3 for alpha chain variable domain of TCR clone 86070 (TRAV2, TRAJ23)
CAVETRGKRIF

SEQ ID NO: 172140 - protein, 14 aa, Homo sapiens
  CDR3 for beta chain variable domain of TCR clone 86070 (TRBV2, TRBJ2-3)
CASSEGQNTDTQYF

SEQ ID NO: 172141 - protein, 13 aa, Homo sapiens
  CDR3 for alpha chain variable domain of TCR clone 86071 (TRAV13-2, TRAJ40)
CAEFTSGTYKYIF

SEQ ID NO: 172142 - protein, 14 aa, Homo sapiens
  CDR3 for beta chain variable domain of TCR clone 86071 (TRBV10-2, TRBJ1-5)
CASSPTGRNQPQHF

SEQ ID NO: 172143 - protein, 14 aa, Homo sapiens
  CDR3 for alpha chain variable domain of TCR clone 86072 (TRAV1-1, TRAJ27)
CAVIYNTNAGKATF

SEQ ID NO: 172144 - protein, 15 aa, Homo sapiens
  CDR3 for beta chain variable domain of TCR clone 86072 (TRBV7-2, TRBJ2-1)
CASSSGLAGGNEQFF

SEQ ID NO: 172145 - protein, 11 aa, Homo sapiens
  CDR3 for alpha chain variable domain of TCR clone 86073 (TRAV12-3, TRAJ43)
CAMSASNDMRF

SEQ ID NO: 172146 - protein, 19 aa, Homo sapiens
  CDR3 for beta chain variable domain of TCR clone 86073 (TRBV28, TRBJ2-7)
CASSYSGTSRLGWVYEQYF

SEQ ID NO: 172147 - protein, 14 aa, Homo sapiens
  CDR3 for alpha chain variable domain of TCR clone 86074 (TRAV2, TRAJ9)
CAVGDRSGGFKTIF

SEQ ID NO: 172148 - protein, 19 aa, Homo sapiens
  CDR3 for beta chain variable domain of TCR clone 86074 (TRBV25-1, TRBJ2-2)
CAILVYRVDRGRKTGELFF

SEQ ID NO: 172149 - protein, 14 aa, Homo sapiens
  CDR3 for alpha chain variable domain of TCR clone 86075 (TRAV9-2, TRAJ39)
CALYIYNAGNMLTF

SEQ ID NO: 172150 - protein, 12 aa, Homo sapiens
  CDR3 for beta chain variable domain of TCR clone 86075 (TRBV11-2, TRBJ2-2)
CASSLGGGELFS

SEQ ID NO: 172151 - protein, 13 aa, Homo sapiens
  CDR3 for alpha chain variable domain of TCR clone 86076 (TRAV13-1, TRAJ17)
CAADGAAGNKLTF

SEQ ID NO: 172152 - protein, 14 aa, Homo sapiens
  CDR3 for beta chain variable domain of TCR clone 86076 (TRBV11-2, TRBJ1-3)
CSSSLTQGRNTIYF

SEQ ID NO: 172153 - protein, 14 aa, Homo sapiens
  CDR3 for alpha chain variable domain of TCR clone 86077 (TRAV1-2, TRAJ8)
CAVREDTGFQKLVF

SEQ ID NO: 172154 - protein, 12 aa, Homo sapiens
  CDR3 for beta chain variable domain of TCR clone 86077 (TRBV11-2, TRBJ2-3)
CASRPGTDTQYF

SEQ ID NO: 172155 - protein, 12 aa, Homo sapiens
  CDR3 for alpha chain variable domain of TCR clone 86078 (TRAV12-1, TRAJ40)
CVVYSGTYKYIF

SEQ ID NO: 172156 - protein, 17 aa, Homo sapiens
  CDR3 for beta chain variable domain of TCR clone 86078 (TRBV6-6, TRBJ2-5)
CASSYPLAGGPQETQYF

SEQ ID NO: 172157 - protein, 14 aa, Homo sapiens
  CDR3 for alpha chain variable domain of TCR clone 86079 (TRAV23/DV6, TRAJ4)
CAAPSSGGYHKLIF

SEQ ID NO: 172158 - protein, 16 aa, Homo sapiens
  CDR3 for beta chain variable domain of TCR clone 86079 (TRBV19, TRBJ1-1)
CASRFGGPVTGTEAFF

SEQ ID NO: 172159 - protein, 15 aa, Homo sapiens
  CDR3 for alpha chain variable domain of TCR clone 86080 (TRAV4, TRAJ39)
CLVSPNNNAGNMLTF

SEQ ID NO: 172160 - protein, 13 aa, Homo sapiens
  CDR3 for beta chain variable domain of TCR clone 86080 (TRBV11-2, TRBJ2-5)
CASSSTGEETQYF

SEQ ID NO: 172161 - protein, 13 aa, Homo sapiens
  CDR3 for alpha chain variable domain of TCR clone 86081 (TRAV17, TRAJ26)
CVTVDNYGQNFVF

SEQ ID NO: 172162 - protein, 13 aa, Homo sapiens
  CDR3 for beta chain variable domain of TCR clone 86081 (TRBV14, TRBJ1-1)
CASSREFGTEAFF

SEQ ID NO: 172163 - protein, 13 aa, Homo sapiens
  CDR3 for alpha chain variable domain of TCR clone 86082 (TRAV13-1, TRAJ28)
CAANEAGSYQLTF

SEQ ID NO: 172164 - protein, 15 aa, Homo sapiens
  CDR3 for beta chain variable domain of TCR clone 86082 (TRBV7-9, TRBJ1-6)
CASSSPGRGSSPLHF

SEQ ID NO: 172165 - protein, 14 aa, Homo sapiens
  CDR3 for alpha chain variable domain of TCR clone 86083 (TRAV12-2, TRAJ24)
CAVTPADSWGKLQF

SEQ ID NO: 172166 - protein, 14 aa, Homo sapiens
  CDR3 for beta chain variable domain of TCR clone 86083 (TRBV25-1, TRBJ1-1)
CASTHLGGNTEAFF

SEQ ID NO: 172167 - protein, 12 aa, Homo sapiens
  CDR3 for alpha chain variable domain of TCR clone 86084 (TRAV35, TRAJ31)
CAAASNNARLMF

SEQ ID NO: 172168 - protein, 12 aa, Homo sapiens
  CDR3 for beta chain variable domain of TCR clone 86084 (TRBV6-3, TRBJ2-7)
CASSLTPYEQYF

SEQ ID NO: 172169 - protein, 15 aa, Homo sapiens
  CDR3 for alpha chain variable domain of TCR clone 86085 (TRAV3, TRAJ20)
CAVRDIKLSDYKLSF

SEQ ID NO: 172170 - protein, 15 aa, Homo sapiens
  CDR3 for beta chain variable domain of TCR clone 86085 (TRBV6-5, TRBJ2-1)
CASSYDAGAGNEQFF

SEQ ID NO: 172171 - protein, 16 aa, Homo sapiens
  CDR3 for alpha chain variable domain of TCR clone 86086 (TRAV26-1, TRAJ53)
CIVRVAMGGSNYKLTF

SEQ ID NO: 172172 - protein, 12 aa, Homo sapiens
  CDR3 for beta chain variable domain of TCR clone 86086 (TRBV7-9, TRBJ1-5)
CASSPQGQLQHF

SEQ ID NO: 172173 - protein, 18 aa, Homo sapiens
  CDR3 for alpha chain variable domain of TCR clone 86087 (TRAV13-1, TRAJ10)
CAASKGRAVTGGGNKPTF

SEQ ID NO: 172174 - protein, 14 aa, Homo sapiens
  CDR3 for beta chain variable domain of TCR clone 86087 (TRBV18, TRBJ2-7)
CASSPRGGAYEQYF

SEQ ID NO: 172175 - protein, 14 aa, Homo sapiens
  CDR3 for alpha chain variable domain of TCR clone 86088 (TRAV8-3, TRAJ4)
CAVGAAGGYNKLIF

SEQ ID NO: 172176 - protein, 15 aa, Homo sapiens
  CDR3 for beta chain variable domain of TCR clone 86088 (TRBV25-1, TRBJ1-4)
CASSPGDSTNEKLFF

SEQ ID NO: 172177 - protein, 12 aa, Homo sapiens
  CDR3 for alpha chain variable domain of TCR clone 86089 (TRAV12-3, TRAJ17)
FAMTLTGNKLTF

SEQ ID NO: 172178 - protein, 15 aa, Homo sapiens
  CDR3 for beta chain variable domain of TCR clone 86089 (TRBV20-1, TRBJ2-7)
CSARDWVSGMDEQYF

SEQ ID NO: 172179 - protein, 12 aa, Homo sapiens
  CDR3 for alpha chain variable domain of TCR clone 86090 (TRAV12-3, TRAJ17)
CAMTLTGNKLTS

SEQ ID NO: 172180 - protein, 16 aa, Homo sapiens
  CDR3 for beta chain variable domain of TCR clone 86090 (TRBV19, TRBJ2-1)
CASSKAGPSSYNEQFF

SEQ ID NO: 172181 - protein, 14 aa, Homo sapiens
  CDR3 for alpha chain variable domain of TCR clone 86091 (TRAV1-2, TRAJ16)
CAVNRFSDGQKLLF

SEQ ID NO: 172182 - protein, 15 aa, Homo sapiens
  CDR3 for beta chain variable domain of TCR clone 86091 (TRBV7-9, TRBJ1-6)
CASSSPGRGNSPLFF

SEQ ID NO: 172183 - protein, 17 aa, Homo sapiens
  CDR3 for alpha chain variable domain of TCR clone 86092 (TRAV13-1, TRAJ28)
CAASPPYPGAGSFQLTF

SEQ ID NO: 172184 - protein, 13 aa, Homo sapiens
  CDR3 for beta chain variable domain of TCR clone 86092 (TRBV12-5, TRBJ2-3)
CASGDRQSDTQYF

SEQ ID NO: 172185 - protein, 15 aa, Homo sapiens
  CDR3 for alpha chain variable domain of TCR clone 86093 (TRAV13-1, TRAJ32)
CAASNGWWCYQQAHL

SEQ ID NO: 172186 - protein, 17 aa, Homo sapiens
  CDR3 for beta chain variable domain of TCR clone 86093 (TRBV15, TRBJ1-2)
CATSGREIDVVNYGYTF

SEQ ID NO: 172187 - protein, 13 aa, Homo sapiens
  CDR3 for alpha chain variable domain of TCR clone 86094 (TRAV8-3, TRAJ4)
WVFYSGGYNKLIL

SEQ ID NO: 172188 - protein, 14 aa, Homo sapiens
  CDR3 for beta chain variable domain of TCR clone 86094 (TRBV7-9, TRBJ2-3)
CASSLEDGTDTQYF

SEQ ID NO: 172189 - protein, 14 aa, Homo sapiens
  CDR3 for alpha chain variable domain of TCR clone 86095 (TRAV23/DV6, TRAJ4)
CAANLSGGDNKLIF

SEQ ID NO: 172190 - protein, 11 aa, Homo sapiens
  CDR3 for beta chain variable domain of TCR clone 86095 (TRBV7-9, TRBJ2-3)
CASSPTDTQYF

SEQ ID NO: 172191 - protein, 14 aa, Homo sapiens
  CDR3 for alpha chain variable domain of TCR clone 86096 (TRAV1-1, TRAJ35)
RAVRSIGFGNVLHC

SEQ ID NO: 172192 - protein, 14 aa, Homo sapiens
  CDR3 for beta chain variable domain of TCR clone 86096 (TRBV19, TRBJ2-1)
CASPTFVLSGEQFF

SEQ ID NO: 172193 - protein, 14 aa, Homo sapiens
  CDR3 for alpha chain variable domain of TCR clone 86097 (TRAV21, TRAJ40)
CAVVWTSGTYKYTF

SEQ ID NO: 172194 - protein, 12 aa, Homo sapiens
  CDR3 for beta chain variable domain of TCR clone 86097 (TRBV28, TRBJ2-6)
CAIQAGANVLTF

SEQ ID NO: 172195 - protein, 18 aa, Homo sapiens
  CDR3 for alpha chain variable domain of TCR clone 86098 (TRAV26-1, TRAJ52)
CIVRVEGAGGTSYGKLTF

SEQ ID NO: 172196 - protein, 13 aa, Homo sapiens
  CDR3 for beta chain variable domain of TCR clone 86098 (TRBV11-3, TRBJ2-7)
CASSLDKLYEQYF

SEQ ID NO: 172197 - protein, 12 aa, Homo sapiens
  CDR3 for alpha chain variable domain of TCR clone 86099 (TRAV8-3, TRAJ41)
CAVALSGYALNF

SEQ ID NO: 172198 - protein, 17 aa, Homo sapiens
  CDR3 for beta chain variable domain of TCR clone 86099 (TRBV7-3, TRBJ2-2)
CASSLSGTSGGTGELVF

SEQ ID NO: 172199 - protein, 14 aa, Homo sapiens
  CDR3 for alpha chain variable domain of TCR clone 86100 (TRAV2, TRAJ9)
CAVADRSGGFKTIF

SEQ ID NO: 172200 - protein, 13 aa, Homo sapiens
  CDR3 for beta chain variable domain of TCR clone 86100 (TRBV19, TRBJ1-2)
CASSVPGQDGYTF

SEQ ID NO: 172201 - protein, 14 aa, Homo sapiens
  CDR3 for alpha chain variable domain of TCR clone 86101 (TRAV38-1, TRAJ29)
CAFITPSGNTPLVF

SEQ ID NO: 172202 - protein, 14 aa, Homo sapiens
  CDR3 for beta chain variable domain of TCR clone 86101 (TRBV18, TRBJ2-7)
CASAPRGGAYEQYF

SEQ ID NO: 172203 - protein, 14 aa, Homo sapiens
  CDR3 for alpha chain variable domain of TCR clone 86102 (TRAV12-1, TRAJ3)
CGAARYSSASKIIF

SEQ ID NO: 172204 - protein, 14 aa, Homo sapiens
  CDR3 for beta chain variable domain of TCR clone 86102 (TRBV19, TRBJ2-1)
CASPTFVLSGEQFF

SEQ ID NO: 172205 - protein, 13 aa, Homo sapiens
  CDR3 for alpha chain variable domain of TCR clone 86103 (TRAV13-2, TRAJ13)
CAERPGGLPESYL

SEQ ID NO: 172206 - protein, 15 aa, Homo sapiens
  CDR3 for beta chain variable domain of TCR clone 86103 (TRBV28, TRBJ2-7)
CASSPGGRGFYEQYF

SEQ ID NO: 172207 - protein, 15 aa, Homo sapiens
  CDR3 for alpha chain variable domain of TCR clone 86104 (TRAV35, TRAJ40)
CAGQLGTSGTYRYIF

SEQ ID NO: 172208 - protein, 14 aa, Homo sapiens
  CDR3 for beta chain variable domain of TCR clone 86104 (TRBV7-3, TRBJ2-1)
CASSLAGGTNEQFL

SEQ ID NO: 172209 - protein, 15 aa, Homo sapiens
  CDR3 for alpha chain variable domain of TCR clone 86105 (TRAV26-1, TRAJ29)
CIVRVEGSGNTPLVF

SEQ ID NO: 172210 - protein, 15 aa, Homo sapiens
  CDR3 for beta chain variable domain of TCR clone 86105 (TRBV28, TRBJ2-1)
CASSIIAGGRSEQFF

SEQ ID NO: 172211 - protein, 13 aa, Homo sapiens
  CDR3 for alpha chain variable domain of TCR clone 86106 (TRAV13-2, TRAJ48)
CAEMDFGNEKLTF

SEQ ID NO: 172212 - protein, 13 aa, Homo sapiens
  CDR3 for beta chain variable domain of TCR clone 86106 (TRBV7-9, TRBJ1-2)
CASSLKQNYSYTF

SEQ ID NO: 172213 - protein, 11 aa, Homo sapiens
  CDR3 for alpha chain variable domain of TCR clone 86107 (TRAV27, TRAJ47)
STVEYGNKLVF

SEQ ID NO: 172214 - protein, 18 aa, Homo sapiens
  CDR3 for beta chain variable domain of TCR clone 86107 (TRBV2, TRBJ2-1)
CASRGLAGGPRTYNEQFF

SEQ ID NO: 172215 - protein, 14 aa, Homo sapiens
  CDR3 for alpha chain variable domain of TCR clone 86108 (TRAV1-2, TRAJ8)
CAVREDTGFQKLVF

SEQ ID NO: 172216 - protein, 14 aa, Homo sapiens
  CDR3 for beta chain variable domain of TCR clone 86108 (TRBV4-3, TRBJ1-4)
CASSPLQRNEKLFF

SEQ ID NO: 172217 - protein, 16 aa, Homo sapiens
  CDR3 for alpha chain variable domain of TCR clone 86109 (TRAV27, TRAJ52)
CAGAPAGGTSYGKLTF

SEQ ID NO: 172218 - protein, 12 aa, Homo sapiens
  CDR3 for beta chain variable domain of TCR clone 86109 (TRBV27, TRBJ2-1)
CARRGFYNEQFF

SEQ ID NO: 172219 - protein, 14 aa, Homo sapiens
  CDR3 for alpha chain variable domain of TCR clone 86110 (TRAV29/DV5, TRAJ34)
CAASASRETDKLIF

SEQ ID NO: 172220 - protein, 16 aa, Homo sapiens
  CDR3 for beta chain variable domain of TCR clone 86110 (TRBV12-5, TRBJ2-5)
CASGPRTSGNQETQYF

SEQ ID NO: 172221 - protein, 16 aa, Homo sapiens
  CDR3 for alpha chain variable domain of TCR clone 86111 (TRAV3, TRAJ5)
CAVRNLMDTGRRAHTF

SEQ ID NO: 172222 - protein, 16 aa, Homo sapiens
  CDR3 for beta chain variable domain of TCR clone 86111 (TRBV4-2, TRBJ2-7)
CASSQEGLANSYEQYF

SEQ ID NO: 172223 - protein, 15 aa, Homo sapiens
  CDR3 for alpha chain variable domain of TCR clone 86112 (TRAV4, TRAJ10)
CLVGDGSGGGKKLTF

SEQ ID NO: 172224 - protein, 15 aa, Homo sapiens
  CDR3 for beta chain variable domain of TCR clone 86112 (TRBV27, TRBJ2-3)
CASSSLAGVIDTQYF

SEQ ID NO: 172225 - protein, 15 aa, Homo sapiens
  CDR3 for alpha chain variable domain of TCR clone 86113 (TRAV13-1, TRAJ32)
CAASIYGGATNKLIF

SEQ ID NO: 172226 - protein, 17 aa, Homo sapiens
  CDR3 for beta chain variable domain of TCR clone 86113 (TRBV7-3, TRBJ2-5)
CASSLGSGGSGSETQYF

SEQ ID NO: 172227 - protein, 15 aa, Homo sapiens
  CDR3 for alpha chain variable domain of TCR clone 86114 (TRAV27, TRAJ24)
CAGGTSADSWGKLQF

SEQ ID NO: 172228 - protein, 20 aa, Homo sapiens
  CDR3 for beta chain variable domain of TCR clone 86114 (TRBV28, TRBJ2-1)
CASTPIGRSPGLAGGNEQFF

SEQ ID NO: 172229 - protein, 14 aa, Homo sapiens
  CDR3 for alpha chain variable domain of TCR clone 86115 (TRAV1-2, TRAJ16)
CAVNRFSDGQKLLF

SEQ ID NO: 172230 - protein, 11 aa, Homo sapiens
  CDR3 for beta chain variable domain of TCR clone 86115 (TRBV7-2, TRBJ2-3)
CASSFVPGQTP

SEQ ID NO: 172231 - protein, 11 aa, Homo sapiens
  CDR3 for alpha chain variable domain of TCR clone 86116 (TRAV12-3, TRAJ43)
CAMSVSNDMRF

SEQ ID NO: 172232 - protein, 14 aa, Homo sapiens
  CDR3 for beta chain variable domain of TCR clone 86116 (TRBV11-2, TRBJ2-5)
CASSRTGGIETQYF

SEQ ID NO: 172233 - protein, 13 aa, Homo sapiens
  CDR3 for alpha chain variable domain of TCR clone 86117 (TRAV21, TRAJ34)
CAVSEGDTDKPIF

SEQ ID NO: 172234 - protein, 17 aa, Homo sapiens
  CDR3 for beta chain variable domain of TCR clone 86117 (TRBV20-1, TRBJ1-5)
CSARDPSAQGFNQPQHF

SEQ ID NO: 172235 - protein, 14 aa, Homo sapiens
  CDR3 for alpha chain variable domain of TCR clone 86118 (TRAV38-1, TRAJ54)
CAFMSPSGAHKLVF

SEQ ID NO: 172236 - protein, 16 aa, Homo sapiens
  CDR3 for beta chain variable domain of TCR clone 86118 (TRBV28, TRBJ2-1)
CASSLGGSGSYNEQFF

SEQ ID NO: 172237 - protein, 15 aa, Homo sapiens
  CDR3 for alpha chain variable domain of TCR clone 86119 (TRAV36/DV7, TRAJ53)
CAVEGSGGSNYKLTF

SEQ ID NO: 172238 - protein, 15 aa, Homo sapiens
  CDR3 for beta chain variable domain of TCR clone 86119 (TRBV27, TRBJ2-2)
CQQFIRFWVTGELFF

SEQ ID NO: 172239 - protein, 12 aa, Homo sapiens
  CDR3 for alpha chain variable domain of TCR clone 86120 (TRAV2, TRAJ31)
CAVEDNNARLMF

SEQ ID NO: 172240 - protein, 16 aa, Homo sapiens
  CDR3 for beta chain variable domain of TCR clone 86120 (TRBV10-3, TRBJ2-1)
CAISGVGDVGGGEQFF

SEQ ID NO: 172241 - protein, 14 aa, Homo sapiens
  CDR3 for alpha chain variable domain of TCR clone 86121 (TRAV38-1, TRAJ45)
CAYYSGGGADGLTF

SEQ ID NO: 172242 - protein, 14 aa, Homo sapiens
  CDR3 for beta chain variable domain of TCR clone 86121 (TRBV25-1, TRBJ1-1)
CASTRLGGNTEAFF

SEQ ID NO: 172243 - protein, 16 aa, Homo sapiens
  CDR3 for alpha chain variable domain of TCR clone 86122 (TRAV16, TRAJ52)
CALSGVGGTSYGKLTF

SEQ ID NO: 172244 - protein, 14 aa, Homo sapiens
  CDR3 for beta chain variable domain of TCR clone 86122 (TRBV19, TRBJ1-2)
CASSLQGQAHGYTF

SEQ ID NO: 172245 - protein, 15 aa, Homo sapiens
  CDR3 for alpha chain variable domain of TCR clone 86123 (TRAV8-3, TRAJ45)
CASSYSGGGADVLTF

SEQ ID NO: 172246 - protein, 15 aa, Homo sapiens
  CDR3 for beta chain variable domain of TCR clone 86123 (TRBV18, TRBJ1-1)
CASSPRQGENTEAFF

SEQ ID NO: 172247 - protein, 13 aa, Homo sapiens
  CDR3 for alpha chain variable domain of TCR clone 86124 (TRAV23/DV6, TRAJ12)
CAPRVDSSYKLIF

SEQ ID NO: 172248 - protein, 12 aa, Homo sapiens
  CDR3 for beta chain variable domain of TCR clone 86124 (TRBV7-6, TRBJ2-5)
CASSLSQEDQYF

SEQ ID NO: 172249 - protein, 19 aa, Homo sapiens
  CDR3 for alpha chain variable domain of TCR clone 86125 (TRAV17, TRAJ17)
CATDGRPEVIKAAGNKLTF

SEQ ID NO: 172250 - protein, 17 aa, Homo sapiens
  CDR3 for beta chain variable domain of TCR clone 86125 (TRBV12-4, TRBJ1-1)
CASSLSGFRTMNTEAFF

SEQ ID NO: 172251 - protein, 13 aa, Homo sapiens
  CDR3 for alpha chain variable domain of TCR clone 86126 (TRAV26-1, TRAJ30)
CIVRVESNDKIIF

SEQ ID NO: 172252 - protein, 14 aa, Homo sapiens
  CDR3 for beta chain variable domain of TCR clone 86126 (TRBV25-1, TRBJ1-1)
CASTHLGGNTEASF

SEQ ID NO: 172253 - protein, 13 aa, Homo sapiens
  CDR3 for alpha chain variable domain of TCR clone 86127 (TRAV12-3, TRAJ40)
CAMSDSGTYKYIF

SEQ ID NO: 172254 - protein, 13 aa, Homo sapiens
  CDR3 for beta chain variable domain of TCR clone 86127 (TRBV10-3, TRBJ2-7)
CASKLAVNYEQYF

SEQ ID NO: 172255 - protein, 11 aa, Homo sapiens
  CDR3 for alpha chain variable domain of TCR clone 86128 (TRAV16, TRAJ33)
CALHSNYQLIW

SEQ ID NO: 172256 - protein, 15 aa, Homo sapiens
  CDR3 for beta chain variable domain of TCR clone 86128 (TRBV4-1, TRBJ2-7)
CASSQQGQGVDEQYF

SEQ ID NO: 172257 - protein, 16 aa, Homo sapiens
  CDR3 for alpha chain variable domain of TCR clone 86129 (TRAV12-2, TRAJ10)
CAVNRVLTGGGNKLTF

SEQ ID NO: 172258 - protein, 14 aa, Homo sapiens
  CDR3 for beta chain variable domain of TCR clone 86129 (TRBV9, TRBJ2-1)
CASSVAVAVNEQFF

SEQ ID NO: 172259 - protein, 13 aa, Homo sapiens
  CDR3 for alpha chain variable domain of TCR clone 86130 (TRAV27, TRAJ41)
CAGEGNSGYALNF

SEQ ID NO: 172260 - protein, 14 aa, Homo sapiens
  CDR3 for beta chain variable domain of TCR clone 86130 (TRBV7-2, TRBJ1-1)
CASSFLTGTTEAYF

SEQ ID NO: 172261 - protein, 13 aa, Homo sapiens
  CDR3 for alpha chain variable domain of TCR clone 86131 (TRAV29/DV5, TRAJ47)
CAASAEYGNKLVF

SEQ ID NO: 172262 - protein, 15 aa, Homo sapiens
  CDR3 for beta chain variable domain of TCR clone 86131 (TRBV7-9, TRBJ1-4)
CASGARTGGNEKLFF

SEQ ID NO: 172263 - protein, 16 aa, Homo sapiens
  CDR3 for alpha chain variable domain of TCR clone 86132 (TRAV12-2, TRAJ43)
CAGDDMRFGAGPRLTV

SEQ ID NO: 172264 - protein, 16 aa, Homo sapiens
  CDR3 for beta chain variable domain of TCR clone 86132 (TRBV2, TRBJ2-4)
CASSEAPGGEQNIQYF

SEQ ID NO: 172265 - protein, 16 aa, Homo sapiens
  CDR3 for alpha chain variable domain of TCR clone 86133 (TRAV38-2/DV8, TRAJ12)
CAYRSVPMDSSYKLIF

SEQ ID NO: 172266 - protein, 15 aa, Homo sapiens
  CDR3 for beta chain variable domain of TCR clone 86133 (TRBV4-1, TRBJ1-4)
CASSDTGGTNEKLFF

SEQ ID NO: 172267 - protein, 13 aa, Homo sapiens
  CDR3 for alpha chain variable domain of TCR clone 86134 (TRAV10, TRAJ41)
CVVSGGAGYALNF

SEQ ID NO: 172268 - protein, 16 aa, Homo sapiens
  CDR3 for beta chain variable domain of TCR clone 86134 (TRBV29-1, TRBJ2-7)
CSVEVVGTSGSYEQYF

SEQ ID NO: 172269 - protein, 17 aa, Homo sapiens
  CDR3 for alpha chain variable domain of TCR clone 86135 (TRAV16, TRAJ58)
CITVLSNGETSGSRLTF

SEQ ID NO: 172270 - protein, 17 aa, Homo sapiens
  CDR3 for beta chain variable domain of TCR clone 86135 (TRBV18, TRBJ2-1)
WASSKGLSGGADNEQFF

SEQ ID NO: 172271 - protein, 16 aa, Homo sapiens
  CDR3 for alpha chain variable domain of TCR clone 86136 (TRAV12-2, TRAJ40)
CAVIRGGTSGTYKYIF

SEQ ID NO: 172272 - protein, 14 aa, Homo sapiens
  CDR3 for beta chain variable domain of TCR clone 86136 (TRBV20-1, TRBJ2-5)
CSARDGRGGETQYF

SEQ ID NO: 172273 - protein, 14 aa, Homo sapiens
  CDR3 for alpha chain variable domain of TCR clone 86137 (TRAV29/DV5, TRAJ36)
CAARRKTGANNLFF

SEQ ID NO: 172274 - protein, 16 aa, Homo sapiens
  CDR3 for beta chain variable domain of TCR clone 86137 (TRBV13, TRBJ2-2)
CASSPRTGEHTGELFF

SEQ ID NO: 172275 - protein, 11 aa, Homo sapiens
  CDR3 for alpha chain variable domain of TCR clone 86138 (TRAV1-2, TRAJ40)
CAVPGTYKYIF

SEQ ID NO: 172276 - protein, 14 aa, Homo sapiens
  CDR3 for beta chain variable domain of TCR clone 86138 (TRBV4-2, TRBJ2-1)
CASGLDRAYNEQFF

SEQ ID NO: 172277 - protein, 13 aa, Homo sapiens
  CDR3 for alpha chain variable domain of TCR clone 86139 (TRAV21, TRAJ57)
CAVIEGGSEKLVF

SEQ ID NO: 172278 - protein, 15 aa, Homo sapiens
  CDR3 for beta chain variable domain of TCR clone 86139 (TRBV10-3, TRBJ2-5)
CAISEFGRGQENQYF

SEQ ID NO: 172279 - protein, 14 aa, Homo sapiens
  CDR3 for alpha chain variable domain of TCR clone 86140 (TRAV34, TRAJ44)
CGADGTGTASKLTF

SEQ ID NO: 172280 - protein, 17 aa, Homo sapiens
  CDR3 for beta chain variable domain of TCR clone 86140 (TRBV7-8, TRBJ2-6)
CASSAGTGGAGANVLTF

SEQ ID NO: 172281 - protein, 18 aa, Homo sapiens
  CDR3 for alpha chain variable domain of TCR clone 86141 (TRAV21, TRAJ52)
CAVRPSPAGGTSYGELTF

SEQ ID NO: 172282 - protein, 15 aa, Homo sapiens
  CDR3 for beta chain variable domain of TCR clone 86141 (TRBV20-1, TRBJ2-5)
CSATPLTGDQETQYF

SEQ ID NO: 172283 - protein, 22 aa, Homo sapiens
  CDR3 for alpha chain variable domain of TCR clone 86142 (TRAV27, TRAJ41)
CAVRTQIPDIQNPDPAVYQLTD

SEQ ID NO: 172284 - protein, 16 aa, Homo sapiens
  CDR3 for beta chain variable domain of TCR clone 86142 (TRBV5-1, TRBJ2-3)
CASSLGLAVYTDTQYF

SEQ ID NO: 172285 - protein, 16 aa, Homo sapiens
  CDR3 for alpha chain variable domain of TCR clone 86143 (TRAV8-3, TRAJ8)
CAVPRDGNTGFQKLEF

SEQ ID NO: 172286 - protein, 14 aa, Homo sapiens
  CDR3 for beta chain variable domain of TCR clone 86143 (TRBV28, TRBJ1-1)
CASSESGRGTEAFF

SEQ ID NO: 172287 - protein, 13 aa, Homo sapiens
  CDR3 for alpha chain variable domain of TCR clone 86144 (TRAV12-2, TRAJ20)
CAVYPSNDYKLSF

SEQ ID NO: 172288 - protein, 15 aa, Homo sapiens
  CDR3 for beta chain variable domain of TCR clone 86144 (TRBV18, TRBJ1-2)
CASSPGNGRGYGYTF

SEQ ID NO: 172289 - protein, 12 aa, Homo sapiens
  CDR3 for alpha chain variable domain of TCR clone 86145 (TRAV9-2, TRAJ36)
CALKKGANNLFF

SEQ ID NO: 172290 - protein, 17 aa, Homo sapiens
  CDR3 for beta chain variable domain of TCR clone 86145 (TRBV28, TRBJ2-5)
CASSTPEGDALQETQYF

SEQ ID NO: 172291 - protein, 12 aa, Homo sapiens
  CDR3 for alpha chain variable domain of TCR clone 86146 (TRAV3, TRAJ43)
CAVRYPNNDMRF

SEQ ID NO: 172292 - protein, 17 aa, Homo sapiens
  CDR3 for beta chain variable domain of TCR clone 86146 (TRBV7-8, TRBJ2-6)
CASSAGTGGAGANVLTF

SEQ ID NO: 172293 - protein, 13 aa, Homo sapiens
  CDR3 for alpha chain variable domain of TCR clone 86147 (TRAV27, TRAJ41)
CAGEGNSGYALNF

SEQ ID NO: 172294 - protein, 15 aa, Homo sapiens
  CDR3 for beta chain variable domain of TCR clone 86147 (TRBV4-1, TRBJ2-7)
CASSQNTGRLYEQYF

SEQ ID NO: 172295 - protein, 14 aa, Homo sapiens
  CDR3 for alpha chain variable domain of TCR clone 86148 (TRAV8-2, TRAJ37)
CVVSISGNTGKLIF

SEQ ID NO: 172296 - protein, 11 aa, Homo sapiens
  CDR3 for beta chain variable domain of TCR clone 86148 (TRBV18, TRBJ2-5)
CASAPRETQYF

SEQ ID NO: 172297 - protein, 12 aa, Homo sapiens
  CDR3 for alpha chain variable domain of TCR clone 86149 (TRAV4, TRAJ21)
CLVGDNFNKFYF

SEQ ID NO: 172298 - protein, 15 aa, Homo sapiens
  CDR3 for beta chain variable domain of TCR clone 86149 (TRBV4-1, TRBJ1-4)
CASSDTGGTNEKLFF

SEQ ID NO: 172299 - protein, 15 aa, Homo sapiens
  CDR3 for alpha chain variable domain of TCR clone 86150 (TRAV21, TRAJ37)
CAVRPTLSNTGKLIF

SEQ ID NO: 172300 - protein, 16 aa, Homo sapiens
  CDR3 for beta chain variable domain of TCR clone 86150 (TRBV24-1, TRBJ2-3)
CAASDRRQDLTDTQYF

SEQ ID NO: 172301 - protein, 14 aa, Homo sapiens
  CDR3 for alpha chain variable domain of TCR clone 86151 (TRAV35, TRAJ33)
CAGSSQDSNYQLIW

SEQ ID NO: 172302 - protein, 15 aa, Homo sapiens
  CDR3 for beta chain variable domain of TCR clone 86151 (TRBV20-1, TRBJ2-7)
CSAESGTSGAYEQYV

SEQ ID NO: 172303 - protein, 12 aa, Homo sapiens
  CDR3 for alpha chain variable domain of TCR clone 86152 (TRAV8-3, TRAJ20)
CAVGGGDYKLSF

SEQ ID NO: 172304 - protein, 14 aa, Homo sapiens
  CDR3 for beta chain variable domain of TCR clone 86152 (TRBV5-1, TRBJ2-7)
CASSRWESLYEQYF

SEQ ID NO: 172305 - protein, 13 aa, Homo sapiens
  CDR3 for alpha chain variable domain of TCR clone 86153 (TRAV20, TRAJ49)
CAVQARTGNQVYF

SEQ ID NO: 172306 - protein, 14 aa, Homo sapiens
  CDR3 for beta chain variable domain of TCR clone 86153 (TRBV7-2, TRBJ2-7)
CASSPKTSFYEQYF

SEQ ID NO: 172307 - protein, 14 aa, Homo sapiens
  CDR3 for alpha chain variable domain of TCR clone 86154 (TRAV1-2, TRAJ6)
CAVSLSGGSYIPTF

SEQ ID NO: 172308 - protein, 13 aa, Homo sapiens
  CDR3 for beta chain variable domain of TCR clone 86154 (TRBV11-2, TRBJ2-5)
CASSRGPSETQYF

SEQ ID NO: 172309 - protein, 14 aa, Homo sapiens
  CDR3 for alpha chain variable domain of TCR clone 86155 (TRAV8-1, TRAJ5)
CAVSMDTGRRALTF

SEQ ID NO: 172310 - protein, 15 aa, Homo sapiens
  CDR3 for beta chain variable domain of TCR clone 86155 (TRBV12-4, TRBJ2-5)
CASSPPTGLQETQYF

SEQ ID NO: 172311 - protein, 13 aa, Homo sapiens
  CDR3 for alpha chain variable domain of TCR clone 86156 (TRAV13-2, TRAJ13)
CAERPGGYQKVTF

SEQ ID NO: 172312 - protein, 14 aa, Homo sapiens
  CDR3 for beta chain variable domain of TCR clone 86156 (TRBV23-1, TRBJ2-5)
CASSFLRSQETQYV

SEQ ID NO: 172313 - protein, 16 aa, Homo sapiens
  CDR3 for alpha chain variable domain of TCR clone 86157 (TRAV16, TRAJ4)
CITVLPFSGGCNKLIF

SEQ ID NO: 172314 - protein, 14 aa, Homo sapiens
  CDR3 for beta chain variable domain of TCR clone 86157 (TRBV19, TRBJ2-7)
CASSMGQGAIEQYF

SEQ ID NO: 172315 - protein, 13 aa, Homo sapiens
  CDR3 for alpha chain variable domain of TCR clone 86158 (TRAV3, TRAJ20)
CAVRDTGDYKLSF

SEQ ID NO: 172316 - protein, 14 aa, Homo sapiens
  CDR3 for beta chain variable domain of TCR clone 86158 (TRBV7-9, TRBJ2-1)
CASSPRDSLYEQFF

SEQ ID NO: 172317 - protein, 16 aa, Homo sapiens
  CDR3 for alpha chain variable domain of TCR clone 86159 (TRAV26-1, TRAJ44)
IASSESRTGTVSKLTF

SEQ ID NO: 172318 - protein, 13 aa, Homo sapiens
  CDR3 for beta chain variable domain of TCR clone 86159 (TRBV7-2, TRBJ1-5)
CASSFARNQPQHF

SEQ ID NO: 172319 - protein, 13 aa, Homo sapiens
  CDR3 for alpha chain variable domain of TCR clone 86160 (TRAV13-1, TRAJ6)
CARGSGGSYIPTF

SEQ ID NO: 172320 - protein, 16 aa, Homo sapiens
  CDR3 for beta chain variable domain of TCR clone 86160 (TRBV19, TRBJ2-3)
CASSPGAASRTDTQYF

SEQ ID NO: 172321 - protein, 13 aa, Homo sapiens
  CDR3 for alpha chain variable domain of TCR clone 86161 (TRAV2, TRAJ40)
CAVVTSGTYKYIF

SEQ ID NO: 172322 - protein, 14 aa, Homo sapiens
  CDR3 for beta chain variable domain of TCR clone 86161 (TRBV18, TRBJ2-5)
CASSPPGHQETQYF

SEQ ID NO: 172323 - protein, 15 aa, Homo sapiens
  CDR3 for alpha chain variable domain of TCR clone 86162 (TRAV26-1, TRAJ28)
CIVRVAGAGSYQLTF

SEQ ID NO: 172324 - protein, 19 aa, Homo sapiens
  CDR3 for beta chain variable domain of TCR clone 86162 (TRBV7-3, TRBJ2-7)
CASSLMGVAGGWPSYEQYF

SEQ ID NO: 172325 - protein, 14 aa, Homo sapiens
  CDR3 for alpha chain variable domain of TCR clone 86163 (TRAV8-3, TRAJ10)
CAVGNAGGGNKLAF

SEQ ID NO: 172326 - protein, 16 aa, Homo sapiens
  CDR3 for beta chain variable domain of TCR clone 86163 (TRBV11-2, TRBJ1-2)
CASSLDTGGADYGYTF

SEQ ID NO: 172327 - protein, 15 aa, Homo sapiens
  CDR3 for alpha chain variable domain of TCR clone 86164 (TRAV4, TRAJ10)
CLVGDEEGGGNKLTF

SEQ ID NO: 172328 - protein, 15 aa, Homo sapiens
  CDR3 for beta chain variable domain of TCR clone 86164 (TRBV7-9, TRBJ2-1)
CASSFVGAGKNEQFF

SEQ ID NO: 172329 - protein, 13 aa, Homo sapiens
  CDR3 for alpha chain variable domain of TCR clone 86165 (TRAV13-1, TRAJ39)
CAASIWAGNMLTF

SEQ ID NO: 172330 - protein, 15 aa, Homo sapiens
  CDR3 for beta chain variable domain of TCR clone 86165 (TRBV7-9, TRBJ1-1)
CASSLLEQGGTEAVF

SEQ ID NO: 172331 - protein, 14 aa, Homo sapiens
  CDR3 for alpha chain variable domain of TCR clone 86166 (TRAV2, TRAJ9)
CAVEDRSGGFKTIF

SEQ ID NO: 172332 - protein, 11 aa, Homo sapiens
  CDR3 for beta chain variable domain of TCR clone 86166 (TRBV7-9, TRBJ2-5)
CASSLGENQYF

SEQ ID NO: 172333 - protein, 14 aa, Homo sapiens
  CDR3 for alpha chain variable domain of TCR clone 86167 (TRAV1-2, TRAJ16)
CAVNRFSDGQKLLF

SEQ ID NO: 172334 - protein, 19 aa, Homo sapiens
  CDR3 for beta chain variable domain of TCR clone 86167 (TRBV4-1, TRBJ2-5)
CASSQEGSGTSKRGETQYF

SEQ ID NO: 172335 - protein, 12 aa, Homo sapiens
  CDR3 for alpha chain variable domain of TCR clone 86168 (TRAV2, TRAJ10)
CASTGGGNKLTF

SEQ ID NO: 172336 - protein, 14 aa, Homo sapiens
  CDR3 for beta chain variable domain of TCR clone 86168 (TRBV12-5, TRBJ2-5)
CASGSRTHQETQYF

SEQ ID NO: 172337 - protein, 14 aa, Homo sapiens
  CDR3 for alpha chain variable domain of TCR clone 86169 (TRAV17, TRAJ31)
CATVLRTNNARLMF

SEQ ID NO: 172338 - protein, 14 aa, Homo sapiens
  CDR3 for beta chain variable domain of TCR clone 86169 (TRBV12-4, TRBJ2-5)
CASSLWQKQETQYF

SEQ ID NO: 172339 - protein, 12 aa, Homo sapiens
  CDR3 for alpha chain variable domain of TCR clone 86170 (TRAV27, TRAJ34)
CAGAKNTDKLIF

SEQ ID NO: 172340 - protein, 16 aa, Homo sapiens
  CDR3 for beta chain variable domain of TCR clone 86170 (TRBV28, TRBJ1-1)
CASSLSGTGWNTEAFF

SEQ ID NO: 172341 - protein, 14 aa, Homo sapiens
  CDR3 for alpha chain variable domain of TCR clone 86171 (TRAV12-2, TRAJ53)
CAVKGGGSNYKLTF

SEQ ID NO: 172342 - protein, 14 aa, Homo sapiens
  CDR3 for beta chain variable domain of TCR clone 86171 (TRBV7-9, TRBJ2-1)
CASRPTGLRNEQFF

SEQ ID NO: 172343 - protein, 14 aa, Homo sapiens
  CDR3 for alpha chain variable domain of TCR clone 86172 (TRAV2, TRAJ9)
CAVEDRSGGSKTIF

SEQ ID NO: 172344 - protein, 16 aa, Homo sapiens
  CDR3 for beta chain variable domain of TCR clone 86172 (TRBV15, TRBJ2-7)
CATSRDGGIPSYEQYF

SEQ ID NO: 172345 - protein, 14 aa, Homo sapiens
  CDR3 for alpha chain variable domain of TCR clone 86173 (TRAV9-2, TRAJ39)
CALYIYNAGNMLTF

SEQ ID NO: 172346 - protein, 14 aa, Homo sapiens
  CDR3 for beta chain variable domain of TCR clone 86173 (TRBV7-9, TRBJ2-2)
CASSGLADTGELFF

SEQ ID NO: 172347 - protein, 12 aa, Homo sapiens
  CDR3 for alpha chain variable domain of TCR clone 86174 (TRAV27, TRAJ36)
CAGMTGANNLFF

SEQ ID NO: 172348 - protein, 16 aa, Homo sapiens
  CDR3 for beta chain variable domain of TCR clone 86174 (TRBV5-1, TRBJ1-1)
CASSSGGNSLNTEAFF

SEQ ID NO: 172349 - protein, 18 aa, Homo sapiens
  CDR3 for alpha chain variable domain of TCR clone 86175 (TRAV26-2, TRAJ54)
CILRDVEVGIQGAQKLVF

SEQ ID NO: 172350 - protein, 17 aa, Homo sapiens
  CDR3 for beta chain variable domain of TCR clone 86175 (TRBV20-1, TRBJ1-5)
CIASLSPGQGGNQPQHF

SEQ ID NO: 172351 - protein, 16 aa, Homo sapiens
  CDR3 for alpha chain variable domain of TCR clone 86176 (TRAV21, TRAJ45)
CAVSWGSGGDADGLTF

SEQ ID NO: 172352 - protein, 14 aa, Homo sapiens
  CDR3 for beta chain variable domain of TCR clone 86176 (TRBV4-2, TRBJ1-2)
CASSPGGSNYGYTF

SEQ ID NO: 172353 - protein, 14 aa, Homo sapiens
  CDR3 for alpha chain variable domain of TCR clone 86177 (TRAV13-1, TRAJ20)
CAAPPGSNDYKLSF

SEQ ID NO: 172354 - protein, 13 aa, Homo sapiens
  CDR3 for beta chain variable domain of TCR clone 86177 (TRBV20-1, TRBJ1-1)
CSAPPGGHTEAFF

SEQ ID NO: 172355 - protein, 11 aa, Homo sapiens
  CDR3 for alpha chain variable domain of TCR clone 86178 (TRAV16, TRAJ33)
CALHSNYQLIW

SEQ ID NO: 172356 - protein, 14 aa, Homo sapiens
  CDR3 for beta chain variable domain of TCR clone 86178 (TRBV7-2, TRBJ2-7)
CASRSQGAAYEQYF

SEQ ID NO: 172357 - protein, 13 aa, Homo sapiens
  CDR3 for alpha chain variable domain of TCR clone 86179 (TRAV12-2, TRAJ37)
CAGGSGNTGKLIF

SEQ ID NO: 172358 - protein, 15 aa, Homo sapiens
  CDR3 for beta chain variable domain of TCR clone 86179 (TRBV7-9, TRBJ1-6)
CASSSPGRGNSPLHF

SEQ ID NO: 172359 - protein, 23 aa, Homo sapiens
  CDR3 for alpha chain variable domain of TCR clone 86180 (TRAV12-2, TRAJ36)
SLLIRDSQPSDSATLERANNLFF

SEQ ID NO: 172360 - protein, 15 aa, Homo sapiens
  CDR3 for beta chain variable domain of TCR clone 86180 (TRBV9, TRBJ1-6)
CASSVAGTGDSPLHF

SEQ ID NO: 172361 - protein, 13 aa, Homo sapiens
  CDR3 for alpha chain variable domain of TCR clone 86181 (TRAV13-1, TRAJ37)
CAARSGNSGKLIF

SEQ ID NO: 172362 - protein, 14 aa, Homo sapiens
  CDR3 for beta chain variable domain of TCR clone 86181 (TRBV12-4, TRBJ2-3)
CASSLGQGTDTQYF

SEQ ID NO: 172363 - protein, 15 aa, Homo sapiens
  CDR3 for alpha chain variable domain of TCR clone 86182 (TRAV16, TRAJ12)
CSKWPLRDSSYKLIF

SEQ ID NO: 172364 - protein, 16 aa, Homo sapiens
  CDR3 for beta chain variable domain of TCR clone 86182 (TRBV15, TRBJ2-3)
CATSRDLGIVTDTQYF

SEQ ID NO: 172365 - protein, 11 aa, Homo sapiens
  CDR3 for alpha chain variable domain of TCR clone 86183 (TRAV12-2, TRAJ49)
CALQGGNQFYF

SEQ ID NO: 172366 - protein, 11 aa, Homo sapiens
  CDR3 for beta chain variable domain of TCR clone 86183 (TRBV19, TRBJ1-1)
CASSIGSEAFF

SEQ ID NO: 172367 - protein, 13 aa, Homo sapiens
  CDR3 for alpha chain variable domain of TCR clone 86184 (TRAV21, TRAJ27)
CAALNTNAGKSTF

SEQ ID NO: 172368 - protein, 12 aa, Homo sapiens
  CDR3 for beta chain variable domain of TCR clone 86184 (TRBV5-1, TRBJ1-2)
CASSQDTYGYTF

SEQ ID NO: 172369 - protein, 11 aa, Homo sapiens
  CDR3 for alpha chain variable domain of TCR clone 86185 (TRAV2, TRAJ21)
CAVFNFNKFYF

SEQ ID NO: 172370 - protein, 14 aa, Homo sapiens
  CDR3 for beta chain variable domain of TCR clone 86185 (TRBV15, TRBJ2-3)
CATRSGTRTDTQYF

SEQ ID NO: 172371 - protein, 14 aa, Homo sapiens
  CDR3 for alpha chain variable domain of TCR clone 86186 (TRAV26-1, TRAJ38)
CIADNAGNNRKLLW

SEQ ID NO: 172372 - protein, 15 aa, Homo sapiens
  CDR3 for beta chain variable domain of TCR clone 86186 (TRBV20-1, TRBJ2-7)
CSARDRVSGMDEQYF

SEQ ID NO: 172373 - protein, 15 aa, Homo sapiens
  CDR3 for alpha chain variable domain of TCR clone 86187 (TRAV17, TRAJ45)
CATAELGGGADGLTF

SEQ ID NO: 172374 - protein, 16 aa, Homo sapiens
  CDR3 for beta chain variable domain of TCR clone 86187 (TRBV4-1, TRBJ2-3)
CASSQSTSGAEDTQYF

SEQ ID NO: 172375 - protein, 14 aa, Homo sapiens
  CDR3 for alpha chain variable domain of TCR clone 86188 (TRAV1-2, TRAJ16)
CAVNRFSDGQKLLS

SEQ ID NO: 172376 - protein, 14 aa, Homo sapiens
  CDR3 for beta chain variable domain of TCR clone 86188 (TRBV4-1, TRBJ2-2)
CASSQAVNTGELFF

SEQ ID NO: 172377 - protein, 15 aa, Homo sapiens
  CDR3 for alpha chain variable domain of TCR clone 86189 (TRAV17, TRAJ57)
CATGPSQGGSEKLVF

SEQ ID NO: 172378 - protein, 16 aa, Homo sapiens
  CDR3 for beta chain variable domain of TCR clone 86189 (TRBV12-4, TRBJ1-5)
CASSRPVGGSNQPEHF

SEQ ID NO: 172379 - protein, 14 aa, Homo sapiens
  CDR3 for alpha chain variable domain of TCR clone 86190 (TRAV17, TRAJ57)
CATDPQGGTEKLVF

SEQ ID NO: 172380 - protein, 16 aa, Homo sapiens
  CDR3 for beta chain variable domain of TCR clone 86190 (TRBV13, TRBJ2-2)
CASSPRTGEHTGELFF

SEQ ID NO: 172381 - protein, 14 aa, Homo sapiens
  CDR3 for alpha chain variable domain of TCR clone 86191 (TRAV17, TRAJ6)
CATDASGGSYIPTF

SEQ ID NO: 172382 - protein, 15 aa, Homo sapiens
  CDR3 for beta chain variable domain of TCR clone 86191 (TRBV10-2, TRBJ2-6)
CASSEQGTGANVLTF

SEQ ID NO: 172383 - protein, 14 aa, Homo sapiens
  CDR3 for alpha chain variable domain of TCR clone 86192 (TRAV2, TRAJ23)
CAVGLRNQGGKLIF

SEQ ID NO: 172384 - protein, 13 aa, Homo sapiens
  CDR3 for beta chain variable domain of TCR clone 86192 (TRBV19, TRBJ1-2)
YASSVPGQDGYTL

SEQ ID NO: 172385 - protein, 16 aa, Homo sapiens
  CDR3 for alpha chain variable domain of TCR clone 86193 (TRAV3, TRAJ10)
CAVRDMRAGGGNKLTF

SEQ ID NO: 172386 - protein, 15 aa, Homo sapiens
  CDR3 for beta chain variable domain of TCR clone 86193 (TRBV7-9, TRBJ2-7)
CAGTPLAGVNYEQYF

SEQ ID NO: 172387 - protein, 15 aa, Homo sapiens
  CDR3 for alpha chain variable domain of TCR clone 86194 (TRAV27, TRAJ38)
CAARRNAGNNRTLIW

SEQ ID NO: 172388 - protein, 13 aa, Homo sapiens
  CDR3 for beta chain variable domain of TCR clone 86194 (TRBV7-3, TRBJ2-1)
CASSLDSYNEQFF

SEQ ID NO: 172389 - protein, 17 aa, Homo sapiens
  CDR3 for alpha chain variable domain of TCR clone 86195 (TRAV23/DV6, TRAJ57)
CAASSTLSQGGSEKLVF

SEQ ID NO: 172390 - protein, 14 aa, Homo sapiens
  CDR3 for beta chain variable domain of TCR clone 86195 (TRBV25-1, TRBJ1-1)
CASTHLGGNTEACF

SEQ ID NO: 172391 - protein, 13 aa, Homo sapiens
  CDR3 for alpha chain variable domain of TCR clone 86196 (TRAV30, TRAJ24)
CGTVTDSWGKLQF

SEQ ID NO: 172392 - protein, 13 aa, Homo sapiens
  CDR3 for beta chain variable domain of TCR clone 86196 (TRBV18, TRBJ2-1)
CASSPPSSNEQFF

SEQ ID NO: 172393 - protein, 15 aa, Homo sapiens
  CDR3 for alpha chain variable domain of TCR clone 86197 (TRAV17, TRAJ37)
CATDGCSSNTGKLIF

SEQ ID NO: 172394 - protein, 15 aa, Homo sapiens
  CDR3 for beta chain variable domain of TCR clone 86197 (TRBV28, TRBJ2-5)
CASSSGRTIQETQYF

SEQ ID NO: 172395 - protein, 14 aa, Homo sapiens
  CDR3 for alpha chain variable domain of TCR clone 86198 (TRAV16, TRAJ39)
CATRRFNAGNMLTF

SEQ ID NO: 172396 - protein, 16 aa, Homo sapiens
  CDR3 for beta chain variable domain of TCR clone 86198 (TRBV3-1, TRBJ1-2)
CASSQGQGVQRDGYTF

SEQ ID NO: 172397 - protein, 12 aa, Homo sapiens
  CDR3 for alpha chain variable domain of TCR clone 86199 (TRAV12-1, TRAJ23)
CVVNIPGGKLIF

SEQ ID NO: 172398 - protein, 10 aa, Homo sapiens
  CDR3 for beta chain variable domain of TCR clone 86199 (TRBV7-2, TRBJ2-7)
VSSGSYEQYF

SEQ ID NO: 172399 - protein, 13 aa, Homo sapiens
  CDR3 for alpha chain variable domain of TCR clone 86200 (TRAV22, TRAJ48)
CAVERFGNEKLTF

SEQ ID NO: 172400 - protein, 13 aa, Homo sapiens
  CDR3 for beta chain variable domain of TCR clone 86200 (TRBV7-9, TRBJ1-2)
CASSLKQNYGYTF

SEQ ID NO: 172401 - protein, 16 aa, Homo sapiens
  CDR3 for alpha chain variable domain of TCR clone 86201 (TRAV26-1, TRAJ53)
CIVRVAMGGSNYKLTF

SEQ ID NO: 172402 - protein, 13 aa, Homo sapiens
  CDR3 for beta chain variable domain of TCR clone 86201 (TRBV20-1, TRBJ1-1)
CSAPLGGGTEAFF

SEQ ID NO: 172403 - protein, 11 aa, Homo sapiens
  CDR3 for alpha chain variable domain of TCR clone 86202 (TRAV13-1, TRAJ23)
CAASSRGKLIF

SEQ ID NO: 172404 - protein, 18 aa, Homo sapiens
  CDR3 for beta chain variable domain of TCR clone 86202 (TRBV11-2, TRBJ2-3)
CASSLGGASRGAPNTQYF

SEQ ID NO: 172405 - protein, 19 aa, Homo sapiens
  CDR3 for alpha chain variable domain of TCR clone 86203 (TRAV39, TRAJ43)
PCMTSLPPTSVPWANDMRF

SEQ ID NO: 172406 - protein, 15 aa, Homo sapiens
  CDR3 for beta chain variable domain of TCR clone 86203 (TRBV12-4, TRBJ2-5)
CASSPPTGPQETQYF

SEQ ID NO: 172407 - protein, 17 aa, Homo sapiens
  CDR3 for alpha chain variable domain of TCR clone 86204 (TRAV38-1, TRAJ45)
CAFMRSHSGGGADGLTF

SEQ ID NO: 172408 - protein, 15 aa, Homo sapiens
  CDR3 for beta chain variable domain of TCR clone 86204 (TRBV7-2, TRBJ2-3)
CASSLVVRGPDTRYF

SEQ ID NO: 172409 - protein, 13 aa, Homo sapiens
  CDR3 for alpha chain variable domain of TCR clone 86205 (TRAV13-1, TRAJ17)
CAASRAAGNKLTF

SEQ ID NO: 172410 - protein, 16 aa, Homo sapiens
  CDR3 for beta chain variable domain of TCR clone 86205 (TRBV12-5, TRBJ2-5)
CASGPRTSGNQETQYF

SEQ ID NO: 172411 - protein, 10 aa, Homo sapiens
  CDR3 for alpha chain variable domain of TCR clone 86206 (TRAV26-1, )
CIVSHRVAGF

SEQ ID NO: 172412 - protein, 14 aa, Homo sapiens
  CDR3 for beta chain variable domain of TCR clone 86206 (TRBV20-1, TRBJ2-7)
CSAWTALSSYEQYF

SEQ ID NO: 172413 - protein, 14 aa, Homo sapiens
  CDR3 for alpha chain variable domain of TCR clone 86207 (TRAV12-2, TRAJ53)
CAVKGGGSNYKLTF

SEQ ID NO: 172414 - protein, 17 aa, Homo sapiens
  CDR3 for beta chain variable domain of TCR clone 86207 (TRBV13, TRBJ2-3)
CASSLSRVAGGRNTQYF

SEQ ID NO: 172415 - protein, 14 aa, Homo sapiens
  CDR3 for alpha chain variable domain of TCR clone 86208 (TRAV1-2, TRAJ16)
CAVNRFSDGQKLLF

SEQ ID NO: 172416 - protein, 18 aa, Homo sapiens
  CDR3 for beta chain variable domain of TCR clone 86208 (TRBV7-3, TRBJ2-1)
CASSLTLASGRAMVSSSS

SEQ ID NO: 172417 - protein, 16 aa, Homo sapiens
  CDR3 for alpha chain variable domain of TCR clone 86209 (TRAV30, TRAJ24)
CGTEIVDADSWGKFQF

SEQ ID NO: 172418 - protein, 12 aa, Homo sapiens
  CDR3 for beta chain variable domain of TCR clone 86209 (TRBV11-2, TRBJ2-2)
CASSLGGGELVF

SEQ ID NO: 172419 - protein, 13 aa, Homo sapiens
  CDR3 for alpha chain variable domain of TCR clone 86210 (TRAV17, TRAJ13)
CATDSGGYQKVTF

SEQ ID NO: 172420 - protein, 14 aa, Homo sapiens
  CDR3 for beta chain variable domain of TCR clone 86210 (TRBV7-9, TRBJ1-2)
CASSPNSRGYGYTF

SEQ ID NO: 172421 - protein, 13 aa, Homo sapiens
  CDR3 for alpha chain variable domain of TCR clone 86211 (TRAV20, TRAJ37)
CAGCSSNTGELIF

SEQ ID NO: 172422 - protein, 21 aa, Homo sapiens
  CDR3 for beta chain variable domain of TCR clone 86211 (TRBV4-2, TRBJ2-3)
PCSQKTRPCISVPAAPDTQYF

SEQ ID NO: 172423 - protein, 15 aa, Homo sapiens
  CDR3 for alpha chain variable domain of TCR clone 86212 (TRAV25, TRAJ52)
CAGTSGITSYGKLTF

SEQ ID NO: 172424 - protein, 16 aa, Homo sapiens
  CDR3 for beta chain variable domain of TCR clone 86212 (TRBV15, TRBJ1-2)
CATSRGPRTGGGGYTF

SEQ ID NO: 172425 - protein, 14 aa, Homo sapiens
  CDR3 for alpha chain variable domain of TCR clone 86213 (TRAV12-2, TRAJ40)
RAVKIPSGTYKYIF

SEQ ID NO: 172426 - protein, 13 aa, Homo sapiens
  CDR3 for beta chain variable domain of TCR clone 86213 (TRBV7-9, TRBJ1-2)
RASSLKQNYGYTF

SEQ ID NO: 172427 - protein, 12 aa, Homo sapiens
  CDR3 for alpha chain variable domain of TCR clone 86214 (TRAV21, TRAJ31)
CAVWGNNARRMF

SEQ ID NO: 172428 - protein, 16 aa, Homo sapiens
  CDR3 for beta chain variable domain of TCR clone 86214 (TRBV27, TRBJ2-5)
CASSYGPGGQKETQYF

SEQ ID NO: 172429 - protein, 13 aa, Homo sapiens
  CDR3 for alpha chain variable domain of TCR clone 86215 (TRAV26-2, TRAJ54)
CILRVGGAQKLVF

SEQ ID NO: 172430 - protein, 16 aa, Homo sapiens
  CDR3 for beta chain variable domain of TCR clone 86215 (TRBV4-1, TRBJ1-1)
CASSSMSERPNTEAFF

SEQ ID NO: 172431 - protein, 14 aa, Homo sapiens
  CDR3 for alpha chain variable domain of TCR clone 86216 (TRAV26-1, TRAJ34)
CIVRVAYNTDKLIF

SEQ ID NO: 172432 - protein, 15 aa, Homo sapiens
  CDR3 for beta chain variable domain of TCR clone 86216 (TRBV20-1, TRBJ2-7)
CSARVPAAYYYEQYF

SEQ ID NO: 172433 - protein, 11 aa, Homo sapiens
  CDR3 for alpha chain variable domain of TCR clone 86217 (TRAV3, TRAJ21)
CAVGNFNKFYF

SEQ ID NO: 172434 - protein, 14 aa, Homo sapiens
  CDR3 for beta chain variable domain of TCR clone 86217 (TRBV29-1, TRBJ2-2)
CSGRGCGNTGELFF

SEQ ID NO: 172435 - protein, 11 aa, Homo sapiens
  CDR3 for alpha chain variable domain of TCR clone 86218 (TRAV21, TRAJ34)
CAHYNTDKLIF

SEQ ID NO: 172436 - protein, 14 aa, Homo sapiens
  CDR3 for beta chain variable domain of TCR clone 86218 (TRBV6-1, TRBJ1-3)
CASVQGGGGNTMYF

SEQ ID NO: 172437 - protein, 16 aa, Homo sapiens
  CDR3 for alpha chain variable domain of TCR clone 86219 (TRAV38-2/DV8, TRAJ47)
CAYRSAITEYGNKLVF

SEQ ID NO: 172438 - protein, 14 aa, Homo sapiens
  CDR3 for beta chain variable domain of TCR clone 86219 (TRBV19, TRBJ2-7)
CASSIFAGTYEQYF

SEQ ID NO: 172439 - protein, 12 aa, Homo sapiens
  CDR3 for alpha chain variable domain of TCR clone 86220 (TRAV1-2, TRAJ29)
CAVPSGNTPLVF

SEQ ID NO: 172440 - protein, 13 aa, Homo sapiens
  CDR3 for beta chain variable domain of TCR clone 86220 (TRBV5-4, TRBJ1-1)
CAGSVDLGTEAFF

SEQ ID NO: 172441 - protein, 15 aa, Homo sapiens
  CDR3 for alpha chain variable domain of TCR clone 86221 (TRAV3, TRAJ22)
CAVRDRGGSARQMTF

SEQ ID NO: 172442 - protein, 13 aa, Homo sapiens
  CDR3 for beta chain variable domain of TCR clone 86221 (TRBV20-1, TRBJ1-1)
CSARVGGNTEAFF

SEQ ID NO: 172443 - protein, 13 aa, Homo sapiens
  CDR3 for alpha chain variable domain of TCR clone 86222 (TRAV20, TRAJ49)
CAVQARTGNQFYF

SEQ ID NO: 172444 - protein, 12 aa, Homo sapiens
  CDR3 for beta chain variable domain of TCR clone 86222 (TRBV7-9, TRBJ2-7)
YASSIKREEQYF

SEQ ID NO: 172445 - protein, 13 aa, Homo sapiens
  CDR3 for alpha chain variable domain of TCR clone 86223 (TRAV12-1, TRAJ21)
CVVTLYNFTKFYF

SEQ ID NO: 172446 - protein, 20 aa, Homo sapiens
  CDR3 for beta chain variable domain of TCR clone 86223 (TRBV7-8, TRBJ2-1)
CASSLAHRLAGVRSYNEQFF

SEQ ID NO: 172447 - protein, 15 aa, Homo sapiens
  CDR3 for alpha chain variable domain of TCR clone 86224 (TRAV26-1, TRAJ22)
CIVRVSFWFCKATDL

SEQ ID NO: 172448 - protein, 15 aa, Homo sapiens
  CDR3 for beta chain variable domain of TCR clone 86224 (TRBV5-1, TRBJ2-1)
CASSPPRAPYNEQFF

SEQ ID NO: 172449 - protein, 11 aa, Homo sapiens
  CDR3 for alpha chain variable domain of TCR clone 86225 (TRAV1-2, TRAJ20)
CAVSNDYKLSF

SEQ ID NO: 172450 - protein, 14 aa, Homo sapiens
  CDR3 for beta chain variable domain of TCR clone 86225 (TRBV5-4, TRBJ1-1)
CASSLDSRRDEAFF

SEQ ID NO: 172451 - protein, 11 aa, Homo sapiens
  CDR3 for alpha chain variable domain of TCR clone 86226 (TRAV36/DV7, TRAJ45)
SGGGGADGLTF

SEQ ID NO: 172452 - protein, 16 aa, Homo sapiens
  CDR3 for beta chain variable domain of TCR clone 86226 (TRBV7-3, TRBJ2-2)
CASSLKRGTLSGELFF

SEQ ID NO: 172453 - protein, 22 aa, Homo sapiens
  CDR3 for alpha chain variable domain of TCR clone 86227 (TRAV21, )
CAVRQDAGNNHIHNPDPAVYQL

SEQ ID NO: 172454 - protein, 16 aa, Homo sapiens
  CDR3 for beta chain variable domain of TCR clone 86227 (TRBV4-2, TRBJ1-1)
CASRPLDGGGDTEAFF

SEQ ID NO: 172455 - protein, 17 aa, Homo sapiens
  CDR3 for alpha chain variable domain of TCR clone 86228 (TRAV2, TRAJ22)
ILQVREADAAEQRQLTF

SEQ ID NO: 172456 - protein, 16 aa, Homo sapiens
  CDR3 for beta chain variable domain of TCR clone 86228 (TRBV2, TRBJ2-5)
CASSETQGVGEETQYL

SEQ ID NO: 172457 - protein, 12 aa, Homo sapiens
  CDR3 for alpha chain variable domain of TCR clone 86229 (TRAV12-3, TRAJ5)
CAMDTGRRALTF

SEQ ID NO: 172458 - protein, 20 aa, Homo sapiens
  CDR3 for beta chain variable domain of TCR clone 86229 (TRBV19, TRBJ2-1)
CASSISRTVTSTRLNNEQFF

SEQ ID NO: 172459 - protein, 14 aa, Homo sapiens
  CDR3 for alpha chain variable domain of TCR clone 86230 (TRAV4, TRAJ23)
CLVGSYNQGGKLIF

SEQ ID NO: 172460 - protein, 11 aa, Homo sapiens
  CDR3 for beta chain variable domain of TCR clone 86230 (TRBV12-4, TRBJ2-2)
CASSSAGELFF

SEQ ID NO: 172461 - protein, 15 aa, Homo sapiens
  CDR3 for alpha chain variable domain of TCR clone 86231 (TRAV34, TRAJ38)
CGADFTPGNNRKLFW

SEQ ID NO: 172462 - protein, 16 aa, Homo sapiens
  CDR3 for beta chain variable domain of TCR clone 86231 (TRBV12-5, TRBJ2-5)
CASGPRTSGNQETQYF

SEQ ID NO: 172463 - protein, 12 aa, Homo sapiens
  CDR3 for alpha chain variable domain of TCR clone 86232 (TRAV12-2, TRAJ10)
WGVTGGGNKLTF

SEQ ID NO: 172464 - protein, 14 aa, Homo sapiens
  CDR3 for beta chain variable domain of TCR clone 86232 (TRBV9, TRBJ2-1)
CASSVVAAYNEQFF

SEQ ID NO: 172465 - protein, 12 aa, Homo sapiens
  CDR3 for alpha chain variable domain of TCR clone 86233 (TRAV1-2, TRAJ17)
CAVRAAGNKLTF

SEQ ID NO: 172466 - protein, 16 aa, Homo sapiens
  CDR3 for beta chain variable domain of TCR clone 86233 (TRBV20-1, TRBJ2-1)
CSAPGLAGSYRDEQFF

SEQ ID NO: 172467 - protein, 11 aa, Homo sapiens
  CDR3 for alpha chain variable domain of TCR clone 86234 (TRAV17, TRAJ21)
CATGNFNNFYF

SEQ ID NO: 172468 - protein, 16 aa, Homo sapiens
  CDR3 for beta chain variable domain of TCR clone 86234 (TRBV2, TRBJ2-1)
CASSANPRDWQAEQFF

SEQ ID NO: 172469 - protein, 16 aa, Homo sapiens
  CDR3 for alpha chain variable domain of TCR clone 86235 (TRAV30, TRAJ24)
CGTEIVDADSWGKFQF

SEQ ID NO: 172470 - protein, 14 aa, Homo sapiens
  CDR3 for beta chain variable domain of TCR clone 86235 (TRBV11-2, TRBJ2-7)
CASSLGNSLYEQYF

SEQ ID NO: 172471 - protein, 15 aa, Homo sapiens
  CDR3 for alpha chain variable domain of TCR clone 86236 (TRAV21, TRAJ24)
CAARSSTDSWGKLQF

SEQ ID NO: 172472 - protein, 15 aa, Homo sapiens
  CDR3 for beta chain variable domain of TCR clone 86236 (TRBV5-1, TRBJ2-1)
CASGPPRAPYNEQFF

SEQ ID NO: 172473 - protein, 14 aa, Homo sapiens
  CDR3 for alpha chain variable domain of TCR clone 86237 (TRAV1-2, TRAJ16)
CAVRSASDGQELLF

SEQ ID NO: 172474 - protein, 17 aa, Homo sapiens
  CDR3 for beta chain variable domain of TCR clone 86237 (TRBV7-3, TRBJ2-3)
CASSLMKRMRGADTQYF

SEQ ID NO: 172475 - protein, 14 aa, Homo sapiens
  CDR3 for alpha chain variable domain of TCR clone 86238 (TRAV12-1, TRAJ38)
CVVHNAGNNRKLIW

SEQ ID NO: 172476 - protein, 13 aa, Homo sapiens
  CDR3 for beta chain variable domain of TCR clone 86238 (TRBV19, TRBJ2-1)
CATARGVYNEQFF

SEQ ID NO: 172477 - protein, 13 aa, Homo sapiens
  CDR3 for alpha chain variable domain of TCR clone 86239 (TRAV3, TRAJ15)
CAVRDQAGTALIF

SEQ ID NO: 172478 - protein, 15 aa, Homo sapiens
  CDR3 for beta chain variable domain of TCR clone 86239 (TRBV9, TRBJ1-6)
CASSVAGTGDSPLHF

SEQ ID NO: 172479 - protein, 20 aa, Homo sapiens
  CDR3 for alpha chain variable domain of TCR clone 86240 (TRAV4, TRAJ29)
CCVLLPRGCVPFSGNTPLFF

SEQ ID NO: 172480 - protein, 17 aa, Homo sapiens
  CDR3 for beta chain variable domain of TCR clone 86240 (TRBV25-1, TRBJ2-7)
CASSDARVVFSSYEQYF

SEQ ID NO: 172481 - protein, 16 aa, Homo sapiens
  CDR3 for alpha chain variable domain of TCR clone 86241 (TRAV12-3, TRAJ53)
CAMSPGSGGRNYKLTF

SEQ ID NO: 172482 - protein, 13 aa, Homo sapiens
  CDR3 for beta chain variable domain of TCR clone 86241 (TRBV7-3, TRBJ1-1)
CASSQDWGAEAFF

SEQ ID NO: 172483 - protein, 14 aa, Homo sapiens
  CDR3 for alpha chain variable domain of TCR clone 86242 (TRAV12-2, TRAJ13)
CAVKKTGGYQQVTF

SEQ ID NO: 172484 - protein, 16 aa, Homo sapiens
  CDR3 for beta chain variable domain of TCR clone 86242 (TRBV6-1, TRBJ2-5)
CASSETLDRGAETQYF

SEQ ID NO: 172485 - protein, 16 aa, Homo sapiens
  CDR3 for alpha chain variable domain of TCR clone 86243 (TRAV21, TRAJ37)
CAVRSAGSSNTGKLIF

SEQ ID NO: 172486 - protein, 13 aa, Homo sapiens
  CDR3 for beta chain variable domain of TCR clone 86243 (TRBV7-9, TRBJ2-5)
CASLPSGRETQYF

SEQ ID NO: 172487 - protein, 14 aa, Homo sapiens
  CDR3 for alpha chain variable domain of TCR clone 86244 (TRAV12-2, TRAJ48)
CAVNAFFGNEKLTF

SEQ ID NO: 172488 - protein, 13 aa, Homo sapiens
  CDR3 for beta chain variable domain of TCR clone 86244 (TRBV28, TRBJ2-7)
CAGPQQGLDEQYF

SEQ ID NO: 172489 - protein, 11 aa, Homo sapiens
  CDR3 for alpha chain variable domain of TCR clone 86245 (TRAV3, TRAJ13)
CAVTSYQKVTF

SEQ ID NO: 172490 - protein, 15 aa, Homo sapiens
  CDR3 for beta chain variable domain of TCR clone 86245 (TRBV7-9, TRBJ2-7)
CSSSSSGLAVYEQYF

SEQ ID NO: 172491 - protein, 14 aa, Homo sapiens
  CDR3 for alpha chain variable domain of TCR clone 86246 (TRAV13-1, TRAJ39)
CAASTGNAGNMLTF

SEQ ID NO: 172492 - protein, 13 aa, Homo sapiens
  CDR3 for beta chain variable domain of TCR clone 86246 (TRBV19, TRBJ2-7)
CASSTTGNYEQYF

SEQ ID NO: 172493 - protein, 11 aa, Homo sapiens
  CDR3 for alpha chain variable domain of TCR clone 86247 (TRAV2, TRAJ31)
CAAGPTARLMF

SEQ ID NO: 172494 - protein, 13 aa, Homo sapiens
  CDR3 for beta chain variable domain of TCR clone 86247 (TRBV4-1, TRBJ2-3)
CASSQPPTDTQYF

SEQ ID NO: 172495 - protein, 15 aa, Homo sapiens
  CDR3 for alpha chain variable domain of TCR clone 86248 (TRAV2, TRAJ22)
CAVPSRGGSARQLTF

SEQ ID NO: 172496 - protein, 14 aa, Homo sapiens
  CDR3 for beta chain variable domain of TCR clone 86248 (TRBV25-1, TRBJ1-1)
CASTHLGGNTEAFF

SEQ ID NO: 172497 - protein, 14 aa, Homo sapiens
  CDR3 for alpha chain variable domain of TCR clone 86249 (TRAV1-2, TRAJ16)
CAVNRFSDGQKLLS

SEQ ID NO: 172498 - protein, 16 aa, Homo sapiens
  CDR3 for beta chain variable domain of TCR clone 86249 (TRBV7-3, TRBJ2-2)
CASSLKRGTLSGELFF

SEQ ID NO: 172499 - protein, 13 aa, Homo sapiens
  CDR3 for alpha chain variable domain of TCR clone 86250 (TRAV12-3, TRAJ13)
CAMSSGGYQKVTF

SEQ ID NO: 172500 - protein, 16 aa, Homo sapiens
  CDR3 for beta chain variable domain of TCR clone 86250 (TRBV5-1, TRBJ1-1)
CASSSGGNSLNTEAFF

SEQ ID NO: 172501 - protein, 10 aa, Homo sapiens
  CDR3 for alpha chain variable domain of TCR clone 86251 (TRAV12-2, TRAJ22)
CAVNETQLTF

SEQ ID NO: 172502 - protein, 13 aa, Homo sapiens
  CDR3 for beta chain variable domain of TCR clone 86251 (TRBV6-5, TRBJ2-6)
CASSTSGPLRLYF

SEQ ID NO: 172503 - protein, 14 aa, Homo sapiens
  CDR3 for alpha chain variable domain of TCR clone 86252 (TRAV1-2, TRAJ16)
CAVNRFPDGQKLLF

SEQ ID NO: 172504 - protein, 17 aa, Homo sapiens
  CDR3 for beta chain variable domain of TCR clone 86252 (TRBV28, TRBJ2-5)
CASSRQGGLAGAETQCF

SEQ ID NO: 172505 - protein, 14 aa, Homo sapiens
  CDR3 for alpha chain variable domain of TCR clone 86253 (TRAV2, TRAJ9)
CAVEDRSGGVKTIF

SEQ ID NO: 172506 - protein, 16 aa, Homo sapiens
  CDR3 for beta chain variable domain of TCR clone 86253 (TRBV7-3, TRBJ2-2)
CASSLKRGTLSGELFF

SEQ ID NO: 172507 - protein, 18 aa, Homo sapiens
  CDR3 for alpha chain variable domain of TCR clone 86254 (TRAV16, TRAJ45)
CAQASYPSSGGGADGLTF

SEQ ID NO: 172508 - protein, 12 aa, Homo sapiens
  CDR3 for beta chain variable domain of TCR clone 86254 (TRBV11-3, TRBJ2-4)
CASSAGRVTQYF

SEQ ID NO: 172509 - protein, 13 aa, Homo sapiens
  CDR3 for alpha chain variable domain of TCR clone 86255 (TRAV12-1, TRAJ33)
CGDAPDSNYQLIW

SEQ ID NO: 172510 - protein, 14 aa, Homo sapiens
  CDR3 for beta chain variable domain of TCR clone 86255 (TRBV4-1, TRBJ2-2)
CASSQAVNTGELFF

SEQ ID NO: 172511 - protein, 16 aa, Homo sapiens
  CDR3 for alpha chain variable domain of TCR clone 86256 (TRAV3, TRAJ10)
CAVRDMGAGGGNKLTF

SEQ ID NO: 172512 - protein, 14 aa, Homo sapiens
  CDR3 for beta chain variable domain of TCR clone 86256 (TRBV25-1, TRBJ1-1)
CASTHLGGNTEAFF

SEQ ID NO: 172513 - protein, 14 aa, Homo sapiens
  CDR3 for alpha chain variable domain of TCR clone 86257 (TRAV12-2, TRAJ40)
CAVKIPSGTYKYIF

SEQ ID NO: 172514 - protein, 14 aa, Homo sapiens
  CDR3 for beta chain variable domain of TCR clone 86257 (TRBV20-1, TRBJ1-1)
CSAQTGIGGTEAFF

SEQ ID NO: 172515 - protein, 12 aa, Homo sapiens
  CDR3 for alpha chain variable domain of TCR clone 86258 (TRAV12-3, TRAJ17)
CAMTLTGNKLTF

SEQ ID NO: 172516 - protein, 16 aa, Homo sapiens
  CDR3 for beta chain variable domain of TCR clone 86258 (TRBV12-4, TRBJ1-4)
CASSLKGIGHGEKLFF

SEQ ID NO: 172517 - protein, 13 aa, Homo sapiens
  CDR3 for alpha chain variable domain of TCR clone 86259 (TRAV8-6, TRAJ8)
CAVSNTGFQKLVF

SEQ ID NO: 172518 - protein, 15 aa, Homo sapiens
  CDR3 for beta chain variable domain of TCR clone 86259 (TRBV28, TRBJ2-5)
CASRSGRTIQETQYF

SEQ ID NO: 172519 - protein, 13 aa, Homo sapiens
  CDR3 for alpha chain variable domain of TCR clone 86260 (TRAV13-2, TRAJ5)
CAVMDTGRRALSF

SEQ ID NO: 172520 - protein, 12 aa, Homo sapiens
  CDR3 for beta chain variable domain of TCR clone 86260 (TRBV28, TRBJ2-7)
CASSFSSYEQYF

SEQ ID NO: 172521 - protein, 13 aa, Homo sapiens
  CDR3 for alpha chain variable domain of TCR clone 86261 (TRAV26-2, TRAJ43)
CILRAVNNNDMRF

SEQ ID NO: 172522 - protein, 16 aa, Homo sapiens
  CDR3 for beta chain variable domain of TCR clone 86261 (TRBV28, TRBJ1-5)
CASSLTGQGWNQPQHF

SEQ ID NO: 172523 - protein, 13 aa, Homo sapiens
  CDR3 for alpha chain variable domain of TCR clone 86262 (TRAV8-6, TRAJ33)
CAVSEGSNYQLIW

SEQ ID NO: 172524 - protein, 12 aa, Homo sapiens
  CDR3 for beta chain variable domain of TCR clone 86262 (TRBV11-2, TRBJ2-2)
CASSLGGGELFF

SEQ ID NO: 172525 - protein, 11 aa, Homo sapiens
  CDR3 for alpha chain variable domain of TCR clone 86263 (TRAV12-1, TRAJ8)
CVVTGFQKLVF

SEQ ID NO: 172526 - protein, 16 aa, Homo sapiens
  CDR3 for beta chain variable domain of TCR clone 86263 (TRBV7-7, TRBJ2-1)
CASSLASGTSYNEQFF

SEQ ID NO: 172527 - protein, 13 aa, Homo sapiens
  CDR3 for alpha chain variable domain of TCR clone 86264 (TRAV2, TRAJ40)
CAVVTSGTHKYIF

SEQ ID NO: 172528 - protein, 15 aa, Homo sapiens
  CDR3 for beta chain variable domain of TCR clone 86264 (TRBV6-1, TRBJ2-3)
CASSERGGITDTQYF

SEQ ID NO: 172529 - protein, 15 aa, Homo sapiens
  CDR3 for alpha chain variable domain of TCR clone 86265 (TRAV8-3, TRAJ27)
CAVGPSKTNAAKSTF

SEQ ID NO: 172530 - protein, 15 aa, Homo sapiens
  CDR3 for beta chain variable domain of TCR clone 86265 (TRBV7-2, TRBJ2-1)
CASSSGLAGGNEQFF

SEQ ID NO: 172531 - protein, 12 aa, Homo sapiens
  CDR3 for alpha chain variable domain of TCR clone 86266 (TRAV12-1, TRAJ40)
CVFYSGTYKYIF

SEQ ID NO: 172532 - protein, 17 aa, Homo sapiens
  CDR3 for beta chain variable domain of TCR clone 86266 (TRBV11-2, TRBJ2-1)
CASSLYPPGVEYNEQFF

SEQ ID NO: 172533 - protein, 11 aa, Homo sapiens
  CDR3 for alpha chain variable domain of TCR clone 86267 (TRAV2, TRAJ13)
CASGGYQKVTF

SEQ ID NO: 172534 - protein, 18 aa, Homo sapiens
  CDR3 for beta chain variable domain of TCR clone 86267 (TRBV12-4, TRBJ2-4)
CASSRTGAVDVAKNIQYF

SEQ ID NO: 172535 - protein, 13 aa, Homo sapiens
  CDR3 for alpha chain variable domain of TCR clone 86268 (TRAV8-3, TRAJ28)
CAVGAVGSYQLTF

SEQ ID NO: 172536 - protein, 16 aa, Homo sapiens
  CDR3 for beta chain variable domain of TCR clone 86268 (TRBV19, TRBJ2-1)
CASSKAGPSSYNEHFF

SEQ ID NO: 172537 - protein, 14 aa, Homo sapiens
  CDR3 for alpha chain variable domain of TCR clone 86269 (TRAV17, TRAJ16)
CATADFSDGQKLLF

SEQ ID NO: 172538 - protein, 10 aa, Homo sapiens
  CDR3 for beta chain variable domain of TCR clone 86269 (TRBV20-1, TRBJ1-4)
PQGANEKLFF

SEQ ID NO: 172539 - protein, 15 aa, Homo sapiens
  CDR3 for alpha chain variable domain of TCR clone 86270 (TRAV26-1, TRAJ17)
CIVRVVKAAGNKLTL

SEQ ID NO: 172540 - protein, 16 aa, Homo sapiens
  CDR3 for beta chain variable domain of TCR clone 86270 (TRBV7-9, TRBJ2-1)
CASSLVSGPSYNEQFF

SEQ ID NO: 172541 - protein, 11 aa, Homo sapiens
  CDR3 for alpha chain variable domain of TCR clone 86271 (TRAV4, TRAJ23)
CLVAPGGKLLF

SEQ ID NO: 172542 - protein, 15 aa, Homo sapiens
  CDR3 for beta chain variable domain of TCR clone 86271 (TRBV7-2, TRBJ2-1)
CASSFQADEYNEQFF

SEQ ID NO: 172543 - protein, 15 aa, Homo sapiens
  CDR3 for alpha chain variable domain of TCR clone 86272 (TRAV23/DV6, TRAJ18)
CAARYRGSTLGRLYF

SEQ ID NO: 172544 - protein, 16 aa, Homo sapiens
  CDR3 for beta chain variable domain of TCR clone 86272 (TRBV20-1, TRBJ1-2)
CSASMGQGVANYGYTL

SEQ ID NO: 172545 - protein, 14 aa, Homo sapiens
  CDR3 for alpha chain variable domain of TCR clone 86273 (TRAV17, TRAJ22)
CATSPSGSARQLTF

SEQ ID NO: 172546 - protein, 12 aa, Homo sapiens
  CDR3 for beta chain variable domain of TCR clone 86273 (TRBV5-4, TRBJ2-1)
CASSLVQNEQFF

SEQ ID NO: 172547 - protein, 14 aa, Homo sapiens
  CDR3 for alpha chain variable domain of TCR clone 86274 (TRAV12-3, TRAJ13)
CAMRNSGGYQKVTF

SEQ ID NO: 172548 - protein, 14 aa, Homo sapiens
  CDR3 for beta chain variable domain of TCR clone 86274 (TRBV4-1, TRBJ1-6)
CASSPGSDSSPLLF

SEQ ID NO: 172549 - protein, 13 aa, Homo sapiens
  CDR3 for alpha chain variable domain of TCR clone 86275 (TRAV38-2/DV8, TRAJ34)
CAYRTWNTDKLIF

SEQ ID NO: 172550 - protein, 18 aa, Homo sapiens
  CDR3 for beta chain variable domain of TCR clone 86275 (TRBV6-5, TRBJ2-6)
CASSYSGNMESGANVLTF

SEQ ID NO: 172551 - protein, 14 aa, Homo sapiens
  CDR3 for alpha chain variable domain of TCR clone 86276 (TRAV1-2, TRAJ16)
CAVNRFSDGQKLLF

SEQ ID NO: 172552 - protein, 13 aa, Homo sapiens
  CDR3 for beta chain variable domain of TCR clone 86276 (TRBV19, TRBJ1-2)
CASSVPGQDGYAF

SEQ ID NO: 172553 - protein, 12 aa, Homo sapiens
  CDR3 for alpha chain variable domain of TCR clone 86277 (TRAV13-1, TRAJ49)
CAAQNTGNQFYF

SEQ ID NO: 172554 - protein, 17 aa, Homo sapiens
  CDR3 for beta chain variable domain of TCR clone 86277 (TRBV25-1, TRBJ2-7)
CASSDARVVFSSYEQYF

SEQ ID NO: 172555 - protein, 14 aa, Homo sapiens
  CDR3 for alpha chain variable domain of TCR clone 86278 (TRAV1-2, TRAJ16)
CAVNRFSDGQKLLF

SEQ ID NO: 172556 - protein, 15 aa, Homo sapiens
  CDR3 for beta chain variable domain of TCR clone 86278 (TRBV7-9, TRBJ1-6)
CASSSPGRGNLPLHF

SEQ ID NO: 172557 - protein, 13 aa, Homo sapiens
  CDR3 for alpha chain variable domain of TCR clone 86279 (TRAV27, TRAJ49)
CAPRPYTGNQFYF

SEQ ID NO: 172558 - protein, 16 aa, Homo sapiens
  CDR3 for beta chain variable domain of TCR clone 86279 (TRBV7-9, TRBJ2-1)
CASSDVAGGSYNEQFF

SEQ ID NO: 172559 - protein, 15 aa, Homo sapiens
  CDR3 for alpha chain variable domain of TCR clone 86280 (TRAV23/DV6, TRAJ18)
CAARYRGSTLGRLYF

SEQ ID NO: 172560 - protein, 13 aa, Homo sapiens
  CDR3 for beta chain variable domain of TCR clone 86280 (TRBV7-2, TRBJ2-7)
CASSSASGSEQYF

SEQ ID NO: 172561 - protein, 14 aa, Homo sapiens
  CDR3 for alpha chain variable domain of TCR clone 86281 (TRAV1-2, TRAJ16)
CAVNRFSDGQKLLV

SEQ ID NO: 172562 - protein, 16 aa, Homo sapiens
  CDR3 for beta chain variable domain of TCR clone 86281 (TRBV12-5, TRBJ2-5)
CASGPRTSGNQETQYF

SEQ ID NO: 172563 - protein, 15 aa, Homo sapiens
  CDR3 for alpha chain variable domain of TCR clone 86282 (TRAV21, TRAJ53)
CAVRQSGGSNYKLTF

SEQ ID NO: 172564 - protein, 14 aa, Homo sapiens
  CDR3 for beta chain variable domain of TCR clone 86282 (TRBV18, TRBJ2-5)
CASSPGVYQETQYF

SEQ ID NO: 172565 - protein, 16 aa, Homo sapiens
  CDR3 for alpha chain variable domain of TCR clone 86283 (TRAV12-2, TRAJ40)
CAVIRGGTSGTYKYIF

SEQ ID NO: 172566 - protein, 13 aa, Homo sapiens
  CDR3 for beta chain variable domain of TCR clone 86283 (TRBV7-9, TRBJ1-2)
CASSLKQNYGYIF

SEQ ID NO: 172567 - protein, 16 aa, Homo sapiens
  CDR3 for alpha chain variable domain of TCR clone 86284 (TRAV20, TRAJ23)
CAVQPPIYNQGGKLIF

SEQ ID NO: 172568 - protein, 12 aa, Homo sapiens
  CDR3 for beta chain variable domain of TCR clone 86284 (TRBV14, TRBJ2-5)
CASSQLKETQYF

SEQ ID NO: 172569 - protein, 17 aa, Homo sapiens
  CDR3 for alpha chain variable domain of TCR clone 86285 (TRAV16, TRAJ58)
CITVLSNGETSGSRLTF

SEQ ID NO: 172570 - protein, 17 aa, Homo sapiens
  CDR3 for beta chain variable domain of TCR clone 86285 (TRBV18, TRBJ2-1)
CASSKGLSGGADNEQFV

SEQ ID NO: 172571 - protein, 11 aa, Homo sapiens
  CDR3 for alpha chain variable domain of TCR clone 86286 (TRAV27, TRAJ53)
NSGGSNYKLTF

SEQ ID NO: 172572 - protein, 14 aa, Homo sapiens
  CDR3 for beta chain variable domain of TCR clone 86286 (TRBV11-1, TRBJ2-7)
CASTFAVPSYEQYF

SEQ ID NO: 172573 - protein, 13 aa, Homo sapiens
  CDR3 for alpha chain variable domain of TCR clone 86287 (TRAV17, TRAJ9)
CATDYTGGVKTIF

SEQ ID NO: 172574 - protein, 13 aa, Homo sapiens
  CDR3 for beta chain variable domain of TCR clone 86287 (TRBV7-9, TRBJ1-2)
CASSLKQNYGYTF

SEQ ID NO: 172575 - protein, 15 aa, Homo sapiens
  CDR3 for alpha chain variable domain of TCR clone 86288 (TRAV26-1, TRAJ44)
CIVRVATGTASKLTF

SEQ ID NO: 172576 - protein, 12 aa, Homo sapiens
  CDR3 for beta chain variable domain of TCR clone 86288 (TRBV11-2, TRBJ2-2)
CASSLGGGELFF

SEQ ID NO: 172577 - protein, 14 aa, Homo sapiens
  CDR3 for alpha chain variable domain of TCR clone 86289 (TRAV1-2, TRAJ8)
CAVREDTGFQKLVF

SEQ ID NO: 172578 - protein, 22 aa, Homo sapiens
  CDR3 for beta chain variable domain of TCR clone 86289 (TRBV7-3, TRBJ2-2)
GGTQPCISVPAAQEDTQGSCFF

SEQ ID NO: 172579 - protein, 19 aa, Homo sapiens
  CDR3 for alpha chain variable domain of TCR clone 86290 (TRAV6, TRAJ36)
CARQTTSSLGLERDSPLFP

SEQ ID NO: 172580 - protein, 14 aa, Homo sapiens
  CDR3 for beta chain variable domain of TCR clone 86290 (TRBV10-2, TRBJ1-5)
CASSSTGRNQPQHF

SEQ ID NO: 172581 - protein, 23 aa, Homo sapiens
  CDR3 for alpha chain variable domain of TCR clone 86291 (TRAV26-1, TRAJ38)
CIADNAGNNHIQNPDPAVYQLRD

SEQ ID NO: 172582 - protein, 13 aa, Homo sapiens
  CDR3 for beta chain variable domain of TCR clone 86291 (TRBV20-1, TRBJ1-1)
CSARGGRNTEAFF

SEQ ID NO: 172583 - protein, 15 aa, Homo sapiens
  CDR3 for alpha chain variable domain of TCR clone 86292 (TRAV27, TRAJ24)
CAGSMTTDSWGNLQF

SEQ ID NO: 172584 - protein, 15 aa, Homo sapiens
  CDR3 for beta chain variable domain of TCR clone 86292 (TRBV6-6, TRBJ1-5)
CASSSPRGQGQPQHF

SEQ ID NO: 172585 - protein, 16 aa, Homo sapiens
  CDR3 for alpha chain variable domain of TCR clone 86293 (TRAV16, TRAJ42)
CARKMNYGGSQGNLIF

SEQ ID NO: 172586 - protein, 15 aa, Homo sapiens
  CDR3 for beta chain variable domain of TCR clone 86293 (TRBV20-1, TRBJ2-7)
CRAREGRDSLYEQYF

SEQ ID NO: 172587 - protein, 13 aa, Homo sapiens
  CDR3 for alpha chain variable domain of TCR clone 86294 (TRAV12-3, TRAJ33)
CAMSENSNYQLIW

SEQ ID NO: 172588 - protein, 13 aa, Homo sapiens
  CDR3 for beta chain variable domain of TCR clone 86294 (TRBV7-2, TRBJ2-2)
CASSLAVTGELFF

SEQ ID NO: 172589 - protein, 13 aa, Homo sapiens
  CDR3 for alpha chain variable domain of TCR clone 86295 (TRAV20, TRAJ37)
CAGCSSNTGKLIF

SEQ ID NO: 172590 - protein, 15 aa, Homo sapiens
  CDR3 for beta chain variable domain of TCR clone 86295 (TRBV4-1, TRBJ1-4)
CASSDTGGTNEKLFF

SEQ ID NO: 172591 - protein, 12 aa, Homo sapiens
  CDR3 for alpha chain variable domain of TCR clone 86296 (TRAV13-1, TRAJ49)
CAASPMGNQLYF

SEQ ID NO: 172592 - protein, 10 aa, Homo sapiens
  CDR3 for beta chain variable domain of TCR clone 86296 (TRBV15, TRBJ2-7)
AETGGYEQYF

SEQ ID NO: 172593 - protein, 13 aa, Homo sapiens
  CDR3 for alpha chain variable domain of TCR clone 86297 (TRAV1-2, TRAJ9)
CAALNTGGFKTIF

SEQ ID NO: 172594 - protein, 12 aa, Homo sapiens
  CDR3 for beta chain variable domain of TCR clone 86297 (TRBV7-9, TRBJ1-4)
CASSTDREKLFF

SEQ ID NO: 172595 - protein, 14 aa, Homo sapiens
  CDR3 for alpha chain variable domain of TCR clone 86298 (TRAV12-2, TRAJ13)
CAVKKTGGYQKVTF

SEQ ID NO: 172596 - protein, 15 aa, Homo sapiens
  CDR3 for beta chain variable domain of TCR clone 86298 (TRBV20-1, TRBJ2-7)
CSARKGLAESYEQYF

SEQ ID NO: 172597 - protein, 13 aa, Homo sapiens
  CDR3 for alpha chain variable domain of TCR clone 86299 (TRAV29/DV5, TRAJ31)
CAASRNNNARLMF

SEQ ID NO: 172598 - protein, 12 aa, Homo sapiens
  CDR3 for beta chain variable domain of TCR clone 86299 (TRBV12-4, TRBJ1-5)
CASSLGRQPQHF

SEQ ID NO: 172599 - protein, 15 aa, Homo sapiens
  CDR3 for alpha chain variable domain of TCR clone 86300 (TRAV3, TRAJ32)
CAVSSYVGATNKLIF

SEQ ID NO: 172600 - protein, 13 aa, Homo sapiens
  CDR3 for beta chain variable domain of TCR clone 86300 (TRBV20-1, TRBJ2-7)
CSARPSTNYEQYF

SEQ ID NO: 172601 - protein, 16 aa, Homo sapiens
  CDR3 for alpha chain variable domain of TCR clone 86301 (TRAV13-1, TRAJ18)
CAASRMRGSTLGRLYF

SEQ ID NO: 172602 - protein, 15 aa, Homo sapiens
  CDR3 for beta chain variable domain of TCR clone 86301 (TRBV19, TRBJ1-6)
CASSTQGAVGSPLHF

SEQ ID NO: 172603 - protein, 16 aa, Homo sapiens
  CDR3 for alpha chain variable domain of TCR clone 86302 (TRAV12-3, TRAJ53)
CAMSVGSGGSNYKLTF

SEQ ID NO: 172604 - protein, 15 aa, Homo sapiens
  CDR3 for beta chain variable domain of TCR clone 86302 (TRBV9, TRBJ1-6)
CASSVAGTGDSPLHF

SEQ ID NO: 172605 - protein, 15 aa, Homo sapiens
  CDR3 for alpha chain variable domain of TCR clone 86303 (TRAV21, TRAJ52)
CAVRGGGTSYGKLTF

SEQ ID NO: 172606 - protein, 17 aa, Homo sapiens
  CDR3 for beta chain variable domain of TCR clone 86303 (TRBV13, TRBJ2-3)
CASSLSRVAGGRNTQYF

SEQ ID NO: 172607 - protein, 17 aa, Homo sapiens
  CDR3 for alpha chain variable domain of TCR clone 86304 (TRAV16, TRAJ28)
CALSDPYSGAGSYQLTF

SEQ ID NO: 172608 - protein, 14 aa, Homo sapiens
  CDR3 for beta chain variable domain of TCR clone 86304 (TRBV7-9, TRBJ2-1)
CASSPRDSLYEQFF

SEQ ID NO: 172609 - protein, 15 aa, Homo sapiens
  CDR3 for alpha chain variable domain of TCR clone 86305 (TRAV12-3, TRAJ11)
CAMSEENSGYSTLTF

SEQ ID NO: 172610 - protein, 13 aa, Homo sapiens
  CDR3 for beta chain variable domain of TCR clone 86305 (TRBV10-3, TRBJ2-7)
CASKLAVNYEQYF

SEQ ID NO: 172611 - protein, 12 aa, Homo sapiens
  CDR3 for alpha chain variable domain of TCR clone 86306 (TRAV27, TRAJ33)
CAGDGSNYQLIW

SEQ ID NO: 172612 - protein, 13 aa, Homo sapiens
  CDR3 for beta chain variable domain of TCR clone 86306 (TRBV19, TRBJ1-2)
CASSVPGQDGYTF

SEQ ID NO: 172613 - protein, 12 aa, Homo sapiens
  CDR3 for alpha chain variable domain of TCR clone 86307 (TRAV2, TRAJ31)
CAVEDNNARLMF

SEQ ID NO: 172614 - protein, 16 aa, Homo sapiens
  CDR3 for beta chain variable domain of TCR clone 86307 (TRBV20-1, TRBJ1-4)
CSAPGQGLLTNEKLFF

SEQ ID NO: 172615 - protein, 17 aa, Homo sapiens
  CDR3 for alpha chain variable domain of TCR clone 86308 (TRAV3, TRAJ12)
CAVRDGGRMDSSYKLIF

SEQ ID NO: 172616 - protein, 13 aa, Homo sapiens
  CDR3 for beta chain variable domain of TCR clone 86308 (TRBV7-2, TRBJ2-2)
CASSLAVTGELFF

SEQ ID NO: 172617 - protein, 15 aa, Homo sapiens
  CDR3 for alpha chain variable domain of TCR clone 86309 (TRAV38-1, TRAJ57)
CAFMKLQGGSEKLVF

SEQ ID NO: 172618 - protein, 15 aa, Homo sapiens
  CDR3 for beta chain variable domain of TCR clone 86309 (TRBV19, TRBJ2-7)
CASRPTPGLSIEQYF

SEQ ID NO: 172619 - protein, 12 aa, Homo sapiens
  CDR3 for alpha chain variable domain of TCR clone 86310 (TRAV13-2, TRAJ23)
CAERHRGGKLIL

SEQ ID NO: 172620 - protein, 16 aa, Homo sapiens
  CDR3 for beta chain variable domain of TCR clone 86310 (TRBV4-1, TRBJ2-5)
CASSHADRAGGETQYF

SEQ ID NO: 172621 - protein, 13 aa, Homo sapiens
  CDR3 for alpha chain variable domain of TCR clone 86311 (TRAV8-6, TRAJ50)
CAVIKTSYDKVIF

SEQ ID NO: 172622 - protein, 15 aa, Homo sapiens
  CDR3 for beta chain variable domain of TCR clone 86311 (TRBV7-2, TRBJ2-2)
CASRRPGQNTGEPFF

SEQ ID NO: 172623 - protein, 13 aa, Homo sapiens
  CDR3 for alpha chain variable domain of TCR clone 86312 (TRAV13-1, TRAJ6)
CAARRGGSYIPTY

SEQ ID NO: 172624 - protein, 14 aa, Homo sapiens
  CDR3 for beta chain variable domain of TCR clone 86312 (TRBV19, TRBJ2-1)
CASEVTGARNEQFF

SEQ ID NO: 172625 - protein, 15 aa, Homo sapiens
  CDR3 for alpha chain variable domain of TCR clone 86313 (TRAV8-3, TRAJ11)
CAVGLLNSGYSTLTF

SEQ ID NO: 172626 - protein, 13 aa, Homo sapiens
  CDR3 for beta chain variable domain of TCR clone 86313 (TRBV4-2, TRBJ1-1)
CASSQAGNTEAFF

SEQ ID NO: 172627 - protein, 15 aa, Homo sapiens
  CDR3 for alpha chain variable domain of TCR clone 86314 (TRAV9-2, TRAJ56)
CALSDVDGANSKLTF

SEQ ID NO: 172628 - protein, 16 aa, Homo sapiens
  CDR3 for beta chain variable domain of TCR clone 86314 (TRBV12-4, TRBJ2-2)
CASSFRGLVRTGELFF

SEQ ID NO: 172629 - protein, 14 aa, Homo sapiens
  CDR3 for alpha chain variable domain of TCR clone 86315 (TRAV13-2, TRAJ39)
GDSVRNNAGNMLTF

SEQ ID NO: 172630 - protein, 16 aa, Homo sapiens
  CDR3 for beta chain variable domain of TCR clone 86315 (TRBV19, TRBJ2-1)
CASSIDGSFAYNEQFF

SEQ ID NO: 172631 - protein, 13 aa, Homo sapiens
  CDR3 for alpha chain variable domain of TCR clone 86316 (TRAV12-3, TRAJ9)
CAMRNTGRFKTIF

SEQ ID NO: 172632 - protein, 14 aa, Homo sapiens
  CDR3 for beta chain variable domain of TCR clone 86316 (TRBV11-2, TRBJ2-7)
CASSSTGEGYEQYF

SEQ ID NO: 172633 - protein, 16 aa, Homo sapiens
  CDR3 for alpha chain variable domain of TCR clone 86317 (TRAV30, TRAJ24)
CGTEIVDADSWGNSSL

SEQ ID NO: 172634 - protein, 16 aa, Homo sapiens
  CDR3 for beta chain variable domain of TCR clone 86317 (TRBV6-3, TRBJ1-1)
CASTDLGTVPNTEAFF

SEQ ID NO: 172635 - protein, 13 aa, Homo sapiens
  CDR3 for alpha chain variable domain of TCR clone 86318 (TRAV12-2, TRAJ39)
CAVNNNAGNMLTF

SEQ ID NO: 172636 - protein, 16 aa, Homo sapiens
  CDR3 for beta chain variable domain of TCR clone 86318 (TRBV20-1, TRBJ2-3)
CSAVRDRGPIADTQYF

SEQ ID NO: 172637 - protein, 14 aa, Homo sapiens
  CDR3 for alpha chain variable domain of TCR clone 86319 (TRAV27, TRAJ49)
CAGRPEGTGHQFYF

SEQ ID NO: 172638 - protein, 16 aa, Homo sapiens
  CDR3 for beta chain variable domain of TCR clone 86319 (TRBV12-5, TRBJ2-5)
CASGPRTSGNQETQYF

SEQ ID NO: 172639 - protein, 13 aa, Homo sapiens
  CDR3 for alpha chain variable domain of TCR clone 86320 (TRAV8-3, TRAJ43)
CAVVPYNNNDMRF

SEQ ID NO: 172640 - protein, 17 aa, Homo sapiens
  CDR3 for beta chain variable domain of TCR clone 86320 (TRBV7-8, TRBJ2-6)
CASSAGTGGAGANVLTF

SEQ ID NO: 172641 - protein, 12 aa, Homo sapiens
  CDR3 for alpha chain variable domain of TCR clone 86321 (TRAV36/DV7, TRAJ54)
CAVVRGAQKLEF

SEQ ID NO: 172642 - protein, 13 aa, Homo sapiens
  CDR3 for beta chain variable domain of TCR clone 86321 (TRBV7-9, TRBJ1-2)
CASSLKQNYGYTF

SEQ ID NO: 172643 - protein, 12 aa, Homo sapiens
  CDR3 for alpha chain variable domain of TCR clone 86322 (TRAV3, TRAJ20)
CAVRDGGYKLSF

SEQ ID NO: 172644 - protein, 13 aa, Homo sapiens
  CDR3 for beta chain variable domain of TCR clone 86322 (TRBV9, TRBJ2-1)
CASSVGQGGEQFF

SEQ ID NO: 172645 - protein, 16 aa, Homo sapiens
  CDR3 for alpha chain variable domain of TCR clone 86323 (TRAV21, TRAJ52)
CAVTNAGGTSYGKLTF

SEQ ID NO: 172646 - protein, 13 aa, Homo sapiens
  CDR3 for beta chain variable domain of TCR clone 86323 (TRBV20-1, TRBJ2-3)
CSARLAGTDTQYS

SEQ ID NO: 172647 - protein, 13 aa, Homo sapiens
  CDR3 for alpha chain variable domain of TCR clone 86324 (TRAV1-1, TRAJ9)
CAAKDTGGFKTIF

SEQ ID NO: 172648 - protein, 14 aa, Homo sapiens
  CDR3 for beta chain variable domain of TCR clone 86324 (TRBV20-1, TRBJ2-1)
CSAQIGGSADEQFF

SEQ ID NO: 172649 - protein, 15 aa, Homo sapiens
  CDR3 for alpha chain variable domain of TCR clone 86325 (TRAV14/DV4, TRAJ39)
CAMRAVNNAGNMLTF

SEQ ID NO: 172650 - protein, 12 aa, Homo sapiens
  CDR3 for beta chain variable domain of TCR clone 86325 (TRBV29-1, TRBJ2-3)
CSVTGGADTQYF

SEQ ID NO: 172651 - protein, 17 aa, Homo sapiens
  CDR3 for alpha chain variable domain of TCR clone 86326 (TRAV26-1, TRAJ37)
CIVRVITVSSNTGKLIF

SEQ ID NO: 172652 - protein, 13 aa, Homo sapiens
  CDR3 for beta chain variable domain of TCR clone 86326 (TRBV2, TRBJ1-4)
CASSEQAGEKLFF

SEQ ID NO: 172653 - protein, 16 aa, Homo sapiens
  CDR3 for alpha chain variable domain of TCR clone 86327 (TRAV30, TRAJ24)
CGTEIVDADSWGKFQF

SEQ ID NO: 172654 - protein, 13 aa, Homo sapiens
  CDR3 for beta chain variable domain of TCR clone 86327 (TRBV19, TRBJ2-7)
CASRKAGGSEQYF

SEQ ID NO: 172655 - protein, 16 aa, Homo sapiens
  CDR3 for alpha chain variable domain of TCR clone 86328 (TRAV12-1, TRAJ53)
CVVTSVAGGSNYKLTF

SEQ ID NO: 172656 - protein, 13 aa, Homo sapiens
  CDR3 for beta chain variable domain of TCR clone 86328 (TRBV7-9, TRBJ1-2)
CASSLKQNYGYTF

SEQ ID NO: 172657 - protein, 15 aa, Homo sapiens
  CDR3 for alpha chain variable domain of TCR clone 86329 (TRAV3, TRAJ17)
CAVSPTEAAGNKLTF

SEQ ID NO: 172658 - protein, 12 aa, Homo sapiens
  CDR3 for beta chain variable domain of TCR clone 86329 (TRBV7-9, TRBJ1-6)
CASSLMTSPLHF

SEQ ID NO: 172659 - protein, 12 aa, Homo sapiens
  CDR3 for alpha chain variable domain of TCR clone 86330 (TRAV13-1, TRAJ21)
CAAKESFNKFYF

SEQ ID NO: 172660 - protein, 18 aa, Homo sapiens
  CDR3 for beta chain variable domain of TCR clone 86330 (TRBV20-1, TRBJ2-6)
CSAETTPTHGSGANVLTF

SEQ ID NO: 172661 - protein, 14 aa, Homo sapiens
  CDR3 for alpha chain variable domain of TCR clone 86331 (TRAV3, TRAJ6)
CAVRDWGGSYIPTF

SEQ ID NO: 172662 - protein, 17 aa, Homo sapiens
  CDR3 for beta chain variable domain of TCR clone 86331 (TRBV6-5, TRBJ2-1)
CASRLSVRFESYNEQFF

SEQ ID NO: 172663 - protein, 16 aa, Homo sapiens
  CDR3 for alpha chain variable domain of TCR clone 86332 (TRAV12-3, TRAJ10)
CAMKKGITGGGNKLTF

SEQ ID NO: 172664 - protein, 12 aa, Homo sapiens
  CDR3 for beta chain variable domain of TCR clone 86332 (TRBV20-1, TRBJ2-7)
CSAITPTEEQYF

SEQ ID NO: 172665 - protein, 14 aa, Homo sapiens
  CDR3 for alpha chain variable domain of TCR clone 86333 (TRAV1-2, TRAJ16)
CAVNRFSDVQKLLF

SEQ ID NO: 172666 - protein, 17 aa, Homo sapiens
  CDR3 for beta chain variable domain of TCR clone 86333 (TRBV15, TRBJ1-2)
CATSGREIDVVNYGYTF

SEQ ID NO: 172667 - protein, 13 aa, Homo sapiens
  CDR3 for alpha chain variable domain of TCR clone 86334 (TRAV27, TRAJ57)
CRSAQGGSEKLVF

SEQ ID NO: 172668 - protein, 14 aa, Homo sapiens
  CDR3 for beta chain variable domain of TCR clone 86334 (TRBV7-2, TRBJ1-1)
CASSFLTGTTEAFF

SEQ ID NO: 172669 - protein, 17 aa, Homo sapiens
  CDR3 for alpha chain variable domain of TCR clone 86335 (TRAV13-1, TRAJ52)
CAASSGAGGTSYGKLTF

SEQ ID NO: 172670 - protein, 13 aa, Homo sapiens
  CDR3 for beta chain variable domain of TCR clone 86335 (TRBV9, TRBJ2-1)
CASSVGQGGEQFF

SEQ ID NO: 172671 - protein, 15 aa, Homo sapiens
  CDR3 for alpha chain variable domain of TCR clone 86336 (TRAV38-2/DV8, TRAJ48)
CAYRSGGFGNEKLTF

SEQ ID NO: 172672 - protein, 16 aa, Homo sapiens
  CDR3 for beta chain variable domain of TCR clone 86336 (TRBV28, TRBJ2-7)
CASSPWVATGDLSQYV

SEQ ID NO: 172673 - protein, 13 aa, Homo sapiens
  CDR3 for alpha chain variable domain of TCR clone 86337 (TRAV36/DV7, TRAJ53)
CALSGGSNYRLTF

SEQ ID NO: 172674 - protein, 13 aa, Homo sapiens
  CDR3 for beta chain variable domain of TCR clone 86337 (TRBV28, TRBJ2-7)
CASSLPSRYEQYF

SEQ ID NO: 172675 - protein, 22 aa, Homo sapiens
  CDR3 for alpha chain variable domain of TCR clone 86338 (TRAV26-1, TRAJ30)
CIVRVRTEMTRSSLEKGRDFIF

SEQ ID NO: 172676 - protein, 18 aa, Homo sapiens
  CDR3 for beta chain variable domain of TCR clone 86338 (TRBV4-1, TRBJ1-5)
CASSQDPRGQGLNQPQHF

SEQ ID NO: 172677 - protein, 18 aa, Homo sapiens
  CDR3 for alpha chain variable domain of TCR clone 86339 (TRAV13-1, TRAJ52)
CAAKNPHAGGTSYGKLTF

SEQ ID NO: 172678 - protein, 15 aa, Homo sapiens
  CDR3 for beta chain variable domain of TCR clone 86339 (TRBV6-1, TRBJ2-3)
CASSERGGITDTQYF

SEQ ID NO: 172679 - protein, 15 aa, Homo sapiens
  CDR3 for alpha chain variable domain of TCR clone 86340 (TRAV1-2, TRAJ17)
CAVRDSGAAGNKLTF

SEQ ID NO: 172680 - protein, 15 aa, Homo sapiens
  CDR3 for beta chain variable domain of TCR clone 86340 (TRBV7-9, TRBJ1-1)
CASSPTDGENTEAFF

SEQ ID NO: 172681 - protein, 14 aa, Homo sapiens
  CDR3 for alpha chain variable domain of TCR clone 86341 (TRAV17, TRAJ31)
RATVPLSGNARLMF

SEQ ID NO: 172682 - protein, 15 aa, Homo sapiens
  CDR3 for beta chain variable domain of TCR clone 86341 (TRBV15, TRBJ2-2)
CATSGTGGRVGELFF

SEQ ID NO: 172683 - protein, 15 aa, Homo sapiens
  CDR3 for alpha chain variable domain of TCR clone 86342 (TRAV25, TRAJ23)
CALAPNYNQGGKLIF

SEQ ID NO: 172684 - protein, 15 aa, Homo sapiens
  CDR3 for beta chain variable domain of TCR clone 86342 (TRBV11-3, TRBJ2-3)
CASLKDGREGDTQYF

SEQ ID NO: 172685 - protein, 13 aa, Homo sapiens
  CDR3 for alpha chain variable domain of TCR clone 86343 (TRAV12-2, TRAJ20)
CAVYPSNDYKLSF

SEQ ID NO: 172686 - protein, 15 aa, Homo sapiens
  CDR3 for beta chain variable domain of TCR clone 86343 (TRBV27, TRBJ2-5)
CASSLYPRRGETQYF

SEQ ID NO: 172687 - protein, 12 aa, Homo sapiens
  CDR3 for alpha chain variable domain of TCR clone 86344 (TRAV1-2, TRAJ26)
CAVRYYGQHFVF

SEQ ID NO: 172688 - protein, 14 aa, Homo sapiens
  CDR3 for beta chain variable domain of TCR clone 86344 (TRBV11-1, TRBJ2-7)
CASSFRQGSYEQYF

SEQ ID NO: 172689 - protein, 15 aa, Homo sapiens
  CDR3 for alpha chain variable domain of TCR clone 86345 (TRAV3, TRAJ22)
CAVRDRGGSARQLTF

SEQ ID NO: 172690 - protein, 15 aa, Homo sapiens
  CDR3 for beta chain variable domain of TCR clone 86345 (TRBV7-9, TRBJ1-2)
CASSLDREPNYGYTF

SEQ ID NO: 172691 - protein, 13 aa, Homo sapiens
  CDR3 for alpha chain variable domain of TCR clone 86346 (TRAV3, TRAJ27)
CAVRPLGAGKSTF

SEQ ID NO: 172692 - protein, 16 aa, Homo sapiens
  CDR3 for beta chain variable domain of TCR clone 86346 (TRBV7-2, TRBJ1-3)
CASSSGRVLSGNTIYF

SEQ ID NO: 172693 - protein, 13 aa, Homo sapiens
  CDR3 for alpha chain variable domain of TCR clone 86347 (TRAV3, TRAJ21)
CAVREPDFNKFYF

SEQ ID NO: 172694 - protein, 15 aa, Homo sapiens
  CDR3 for beta chain variable domain of TCR clone 86347 (TRBV19, TRBJ1-6)
CASSTQGAVGSPLHF

SEQ ID NO: 172695 - protein, 13 aa, Homo sapiens
  CDR3 for alpha chain variable domain of TCR clone 86348 (TRAV35, TRAJ36)
CAGPRIGASNLFF

SEQ ID NO: 172696 - protein, 15 aa, Homo sapiens
  CDR3 for beta chain variable domain of TCR clone 86348 (TRBV28, TRBJ2-5)
CASSPPWSYQETQYF

SEQ ID NO: 172697 - protein, 18 aa, Homo sapiens
  CDR3 for alpha chain variable domain of TCR clone 86349 (TRAV26-2, TRAJ54)
CILRDVEVGIQGAQKLVF

SEQ ID NO: 172698 - protein, 14 aa, Homo sapiens
  CDR3 for beta chain variable domain of TCR clone 86349 (TRBV7-9, TRBJ1-1)
CASTPLQSYTEAFF

SEQ ID NO: 172699 - protein, 13 aa, Homo sapiens
  CDR3 for alpha chain variable domain of TCR clone 86350 (TRAV13-1, TRAJ33)
CAASRAGNYQLIW

SEQ ID NO: 172700 - protein, 14 aa, Homo sapiens
  CDR3 for beta chain variable domain of TCR clone 86350 (TRBV13, TRBJ2-5)
CASSLERVGETQYF

SEQ ID NO: 172701 - protein, 16 aa, Homo sapiens
  CDR3 for alpha chain variable domain of TCR clone 86351 (TRAV3, TRAJ3)
CAVSDRAKSSASKIIF

SEQ ID NO: 172702 - protein, 13 aa, Homo sapiens
  CDR3 for beta chain variable domain of TCR clone 86351 (TRBV10-3, TRBJ2-7)
CASKLAVNYEQYF

SEQ ID NO: 172703 - protein, 14 aa, Homo sapiens
  CDR3 for alpha chain variable domain of TCR clone 86352 (TRAV12-3, TRAJ58)
CAMSTETSGSRLTS

SEQ ID NO: 172704 - protein, 15 aa, Homo sapiens
  CDR3 for beta chain variable domain of TCR clone 86352 (TRBV4-1, TRBJ1-4)
CASSDTGGTNEKLFF

SEQ ID NO: 172705 - protein, 12 aa, Homo sapiens
  CDR3 for alpha chain variable domain of TCR clone 86353 (TRAV12-2, TRAJ8)
CAVNTGFQKLVF

SEQ ID NO: 172706 - protein, 15 aa, Homo sapiens
  CDR3 for beta chain variable domain of TCR clone 86353 (TRBV12-4, TRBJ2-5)
CASSPPTGLQETQYF

SEQ ID NO: 172707 - protein, 12 aa, Homo sapiens
  CDR3 for alpha chain variable domain of TCR clone 86354 (TRAV13-2, TRAJ8)
CAPWLGFQKLVF

SEQ ID NO: 172708 - protein, 13 aa, Homo sapiens
  CDR3 for beta chain variable domain of TCR clone 86354 (TRBV12-4, TRBJ1-5)
CASSADRAQPQHF

SEQ ID NO: 172709 - protein, 14 aa, Homo sapiens
  CDR3 for alpha chain variable domain of TCR clone 86355 (TRAV26-1, TRAJ54)
CIVRRTQGAQKLVF

SEQ ID NO: 172710 - protein, 14 aa, Homo sapiens
  CDR3 for beta chain variable domain of TCR clone 86355 (TRBV4-1, TRBJ2-2)
CASSQAVNTGELFF

SEQ ID NO: 172711 - protein, 13 aa, Homo sapiens
  CDR3 for alpha chain variable domain of TCR clone 86356 (TRAV23/DV6, TRAJ15)
CAALPAGRNCSDL

SEQ ID NO: 172712 - protein, 14 aa, Homo sapiens
  CDR3 for beta chain variable domain of TCR clone 86356 (TRBV7-9, TRBJ1-2)
CASSLQGANYGYTF

SEQ ID NO: 172713 - protein, 21 aa, Homo sapiens
  CDR3 for alpha chain variable domain of TCR clone 86357 (TRAV1-1, TRAJ6)
CLLLLRCVRLERTGGSYIPTF

SEQ ID NO: 172714 - protein, 13 aa, Homo sapiens
  CDR3 for beta chain variable domain of TCR clone 86357 (TRBV10-2, TRBJ2-7)
CASGASGGYEQYF

SEQ ID NO: 172715 - protein, 14 aa, Homo sapiens
  CDR3 for alpha chain variable domain of TCR clone 86358 (TRAV1-2, TRAJ16)
CAVNRFSDGQKLLF

SEQ ID NO: 172716 - protein, 16 aa, Homo sapiens
  CDR3 for beta chain variable domain of TCR clone 86358 (TRBV5-1, TRBJ1-1)
CASSLRPRNLNTEAFF

SEQ ID NO: 172717 - protein, 14 aa, Homo sapiens
  CDR3 for alpha chain variable domain of TCR clone 86359 (TRAV13-1, TRAJ44)
CAAKSTGTASKLTF

SEQ ID NO: 172718 - protein, 17 aa, Homo sapiens
  CDR3 for beta chain variable domain of TCR clone 86359 (TRBV7-3, TRBJ2-3)
LASSLMKRMRGADTQYF

SEQ ID NO: 172719 - protein, 17 aa, Homo sapiens
  CDR3 for alpha chain variable domain of TCR clone 86360 (TRAV3, TRAJ42)
CTVRDRDYGGSQGNLIF

SEQ ID NO: 172720 - protein, 15 aa, Homo sapiens
  CDR3 for beta chain variable domain of TCR clone 86360 (TRBV2, TRBJ2-7)
CASSEGLARSYEQYF

SEQ ID NO: 172721 - protein, 15 aa, Homo sapiens
  CDR3 for alpha chain variable domain of TCR clone 86361 (TRAV8-3, TRAJ7)
CAVCSISYGNNRLAF

SEQ ID NO: 172722 - protein, 15 aa, Homo sapiens
  CDR3 for beta chain variable domain of TCR clone 86361 (TRBV4-2, TRBJ1-1)
CASSQEDLPRTEAFF

SEQ ID NO: 172723 - protein, 11 aa, Homo sapiens
  CDR3 for alpha chain variable domain of TCR clone 86362 (TRAV4, TRAJ20)
CLVGDKVTTTS

SEQ ID NO: 172724 - protein, 19 aa, Homo sapiens
  CDR3 for beta chain variable domain of TCR clone 86362 (TRBV23-1, TRBJ2-7)
CASGDRGLAGAPTSSTSGR

SEQ ID NO: 172725 - protein, 13 aa, Homo sapiens
  CDR3 for alpha chain variable domain of TCR clone 86363 (TRAV3, TRAJ34)
CAVRDYNTDKLIF

SEQ ID NO: 172726 - protein, 15 aa, Homo sapiens
  CDR3 for beta chain variable domain of TCR clone 86363 (TRBV7-8, TRBJ2-1)
CASSLADSLYNEQFF

SEQ ID NO: 172727 - protein, 14 aa, Homo sapiens
  CDR3 for alpha chain variable domain of TCR clone 86364 (TRAV8-3, TRAJ11)
CAVGSNSGYSTLTF

SEQ ID NO: 172728 - protein, 14 aa, Homo sapiens
  CDR3 for beta chain variable domain of TCR clone 86364 (TRBV5-1, TRBJ2-7)
CASSLTRGGYEQYF

SEQ ID NO: 172729 - protein, 13 aa, Homo sapiens
  CDR3 for alpha chain variable domain of TCR clone 86365 (TRAV27, TRAJ8)
CAGGTTGFQKLVF

SEQ ID NO: 172730 - protein, 15 aa, Homo sapiens
  CDR3 for beta chain variable domain of TCR clone 86365 (TRBV6-1, TRBJ2-7)
CASSESMGDFYEQYF

SEQ ID NO: 172731 - protein, 14 aa, Homo sapiens
  CDR3 for alpha chain variable domain of TCR clone 86366 (TRAV8-4, TRAJ17)
CAVSEGAAGNKLTF

SEQ ID NO: 172732 - protein, 13 aa, Homo sapiens
  CDR3 for beta chain variable domain of TCR clone 86366 (TRBV19, TRBJ2-1)
CAGSMYRVNEQFF

SEQ ID NO: 172733 - protein, 10 aa, Homo sapiens
  CDR3 for alpha chain variable domain of TCR clone 86367 (TRAV23/DV6, TRAJ57)
CAASSTLSQG

SEQ ID NO: 172734 - protein, 15 aa, Homo sapiens
  CDR3 for beta chain variable domain of TCR clone 86367 (TRBV13, TRBJ1-5)
CASSFGQGGVQPQHF

SEQ ID NO: 172735 - protein, 14 aa, Homo sapiens
  CDR3 for alpha chain variable domain of TCR clone 86368 (TRAV1-2, TRAJ10)
CAVRVTGGGNKLTF

SEQ ID NO: 172736 - protein, 16 aa, Homo sapiens
  CDR3 for beta chain variable domain of TCR clone 86368 (TRBV2, TRBJ2-1)
CASSVGGSLSYDEQFF

SEQ ID NO: 172737 - protein, 13 aa, Homo sapiens
  CDR3 for alpha chain variable domain of TCR clone 86369 (TRAV12-3, TRAJ20)
CAVYPSNDYKLSF

SEQ ID NO: 172738 - protein, 15 aa, Homo sapiens
  CDR3 for beta chain variable domain of TCR clone 86369 (TRBV27, TRBJ2-5)
CASSLYPRGGETQYF

SEQ ID NO: 172739 - protein, 15 aa, Homo sapiens
  CDR3 for alpha chain variable domain of TCR clone 86370 (TRAV12-1, TRAJ44)
CVADLPTGTASKLTF

SEQ ID NO: 172740 - protein, 13 aa, Homo sapiens
  CDR3 for beta chain variable domain of TCR clone 86370 (TRBV6-5, TRBJ2-5)
CASSPLGGETQYF

SEQ ID NO: 172741 - protein, 16 aa, Homo sapiens
  CDR3 for alpha chain variable domain of TCR clone 86371 (TRAV17, TRAJ52)
CATSNAGGTSYGKLTF

SEQ ID NO: 172742 - protein, 13 aa, Homo sapiens
  CDR3 for beta chain variable domain of TCR clone 86371 (TRBV27, TRBJ1-6)
RASSLVLVSPLHF

SEQ ID NO: 172743 - protein, 13 aa, Homo sapiens
  CDR3 for alpha chain variable domain of TCR clone 86372 (TRAV17, TRAJ9)
CATFLTGGFNTIF

SEQ ID NO: 172744 - protein, 16 aa, Homo sapiens
  CDR3 for beta chain variable domain of TCR clone 86372 (TRBV5-7, TRBJ1-4)
CASSPSGGLKTEKLFF

SEQ ID NO: 172745 - protein, 12 aa, Homo sapiens
  CDR3 for alpha chain variable domain of TCR clone 86373 (TRAV12-1, TRAJ40)
CVVYSGTYKYIF

SEQ ID NO: 172746 - protein, 17 aa, Homo sapiens
  CDR3 for beta chain variable domain of TCR clone 86373 (TRBV11-3, TRBJ1-5)
CASSPLTGLRGNQPHHF

SEQ ID NO: 172747 - protein, 14 aa, Homo sapiens
  CDR3 for alpha chain variable domain of TCR clone 86374 (TRAV9-2, TRAJ39)
CALYIYNAGNMLTF

SEQ ID NO: 172748 - protein, 15 aa, Homo sapiens
  CDR3 for beta chain variable domain of TCR clone 86374 (TRBV28, TRBJ2-5)
CASSPPWSYQETQYF

SEQ ID NO: 172749 - protein, 15 aa, Homo sapiens
  CDR3 for alpha chain variable domain of TCR clone 86375 (TRAV13-1, TRAJ32)
CAASIYGGATNKLIF

SEQ ID NO: 172750 - protein, 14 aa, Homo sapiens
  CDR3 for beta chain variable domain of TCR clone 86375 (TRBV7-9, TRBJ2-1)
CASSLASGSKEQFF

SEQ ID NO: 172751 - protein, 14 aa, Homo sapiens
  CDR3 for alpha chain variable domain of TCR clone 86376 (TRAV23/DV6, TRAJ22)
CADISSGSARQLTF

SEQ ID NO: 172752 - protein, 14 aa, Homo sapiens
  CDR3 for beta chain variable domain of TCR clone 86376 (TRBV6-1, TRBJ1-3)
CASVQGGGGNTIYF

SEQ ID NO: 172753 - protein, 16 aa, Homo sapiens
  CDR3 for alpha chain variable domain of TCR clone 86377 (TRAV30, TRAJ26)
CGTESVGDNYGQNYVF

SEQ ID NO: 172754 - protein, 13 aa, Homo sapiens
  CDR3 for beta chain variable domain of TCR clone 86377 (TRBV19, TRBJ1-2)
CASSISEDYGYTF

SEQ ID NO: 172755 - protein, 13 aa, Homo sapiens
  CDR3 for alpha chain variable domain of TCR clone 86378 (TRAV23/DV6, TRAJ21)
CAASIGNFNKFYF

SEQ ID NO: 172756 - protein, 11 aa, Homo sapiens
  CDR3 for beta chain variable domain of TCR clone 86378 (TRBV2, TRBJ1-1)
CASREGTEAFF

SEQ ID NO: 172757 - protein, 15 aa, Homo sapiens
  CDR3 for alpha chain variable domain of TCR clone 86379 (TRAV17, TRAJ57)
CAAGPSQGGSEKLVF

SEQ ID NO: 172758 - protein, 14 aa, Homo sapiens
  CDR3 for beta chain variable domain of TCR clone 86379 (TRBV19, TRBJ2-1)
CASPTFVLSGEQFF

SEQ ID NO: 172759 - protein, 12 aa, Homo sapiens
  CDR3 for alpha chain variable domain of TCR clone 86380 (TRAV12-3, TRAJ20)
CAIVRGDYKLSF

SEQ ID NO: 172760 - protein, 14 aa, Homo sapiens
  CDR3 for beta chain variable domain of TCR clone 86380 (TRBV5-5, TRBJ1-5)
CASSGQGVDQPQHF

SEQ ID NO: 172761 - protein, 14 aa, Homo sapiens
  CDR3 for alpha chain variable domain of TCR clone 86381 (TRAV17, TRAJ16)
CATADFSDGQKLLF

SEQ ID NO: 172762 - protein, 15 aa, Homo sapiens
  CDR3 for beta chain variable domain of TCR clone 86381 (TRBV19, TRBJ1-1)
CASTSGQIQNTEAFF

SEQ ID NO: 172763 - protein, 14 aa, Homo sapiens
  CDR3 for alpha chain variable domain of TCR clone 86382 (TRAV16, TRAJ44)
CALSTTGTASKLTF

SEQ ID NO: 172764 - protein, 16 aa, Homo sapiens
  CDR3 for beta chain variable domain of TCR clone 86382 (TRBV20-1, TRBJ2-3)
CSARLHSAGAIDTQYF

SEQ ID NO: 172765 - protein, 17 aa, Homo sapiens
  CDR3 for alpha chain variable domain of TCR clone 86383 (TRAV8-6, TRAJ58)
CAVSSWVGETSGSRLTF

SEQ ID NO: 172766 - protein, 13 aa, Homo sapiens
  CDR3 for beta chain variable domain of TCR clone 86383 (TRBV12-4, TRBJ1-2)
CASSLRQGKGYTF

SEQ ID NO: 172767 - protein, 16 aa, Homo sapiens
  CDR3 for alpha chain variable domain of TCR clone 86384 (TRAV3, TRAJ5)
CAVRNLMDTGRRALTF

SEQ ID NO: 172768 - protein, 13 aa, Homo sapiens
  CDR3 for beta chain variable domain of TCR clone 86384 (TRBV24-1, TRBJ2-1)
CATSAGPYNEQFF

SEQ ID NO: 172769 - protein, 14 aa, Homo sapiens
  CDR3 for alpha chain variable domain of TCR clone 86385 (TRAV12-2, TRAJ17)
CAVLFKAAGNKLTF

SEQ ID NO: 172770 - protein, 17 aa, Homo sapiens
  CDR3 for beta chain variable domain of TCR clone 86385 (TRBV24-1, TRBJ2-1)
CATSDVSTSGTYNEQFF

SEQ ID NO: 172771 - protein, 16 aa, Homo sapiens
  CDR3 for alpha chain variable domain of TCR clone 86386 (TRAV30, TRAJ24)
CGTEIVDADSWGNSSL

SEQ ID NO: 172772 - protein, 12 aa, Homo sapiens
  CDR3 for beta chain variable domain of TCR clone 86386 (TRBV11-2, TRBJ2-2)
CASSLGGGELFF

SEQ ID NO: 172773 - protein, 14 aa, Homo sapiens
  CDR3 for alpha chain variable domain of TCR clone 86387 (TRAV12-3, TRAJ10)
SHLPLTGGGNKLTF

SEQ ID NO: 172774 - protein, 15 aa, Homo sapiens
  CDR3 for beta chain variable domain of TCR clone 86387 (TRBV11-3, TRBJ2-2)
CASSLVGTGAGELFF

SEQ ID NO: 172775 - protein, 16 aa, Homo sapiens
  CDR3 for alpha chain variable domain of TCR clone 86388 (TRAV30, TRAJ24)
CGTEIVDADSWGKSQF

SEQ ID NO: 172776 - protein, 14 aa, Homo sapiens
  CDR3 for beta chain variable domain of TCR clone 86388 (TRBV12-5, TRBJ2-5)
CASGSRTRQETQYF

SEQ ID NO: 172777 - protein, 18 aa, Homo sapiens
  CDR3 for alpha chain variable domain of TCR clone 86389 (TRAV12-3, TRAJ52)
CAMSVGGAGGTSYGKLTF

SEQ ID NO: 172778 - protein, 15 aa, Homo sapiens
  CDR3 for beta chain variable domain of TCR clone 86389 (TRBV27, TRBJ1-6)
CASSFDRVLGSPLHF

SEQ ID NO: 172779 - protein, 14 aa, Homo sapiens
  CDR3 for alpha chain variable domain of TCR clone 86390 (TRAV1-1, TRAJ30)
CAVRSLNRDDKIIF

SEQ ID NO: 172780 - protein, 17 aa, Homo sapiens
  CDR3 for beta chain variable domain of TCR clone 86390 (TRBV24-1, TRBJ2-1)
CATSDVSTSGTYNEQFF

SEQ ID NO: 172781 - protein, 12 aa, Homo sapiens
  CDR3 for alpha chain variable domain of TCR clone 86391 (TRAV21, TRAJ37)
CAVRGNTGKLIF

SEQ ID NO: 172782 - protein, 16 aa, Homo sapiens
  CDR3 for beta chain variable domain of TCR clone 86391 (TRBV12-5, TRBJ2-5)
CASGPRTSGNQETQYF

SEQ ID NO: 172783 - protein, 13 aa, Homo sapiens
  CDR3 for alpha chain variable domain of TCR clone 86392 (TRAV27, TRAJ45)
CRSSGGGADGLTF

SEQ ID NO: 172784 - protein, 16 aa, Homo sapiens
  CDR3 for beta chain variable domain of TCR clone 86392 (TRBV11-2, TRBJ2-1)
CSSLYPPGVEYNEQFF

SEQ ID NO: 172785 - protein, 11 aa, Homo sapiens
  CDR3 for alpha chain variable domain of TCR clone 86393 (TRAV26-1, TRAJ37)
CIVRVGRRLIF

SEQ ID NO: 172786 - protein, 14 aa, Homo sapiens
  CDR3 for beta chain variable domain of TCR clone 86393 (TRBV9, TRBJ2-7)
CASSVGVGSYEQYF

SEQ ID NO: 172787 - protein, 13 aa, Homo sapiens
  CDR3 for alpha chain variable domain of TCR clone 86394 (TRAV4, TRAJ20)
CLVGSSNDYKLSF

SEQ ID NO: 172788 - protein, 12 aa, Homo sapiens
  CDR3 for beta chain variable domain of TCR clone 86394 (TRBV12-5, TRBJ2-5)
CASGQGVETQYF

SEQ ID NO: 172789 - protein, 13 aa, Homo sapiens
  CDR3 for alpha chain variable domain of TCR clone 86395 (TRAV12-3, TRAJ33)
CAMSVNSNYQLIW

SEQ ID NO: 172790 - protein, 12 aa, Homo sapiens
  CDR3 for beta chain variable domain of TCR clone 86395 (TRBV7-8, TRBJ2-7)
CASSLGDREQYF

SEQ ID NO: 172791 - protein, 11 aa, Homo sapiens
  CDR3 for alpha chain variable domain of TCR clone 86396 (TRAV21, TRAJ31)
CAVRNNARLMF

SEQ ID NO: 172792 - protein, 17 aa, Homo sapiens
  CDR3 for beta chain variable domain of TCR clone 86396 (TRBV7-8, TRBJ2-6)
CASSAGTGGAGANVLTF

SEQ ID NO: 172793 - protein, 14 aa, Homo sapiens
  CDR3 for alpha chain variable domain of TCR clone 86397 (TRAV12-2, TRAJ17)
CAVLFKATGNKLTF

SEQ ID NO: 172794 - protein, 14 aa, Homo sapiens
  CDR3 for beta chain variable domain of TCR clone 86397 (TRBV7-8, TRBJ2-5)
CASSATGGQETQYF

SEQ ID NO: 172795 - protein, 16 aa, Homo sapiens
  CDR3 for alpha chain variable domain of TCR clone 86398 (TRAV26-1, TRAJ38)
CIVRVSGAGNNRKLIW

SEQ ID NO: 172796 - protein, 13 aa, Homo sapiens
  CDR3 for beta chain variable domain of TCR clone 86398 (TRBV19, TRBJ1-2)
CASSVPGQDGYTF

SEQ ID NO: 172797 - protein, 13 aa, Homo sapiens
  CDR3 for alpha chain variable domain of TCR clone 86399 (TRAV26-1, TRAJ33)
CIVRVEGNYQLIW

SEQ ID NO: 172798 - protein, 15 aa, Homo sapiens
  CDR3 for beta chain variable domain of TCR clone 86399 (TRBV15, TRBJ2-7)
CHQQRSGRRRGEQYF

SEQ ID NO: 172799 - protein, 10 aa, Homo sapiens
  CDR3 for alpha chain variable domain of TCR clone 86400 (TRAV23/DV6, TRAJ3)
CAATTFALVG

SEQ ID NO: 172800 - protein, 15 aa, Homo sapiens
  CDR3 for beta chain variable domain of TCR clone 86400 (TRBV19, TRBJ1-6)
CASSTQGAVGSPLHF

SEQ ID NO: 172801 - protein, 12 aa, Homo sapiens
  CDR3 for alpha chain variable domain of TCR clone 86401 (TRAV12-3, TRAJ17)
CAMTLTGNKLTF

SEQ ID NO: 172802 - protein, 12 aa, Homo sapiens
  CDR3 for beta chain variable domain of TCR clone 86401 (TRBV12-4, TRBJ1-2)
CASSFIWLHLRF

SEQ ID NO: 172803 - protein, 12 aa, Homo sapiens
  CDR3 for alpha chain variable domain of TCR clone 86402 (TRAV12-3, TRAJ40)
CAVSSGTYKYIF

SEQ ID NO: 172804 - protein, 15 aa, Homo sapiens
  CDR3 for beta chain variable domain of TCR clone 86402 (TRBV7-9, TRBJ2-7)
CASSPGGSLTYEQYF

SEQ ID NO: 172805 - protein, 18 aa, Homo sapiens
  CDR3 for alpha chain variable domain of TCR clone 86403 (TRAV13-1, TRAJ52)
CAASKRSAGGTSYGKLTF

SEQ ID NO: 172806 - protein, 13 aa, Homo sapiens
  CDR3 for beta chain variable domain of TCR clone 86403 (TRBV7-2, TRBJ2-2)
CASSSVRAGELFF

SEQ ID NO: 172807 - protein, 11 aa, Homo sapiens
  CDR3 for alpha chain variable domain of TCR clone 86404 (TRAV1-2, TRAJ40)
CAVPGTYEYIF

SEQ ID NO: 172808 - protein, 13 aa, Homo sapiens
  CDR3 for beta chain variable domain of TCR clone 86404 (TRBV7-2, TRBJ2-2)
CASSSRPTGELFF

SEQ ID NO: 172809 - protein, 13 aa, Homo sapiens
  CDR3 for alpha chain variable domain of TCR clone 86405 (TRAV8-6, TRAJ16)
CAVSSPDGQKLPF

SEQ ID NO: 172810 - protein, 16 aa, Homo sapiens
  CDR3 for beta chain variable domain of TCR clone 86405 (TRBV5-7, TRBJ2-3)
CASSSLGGAITDTQYF

SEQ ID NO: 172811 - protein, 13 aa, Homo sapiens
  CDR3 for alpha chain variable domain of TCR clone 86406 (TRAV16, TRAJ5)
CALTNTGRRALTF

SEQ ID NO: 172812 - protein, 15 aa, Homo sapiens
  CDR3 for beta chain variable domain of TCR clone 86406 (TRBV11-3, TRBJ2-4)
CASSRPGTGINIQYF

SEQ ID NO: 172813 - protein, 14 aa, Homo sapiens
  CDR3 for alpha chain variable domain of TCR clone 86407 (TRAV8-2, TRAJ23)
CVVSDDNQGGKLIF

SEQ ID NO: 172814 - protein, 13 aa, Homo sapiens
  CDR3 for beta chain variable domain of TCR clone 86407 (TRBV7-9, TRBJ1-2)
CASSLKQNYGYTF

SEQ ID NO: 172815 - protein, 13 aa, Homo sapiens
  CDR3 for alpha chain variable domain of TCR clone 86408 (TRAV12-1, TRAJ6)
CVVNRGGSYIPTF

SEQ ID NO: 172816 - protein, 11 aa, Homo sapiens
  CDR3 for beta chain variable domain of TCR clone 86408 (TRBV12-4, TRBJ2-3)
CASTATDTQYF

SEQ ID NO: 172817 - protein, 12 aa, Homo sapiens
  CDR3 for alpha chain variable domain of TCR clone 86409 (TRAV29/DV5, TRAJ40)
CAAINLPRNLQI

SEQ ID NO: 172818 - protein, 12 aa, Homo sapiens
  CDR3 for beta chain variable domain of TCR clone 86409 (TRBV12-4, TRBJ2-3)
CASSTLPDTQYF

SEQ ID NO: 172819 - protein, 14 aa, Homo sapiens
  CDR3 for alpha chain variable domain of TCR clone 86410 (TRAV2, TRAJ9)
SAVEDRSGGFKTIF

SEQ ID NO: 172820 - protein, 14 aa, Homo sapiens
  CDR3 for beta chain variable domain of TCR clone 86410 (TRBV13, TRBJ2-5)
CASSLERVGETQYF

SEQ ID NO: 172821 - protein, 14 aa, Homo sapiens
  CDR3 for alpha chain variable domain of TCR clone 86411 (TRAV1-2, TRAJ16)
CAVHRFSDGQKLLF

SEQ ID NO: 172822 - protein, 15 aa, Homo sapiens
  CDR3 for beta chain variable domain of TCR clone 86411 (TRBV9, TRBJ1-6)
CASSVAGTGDSPLHF

SEQ ID NO: 172823 - protein, 12 aa, Homo sapiens
  CDR3 for alpha chain variable domain of TCR clone 86412 (TRAV12-3, TRAJ17)
CAMTLTGNKLTF

SEQ ID NO: 172824 - protein, 11 aa, Homo sapiens
  CDR3 for beta chain variable domain of TCR clone 86412 (TRBV19, TRBJ2-5)
CLECGAGTQYF

SEQ ID NO: 172825 - protein, 12 aa, Homo sapiens
  CDR3 for alpha chain variable domain of TCR clone 86413 (TRAV36/DV7, TRAJ54)
CAVVRGAQKLVF

SEQ ID NO: 172826 - protein, 14 aa, Homo sapiens
  CDR3 for beta chain variable domain of TCR clone 86413 (TRBV7-2, TRBJ2-7)
CASSLYPGRYEQYF

SEQ ID NO: 172827 - protein, 15 aa, Homo sapiens
  CDR3 for alpha chain variable domain of TCR clone 86414 (TRAV3, TRAJ16)
CAVRDGFSDGQKLLF

SEQ ID NO: 172828 - protein, 16 aa, Homo sapiens
  CDR3 for beta chain variable domain of TCR clone 86414 (TRBV12-5, TRBJ2-5)
CASGPRTSGNQETQYF

SEQ ID NO: 172829 - protein, 15 aa, Homo sapiens
  CDR3 for alpha chain variable domain of TCR clone 86415 (TRAV21, TRAJ53)
CATLNSGGSNYKLTF

SEQ ID NO: 172830 - protein, 12 aa, Homo sapiens
  CDR3 for beta chain variable domain of TCR clone 86415 (TRBV14, TRBJ2-4)
CASSNLKSMQYF

SEQ ID NO: 172831 - protein, 12 aa, Homo sapiens
  CDR3 for alpha chain variable domain of TCR clone 86416 (TRAV12-3, TRAJ40)
CAMSSGTYKYIF

SEQ ID NO: 172832 - protein, 14 aa, Homo sapiens
  CDR3 for beta chain variable domain of TCR clone 86416 (TRBV5-7, TRBJ1-5)
CASSRTGGGQPQHF

SEQ ID NO: 172833 - protein, 12 aa, Homo sapiens
  CDR3 for alpha chain variable domain of TCR clone 86417 (TRAV8-3, TRAJ26)
CAGDNYGQNSVF

SEQ ID NO: 172834 - protein, 11 aa, Homo sapiens
  CDR3 for beta chain variable domain of TCR clone 86417 (TRBV29-1, TRBJ2-5)
CSEDRTGTQYF

SEQ ID NO: 172835 - protein, 12 aa, Homo sapiens
  CDR3 for alpha chain variable domain of TCR clone 86418 (TRAV17, TRAJ12)
CTTLRSSYKLIF

SEQ ID NO: 172836 - protein, 16 aa, Homo sapiens
  CDR3 for beta chain variable domain of TCR clone 86418 (TRBV28, TRBJ2-7)
CASSLFFETGGPEQYF

SEQ ID NO: 172837 - protein, 14 aa, Homo sapiens
  CDR3 for alpha chain variable domain of TCR clone 86419 (TRAV26-1, TRAJ49)
CIVRVATGGNQVYF

SEQ ID NO: 172838 - protein, 16 aa, Homo sapiens
  CDR3 for beta chain variable domain of TCR clone 86419 (TRBV6-6, TRBJ1-6)
CASSLHGPGRGSPLHF

SEQ ID NO: 172839 - protein, 11 aa, Homo sapiens
  CDR3 for alpha chain variable domain of TCR clone 86420 (TRAV2, TRAJ33)
CAEDSNYQLIW

SEQ ID NO: 172840 - protein, 15 aa, Homo sapiens
  CDR3 for beta chain variable domain of TCR clone 86420 (TRBV19, TRBJ1-2)
CASSVGQVLNYGYTF

SEQ ID NO: 172841 - protein, 18 aa, Homo sapiens
  CDR3 for alpha chain variable domain of TCR clone 86421 (TRAV29/DV5, TRAJ53)
CSVLLCSKRGGSNYKLTF

SEQ ID NO: 172842 - protein, 17 aa, Homo sapiens
  CDR3 for beta chain variable domain of TCR clone 86421 (TRBV7-8, TRBJ2-6)
CASSAGTGGAGANALTF

SEQ ID NO: 172843 - protein, 13 aa, Homo sapiens
  CDR3 for alpha chain variable domain of TCR clone 86422 (TRAV3, TRAJ21)
CAVREPDFNKFYF

SEQ ID NO: 172844 - protein, 13 aa, Homo sapiens
  CDR3 for beta chain variable domain of TCR clone 86422 (TRBV24-1, TRBJ2-1)
CATSAGPYNEQFF

SEQ ID NO: 172845 - protein, 17 aa, Homo sapiens
  CDR3 for alpha chain variable domain of TCR clone 86423 (TRAV26-1, TRAJ53)
CTVRVDDSGGSNYKLTF

SEQ ID NO: 172846 - protein, 15 aa, Homo sapiens
  CDR3 for beta chain variable domain of TCR clone 86423 (TRBV7-9, TRBJ1-4)
CASSRTGGFNEKLFF

SEQ ID NO: 172847 - protein, 13 aa, Homo sapiens
  CDR3 for alpha chain variable domain of TCR clone 86424 (TRAV8-1, TRAJ8)
CAVNRTGFQKLVF

SEQ ID NO: 172848 - protein, 15 aa, Homo sapiens
  CDR3 for beta chain variable domain of TCR clone 86424 (TRBV9, TRBJ1-6)
CASSVAGTGDSPLHF

SEQ ID NO: 172849 - protein, 15 aa, Homo sapiens
  CDR3 for alpha chain variable domain of TCR clone 86425 (TRAV17, TRAJ57)
CATGASQGGSEKLVF

SEQ ID NO: 172850 - protein, 18 aa, Homo sapiens
  CDR3 for beta chain variable domain of TCR clone 86425 (TRBV7-9, TRBJ2-7)
CASSLTTSGSRTWYEQYF

SEQ ID NO: 172851 - protein, 18 aa, Homo sapiens
  CDR3 for alpha chain variable domain of TCR clone 86426 (TRAV26-1, TRAJ56)
CIVRVASRVTGANSKLTF

SEQ ID NO: 172852 - protein, 15 aa, Homo sapiens
  CDR3 for beta chain variable domain of TCR clone 86426 (TRBV7-9, TRBJ2-5)
CASSDTGRGRENQYF

SEQ ID NO: 172853 - protein, 17 aa, Homo sapiens
  CDR3 for alpha chain variable domain of TCR clone 86427 (TRAV13-1, TRAJ31)
CAPRDRTMFGDGTQLVV

SEQ ID NO: 172854 - protein, 12 aa, Homo sapiens
  CDR3 for beta chain variable domain of TCR clone 86427 (TRBV7-9, TRBJ2-7)
CASSLEGYEQYF

SEQ ID NO: 172855 - protein, 15 aa, Homo sapiens
  CDR3 for alpha chain variable domain of TCR clone 86428 (TRAV9-2, TRAJ9)
CALSLTNTGGFKTIF

SEQ ID NO: 172856 - protein, 12 aa, Homo sapiens
  CDR3 for beta chain variable domain of TCR clone 86428 (TRBV29-1, TRBJ2-3)
CSVTGGADTQYF

SEQ ID NO: 172857 - protein, 23 aa, Homo sapiens
  CDR3 for alpha chain variable domain of TCR clone 86429 (TRAV2, TRAJ32)
CAFTMVVLQTSSSLELALCLLSS

SEQ ID NO: 172858 - protein, 16 aa, Homo sapiens
  CDR3 for beta chain variable domain of TCR clone 86429 (TRBV7-9, TRBJ2-7)
CASSYPDREGGYEQYF

SEQ ID NO: 172859 - protein, 19 aa, Homo sapiens
  CDR3 for alpha chain variable domain of TCR clone 86430 (TRAV17, TRAJ40)
TASRAADTASHFCASKYIF

SEQ ID NO: 172860 - protein, 17 aa, Homo sapiens
  CDR3 for beta chain variable domain of TCR clone 86430 (TRBV11-2, TRBJ2-4)
CASSFLALGGAGDIQYF

SEQ ID NO: 172861 - protein, 14 aa, Homo sapiens
  CDR3 for alpha chain variable domain of TCR clone 86431 (TRAV38-2/DV8, TRAJ23)
CAYRKPNQGGKLIF

SEQ ID NO: 172862 - protein, 14 aa, Homo sapiens
  CDR3 for beta chain variable domain of TCR clone 86431 (TRBV7-2, TRBJ2-5)
CASSFTQGQETQYF

SEQ ID NO: 172863 - protein, 14 aa, Homo sapiens
  CDR3 for alpha chain variable domain of TCR clone 86432 (TRAV8-3, TRAJ9)
CAVVYNTGGFKTIF

SEQ ID NO: 172864 - protein, 12 aa, Homo sapiens
  CDR3 for beta chain variable domain of TCR clone 86432 (TRBV11-2, TRBJ2-1)
CASSPGNNEQFF

SEQ ID NO: 172865 - protein, 15 aa, Homo sapiens
  CDR3 for alpha chain variable domain of TCR clone 86433 (TRAV8-3, TRAJ45)
CASSYSGGGADGLAF

SEQ ID NO: 172866 - protein, 13 aa, Homo sapiens
  CDR3 for beta chain variable domain of TCR clone 86433 (TRBV10-3, TRBJ2-7)
CASKLAVSYEQYF

SEQ ID NO: 172867 - protein, 13 aa, Homo sapiens
  CDR3 for alpha chain variable domain of TCR clone 86434 (TRAV3, TRAJ21)
CAGREPDFNKFYF

SEQ ID NO: 172868 - protein, 14 aa, Homo sapiens
  CDR3 for beta chain variable domain of TCR clone 86434 (TRBV4-1, TRBJ2-2)
CASSQAVNTGELFF

SEQ ID NO: 172869 - protein, 14 aa, Homo sapiens
  CDR3 for alpha chain variable domain of TCR clone 86435 (TRAV1-2, TRAJ8)
CAVREDTGSQKLVF

SEQ ID NO: 172870 - protein, 13 aa, Homo sapiens
  CDR3 for beta chain variable domain of TCR clone 86435 (TRBV15, TRBJ1-6)
CATSGGLNSPLHF

SEQ ID NO: 172871 - protein, 12 aa, Homo sapiens
  CDR3 for alpha chain variable domain of TCR clone 86436 (TRAV12-3, TRAJ17)
CAMTLTGNKPTF

SEQ ID NO: 172872 - protein, 15 aa, Homo sapiens
  CDR3 for beta chain variable domain of TCR clone 86436 (TRBV20-1, TRBJ2-7)
GSARDRVSGMDEQYF

SEQ ID NO: 172873 - protein, 13 aa, Homo sapiens
  CDR3 for alpha chain variable domain of TCR clone 86437 (TRAV35, TRAJ48)
CAGHEFGNEKLAF

SEQ ID NO: 172874 - protein, 15 aa, Homo sapiens
  CDR3 for beta chain variable domain of TCR clone 86437 (TRBV28, TRBJ2-7)
CASSQLGAGGHEQYF

SEQ ID NO: 172875 - protein, 12 aa, Homo sapiens
  CDR3 for alpha chain variable domain of TCR clone 86438 (TRAV8-4, TRAJ22)
CAATGSARQLTF

SEQ ID NO: 172876 - protein, 15 aa, Homo sapiens
  CDR3 for beta chain variable domain of TCR clone 86438 (TRBV4-3, TRBJ2-2)
CASSQGQGGTGELFF

SEQ ID NO: 172877 - protein, 13 aa, Homo sapiens
  CDR3 for alpha chain variable domain of TCR clone 86439 (TRAV12-3, TRAJ13)
CAMSSGGYQKVTF

SEQ ID NO: 172878 - protein, 16 aa, Homo sapiens
  CDR3 for beta chain variable domain of TCR clone 86439 (TRBV4-1, TRBJ2-7)
CASSRGDILNSYEQYL

SEQ ID NO: 172879 - protein, 10 aa, Homo sapiens
  CDR3 for alpha chain variable domain of TCR clone 86440 (TRAV38-2/DV8, TRAJ40)
CASGTYKYIF

SEQ ID NO: 172880 - protein, 14 aa, Homo sapiens
  CDR3 for beta chain variable domain of TCR clone 86440 (TRBV5-1, TRBJ2-5)
CASSLSLNQETQYF

SEQ ID NO: 172881 - protein, 14 aa, Homo sapiens
  CDR3 for alpha chain variable domain of TCR clone 86441 (TRAV17, TRAJ57)
CATDPQGVSEKLVF

SEQ ID NO: 172882 - protein, 18 aa, Homo sapiens
  CDR3 for beta chain variable domain of TCR clone 86441 (TRBV6-6, TRBJ1-3)
CASSYSKWDSISGNTIYF

SEQ ID NO: 172883 - protein, 14 aa, Homo sapiens
  CDR3 for alpha chain variable domain of TCR clone 86442 (TRAV26-1, TRAJ38)
FIADNAGNNRKLIW

SEQ ID NO: 172884 - protein, 13 aa, Homo sapiens
  CDR3 for beta chain variable domain of TCR clone 86442 (TRBV15, TRBJ1-6)
CATSGGLNSPLHF

SEQ ID NO: 172885 - protein, 18 aa, Homo sapiens
  CDR3 for alpha chain variable domain of TCR clone 86443 (TRAV13-1, TRAJ52)
CAASKRSAGGTSYGKLTF

SEQ ID NO: 172886 - protein, 12 aa, Homo sapiens
  CDR3 for beta chain variable domain of TCR clone 86443 (TRBV12-5, TRBJ2-5)
CASGQGVETQYF

SEQ ID NO: 172887 - protein, 17 aa, Homo sapiens
  CDR3 for alpha chain variable domain of TCR clone 86444 (TRAV3, TRAJ37)
CAVRDMRTPGNTGKLIF

SEQ ID NO: 172888 - protein, 14 aa, Homo sapiens
  CDR3 for beta chain variable domain of TCR clone 86444 (TRBV19, TRBJ2-1)
CASPTFVLSGEQFF

SEQ ID NO: 172889 - protein, 14 aa, Homo sapiens
  CDR3 for alpha chain variable domain of TCR clone 86445 (TRAV38-2/DV8, TRAJ42)
CAYPEGGSQGNLIF

SEQ ID NO: 172890 - protein, 15 aa, Homo sapiens
  CDR3 for beta chain variable domain of TCR clone 86445 (TRBV19, TRBJ2-1)
CASSTGTSSHNEQFF

SEQ ID NO: 172891 - protein, 12 aa, Homo sapiens
  CDR3 for alpha chain variable domain of TCR clone 86446 (TRAV20, TRAJ20)
CAVRFNDYRLSF

SEQ ID NO: 172892 - protein, 14 aa, Homo sapiens
  CDR3 for beta chain variable domain of TCR clone 86446 (TRBV20-1, TRBJ2-1)
CSAQIGGSANEQFF

SEQ ID NO: 172893 - protein, 23 aa, Homo sapiens
  CDR3 for alpha chain variable domain of TCR clone 86447 (TRAV26-1, TRAJ38)
CIADNAGNNHIQNPDPAVYQLRD

SEQ ID NO: 172894 - protein, 13 aa, Homo sapiens
  CDR3 for beta chain variable domain of TCR clone 86447 (TRBV4-1, TRBJ2-1)
CASSQAGGDEQFF

SEQ ID NO: 172895 - protein, 13 aa, Homo sapiens
  CDR3 for alpha chain variable domain of TCR clone 86448 (TRAV27, TRAJ57)
CRSAQGGSEKLVF

SEQ ID NO: 172896 - protein, 11 aa, Homo sapiens
  CDR3 for beta chain variable domain of TCR clone 86448 (TRBV11-2, TRBJ1-1)
CASSINTESFF

SEQ ID NO: 172897 - protein, 11 aa, Homo sapiens
  CDR3 for alpha chain variable domain of TCR clone 86449 (TRAV2, TRAJ13)
CASGGYQKVTF

SEQ ID NO: 172898 - protein, 16 aa, Homo sapiens
  CDR3 for beta chain variable domain of TCR clone 86449 (TRBV4-3, TRBJ2-2)
CASSHLQGSGTGELFF

SEQ ID NO: 172899 - protein, 13 aa, Homo sapiens
  CDR3 for alpha chain variable domain of TCR clone 86450 (TRAV2, TRAJ5)
CAVPDTGRRALTF

SEQ ID NO: 172900 - protein, 16 aa, Homo sapiens
  CDR3 for beta chain variable domain of TCR clone 86450 (TRBV12-4, TRBJ1-2)
CASSPTATGKTRGYTF

SEQ ID NO: 172901 - protein, 12 aa, Homo sapiens
  CDR3 for alpha chain variable domain of TCR clone 86451 (TRAV6, TRAJ27)
CSRIRGAGKSTF

SEQ ID NO: 172902 - protein, 17 aa, Homo sapiens
  CDR3 for beta chain variable domain of TCR clone 86451 (TRBV13, TRBJ2-3)
CASSLSRVAGGRNTQYF

SEQ ID NO: 172903 - protein, 14 aa, Homo sapiens
  CDR3 for alpha chain variable domain of TCR clone 86452 (TRAV1-2, TRAJ8)
CAVRGDTGFQKLVF

SEQ ID NO: 172904 - protein, 14 aa, Homo sapiens
  CDR3 for beta chain variable domain of TCR clone 86452 (TRBV5-4, TRBJ1-1)
CASSLDSRRDEAFF

SEQ ID NO: 172905 - protein, 12 aa, Homo sapiens
  CDR3 for alpha chain variable domain of TCR clone 86453 (TRAV36/DV7, TRAJ40)
CAVGTGTYKYIF

SEQ ID NO: 172906 - protein, 14 aa, Homo sapiens
  CDR3 for beta chain variable domain of TCR clone 86453 (TRBV19, TRBJ2-1)
CASPTFVLSGEQFF

SEQ ID NO: 172907 - protein, 15 aa, Homo sapiens
  CDR3 for alpha chain variable domain of TCR clone 86454 (TRAV2, TRAJ9)
CAVAALNTGGFKTIF

SEQ ID NO: 172908 - protein, 12 aa, Homo sapiens
  CDR3 for beta chain variable domain of TCR clone 86454 (TRBV3-1, TRBJ2-3)
CQQPRGGDTQYF

SEQ ID NO: 172909 - protein, 12 aa, Homo sapiens
  CDR3 for alpha chain variable domain of TCR clone 86455 (TRAV21, TRAJ33)
CAKMDSNYQLIW

SEQ ID NO: 172910 - protein, 15 aa, Homo sapiens
  CDR3 for beta chain variable domain of TCR clone 86455 (TRBV19, TRBJ1-2)
CASSVGQVLNYGYTF

SEQ ID NO: 172911 - protein, 10 aa, Homo sapiens
  CDR3 for alpha chain variable domain of TCR clone 86456 (TRAV12-3, TRAJ49)
CAMNDDQFYF

SEQ ID NO: 172912 - protein, 14 aa, Homo sapiens
  CDR3 for beta chain variable domain of TCR clone 86456 (TRBV28, TRBJ1-5)
CASSLFPGVQPQHF

SEQ ID NO: 172913 - protein, 16 aa, Homo sapiens
  CDR3 for alpha chain variable domain of TCR clone 86457 (TRAV20, TRAJ28)
CAVRDPSGAGSYQLTF

SEQ ID NO: 172914 - protein, 14 aa, Homo sapiens
  CDR3 for beta chain variable domain of TCR clone 86457 (TRBV7-2, TRBJ2-7)
CASSPKTSFYEQYF

SEQ ID NO: 172915 - protein, 16 aa, Homo sapiens
  CDR3 for alpha chain variable domain of TCR clone 86458 (TRAV1-2, TRAJ10)
CAVRVVLTGGGNKLTF

SEQ ID NO: 172916 - protein, 15 aa, Homo sapiens
  CDR3 for beta chain variable domain of TCR clone 86458 (TRBV29-1, TRBJ2-1)
CSVGRHALFYNEQFF

SEQ ID NO: 172917 - protein, 11 aa, Homo sapiens
  CDR3 for alpha chain variable domain of TCR clone 86459 (TRAV2, TRAJ13)
CAPGGYQKVTF

SEQ ID NO: 172918 - protein, 14 aa, Homo sapiens
  CDR3 for beta chain variable domain of TCR clone 86459 (TRBV13, TRBJ2-7)
CASSLKGASYEQYF

SEQ ID NO: 172919 - protein, 12 aa, Homo sapiens
  CDR3 for alpha chain variable domain of TCR clone 86460 (TRAV13-1, TRAJ48)
CAANFGNEKLTF

SEQ ID NO: 172920 - protein, 15 aa, Homo sapiens
  CDR3 for beta chain variable domain of TCR clone 86460 (TRBV27, TRBJ1-6)
CASSFDRGLGSPLHF

SEQ ID NO: 172921 - protein, 12 aa, Homo sapiens
  CDR3 for alpha chain variable domain of TCR clone 86461 (TRAV2, TRAJ31)
CAVEDNNARLMF

SEQ ID NO: 172922 - protein, 16 aa, Homo sapiens
  CDR3 for beta chain variable domain of TCR clone 86461 (TRBV10-3, TRBJ2-1)
CAISGVGYGGGGEQFF

SEQ ID NO: 172923 - protein, 13 aa, Homo sapiens
  CDR3 for alpha chain variable domain of TCR clone 86462 (TRAV21, TRAJ57)
CAVTQGGSEKLVF

SEQ ID NO: 172924 - protein, 14 aa, Homo sapiens
  CDR3 for beta chain variable domain of TCR clone 86462 (TRBV20-1, TRBJ1-1)
CSAQTRIGGTEAFF

SEQ ID NO: 172925 - protein, 14 aa, Homo sapiens
  CDR3 for alpha chain variable domain of TCR clone 86463 (TRAV12-2, TRAJ40)
FAVKIPSGTYKYIF

SEQ ID NO: 172926 - protein, 15 aa, Homo sapiens
  CDR3 for beta chain variable domain of TCR clone 86463 (TRBV6-5, TRBJ2-1)
CASSYDAGAGNEQFF

SEQ ID NO: 172927 - protein, 14 aa, Homo sapiens
  CDR3 for alpha chain variable domain of TCR clone 86464 (TRAV12-3, TRAJ56)
CAMSVTGANSKLTF

SEQ ID NO: 172928 - protein, 17 aa, Homo sapiens
  CDR3 for beta chain variable domain of TCR clone 86464 (TRBV5-3, TRBJ1-5)
CARSPRRDRRCTQPQHF

SEQ ID NO: 172929 - protein, 13 aa, Homo sapiens
  CDR3 for alpha chain variable domain of TCR clone 86465 (TRAV27, TRAJ29)
CAGAHSGNTPLVF

SEQ ID NO: 172930 - protein, 14 aa, Homo sapiens
  CDR3 for beta chain variable domain of TCR clone 86465 (TRBV7-9, TRBJ2-7)
FASSIGQGAGEQYF

SEQ ID NO: 172931 - protein, 13 aa, Homo sapiens
  CDR3 for alpha chain variable domain of TCR clone 86466 (TRAV26-1, TRAJ34)
CIVRPWITDKLIF

SEQ ID NO: 172932 - protein, 16 aa, Homo sapiens
  CDR3 for beta chain variable domain of TCR clone 86466 (TRBV2, TRBJ2-3)
CASSTSVEGVTDTQYF

SEQ ID NO: 172933 - protein, 14 aa, Homo sapiens
  CDR3 for alpha chain variable domain of TCR clone 86467 (TRAV12-3, TRAJ10)
SHPPLTGGGNKLTF

SEQ ID NO: 172934 - protein, 13 aa, Homo sapiens
  CDR3 for beta chain variable domain of TCR clone 86467 (TRBV7-6, TRBJ2-3)
CASSLAVGDTQYF

SEQ ID NO: 172935 - protein, 15 aa, Homo sapiens
  CDR3 for alpha chain variable domain of TCR clone 86468 (TRAV27, TRAJ38)
CAARRNAGNNRKLIW

SEQ ID NO: 172936 - protein, 14 aa, Homo sapiens
  CDR3 for beta chain variable domain of TCR clone 86468 (TRBV7-2, TRBJ2-7)
CASGPRDGAYEQYF

SEQ ID NO: 172937 - protein, 16 aa, Homo sapiens
  CDR3 for alpha chain variable domain of TCR clone 86469 (TRAV26-1, TRAJ53)
CIVRVAMGGSNYKLTF

SEQ ID NO: 172938 - protein, 12 aa, Homo sapiens
  CDR3 for beta chain variable domain of TCR clone 86469 (TRBV7-9, TRBJ1-5)
CASSPHGQPQHF

SEQ ID NO: 172939 - protein, 16 aa, Homo sapiens
  CDR3 for alpha chain variable domain of TCR clone 86470 (TRAV3, TRAJ37)
CAVRPHGSGNTGKLIF

SEQ ID NO: 172940 - protein, 16 aa, Homo sapiens
  CDR3 for beta chain variable domain of TCR clone 86470 (TRBV9, TRBJ1-2)
CASSVEEKVSPYGYIF

SEQ ID NO: 172941 - protein, 13 aa, Homo sapiens
  CDR3 for alpha chain variable domain of TCR clone 86471 (TRAV23/DV6, TRAJ34)
CAAIENNTYKLIF

SEQ ID NO: 172942 - protein, 15 aa, Homo sapiens
  CDR3 for beta chain variable domain of TCR clone 86471 (TRBV20-1, TRBJ2-7)
CSARGPLAGGREQYF

SEQ ID NO: 172943 - protein, 14 aa, Homo sapiens
  CDR3 for alpha chain variable domain of TCR clone 86472 (TRAV12-2, TRAJ53)
CAVKGGGSNYKLTF

SEQ ID NO: 172944 - protein, 12 aa, Homo sapiens
  CDR3 for beta chain variable domain of TCR clone 86472 (TRBV29-1, TRBJ2-3)
CSVTGGADTQYF

SEQ ID NO: 172945 - protein, 16 aa, Homo sapiens
  CDR3 for alpha chain variable domain of TCR clone 86473 (TRAV27, TRAJ13)
CAGAKSDSGGYQKATF

SEQ ID NO: 172946 - protein, 15 aa, Homo sapiens
  CDR3 for beta chain variable domain of TCR clone 86473 (TRBV29-1, TRBJ2-1)
CSVGRHALFYNEQLF

SEQ ID NO: 172947 - protein, 14 aa, Homo sapiens
  CDR3 for alpha chain variable domain of TCR clone 86474 (TRAV17, TRAJ57)
CATDPQGGSEKLVF

SEQ ID NO: 172948 - protein, 14 aa, Homo sapiens
  CDR3 for beta chain variable domain of TCR clone 86474 (TRBV7-8, TRBJ2-7)
CTSSPRDRVYEQYF

SEQ ID NO: 172949 - protein, 12 aa, Homo sapiens
  CDR3 for alpha chain variable domain of TCR clone 86475 (TRAV3, TRAJ43)
CAVREPNNDMRF

SEQ ID NO: 172950 - protein, 15 aa, Homo sapiens
  CDR3 for beta chain variable domain of TCR clone 86475 (TRBV6-5, TRBJ2-1)
CASSYDAGAGNEQFF

SEQ ID NO: 172951 - protein, 10 aa, Homo sapiens
  CDR3 for alpha chain variable domain of TCR clone 86476 (TRAV8-4, TRAJ43)
GAVSADDMRF

SEQ ID NO: 172952 - protein, 16 aa, Homo sapiens
  CDR3 for beta chain variable domain of TCR clone 86476 (TRBV12-5, TRBJ2-5)
CASGPRTSGNQETQYF

SEQ ID NO: 172953 - protein, 13 aa, Homo sapiens
  CDR3 for alpha chain variable domain of TCR clone 86477 (TRAV21, TRAJ20)
CAVGLRVDYKLSF

SEQ ID NO: 172954 - protein, 11 aa, Homo sapiens
  CDR3 for beta chain variable domain of TCR clone 86477 (TRBV7-9, TRBJ2-3)
CASSGPDTQYF

SEQ ID NO: 172955 - protein, 18 aa, Homo sapiens
  CDR3 for alpha chain variable domain of TCR clone 86478 (TRAV3, TRAJ17)
CAVRARRGGRSCRQQANF

SEQ ID NO: 172956 - protein, 14 aa, Homo sapiens
  CDR3 for beta chain variable domain of TCR clone 86478 (TRBV4-1, TRBJ2-2)
CASSQAVNTGELFI

SEQ ID NO: 172957 - protein, 14 aa, Homo sapiens
  CDR3 for alpha chain variable domain of TCR clone 86479 (TRAV21, TRAJ9)
CAVRRGTGGFKTIF

SEQ ID NO: 172958 - protein, 12 aa, Homo sapiens
  CDR3 for beta chain variable domain of TCR clone 86479 (TRBV11-2, TRBJ2-2)
CASSLGGGELFF

SEQ ID NO: 172959 - protein, 14 aa, Homo sapiens
  CDR3 for alpha chain variable domain of TCR clone 86480 (TRAV1-2, TRAJ16)
CAVNRFSDGQKLLF

SEQ ID NO: 172960 - protein, 13 aa, Homo sapiens
  CDR3 for beta chain variable domain of TCR clone 86480 (TRBV10-3, TRBJ2-7)
CASKLAVNYEQCF

SEQ ID NO: 172961 - protein, 12 aa, Homo sapiens
  CDR3 for alpha chain variable domain of TCR clone 86481 (TRAV21, TRAJ37)
CAVRGNTGKLIF

SEQ ID NO: 172962 - protein, 14 aa, Homo sapiens
  CDR3 for beta chain variable domain of TCR clone 86481 (TRBV19, TRBJ2-1)
CASEVTGARNEQLF

SEQ ID NO: 172963 - protein, 14 aa, Homo sapiens
  CDR3 for alpha chain variable domain of TCR clone 86482 (TRAV20, TRAJ56)
CAVQFGGANSMLTF

SEQ ID NO: 172964 - protein, 14 aa, Homo sapiens
  CDR3 for beta chain variable domain of TCR clone 86482 (TRBV20-1, TRBJ2-7)
CSAKRGRSSYEQYF

SEQ ID NO: 172965 - protein, 14 aa, Homo sapiens
  CDR3 for alpha chain variable domain of TCR clone 86483 (TRAV4, TRAJ20)
CLVGRRSNDYKLSF

SEQ ID NO: 172966 - protein, 18 aa, Homo sapiens
  CDR3 for beta chain variable domain of TCR clone 86483 (TRBV2, TRBJ2-5)
CASSGGPQGRGAQETQYF

SEQ ID NO: 172967 - protein, 11 aa, Homo sapiens
  CDR3 for alpha chain variable domain of TCR clone 86484 (TRAV1-2, TRAJ40)
CAVPGTYKYIF

SEQ ID NO: 172968 - protein, 11 aa, Homo sapiens
  CDR3 for beta chain variable domain of TCR clone 86484 (TRBV19, TRBJ1-1)
CASSIGSEAFF

SEQ ID NO: 172969 - protein, 15 aa, Homo sapiens
  CDR3 for alpha chain variable domain of TCR clone 86485 (TRAV1-1, TRAJ5)
CAVRHMDTGRRALTF

SEQ ID NO: 172970 - protein, 17 aa, Homo sapiens
  CDR3 for beta chain variable domain of TCR clone 86485 (TRBV28, TRBJ2-7)
CASSTGLAGGDSSEQYF

SEQ ID NO: 172971 - protein, 13 aa, Homo sapiens
  CDR3 for alpha chain variable domain of TCR clone 86486 (TRAV12-3, TRAJ7)
CAMTPYGNNRLAF

SEQ ID NO: 172972 - protein, 16 aa, Homo sapiens
  CDR3 for beta chain variable domain of TCR clone 86486 (TRBV20-1, TRBJ1-4)
FSARPYGGELNEKLFF

SEQ ID NO: 172973 - protein, 11 aa, Homo sapiens
  CDR3 for alpha chain variable domain of TCR clone 86487 (TRAV21, TRAJ34)
CAHYNTDKLIF

SEQ ID NO: 172974 - protein, 13 aa, Homo sapiens
  CDR3 for beta chain variable domain of TCR clone 86487 (TRBV6-4, TRBJ1-5)
CASSADLNQPQHF

SEQ ID NO: 172975 - protein, 13 aa, Homo sapiens
  CDR3 for alpha chain variable domain of TCR clone 86488 (TRAV12-1, TRAJ34)
CAVRGYNTDKLIF

SEQ ID NO: 172976 - protein, 18 aa, Homo sapiens
  CDR3 for beta chain variable domain of TCR clone 86488 (TRBV11-2, TRBJ2-3)
CASSLGGASRGAPNTQYF

SEQ ID NO: 172977 - protein, 11 aa, Homo sapiens
  CDR3 for alpha chain variable domain of TCR clone 86489 (TRAV3, TRAJ21)
CAVGNFNKFYF

SEQ ID NO: 172978 - protein, 15 aa, Homo sapiens
  CDR3 for beta chain variable domain of TCR clone 86489 (TRBV5-1, TRBJ1-1)
CASSSGGRRVTEAFF

SEQ ID NO: 172979 - protein, 15 aa, Homo sapiens
  CDR3 for alpha chain variable domain of TCR clone 86490 (TRAV29/DV5, TRAJ42)
CAAKTDGGSQGTLIF

SEQ ID NO: 172980 - protein, 16 aa, Homo sapiens
  CDR3 for beta chain variable domain of TCR clone 86490 (TRBV7-9, TRBJ2-1)
CASSLVSGPSYNEQFF

SEQ ID NO: 172981 - protein, 14 aa, Homo sapiens
  CDR3 for alpha chain variable domain of TCR clone 86491 (TRAV1-2, TRAJ8)
CAVREDTGSQKLVF

SEQ ID NO: 172982 - protein, 16 aa, Homo sapiens
  CDR3 for beta chain variable domain of TCR clone 86491 (TRBV4-1, TRBJ2-7)
CASSLTAGQATYEQYF

SEQ ID NO: 172983 - protein, 14 aa, Homo sapiens
  CDR3 for alpha chain variable domain of TCR clone 86492 (TRAV1-2, TRAJ8)
CAVREDTGFQKLVF

SEQ ID NO: 172984 - protein, 12 aa, Homo sapiens
  CDR3 for beta chain variable domain of TCR clone 86492 (TRBV11-2, TRBJ2-2)
CASSRGGGELFF

SEQ ID NO: 172985 - protein, 13 aa, Homo sapiens
  CDR3 for alpha chain variable domain of TCR clone 86493 (TRAV1-2, TRAJ12)
CAVSMDSSYKLIF

SEQ ID NO: 172986 - protein, 14 aa, Homo sapiens
  CDR3 for beta chain variable domain of TCR clone 86493 (TRBV7-2, TRBJ2-7)
CASRSQGAAYEQYF

SEQ ID NO: 172987 - protein, 13 aa, Homo sapiens
  CDR3 for alpha chain variable domain of TCR clone 86494 (TRAV3, TRAJ21)
CAVREPDFNKFYF

SEQ ID NO: 172988 - protein, 11 aa, Homo sapiens
  CDR3 for beta chain variable domain of TCR clone 86494 (TRBV11-2, TRBJ2-2)
CASSLPGELFF

SEQ ID NO: 172989 - protein, 15 aa, Homo sapiens
  CDR3 for alpha chain variable domain of TCR clone 86495 (TRAV8-4, TRAJ3)
CAVTGENLVQQCFQD

SEQ ID NO: 172990 - protein, 14 aa, Homo sapiens
  CDR3 for beta chain variable domain of TCR clone 86495 (TRBV7-2, TRBJ1-1)
CASSFLTGTTEAFF

SEQ ID NO: 172991 - protein, 14 aa, Homo sapiens
  CDR3 for alpha chain variable domain of TCR clone 86496 (TRAV23/DV6, TRAJ57)
CAASNQGGSEQLVF

SEQ ID NO: 172992 - protein, 13 aa, Homo sapiens
  CDR3 for beta chain variable domain of TCR clone 86496 (TRBV11-2, TRBJ2-7)
CASSSYPSYEQYF

SEQ ID NO: 172993 - protein, 17 aa, Homo sapiens
  CDR3 for alpha chain variable domain of TCR clone 86497 (TRAV23/DV6, TRAJ28)
CAALLAYSGAGSYQLTF

SEQ ID NO: 172994 - protein, 13 aa, Homo sapiens
  CDR3 for beta chain variable domain of TCR clone 86497 (TRBV4-2, TRBJ2-3)
CASSQGDTDTQYF

SEQ ID NO: 172995 - protein, 14 aa, Homo sapiens
  CDR3 for alpha chain variable domain of TCR clone 86498 (TRAV17, TRAJ56)
CATVPAGANSKLTF

SEQ ID NO: 172996 - protein, 15 aa, Homo sapiens
  CDR3 for beta chain variable domain of TCR clone 86498 (TRBV4-1, TRBJ2-7)
CASSQDRNRDYEQYF

SEQ ID NO: 172997 - protein, 15 aa, Homo sapiens
  CDR3 for alpha chain variable domain of TCR clone 86499 (TRAV17, TRAJ56)
CATDANTGANSKLPF

SEQ ID NO: 172998 - protein, 16 aa, Homo sapiens
  CDR3 for beta chain variable domain of TCR clone 86499 (TRBV7-3, TRBJ2-2)
CASSLKRGTLSGELFF

SEQ ID NO: 172999 - protein, 16 aa, Homo sapiens
  CDR3 for alpha chain variable domain of TCR clone 86500 (TRAV3, TRAJ10)
CAVRDMRAGGGNKLTF

SEQ ID NO: 173000 - protein, 12 aa, Homo sapiens
  CDR3 for beta chain variable domain of TCR clone 86500 (TRBV12-4, TRBJ1-2)
CASSFIWLHLRF

SEQ ID NO: 173001 - protein, 13 aa, Homo sapiens
  CDR3 for alpha chain variable domain of TCR clone 86501 (TRAV13-1, TRAJ6)
CAASSGGSYIPTF

SEQ ID NO: 173002 - protein, 14 aa, Homo sapiens
  CDR3 for beta chain variable domain of TCR clone 86501 (TRBV9, TRBJ2-7)
CASGVGVGSYEQYF

SEQ ID NO: 173003 - protein, 14 aa, Homo sapiens
  CDR3 for alpha chain variable domain of TCR clone 86502 (TRAV1-2, TRAJ16)
CAVNRFSDGQKLLF

SEQ ID NO: 173004 - protein, 18 aa, Homo sapiens
  CDR3 for beta chain variable domain of TCR clone 86502 (TRBV20-1, TRBJ2-6)
CSAETTPTPGSGANVLTF

SEQ ID NO: 173005 - protein, 13 aa, Homo sapiens
  CDR3 for alpha chain variable domain of TCR clone 86503 (TRAV30, TRAJ24)
FGTVTDSWGKLQF

SEQ ID NO: 173006 - protein, 15 aa, Homo sapiens
  CDR3 for beta chain variable domain of TCR clone 86503 (TRBV25-1, TRBJ1-4)
CASSPGDSTNEKLFF

SEQ ID NO: 173007 - protein, 12 aa, Homo sapiens
  CDR3 for alpha chain variable domain of TCR clone 86504 (TRAV12-3, TRAJ17)
CAMTLTGNKLTF

SEQ ID NO: 173008 - protein, 15 aa, Homo sapiens
  CDR3 for beta chain variable domain of TCR clone 86504 (TRBV6-5, TRBJ2-3)
CASSLNGDYTDTQYF

SEQ ID NO: 173009 - protein, 16 aa, Homo sapiens
  CDR3 for alpha chain variable domain of TCR clone 86505 (TRAV13-1, TRAJ3)
CAATGVQQCFHDNLWI

SEQ ID NO: 173010 - protein, 16 aa, Homo sapiens
  CDR3 for beta chain variable domain of TCR clone 86505 (TRBV7-3, TRBJ2-2)
CASSLKRGTLSGELFF

SEQ ID NO: 173011 - protein, 11 aa, Homo sapiens
  CDR3 for alpha chain variable domain of TCR clone 86506 (TRAV3, TRAJ21)
CAVGNFNKFYF

SEQ ID NO: 173012 - protein, 16 aa, Homo sapiens
  CDR3 for beta chain variable domain of TCR clone 86506 (TRBV6-1, TRBJ1-3)
CASVQGGVETPYILER

SEQ ID NO: 173013 - protein, 14 aa, Homo sapiens
  CDR3 for alpha chain variable domain of TCR clone 86507 (TRAV1-2, TRAJ16)
CAVNRVSDGQKLLF

SEQ ID NO: 173014 - protein, 17 aa, Homo sapiens
  CDR3 for beta chain variable domain of TCR clone 86507 (TRBV20-1, TRBJ2-1)
CSASSSGLAGSYNEQFF

SEQ ID NO: 173015 - protein, 12 aa, Homo sapiens
  CDR3 for alpha chain variable domain of TCR clone 86508 (TRAV13-1, TRAJ49)
CAASIWGNQFYF

SEQ ID NO: 173016 - protein, 14 aa, Homo sapiens
  CDR3 for beta chain variable domain of TCR clone 86508 (TRBV12-4, TRBJ1-1)
CASSLGGLNTEAFF

SEQ ID NO: 173017 - protein, 15 aa, Homo sapiens
  CDR3 for alpha chain variable domain of TCR clone 86509 (TRAV25, TRAJ52)
CAGRPGGTSYGKLTF

SEQ ID NO: 173018 - protein, 17 aa, Homo sapiens
  CDR3 for beta chain variable domain of TCR clone 86509 (TRBV7-8, TRBJ2-6)
CASGAGAGGAGANVLTF

SEQ ID NO: 173019 - protein, 12 aa, Homo sapiens
  CDR3 for alpha chain variable domain of TCR clone 86510 (TRAV12-3, TRAJ4)
CAMTGAGTRLAV

SEQ ID NO: 173020 - protein, 15 aa, Homo sapiens
  CDR3 for beta chain variable domain of TCR clone 86510 (TRBV7-8, TRBJ2-5)
CASSDAAGSQETQYF

SEQ ID NO: 173021 - protein, 12 aa, Homo sapiens
  CDR3 for alpha chain variable domain of TCR clone 86511 (TRAV21, TRAJ49)
CAVRNTGDQFYF

SEQ ID NO: 173022 - protein, 12 aa, Homo sapiens
  CDR3 for beta chain variable domain of TCR clone 86511 (TRBV7-9, TRBJ2-7)
CATRTDAYEQYF

SEQ ID NO: 173023 - protein, 11 aa, Homo sapiens
  CDR3 for alpha chain variable domain of TCR clone 86512 (TRAV36/DV7, TRAJ43)
CAAHNNNDMRF

SEQ ID NO: 173024 - protein, 15 aa, Homo sapiens
  CDR3 for beta chain variable domain of TCR clone 86512 (TRBV6-1, TRBJ2-2)
CASSRLREDTGELFF

SEQ ID NO: 173025 - protein, 14 aa, Homo sapiens
  CDR3 for alpha chain variable domain of TCR clone 86513 (TRAV2, TRAJ9)
CAVEDRSGGFKTIF

SEQ ID NO: 173026 - protein, 17 aa, Homo sapiens
  CDR3 for beta chain variable domain of TCR clone 86513 (TRBV4-1, TRBJ2-7)
CASSRDPRGVRGGEQYF

SEQ ID NO: 173027 - protein, 14 aa, Homo sapiens
  CDR3 for alpha chain variable domain of TCR clone 86514 (TRAV3, TRAJ9)
CAVRLNTGGFKTIF

SEQ ID NO: 173028 - protein, 15 aa, Homo sapiens
  CDR3 for beta chain variable domain of TCR clone 86514 (TRBV7-2, TRBJ2-1)
CASSLASGRVNEQCF

SEQ ID NO: 173029 - protein, 14 aa, Homo sapiens
  CDR3 for alpha chain variable domain of TCR clone 86515 (TRAV12-3, TRAJ42)
CAMNYGGSQGNLIF

SEQ ID NO: 173030 - protein, 19 aa, Homo sapiens
  CDR3 for beta chain variable domain of TCR clone 86515 (TRBV4-1, TRBJ2-7)
CASSPVAGGGRAVLRAGHQ

SEQ ID NO: 173031 - protein, 11 aa, Homo sapiens
  CDR3 for alpha chain variable domain of TCR clone 86516 (TRAV3, TRAJ21)
CAVGNFNKFYF

SEQ ID NO: 173032 - protein, 15 aa, Homo sapiens
  CDR3 for beta chain variable domain of TCR clone 86516 (TRBV7-6, TRBJ2-1)
CASSPGQGPYNEQFF

SEQ ID NO: 173033 - protein, 19 aa, Homo sapiens
  CDR3 for alpha chain variable domain of TCR clone 86517 (TRAV29/DV5, TRAJ49)
CSVLLCSKLTVDTGNQFYF

SEQ ID NO: 173034 - protein, 15 aa, Homo sapiens
  CDR3 for beta chain variable domain of TCR clone 86517 (TRBV7-9, TRBJ1-4)
CASSARTGGNEKLFF

SEQ ID NO: 173035 - protein, 16 aa, Homo sapiens
  CDR3 for alpha chain variable domain of TCR clone 86518 (TRAV30, TRAJ24)
CGTEIVDADILGKFQF

SEQ ID NO: 173036 - protein, 14 aa, Homo sapiens
  CDR3 for beta chain variable domain of TCR clone 86518 (TRBV12-5, TRBJ2-5)
CASGSRTHQETQYF

SEQ ID NO: 173037 - protein, 16 aa, Homo sapiens
  CDR3 for alpha chain variable domain of TCR clone 86519 (TRAV12-3, TRAJ53)
CAMSPGSGGSNYKLII

SEQ ID NO: 173038 - protein, 11 aa, Homo sapiens
  CDR3 for beta chain variable domain of TCR clone 86519 (TRBV29-1, TRBJ2-5)
CSEDRTGTQYF

SEQ ID NO: 173039 - protein, 16 aa, Homo sapiens
  CDR3 for alpha chain variable domain of TCR clone 86520 (TRAV3, TRAJ13)
CAVRDPNSGGYQKVTF

SEQ ID NO: 173040 - protein, 13 aa, Homo sapiens
  CDR3 for beta chain variable domain of TCR clone 86520 (TRBV7-9, TRBJ2-7)
CASSLQGSYKQYF

SEQ ID NO: 173041 - protein, 16 aa, Homo sapiens
  CDR3 for alpha chain variable domain of TCR clone 86521 (TRAV30, TRAJ24)
CGTEIADADSWWKFQF

SEQ ID NO: 173042 - protein, 14 aa, Homo sapiens
  CDR3 for beta chain variable domain of TCR clone 86521 (TRBV12-5, TRBJ2-5)
CASGSRTHQETQYF

SEQ ID NO: 173043 - protein, 15 aa, Homo sapiens
  CDR3 for alpha chain variable domain of TCR clone 86522 (TRAV12-3, TRAJ52)
CNGGAGGTSYGKLTF

SEQ ID NO: 173044 - protein, 13 aa, Homo sapiens
  CDR3 for beta chain variable domain of TCR clone 86522 (TRBV20-1, TRBJ2-5)
CSAGGDYQETQYF

SEQ ID NO: 173045 - protein, 16 aa, Homo sapiens
  CDR3 for alpha chain variable domain of TCR clone 86523 (TRAV30, TRAJ24)
CGTEIVDADSWGKFQF

SEQ ID NO: 173046 - protein, 16 aa, Homo sapiens
  CDR3 for beta chain variable domain of TCR clone 86523 (TRBV2, TRBJ2-7)
CASSEPWTGPSYEQYF

SEQ ID NO: 173047 - protein, 13 aa, Homo sapiens
  CDR3 for alpha chain variable domain of TCR clone 86524 (TRAV2, TRAJ27)
CAVEAPMQANQPL

SEQ ID NO: 173048 - protein, 13 aa, Homo sapiens
  CDR3 for beta chain variable domain of TCR clone 86524 (TRBV10-2, TRBJ2-3)
CASSESGDNTQYF

SEQ ID NO: 173049 - protein, 10 aa, Homo sapiens
  CDR3 for alpha chain variable domain of TCR clone 86525 (TRAV8-2, TRAJ29)
CTGGNKPLVF

SEQ ID NO: 173050 - protein, 13 aa, Homo sapiens
  CDR3 for beta chain variable domain of TCR clone 86525 (TRBV20-1, TRBJ1-1)
CSARGGGNTEAFF

SEQ ID NO: 173051 - protein, 18 aa, Homo sapiens
  CDR3 for alpha chain variable domain of TCR clone 86526 (TRAV26-1, TRAJ5)
CIVRVVPPRDTGRRALTF

SEQ ID NO: 173052 - protein, 15 aa, Homo sapiens
  CDR3 for beta chain variable domain of TCR clone 86526 (TRBV7-9, TRBJ2-7)
CASSLPMGQANEQYS

SEQ ID NO: 173053 - protein, 14 aa, Homo sapiens
  CDR3 for alpha chain variable domain of TCR clone 86527 (TRAV35, TRAJ42)
CAGRYGGSQGNLIF

SEQ ID NO: 173054 - protein, 21 aa, Homo sapiens
  CDR3 for beta chain variable domain of TCR clone 86527 (TRBV11-1, TRBJ2-1)
CASSARERLRPEGPSYNEQFF

SEQ ID NO: 173055 - protein, 14 aa, Homo sapiens
  CDR3 for alpha chain variable domain of TCR clone 86528 (TRAV4, TRAJ17)
CLVGPQAAGNKLTF

SEQ ID NO: 173056 - protein, 14 aa, Homo sapiens
  CDR3 for beta chain variable domain of TCR clone 86528 (TRBV18, TRBJ2-5)
CASSPGVSQETQYF

SEQ ID NO: 173057 - protein, 15 aa, Homo sapiens
  CDR3 for alpha chain variable domain of TCR clone 86529 (TRAV12-1, TRAJ17)
CGEHDEKAAGNKLTF

SEQ ID NO: 173058 - protein, 14 aa, Homo sapiens
  CDR3 for beta chain variable domain of TCR clone 86529 (TRBV6-5, TRBJ1-1)
CASSPGQGTTEAFF

SEQ ID NO: 173059 - protein, 11 aa, Homo sapiens
  CDR3 for alpha chain variable domain of TCR clone 86530 (TRAV21, TRAJ34)
CAHYNTDKLIF

SEQ ID NO: 173060 - protein, 15 aa, Homo sapiens
  CDR3 for beta chain variable domain of TCR clone 86530 (TRBV28, TRBJ2-1)
CASSIIAGGRSEQFF

SEQ ID NO: 173061 - protein, 12 aa, Homo sapiens
  CDR3 for alpha chain variable domain of TCR clone 86531 (TRAV1-2, TRAJ29)
CAVPSGNTPLVF

SEQ ID NO: 173062 - protein, 14 aa, Homo sapiens
  CDR3 for beta chain variable domain of TCR clone 86531 (TRBV11-2, TRBJ2-5)
CASRPLAGRETQYF

SEQ ID NO: 173063 - protein, 12 aa, Homo sapiens
  CDR3 for alpha chain variable domain of TCR clone 86532 (TRAV12-3, TRAJ17)
CAMTLTGNKLTF

SEQ ID NO: 173064 - protein, 13 aa, Homo sapiens
  CDR3 for beta chain variable domain of TCR clone 86532 (TRBV28, TRBJ1-5)
CASSLRGNQPQHF

SEQ ID NO: 173065 - protein, 15 aa, Homo sapiens
  CDR3 for alpha chain variable domain of TCR clone 86533 (TRAV27, TRAJ38)
CAARRNAGNNRKLIW

SEQ ID NO: 173066 - protein, 22 aa, Homo sapiens
  CDR3 for beta chain variable domain of TCR clone 86533 (TRBV6-1, TRBJ1-3)
CASVQGGGWKHHIFWRGKLAHC

SEQ ID NO: 173067 - protein, 11 aa, Homo sapiens
  CDR3 for alpha chain variable domain of TCR clone 86534 (TRAV12-2, TRAJ39)
CAVNNTLTFGG

SEQ ID NO: 173068 - protein, 16 aa, Homo sapiens
  CDR3 for beta chain variable domain of TCR clone 86534 (TRBV5-3, TRBJ2-2)
CARSFGTGTNTGELFF

SEQ ID NO: 173069 - protein, 17 aa, Homo sapiens
  CDR3 for alpha chain variable domain of TCR clone 86535 (TRAV26-1, TRAJ53)
CIVRVDDSGGSNYKLTF

SEQ ID NO: 173070 - protein, 14 aa, Homo sapiens
  CDR3 for beta chain variable domain of TCR clone 86535 (TRBV7-8, TRBJ2-3)
CASSLEAGTDTQYF

SEQ ID NO: 173071 - protein, 13 aa, Homo sapiens
  CDR3 for alpha chain variable domain of TCR clone 86536 (TRAV17, TRAJ9)
CATDYPGGFKTIF

SEQ ID NO: 173072 - protein, 16 aa, Homo sapiens
  CDR3 for beta chain variable domain of TCR clone 86536 (TRBV7-7, TRBJ2-1)
CASSLASGTSYNEQFF

SEQ ID NO: 173073 - protein, 13 aa, Homo sapiens
  CDR3 for alpha chain variable domain of TCR clone 86537 (TRAV20, TRAJ37)
CAGCSSNTGKLIF

SEQ ID NO: 173074 - protein, 14 aa, Homo sapiens
  CDR3 for beta chain variable domain of TCR clone 86537 (TRBV11-2, TRBJ2-5)
CASSRTGGIETQYF

SEQ ID NO: 173075 - protein, 17 aa, Homo sapiens
  CDR3 for alpha chain variable domain of TCR clone 86538 (TRAV8-1, TRAJ43)
CAVTNDMRFGAGTRLTV

SEQ ID NO: 173076 - protein, 14 aa, Homo sapiens
  CDR3 for beta chain variable domain of TCR clone 86538 (TRBV25-1, TRBJ1-1)
CASTHLGGNTEAFF

SEQ ID NO: 173077 - protein, 14 aa, Homo sapiens
  CDR3 for alpha chain variable domain of TCR clone 86539 (TRAV26-2, TRAJ40)
CILPTPEGTYKYIF

SEQ ID NO: 173078 - protein, 12 aa, Homo sapiens
  CDR3 for beta chain variable domain of TCR clone 86539 (TRBV19, TRBJ2-1)
CASSQISNEQFF

SEQ ID NO: 173079 - protein, 14 aa, Homo sapiens
  CDR3 for alpha chain variable domain of TCR clone 86540 (TRAV3, TRAJ9)
CALRDDTGGFKTIF

SEQ ID NO: 173080 - protein, 18 aa, Homo sapiens
  CDR3 for beta chain variable domain of TCR clone 86540 (TRBV20-1, TRBJ2-6)
CSAETTPTHGSGANVLTF

SEQ ID NO: 173081 - protein, 13 aa, Homo sapiens
  CDR3 for alpha chain variable domain of TCR clone 86541 (TRAV20, TRAJ37)
CAGCSSNTGKLIF

SEQ ID NO: 173082 - protein, 14 aa, Homo sapiens
  CDR3 for beta chain variable domain of TCR clone 86541 (TRBV19, TRBJ2-5)
CASSMTGQQETQYF

SEQ ID NO: 173083 - protein, 13 aa, Homo sapiens
  CDR3 for alpha chain variable domain of TCR clone 86542 (TRAV12-2, TRAJ20)
CAVYPSNDYKLSF

SEQ ID NO: 173084 - protein, 13 aa, Homo sapiens
  CDR3 for beta chain variable domain of TCR clone 86542 (TRBV4-2, TRBJ1-1)
CDSSQAGNTEAFF

SEQ ID NO: 173085 - protein, 13 aa, Homo sapiens
  CDR3 for alpha chain variable domain of TCR clone 86543 (TRAV13-1, TRAJ39)
CSKYSNAGNMLTF

SEQ ID NO: 173086 - protein, 14 aa, Homo sapiens
  CDR3 for beta chain variable domain of TCR clone 86543 (TRBV7-2, TRBJ2-7)
CASRSQGAAYEQYF

SEQ ID NO: 173087 - protein, 11 aa, Homo sapiens
  CDR3 for alpha chain variable domain of TCR clone 86544 (TRAV3, TRAJ21)
CAVGNFNKFYF

SEQ ID NO: 173088 - protein, 14 aa, Homo sapiens
  CDR3 for beta chain variable domain of TCR clone 86544 (TRBV7-9, TRBJ2-4)
CASSLAMGGNIQYF

SEQ ID NO: 173089 - protein, 11 aa, Homo sapiens
  CDR3 for alpha chain variable domain of TCR clone 86545 (TRAV3, TRAJ21)
CAVGNFNKFYF

SEQ ID NO: 173090 - protein, 15 aa, Homo sapiens
  CDR3 for beta chain variable domain of TCR clone 86545 (TRBV6-1, TRBJ2-6)
CASSSRPSGANVLTF

SEQ ID NO: 173091 - protein, 14 aa, Homo sapiens
  CDR3 for alpha chain variable domain of TCR clone 86546 (TRAV23/DV6, TRAJ4)
CAANLSGGHNKLIF

SEQ ID NO: 173092 - protein, 17 aa, Homo sapiens
  CDR3 for beta chain variable domain of TCR clone 86546 (TRBV4-1, TRBJ1-3)
CASSPQRGIRFGNTIYF

SEQ ID NO: 173093 - protein, 15 aa, Homo sapiens
  CDR3 for alpha chain variable domain of TCR clone 86547 (TRAV23/DV6, TRAJ32)
CAACPVLQTSSSFEL

SEQ ID NO: 173094 - protein, 17 aa, Homo sapiens
  CDR3 for beta chain variable domain of TCR clone 86547 (TRBV13, TRBJ2-3)
CASSSLGTSGLTDTQYF

SEQ ID NO: 173095 - protein, 11 aa, Homo sapiens
  CDR3 for alpha chain variable domain of TCR clone 86548 (TRAV1-2, TRAJ40)
CAVPGTYKYSF

SEQ ID NO: 173096 - protein, 16 aa, Homo sapiens
  CDR3 for beta chain variable domain of TCR clone 86548 (TRBV29-1, TRBJ2-7)
CSVEVVGTSGSYEQYF

SEQ ID NO: 173097 - protein, 16 aa, Homo sapiens
  CDR3 for alpha chain variable domain of TCR clone 86549 (TRAV12-2, TRAJ43)
CAGADMRFGAGTRLTV

SEQ ID NO: 173098 - protein, 16 aa, Homo sapiens
  CDR3 for beta chain variable domain of TCR clone 86549 (TRBV2, TRBJ2-4)
CASSEAPGGEQNMQYF

SEQ ID NO: 173099 - protein, 12 aa, Homo sapiens
  CDR3 for alpha chain variable domain of TCR clone 86550 (TRAV27, TRAJ22)
CAGDGAGVEIWF

SEQ ID NO: 173100 - protein, 16 aa, Homo sapiens
  CDR3 for beta chain variable domain of TCR clone 86550 (TRBV12-5, TRBJ2-5)
CASGPRTSGNQETQYF

SEQ ID NO: 173101 - protein, 14 aa, Homo sapiens
  CDR3 for alpha chain variable domain of TCR clone 86551 (TRAV20, TRAJ22)
CAVALGGSARQLTF

SEQ ID NO: 173102 - protein, 13 aa, Homo sapiens
  CDR3 for beta chain variable domain of TCR clone 86551 (TRBV13, TRBJ2-7)
CASSQGVSYEQYF

SEQ ID NO: 173103 - protein, 10 aa, Homo sapiens
  CDR3 for alpha chain variable domain of TCR clone 86552 (TRAV36/DV7, TRAJ38)
CAANNRKLIW

SEQ ID NO: 173104 - protein, 14 aa, Homo sapiens
  CDR3 for beta chain variable domain of TCR clone 86552 (TRBV27, TRBJ1-1)
CASSLLSGLSEAFF

SEQ ID NO: 173105 - protein, 13 aa, Homo sapiens
  CDR3 for alpha chain variable domain of TCR clone 86553 (TRAV9-2, TRAJ53)
CALSGGSNYKLTF

SEQ ID NO: 173106 - protein, 15 aa, Homo sapiens
  CDR3 for beta chain variable domain of TCR clone 86553 (TRBV7-3, TRBJ2-1)
CASSLKASEYNERFF

SEQ ID NO: 173107 - protein, 13 aa, Homo sapiens
  CDR3 for alpha chain variable domain of TCR clone 86554 (TRAV35, TRAJ57)
CAGSQGGSEKLVF

SEQ ID NO: 173108 - protein, 15 aa, Homo sapiens
  CDR3 for beta chain variable domain of TCR clone 86554 (TRBV19, TRBJ2-5)
CASHGLAGAQETQYF

SEQ ID NO: 173109 - protein, 16 aa, Homo sapiens
  CDR3 for alpha chain variable domain of TCR clone 86555 (TRAV30, TRAJ24)
CGTEIVDAERWGKFQF

SEQ ID NO: 173110 - protein, 14 aa, Homo sapiens
  CDR3 for beta chain variable domain of TCR clone 86555 (TRBV12-5, TRBJ2-5)
CASGSRTHQETQYF

SEQ ID NO: 173111 - protein, 14 aa, Homo sapiens
  CDR3 for alpha chain variable domain of TCR clone 86556 (TRAV12-3, TRAJ10)
SHLPLTGGGTKLTF

SEQ ID NO: 173112 - protein, 16 aa, Homo sapiens
  CDR3 for beta chain variable domain of TCR clone 86556 (TRBV5-8, TRBJ2-2)
CASSLINPGGAGELFF

SEQ ID NO: 173113 - protein, 16 aa, Homo sapiens
  CDR3 for alpha chain variable domain of TCR clone 86557 (TRAV30, TRAJ24)
CGTEIVDDDSWGKLQF

SEQ ID NO: 173114 - protein, 14 aa, Homo sapiens
  CDR3 for beta chain variable domain of TCR clone 86557 (TRBV12-5, TRBJ2-5)
CASGSRTHQETQYF

SEQ ID NO: 173115 - protein, 14 aa, Homo sapiens
  CDR3 for alpha chain variable domain of TCR clone 86558 (TRAV30, TRAJ33)
CGTVAPRSNYQLIW

SEQ ID NO: 173116 - protein, 14 aa, Homo sapiens
  CDR3 for beta chain variable domain of TCR clone 86558 (TRBV19, TRBJ2-1)
CASPTLVLSGEQFF

SEQ ID NO: 173117 - protein, 13 aa, Homo sapiens
  CDR3 for alpha chain variable domain of TCR clone 86559 (TRAV21, TRAJ20)
CAAGLRVDYKLSF

SEQ ID NO: 173118 - protein, 11 aa, Homo sapiens
  CDR3 for beta chain variable domain of TCR clone 86559 (TRBV29-1, TRBJ2-5)
CGEDRTGTQYF

SEQ ID NO: 173119 - protein, 14 aa, Homo sapiens
  CDR3 for alpha chain variable domain of TCR clone 86560 (TRAV8-1, TRAJ5)
CAVRTDTGRRALTF

SEQ ID NO: 173120 - protein, 16 aa, Homo sapiens
  CDR3 for beta chain variable domain of TCR clone 86560 (TRBV29-1, TRBJ2-7)
RSVEVVGTSGSYEQYF

SEQ ID NO: 173121 - protein, 13 aa, Homo sapiens
  CDR3 for alpha chain variable domain of TCR clone 86561 (TRAV29/DV5, TRAJ31)
CAASSNNNARLMF

SEQ ID NO: 173122 - protein, 16 aa, Homo sapiens
  CDR3 for beta chain variable domain of TCR clone 86561 (TRBV19, TRBJ2-2)
CASRSPGTGATGELFF

SEQ ID NO: 173123 - protein, 15 aa, Homo sapiens
  CDR3 for alpha chain variable domain of TCR clone 86562 (TRAV26-1, TRAJ29)
CIVRVEGSGNTPLVF

SEQ ID NO: 173124 - protein, 15 aa, Homo sapiens
  CDR3 for beta chain variable domain of TCR clone 86562 (TRBV7-9, TRBJ1-5)
CASSQSHQPNQPQHF

SEQ ID NO: 173125 - protein, 13 aa, Homo sapiens
  CDR3 for alpha chain variable domain of TCR clone 86563 (TRAV3, TRAJ20)
CAVRSLNDYKLSF

SEQ ID NO: 173126 - protein, 13 aa, Homo sapiens
  CDR3 for beta chain variable domain of TCR clone 86563 (TRBV6-1, TRBJ2-1)
CAGMDPTNKEQFF

SEQ ID NO: 173127 - protein, 18 aa, Homo sapiens
  CDR3 for alpha chain variable domain of TCR clone 86564 (TRAV21, TRAJ52)
CAVRPSPAGGTGYGKLTF

SEQ ID NO: 173128 - protein, 15 aa, Homo sapiens
  CDR3 for beta chain variable domain of TCR clone 86564 (TRBV27, TRBJ2-1)
CASSNGGGSSNEQFF

SEQ ID NO: 173129 - protein, 11 aa, Homo sapiens
  CDR3 for alpha chain variable domain of TCR clone 86565 (TRAV13-2, TRAJ15)
CSHQAGTALIF

SEQ ID NO: 173130 - protein, 14 aa, Homo sapiens
  CDR3 for beta chain variable domain of TCR clone 86565 (TRBV18, TRBJ2-7)
CASSPRGGAYEQYF

SEQ ID NO: 173131 - protein, 14 aa, Homo sapiens
  CDR3 for alpha chain variable domain of TCR clone 86566 (TRAV12-2, TRAJ40)
CAVKIPSGTYKYIF

SEQ ID NO: 173132 - protein, 16 aa, Homo sapiens
  CDR3 for beta chain variable domain of TCR clone 86566 (TRBV28, TRBJ2-5)
GASSFSPAGGWETQYF

SEQ ID NO: 173133 - protein, 14 aa, Homo sapiens
  CDR3 for alpha chain variable domain of TCR clone 86567 (TRAV2, TRAJ37)
CAVDFTSNTGKLIF

SEQ ID NO: 173134 - protein, 15 aa, Homo sapiens
  CDR3 for beta chain variable domain of TCR clone 86567 (TRBV5-1, TRBJ2-1)
CASKGLAGVYNEQFF

SEQ ID NO: 173135 - protein, 15 aa, Homo sapiens
  CDR3 for alpha chain variable domain of TCR clone 86568 (TRAV21, TRAJ53)
CATLNSGGSNYKLTF

SEQ ID NO: 173136 - protein, 16 aa, Homo sapiens
  CDR3 for beta chain variable domain of TCR clone 86568 (TRBV12-4, TRBJ1-5)
CASSRPVGGPNQPQHF

SEQ ID NO: 173137 - protein, 14 aa, Homo sapiens
  CDR3 for alpha chain variable domain of TCR clone 86569 (TRAV13-1, TRAJ35)
CAASKGGFGNVLHC

SEQ ID NO: 173138 - protein, 11 aa, Homo sapiens
  CDR3 for beta chain variable domain of TCR clone 86569 (TRBV19, TRBJ1-1)
CASSIGSEAFF

SEQ ID NO: 173139 - protein, 14 aa, Homo sapiens
  CDR3 for alpha chain variable domain of TCR clone 86570 (TRAV1-2, TRAJ8)
CAMREDTGFQKLVF

SEQ ID NO: 173140 - protein, 11 aa, Homo sapiens
  CDR3 for beta chain variable domain of TCR clone 86570 (TRBV20-1, TRBJ2-5)
CSADRAETQYF

SEQ ID NO: 173141 - protein, 14 aa, Homo sapiens
  CDR3 for alpha chain variable domain of TCR clone 86571 (TRAV8-3, TRAJ10)
CAVGNAGGGNKPTF

SEQ ID NO: 173142 - protein, 16 aa, Homo sapiens
  CDR3 for beta chain variable domain of TCR clone 86571 (TRBV11-2, TRBJ1-2)
CASSLDTGGADYGYTF

SEQ ID NO: 173143 - protein, 12 aa, Homo sapiens
  CDR3 for alpha chain variable domain of TCR clone 86572 (TRAV8-3, TRAJ26)
CAGDNCGQNFVF

SEQ ID NO: 173144 - protein, 15 aa, Homo sapiens
  CDR3 for beta chain variable domain of TCR clone 86572 (TRBV9, TRBJ2-1)
CASSFAGSSYNEQFF

SEQ ID NO: 173145 - protein, 13 aa, Homo sapiens
  CDR3 for alpha chain variable domain of TCR clone 86573 (TRAV13-1, TRAJ33)
CAASRAGNYQLIW

SEQ ID NO: 173146 - protein, 16 aa, Homo sapiens
  CDR3 for beta chain variable domain of TCR clone 86573 (TRBV2, TRBJ2-7)
CASSEQYFGPGTRLTV

SEQ ID NO: 173147 - protein, 14 aa, Homo sapiens
  CDR3 for alpha chain variable domain of TCR clone 86574 (TRAV13-1, TRAJ44)
FAAKATGTASKLTF

SEQ ID NO: 173148 - protein, 15 aa, Homo sapiens
  CDR3 for beta chain variable domain of TCR clone 86574 (TRBV19, TRBJ2-1)
CASIKGRGPYNEQFF

SEQ ID NO: 173149 - protein, 14 aa, Homo sapiens
  CDR3 for alpha chain variable domain of TCR clone 86575 (TRAV3, TRAJ9)
CAVRGNTGGFKTIF

SEQ ID NO: 173150 - protein, 14 aa, Homo sapiens
  CDR3 for beta chain variable domain of TCR clone 86575 (TRBV6-1, TRBJ1-3)
CASVQGGGGNTIYF

SEQ ID NO: 173151 - protein, 12 aa, Homo sapiens
  CDR3 for alpha chain variable domain of TCR clone 86576 (TRAV23/DV6, TRAJ30)
CAASKGDDKIIF

SEQ ID NO: 173152 - protein, 13 aa, Homo sapiens
  CDR3 for beta chain variable domain of TCR clone 86576 (TRBV12-4, TRBJ2-7)
CASSPTETYEQYF

SEQ ID NO: 173153 - protein, 14 aa, Homo sapiens
  CDR3 for alpha chain variable domain of TCR clone 86577 (TRAV12-2, TRAJ13)
CAVKKTGCYQKVTF

SEQ ID NO: 173154 - protein, 15 aa, Homo sapiens
  CDR3 for beta chain variable domain of TCR clone 86577 (TRBV6-3, TRBJ2-7)
CASSSPGTVFYEQYF

SEQ ID NO: 173155 - protein, 15 aa, Homo sapiens
  CDR3 for alpha chain variable domain of TCR clone 86578 (TRAV23/DV6, TRAJ28)
CAALLAYFGAGSYQL

SEQ ID NO: 173156 - protein, 13 aa, Homo sapiens
  CDR3 for beta chain variable domain of TCR clone 86578 (TRBV4-2, TRBJ2-3)
CASSQGNTDTQYF

SEQ ID NO: 173157 - protein, 19 aa, Homo sapiens
  CDR3 for alpha chain variable domain of TCR clone 86579 (TRAV38-1, TRAJ53)
FAFMKHGLESGGSNYKLTF

SEQ ID NO: 173158 - protein, 13 aa, Homo sapiens
  CDR3 for beta chain variable domain of TCR clone 86579 (TRBV19, TRBJ2-7)
CASSPRQSYEQYF

SEQ ID NO: 173159 - protein, 14 aa, Homo sapiens
  CDR3 for alpha chain variable domain of TCR clone 86580 (TRAV12-2, TRAJ13)
CAVKKTGGYQKVTF

SEQ ID NO: 173160 - protein, 13 aa, Homo sapiens
  CDR3 for beta chain variable domain of TCR clone 86580 (TRBV11-2, TRBJ1-1)
CASSLGNGAEAFF

SEQ ID NO: 173161 - protein, 14 aa, Homo sapiens
  CDR3 for alpha chain variable domain of TCR clone 86581 (TRAV1-2, TRAJ8)
CAVREDTGFQKLVF

SEQ ID NO: 173162 - protein, 13 aa, Homo sapiens
  CDR3 for beta chain variable domain of TCR clone 86581 (TRBV29-1, TRBJ1-1)
CSVGGSRNTEAFF

SEQ ID NO: 173163 - protein, 15 aa, Homo sapiens
  CDR3 for alpha chain variable domain of TCR clone 86582 (TRAV40, TRAJ45)
CLLGDLGGGADGLTF

SEQ ID NO: 173164 - protein, 17 aa, Homo sapiens
  CDR3 for beta chain variable domain of TCR clone 86582 (TRBV18, TRBJ1-5)
CASSPPMGQGTNQPQHF

SEQ ID NO: 173165 - protein, 12 aa, Homo sapiens
  CDR3 for alpha chain variable domain of TCR clone 86583 (TRAV3, TRAJ31)
CAVRDGNARLMF

SEQ ID NO: 173166 - protein, 15 aa, Homo sapiens
  CDR3 for beta chain variable domain of TCR clone 86583 (TRBV5-1, TRBJ2-1)
CASSPPRAPYNEQFF

SEQ ID NO: 173167 - protein, 13 aa, Homo sapiens
  CDR3 for alpha chain variable domain of TCR clone 86584 (TRAV23/DV6, TRAJ45)
CAARRGGADGLTV

SEQ ID NO: 173168 - protein, 14 aa, Homo sapiens
  CDR3 for beta chain variable domain of TCR clone 86584 (TRBV7-2, TRBJ2-3)
CASSLARGTDTQYF

SEQ ID NO: 173169 - protein, 15 aa, Homo sapiens
  CDR3 for alpha chain variable domain of TCR clone 86585 (TRAV3, TRAJ13)
CAVRVYSGGYQKVTF

SEQ ID NO: 173170 - protein, 14 aa, Homo sapiens
  CDR3 for beta chain variable domain of TCR clone 86585 (TRBV7-3, TRBJ1-1)
CASSLKGGNTEAFF

SEQ ID NO: 173171 - protein, 15 aa, Homo sapiens
  CDR3 for alpha chain variable domain of TCR clone 86586 (TRAV25, TRAJ52)
CAGRPGGTSYGKLTF

SEQ ID NO: 173172 - protein, 11 aa, Homo sapiens
  CDR3 for beta chain variable domain of TCR clone 86586 (TRBV11-2, TRBJ2-2)
CASSLPGELFF

SEQ ID NO: 173173 - protein, 13 aa, Homo sapiens
  CDR3 for alpha chain variable domain of TCR clone 86587 (TRAV12-1, TRAJ33)
CGDAPDSNYQLIW

SEQ ID NO: 173174 - protein, 12 aa, Homo sapiens
  CDR3 for beta chain variable domain of TCR clone 86587 (TRBV7-9, TRBJ2-7)
CASSFGSYEQYF

SEQ ID NO: 173175 - protein, 17 aa, Homo sapiens
  CDR3 for alpha chain variable domain of TCR clone 86588 (TRAV3, TRAJ6)
CAVRDGPRAGGSYIPTF

SEQ ID NO: 173176 - protein, 13 aa, Homo sapiens
  CDR3 for beta chain variable domain of TCR clone 86588 (TRBV19, TRBJ2-7)
CASSVDRTYEQYF

SEQ ID NO: 173177 - protein, 17 aa, Homo sapiens
  CDR3 for alpha chain variable domain of TCR clone 86589 (TRAV20, TRAJ28)
CAVQGGYSGAGSYQLTF

SEQ ID NO: 173178 - protein, 15 aa, Homo sapiens
  CDR3 for beta chain variable domain of TCR clone 86589 (TRBV7-2, TRBJ2-7)
CASSLSSGRTYEQYV

SEQ ID NO: 173179 - protein, 14 aa, Homo sapiens
  CDR3 for alpha chain variable domain of TCR clone 86590 (TRAV17, TRAJ10)
CATTITGGGNKLTF

SEQ ID NO: 173180 - protein, 13 aa, Homo sapiens
  CDR3 for beta chain variable domain of TCR clone 86590 (TRBV7-3, TRBJ1-1)
CASSQDWGAEAFF

SEQ ID NO: 173181 - protein, 14 aa, Homo sapiens
  CDR3 for alpha chain variable domain of TCR clone 86591 (TRAV1-2, TRAJ16)
CAVNRVSDGQKLLF

SEQ ID NO: 173182 - protein, 16 aa, Homo sapiens
  CDR3 for beta chain variable domain of TCR clone 86591 (TRBV20-1, TRBJ1-4)
CSAPGQGLLTNEKLFF

SEQ ID NO: 173183 - protein, 13 aa, Homo sapiens
  CDR3 for alpha chain variable domain of TCR clone 86592 (TRAV24, TRAJ42)
CAFSTGSQGNLIF

SEQ ID NO: 173184 - protein, 15 aa, Homo sapiens
  CDR3 for beta chain variable domain of TCR clone 86592 (TRBV10-3, TRBJ1-3)
CAISDSQGAGNTIYF

SEQ ID NO: 173185 - protein, 16 aa, Homo sapiens
  CDR3 for alpha chain variable domain of TCR clone 86593 (TRAV3, TRAJ37)
CAVRPHGSGNTGKLIF

SEQ ID NO: 173186 - protein, 15 aa, Homo sapiens
  CDR3 for beta chain variable domain of TCR clone 86593 (TRBV5-5, TRBJ2-7)
CASSLAAPRSYEQYF

SEQ ID NO: 173187 - protein, 15 aa, Homo sapiens
  CDR3 for alpha chain variable domain of TCR clone 86594 (TRAV8-4, TRAJ48)
CALSAAYFGNEKLTF

SEQ ID NO: 173188 - protein, 12 aa, Homo sapiens
  CDR3 for beta chain variable domain of TCR clone 86594 (TRBV3-1, TRBJ2-5)
CASSQRGETQYF

SEQ ID NO: 173189 - protein, 15 aa, Homo sapiens
  CDR3 for alpha chain variable domain of TCR clone 86595 (TRAV3, TRAJ3)
CAVRDRDSSASKIIF

SEQ ID NO: 173190 - protein, 18 aa, Homo sapiens
  CDR3 for beta chain variable domain of TCR clone 86595 (TRBV25-1, TRBJ1-2)
CAISGLQNGQGLIFGYTF

SEQ ID NO: 173191 - protein, 11 aa, Homo sapiens
  CDR3 for alpha chain variable domain of TCR clone 86596 (TRAV21, TRAJ11)
CAVNGYSTLTF

SEQ ID NO: 173192 - protein, 16 aa, Homo sapiens
  CDR3 for beta chain variable domain of TCR clone 86596 (TRBV9, TRBJ2-2)
CASSAMGKGNTGELFF

SEQ ID NO: 173193 - protein, 12 aa, Homo sapiens
  CDR3 for alpha chain variable domain of TCR clone 86597 (TRAV3, TRAJ4)
CAVSGGYNKLLF

SEQ ID NO: 173194 - protein, 17 aa, Homo sapiens
  CDR3 for beta chain variable domain of TCR clone 86597 (TRBV6-5, TRBJ2-6)
CASSSATSGPGANVLTF

SEQ ID NO: 173195 - protein, 12 aa, Homo sapiens
  CDR3 for alpha chain variable domain of TCR clone 86598 (TRAV22, TRAJ22)
CAPGGSARQLTF

SEQ ID NO: 173196 - protein, 15 aa, Homo sapiens
  CDR3 for beta chain variable domain of TCR clone 86598 (TRBV18, TRBJ2-3)
CASSPLAGETDTQYF

SEQ ID NO: 173197 - protein, 15 aa, Homo sapiens
  CDR3 for alpha chain variable domain of TCR clone 86599 (TRAV12-1, TRAJ44)
CVVFVNTGTDSKLTF

SEQ ID NO: 173198 - protein, 16 aa, Homo sapiens
  CDR3 for beta chain variable domain of TCR clone 86599 (TRBV20-1, TRBJ2-5)
CSPGGTSGGYMETQYF

SEQ ID NO: 173199 - protein, 14 aa, Homo sapiens
  CDR3 for alpha chain variable domain of TCR clone 86600 (TRAV12-2, TRAJ13)
CAVKKTGGYQKVTF

SEQ ID NO: 173200 - protein, 16 aa, Homo sapiens
  CDR3 for beta chain variable domain of TCR clone 86600 (TRBV20-1, TRBJ1-4)
CSAPGQGLLTNERLFF

SEQ ID NO: 173201 - protein, 11 aa, Homo sapiens
  CDR3 for alpha chain variable domain of TCR clone 86601 (TRAV2, TRAJ13)
CASGGYQKVTF

SEQ ID NO: 173202 - protein, 13 aa, Homo sapiens
  CDR3 for beta chain variable domain of TCR clone 86601 (TRBV28, TRBJ2-7)
CASKAGGVYEQYF

SEQ ID NO: 173203 - protein, 12 aa, Homo sapiens
  CDR3 for alpha chain variable domain of TCR clone 86602 (TRAV17, TRAJ20)
CATALSDYKLSF

SEQ ID NO: 173204 - protein, 12 aa, Homo sapiens
  CDR3 for beta chain variable domain of TCR clone 86602 (TRBV10-3, TRBJ2-7)
CAHGADSGEQYF

SEQ ID NO: 173205 - protein, 15 aa, Homo sapiens
  CDR3 for alpha chain variable domain of TCR clone 86603 (TRAV27, TRAJ38)
CAARRNAGNNRKLTW

SEQ ID NO: 173206 - protein, 15 aa, Homo sapiens
  CDR3 for beta chain variable domain of TCR clone 86603 (TRBV5-1, TRBJ2-1)
CASSPPRAPYNEQFF

SEQ ID NO: 173207 - protein, 17 aa, Homo sapiens
  CDR3 for alpha chain variable domain of TCR clone 86604 (TRAV13-1, TRAJ31)
CAPRDRLMFGDGTQLVV

SEQ ID NO: 173208 - protein, 12 aa, Homo sapiens
  CDR3 for beta chain variable domain of TCR clone 86604 (TRBV7-9, TRBJ2-7)
CACSLEGYEQYF

SEQ ID NO: 173209 - protein, 14 aa, Homo sapiens
  CDR3 for alpha chain variable domain of TCR clone 86605 (TRAV12-2, TRAJ53)
CRERGGGSNYKLTF

SEQ ID NO: 173210 - protein, 17 aa, Homo sapiens
  CDR3 for beta chain variable domain of TCR clone 86605 (TRBV7-3, TRBJ2-3)
RASSLMKRTRGADTQYF

SEQ ID NO: 173211 - protein, 15 aa, Homo sapiens
  CDR3 for alpha chain variable domain of TCR clone 86606 (TRAV26-1, TRAJ29)
CIVRVEGSGNTTLVF

SEQ ID NO: 173212 - protein, 14 aa, Homo sapiens
  CDR3 for beta chain variable domain of TCR clone 86606 (TRBV25-1, TRBJ1-1)
CASTHLGGNTEAFF

SEQ ID NO: 173213 - protein, 15 aa, Homo sapiens
  CDR3 for alpha chain variable domain of TCR clone 86607 (TRAV12-2, TRAJ45)
CAVLLGGGGADGPTF

SEQ ID NO: 173214 - protein, 14 aa, Homo sapiens
  CDR3 for beta chain variable domain of TCR clone 86607 (TRBV7-2, TRBJ2-7)
CASSVGTRTYEQYF

SEQ ID NO: 173215 - protein, 14 aa, Homo sapiens
  CDR3 for alpha chain variable domain of TCR clone 86608 (TRAV1-2, TRAJ16)
CAVNRFSDGQKLLF

SEQ ID NO: 173216 - protein, 15 aa, Homo sapiens
  CDR3 for beta chain variable domain of TCR clone 86608 (TRBV7-3, TRBJ2-1)
CASSFGQSNYNEQFF

SEQ ID NO: 173217 - protein, 13 aa, Homo sapiens
  CDR3 for alpha chain variable domain of TCR clone 86609 (TRAV12-3, TRAJ13)
CAMSSGGYQKVTF

SEQ ID NO: 173218 - protein, 15 aa, Homo sapiens
  CDR3 for beta chain variable domain of TCR clone 86609 (TRBV7-9, TRBJ2-1)
CASSLGWGRANEQFF

SEQ ID NO: 173219 - protein, 11 aa, Homo sapiens
  CDR3 for alpha chain variable domain of TCR clone 86610 (TRAV12-1, TRAJ21)
CVVNNFNKFYF

SEQ ID NO: 173220 - protein, 16 aa, Homo sapiens
  CDR3 for beta chain variable domain of TCR clone 86610 (TRBV29-1, TRBJ2-7)
CSVEDAEDGTAYEQYF

SEQ ID NO: 173221 - protein, 14 aa, Homo sapiens
  CDR3 for alpha chain variable domain of TCR clone 86611 (TRAV25, TRAJ12)
CAGCDMDSSYKLIF

SEQ ID NO: 173222 - protein, 13 aa, Homo sapiens
  CDR3 for beta chain variable domain of TCR clone 86611 (TRBV12-4, TRBJ2-2)
CARSITGSGELFF

SEQ ID NO: 173223 - protein, 19 aa, Homo sapiens
  CDR3 for alpha chain variable domain of TCR clone 86612 (TRAV26-1, TRAJ52)
CIVRAHRNAGGTSYGKLTF

SEQ ID NO: 173224 - protein, 16 aa, Homo sapiens
  CDR3 for beta chain variable domain of TCR clone 86612 (TRBV12-4, TRBJ1-2)
CASSFRGLTGNYGYTF

SEQ ID NO: 173225 - protein, 17 aa, Homo sapiens
  CDR3 for alpha chain variable domain of TCR clone 86613 (TRAV12-2, TRAJ6)
CAPQGPPRAGGSYIPTF

SEQ ID NO: 173226 - protein, 16 aa, Homo sapiens
  CDR3 for beta chain variable domain of TCR clone 86613 (TRBV19, TRBJ2-2)
CASSTARASNTGELFV

SEQ ID NO: 173227 - protein, 12 aa, Homo sapiens
  CDR3 for alpha chain variable domain of TCR clone 86614 (TRAV13-1, TRAJ49)
CAAPNTGNQFYF

SEQ ID NO: 173228 - protein, 17 aa, Homo sapiens
  CDR3 for beta chain variable domain of TCR clone 86614 (TRBV25-1, TRBJ2-7)
CASSDARVVVSSYEQYF

SEQ ID NO: 173229 - protein, 18 aa, Homo sapiens
  CDR3 for alpha chain variable domain of TCR clone 86615 (TRAV9-2, TRAJ52)
CALSRHNAGGTSYGKLTF

SEQ ID NO: 173230 - protein, 13 aa, Homo sapiens
  CDR3 for beta chain variable domain of TCR clone 86615 (TRBV7-9, TRBJ1-2)
CASGLKQNYGYTF

SEQ ID NO: 173231 - protein, 14 aa, Homo sapiens
  CDR3 for alpha chain variable domain of TCR clone 86616 (TRAV8-2, TRAJ11)
CVVSEKPGYSTLTF

SEQ ID NO: 173232 - protein, 16 aa, Homo sapiens
  CDR3 for beta chain variable domain of TCR clone 86616 (TRBV28, TRBJ2-1)
CASSSPEYPRDNEQFF

SEQ ID NO: 173233 - protein, 12 aa, Homo sapiens
  CDR3 for alpha chain variable domain of TCR clone 86617 (TRAV27, TRAJ35)
CAGADFGNVLHC

SEQ ID NO: 173234 - protein, 16 aa, Homo sapiens
  CDR3 for beta chain variable domain of TCR clone 86617 (TRBV6-1, TRBJ2-1)
CASISRQGSSYNERFF

SEQ ID NO: 173235 - protein, 15 aa, Homo sapiens
  CDR3 for alpha chain variable domain of TCR clone 86618 (TRAV21, TRAJ24)
CAARSSTDSWGKLQF

SEQ ID NO: 173236 - protein, 15 aa, Homo sapiens
  CDR3 for beta chain variable domain of TCR clone 86618 (TRBV5-1, TRBJ1-4)
FAPAAWKDGNEKLFF

SEQ ID NO: 173237 - protein, 12 aa, Homo sapiens
  CDR3 for alpha chain variable domain of TCR clone 86619 (TRAV12-2, TRAJ43)
CAVNVNNDDMRF

SEQ ID NO: 173238 - protein, 17 aa, Homo sapiens
  CDR3 for beta chain variable domain of TCR clone 86619 (TRBV3-1, TRBJ2-2)
CASSQFRDKVDTGELFF

SEQ ID NO: 173239 - protein, 13 aa, Homo sapiens
  CDR3 for alpha chain variable domain of TCR clone 86620 (TRAV27, TRAJ6)
CAGGTRGSYIPTF

SEQ ID NO: 173240 - protein, 14 aa, Homo sapiens
  CDR3 for beta chain variable domain of TCR clone 86620 (TRBV7-3, TRBJ1-1)
CASSLKGGNTEAFF

SEQ ID NO: 173241 - protein, 15 aa, Homo sapiens
  CDR3 for alpha chain variable domain of TCR clone 86621 (TRAV8-4, TRAJ40)
WAVSSITSGTYKYIF

SEQ ID NO: 173242 - protein, 13 aa, Homo sapiens
  CDR3 for beta chain variable domain of TCR clone 86621 (TRBV2, TRBJ2-1)
CATSRGTDNEQFF

SEQ ID NO: 173243 - protein, 10 aa, Homo sapiens
  CDR3 for alpha chain variable domain of TCR clone 86622 (TRAV1-2, TRAJ18)
CAVRGEAQPW

SEQ ID NO: 173244 - protein, 15 aa, Homo sapiens
  CDR3 for beta chain variable domain of TCR clone 86622 (TRBV19, TRBJ2-1)
CASSSPGVPLDEQFF

SEQ ID NO: 173245 - protein, 15 aa, Homo sapiens
  CDR3 for alpha chain variable domain of TCR clone 86623 (TRAV2, TRAJ9)
CAVEDRGTGGFKTIF

SEQ ID NO: 173246 - protein, 13 aa, Homo sapiens
  CDR3 for beta chain variable domain of TCR clone 86623 (TRBV19, TRBJ1-2)
CASSVPGQDGCTF

SEQ ID NO: 173247 - protein, 14 aa, Homo sapiens
  CDR3 for alpha chain variable domain of TCR clone 86624 (TRAV12-3, TRAJ33)
CAMSVPGSNYQLIW

SEQ ID NO: 173248 - protein, 19 aa, Homo sapiens
  CDR3 for beta chain variable domain of TCR clone 86624 (TRBV19, TRBJ2-5)
CASSIGQVTDFFLGETQYF

SEQ ID NO: 173249 - protein, 15 aa, Homo sapiens
  CDR3 for alpha chain variable domain of TCR clone 86625 (TRAV20, TRAJ45)
CAVQETGGGADGLTF

SEQ ID NO: 173250 - protein, 14 aa, Homo sapiens
  CDR3 for beta chain variable domain of TCR clone 86625 (TRBV5-1, TRBJ2-7)
CASSRGESLYEQYF

SEQ ID NO: 173251 - protein, 15 aa, Homo sapiens
  CDR3 for alpha chain variable domain of TCR clone 86626 (TRAV12-2, TRAJ56)
CAVNPFTRANSKLTF

SEQ ID NO: 173252 - protein, 13 aa, Homo sapiens
  CDR3 for beta chain variable domain of TCR clone 86626 (TRBV20-1, TRBJ1-2)
CSARDRVYGGYTF

SEQ ID NO: 173253 - protein, 17 aa, Homo sapiens
  CDR3 for alpha chain variable domain of TCR clone 86627 (TRAV13-2, TRAJ42)
CAEQGKNYGGSQGNLIF

SEQ ID NO: 173254 - protein, 16 aa, Homo sapiens
  CDR3 for beta chain variable domain of TCR clone 86627 (TRBV7-9, TRBJ2-1)
CASSLGTGWDYNEQFF

SEQ ID NO: 173255 - protein, 12 aa, Homo sapiens
  CDR3 for alpha chain variable domain of TCR clone 86628 (TRAV1-1, TRAJ8)
CAGGTGFQELVF

SEQ ID NO: 173256 - protein, 13 aa, Homo sapiens
  CDR3 for beta chain variable domain of TCR clone 86628 (TRBV7-3, TRBJ1-1)
CASSQDWGAEAFF

SEQ ID NO: 173257 - protein, 14 aa, Homo sapiens
  CDR3 for alpha chain variable domain of TCR clone 86629 (TRAV12-2, TRAJ53)
CAVKGGGSNSKLTF

SEQ ID NO: 173258 - protein, 14 aa, Homo sapiens
  CDR3 for beta chain variable domain of TCR clone 86629 (TRBV19, TRBJ2-1)
CASPTFVLSGEQFF

SEQ ID NO: 173259 - protein, 15 aa, Homo sapiens
  CDR3 for alpha chain variable domain of TCR clone 86630 (TRAV35, TRAJ58)
CAGRRQETSVSRLTF

SEQ ID NO: 173260 - protein, 16 aa, Homo sapiens
  CDR3 for beta chain variable domain of TCR clone 86630 (TRBV2, TRBJ2-1)
CASSVGGSLSYNEQFF

SEQ ID NO: 173261 - protein, 13 aa, Homo sapiens
  CDR3 for alpha chain variable domain of TCR clone 86631 (TRAV27, TRAJ29)
CAGAHSGNTPLFF

SEQ ID NO: 173262 - protein, 14 aa, Homo sapiens
  CDR3 for beta chain variable domain of TCR clone 86631 (TRBV7-9, TRBJ2-7)
CASSIGQGAGEQYF

SEQ ID NO: 173263 - protein, 12 aa, Homo sapiens
  CDR3 for alpha chain variable domain of TCR clone 86632 (TRAV21, TRAJ49)
CAVSWTGNQFYF

SEQ ID NO: 173264 - protein, 18 aa, Homo sapiens
  CDR3 for beta chain variable domain of TCR clone 86632 (TRBV7-8, TRBJ2-1)
CASSPAEGLAGGLNEQFL

SEQ ID NO: 173265 - protein, 15 aa, Homo sapiens
  CDR3 for alpha chain variable domain of TCR clone 86633 (TRAV17, TRAJ23)
CATDPEDNQGGKLIF

SEQ ID NO: 173266 - protein, 12 aa, Homo sapiens
  CDR3 for beta chain variable domain of TCR clone 86633 (TRBV2, TRBJ2-1)
CAKREGYNEQFF

SEQ ID NO: 173267 - protein, 12 aa, Homo sapiens
  CDR3 for alpha chain variable domain of TCR clone 86634 (TRAV13-1, TRAJ53)
AASGGSNYKLTF

SEQ ID NO: 173268 - protein, 14 aa, Homo sapiens
  CDR3 for beta chain variable domain of TCR clone 86634 (TRBV9, TRBJ2-7)
CASSVGVGSYEQYF

SEQ ID NO: 173269 - protein, 12 aa, Homo sapiens
  CDR3 for alpha chain variable domain of TCR clone 86635 (TRAV17, TRAJ20)
CATQSNDYKLSF

SEQ ID NO: 173270 - protein, 14 aa, Homo sapiens
  CDR3 for beta chain variable domain of TCR clone 86635 (TRBV2, TRBJ2-5)
CASTWGRAQETQYF

SEQ ID NO: 173271 - protein, 13 aa, Homo sapiens
  CDR3 for alpha chain variable domain of TCR clone 86636 (TRAV36/DV7, TRAJ37)
CAVFSSNTGTLIF

SEQ ID NO: 173272 - protein, 15 aa, Homo sapiens
  CDR3 for beta chain variable domain of TCR clone 86636 (TRBV5-1, TRBJ2-2)
CASSSQGGNTGELFF

SEQ ID NO: 173273 - protein, 14 aa, Homo sapiens
  CDR3 for alpha chain variable domain of TCR clone 86637 (TRAV23/DV6, TRAJ11)
CAASLESGYSTLTF

SEQ ID NO: 173274 - protein, 13 aa, Homo sapiens
  CDR3 for beta chain variable domain of TCR clone 86637 (TRBV4-1, TRBJ2-5)
CAGSLTRGETQYF

SEQ ID NO: 173275 - protein, 11 aa, Homo sapiens
  CDR3 for alpha chain variable domain of TCR clone 86638 (TRAV29/DV5, TRAJ31)
CAASYRDRLLF

SEQ ID NO: 173276 - protein, 19 aa, Homo sapiens
  CDR3 for beta chain variable domain of TCR clone 86638 (TRBV19, TRBJ2-5)
CASSIGQVTDFFLGETQYF

SEQ ID NO: 173277 - protein, 16 aa, Homo sapiens
  CDR3 for alpha chain variable domain of TCR clone 86639 (TRAV12-1, TRAJ12)
CVVNTLLMDSSYKFIF

SEQ ID NO: 173278 - protein, 13 aa, Homo sapiens
  CDR3 for beta chain variable domain of TCR clone 86639 (TRBV11-2, TRBJ2-1)
CASSSEAYNEQFF

SEQ ID NO: 173279 - protein, 13 aa, Homo sapiens
  CDR3 for alpha chain variable domain of TCR clone 86640 (TRAV1-2, TRAJ33)
CAVVMDSNYQLIW

SEQ ID NO: 173280 - protein, 13 aa, Homo sapiens
  CDR3 for beta chain variable domain of TCR clone 86640 (TRBV28, TRBJ2-1)
CASSLIGRDEQFF

SEQ ID NO: 173281 - protein, 14 aa, Homo sapiens
  CDR3 for alpha chain variable domain of TCR clone 86641 (TRAV35, TRAJ22)
CAGLRPGSARQLTF

SEQ ID NO: 173282 - protein, 16 aa, Homo sapiens
  CDR3 for beta chain variable domain of TCR clone 86641 (TRBV7-9, TRBJ1-2)
CASSLGFSSGEDGYTF

SEQ ID NO: 173283 - protein, 14 aa, Homo sapiens
  CDR3 for alpha chain variable domain of TCR clone 86642 (TRAV1-1, TRAJ28)
CAAPSGAGSDQLTF

SEQ ID NO: 173284 - protein, 15 aa, Homo sapiens
  CDR3 for beta chain variable domain of TCR clone 86642 (TRBV7-2, TRBJ1-2)
CASSLVSGGDYGYTF

SEQ ID NO: 173285 - protein, 13 aa, Homo sapiens
  CDR3 for alpha chain variable domain of TCR clone 86643 (TRAV3, TRAJ27)
CAVRPLGAGKSNF

SEQ ID NO: 173286 - protein, 13 aa, Homo sapiens
  CDR3 for beta chain variable domain of TCR clone 86643 (TRBV7-9, TRBJ2-3)
CASSPGSTDTQYL

SEQ ID NO: 173287 - protein, 17 aa, Homo sapiens
  CDR3 for alpha chain variable domain of TCR clone 86644 (TRAV26-2, TRAJ42)
CILRDVGYGGSQGNLIF

SEQ ID NO: 173288 - protein, 16 aa, Homo sapiens
  CDR3 for beta chain variable domain of TCR clone 86644 (TRBV12-4, TRBJ2-7)
CASSLIGGTGTYEHYF

SEQ ID NO: 173289 - protein, 13 aa, Homo sapiens
  CDR3 for alpha chain variable domain of TCR clone 86645 (TRAV12-1, TRAJ26)
CVVRRNYGQNFVS

SEQ ID NO: 173290 - protein, 14 aa, Homo sapiens
  CDR3 for beta chain variable domain of TCR clone 86645 (TRBV4-2, TRBJ2-1)
CASGLDRAYNEQFF

SEQ ID NO: 173291 - protein, 14 aa, Homo sapiens
  CDR3 for alpha chain variable domain of TCR clone 86646 (TRAV12-2, TRAJ13)
CAVKKTGGYQKVTF

SEQ ID NO: 173292 - protein, 14 aa, Homo sapiens
  CDR3 for beta chain variable domain of TCR clone 86646 (TRBV19, TRBJ2-1)
CASPTFVLSGEQFL

SEQ ID NO: 173293 - protein, 14 aa, Homo sapiens
  CDR3 for alpha chain variable domain of TCR clone 86647 (TRAV27, TRAJ58)
CAGDGETSGSRLTF

SEQ ID NO: 173294 - protein, 16 aa, Homo sapiens
  CDR3 for beta chain variable domain of TCR clone 86647 (TRBV2, TRBJ2-1)
CASSVGGSLSYNEQFF

SEQ ID NO: 173295 - protein, 10 aa, Homo sapiens
  CDR3 for alpha chain variable domain of TCR clone 86648 (TRAV26-2, TRAJ20)
CIQNDYKLSF

SEQ ID NO: 173296 - protein, 14 aa, Homo sapiens
  CDR3 for beta chain variable domain of TCR clone 86648 (TRBV28, TRBJ1-6)
CATVYSRVRSPFHF

SEQ ID NO: 173297 - protein, 12 aa, Homo sapiens
  CDR3 for alpha chain variable domain of TCR clone 86649 (TRAV12-1, TRAJ9)
CVVNPASFKTIF

SEQ ID NO: 173298 - protein, 15 aa, Homo sapiens
  CDR3 for beta chain variable domain of TCR clone 86649 (TRBV4-3, TRBJ2-2)
CSSSQGTGGTGELFF

SEQ ID NO: 173299 - protein, 15 aa, Homo sapiens
  CDR3 for alpha chain variable domain of TCR clone 86650 (TRAV21, TRAJ45)
RAVSYSGGGADGLTF

SEQ ID NO: 173300 - protein, 12 aa, Homo sapiens
  CDR3 for beta chain variable domain of TCR clone 86650 (TRBV11-2, TRBJ2-1)
CASSPGNNEQFF

SEQ ID NO: 173301 - protein, 14 aa, Homo sapiens
  CDR3 for alpha chain variable domain of TCR clone 86651 (TRAV13-1, TRAJ44)
CAAKATGTASKLTF

SEQ ID NO: 173302 - protein, 15 aa, Homo sapiens
  CDR3 for beta chain variable domain of TCR clone 86651 (TRBV24-1, TRBJ2-1)
CATSGSGGFYNEQFF

SEQ ID NO: 173303 - protein, 13 aa, Homo sapiens
  CDR3 for alpha chain variable domain of TCR clone 86652 (TRAV8-3, TRAJ28)
CAVGAVGSYQLTF

SEQ ID NO: 173304 - protein, 18 aa, Homo sapiens
  CDR3 for beta chain variable domain of TCR clone 86652 (TRBV6-6, TRBJ1-3)
CASSYSKWDSISGNTIYF

SEQ ID NO: 173305 - protein, 14 aa, Homo sapiens
  CDR3 for alpha chain variable domain of TCR clone 86653 (TRAV35, TRAJ50)
CAGHRKTSYDKVKF

SEQ ID NO: 173306 - protein, 13 aa, Homo sapiens
  CDR3 for beta chain variable domain of TCR clone 86653 (TRBV7-7, TRBJ2-3)
CASSLSRADTQDF

SEQ ID NO: 173307 - protein, 14 aa, Homo sapiens
  CDR3 for alpha chain variable domain of TCR clone 86654 (TRAV1-2, TRAJ8)
CAVREDTGFRKLVF

SEQ ID NO: 173308 - protein, 16 aa, Homo sapiens
  CDR3 for beta chain variable domain of TCR clone 86654 (TRBV4-1, TRBJ2-3)
CASSQSTSGAEDTQYF

SEQ ID NO: 173309 - protein, 14 aa, Homo sapiens
  CDR3 for alpha chain variable domain of TCR clone 86655 (TRAV8-1, TRAJ39)
CAVNDNHAGNMLTF

SEQ ID NO: 173310 - protein, 13 aa, Homo sapiens
  CDR3 for beta chain variable domain of TCR clone 86655 (TRBV19, TRBJ2-7)
CASRKAGGSEQYF

SEQ ID NO: 173311 - protein, 11 aa, Homo sapiens
  CDR3 for alpha chain variable domain of TCR clone 86656 (TRAV3, TRAJ21)
CASGNFNKFYF

SEQ ID NO: 173312 - protein, 16 aa, Homo sapiens
  CDR3 for beta chain variable domain of TCR clone 86656 (TRBV19, TRBJ2-1)
CASSKAGPSSYNEQFF

SEQ ID NO: 173313 - protein, 15 aa, Homo sapiens
  CDR3 for alpha chain variable domain of TCR clone 86657 (TRAV8-3, TRAJ40)
CAAPSLVSGTYKYIF

SEQ ID NO: 173314 - protein, 12 aa, Homo sapiens
  CDR3 for beta chain variable domain of TCR clone 86657 (TRBV11-2, TRBJ2-2)
CASSLGGGELFF

SEQ ID NO: 173315 - protein, 17 aa, Homo sapiens
  CDR3 for alpha chain variable domain of TCR clone 86658 (TRAV13-1, TRAJ52)
CAAGRNAGGTSYGTLTF

SEQ ID NO: 173316 - protein, 13 aa, Homo sapiens
  CDR3 for beta chain variable domain of TCR clone 86658 (TRBV7-2, TRBJ1-1)
CASNLKGAKVAFF

SEQ ID NO: 173317 - protein, 13 aa, Homo sapiens
  CDR3 for alpha chain variable domain of TCR clone 86659 (TRAV27, TRAJ6)
CAGGTRGSYIPTF

SEQ ID NO: 173318 - protein, 15 aa, Homo sapiens
  CDR3 for beta chain variable domain of TCR clone 86659 (TRBV19, TRBJ1-5)
CASSIPGGAGQPQHF

SEQ ID NO: 173319 - protein, 11 aa, Homo sapiens
  CDR3 for alpha chain variable domain of TCR clone 86660 (TRAV3, TRAJ21)
CAVGNFNKFYF

SEQ ID NO: 173320 - protein, 17 aa, Homo sapiens
  CDR3 for beta chain variable domain of TCR clone 86660 (TRBV24-1, TRBJ2-1)
CATSDASTSGTYNEQFF

SEQ ID NO: 173321 - protein, 15 aa, Homo sapiens
  CDR3 for alpha chain variable domain of TCR clone 86661 (TRAV12-2, TRAJ43)
CAFDMRFGAGTRLTV

SEQ ID NO: 173322 - protein, 18 aa, Homo sapiens
  CDR3 for beta chain variable domain of TCR clone 86661 (TRBV20-1, TRBJ2-3)
FSASGLAGGPGTTDTQYF

SEQ ID NO: 173323 - protein, 14 aa, Homo sapiens
  CDR3 for alpha chain variable domain of TCR clone 86662 (TRAV12-3, TRAJ54)
CAMRGIQGAQKLVC

SEQ ID NO: 173324 - protein, 13 aa, Homo sapiens
  CDR3 for beta chain variable domain of TCR clone 86662 (TRBV19, TRBJ1-1)
CASSPSNGGEAFF

SEQ ID NO: 173325 - protein, 14 aa, Homo sapiens
  CDR3 for alpha chain variable domain of TCR clone 86663 (TRAV26-1, TRAJ34)
CIVRAAYNTDKLIF

SEQ ID NO: 173326 - protein, 14 aa, Homo sapiens
  CDR3 for beta chain variable domain of TCR clone 86663 (TRBV20-1, TRBJ2-7)
CSAWTALSSYEQYF

SEQ ID NO: 173327 - protein, 13 aa, Homo sapiens
  CDR3 for alpha chain variable domain of TCR clone 86664 (TRAV8-6, TRAJ40)
CAVSVTGTHKYIF

SEQ ID NO: 173328 - protein, 15 aa, Homo sapiens
  CDR3 for beta chain variable domain of TCR clone 86664 (TRBV4-1, TRBJ2-3)
CASGRGQGIPDTQYF

SEQ ID NO: 173329 - protein, 14 aa, Homo sapiens
  CDR3 for alpha chain variable domain of TCR clone 86665 (TRAV12-2, TRAJ45)
CAVYSGGGADGLTF

SEQ ID NO: 173330 - protein, 13 aa, Homo sapiens
  CDR3 for beta chain variable domain of TCR clone 86665 (TRBV7-7, TRBJ2-3)
CASSLGRADTQYF

SEQ ID NO: 173331 - protein, 11 aa, Homo sapiens
  CDR3 for alpha chain variable domain of TCR clone 86666 (TRAV12-3, TRAJ27)
CAMANAGKSTF

SEQ ID NO: 173332 - protein, 13 aa, Homo sapiens
  CDR3 for beta chain variable domain of TCR clone 86666 (TRBV19, TRBJ1-5)
CASSIGGNQPQHF

SEQ ID NO: 173333 - protein, 20 aa, Homo sapiens
  CDR3 for alpha chain variable domain of TCR clone 86667 (TRAV4, TRAJ29)
CCVLLPRGCVPFSGNTPLVF

SEQ ID NO: 173334 - protein, 11 aa, Homo sapiens
  CDR3 for beta chain variable domain of TCR clone 86667 (TRBV11-2, TRBJ1-1)
CASSINTGALF

SEQ ID NO: 173335 - protein, 12 aa, Homo sapiens
  CDR3 for alpha chain variable domain of TCR clone 86668 (TRAV1-1, TRAJ39)
CSVPVVGNMLTF

SEQ ID NO: 173336 - protein, 15 aa, Homo sapiens
  CDR3 for beta chain variable domain of TCR clone 86668 (TRBV19, TRBJ1-6)
CASSTQGAVGSPLHF

SEQ ID NO: 173337 - protein, 12 aa, Homo sapiens
  CDR3 for alpha chain variable domain of TCR clone 86669 (TRAV1-1, TRAJ8)
CAGGTGFQKLVF

SEQ ID NO: 173338 - protein, 15 aa, Homo sapiens
  CDR3 for beta chain variable domain of TCR clone 86669 (TRBV27, TRBJ2-1)
CASSNGGGSSNEQFF

SEQ ID NO: 173339 - protein, 14 aa, Homo sapiens
  CDR3 for alpha chain variable domain of TCR clone 86670 (TRAV29/DV5, TRAJ48)
CTAMALFGNEKLTF

SEQ ID NO: 173340 - protein, 15 aa, Homo sapiens
  CDR3 for beta chain variable domain of TCR clone 86670 (TRBV7-2, TRBJ2-1)
CASTHGTGIYNEQFF

SEQ ID NO: 173341 - protein, 12 aa, Homo sapiens
  CDR3 for alpha chain variable domain of TCR clone 86671 (TRAV12-3, TRAJ17)
CAMTLTGNKLTF

SEQ ID NO: 173342 - protein, 17 aa, Homo sapiens
  CDR3 for beta chain variable domain of TCR clone 86671 (TRBV20-1, TRBJ2-7)
CSARDRVWGWTSSTSGR

SEQ ID NO: 173343 - protein, 14 aa, Homo sapiens
  CDR3 for alpha chain variable domain of TCR clone 86672 (TRAV36/DV7, TRAJ40)
CAVEGASGTYKYIF

SEQ ID NO: 173344 - protein, 15 aa, Homo sapiens
  CDR3 for beta chain variable domain of TCR clone 86672 (TRBV11-3, TRBJ2-2)
CASSYFSTGTGELFF

SEQ ID NO: 173345 - protein, 14 aa, Homo sapiens
  CDR3 for alpha chain variable domain of TCR clone 86673 (TRAV23/DV6, TRAJ4)
CAANLSGGYNKLMF

SEQ ID NO: 173346 - protein, 11 aa, Homo sapiens
  CDR3 for beta chain variable domain of TCR clone 86673 (TRBV7-9, TRBJ2-3)
CASSPTDTQYF

SEQ ID NO: 173347 - protein, 16 aa, Homo sapiens
  CDR3 for alpha chain variable domain of TCR clone 86674 (TRAV3, TRAJ37)
CAVRGKGSGNTAKLIF

SEQ ID NO: 173348 - protein, 13 aa, Homo sapiens
  CDR3 for beta chain variable domain of TCR clone 86674 (TRBV14, TRBJ2-7)
CASSQDRRYEQYF

SEQ ID NO: 173349 - protein, 14 aa, Homo sapiens
  CDR3 for alpha chain variable domain of TCR clone 86675 (TRAV26-1, TRAJ39)
CIVFTNNAGNMLTF

SEQ ID NO: 173350 - protein, 15 aa, Homo sapiens
  CDR3 for beta chain variable domain of TCR clone 86675 (TRBV19, TRBJ2-4)
CASSLAGLTKNIQYF

SEQ ID NO: 173351 - protein, 16 aa, Homo sapiens
  CDR3 for alpha chain variable domain of TCR clone 86676 (TRAV30, TRAJ24)
CGTEIVDADSWGKFQF

SEQ ID NO: 173352 - protein, 12 aa, Homo sapiens
  CDR3 for beta chain variable domain of TCR clone 86676 (TRBV4-2, TRBJ2-5)
CASGGAQETQYF

SEQ ID NO: 173353 - protein, 12 aa, Homo sapiens
  CDR3 for alpha chain variable domain of TCR clone 86677 (TRAV12-3, TRAJ41)
CAMSYSGYSLNF

SEQ ID NO: 173354 - protein, 13 aa, Homo sapiens
  CDR3 for beta chain variable domain of TCR clone 86677 (TRBV7-3, TRBJ2-1)
CASSLDSYNEQFF

SEQ ID NO: 173355 - protein, 11 aa, Homo sapiens
  CDR3 for alpha chain variable domain of TCR clone 86678 (TRAV12-3, TRAJ27)
CAMANAGKSTF

SEQ ID NO: 173356 - protein, 17 aa, Homo sapiens
  CDR3 for beta chain variable domain of TCR clone 86678 (TRBV13, TRBJ2-3)
CASSLSRVAGGRNTQHF

SEQ ID NO: 173357 - protein, 15 aa, Homo sapiens
  CDR3 for alpha chain variable domain of TCR clone 86679 (TRAV8-3, TRAJ23)
CAVGDRSNQGGKLIF

SEQ ID NO: 173358 - protein, 22 aa, Homo sapiens
  CDR3 for beta chain variable domain of TCR clone 86679 (TRBV29-1, TRBJ2-5)
TVSNMSPEDSSIYLCSAGTQYF

SEQ ID NO: 173359 - protein, 21 aa, Homo sapiens
  CDR3 for alpha chain variable domain of TCR clone 86680 (TRAV1-1, TRAJ6)
CLLLLRCERLGRTGGSYIPTF

SEQ ID NO: 173360 - protein, 13 aa, Homo sapiens
  CDR3 for beta chain variable domain of TCR clone 86680 (TRBV10-2, TRBJ2-7)
CASGASGGYEQYF

SEQ ID NO: 173361 - protein, 11 aa, Homo sapiens
  CDR3 for alpha chain variable domain of TCR clone 86681 (TRAV1-2, TRAJ20)
CAVANDYKPSF

SEQ ID NO: 173362 - protein, 15 aa, Homo sapiens
  CDR3 for beta chain variable domain of TCR clone 86681 (TRBV2, TRBJ2-1)
CASSELAGSYNEQFF

SEQ ID NO: 173363 - protein, 16 aa, Homo sapiens
  CDR3 for alpha chain variable domain of TCR clone 86682 (TRAV14/DV4, TRAJ53)
CAMREGGGGSNYKLTF

SEQ ID NO: 173364 - protein, 17 aa, Homo sapiens
  CDR3 for beta chain variable domain of TCR clone 86682 (TRBV13, TRBJ2-3)
CASSLSRVAGGRNTQYL

SEQ ID NO: 173365 - protein, 15 aa, Homo sapiens
  CDR3 for alpha chain variable domain of TCR clone 86683 (TRAV21, TRAJ32)
CAAAPYGGATNKLIF

SEQ ID NO: 173366 - protein, 17 aa, Homo sapiens
  CDR3 for beta chain variable domain of TCR clone 86683 (TRBV18, TRBJ2-3)
CASSPVGDGGFTDTQYF

SEQ ID NO: 173367 - protein, 11 aa, Homo sapiens
  CDR3 for alpha chain variable domain of TCR clone 86684 (TRAV4, TRAJ28)
CLVGDNRAETL

SEQ ID NO: 173368 - protein, 13 aa, Homo sapiens
  CDR3 for beta chain variable domain of TCR clone 86684 (TRBV20-1, TRBJ2-7)
CSATPTSGYEQYF

SEQ ID NO: 173369 - protein, 14 aa, Homo sapiens
  CDR3 for alpha chain variable domain of TCR clone 86685 (TRAV26-1, TRAJ38)
CIADNAGNNRKLIW

SEQ ID NO: 173370 - protein, 17 aa, Homo sapiens
  CDR3 for beta chain variable domain of TCR clone 86685 (TRBV7-6, TRBJ1-4)
CASSLGAGAGEKLFLAV

SEQ ID NO: 173371 - protein, 14 aa, Homo sapiens
  CDR3 for alpha chain variable domain of TCR clone 86686 (TRAV26-1, TRAJ38)
CIADNAGNNGKLIW

SEQ ID NO: 173372 - protein, 17 aa, Homo sapiens
  CDR3 for beta chain variable domain of TCR clone 86686 (TRBV7-9, TRBJ2-3)
CASSPTVAGDLTDTQYF

SEQ ID NO: 173373 - protein, 14 aa, Homo sapiens
  CDR3 for alpha chain variable domain of TCR clone 86687 (TRAV1-2, TRAJ16)
CAVNRFSDGQKLLF

SEQ ID NO: 173374 - protein, 19 aa, Homo sapiens
  CDR3 for beta chain variable domain of TCR clone 86687 (TRBV7-2, TRBJ2-3)
CASSFLSRNWGGGIDTQYF

SEQ ID NO: 173375 - protein, 16 aa, Homo sapiens
  CDR3 for alpha chain variable domain of TCR clone 86688 (TRAV12-2, TRAJ45)
CAVKRNPGGGADGLTF

SEQ ID NO: 173376 - protein, 12 aa, Homo sapiens
  CDR3 for beta chain variable domain of TCR clone 86688 (TRBV11-2, TRBJ2-2)
CASSLPTGELFF

SEQ ID NO: 173377 - protein, 15 aa, Homo sapiens
  CDR3 for alpha chain variable domain of TCR clone 86689 (TRAV21, TRAJ45)
CAVSYSGGGADGRTF

SEQ ID NO: 173378 - protein, 13 aa, Homo sapiens
  CDR3 for beta chain variable domain of TCR clone 86689 (TRBV20-1, TRBJ2-5)
CSAATELQETQYF

SEQ ID NO: 173379 - protein, 16 aa, Homo sapiens
  CDR3 for alpha chain variable domain of TCR clone 86690 (TRAV30, TRAJ24)
CGTEIVDADSWGTFQF

SEQ ID NO: 173380 - protein, 12 aa, Homo sapiens
  CDR3 for beta chain variable domain of TCR clone 86690 (TRBV11-2, TRBJ2-1)
CASSPGNNEQFF

SEQ ID NO: 173381 - protein, 15 aa, Homo sapiens
  CDR3 for alpha chain variable domain of TCR clone 86691 (TRAV12-2, TRAJ57)
CAVSRGQGGSEKLVF

SEQ ID NO: 173382 - protein, 13 aa, Homo sapiens
  CDR3 for beta chain variable domain of TCR clone 86691 (TRBV3-1, TRBJ2-7)
CASSLRDGYEQYF

SEQ ID NO: 173383 - protein, 11 aa, Homo sapiens
  CDR3 for alpha chain variable domain of TCR clone 86692 (TRAV12-2, TRAJ29)
CAVTLRSPLVF

SEQ ID NO: 173384 - protein, 14 aa, Homo sapiens
  CDR3 for beta chain variable domain of TCR clone 86692 (TRBV7-8, TRBJ2-3)
CASSLEAGTDTQYF

SEQ ID NO: 173385 - protein, 13 aa, Homo sapiens
  CDR3 for alpha chain variable domain of TCR clone 86693 (TRAV12-1, TRAJ26)
CVVRRNYGQNFVF

SEQ ID NO: 173386 - protein, 16 aa, Homo sapiens
  CDR3 for beta chain variable domain of TCR clone 86693 (TRBV7-3, TRBJ2-2)
CASSLKRGTLSGELFF

SEQ ID NO: 173387 - protein, 14 aa, Homo sapiens
  CDR3 for alpha chain variable domain of TCR clone 86694 (TRAV1-2, TRAJ8)
CAVREGTGFQKLVF

SEQ ID NO: 173388 - protein, 12 aa, Homo sapiens
  CDR3 for beta chain variable domain of TCR clone 86694 (TRBV2, TRBJ1-5)
CASARAGQPQHF

SEQ ID NO: 173389 - protein, 10 aa, Homo sapiens
  CDR3 for alpha chain variable domain of TCR clone 86695 (TRAV30, TRAJ48)
CGIGNEKLTF

SEQ ID NO: 173390 - protein, 12 aa, Homo sapiens
  CDR3 for beta chain variable domain of TCR clone 86695 (TRBV6-1, TRBJ2-7)
CASRTGRYEQYF

SEQ ID NO: 173391 - protein, 19 aa, Homo sapiens
  CDR3 for alpha chain variable domain of TCR clone 86696 (TRAV26-1, TRAJ52)
CIVRAHRNAGGTSYGKLTF

SEQ ID NO: 173392 - protein, 11 aa, Homo sapiens
  CDR3 for beta chain variable domain of TCR clone 86696 (TRBV29-1, TRBJ2-5)
CSEDRTGTQYF

SEQ ID NO: 173393 - protein, 14 aa, Homo sapiens
  CDR3 for alpha chain variable domain of TCR clone 86697 (TRAV20, TRAJ20)
CAVRRGYNDYKLSF

SEQ ID NO: 173394 - protein, 13 aa, Homo sapiens
  CDR3 for beta chain variable domain of TCR clone 86697 (TRBV6-1, TRBJ1-1)
CASSRQGNTEAFF

SEQ ID NO: 173395 - protein, 15 aa, Homo sapiens
  CDR3 for alpha chain variable domain of TCR clone 86698 (TRAV20, TRAJ41)
CAVQANSNSGYALNF

SEQ ID NO: 173396 - protein, 18 aa, Homo sapiens
  CDR3 for beta chain variable domain of TCR clone 86698 (TRBV7-9, TRBJ2-7)
CASSITTSGSRTWYEQYF

SEQ ID NO: 173397 - protein, 14 aa, Homo sapiens
  CDR3 for alpha chain variable domain of TCR clone 86699 (TRAV1-1, TRAJ23)
CAVSIYNQGGKLIF

SEQ ID NO: 173398 - protein, 16 aa, Homo sapiens
  CDR3 for beta chain variable domain of TCR clone 86699 (TRBV7-3, TRBJ2-1)
CASSLVSGSSNNEQFF

SEQ ID NO: 173399 - protein, 12 aa, Homo sapiens
  CDR3 for alpha chain variable domain of TCR clone 86700 (TRAV12-3, TRAJ17)
RAMTLTGNKLTF

SEQ ID NO: 173400 - protein, 15 aa, Homo sapiens
  CDR3 for beta chain variable domain of TCR clone 86700 (TRBV11-3, TRBJ2-3)
CASLKDGREGDTQYF

SEQ ID NO: 173401 - protein, 11 aa, Homo sapiens
  CDR3 for alpha chain variable domain of TCR clone 86701 (TRAV21, TRAJ11)
CAVNGYSTLTF

SEQ ID NO: 173402 - protein, 15 aa, Homo sapiens
  CDR3 for beta chain variable domain of TCR clone 86701 (TRBV11-2, TRBJ2-1)
CASSKNRGLIYEQFF

SEQ ID NO: 173403 - protein, 14 aa, Homo sapiens
  CDR3 for alpha chain variable domain of TCR clone 86702 (TRAV12-2, TRAJ40)
CAVKIPSGTYKYIF

SEQ ID NO: 173404 - protein, 14 aa, Homo sapiens
  CDR3 for beta chain variable domain of TCR clone 86702 (TRBV25-1, TRBJ1-1)
CASTHLGGNTEAFS

SEQ ID NO: 173405 - protein, 16 aa, Homo sapiens
  CDR3 for alpha chain variable domain of TCR clone 86703 (TRAV12-1, TRAJ22)
CVVNTISSGSARQLTF

SEQ ID NO: 173406 - protein, 13 aa, Homo sapiens
  CDR3 for beta chain variable domain of TCR clone 86703 (TRBV19, TRBJ2-1)
CASTGGVFSEQFF

SEQ ID NO: 173407 - protein, 14 aa, Homo sapiens
  CDR3 for alpha chain variable domain of TCR clone 86704 (TRAV12-1, TRAJ17)
CVVNYKAAGNKLTF

SEQ ID NO: 173408 - protein, 15 aa, Homo sapiens
  CDR3 for beta chain variable domain of TCR clone 86704 (TRBV7-2, TRBJ2-1)
CASTRGTGIYNEQFF

SEQ ID NO: 173409 - protein, 16 aa, Homo sapiens
  CDR3 for alpha chain variable domain of TCR clone 86705 (TRAV3, TRAJ37)
CAVRGKGSGNTGKLIF

SEQ ID NO: 173410 - protein, 14 aa, Homo sapiens
  CDR3 for beta chain variable domain of TCR clone 86705 (TRBV7-2, TRBJ2-7)
CASGPKTSFYEQYF

SEQ ID NO: 173411 - protein, 14 aa, Homo sapiens
  CDR3 for alpha chain variable domain of TCR clone 86706 (TRAV4, TRAJ41)
CLVGDGDSGYALNF

SEQ ID NO: 173412 - protein, 15 aa, Homo sapiens
  CDR3 for beta chain variable domain of TCR clone 86706 (TRBV27, TRBJ2-7)
CASSLVGGGANEQYF

SEQ ID NO: 173413 - protein, 13 aa, Homo sapiens
  CDR3 for alpha chain variable domain of TCR clone 86707 (TRAV23/DV6, TRAJ45)
CAARRVGADGLTF

SEQ ID NO: 173414 - protein, 14 aa, Homo sapiens
  CDR3 for beta chain variable domain of TCR clone 86707 (TRBV7-2, TRBJ2-3)
CASSLARGTDTQYF

SEQ ID NO: 173415 - protein, 12 aa, Homo sapiens
  CDR3 for alpha chain variable domain of TCR clone 86708 (TRAV1-1, TRAJ33)
CAASDSNYQLIW

SEQ ID NO: 173416 - protein, 16 aa, Homo sapiens
  CDR3 for beta chain variable domain of TCR clone 86708 (TRBV3-1, TRBJ2-5)
CASSQDWASGQETQYF

SEQ ID NO: 173417 - protein, 14 aa, Homo sapiens
  CDR3 for alpha chain variable domain of TCR clone 86709 (TRAV9-2, TRAJ39)
CALYIYNAGNMLTF

SEQ ID NO: 173418 - protein, 15 aa, Homo sapiens
  CDR3 for beta chain variable domain of TCR clone 86709 (TRBV15, TRBJ2-7)
CATSSGTTTTYEQYF

SEQ ID NO: 173419 - protein, 14 aa, Homo sapiens
  CDR3 for alpha chain variable domain of TCR clone 86710 (TRAV1-2, TRAJ8)
CAVREDTGFQKLVF

SEQ ID NO: 173420 - protein, 14 aa, Homo sapiens
  CDR3 for beta chain variable domain of TCR clone 86710 (TRBV15, TRBJ2-5)
CATSIGGLGETQYF

SEQ ID NO: 173421 - protein, 13 aa, Homo sapiens
  CDR3 for alpha chain variable domain of TCR clone 86711 (TRAV8-3, TRAJ6)
CAVEKGGSYIPTF

SEQ ID NO: 173422 - protein, 14 aa, Homo sapiens
  CDR3 for beta chain variable domain of TCR clone 86711 (TRBV25-1, TRBJ1-1)
CASTHLGGNTEAFF

SEQ ID NO: 173423 - protein, 14 aa, Homo sapiens
  CDR3 for alpha chain variable domain of TCR clone 86712 (TRAV12-3, TRAJ10)
SHLPLTGGGNKLTF

SEQ ID NO: 173424 - protein, 16 aa, Homo sapiens
  CDR3 for beta chain variable domain of TCR clone 86712 (TRBV4-1, TRBJ1-2)
CASSQDAGQVLYGYTF

SEQ ID NO: 173425 - protein, 15 aa, Homo sapiens
  CDR3 for alpha chain variable domain of TCR clone 86713 (TRAV38-1, TRAJ37)
CAFIFGSGNTGKLIF

SEQ ID NO: 173426 - protein, 16 aa, Homo sapiens
  CDR3 for beta chain variable domain of TCR clone 86713 (TRBV12-4, TRBJ1-5)
CASRQPVEGSNQPQHF

SEQ ID NO: 173427 - protein, 14 aa, Homo sapiens
  CDR3 for alpha chain variable domain of TCR clone 86714 (TRAV29/DV5, TRAJ36)
CAARRKTGANNLFF

SEQ ID NO: 173428 - protein, 14 aa, Homo sapiens
  CDR3 for beta chain variable domain of TCR clone 86714 (TRBV12-5, TRBJ2-5)
CASGSRTHEETQYF

SEQ ID NO: 173429 - protein, 14 aa, Homo sapiens
  CDR3 for alpha chain variable domain of TCR clone 86715 (TRAV14/DV4, TRAJ11)
CAMSSNSGYGTLTF

SEQ ID NO: 173430 - protein, 11 aa, Homo sapiens
  CDR3 for beta chain variable domain of TCR clone 86715 (TRBV7-9, TRBJ2-3)
CASSGPDTQYF

SEQ ID NO: 173431 - protein, 14 aa, Homo sapiens
  CDR3 for alpha chain variable domain of TCR clone 86716 (TRAV8-4, TRAJ17)
CAVSDQAAGNNLTF

SEQ ID NO: 173432 - protein, 15 aa, Homo sapiens
  CDR3 for beta chain variable domain of TCR clone 86716 (TRBV7-2, TRBJ1-2)
CASSLAPDRGLGYTF

SEQ ID NO: 173433 - protein, 14 aa, Homo sapiens
  CDR3 for alpha chain variable domain of TCR clone 86717 (TRAV1-2, TRAJ16)
CAVNRFSDVQKLLF

SEQ ID NO: 173434 - protein, 15 aa, Homo sapiens
  CDR3 for beta chain variable domain of TCR clone 86717 (TRBV7-9, TRBJ2-2)
CASGPLDTFPGELFF

SEQ ID NO: 173435 - protein, 14 aa, Homo sapiens
  CDR3 for alpha chain variable domain of TCR clone 86718 (TRAV1-2, TRAJ16)
CAVNRFSGGQKLLF

SEQ ID NO: 173436 - protein, 15 aa, Homo sapiens
  CDR3 for beta chain variable domain of TCR clone 86718 (TRBV20-1, TRBJ2-7)
CSARDRVSGMDEQYF

SEQ ID NO: 173437 - protein, 13 aa, Homo sapiens
  CDR3 for alpha chain variable domain of TCR clone 86719 (TRAV21, TRAJ11)
CAVPNSGYSTLTF

SEQ ID NO: 173438 - protein, 18 aa, Homo sapiens
  CDR3 for beta chain variable domain of TCR clone 86719 (TRBV7-9, TRBJ1-1)
CASSKPWDTMGMNTEAFF

SEQ ID NO: 173439 - protein, 15 aa, Homo sapiens
  CDR3 for alpha chain variable domain of TCR clone 86720 (TRAV26-1, TRAJ3)
CIVRSGYSSSSKIIF

SEQ ID NO: 173440 - protein, 14 aa, Homo sapiens
  CDR3 for beta chain variable domain of TCR clone 86720 (TRBV13, TRBJ2-5)
CASYRRLAEETQYF

SEQ ID NO: 173441 - protein, 14 aa, Homo sapiens
  CDR3 for alpha chain variable domain of TCR clone 86721 (TRAV13-1, TRAJ44)
CAAKATGTASTLTF

SEQ ID NO: 173442 - protein, 15 aa, Homo sapiens
  CDR3 for beta chain variable domain of TCR clone 86721 (TRBV10-3, TRBJ2-1)
CAISDVQDRAYEQFF

SEQ ID NO: 173443 - protein, 13 aa, Homo sapiens
  CDR3 for alpha chain variable domain of TCR clone 86722 (TRAV24, TRAJ23)
CASFLVQGGKLIF

SEQ ID NO: 173444 - protein, 14 aa, Homo sapiens
  CDR3 for beta chain variable domain of TCR clone 86722 (TRBV12-4, TRBJ2-3)
CACTIAGWGDTQYF

SEQ ID NO: 173445 - protein, 14 aa, Homo sapiens
  CDR3 for alpha chain variable domain of TCR clone 86723 (TRAV12-2, TRAJ13)
CAVNPSGGYQKVTF

SEQ ID NO: 173446 - protein, 12 aa, Homo sapiens
  CDR3 for beta chain variable domain of TCR clone 86723 (TRBV29-1, TRBJ2-3)
CSVTGGADTQYF

SEQ ID NO: 173447 - protein, 13 aa, Homo sapiens
  CDR3 for alpha chain variable domain of TCR clone 86724 (TRAV13-2, TRAJ53)
CAENMGINYKLTF

SEQ ID NO: 173448 - protein, 13 aa, Homo sapiens
  CDR3 for beta chain variable domain of TCR clone 86724 (TRBV4-1, TRBJ2-2)
CASSQENTGELFF

SEQ ID NO: 173449 - protein, 16 aa, Homo sapiens
  CDR3 for alpha chain variable domain of TCR clone 86725 (TRAV8-1, TRAJ39)
CAVNVPSYNAGNMLTF

SEQ ID NO: 173450 - protein, 18 aa, Homo sapiens
  CDR3 for beta chain variable domain of TCR clone 86725 (TRBV5-8, TRBJ2-7)
CASSPHYRVWATSSTSGR

SEQ ID NO: 173451 - protein, 10 aa, Homo sapiens
  CDR3 for alpha chain variable domain of TCR clone 86726 (TRAV12-3, TRAJ18)
CAMSAEAQPW

SEQ ID NO: 173452 - protein, 13 aa, Homo sapiens
  CDR3 for beta chain variable domain of TCR clone 86726 (TRBV15, TRBJ1-6)
CATSGGLNSPHHF

SEQ ID NO: 173453 - protein, 15 aa, Homo sapiens
  CDR3 for alpha chain variable domain of TCR clone 86727 (TRAV2, TRAJ15)
CAVEDRGQAGTALIF

SEQ ID NO: 173454 - protein, 16 aa, Homo sapiens
  CDR3 for beta chain variable domain of TCR clone 86727 (TRBV19, TRBJ2-1)
CASSKAGPSSYNEQFF

SEQ ID NO: 173455 - protein, 18 aa, Homo sapiens
  CDR3 for alpha chain variable domain of TCR clone 86728 (TRAV26-2, TRAJ54)
CILRDAEVGIQGAQKLVF

SEQ ID NO: 173456 - protein, 17 aa, Homo sapiens
  CDR3 for beta chain variable domain of TCR clone 86728 (TRBV20-1, TRBJ1-5)
CSASLSPGQGGNQPQHF

SEQ ID NO: 173457 - protein, 15 aa, Homo sapiens
  CDR3 for alpha chain variable domain of TCR clone 86729 (TRAV8-3, TRAJ45)
CASSYSGGGADGLTF

SEQ ID NO: 173458 - protein, 16 aa, Homo sapiens
  CDR3 for beta chain variable domain of TCR clone 86729 (TRBV13, TRBJ2-7)
CASSSRESGRTYEQYF

SEQ ID NO: 173459 - protein, 13 aa, Homo sapiens
  CDR3 for alpha chain variable domain of TCR clone 86730 (TRAV2, TRAJ40)
CAVVTSGTYKYIL

SEQ ID NO: 173460 - protein, 16 aa, Homo sapiens
  CDR3 for beta chain variable domain of TCR clone 86730 (TRBV12-5, TRBJ2-5)
CASGPRTSGNQETQYF

SEQ ID NO: 173461 - protein, 12 aa, Homo sapiens
  CDR3 for alpha chain variable domain of TCR clone 86731 (TRAV29/DV5, TRAJ15)
CASNQAGTALIF

SEQ ID NO: 173462 - protein, 15 aa, Homo sapiens
  CDR3 for beta chain variable domain of TCR clone 86731 (TRBV11-2, TRBJ2-2)
CDSSSDRVNAGELFF

SEQ ID NO: 173463 - protein, 14 aa, Homo sapiens
  CDR3 for alpha chain variable domain of TCR clone 86732 (TRAV1-2, TRAJ16)
CAVNRFSDGQKLLF

SEQ ID NO: 173464 - protein, 11 aa, Homo sapiens
  CDR3 for beta chain variable domain of TCR clone 86732 (TRBV5-5, TRBJ1-1)
CASSLGVEAFF

SEQ ID NO: 173465 - protein, 13 aa, Homo sapiens
  CDR3 for alpha chain variable domain of TCR clone 86733 (TRAV41, TRAJ40)
CAVIPSGTYKYIF

SEQ ID NO: 173466 - protein, 16 aa, Homo sapiens
  CDR3 for beta chain variable domain of TCR clone 86733 (TRBV7-3, TRBJ2-1)
CASSLSSGGGAKEQFF

SEQ ID NO: 173467 - protein, 20 aa, Homo sapiens
  CDR3 for alpha chain variable domain of TCR clone 86734 (TRAV26-1, TRAJ42)
CCVLLHRQTDYGGSQGNLIF

SEQ ID NO: 173468 - protein, 16 aa, Homo sapiens
  CDR3 for beta chain variable domain of TCR clone 86734 (TRBV7-3, TRBJ2-2)
CASSLKRGTLSGELFF

SEQ ID NO: 173469 - protein, 13 aa, Homo sapiens
  CDR3 for alpha chain variable domain of TCR clone 86735 (TRAV29/DV5, TRAJ31)
CAASRNNNARLMF

SEQ ID NO: 173470 - protein, 12 aa, Homo sapiens
  CDR3 for beta chain variable domain of TCR clone 86735 (TRBV11-2, TRBJ2-1)
CASSPGNNEQFF

SEQ ID NO: 173471 - protein, 19 aa, Homo sapiens
  CDR3 for alpha chain variable domain of TCR clone 86736 (TRAV2, TRAJ20)
ILQVREADAAVYRDCKLSF

SEQ ID NO: 173472 - protein, 13 aa, Homo sapiens
  CDR3 for beta chain variable domain of TCR clone 86736 (TRBV24-1, TRBJ2-2)
CATSDWSTGELFF

SEQ ID NO: 173473 - protein, 15 aa, Homo sapiens
  CDR3 for alpha chain variable domain of TCR clone 86737 (TRAV21, TRAJ53)
CATLNSGGSHYKLTF

SEQ ID NO: 173474 - protein, 15 aa, Homo sapiens
  CDR3 for beta chain variable domain of TCR clone 86737 (TRBV18, TRBJ2-1)
CASSPPSASYNEQFF

SEQ ID NO: 173475 - protein, 16 aa, Homo sapiens
  CDR3 for alpha chain variable domain of TCR clone 86738 (TRAV17, TRAJ52)
CATGIIGGTSYGKLKF

SEQ ID NO: 173476 - protein, 12 aa, Homo sapiens
  CDR3 for beta chain variable domain of TCR clone 86738 (TRBV7-3, TRBJ2-1)
CASSFINNEQFF

SEQ ID NO: 173477 - protein, 13 aa, Homo sapiens
  CDR3 for alpha chain variable domain of TCR clone 86739 (TRAV21, TRAJ20)
CAVGLRVDYRLSF

SEQ ID NO: 173478 - protein, 15 aa, Homo sapiens
  CDR3 for beta chain variable domain of TCR clone 86739 (TRBV9, TRBJ1-6)
CASSVAGTGDSPLHF

SEQ ID NO: 173479 - protein, 23 aa, Homo sapiens
  CDR3 for alpha chain variable domain of TCR clone 86740 (TRAV8-3, TRAJ38)
CAVGASNAGNNHIQKPDPAVYQL

SEQ ID NO: 173480 - protein, 15 aa, Homo sapiens
  CDR3 for beta chain variable domain of TCR clone 86740 (TRBV11-3, TRBJ1-3)
CASSLFGPSGNTIYF

SEQ ID NO: 173481 - protein, 13 aa, Homo sapiens
  CDR3 for alpha chain variable domain of TCR clone 86741 (TRAV8-3, TRAJ28)
CAVGAVGSYQLTF

SEQ ID NO: 173482 - protein, 16 aa, Homo sapiens
  CDR3 for beta chain variable domain of TCR clone 86741 (TRBV7-7, TRBJ2-1)
CASSLASGTSYNEQFF

SEQ ID NO: 173483 - protein, 14 aa, Homo sapiens
  CDR3 for alpha chain variable domain of TCR clone 86742 (TRAV29/DV5, TRAJ32)
CAAAYGGATNKLIF

SEQ ID NO: 173484 - protein, 16 aa, Homo sapiens
  CDR3 for beta chain variable domain of TCR clone 86742 (TRBV6-1, TRBJ2-5)
CASSETLDRGAETQYF

SEQ ID NO: 173485 - protein, 12 aa, Homo sapiens
  CDR3 for alpha chain variable domain of TCR clone 86743 (TRAV16, TRAJ10)
CSRTGGGNKLTF

SEQ ID NO: 173486 - protein, 13 aa, Homo sapiens
  CDR3 for beta chain variable domain of TCR clone 86743 (TRBV11-2, TRBJ2-5)
CASSFSSQETQYF

SEQ ID NO: 173487 - protein, 18 aa, Homo sapiens
  CDR3 for alpha chain variable domain of TCR clone 86744 (TRAV21, TRAJ52)
CAVRPSPAGGTSYGKLTF

SEQ ID NO: 173488 - protein, 17 aa, Homo sapiens
  CDR3 for beta chain variable domain of TCR clone 86744 (TRBV13, TRBJ2-3)
CASSLSRVAGGRNTQYF

SEQ ID NO: 173489 - protein, 14 aa, Homo sapiens
  CDR3 for alpha chain variable domain of TCR clone 86745 (TRAV26-1, TRAJ22)
CIVRVYGSARQLTL

SEQ ID NO: 173490 - protein, 17 aa, Homo sapiens
  CDR3 for beta chain variable domain of TCR clone 86745 (TRBV7-3, TRBJ2-3)
CASSPGGLAGFGDTQYF

SEQ ID NO: 173491 - protein, 13 aa, Homo sapiens
  CDR3 for alpha chain variable domain of TCR clone 86746 (TRAV12-3, TRAJ52)
CAMSVGGAGGTSY

SEQ ID NO: 173492 - protein, 15 aa, Homo sapiens
  CDR3 for beta chain variable domain of TCR clone 86746 (TRBV27, TRBJ1-6)
CASSFDRGLGSPLHF

SEQ ID NO: 173493 - protein, 16 aa, Homo sapiens
  CDR3 for alpha chain variable domain of TCR clone 86747 (TRAV30, TRAJ24)
CGTEIVDADSWGKFQF

SEQ ID NO: 173494 - protein, 15 aa, Homo sapiens
  CDR3 for beta chain variable domain of TCR clone 86747 (TRBV10-3, TRBJ2-3)
CAISVLGQETDTQYF

SEQ ID NO: 173495 - protein, 15 aa, Homo sapiens
  CDR3 for alpha chain variable domain of TCR clone 86748 (TRAV1-2, TRAJ24)
CAVRDDTDSWGKFQF

SEQ ID NO: 173496 - protein, 20 aa, Homo sapiens
  CDR3 for beta chain variable domain of TCR clone 86748 (TRBV7-8, TRBJ2-2)
CASSHLFPGPTIHITGELFF

SEQ ID NO: 173497 - protein, 12 aa, Homo sapiens
  CDR3 for alpha chain variable domain of TCR clone 86749 (TRAV21, TRAJ11)
CAATSGYSTRTF

SEQ ID NO: 173498 - protein, 14 aa, Homo sapiens
  CDR3 for beta chain variable domain of TCR clone 86749 (TRBV20-1, TRBJ2-7)
CSAPELAGVGEQYF

SEQ ID NO: 173499 - protein, 13 aa, Homo sapiens
  CDR3 for alpha chain variable domain of TCR clone 86750 (TRAV26-1, TRAJ30)
CIVRVESNEKIIF

SEQ ID NO: 173500 - protein, 15 aa, Homo sapiens
  CDR3 for beta chain variable domain of TCR clone 86750 (TRBV6-1, TRBJ2-3)
CASSERGGITDTQYF

SEQ ID NO: 173501 - protein, 13 aa, Homo sapiens
  CDR3 for alpha chain variable domain of TCR clone 86751 (TRAV17, TRAJ9)
CATDYTGGFKTIF

SEQ ID NO: 173502 - protein, 14 aa, Homo sapiens
  CDR3 for beta chain variable domain of TCR clone 86751 (TRBV3-1, TRBJ2-5)
CASSQGPDQETQYF

SEQ ID NO: 173503 - protein, 15 aa, Homo sapiens
  CDR3 for alpha chain variable domain of TCR clone 86752 (TRAV8-3, TRAJ45)
CTSSYSGGGADGLTF

SEQ ID NO: 173504 - protein, 13 aa, Homo sapiens
  CDR3 for beta chain variable domain of TCR clone 86752 (TRBV4-2, TRBJ1-1)
CASSQAGNTEAFF

SEQ ID NO: 173505 - protein, 15 aa, Homo sapiens
  CDR3 for alpha chain variable domain of TCR clone 86753 (TRAV12-2, TRAJ53)
CAVNGGGGSNYQLTF

SEQ ID NO: 173506 - protein, 17 aa, Homo sapiens
  CDR3 for beta chain variable domain of TCR clone 86753 (TRBV7-3, TRBJ2-3)
CASSLMKRMRGADTQYF

SEQ ID NO: 173507 - protein, 12 aa, Homo sapiens
  CDR3 for alpha chain variable domain of TCR clone 86754 (TRAV12-3, TRAJ17)
CAMTLTGNKLAF

SEQ ID NO: 173508 - protein, 15 aa, Homo sapiens
  CDR3 for beta chain variable domain of TCR clone 86754 (TRBV20-1, TRBJ2-7)
CSARDRVSWMDEQYF

SEQ ID NO: 173509 - protein, 10 aa, Homo sapiens
  CDR3 for alpha chain variable domain of TCR clone 86755 (TRAV1-2, TRAJ20)
CALNDYKLSF

SEQ ID NO: 173510 - protein, 16 aa, Homo sapiens
  CDR3 for beta chain variable domain of TCR clone 86755 (TRBV20-1, TRBJ1-1)
FSARALTQGMNTEAFF

SEQ ID NO: 173511 - protein, 11 aa, Homo sapiens
  CDR3 for alpha chain variable domain of TCR clone 86756 (TRAV12-2, TRAJ49)
CALPGGNQFYF

SEQ ID NO: 173512 - protein, 14 aa, Homo sapiens
  CDR3 for beta chain variable domain of TCR clone 86756 (TRBV7-2, TRBJ2-7)
CASSPKTSFYEQYF

SEQ ID NO: 173513 - protein, 14 aa, Homo sapiens
  CDR3 for alpha chain variable domain of TCR clone 86757 (TRAV17, TRAJ54)
CATDANQGAQKLVF

SEQ ID NO: 173514 - protein, 13 aa, Homo sapiens
  CDR3 for beta chain variable domain of TCR clone 86757 (TRBV19, TRBJ1-2)
CASSVPGQDGYTF

SEQ ID NO: 173515 - protein, 13 aa, Homo sapiens
  CDR3 for alpha chain variable domain of TCR clone 86758 (TRAV21, TRAJ57)
CAVTQGGSEKLVF

SEQ ID NO: 173516 - protein, 12 aa, Homo sapiens
  CDR3 for beta chain variable domain of TCR clone 86758 (TRBV2, TRBJ2-1)
CASSERFREQFF

SEQ ID NO: 173517 - protein, 12 aa, Homo sapiens
  CDR3 for alpha chain variable domain of TCR clone 86759 (TRAV12-3, TRAJ17)
CAMTLTGNKLTF

SEQ ID NO: 173518 - protein, 15 aa, Homo sapiens
  CDR3 for beta chain variable domain of TCR clone 86759 (TRBV5-5, TRBJ2-2)
CASSRQASGAGELFF

SEQ ID NO: 173519 - protein, 15 aa, Homo sapiens
  CDR3 for alpha chain variable domain of TCR clone 86760 (TRAV12-2, TRAJ9)
CAGNNERTGGFKTIF

SEQ ID NO: 173520 - protein, 14 aa, Homo sapiens
  CDR3 for beta chain variable domain of TCR clone 86760 (TRBV4-1, TRBJ1-4)
CASSQERKNEKLFF

SEQ ID NO: 173521 - protein, 15 aa, Homo sapiens
  CDR3 for alpha chain variable domain of TCR clone 86761 (TRAV3, TRAJ4)
CAQNMFSGGYNNLIF

SEQ ID NO: 173522 - protein, 16 aa, Homo sapiens
  CDR3 for beta chain variable domain of TCR clone 86761 (TRBV3-1, TRBJ1-6)
CASSQEFQGSYSPLHF

SEQ ID NO: 173523 - protein, 15 aa, Homo sapiens
  CDR3 for alpha chain variable domain of TCR clone 86762 (TRAV30, TRAJ34)
CGTVGYNTTSSSLGL

SEQ ID NO: 173524 - protein, 16 aa, Homo sapiens
  CDR3 for beta chain variable domain of TCR clone 86762 (TRBV7-9, TRBJ1-2)
CASSLGFSSGEDGYTF

SEQ ID NO: 173525 - protein, 15 aa, Homo sapiens
  CDR3 for alpha chain variable domain of TCR clone 86763 (TRAV12-3, TRAJ27)
CAMRAYNTNAGQSTF

SEQ ID NO: 173526 - protein, 13 aa, Homo sapiens
  CDR3 for beta chain variable domain of TCR clone 86763 (TRBV11-2, TRBJ2-5)
CASSRGPSETQYF

SEQ ID NO: 173527 - protein, 15 aa, Homo sapiens
  CDR3 for alpha chain variable domain of TCR clone 86764 (TRAV21, TRAJ32)
CAAAPYGGATNKLIF

SEQ ID NO: 173528 - protein, 14 aa, Homo sapiens
  CDR3 for beta chain variable domain of TCR clone 86764 (TRBV12-4, TRBJ2-1)
CASSLGQGASEQLF

SEQ ID NO: 173529 - protein, 13 aa, Homo sapiens
  CDR3 for alpha chain variable domain of TCR clone 86765 (TRAV2, TRAJ24)
CAATTDSWGKLQF

SEQ ID NO: 173530 - protein, 14 aa, Homo sapiens
  CDR3 for beta chain variable domain of TCR clone 86765 (TRBV13, TRBJ2-5)
CASSLGRGQETQYF

SEQ ID NO: 173531 - protein, 14 aa, Homo sapiens
  CDR3 for alpha chain variable domain of TCR clone 86766 (TRAV8-1, TRAJ34)
CAVNPSYNTDTLIF

SEQ ID NO: 173532 - protein, 16 aa, Homo sapiens
  CDR3 for beta chain variable domain of TCR clone 86766 (TRBV7-2, TRBJ2-6)
CASSLAGRSGANVLTF

SEQ ID NO: 173533 - protein, 13 aa, Homo sapiens
  CDR3 for alpha chain variable domain of TCR clone 86767 (TRAV17, TRAJ5)
CAPMDTGRRALTF

SEQ ID NO: 173534 - protein, 12 aa, Homo sapiens
  CDR3 for beta chain variable domain of TCR clone 86767 (TRBV27, TRBJ2-7)
CASSGGFYEQYF

SEQ ID NO: 173535 - protein, 16 aa, Homo sapiens
  CDR3 for alpha chain variable domain of TCR clone 86768 (TRAV26-2, TRAJ45)
CTTASTIGGGADGLTF

SEQ ID NO: 173536 - protein, 20 aa, Homo sapiens
  CDR3 for beta chain variable domain of TCR clone 86768 (TRBV28, TRBJ2-1)
CASTPIGRSPGLAGGNEQFF

SEQ ID NO: 173537 - protein, 14 aa, Homo sapiens
  CDR3 for alpha chain variable domain of TCR clone 86769 (TRAV1-2, TRAJ29)
CAVRDLTSATPLVF

SEQ ID NO: 173538 - protein, 14 aa, Homo sapiens
  CDR3 for beta chain variable domain of TCR clone 86769 (TRBV3-1, TRBJ2-5)
CASSQGPDQETQYF

SEQ ID NO: 173539 - protein, 15 aa, Homo sapiens
  CDR3 for alpha chain variable domain of TCR clone 86770 (TRAV8-3, TRAJ23)
CAVGDRYNQGGKLIF

SEQ ID NO: 173540 - protein, 18 aa, Homo sapiens
  CDR3 for beta chain variable domain of TCR clone 86770 (TRBV20-1, TRBJ2-6)
CSAETTPTHGSGANVLTF

SEQ ID NO: 173541 - protein, 17 aa, Homo sapiens
  CDR3 for alpha chain variable domain of TCR clone 86771 (TRAV3, TRAJ6)
CAVRDGPRAGGSYIPTF

SEQ ID NO: 173542 - protein, 15 aa, Homo sapiens
  CDR3 for beta chain variable domain of TCR clone 86771 (TRBV29-1, TRBJ2-5)
CSVEGLAVNQETQYF

SEQ ID NO: 173543 - protein, 15 aa, Homo sapiens
  CDR3 for alpha chain variable domain of TCR clone 86772 (TRAV21, TRAJ24)
CAARSSTDGWGKLQF

SEQ ID NO: 173544 - protein, 11 aa, Homo sapiens
  CDR3 for beta chain variable domain of TCR clone 86772 (TRBV11-2, TRBJ2-2)
CASSLPGELFF

SEQ ID NO: 173545 - protein, 12 aa, Homo sapiens
  CDR3 for alpha chain variable domain of TCR clone 86773 (TRAV16, TRAJ26)
CALRSYGQNFVF

SEQ ID NO: 173546 - protein, 14 aa, Homo sapiens
  CDR3 for beta chain variable domain of TCR clone 86773 (TRBV10-3, TRBJ2-1)
FAISSDLAYNEQFF

SEQ ID NO: 173547 - protein, 17 aa, Homo sapiens
  CDR3 for alpha chain variable domain of TCR clone 86774 (TRAV4, TRAJ13)
CLVGVQGSSGGYQKVTF

SEQ ID NO: 173548 - protein, 14 aa, Homo sapiens
  CDR3 for beta chain variable domain of TCR clone 86774 (TRBV29-1, TRBJ2-2)
CSGRGSGNTGELFF

SEQ ID NO: 173549 - protein, 13 aa, Homo sapiens
  CDR3 for alpha chain variable domain of TCR clone 86775 (TRAV1-2, TRAJ9)
CAALNTGGFKTIF

SEQ ID NO: 173550 - protein, 16 aa, Homo sapiens
  CDR3 for beta chain variable domain of TCR clone 86775 (TRBV5-1, TRBJ2-2)
CASSLGGTGSTGELFF

SEQ ID NO: 173551 - protein, 14 aa, Homo sapiens
  CDR3 for alpha chain variable domain of TCR clone 86776 (TRAV8-3, TRAJ9)
CAVVYNTGGFKTIF

SEQ ID NO: 173552 - protein, 14 aa, Homo sapiens
  CDR3 for beta chain variable domain of TCR clone 86776 (TRBV7-3, TRBJ1-1)
CASSFLTGTTEAFF

SEQ ID NO: 173553 - protein, 15 aa, Homo sapiens
  CDR3 for alpha chain variable domain of TCR clone 86777 (TRAV12-1, TRAJ45)
CVVLSGGGGAAGLTF

SEQ ID NO: 173554 - protein, 15 aa, Homo sapiens
  CDR3 for beta chain variable domain of TCR clone 86777 (TRBV20-1, TRBJ2-7)
CSARDRVSGMDEQYF

SEQ ID NO: 173555 - protein, 11 aa, Homo sapiens
  CDR3 for alpha chain variable domain of TCR clone 86778 (TRAV12-3, TRAJ43)
CAMSVSNDMRF

SEQ ID NO: 173556 - protein, 13 aa, Homo sapiens
  CDR3 for beta chain variable domain of TCR clone 86778 (TRBV20-1, TRBJ1-1)
SAVLHLGGTEAFF

SEQ ID NO: 173557 - protein, 12 aa, Homo sapiens
  CDR3 for alpha chain variable domain of TCR clone 86779 (TRAV12-2, TRAJ31)
CAVNTPDARLMF

SEQ ID NO: 173558 - protein, 13 aa, Homo sapiens
  CDR3 for beta chain variable domain of TCR clone 86779 (TRBV19, TRBJ1-2)
CASSVPGQDGYTF

SEQ ID NO: 173559 - protein, 13 aa, Homo sapiens
  CDR3 for alpha chain variable domain of TCR clone 86780 (TRAV2, TRAJ40)
CAVVTSGTYKYIF

SEQ ID NO: 173560 - protein, 15 aa, Homo sapiens
  CDR3 for beta chain variable domain of TCR clone 86780 (TRBV15, TRBJ1-5)
CATSRDPVSNQPQHF

SEQ ID NO: 173561 - protein, 12 aa, Homo sapiens
  CDR3 for alpha chain variable domain of TCR clone 86781 (TRAV9-2, TRAJ4)
CAPRGGYNKLIF

SEQ ID NO: 173562 - protein, 15 aa, Homo sapiens
  CDR3 for beta chain variable domain of TCR clone 86781 (TRBV9, TRBJ1-6)
CASSVAGTGDSPLHF

SEQ ID NO: 173563 - protein, 16 aa, Homo sapiens
  CDR3 for alpha chain variable domain of TCR clone 86782 (TRAV30, TRAJ24)
CGTEIVDADSWGKFQF

SEQ ID NO: 173564 - protein, 17 aa, Homo sapiens
  CDR3 for beta chain variable domain of TCR clone 86782 (TRBV20-1, TRBJ2-2)
CSASGSGQCGLTGELFF

SEQ ID NO: 173565 - protein, 16 aa, Homo sapiens
  CDR3 for alpha chain variable domain of TCR clone 86783 (TRAV3, TRAJ37)
CAVRVRGSGNTGKLIF

SEQ ID NO: 173566 - protein, 12 aa, Homo sapiens
  CDR3 for beta chain variable domain of TCR clone 86783 (TRBV12-4, TRBJ2-5)
CASSSAQETQYF

SEQ ID NO: 173567 - protein, 13 aa, Homo sapiens
  CDR3 for alpha chain variable domain of TCR clone 86784 (TRAV12-1, TRAJ40)
CVVPTSGTYKYIF

SEQ ID NO: 173568 - protein, 15 aa, Homo sapiens
  CDR3 for beta chain variable domain of TCR clone 86784 (TRBV28, TRBJ2-1)
CASSIIAGGRSEQFF

SEQ ID NO: 173569 - protein, 13 aa, Homo sapiens
  CDR3 for alpha chain variable domain of TCR clone 86785 (TRAV12-1, TRAJ43)
CVVSHHNNNDMRF

SEQ ID NO: 173570 - protein, 14 aa, Homo sapiens
  CDR3 for beta chain variable domain of TCR clone 86785 (TRBV3-1, TRBJ2-5)
CQQPPEFFKRSQYF

SEQ ID NO: 173571 - protein, 15 aa, Homo sapiens
  CDR3 for alpha chain variable domain of TCR clone 86786 (TRAV26-1, TRAJ29)
CIVRVEGSGNTPLVF

SEQ ID NO: 173572 - protein, 14 aa, Homo sapiens
  CDR3 for beta chain variable domain of TCR clone 86786 (TRBV7-9, TRBJ2-5)
CASSLVGGEETQYF

SEQ ID NO: 173573 - protein, 14 aa, Homo sapiens
  CDR3 for alpha chain variable domain of TCR clone 86787 (TRAV35, TRAJ22)
CAGLRPGSARQLTF

SEQ ID NO: 173574 - protein, 12 aa, Homo sapiens
  CDR3 for beta chain variable domain of TCR clone 86787 (TRBV5-1, TRBJ1-1)
CASSFGNTEAFF

SEQ ID NO: 173575 - protein, 13 aa, Homo sapiens
  CDR3 for alpha chain variable domain of TCR clone 86788 (TRAV13-1, TRAJ10)
CAATAGGGNKLTF

SEQ ID NO: 173576 - protein, 12 aa, Homo sapiens
  CDR3 for beta chain variable domain of TCR clone 86788 (TRBV7-3, TRBJ2-1)
CASSCQSGPQFF

SEQ ID NO: 173577 - protein, 17 aa, Homo sapiens
  CDR3 for alpha chain variable domain of TCR clone 86789 (TRAV27, TRAJ26)
CAGARAPLDNYGQNFVF

SEQ ID NO: 173578 - protein, 14 aa, Homo sapiens
  CDR3 for beta chain variable domain of TCR clone 86789 (TRBV7-3, TRBJ2-1)
CASSLAGRTNEQFF

SEQ ID NO: 173579 - protein, 12 aa, Homo sapiens
  CDR3 for alpha chain variable domain of TCR clone 86790 (TRAV27, TRAJ9)
CAGESGGFKTIF

SEQ ID NO: 173580 - protein, 14 aa, Homo sapiens
  CDR3 for beta chain variable domain of TCR clone 86790 (TRBV7-9, TRBJ2-1)
RASSPRDSLYEQFF

SEQ ID NO: 173581 - protein, 15 aa, Homo sapiens
  CDR3 for alpha chain variable domain of TCR clone 86791 (TRAV12-3, TRAJ6)
CAMSATTGGSYIPTF

SEQ ID NO: 173582 - protein, 16 aa, Homo sapiens
  CDR3 for beta chain variable domain of TCR clone 86791 (TRBV20-1, TRBJ1-2)
CSASMGQGDANYGYTF

SEQ ID NO: 173583 - protein, 11 aa, Homo sapiens
  CDR3 for alpha chain variable domain of TCR clone 86792 (TRAV13-1, TRAJ6)
CATLGSYIPTF

SEQ ID NO: 173584 - protein, 13 aa, Homo sapiens
  CDR3 for beta chain variable domain of TCR clone 86792 (TRBV6-6, TRBJ2-1)
CASSLHEGDEQFF

SEQ ID NO: 173585 - protein, 14 aa, Homo sapiens
  CDR3 for alpha chain variable domain of TCR clone 86793 (TRAV2, TRAJ9)
CAVEDRSGGFKTIF

SEQ ID NO: 173586 - protein, 19 aa, Homo sapiens
  CDR3 for beta chain variable domain of TCR clone 86793 (TRBV7-2, TRBJ2-3)
CASSFLSRNWGGGTDTQYF

SEQ ID NO: 173587 - protein, 16 aa, Homo sapiens
  CDR3 for alpha chain variable domain of TCR clone 86794 (TRAV35, TRAJ37)
CWAFLRGSSNPGKLIF

SEQ ID NO: 173588 - protein, 13 aa, Homo sapiens
  CDR3 for beta chain variable domain of TCR clone 86794 (TRBV2, TRBJ1-2)
CASSVRGNYGYTF

SEQ ID NO: 173589 - protein, 12 aa, Homo sapiens
  CDR3 for alpha chain variable domain of TCR clone 86795 (TRAV1-2, TRAJ17)
CAVRAAGNKLTF

SEQ ID NO: 173590 - protein, 16 aa, Homo sapiens
  CDR3 for beta chain variable domain of TCR clone 86795 (TRBV7-3, TRBJ2-2)
CASSLKRGTLSGELFF

SEQ ID NO: 173591 - protein, 16 aa, Homo sapiens
  CDR3 for alpha chain variable domain of TCR clone 86796 (TRAV3, TRAJ10)
CAVRDMRAGGGNKLTF

SEQ ID NO: 173592 - protein, 16 aa, Homo sapiens
  CDR3 for beta chain variable domain of TCR clone 86796 (TRBV19, TRBJ1-1)
CASSPTRFWPGTEAFF

SEQ ID NO: 173593 - protein, 12 aa, Homo sapiens
  CDR3 for alpha chain variable domain of TCR clone 86797 (TRAV21, TRAJ58)
CAAETSGARLTF

SEQ ID NO: 173594 - protein, 15 aa, Homo sapiens
  CDR3 for beta chain variable domain of TCR clone 86797 (TRBV20-1, TRBJ2-7)
CSARDPVKGEGEQYF

SEQ ID NO: 173595 - protein, 12 aa, Homo sapiens
  CDR3 for alpha chain variable domain of TCR clone 86798 (TRAV13-1, TRAJ31)
CAAIVTMPDSCL

SEQ ID NO: 173596 - protein, 11 aa, Homo sapiens
  CDR3 for beta chain variable domain of TCR clone 86798 (TRBV20-1, TRBJ2-7)
CSARTSYEQYF

SEQ ID NO: 173597 - protein, 16 aa, Homo sapiens
  CDR3 for alpha chain variable domain of TCR clone 86799 (TRAV16, TRAJ42)
CALSGLLGGSQGNLIF

SEQ ID NO: 173598 - protein, 15 aa, Homo sapiens
  CDR3 for beta chain variable domain of TCR clone 86799 (TRBV5-1, TRBJ2-1)
CASSPGGLAGNEQLF

SEQ ID NO: 173599 - protein, 14 aa, Homo sapiens
  CDR3 for alpha chain variable domain of TCR clone 86800 (TRAV3, TRAJ9)
CAVRLNTGGFKTIF

SEQ ID NO: 173600 - protein, 20 aa, Homo sapiens
  CDR3 for beta chain variable domain of TCR clone 86800 (TRBV7-8, TRBJ2-2)
CASSHLFPGPTIHITGELFF

SEQ ID NO: 173601 - protein, 14 aa, Homo sapiens
  CDR3 for alpha chain variable domain of TCR clone 86801 (TRAV8-4, TRAJ9)
CAVRINTGDFKTIF

SEQ ID NO: 173602 - protein, 15 aa, Homo sapiens
  CDR3 for beta chain variable domain of TCR clone 86801 (TRBV10-2, TRBJ2-6)
CASSEQGTGANVLTF

SEQ ID NO: 173603 - protein, 12 aa, Homo sapiens
  CDR3 for alpha chain variable domain of TCR clone 86802 (TRAV13-1, TRAJ15)
CAASQAGTALIF

SEQ ID NO: 173604 - protein, 14 aa, Homo sapiens
  CDR3 for beta chain variable domain of TCR clone 86802 (TRBV19, TRBJ2-2)
CASSTLHRSGELVF

SEQ ID NO: 173605 - protein, 15 aa, Homo sapiens
  CDR3 for alpha chain variable domain of TCR clone 86803 (TRAV8-4, TRAJ29)
CAASEDFRGNTPLVF

SEQ ID NO: 173606 - protein, 18 aa, Homo sapiens
  CDR3 for beta chain variable domain of TCR clone 86803 (TRBV20-1, TRBJ2-6)
CSARTLAGGPSGANVLTF

SEQ ID NO: 173607 - protein, 14 aa, Homo sapiens
  CDR3 for alpha chain variable domain of TCR clone 86804 (TRAV16, TRAJ17)
CALSGRAAGNKLTF

SEQ ID NO: 173608 - protein, 14 aa, Homo sapiens
  CDR3 for beta chain variable domain of TCR clone 86804 (TRBV3-1, TRBJ1-2)
CQQPYSPPRGGYTF

SEQ ID NO: 173609 - protein, 12 aa, Homo sapiens
  CDR3 for alpha chain variable domain of TCR clone 86805 (TRAV13-1, TRAJ21)
CAAKEGFKKFYF

SEQ ID NO: 173610 - protein, 14 aa, Homo sapiens
  CDR3 for beta chain variable domain of TCR clone 86805 (TRBV5-4, TRBJ1-1)
CASSLDSRRDEAFF

SEQ ID NO: 173611 - protein, 16 aa, Homo sapiens
  CDR3 for alpha chain variable domain of TCR clone 86806 (TRAV21, TRAJ45)
CAVSWGSGGGADGLTF

SEQ ID NO: 173612 - protein, 14 aa, Homo sapiens
  CDR3 for beta chain variable domain of TCR clone 86806 (TRBV4-2, TRBJ1-2)
CASSPGGSNYGYTV

SEQ ID NO: 173613 - protein, 13 aa, Homo sapiens
  CDR3 for alpha chain variable domain of TCR clone 86807 (TRAV2, TRAJ24)
CAVEDSGRGKFQF

SEQ ID NO: 173614 - protein, 13 aa, Homo sapiens
  CDR3 for beta chain variable domain of TCR clone 86807 (TRBV10-3, TRBJ2-7)
CAYKLAVNYEQYF

SEQ ID NO: 173615 - protein, 16 aa, Homo sapiens
  CDR3 for alpha chain variable domain of TCR clone 86808 (TRAV20, TRAJ22)
CALQASSSGSARQLTF

SEQ ID NO: 173616 - protein, 17 aa, Homo sapiens
  CDR3 for beta chain variable domain of TCR clone 86808 (TRBV2, TRBJ2-1)
CASSEVREGGSYNEQFF

SEQ ID NO: 173617 - protein, 16 aa, Homo sapiens
  CDR3 for alpha chain variable domain of TCR clone 86809 (TRAV27, TRAJ13)
WAGAKSDSGGYQKVTF

SEQ ID NO: 173618 - protein, 15 aa, Homo sapiens
  CDR3 for beta chain variable domain of TCR clone 86809 (TRBV29-1, TRBJ2-1)
CSVGRHALFYNEQFF

SEQ ID NO: 173619 - protein, 19 aa, Homo sapiens
  CDR3 for alpha chain variable domain of TCR clone 86810 (TRAV13-1, TRAJ52)
CAASPYQNAGGTSYGELTF

SEQ ID NO: 173620 - protein, 14 aa, Homo sapiens
  CDR3 for beta chain variable domain of TCR clone 86810 (TRBV19, TRBJ2-7)
CASTVQGRPYEQYF

SEQ ID NO: 173621 - protein, 13 aa, Homo sapiens
  CDR3 for alpha chain variable domain of TCR clone 86811 (TRAV12-2, TRAJ12)
CAVNWDSSYKLIF

SEQ ID NO: 173622 - protein, 12 aa, Homo sapiens
  CDR3 for beta chain variable domain of TCR clone 86811 (TRBV7-9, TRBJ2-7)
CASSIKREEQYF

SEQ ID NO: 173623 - protein, 14 aa, Homo sapiens
  CDR3 for alpha chain variable domain of TCR clone 86812 (TRAV21, TRAJ23)
CAIVIYNQGGKLIF

SEQ ID NO: 173624 - protein, 18 aa, Homo sapiens
  CDR3 for beta chain variable domain of TCR clone 86812 (TRBV20-1, TRBJ2-6)
CSAETTPTHGSGANVLTF

SEQ ID NO: 173625 - protein, 13 aa, Homo sapiens
  CDR3 for alpha chain variable domain of TCR clone 86813 (TRAV3, TRAJ16)
CAVSDRNGQKLLF

SEQ ID NO: 173626 - protein, 15 aa, Homo sapiens
  CDR3 for beta chain variable domain of TCR clone 86813 (TRBV5-1, TRBJ2-1)
CASSPPRAPYNEQFF

SEQ ID NO: 173627 - protein, 14 aa, Homo sapiens
  CDR3 for alpha chain variable domain of TCR clone 86814 (TRAV12-1, TRAJ43)
CVVNGRSNNNEMRF

SEQ ID NO: 173628 - protein, 13 aa, Homo sapiens
  CDR3 for beta chain variable domain of TCR clone 86814 (TRBV10-3, TRBJ2-7)
CASKLAVNYEQYF

SEQ ID NO: 173629 - protein, 14 aa, Homo sapiens
  CDR3 for alpha chain variable domain of TCR clone 86815 (TRAV17, TRAJ6)
CATDASGGSYIPTF

SEQ ID NO: 173630 - protein, 19 aa, Homo sapiens
  CDR3 for beta chain variable domain of TCR clone 86815 (TRBV4-3, TRBJ2-7)
CASNQEFIGWQVTPYEQYF

SEQ ID NO: 173631 - protein, 15 aa, Homo sapiens
  CDR3 for alpha chain variable domain of TCR clone 86816 (TRAV20, TRAJ6)
CAVRLQSGGSYIPTF

SEQ ID NO: 173632 - protein, 14 aa, Homo sapiens
  CDR3 for beta chain variable domain of TCR clone 86816 (TRBV12-4, TRBJ2-7)
CASSASGGWYEQYS

SEQ ID NO: 173633 - protein, 12 aa, Homo sapiens
  CDR3 for alpha chain variable domain of TCR clone 86817 (TRAV21, TRAJ3)
CCFYSSDSKIIF

SEQ ID NO: 173634 - protein, 16 aa, Homo sapiens
  CDR3 for beta chain variable domain of TCR clone 86817 (TRBV19, TRBJ2-1)
CASSKAGPSSYNEQFF

SEQ ID NO: 173635 - protein, 12 aa, Homo sapiens
  CDR3 for alpha chain variable domain of TCR clone 86818 (TRAV3, TRAJ31)
CAVRDGNARLMF

SEQ ID NO: 173636 - protein, 13 aa, Homo sapiens
  CDR3 for beta chain variable domain of TCR clone 86818 (TRBV29-1, TRBJ2-2)
CSTTGVNTGELFF

SEQ ID NO: 173637 - protein, 13 aa, Homo sapiens
  CDR3 for alpha chain variable domain of TCR clone 86819 (TRAV29/DV5, TRAJ31)
CAASRNNNARLMF

SEQ ID NO: 173638 - protein, 13 aa, Homo sapiens
  CDR3 for beta chain variable domain of TCR clone 86819 (TRBV10-2, TRBJ2-7)
CASSAESPYEQYF

SEQ ID NO: 173639 - protein, 15 aa, Homo sapiens
  CDR3 for alpha chain variable domain of TCR clone 86820 (TRAV38-1, TRAJ30)
CAFMMSCGGDDKIIF

SEQ ID NO: 173640 - protein, 16 aa, Homo sapiens
  CDR3 for beta chain variable domain of TCR clone 86820 (TRBV7-9, TRBJ2-7)
CASSFGLAGPSYEQYF

SEQ ID NO: 173641 - protein, 15 aa, Homo sapiens
  CDR3 for alpha chain variable domain of TCR clone 86821 (TRAV25, TRAJ53)
CPTSNSGGGNYKLTF

SEQ ID NO: 173642 - protein, 14 aa, Homo sapiens
  CDR3 for beta chain variable domain of TCR clone 86821 (TRBV11-2, TRBJ2-3)
CASSRLARTDTQYF

SEQ ID NO: 173643 - protein, 14 aa, Homo sapiens
  CDR3 for alpha chain variable domain of TCR clone 86822 (TRAV12-2, TRAJ13)
CAVKKTGGYQKVTF

SEQ ID NO: 173644 - protein, 16 aa, Homo sapiens
  CDR3 for beta chain variable domain of TCR clone 86822 (TRBV12-5, TRBJ2-7)
CASGSQGAPTSGTSGR

SEQ ID NO: 173645 - protein, 14 aa, Homo sapiens
  CDR3 for alpha chain variable domain of TCR clone 86823 (TRAV1-2, TRAJ8)
CAVREDTGFQNLVF

SEQ ID NO: 173646 - protein, 16 aa, Homo sapiens
  CDR3 for beta chain variable domain of TCR clone 86823 (TRBV4-1, TRBJ2-3)
CASSQSTSGAEDTQYF

SEQ ID NO: 173647 - protein, 13 aa, Homo sapiens
  CDR3 for alpha chain variable domain of TCR clone 86824 (TRAV13-1, TRAJ21)
CAASIYNFNKFYF

SEQ ID NO: 173648 - protein, 15 aa, Homo sapiens
  CDR3 for beta chain variable domain of TCR clone 86824 (TRBV6-5, TRBJ2-1)
CASRRAQLSYNEQFF

SEQ ID NO: 173649 - protein, 13 aa, Homo sapiens
  CDR3 for alpha chain variable domain of TCR clone 86825 (TRAV30, TRAJ24)
CGTVTDRWGKLQF

SEQ ID NO: 173650 - protein, 16 aa, Homo sapiens
  CDR3 for beta chain variable domain of TCR clone 86825 (TRBV7-3, TRBJ2-2)
CASSLKRGTLSGELFF

SEQ ID NO: 173651 - protein, 15 aa, Homo sapiens
  CDR3 for alpha chain variable domain of TCR clone 86826 (TRAV8-3, TRAJ11)
CAVGLLNSGYSTLTF

SEQ ID NO: 173652 - protein, 23 aa, Homo sapiens
  CDR3 for beta chain variable domain of TCR clone 86826 (TRBV7-9, TRBJ1-2)
EAQLEKSRLLGDRFSSGEDGYTF

SEQ ID NO: 173653 - protein, 15 aa, Homo sapiens
  CDR3 for alpha chain variable domain of TCR clone 86827 (TRAV26-1, TRAJ40)
CIVRAVPSGTYKYIF

SEQ ID NO: 173654 - protein, 13 aa, Homo sapiens
  CDR3 for beta chain variable domain of TCR clone 86827 (TRBV12-5, TRBJ2-3)
CASGDRQSDTQYF

SEQ ID NO: 173655 - protein, 14 aa, Homo sapiens
  CDR3 for alpha chain variable domain of TCR clone 86828 (TRAV17, TRAJ4)
CATVPSGGYNKLIF

SEQ ID NO: 173656 - protein, 16 aa, Homo sapiens
  CDR3 for beta chain variable domain of TCR clone 86828 (TRBV19, TRBJ2-1)
CASSKAGPSSYNEQFF

SEQ ID NO: 173657 - protein, 15 aa, Homo sapiens
  CDR3 for alpha chain variable domain of TCR clone 86829 (TRAV20, TRAJ4)
CAVQVVSGGYNKLIF

SEQ ID NO: 173658 - protein, 14 aa, Homo sapiens
  CDR3 for beta chain variable domain of TCR clone 86829 (TRBV7-6, TRBJ2-3)
CASNSGGDANTQYF

SEQ ID NO: 173659 - protein, 15 aa, Homo sapiens
  CDR3 for alpha chain variable domain of TCR clone 86830 (TRAV12-2, TRAJ43)
CAFDMRFGAGTRLIV

SEQ ID NO: 173660 - protein, 15 aa, Homo sapiens
  CDR3 for beta chain variable domain of TCR clone 86830 (TRBV5-1, TRBJ2-3)
CASSVTSGSTDTQYF

SEQ ID NO: 173661 - protein, 15 aa, Homo sapiens
  CDR3 for alpha chain variable domain of TCR clone 86831 (TRAV35, TRAJ40)
CAGQLGTSGTYKYIF

SEQ ID NO: 173662 - protein, 14 aa, Homo sapiens
  CDR3 for beta chain variable domain of TCR clone 86831 (TRBV7-3, TRBJ2-1)
CASSLAGETNEQFF

SEQ ID NO: 173663 - protein, 13 aa, Homo sapiens
  CDR3 for alpha chain variable domain of TCR clone 86832 (TRAV29/DV5, TRAJ31)
CAASRNNNAGLMF

SEQ ID NO: 173664 - protein, 12 aa, Homo sapiens
  CDR3 for beta chain variable domain of TCR clone 86832 (TRBV14, TRBJ2-7)
CASSLYKDEQYF

SEQ ID NO: 173665 - protein, 16 aa, Homo sapiens
  CDR3 for alpha chain variable domain of TCR clone 86833 (TRAV2, TRAJ4)
CAVEDRFSGGYNKLIC

SEQ ID NO: 173666 - protein, 13 aa, Homo sapiens
  CDR3 for beta chain variable domain of TCR clone 86833 (TRBV7-7, TRBJ2-5)
CASSRSGQETQYF

SEQ ID NO: 173667 - protein, 18 aa, Homo sapiens
  CDR3 for alpha chain variable domain of TCR clone 86834 (TRAV13-1, TRAJ52)
CAASKRSAGGTSYGKLTF

SEQ ID NO: 173668 - protein, 16 aa, Homo sapiens
  CDR3 for beta chain variable domain of TCR clone 86834 (TRBV12-4, TRBJ1-5)
CASSRPVGGSNQPQHF

SEQ ID NO: 173669 - protein, 13 aa, Homo sapiens
  CDR3 for alpha chain variable domain of TCR clone 86835 (TRAV2, TRAJ40)
CAVVTSGTYKYIF

SEQ ID NO: 173670 - protein, 12 aa, Homo sapiens
  CDR3 for beta chain variable domain of TCR clone 86835 (TRBV7-3, TRBJ1-2)
CASSKKGVPVTF

SEQ ID NO: 173671 - protein, 16 aa, Homo sapiens
  CDR3 for alpha chain variable domain of TCR clone 86836 (TRAV12-3, TRAJ53)
CAMSPGSGGSNYKLTF

SEQ ID NO: 173672 - protein, 15 aa, Homo sapiens
  CDR3 for beta chain variable domain of TCR clone 86836 (TRBV6-1, TRBJ2-4)
CASSEAVWTINIQYF

SEQ ID NO: 173673 - protein, 16 aa, Homo sapiens
  CDR3 for alpha chain variable domain of TCR clone 86837 (TRAV35, TRAJ28)
CAGQKYSGAGSYKLTF

SEQ ID NO: 173674 - protein, 16 aa, Homo sapiens
  CDR3 for beta chain variable domain of TCR clone 86837 (TRBV7-3, TRBJ2-2)
CASSLKRGTLSGELFF

SEQ ID NO: 173675 - protein, 14 aa, Homo sapiens
  CDR3 for alpha chain variable domain of TCR clone 86838 (TRAV13-2, TRAJ22)
CADGTLGSARQLTF

SEQ ID NO: 173676 - protein, 16 aa, Homo sapiens
  CDR3 for beta chain variable domain of TCR clone 86838 (TRBV19, TRBJ2-1)
RASSSKGTRSYNEQFF

SEQ ID NO: 173677 - protein, 12 aa, Homo sapiens
  CDR3 for alpha chain variable domain of TCR clone 86839 (TRAV17, TRAJ57)
CATDGGSEKLVF

SEQ ID NO: 173678 - protein, 12 aa, Homo sapiens
  CDR3 for beta chain variable domain of TCR clone 86839 (TRBV29-1, TRBJ2-2)
CSVDMYTGELFF

SEQ ID NO: 173679 - protein, 15 aa, Homo sapiens
  CDR3 for alpha chain variable domain of TCR clone 86840 (TRAV40, TRAJ39)
CLLPPRGNAGNMLTF

SEQ ID NO: 173680 - protein, 19 aa, Homo sapiens
  CDR3 for beta chain variable domain of TCR clone 86840 (TRBV19, TRBJ2-2)
CASTRPGLAGGRVTGELFF

SEQ ID NO: 173681 - protein, 14 aa, Homo sapiens
  CDR3 for alpha chain variable domain of TCR clone 86841 (TRAV1-1, TRAJ27)
CAVIYNTNAGKSTF

SEQ ID NO: 173682 - protein, 13 aa, Homo sapiens
  CDR3 for beta chain variable domain of TCR clone 86841 (TRBV12-5, TRBJ1-2)
CASGVRTGNCYTF

SEQ ID NO: 173683 - protein, 15 aa, Homo sapiens
  CDR3 for alpha chain variable domain of TCR clone 86842 (TRAV22, TRAJ24)
CAVPLSTDSWGKLQF

SEQ ID NO: 173684 - protein, 16 aa, Homo sapiens
  CDR3 for beta chain variable domain of TCR clone 86842 (TRBV28, TRBJ2-7)
CASSCPDRRLTYEQYF

SEQ ID NO: 173685 - protein, 12 aa, Homo sapiens
  CDR3 for alpha chain variable domain of TCR clone 86843 (TRAV2, TRAJ33)
CAFMDRNYQLIW

SEQ ID NO: 173686 - protein, 16 aa, Homo sapiens
  CDR3 for beta chain variable domain of TCR clone 86843 (TRBV2, TRBJ2-7)
CASSEPWTGPSYEQYF

SEQ ID NO: 173687 - protein, 17 aa, Homo sapiens
  CDR3 for alpha chain variable domain of TCR clone 86844 (TRAV3, TRAJ6)
CAVRDGPRAGGSYIPTF

SEQ ID NO: 173688 - protein, 15 aa, Homo sapiens
  CDR3 for beta chain variable domain of TCR clone 86844 (TRBV20-1, TRBJ1-1)
CSASWDRFLNTEAVF

SEQ ID NO: 173689 - protein, 11 aa, Homo sapiens
  CDR3 for alpha chain variable domain of TCR clone 86845 (TRAV12-3, TRAJ27)
CAMANAGKSTF

SEQ ID NO: 173690 - protein, 13 aa, Homo sapiens
  CDR3 for beta chain variable domain of TCR clone 86845 (TRBV7-9, TRBJ1-2)
CASSSDSIYGYTF

SEQ ID NO: 173691 - protein, 16 aa, Homo sapiens
  CDR3 for alpha chain variable domain of TCR clone 86846 (TRAV3, TRAJ5)
FAVRNLMDTGRRALTF

SEQ ID NO: 173692 - protein, 16 aa, Homo sapiens
  CDR3 for beta chain variable domain of TCR clone 86846 (TRBV4-3, TRBJ2-7)
CASSQEGLANSYEQYF

SEQ ID NO: 173693 - protein, 15 aa, Homo sapiens
  CDR3 for alpha chain variable domain of TCR clone 86847 (TRAV34, TRAJ38)
CGADFTPGNNRKLIW

SEQ ID NO: 173694 - protein, 17 aa, Homo sapiens
  CDR3 for beta chain variable domain of TCR clone 86847 (TRBV20-1, TRBJ2-4)
CSARDWASGGRENIQYF

SEQ ID NO: 173695 - protein, 15 aa, Homo sapiens
  CDR3 for alpha chain variable domain of TCR clone 86848 (TRAV23/DV6, TRAJ18)
CAARYRGSTPGRLYF

SEQ ID NO: 173696 - protein, 13 aa, Homo sapiens
  CDR3 for beta chain variable domain of TCR clone 86848 (TRBV7-3, TRBJ1-1)
CASSQDWGAEAFF

SEQ ID NO: 173697 - protein, 10 aa, Homo sapiens
  CDR3 for alpha chain variable domain of TCR clone 86849 (TRAV12-3, TRAJ18)
CAMSAEAQPW

SEQ ID NO: 173698 - protein, 13 aa, Homo sapiens
  CDR3 for beta chain variable domain of TCR clone 86849 (TRBV15, TRBJ1-6)
YATSGGLNSPLHF

SEQ ID NO: 173699 - protein, 16 aa, Homo sapiens
  CDR3 for alpha chain variable domain of TCR clone 86850 (TRAV3, TRAJ37)
CALRPHGSGNTGKLIF

SEQ ID NO: 173700 - protein, 14 aa, Homo sapiens
  CDR3 for beta chain variable domain of TCR clone 86850 (TRBV25-1, TRBJ1-1)
CASTHLGGNTEAFF

SEQ ID NO: 173701 - protein, 12 aa, Homo sapiens
  CDR3 for alpha chain variable domain of TCR clone 86851 (TRAV3, TRAJ20)
CAVRDPDYKLSF

SEQ ID NO: 173702 - protein, 15 aa, Homo sapiens
  CDR3 for beta chain variable domain of TCR clone 86851 (TRBV11-3, TRBJ2-3)
CASLKDGREGDTQYF

SEQ ID NO: 173703 - protein, 23 aa, Homo sapiens
  CDR3 for alpha chain variable domain of TCR clone 86852 (TRAV12-2, TRAJ22)
CSSETPSPVIQPPGRSSARQLTF

SEQ ID NO: 173704 - protein, 15 aa, Homo sapiens
  CDR3 for beta chain variable domain of TCR clone 86852 (TRBV4-3, TRBJ2-7)
CASSQGDWGDYEQYF

SEQ ID NO: 173705 - protein, 14 aa, Homo sapiens
  CDR3 for alpha chain variable domain of TCR clone 86853 (TRAV12-3, TRAJ10)
SHLPLTGGGNKLTF

SEQ ID NO: 173706 - protein, 14 aa, Homo sapiens
  CDR3 for beta chain variable domain of TCR clone 86853 (TRBV20-1, TRBJ2-7)
CSAWTALSSYEQYF

SEQ ID NO: 173707 - protein, 16 aa, Homo sapiens
  CDR3 for alpha chain variable domain of TCR clone 86854 (TRAV8-3, TRAJ8)
CAVPRDGNTGFQQLVF

SEQ ID NO: 173708 - protein, 15 aa, Homo sapiens
  CDR3 for beta chain variable domain of TCR clone 86854 (TRBV6-1, TRBJ2-6)
CASSSRPSGANALTF

SEQ ID NO: 173709 - protein, 12 aa, Homo sapiens
  CDR3 for alpha chain variable domain of TCR clone 86855 (TRAV12-3, TRAJ17)
CAMTLTGNKLTF

SEQ ID NO: 173710 - protein, 15 aa, Homo sapiens
  CDR3 for beta chain variable domain of TCR clone 86855 (TRBV6-3, TRBJ2-1)
CASIGAGGSYNEQFF

SEQ ID NO: 173711 - protein, 14 aa, Homo sapiens
  CDR3 for alpha chain variable domain of TCR clone 86856 (TRAV1-2, TRAJ16)
CAVNRFSDGQKLLF

SEQ ID NO: 173712 - protein, 15 aa, Homo sapiens
  CDR3 for beta chain variable domain of TCR clone 86856 (TRBV5-8, TRBJ1-1)
CASSFSGTSPKGAFF

SEQ ID NO: 173713 - protein, 14 aa, Homo sapiens
  CDR3 for alpha chain variable domain of TCR clone 86857 (TRAV10, TRAJ36)
CVVKYEGGAKNLFF

SEQ ID NO: 173714 - protein, 16 aa, Homo sapiens
  CDR3 for beta chain variable domain of TCR clone 86857 (TRBV7-3, TRBJ2-2)
CASSLKRGTLSGELFF

SEQ ID NO: 173715 - protein, 16 aa, Homo sapiens
  CDR3 for alpha chain variable domain of TCR clone 86858 (TRAV3, TRAJ10)
CAVRDMRAGGGNKLTC

SEQ ID NO: 173716 - protein, 15 aa, Homo sapiens
  CDR3 for beta chain variable domain of TCR clone 86858 (TRBV11-2, TRBJ1-6)
CASTGFGTAVSPLHF

SEQ ID NO: 173717 - protein, 14 aa, Homo sapiens
  CDR3 for alpha chain variable domain of TCR clone 86859 (TRAV27, TRAJ23)
CAGLSYNQGGKLIF

SEQ ID NO: 173718 - protein, 15 aa, Homo sapiens
  CDR3 for beta chain variable domain of TCR clone 86859 (TRBV19, TRBJ2-2)
CASSLNRGVTGELIF

SEQ ID NO: 173719 - protein, 13 aa, Homo sapiens
  CDR3 for alpha chain variable domain of TCR clone 86860 (TRAV27, TRAJ42)
CAGARGSQGHLIF

SEQ ID NO: 173720 - protein, 14 aa, Homo sapiens
  CDR3 for beta chain variable domain of TCR clone 86860 (TRBV20-1, TRBJ1-1)
CSAQTRIGGTEAFF

SEQ ID NO: 173721 - protein, 16 aa, Homo sapiens
  CDR3 for alpha chain variable domain of TCR clone 86861 (TRAV3, TRAJ37)
CAVRPHGSGNTGQLIF

SEQ ID NO: 173722 - protein, 14 aa, Homo sapiens
  CDR3 for beta chain variable domain of TCR clone 86861 (TRBV25-1, TRBJ1-1)
CASTHLGGNTEAFF

SEQ ID NO: 173723 - protein, 20 aa, Homo sapiens
  CDR3 for alpha chain variable domain of TCR clone 86862 (TRAV21, TRAJ4)
AASQPGDSATLAGGYNKLIF

SEQ ID NO: 173724 - protein, 19 aa, Homo sapiens
  CDR3 for beta chain variable domain of TCR clone 86862 (TRBV18, TRBJ1-3)
CASSPLSRTGMSSGNTIYC

SEQ ID NO: 173725 - protein, 14 aa, Homo sapiens
  CDR3 for alpha chain variable domain of TCR clone 86863 (TRAV14/DV4, TRAJ26)
CAMREGTYGQNFVF

SEQ ID NO: 173726 - protein, 16 aa, Homo sapiens
  CDR3 for beta chain variable domain of TCR clone 86863 (TRBV9, TRBJ1-2)
CASSVEEKVSPYGDTF

SEQ ID NO: 173727 - protein, 13 aa, Homo sapiens
  CDR3 for alpha chain variable domain of TCR clone 86864 (TRAV30, TRAJ6)
CGFIEGGSYIPTF

SEQ ID NO: 173728 - protein, 16 aa, Homo sapiens
  CDR3 for beta chain variable domain of TCR clone 86864 (TRBV7-6, TRBJ2-3)
CASSAGTSRGTDTQYF

SEQ ID NO: 173729 - protein, 12 aa, Homo sapiens
  CDR3 for alpha chain variable domain of TCR clone 86865 (TRAV12-3, TRAJ17)
CAMTLTGNQLTF

SEQ ID NO: 173730 - protein, 13 aa, Homo sapiens
  CDR3 for beta chain variable domain of TCR clone 86865 (TRBV5-1, TRBJ1-2)
CASSSTGVYGYTF

SEQ ID NO: 173731 - protein, 14 aa, Homo sapiens
  CDR3 for alpha chain variable domain of TCR clone 86866 (TRAV8-2, TRAJ23)
CVVSDDNQGGKLIS

SEQ ID NO: 173732 - protein, 16 aa, Homo sapiens
  CDR3 for beta chain variable domain of TCR clone 86866 (TRBV4-2, TRBJ2-5)
CASSQELVGSQETQYF

SEQ ID NO: 173733 - protein, 14 aa, Homo sapiens
  CDR3 for alpha chain variable domain of TCR clone 86867 (TRAV1-2, TRAJ16)
CAVNRFSDGQKLLF

SEQ ID NO: 173734 - protein, 16 aa, Homo sapiens
  CDR3 for beta chain variable domain of TCR clone 86867 (TRBV15, TRBJ1-1)
CATSRDGRVGDTEAFF

SEQ ID NO: 173735 - protein, 12 aa, Homo sapiens
  CDR3 for alpha chain variable domain of TCR clone 86868 (TRAV27, TRAJ9)
CAGESGGFKTIF

SEQ ID NO: 173736 - protein, 18 aa, Homo sapiens
  CDR3 for beta chain variable domain of TCR clone 86868 (TRBV10-2, TRBJ2-2)
CISAPAVHLQADAGELFF

SEQ ID NO: 173737 - protein, 12 aa, Homo sapiens
  CDR3 for alpha chain variable domain of TCR clone 86869 (TRAV12-3, TRAJ17)
CAMTLTDNKLTF

SEQ ID NO: 173738 - protein, 11 aa, Homo sapiens
  CDR3 for beta chain variable domain of TCR clone 86869 (TRBV29-1, TRBJ2-5)
CSEDRTGTQYF

SEQ ID NO: 173739 - protein, 11 aa, Homo sapiens
  CDR3 for alpha chain variable domain of TCR clone 86870 (TRAV12-3, TRAJ27)
CAMANAGKSTF

SEQ ID NO: 173740 - protein, 13 aa, Homo sapiens
  CDR3 for beta chain variable domain of TCR clone 86870 (TRBV19, TRBJ1-2)
CASSVPGQDGYTF

SEQ ID NO: 173741 - protein, 17 aa, Homo sapiens
  CDR3 for alpha chain variable domain of TCR clone 86871 (TRAV3, TRAJ42)
CAVRDRDYGGSQGNLIF

SEQ ID NO: 173742 - protein, 14 aa, Homo sapiens
  CDR3 for beta chain variable domain of TCR clone 86871 (TRBV7-3, TRBJ2-2)
CASSLNSNTGKLFF

SEQ ID NO: 173743 - protein, 13 aa, Homo sapiens
  CDR3 for alpha chain variable domain of TCR clone 86872 (TRAV36/DV7, TRAJ49)
CAVEANTGNQVYF

SEQ ID NO: 173744 - protein, 14 aa, Homo sapiens
  CDR3 for beta chain variable domain of TCR clone 86872 (TRBV20-1, TRBJ2-5)
CSASSGRAAETQYF

SEQ ID NO: 173745 - protein, 16 aa, Homo sapiens
  CDR3 for alpha chain variable domain of TCR clone 86873 (TRAV30, TRAJ24)
CGTEIVDADSWGKFQF

SEQ ID NO: 173746 - protein, 15 aa, Homo sapiens
  CDR3 for beta chain variable domain of TCR clone 86873 (TRBV19, TRBJ2-1)
CASSIQATSYNEQFF

SEQ ID NO: 173747 - protein, 15 aa, Homo sapiens
  CDR3 for alpha chain variable domain of TCR clone 86874 (TRAV27, TRAJ38)
CAARRNAGNNRKLIW

SEQ ID NO: 173748 - protein, 13 aa, Homo sapiens
  CDR3 for beta chain variable domain of TCR clone 86874 (TRBV7-3, TRBJ2-1)
CASSLDSYDEQFF

SEQ ID NO: 173749 - protein, 22 aa, Homo sapiens
  CDR3 for alpha chain variable domain of TCR clone 86875 (TRAV25, TRAJ44)
TATQTTDVGTYANTGTASKLTF

SEQ ID NO: 173750 - protein, 14 aa, Homo sapiens
  CDR3 for beta chain variable domain of TCR clone 86875 (TRBV11-2, TRBJ1-2)
CASSLYRGNYGYTF

SEQ ID NO: 173751 - protein, 12 aa, Homo sapiens
  CDR3 for alpha chain variable domain of TCR clone 86876 (TRAV17, TRAJ57)
CATDGGSEKLVS

SEQ ID NO: 173752 - protein, 13 aa, Homo sapiens
  CDR3 for beta chain variable domain of TCR clone 86876 (TRBV7-9, TRBJ2-7)
CASSFAGAYEQYF

SEQ ID NO: 173753 - protein, 14 aa, Homo sapiens
  CDR3 for alpha chain variable domain of TCR clone 86877 (TRAV38-1, TRAJ45)
CAYYSGGRADGLTF

SEQ ID NO: 173754 - protein, 20 aa, Homo sapiens
  CDR3 for beta chain variable domain of TCR clone 86877 (TRBV28, TRBJ2-1)
CASTPIGRSPGLAGGNEQFF

SEQ ID NO: 173755 - protein, 14 aa, Homo sapiens
  CDR3 for alpha chain variable domain of TCR clone 86878 (TRAV8-3, TRAJ36)
CAVGPITGANNLFF

SEQ ID NO: 173756 - protein, 15 aa, Homo sapiens
  CDR3 for beta chain variable domain of TCR clone 86878 (TRBV4-1, TRBJ2-1)
CANSQDPGNYNEQFF

SEQ ID NO: 173757 - protein, 12 aa, Homo sapiens
  CDR3 for alpha chain variable domain of TCR clone 86879 (TRAV2, TRAJ33)
CAFMDSNYQLIW

SEQ ID NO: 173758 - protein, 16 aa, Homo sapiens
  CDR3 for beta chain variable domain of TCR clone 86879 (TRBV2, TRBJ2-7)
CASSEPWTGPSYEQYC

SEQ ID NO: 173759 - protein, 11 aa, Homo sapiens
  CDR3 for alpha chain variable domain of TCR clone 86880 (TRAV2, TRAJ33)
CAVDSNYQLIW

SEQ ID NO: 173760 - protein, 13 aa, Homo sapiens
  CDR3 for beta chain variable domain of TCR clone 86880 (TRBV7-9, TRBJ2-1)
CASSLDVGNEQFF

SEQ ID NO: 173761 - protein, 11 aa, Homo sapiens
  CDR3 for alpha chain variable domain of TCR clone 86881 (TRAV17, TRAJ49)
CATDAGNQFYF

SEQ ID NO: 173762 - protein, 16 aa, Homo sapiens
  CDR3 for beta chain variable domain of TCR clone 86881 (TRBV7-2, TRBJ1-2)
CASSPTCGTSLGGYTF

SEQ ID NO: 173763 - protein, 16 aa, Homo sapiens
  CDR3 for alpha chain variable domain of TCR clone 86882 (TRAV26-1, TRAJ53)
CIVRVAMGGSNYKLTF

SEQ ID NO: 173764 - protein, 12 aa, Homo sapiens
  CDR3 for beta chain variable domain of TCR clone 86882 (TRBV7-9, TRBJ1-5)
SASSPQGQPQHF

SEQ ID NO: 173765 - protein, 12 aa, Homo sapiens
  CDR3 for alpha chain variable domain of TCR clone 86883 (TRAV12-3, TRAJ17)
CAMTLTGNKLTF

SEQ ID NO: 173766 - protein, 13 aa, Homo sapiens
  CDR3 for beta chain variable domain of TCR clone 86883 (TRBV18, TRBJ2-3)
CASSTGRTDTQYF

SEQ ID NO: 173767 - protein, 13 aa, Homo sapiens
  CDR3 for alpha chain variable domain of TCR clone 86884 (TRAV8-6, TRAJ13)
CAVRDGGYEKVTF

SEQ ID NO: 173768 - protein, 15 aa, Homo sapiens
  CDR3 for beta chain variable domain of TCR clone 86884 (TRBV7-9, TRBJ2-2)
CASRPEGTSTGELFF

SEQ ID NO: 173769 - protein, 14 aa, Homo sapiens
  CDR3 for alpha chain variable domain of TCR clone 86885 (TRAV26-1, TRAJ38)
CIADNAGNNRKLIW

SEQ ID NO: 173770 - protein, 16 aa, Homo sapiens
  CDR3 for beta chain variable domain of TCR clone 86885 (TRBV18, TRBJ1-3)
CASSLGILNGENTIYF

SEQ ID NO: 173771 - protein, 14 aa, Homo sapiens
  CDR3 for alpha chain variable domain of TCR clone 86886 (TRAV12-2, TRAJ17)
CAVLFRAAGNKLTF

SEQ ID NO: 173772 - protein, 13 aa, Homo sapiens
  CDR3 for beta chain variable domain of TCR clone 86886 (TRBV19, TRBJ1-2)
CASSQGQVYGYTF

SEQ ID NO: 173773 - protein, 13 aa, Homo sapiens
  CDR3 for alpha chain variable domain of TCR clone 86887 (TRAV21, TRAJ27)
CAARPGNAGKSTF

SEQ ID NO: 173774 - protein, 12 aa, Homo sapiens
  CDR3 for beta chain variable domain of TCR clone 86887 (TRBV6-3, TRBJ2-7)
CASGLTPYEQYF

SEQ ID NO: 173775 - protein, 12 aa, Homo sapiens
  CDR3 for alpha chain variable domain of TCR clone 86888 (TRAV1-1, TRAJ8)
CAGGPGFQKLVF

SEQ ID NO: 173776 - protein, 16 aa, Homo sapiens
  CDR3 for beta chain variable domain of TCR clone 86888 (TRBV12-4, TRBJ1-5)
CASSRPVGGSNQPQHF

SEQ ID NO: 173777 - protein, 10 aa, Homo sapiens
  CDR3 for alpha chain variable domain of TCR clone 86889 (TRAV23/DV6, TRAJ57)
CEASSTLSQG

SEQ ID NO: 173778 - protein, 14 aa, Homo sapiens
  CDR3 for beta chain variable domain of TCR clone 86889 (TRBV25-1, TRBJ1-1)
CASTHLGGNTEAFF

SEQ ID NO: 173779 - protein, 15 aa, Homo sapiens
  CDR3 for alpha chain variable domain of TCR clone 86890 (TRAV38-2/DV8, TRAJ45)
CAYWDSGGGADGLTF

SEQ ID NO: 173780 - protein, 15 aa, Homo sapiens
  CDR3 for beta chain variable domain of TCR clone 86890 (TRBV27, TRBJ2-1)
CASSNGGGSSNEQFF

SEQ ID NO: 173781 - protein, 12 aa, Homo sapiens
  CDR3 for alpha chain variable domain of TCR clone 86891 (TRAV17, TRAJ53)
CAGGGSNYKLTF

SEQ ID NO: 173782 - protein, 13 aa, Homo sapiens
  CDR3 for beta chain variable domain of TCR clone 86891 (TRBV10-2, TRBJ2-7)
CASGASGGYEQYF

SEQ ID NO: 173783 - protein, 11 aa, Homo sapiens
  CDR3 for alpha chain variable domain of TCR clone 86892 (TRAV1-2, TRAJ11)
CAVRGYSTLTF

SEQ ID NO: 173784 - protein, 14 aa, Homo sapiens
  CDR3 for beta chain variable domain of TCR clone 86892 (TRBV11-2, TRBJ2-7)
CASSRSGGAGEQYF

SEQ ID NO: 173785 - protein, 15 aa, Homo sapiens
  CDR3 for alpha chain variable domain of TCR clone 86893 (TRAV12-2, TRAJ20)
CAAKGGFGAGTTVTV

SEQ ID NO: 173786 - protein, 13 aa, Homo sapiens
  CDR3 for beta chain variable domain of TCR clone 86893 (TRBV12-4, TRBJ2-7)
CASSPGQLYEQYF

SEQ ID NO: 173787 - protein, 12 aa, Homo sapiens
  CDR3 for alpha chain variable domain of TCR clone 86894 (TRAV1-2, TRAJ24)
CAVGGSWGKFQF

SEQ ID NO: 173788 - protein, 15 aa, Homo sapiens
  CDR3 for beta chain variable domain of TCR clone 86894 (TRBV20-1, TRBJ2-7)
CSARDRVSGMDEQYF

SEQ ID NO: 173789 - protein, 11 aa, Homo sapiens
  CDR3 for alpha chain variable domain of TCR clone 86895 (TRAV1-2, TRAJ40)
CAVPGTYNYIF

SEQ ID NO: 173790 - protein, 15 aa, Homo sapiens
  CDR3 for beta chain variable domain of TCR clone 86895 (TRBV25-1, TRBJ1-4)
CTSSPGDSTNEKLFF

SEQ ID NO: 173791 - protein, 15 aa, Homo sapiens
  CDR3 for alpha chain variable domain of TCR clone 86896 (TRAV27, TRAJ38)
CAARRNAGNNRKLIW

SEQ ID NO: 173792 - protein, 15 aa, Homo sapiens
  CDR3 for beta chain variable domain of TCR clone 86896 (TRBV7-9, TRBJ1-4)
CASSRTGGFNEKLFF

SEQ ID NO: 173793 - protein, 14 aa, Homo sapiens
  CDR3 for alpha chain variable domain of TCR clone 86897 (TRAV9-2, TRAJ39)
CALYIYNAGNMLTF

SEQ ID NO: 173794 - protein, 13 aa, Homo sapiens
  CDR3 for beta chain variable domain of TCR clone 86897 (TRBV7-9, TRBJ2-1)
CASTSGGAPFGFF

SEQ ID NO: 173795 - protein, 12 aa, Homo sapiens
  CDR3 for alpha chain variable domain of TCR clone 86898 (TRAV2, TRAJ16)
CAVVRDGQKLLF

SEQ ID NO: 173796 - protein, 14 aa, Homo sapiens
  CDR3 for beta chain variable domain of TCR clone 86898 (TRBV12-5, TRBJ2-5)
CASGSRTHQETQYF

SEQ ID NO: 173797 - protein, 13 aa, Homo sapiens
  CDR3 for alpha chain variable domain of TCR clone 86899 (TRAV20, TRAJ34)
CAASSYNTDKLIF

SEQ ID NO: 173798 - protein, 13 aa, Homo sapiens
  CDR3 for beta chain variable domain of TCR clone 86899 (TRBV7-9, TRBJ1-2)
CASSLKQNYGYTF

SEQ ID NO: 173799 - protein, 16 aa, Homo sapiens
  CDR3 for alpha chain variable domain of TCR clone 86900 (TRAV8-4, TRAJ18)
CAVTANGGSTLGRLYF

SEQ ID NO: 173800 - protein, 14 aa, Homo sapiens
  CDR3 for beta chain variable domain of TCR clone 86900 (TRBV12-4, TRBJ1-2)
CASSSAGHIYGDTF

SEQ ID NO: 173801 - protein, 14 aa, Homo sapiens
  CDR3 for alpha chain variable domain of TCR clone 86901 (TRAV12-2, TRAJ45)
CAVNIGGGADGLTF

SEQ ID NO: 173802 - protein, 15 aa, Homo sapiens
  CDR3 for beta chain variable domain of TCR clone 86901 (TRBV20-1, TRBJ1-5)
CSASAWDGVNQPQHF

SEQ ID NO: 173803 - protein, 15 aa, Homo sapiens
  CDR3 for alpha chain variable domain of TCR clone 86902 (TRAV27, TRAJ38)
CAARRNAGTNRKRIW

SEQ ID NO: 173804 - protein, 13 aa, Homo sapiens
  CDR3 for beta chain variable domain of TCR clone 86902 (TRBV12-5, TRBJ2-3)
CASGDRQSDTQYF

SEQ ID NO: 173805 - protein, 12 aa, Homo sapiens
  CDR3 for alpha chain variable domain of TCR clone 86903 (TRAV12-2, TRAJ10)
WGVTGGGNKLTF

SEQ ID NO: 173806 - protein, 15 aa, Homo sapiens
  CDR3 for beta chain variable domain of TCR clone 86903 (TRBV6-3, TRBJ2-7)
CVSSSPGTVFYEQYF

SEQ ID NO: 173807 - protein, 12 aa, Homo sapiens
  CDR3 for alpha chain variable domain of TCR clone 86904 (TRAV12-2, TRAJ30)
CAVGNRDDKIIF

SEQ ID NO: 173808 - protein, 15 aa, Homo sapiens
  CDR3 for beta chain variable domain of TCR clone 86904 (TRBV6-3, TRBJ1-5)
CASRVDRWSNQPQHF

SEQ ID NO: 173809 - protein, 14 aa, Homo sapiens
  CDR3 for alpha chain variable domain of TCR clone 86905 (TRAV8-3, TRAJ4)
CAVGAAGGYNKLIF

SEQ ID NO: 173810 - protein, 15 aa, Homo sapiens
  CDR3 for beta chain variable domain of TCR clone 86905 (TRBV6-5, TRBJ2-1)
CASSYDAGAGNELFF

SEQ ID NO: 173811 - protein, 12 aa, Homo sapiens
  CDR3 for alpha chain variable domain of TCR clone 86906 (TRAV13-1, TRAJ21)
CAAKEGFNKFYF

SEQ ID NO: 173812 - protein, 15 aa, Homo sapiens
  CDR3 for beta chain variable domain of TCR clone 86906 (TRBV7-9, TRBJ1-6)
CASSSPGRGKSPLHF

SEQ ID NO: 173813 - protein, 16 aa, Homo sapiens
  CDR3 for alpha chain variable domain of TCR clone 86907 (TRAV8-3, TRAJ8)
CAVPRDGNTGFQQLVF

SEQ ID NO: 173814 - protein, 14 aa, Homo sapiens
  CDR3 for beta chain variable domain of TCR clone 86907 (TRBV4-1, TRBJ2-2)
CASSQAVNTGELFF

SEQ ID NO: 173815 - protein, 14 aa, Homo sapiens
  CDR3 for alpha chain variable domain of TCR clone 86908 (TRAV12-2, TRAJ17)
CAVLFKAAGNKLTF

SEQ ID NO: 173816 - protein, 13 aa, Homo sapiens
  CDR3 for beta chain variable domain of TCR clone 86908 (TRBV19, TRBJ1-2)
CASSQGQVYVYTF

SEQ ID NO: 173817 - protein, 13 aa, Homo sapiens
  CDR3 for alpha chain variable domain of TCR clone 86909 (TRAV8-3, TRAJ44)
CAVVPGTASKLTS

SEQ ID NO: 173818 - protein, 14 aa, Homo sapiens
  CDR3 for beta chain variable domain of TCR clone 86909 (TRBV11-2, TRBJ2-3)
CASRRLARTDTQYF

SEQ ID NO: 173819 - protein, 13 aa, Homo sapiens
  CDR3 for alpha chain variable domain of TCR clone 86910 (TRAV27, TRAJ29)
CAGAHSGNTPLVF

SEQ ID NO: 173820 - protein, 14 aa, Homo sapiens
  CDR3 for beta chain variable domain of TCR clone 86910 (TRBV7-9, TRBJ2-7)
CASSIGPGAGEQYF

SEQ ID NO: 173821 - protein, 14 aa, Homo sapiens
  CDR3 for alpha chain variable domain of TCR clone 86911 (TRAV12-2, TRAJ45)
CAVNKGGGADGLTF

SEQ ID NO: 173822 - protein, 15 aa, Homo sapiens
  CDR3 for beta chain variable domain of TCR clone 86911 (TRBV9, TRBJ1-6)
CASSVAGTGDSPLLF

SEQ ID NO: 173823 - protein, 13 aa, Homo sapiens
  CDR3 for alpha chain variable domain of TCR clone 86912 (TRAV27, TRAJ6)
CSGGTRGSYIPTF

SEQ ID NO: 173824 - protein, 13 aa, Homo sapiens
  CDR3 for beta chain variable domain of TCR clone 86912 (TRBV4-1, TRBJ2-2)
CASSQENTGELFF

SEQ ID NO: 173825 - protein, 14 aa, Homo sapiens
  CDR3 for alpha chain variable domain of TCR clone 86913 (TRAV35, TRAJ33)
CAGSSQDSNYQLIW

SEQ ID NO: 173826 - protein, 12 aa, Homo sapiens
  CDR3 for beta chain variable domain of TCR clone 86913 (TRBV12-4, TRBJ2-7)
CASSLGGYEQYF

SEQ ID NO: 173827 - protein, 12 aa, Homo sapiens
  CDR3 for alpha chain variable domain of TCR clone 86914 (TRAV12-3, TRAJ40)
CAMTSGTYKYIF

SEQ ID NO: 173828 - protein, 15 aa, Homo sapiens
  CDR3 for beta chain variable domain of TCR clone 86914 (TRBV7-3, TRBJ2-2)
CASSLTGRGTGELFF

SEQ ID NO: 173829 - protein, 20 aa, Homo sapiens
  CDR3 for alpha chain variable domain of TCR clone 86915 (TRAV12-1, TRAJ42)
SSVIQPPTSVKGGSQGNLIF

SEQ ID NO: 173830 - protein, 17 aa, Homo sapiens
  CDR3 for beta chain variable domain of TCR clone 86915 (TRBV11-2, TRBJ2-1)
CASSLYPPGVEYNEQFF

SEQ ID NO: 173831 - protein, 14 aa, Homo sapiens
  CDR3 for alpha chain variable domain of TCR clone 86916 (TRAV1-1, TRAJ27)
CAVIYNTNAGKSTF

SEQ ID NO: 173832 - protein, 15 aa, Homo sapiens
  CDR3 for beta chain variable domain of TCR clone 86916 (TRBV5-1, TRBJ2-5)
CASSFKGGDQETQYF

SEQ ID NO: 173833 - protein, 13 aa, Homo sapiens
  CDR3 for alpha chain variable domain of TCR clone 86917 (TRAV13-1, TRAJ5)
CAARVTGRRALTF

SEQ ID NO: 173834 - protein, 13 aa, Homo sapiens
  CDR3 for beta chain variable domain of TCR clone 86917 (TRBV7-9, TRBJ1-2)
CASSLKQNYGYTF

SEQ ID NO: 173835 - protein, 13 aa, Homo sapiens
  CDR3 for alpha chain variable domain of TCR clone 86918 (TRAV13-2, TRAJ13)
CAERPGGYQKVTF

SEQ ID NO: 173836 - protein, 12 aa, Homo sapiens
  CDR3 for beta chain variable domain of TCR clone 86918 (TRBV7-8, TRBJ2-7)
CASSLGDREQYF

SEQ ID NO: 173837 - protein, 16 aa, Homo sapiens
  CDR3 for alpha chain variable domain of TCR clone 86919 (TRAV13-1, TRAJ48)
CAASIFGNFGNEKLTF

SEQ ID NO: 173838 - protein, 16 aa, Homo sapiens
  CDR3 for beta chain variable domain of TCR clone 86919 (TRBV7-2, TRBJ2-6)
CASGERRASGANVLTF

SEQ ID NO: 173839 - protein, 11 aa, Homo sapiens
  CDR3 for alpha chain variable domain of TCR clone 86920 (TRAV4, TRAJ31)
CLVGDNAGLMF

SEQ ID NO: 173840 - protein, 15 aa, Homo sapiens
  CDR3 for beta chain variable domain of TCR clone 86920 (TRBV10-2, TRBJ2-6)
CASSEQGTGANVLTF

SEQ ID NO: 173841 - protein, 15 aa, Homo sapiens
  CDR3 for alpha chain variable domain of TCR clone 86921 (TRAV12-2, TRAJ43)
CAFDMRFGAGTRLTV

SEQ ID NO: 173842 - protein, 14 aa, Homo sapiens
  CDR3 for beta chain variable domain of TCR clone 86921 (TRBV19, TRBJ2-5)
CASSMTGQQETQYF

SEQ ID NO: 173843 - protein, 15 aa, Homo sapiens
  CDR3 for alpha chain variable domain of TCR clone 86922 (TRAV36/DV7, TRAJ53)
CAVEGRGGSNYKLTF

SEQ ID NO: 173844 - protein, 12 aa, Homo sapiens
  CDR3 for beta chain variable domain of TCR clone 86922 (TRBV11-2, TRBJ2-2)
CASSLGGGELFF

SEQ ID NO: 173845 - protein, 14 aa, Homo sapiens
  CDR3 for alpha chain variable domain of TCR clone 86923 (TRAV23/DV6, TRAJ8)
CAASKATGFQKLVF

SEQ ID NO: 173846 - protein, 15 aa, Homo sapiens
  CDR3 for beta chain variable domain of TCR clone 86923 (TRBV28, TRBJ2-3)
CASSPDRQGTNTQYF

SEQ ID NO: 173847 - protein, 12 aa, Homo sapiens
  CDR3 for alpha chain variable domain of TCR clone 86924 (TRAV13-1, TRAJ21)
CAAKEGFNKFYF

SEQ ID NO: 173848 - protein, 17 aa, Homo sapiens
  CDR3 for beta chain variable domain of TCR clone 86924 (TRBV20-1, TRBJ2-1)
CSASSAGLAGSYNEQFF

SEQ ID NO: 173849 - protein, 15 aa, Homo sapiens
  CDR3 for alpha chain variable domain of TCR clone 86925 (TRAV3, TRAJ30)
CAVRDEYGRDDKIIF

SEQ ID NO: 173850 - protein, 15 aa, Homo sapiens
  CDR3 for beta chain variable domain of TCR clone 86925 (TRBV20-1, TRBJ2-7)
CSARDRVSGMDEQYF

SEQ ID NO: 173851 - protein, 15 aa, Homo sapiens
  CDR3 for alpha chain variable domain of TCR clone 86926 (TRAV17, TRAJ57)
CATGPFRGGSEKLVF

SEQ ID NO: 173852 - protein, 14 aa, Homo sapiens
  CDR3 for beta chain variable domain of TCR clone 86926 (TRBV12-5, TRBJ2-5)
CASGSRTHQETQYF

SEQ ID NO: 173853 - protein, 16 aa, Homo sapiens
  CDR3 for alpha chain variable domain of TCR clone 86927 (TRAV3, TRAJ23)
CAVKIGIYNQGGKLIF

SEQ ID NO: 173854 - protein, 17 aa, Homo sapiens
  CDR3 for beta chain variable domain of TCR clone 86927 (TRBV10-3, TRBJ2-6)
CALSESTAPSGANVLTF

SEQ ID NO: 173855 - protein, 14 aa, Homo sapiens
  CDR3 for alpha chain variable domain of TCR clone 86928 (TRAV23/DV6, TRAJ13)
CAAMYSGGYQKVTF

SEQ ID NO: 173856 - protein, 14 aa, Homo sapiens
  CDR3 for beta chain variable domain of TCR clone 86928 (TRBV7-9, TRBJ2-1)
CASSPRDALYEQFF

SEQ ID NO: 173857 - protein, 13 aa, Homo sapiens
  CDR3 for alpha chain variable domain of TCR clone 86929 (TRAV26-2, TRAJ47)
CILPMEYGNKLVF

SEQ ID NO: 173858 - protein, 17 aa, Homo sapiens
  CDR3 for beta chain variable domain of TCR clone 86929 (TRBV13, TRBJ2-3)
CASSLSRVAGGRNTQYF

SEQ ID NO: 173859 - protein, 13 aa, Homo sapiens
  CDR3 for alpha chain variable domain of TCR clone 86930 (TRAV12-1, TRAJ29)
CVVNGPGNTPLVF

SEQ ID NO: 173860 - protein, 18 aa, Homo sapiens
  CDR3 for beta chain variable domain of TCR clone 86930 (TRBV7-2, TRBJ2-5)
CASSRGGVGDPVLRARHA

SEQ ID NO: 173861 - protein, 13 aa, Homo sapiens
  CDR3 for alpha chain variable domain of TCR clone 86931 (TRAV25, TRAJ54)
CAGTIQGAQKLVF

SEQ ID NO: 173862 - protein, 15 aa, Homo sapiens
  CDR3 for beta chain variable domain of TCR clone 86931 (TRBV19, TRBJ1-5)
CASSILTGENQHQHF

SEQ ID NO: 173863 - protein, 13 aa, Homo sapiens
  CDR3 for alpha chain variable domain of TCR clone 86932 (TRAV27, TRAJ6)
CAGGTRGSYIPTF

SEQ ID NO: 173864 - protein, 15 aa, Homo sapiens
  CDR3 for beta chain variable domain of TCR clone 86932 (TRBV5-7, TRBJ2-7)
CASSLGQGRGHEQYF

SEQ ID NO: 173865 - protein, 14 aa, Homo sapiens
  CDR3 for alpha chain variable domain of TCR clone 86933 (TRAV1-2, TRAJ16)
CAVNRFSDGQKLLF

SEQ ID NO: 173866 - protein, 14 aa, Homo sapiens
  CDR3 for beta chain variable domain of TCR clone 86933 (TRBV13, TRBJ2-5)
CASRLGRGQETQYF

SEQ ID NO: 173867 - protein, 16 aa, Homo sapiens
  CDR3 for alpha chain variable domain of TCR clone 86934 (TRAV12-2, TRAJ18)
CAVTTDRGSTLGRLYF

SEQ ID NO: 173868 - protein, 16 aa, Homo sapiens
  CDR3 for beta chain variable domain of TCR clone 86934 (TRBV12-5, TRBJ2-5)
CASGPRTSGNQETQYF

SEQ ID NO: 173869 - protein, 17 aa, Homo sapiens
  CDR3 for alpha chain variable domain of TCR clone 86935 (TRAV13-1, TRAJ23)
CAASKRFHRLRKAYLRT

SEQ ID NO: 173870 - protein, 16 aa, Homo sapiens
  CDR3 for beta chain variable domain of TCR clone 86935 (TRBV25-1, TRBJ2-7)
CASSELTGGGIYEQYF

SEQ ID NO: 173871 - protein, 16 aa, Homo sapiens
  CDR3 for alpha chain variable domain of TCR clone 86936 (TRAV27, TRAJ53)
CAAPEGSGGSIYKLTF

SEQ ID NO: 173872 - protein, 14 aa, Homo sapiens
  CDR3 for beta chain variable domain of TCR clone 86936 (TRBV4-3, TRBJ1-5)
CASSQGGQGWPQHF

SEQ ID NO: 173873 - protein, 13 aa, Homo sapiens
  CDR3 for alpha chain variable domain of TCR clone 86937 (TRAV36/DV7, TRAJ37)
CAVFSSNTGKLIF

SEQ ID NO: 173874 - protein, 17 aa, Homo sapiens
  CDR3 for beta chain variable domain of TCR clone 86937 (TRBV5-1, TRBJ2-2)
CASSLAGLSGGTGELFF

SEQ ID NO: 173875 - protein, 23 aa, Homo sapiens
  CDR3 for alpha chain variable domain of TCR clone 86938 (TRAV8-6, TRAJ38)
CAVRNAGNNHIQNPDPAVYQLRD

SEQ ID NO: 173876 - protein, 13 aa, Homo sapiens
  CDR3 for beta chain variable domain of TCR clone 86938 (TRBV4-1, TRBJ1-1)
CASSQAGNTEAFF

SEQ ID NO: 173877 - protein, 12 aa, Homo sapiens
  CDR3 for alpha chain variable domain of TCR clone 86939 (TRAV12-3, TRAJ32)
CAGGGATNKLIF

SEQ ID NO: 173878 - protein, 17 aa, Homo sapiens
  CDR3 for beta chain variable domain of TCR clone 86939 (TRBV28, TRBJ2-5)
CASSTTEGDALQETQYF

SEQ ID NO: 173879 - protein, 13 aa, Homo sapiens
  CDR3 for alpha chain variable domain of TCR clone 86940 (TRAV2, TRAJ15)
CAVASQAGTALIF

SEQ ID NO: 173880 - protein, 16 aa, Homo sapiens
  CDR3 for beta chain variable domain of TCR clone 86940 (TRBV11-1, TRBJ2-2)
CASSAEGLKNTGELFF

SEQ ID NO: 173881 - protein, 14 aa, Homo sapiens
  CDR3 for alpha chain variable domain of TCR clone 86941 (TRAV1-2, TRAJ16)
CAVNRFSDGQKLLF

SEQ ID NO: 173882 - protein, 14 aa, Homo sapiens
  CDR3 for beta chain variable domain of TCR clone 86941 (TRBV7-3, TRBJ2-1)
CASSLAGGTNEQFL

SEQ ID NO: 173883 - protein, 16 aa, Homo sapiens
  CDR3 for alpha chain variable domain of TCR clone 86942 (TRAV8-3, TRAJ44)
CAVGPLNTGTASKLTF

SEQ ID NO: 173884 - protein, 18 aa, Homo sapiens
  CDR3 for beta chain variable domain of TCR clone 86942 (TRBV3-1, TRBJ2-1)
CASSQALPGRPLFDEQFF

SEQ ID NO: 173885 - protein, 15 aa, Homo sapiens
  CDR3 for alpha chain variable domain of TCR clone 86943 (TRAV2, TRAJ22)
CAVGFFSGSARQLTF

SEQ ID NO: 173886 - protein, 15 aa, Homo sapiens
  CDR3 for beta chain variable domain of TCR clone 86943 (TRBV2, TRBJ2-1)
CASSELAGGTMSSSS

SEQ ID NO: 173887 - protein, 11 aa, Homo sapiens
  CDR3 for alpha chain variable domain of TCR clone 86944 (TRAV8-3, TRAJ48)
CGQFGNEKLTF

SEQ ID NO: 173888 - protein, 15 aa, Homo sapiens
  CDR3 for beta chain variable domain of TCR clone 86944 (TRBV28, TRBJ2-4)
CAAGSGTLLMGIQYF

SEQ ID NO: 173889 - protein, 14 aa, Homo sapiens
  CDR3 for alpha chain variable domain of TCR clone 86945 (TRAV3, TRAJ40)
CAVRDRRGTYKYFF

SEQ ID NO: 173890 - protein, 15 aa, Homo sapiens
  CDR3 for beta chain variable domain of TCR clone 86945 (TRBV11-1, TRBJ1-3)
CASTDPRAFGNTIYF

SEQ ID NO: 173891 - protein, 12 aa, Homo sapiens
  CDR3 for alpha chain variable domain of TCR clone 86946 (TRAV12-3, TRAJ17)
CAMTLTGNKLTF

SEQ ID NO: 173892 - protein, 16 aa, Homo sapiens
  CDR3 for beta chain variable domain of TCR clone 86946 (TRBV20-1, TRBJ2-1)
CSARDLKQGMNNEQFF

SEQ ID NO: 173893 - protein, 14 aa, Homo sapiens
  CDR3 for alpha chain variable domain of TCR clone 86947 (TRAV1-2, TRAJ8)
CAVREDTVFQKLVF

SEQ ID NO: 173894 - protein, 12 aa, Homo sapiens
  CDR3 for beta chain variable domain of TCR clone 86947 (TRBV29-1, TRBJ2-3)
CSVTGGADTQYF

SEQ ID NO: 173895 - protein, 16 aa, Homo sapiens
  CDR3 for alpha chain variable domain of TCR clone 86948 (TRAV29/DV5, TRAJ36)
CAASAGVETGATNLFF

SEQ ID NO: 173896 - protein, 16 aa, Homo sapiens
  CDR3 for beta chain variable domain of TCR clone 86948 (TRBV5-1, TRBJ2-3)
CASSLGLAVYTDTQYF

SEQ ID NO: 173897 - protein, 13 aa, Homo sapiens
  CDR3 for alpha chain variable domain of TCR clone 86949 (TRAV2, TRAJ40)
CAVVTSGPYKYIF

SEQ ID NO: 173898 - protein, 14 aa, Homo sapiens
  CDR3 for beta chain variable domain of TCR clone 86949 (TRBV19, TRBJ2-1)
CASPTVVLSGEQFF

SEQ ID NO: 173899 - protein, 14 aa, Homo sapiens
  CDR3 for alpha chain variable domain of TCR clone 86950 (TRAV8-1, TRAJ5)
CAVSMDTGRRALTF

SEQ ID NO: 173900 - protein, 16 aa, Homo sapiens
  CDR3 for beta chain variable domain of TCR clone 86950 (TRBV4-3, TRBJ2-1)
CTSSPALDRGVNEQFF

SEQ ID NO: 173901 - protein, 11 aa, Homo sapiens
  CDR3 for alpha chain variable domain of TCR clone 86951 (TRAV2, TRAJ13)
CASGGYQKVTF

SEQ ID NO: 173902 - protein, 18 aa, Homo sapiens
  CDR3 for beta chain variable domain of TCR clone 86951 (TRBV19, TRBJ2-6)
CASIGPTSGGSWANVLTF

SEQ ID NO: 173903 - protein, 15 aa, Homo sapiens
  CDR3 for alpha chain variable domain of TCR clone 86952 (TRAV8-3, TRAJ27)
CAVGPSKTNAGKSTF

SEQ ID NO: 173904 - protein, 15 aa, Homo sapiens
  CDR3 for beta chain variable domain of TCR clone 86952 (TRBV27, TRBJ2-1)
CASSNGGGSSNGQFF

SEQ ID NO: 173905 - protein, 14 aa, Homo sapiens
  CDR3 for alpha chain variable domain of TCR clone 86953 (TRAV26-1, TRAJ44)
CIDRPTGTASKLTF

SEQ ID NO: 173906 - protein, 14 aa, Homo sapiens
  CDR3 for beta chain variable domain of TCR clone 86953 (TRBV18, TRBJ1-2)
CASSPPGQAYGYTF

SEQ ID NO: 173907 - protein, 14 aa, Homo sapiens
  CDR3 for alpha chain variable domain of TCR clone 86954 (TRAV13-1, TRAJ39)
CAASYNNAGSMLTF

SEQ ID NO: 173908 - protein, 13 aa, Homo sapiens
  CDR3 for beta chain variable domain of TCR clone 86954 (TRBV24-1, TRBJ1-4)
CATNNGRSEKLFF

SEQ ID NO: 173909 - protein, 14 aa, Homo sapiens
  CDR3 for alpha chain variable domain of TCR clone 86955 (TRAV3, TRAJ9)
CAVRLNTGGFKTIF

SEQ ID NO: 173910 - protein, 16 aa, Homo sapiens
  CDR3 for beta chain variable domain of TCR clone 86955 (TRBV12-5, TRBJ2-5)
CASGPRTSGKQETQYF

SEQ ID NO: 173911 - protein, 12 aa, Homo sapiens
  CDR3 for alpha chain variable domain of TCR clone 86956 (TRAV8-3, TRAJ20)
CAVDFNDYKLSF

SEQ ID NO: 173912 - protein, 16 aa, Homo sapiens
  CDR3 for beta chain variable domain of TCR clone 86956 (TRBV10-3, TRBJ2-7)
CAISADFADRPYEQYF

SEQ ID NO: 173913 - protein, 11 aa, Homo sapiens
  CDR3 for alpha chain variable domain of TCR clone 86957 (TRAV3, TRAJ21)
CAAGNFNKFYF

SEQ ID NO: 173914 - protein, 14 aa, Homo sapiens
  CDR3 for beta chain variable domain of TCR clone 86957 (TRBV25-1, TRBJ1-1)
CASTHLGGNTEAFF

SEQ ID NO: 173915 - protein, 13 aa, Homo sapiens
  CDR3 for alpha chain variable domain of TCR clone 86958 (TRAV30, TRAJ6)
CGFIEGGSYIPTF

SEQ ID NO: 173916 - protein, 13 aa, Homo sapiens
  CDR3 for beta chain variable domain of TCR clone 86958 (TRBV5-4, TRBJ2-5)
CTSSPVSQETQYF

SEQ ID NO: 173917 - protein, 11 aa, Homo sapiens
  CDR3 for alpha chain variable domain of TCR clone 86959 (TRAV21, TRAJ34)
CAHYNTDKLIF

SEQ ID NO: 173918 - protein, 11 aa, Homo sapiens
  CDR3 for beta chain variable domain of TCR clone 86959 (TRBV29-1, TRBJ2-5)
CSEDRTETQYF

SEQ ID NO: 173919 - protein, 16 aa, Homo sapiens
  CDR3 for alpha chain variable domain of TCR clone 86960 (TRAV3, TRAJ37)
CAVRGKGSGNTGKLIF

SEQ ID NO: 173920 - protein, 15 aa, Homo sapiens
  CDR3 for beta chain variable domain of TCR clone 86960 (TRBV7-9, TRBJ2-2)
CASGALDTFPGELFF

SEQ ID NO: 173921 - protein, 13 aa, Homo sapiens
  CDR3 for alpha chain variable domain of TCR clone 86961 (TRAV3, TRAJ20)
CAVRDTPRYKLSF

SEQ ID NO: 173922 - protein, 13 aa, Homo sapiens
  CDR3 for beta chain variable domain of TCR clone 86961 (TRBV7-9, TRBJ1-2)
CASSLKQNYGYTF

SEQ ID NO: 173923 - protein, 15 aa, Homo sapiens
  CDR3 for alpha chain variable domain of TCR clone 86962 (TRAV8-6, TRAJ37)
CAVIFSSGNTGKLIF

SEQ ID NO: 173924 - protein, 15 aa, Homo sapiens
  CDR3 for beta chain variable domain of TCR clone 86962 (TRBV25-1, TRBJ2-4)
CASSKTESAKNIQYF

SEQ ID NO: 173925 - protein, 15 aa, Homo sapiens
  CDR3 for alpha chain variable domain of TCR clone 86963 (TRAV8-6, TRAJ6)
CAVSFTSGGSYIPKF

SEQ ID NO: 173926 - protein, 13 aa, Homo sapiens
  CDR3 for beta chain variable domain of TCR clone 86963 (TRBV29-1, TRBJ2-1)
CSVEGGRVNEQFF

SEQ ID NO: 173927 - protein, 13 aa, Homo sapiens
  CDR3 for alpha chain variable domain of TCR clone 86964 (TRAV12-1, TRAJ7)
CVVNMRGNNRVAF

SEQ ID NO: 173928 - protein, 15 aa, Homo sapiens
  CDR3 for beta chain variable domain of TCR clone 86964 (TRBV27, TRBJ2-3)
CASSLGLAATDTQYF

SEQ ID NO: 173929 - protein, 11 aa, Homo sapiens
  CDR3 for alpha chain variable domain of TCR clone 86965 (TRAV21, TRAJ41)
CAVRSGFALNF

SEQ ID NO: 173930 - protein, 13 aa, Homo sapiens
  CDR3 for beta chain variable domain of TCR clone 86965 (TRBV7-9, TRBJ1-2)
CASSLKQNYGYTF

SEQ ID NO: 173931 - protein, 16 aa, Homo sapiens
  CDR3 for alpha chain variable domain of TCR clone 86966 (TRAV12-3, TRAJ53)
CAMSPGSGGSNYKLTL

SEQ ID NO: 173932 - protein, 12 aa, Homo sapiens
  CDR3 for beta chain variable domain of TCR clone 86966 (TRBV11-2, TRBJ2-2)
CASSLGGGELFF

SEQ ID NO: 173933 - protein, 14 aa, Homo sapiens
  CDR3 for alpha chain variable domain of TCR clone 86967 (TRAV38-1, TRAJ40)
CALRPTSGTYKYIF

SEQ ID NO: 173934 - protein, 11 aa, Homo sapiens
  CDR3 for beta chain variable domain of TCR clone 86967 (TRBV27, TRBJ2-7)
CASSLGYEQYF

SEQ ID NO: 173935 - protein, 16 aa, Homo sapiens
  CDR3 for alpha chain variable domain of TCR clone 86968 (TRAV35, TRAJ37)
CWAFLRGSSNTGKLIF

SEQ ID NO: 173936 - protein, 13 aa, Homo sapiens
  CDR3 for beta chain variable domain of TCR clone 86968 (TRBV2, TRBJ1-2)
CASSVRGNYGYTC

SEQ ID NO: 173937 - protein, 15 aa, Homo sapiens
  CDR3 for alpha chain variable domain of TCR clone 86969 (TRAV25, TRAJ53)
CPTSNSGGSNDKLTF

SEQ ID NO: 173938 - protein, 14 aa, Homo sapiens
  CDR3 for beta chain variable domain of TCR clone 86969 (TRBV11-2, TRBJ2-3)
CASSRLARTDTQYF

SEQ ID NO: 173939 - protein, 15 aa, Homo sapiens
  CDR3 for alpha chain variable domain of TCR clone 86970 (TRAV12-1, TRAJ42)
CVVTRDGGSQGNLIF

SEQ ID NO: 173940 - protein, 14 aa, Homo sapiens
  CDR3 for beta chain variable domain of TCR clone 86970 (TRBV11-2, TRBJ2-3)
CSSSLGGGANTQYF

SEQ ID NO: 173941 - protein, 12 aa, Homo sapiens
  CDR3 for alpha chain variable domain of TCR clone 86971 (TRAV27, TRAJ35)
CAGADFGNVLHC

SEQ ID NO: 173942 - protein, 15 aa, Homo sapiens
  CDR3 for beta chain variable domain of TCR clone 86971 (TRBV20-1, TRBJ2-7)
CSARDWVSGMDEQYF

SEQ ID NO: 173943 - protein, 14 aa, Homo sapiens
  CDR3 for alpha chain variable domain of TCR clone 86972 (TRAV1-2, TRAJ16)
CAVYRFSDGQKLLF

SEQ ID NO: 173944 - protein, 15 aa, Homo sapiens
  CDR3 for beta chain variable domain of TCR clone 86972 (TRBV7-9, TRBJ1-6)
CASSSPGRGNSPLHF

SEQ ID NO: 173945 - protein, 13 aa, Homo sapiens
  CDR3 for alpha chain variable domain of TCR clone 86973 (TRAV12-3, TRAJ13)
CALTSGGYQKVTF

SEQ ID NO: 173946 - protein, 13 aa, Homo sapiens
  CDR3 for beta chain variable domain of TCR clone 86973 (TRBV20-1, TRBJ2-2)
CSALSGGAGELFF

SEQ ID NO: 173947 - protein, 12 aa, Homo sapiens
  CDR3 for alpha chain variable domain of TCR clone 86974 (TRAV1-2, TRAJ29)
CAVRNLNTPLVF

SEQ ID NO: 173948 - protein, 16 aa, Homo sapiens
  CDR3 for beta chain variable domain of TCR clone 86974 (TRBV27, TRBJ2-2)
CASSCRGLVRTGELFF

SEQ ID NO: 173949 - protein, 12 aa, Homo sapiens
  CDR3 for alpha chain variable domain of TCR clone 86975 (TRAV3, TRAJ43)
CAGRDPNNDMRF

SEQ ID NO: 173950 - protein, 13 aa, Homo sapiens
  CDR3 for beta chain variable domain of TCR clone 86975 (TRBV19, TRBJ1-2)
CASSVPGQDGYTF

SEQ ID NO: 173951 - protein, 11 aa, Homo sapiens
  CDR3 for alpha chain variable domain of TCR clone 86976 (TRAV35, TRAJ30)
CAGPGDDKIIF

SEQ ID NO: 173952 - protein, 18 aa, Homo sapiens
  CDR3 for beta chain variable domain of TCR clone 86976 (TRBV7-6, TRBJ2-1)
CASSPRTSGMSSYNERFF

SEQ ID NO: 173953 - protein, 15 aa, Homo sapiens
  CDR3 for alpha chain variable domain of TCR clone 86977 (TRAV34, TRAJ38)
CGADFTPGNNRKLIW

SEQ ID NO: 173954 - protein, 16 aa, Homo sapiens
  CDR3 for beta chain variable domain of TCR clone 86977 (TRBV12-5, TRBJ2-5)
CASGPRTSGHQETQYF

SEQ ID NO: 173955 - protein, 11 aa, Homo sapiens
  CDR3 for alpha chain variable domain of TCR clone 86978 (TRAV3, TRAJ21)
CAVGNFNKFCF

SEQ ID NO: 173956 - protein, 14 aa, Homo sapiens
  CDR3 for beta chain variable domain of TCR clone 86978 (TRBV20-1, TRBJ1-1)
CSAQTRIGGTEAFF

SEQ ID NO: 173957 - protein, 17 aa, Homo sapiens
  CDR3 for alpha chain variable domain of TCR clone 86979 (TRAV12-2, TRAJ36)
CAVKDNLFFGTGTRLTV

SEQ ID NO: 173958 - protein, 15 aa, Homo sapiens
  CDR3 for beta chain variable domain of TCR clone 86979 (TRBV28, TRBJ1-1)
CASTSTRGLNTEAFF

SEQ ID NO: 173959 - protein, 13 aa, Homo sapiens
  CDR3 for alpha chain variable domain of TCR clone 86980 (TRAV2, TRAJ13)
CAVESGGYQKVTF

SEQ ID NO: 173960 - protein, 13 aa, Homo sapiens
  CDR3 for beta chain variable domain of TCR clone 86980 (TRBV28, TRBJ2-5)
CASSFAGGETRYF

SEQ ID NO: 173961 - protein, 17 aa, Homo sapiens
  CDR3 for alpha chain variable domain of TCR clone 86981 (TRAV3, TRAJ6)
CAVRDGPRAGGSYIPTF

SEQ ID NO: 173962 - protein, 19 aa, Homo sapiens
  CDR3 for beta chain variable domain of TCR clone 86981 (TRBV19, TRBJ2-2)
CASTRPGLAGGRVTGELFF

SEQ ID NO: 173963 - protein, 14 aa, Homo sapiens
  CDR3 for alpha chain variable domain of TCR clone 86982 (TRAV1-2, TRAJ8)
CAVREDTGFQKLVF

SEQ ID NO: 173964 - protein, 13 aa, Homo sapiens
  CDR3 for beta chain variable domain of TCR clone 86982 (TRBV10-3, TRBJ2-7)
CASTLAVNYEQYF

SEQ ID NO: 173965 - protein, 12 aa, Homo sapiens
  CDR3 for alpha chain variable domain of TCR clone 86983 (TRAV12-3, TRAJ17)
CAMTLTGNKLTF

SEQ ID NO: 173966 - protein, 16 aa, Homo sapiens
  CDR3 for beta chain variable domain of TCR clone 86983 (TRBV4-3, TRBJ2-1)
CASSPALDRGVNEQFF

SEQ ID NO: 173967 - protein, 11 aa, Homo sapiens
  CDR3 for alpha chain variable domain of TCR clone 86984 (TRAV21, TRAJ31)
CAVRNNARLMF

SEQ ID NO: 173968 - protein, 16 aa, Homo sapiens
  CDR3 for beta chain variable domain of TCR clone 86984 (TRBV2, TRBJ2-2)
CASRRPSGTNTGELFF

SEQ ID NO: 173969 - protein, 14 aa, Homo sapiens
  CDR3 for alpha chain variable domain of TCR clone 86985 (TRAV12-2, TRAJ45)
CALPERGGADGLTF

SEQ ID NO: 173970 - protein, 15 aa, Homo sapiens
  CDR3 for beta chain variable domain of TCR clone 86985 (TRBV5-1, TRBJ1-1)
CASISTTGTNTEAFF

SEQ ID NO: 173971 - protein, 20 aa, Homo sapiens
  CDR3 for alpha chain variable domain of TCR clone 86986 (TRAV12-3, TRAJ41)
SLFIRDSQPSDSATPEALNF

SEQ ID NO: 173972 - protein, 16 aa, Homo sapiens
  CDR3 for beta chain variable domain of TCR clone 86986 (TRBV19, TRBJ2-1)
CASSIQGGGSYNEQFF

SEQ ID NO: 173973 - protein, 17 aa, Homo sapiens
  CDR3 for alpha chain variable domain of TCR clone 86987 (TRAV13-1, TRAJ52)
CAASSGAGGTSYGKLTF

SEQ ID NO: 173974 - protein, 16 aa, Homo sapiens
  CDR3 for beta chain variable domain of TCR clone 86987 (TRBV10-3, TRBJ2-1)
CAISGVGDGGGGEQFF

SEQ ID NO: 173975 - protein, 15 aa, Homo sapiens
  CDR3 for alpha chain variable domain of TCR clone 86988 (TRAV26-1, TRAJ15)
CIVRAANQARTALIF

SEQ ID NO: 173976 - protein, 15 aa, Homo sapiens
  CDR3 for beta chain variable domain of TCR clone 86988 (TRBV20-1, TRBJ1-1)
CSARSAATSNTEAFF

SEQ ID NO: 173977 - protein, 12 aa, Homo sapiens
  CDR3 for alpha chain variable domain of TCR clone 86989 (TRAV2, TRAJ33)
CAFMDSNHQLIW

SEQ ID NO: 173978 - protein, 16 aa, Homo sapiens
  CDR3 for beta chain variable domain of TCR clone 86989 (TRBV2, TRBJ2-7)
CASSEPWTGPSYEQYF

SEQ ID NO: 173979 - protein, 16 aa, Homo sapiens
  CDR3 for alpha chain variable domain of TCR clone 86990 (TRAV12-3, TRAJ58)
CAMTDTEETSGSRLTF

SEQ ID NO: 173980 - protein, 22 aa, Homo sapiens
  CDR3 for beta chain variable domain of TCR clone 86990 (TRBV23-1, TRBJ2-7)
CASSRRLDSGQGHVGGGYEQYF

SEQ ID NO: 173981 - protein, 14 aa, Homo sapiens
  CDR3 for alpha chain variable domain of TCR clone 86991 (TRAV8-3, TRAJ6)
CAVGASGGSYIPTF

SEQ ID NO: 173982 - protein, 17 aa, Homo sapiens
  CDR3 for beta chain variable domain of TCR clone 86991 (TRBV18, TRBJ2-2)
CASSPSDPWQNTGELFL

SEQ ID NO: 173983 - protein, 13 aa, Homo sapiens
  CDR3 for alpha chain variable domain of TCR clone 86992 (TRAV8-3, TRAJ28)
CAVGAVGSYKLTF

SEQ ID NO: 173984 - protein, 15 aa, Homo sapiens
  CDR3 for beta chain variable domain of TCR clone 86992 (TRBV7-9, TRBJ1-5)
CASSQGHQPKQPQHF

SEQ ID NO: 173985 - protein, 13 aa, Homo sapiens
  CDR3 for alpha chain variable domain of TCR clone 86993 (TRAV3, TRAJ21)
CAVREPDFNKFYF

SEQ ID NO: 173986 - protein, 18 aa, Homo sapiens
  CDR3 for beta chain variable domain of TCR clone 86993 (TRBV7-7, TRBJ2-1)
CASSLALTSGRSYNEQFF

SEQ ID NO: 173987 - protein, 13 aa, Homo sapiens
  CDR3 for alpha chain variable domain of TCR clone 86994 (TRAV27, TRAJ41)
CAGEGNSGYALNF

SEQ ID NO: 173988 - protein, 12 aa, Homo sapiens
  CDR3 for beta chain variable domain of TCR clone 86994 (TRBV2, TRBJ2-7)
CASTYRTDEQYF

SEQ ID NO: 173989 - protein, 14 aa, Homo sapiens
  CDR3 for alpha chain variable domain of TCR clone 86995 (TRAV3, TRAJ21)
CALGRGSTNFTLDL

SEQ ID NO: 173990 - protein, 14 aa, Homo sapiens
  CDR3 for beta chain variable domain of TCR clone 86995 (TRBV7-9, TRBJ2-4)
CASSLATGGNIQYF

SEQ ID NO: 173991 - protein, 13 aa, Homo sapiens
  CDR3 for alpha chain variable domain of TCR clone 86996 (TRAV35, TRAJ42)
CAGFPGSQENLIF

SEQ ID NO: 173992 - protein, 13 aa, Homo sapiens
  CDR3 for beta chain variable domain of TCR clone 86996 (TRBV29-1, TRBJ2-1)
CSVEGGRVNEQFF

SEQ ID NO: 173993 - protein, 14 aa, Homo sapiens
  CDR3 for alpha chain variable domain of TCR clone 86997 (TRAV1-2, TRAJ16)
CAVNRFSDGQRLLF

SEQ ID NO: 173994 - protein, 15 aa, Homo sapiens
  CDR3 for beta chain variable domain of TCR clone 86997 (TRBV20-1, TRBJ2-7)
CSARDRVSGMDEQYF

SEQ ID NO: 173995 - protein, 16 aa, Homo sapiens
  CDR3 for alpha chain variable domain of TCR clone 86998 (TRAV30, TRAJ24)
CGTEIVDADSWGKFKC

SEQ ID NO: 173996 - protein, 14 aa, Homo sapiens
  CDR3 for beta chain variable domain of TCR clone 86998 (TRBV12-5, TRBJ2-5)
CASGSRTHQETQYF

SEQ ID NO: 173997 - protein, 14 aa, Homo sapiens
  CDR3 for alpha chain variable domain of TCR clone 86999 (TRAV1-2, TRAJ16)
CAVDRFSDGQKLLF

SEQ ID NO: 173998 - protein, 12 aa, Homo sapiens
  CDR3 for beta chain variable domain of TCR clone 86999 (TRBV28, TRBJ2-6)
CAIQAGANVLTF

SEQ ID NO: 173999 - protein, 14 aa, Homo sapiens
  CDR3 for alpha chain variable domain of TCR clone 87000 (TRAV13-1, TRAJ13)
CAASRVGGYQKVTF

SEQ ID NO: 174000 - protein, 16 aa, Homo sapiens
  CDR3 for beta chain variable domain of TCR clone 87000 (TRBV15, TRBJ1-5)
CHQQAPPGTRNQPQHF

SEQ ID NO: 174001 - protein, 14 aa, Homo sapiens
  CDR3 for alpha chain variable domain of TCR clone 87001 (TRAV26-1, TRAJ38)
CIADNAGNNRKLIW

SEQ ID NO: 174002 - protein, 17 aa, Homo sapiens
  CDR3 for beta chain variable domain of TCR clone 87001 (TRBV15, TRBJ1-2)
CATSGREIDVVNYGYTF

SEQ ID NO: 174003 - protein, 14 aa, Homo sapiens
  CDR3 for alpha chain variable domain of TCR clone 87002 (TRAV8-1, TRAJ34)
CAVITTYNNDKLIF

SEQ ID NO: 174004 - protein, 14 aa, Homo sapiens
  CDR3 for beta chain variable domain of TCR clone 87002 (TRBV11-3, TRBJ1-3)
CASSHNGQGNTKYF

SEQ ID NO: 174005 - protein, 14 aa, Homo sapiens
  CDR3 for alpha chain variable domain of TCR clone 87003 (TRAV2, TRAJ39)
CAVEGDNAGNMLTF

SEQ ID NO: 174006 - protein, 14 aa, Homo sapiens
  CDR3 for beta chain variable domain of TCR clone 87003 (TRBV28, TRBJ2-4)
CASSPRARGNSQYF

SEQ ID NO: 174007 - protein, 13 aa, Homo sapiens
  CDR3 for alpha chain variable domain of TCR clone 87004 (TRAV13-2, TRAJ8)
CAFMNTGFQKLVF

SEQ ID NO: 174008 - protein, 17 aa, Homo sapiens
  CDR3 for beta chain variable domain of TCR clone 87004 (TRBV28, TRBJ2-1)
CASSAARQALTYNEQFF

SEQ ID NO: 174009 - protein, 15 aa, Homo sapiens
  CDR3 for alpha chain variable domain of TCR clone 87005 (TRAV26-1, TRAJ15)
CIVRAANQAGTALIF

SEQ ID NO: 174010 - protein, 15 aa, Homo sapiens
  CDR3 for beta chain variable domain of TCR clone 87005 (TRBV20-1, TRBJ1-1)
CSARGAATSNTEAFF

SEQ ID NO: 174011 - protein, 14 aa, Homo sapiens
  CDR3 for alpha chain variable domain of TCR clone 87006 (TRAV1-2, TRAJ16)
CAVNRFSDGQKLLF

SEQ ID NO: 174012 - protein, 14 aa, Homo sapiens
  CDR3 for beta chain variable domain of TCR clone 87006 (TRBV7-7, TRBJ2-2)
CASSRDRSTGELFF

SEQ ID NO: 174013 - protein, 14 aa, Homo sapiens
  CDR3 for alpha chain variable domain of TCR clone 87007 (TRAV1-2, TRAJ16)
CAVNRFSDGQKLLF

SEQ ID NO: 174014 - protein, 15 aa, Homo sapiens
  CDR3 for beta chain variable domain of TCR clone 87007 (TRBV19, TRBJ1-5)
RASSIVWADNQPQHF

SEQ ID NO: 174015 - protein, 17 aa, Homo sapiens
  CDR3 for alpha chain variable domain of TCR clone 87008 (TRAV26-1, TRAJ53)
CIVRVDDSGGSNYKLTF

SEQ ID NO: 174016 - protein, 15 aa, Homo sapiens
  CDR3 for beta chain variable domain of TCR clone 87008 (TRBV20-1, TRBJ2-7)
CSARVPAAYFYKQYF

SEQ ID NO: 174017 - protein, 13 aa, Homo sapiens
  CDR3 for alpha chain variable domain of TCR clone 87009 (TRAV12-1, TRAJ40)
CVAPTSGTYKYIF

SEQ ID NO: 174018 - protein, 13 aa, Homo sapiens
  CDR3 for beta chain variable domain of TCR clone 87009 (TRBV4-2, TRBJ1-1)
CASSQAGNTEAFF

SEQ ID NO: 174019 - protein, 10 aa, Homo sapiens
  CDR3 for alpha chain variable domain of TCR clone 87010 (TRAV1-2, TRAJ34)
CAVNTDKLIF

SEQ ID NO: 174020 - protein, 14 aa, Homo sapiens
  CDR3 for beta chain variable domain of TCR clone 87010 (TRBV25-1, TRBJ1-1)
CASTHLGGNTEAFF

SEQ ID NO: 174021 - protein, 14 aa, Homo sapiens
  CDR3 for alpha chain variable domain of TCR clone 87011 (TRAV12-3, TRAJ22)
CAMSLFGSARQLTF

SEQ ID NO: 174022 - protein, 18 aa, Homo sapiens
  CDR3 for beta chain variable domain of TCR clone 87011 (TRBV23-1, TRBJ2-7)
CASSQYRRTDSTSSTSGR

SEQ ID NO: 174023 - protein, 12 aa, Homo sapiens
  CDR3 for alpha chain variable domain of TCR clone 87012 (TRAV3, TRAJ43)
CAVRDPNNDMRF

SEQ ID NO: 174024 - protein, 12 aa, Homo sapiens
  CDR3 for beta chain variable domain of TCR clone 87012 (TRBV7-8, TRBJ2-7)
CASSLGDREQYF

SEQ ID NO: 174025 - protein, 11 aa, Homo sapiens
  CDR3 for alpha chain variable domain of TCR clone 87013 (TRAV21, TRAJ34)
CAHYNTDKPIF

SEQ ID NO: 174026 - protein, 13 aa, Homo sapiens
  CDR3 for beta chain variable domain of TCR clone 87013 (TRBV20-1, TRBJ2-7)
CSADPGATYEQYF

SEQ ID NO: 174027 - protein, 15 aa, Homo sapiens
  CDR3 for alpha chain variable domain of TCR clone 87014 (TRAV1-2, TRAJ35)
CAVRDPGGFGNVLHC

SEQ ID NO: 174028 - protein, 14 aa, Homo sapiens
  CDR3 for beta chain variable domain of TCR clone 87014 (TRBV5-1, TRBJ2-1)
CASSLEDRFDEQFF

SEQ ID NO: 174029 - protein, 11 aa, Homo sapiens
  CDR3 for alpha chain variable domain of TCR clone 87015 (TRAV12-1, TRAJ47)
CVVNDGNKLVF

SEQ ID NO: 174030 - protein, 14 aa, Homo sapiens
  CDR3 for beta chain variable domain of TCR clone 87015 (TRBV19, TRBJ2-1)
CASPTFVLSGEQFF

SEQ ID NO: 174031 - protein, 13 aa, Homo sapiens
  CDR3 for alpha chain variable domain of TCR clone 87016 (TRAV4, TRAJ33)
CLVGDMNNYQLIW

SEQ ID NO: 174032 - protein, 14 aa, Homo sapiens
  CDR3 for beta chain variable domain of TCR clone 87016 (TRBV7-9, TRBJ1-1)
CASSLGGAKTEAFF

SEQ ID NO: 174033 - protein, 16 aa, Homo sapiens
  CDR3 for alpha chain variable domain of TCR clone 87017 (TRAV3, TRAJ28)
CAVLPRSGAGSYQLTF

SEQ ID NO: 174034 - protein, 13 aa, Homo sapiens
  CDR3 for beta chain variable domain of TCR clone 87017 (TRBV12-4, TRBJ2-5)
CASRLAVRETQYF

SEQ ID NO: 174035 - protein, 11 aa, Homo sapiens
  CDR3 for alpha chain variable domain of TCR clone 87018 (TRAV1-2, TRAJ40)
CAVPGTYKYIF

SEQ ID NO: 174036 - protein, 16 aa, Homo sapiens
  CDR3 for beta chain variable domain of TCR clone 87018 (TRBV7-9, TRBJ2-1)
CASSDVAGGSYNEQFF

SEQ ID NO: 174037 - protein, 15 aa, Homo sapiens
  CDR3 for alpha chain variable domain of TCR clone 87019 (TRAV26-1, TRAJ22)
CIVRVSFWFCKATDL

SEQ ID NO: 174038 - protein, 13 aa, Homo sapiens
  CDR3 for beta chain variable domain of TCR clone 87019 (TRBV10-3, TRBJ2-7)
CASKLAVNYEQYF

SEQ ID NO: 174039 - protein, 11 aa, Homo sapiens
  CDR3 for alpha chain variable domain of TCR clone 87020 (TRAV4, TRAJ23)
CLVAPGGKLIF

SEQ ID NO: 174040 - protein, 13 aa, Homo sapiens
  CDR3 for beta chain variable domain of TCR clone 87020 (TRBV7-9, TRBJ1-2)
CASSLKQNYGYTV

SEQ ID NO: 174041 - protein, 12 aa, Homo sapiens
  CDR3 for alpha chain variable domain of TCR clone 87021 (TRAV27, TRAJ13)
CAGVRGYQKVTF

SEQ ID NO: 174042 - protein, 16 aa, Homo sapiens
  CDR3 for beta chain variable domain of TCR clone 87021 (TRBV28, TRBJ2-1)
CASSSSYSGSLNDQFF

SEQ ID NO: 174043 - protein, 15 aa, Homo sapiens
  CDR3 for alpha chain variable domain of TCR clone 87022 (TRAV35, TRAJ33)
CAGQPPRYSNYQLIW

SEQ ID NO: 174044 - protein, 15 aa, Homo sapiens
  CDR3 for beta chain variable domain of TCR clone 87022 (TRBV20-1, TRBJ2-7)
CSARDRVSGMDEQYF

SEQ ID NO: 174045 - protein, 14 aa, Homo sapiens
  CDR3 for alpha chain variable domain of TCR clone 87023 (TRAV12-2, TRAJ40)
CAVKIPSGTYKYIF

SEQ ID NO: 174046 - protein, 15 aa, Homo sapiens
  CDR3 for beta chain variable domain of TCR clone 87023 (TRBV2, TRBJ2-1)
CASSELAGSYNEQFF

SEQ ID NO: 174047 - protein, 13 aa, Homo sapiens
  CDR3 for alpha chain variable domain of TCR clone 87024 (TRAV23/DV6, TRAJ22)
CACGAGSARQLTF

SEQ ID NO: 174048 - protein, 17 aa, Homo sapiens
  CDR3 for beta chain variable domain of TCR clone 87024 (TRBV6-5, TRBJ2-3)
CASSYTTGTGRGDTQYF

SEQ ID NO: 174049 - protein, 14 aa, Homo sapiens
  CDR3 for alpha chain variable domain of TCR clone 87025 (TRAV8-4, TRAJ48)
CAVSETFGNEKLTF

SEQ ID NO: 174050 - protein, 12 aa, Homo sapiens
  CDR3 for beta chain variable domain of TCR clone 87025 (TRBV11-2, TRBJ2-2)
CASSLGGGELFF

SEQ ID NO: 174051 - protein, 18 aa, Homo sapiens
  CDR3 for alpha chain variable domain of TCR clone 87026 (TRAV12-3, TRAJ52)
CAMSVGGAGGTSYGKLTF

SEQ ID NO: 174052 - protein, 15 aa, Homo sapiens
  CDR3 for beta chain variable domain of TCR clone 87026 (TRBV27, TRBJ1-6)
CASSFDRGRGSPLHF

SEQ ID NO: 174053 - protein, 14 aa, Homo sapiens
  CDR3 for alpha chain variable domain of TCR clone 87027 (TRAV17, TRAJ33)
CATDARRSNYQLLW

SEQ ID NO: 174054 - protein, 14 aa, Homo sapiens
  CDR3 for beta chain variable domain of TCR clone 87027 (TRBV25-1, TRBJ1-4)
CASSGGGQPEKLFF

SEQ ID NO: 174055 - protein, 16 aa, Homo sapiens
  CDR3 for alpha chain variable domain of TCR clone 87028 (TRAV23/DV6, TRAJ34)
CAASGALSYNTDKLIF

SEQ ID NO: 174056 - protein, 12 aa, Homo sapiens
  CDR3 for beta chain variable domain of TCR clone 87028 (TRBV27, TRBJ2-2)
CASKLFTGELFF

SEQ ID NO: 174057 - protein, 13 aa, Homo sapiens
  CDR3 for alpha chain variable domain of TCR clone 87029 (TRAV1-1, TRAJ23)
CAVVANQGGNLIF

SEQ ID NO: 174058 - protein, 12 aa, Homo sapiens
  CDR3 for beta chain variable domain of TCR clone 87029 (TRBV5-7, TRBJ1-1)
CASSLGRGKAFF

SEQ ID NO: 174059 - protein, 16 aa, Homo sapiens
  CDR3 for alpha chain variable domain of TCR clone 87030 (TRAV26-1, TRAJ45)
CIVEKYSGGGADGLTL

SEQ ID NO: 174060 - protein, 16 aa, Homo sapiens
  CDR3 for beta chain variable domain of TCR clone 87030 (TRBV10-3, TRBJ1-6)
CAISERRGQGNSPLHF

SEQ ID NO: 174061 - protein, 18 aa, Homo sapiens
  CDR3 for alpha chain variable domain of TCR clone 87031 (TRAV21, TRAJ52)
CAVMPSPAGGTSYGRLTF

SEQ ID NO: 174062 - protein, 17 aa, Homo sapiens
  CDR3 for beta chain variable domain of TCR clone 87031 (TRBV13, TRBJ2-3)
CASSLSRVAGGRNTQYF

SEQ ID NO: 174063 - protein, 13 aa, Homo sapiens
  CDR3 for alpha chain variable domain of TCR clone 87032 (TRAV1-2, TRAJ9)
CAALNTGGFKTIF

SEQ ID NO: 174064 - protein, 10 aa, Homo sapiens
  CDR3 for beta chain variable domain of TCR clone 87032 (TRBV13, TRBJ2-3)
AGSPTDTQYF

SEQ ID NO: 174065 - protein, 14 aa, Homo sapiens
  CDR3 for alpha chain variable domain of TCR clone 87033 (TRAV17, TRAJ34)
CATDSLEGTDKLIF

SEQ ID NO: 174066 - protein, 13 aa, Homo sapiens
  CDR3 for beta chain variable domain of TCR clone 87033 (TRBV11-2, TRBJ2-7)
CARSGTRPYEQYL

SEQ ID NO: 174067 - protein, 14 aa, Homo sapiens
  CDR3 for alpha chain variable domain of TCR clone 87034 (TRAV26-1, TRAJ34)
CIVRVAYNTDKLIF

SEQ ID NO: 174068 - protein, 15 aa, Homo sapiens
  CDR3 for beta chain variable domain of TCR clone 87034 (TRBV28, TRBJ2-5)
CASSSGRTIQETQYF

SEQ ID NO: 174069 - protein, 16 aa, Homo sapiens
  CDR3 for alpha chain variable domain of TCR clone 87035 (TRAV30, TRAJ24)
CGTEIVDADSWGKFKF

SEQ ID NO: 174070 - protein, 15 aa, Homo sapiens
  CDR3 for beta chain variable domain of TCR clone 87035 (TRBV6-3, TRBJ2-7)
CASSSPGTVFYEQYF

SEQ ID NO: 174071 - protein, 17 aa, Homo sapiens
  CDR3 for alpha chain variable domain of TCR clone 87036 (TRAV3, TRAJ42)
CAVRDRDYGGSQGNLIF

SEQ ID NO: 174072 - protein, 15 aa, Homo sapiens
  CDR3 for beta chain variable domain of TCR clone 87036 (TRBV6-6, TRBJ2-7)
CASSYSYGGFYEQYF

SEQ ID NO: 174073 - protein, 13 aa, Homo sapiens
  CDR3 for alpha chain variable domain of TCR clone 87037 (TRAV13-2, TRAJ10)
CAENTGGGNKLTF

SEQ ID NO: 174074 - protein, 16 aa, Homo sapiens
  CDR3 for beta chain variable domain of TCR clone 87037 (TRBV4-1, TRBJ2-3)
CASSQSTSGAEDTQYF

SEQ ID NO: 174075 - protein, 11 aa, Homo sapiens
  CDR3 for alpha chain variable domain of TCR clone 87038 (TRAV16, TRAJ34)
CALYNTDKLIF

SEQ ID NO: 174076 - protein, 14 aa, Homo sapiens
  CDR3 for beta chain variable domain of TCR clone 87038 (TRBV7-3, TRBJ2-2)
CASSSGGYTGELFF

SEQ ID NO: 174077 - protein, 14 aa, Homo sapiens
  CDR3 for alpha chain variable domain of TCR clone 87039 (TRAV3, TRAJ6)
CAVRDPWGSYIPTF

SEQ ID NO: 174078 - protein, 13 aa, Homo sapiens
  CDR3 for beta chain variable domain of TCR clone 87039 (TRBV4-1, TRBJ2-1)
CASSQAGGDEQFF

SEQ ID NO: 174079 - protein, 16 aa, Homo sapiens
  CDR3 for alpha chain variable domain of TCR clone 87040 (TRAV3, TRAJ28)
CSVLPRSGAGSYQLTF

SEQ ID NO: 174080 - protein, 13 aa, Homo sapiens
  CDR3 for beta chain variable domain of TCR clone 87040 (TRBV12-4, TRBJ2-5)
CASRLAVQETQYF

SEQ ID NO: 174081 - protein, 13 aa, Homo sapiens
  CDR3 for alpha chain variable domain of TCR clone 87041 (TRAV35, TRAJ37)
CAGSSGNTGKLIF

SEQ ID NO: 174082 - protein, 16 aa, Homo sapiens
  CDR3 for beta chain variable domain of TCR clone 87041 (TRBV10-3, TRBJ2-1)
CAISLTGGNSYNEQFF

SEQ ID NO: 174083 - protein, 17 aa, Homo sapiens
  CDR3 for alpha chain variable domain of TCR clone 87042 (TRAV4, TRAJ42)
CLVGVLNYGGSQGNLIF

SEQ ID NO: 174084 - protein, 12 aa, Homo sapiens
  CDR3 for beta chain variable domain of TCR clone 87042 (TRBV20-1, TRBJ2-1)
CSARYTYNEQFF

SEQ ID NO: 174085 - protein, 15 aa, Homo sapiens
  CDR3 for alpha chain variable domain of TCR clone 87043 (TRAV13-2, TRAJ45)
CAESDSGGGADGLTF

SEQ ID NO: 174086 - protein, 15 aa, Homo sapiens
  CDR3 for beta chain variable domain of TCR clone 87043 (TRBV28, TRBJ1-5)
CASSLSGYSNQPQHF

SEQ ID NO: 174087 - protein, 10 aa, Homo sapiens
  CDR3 for alpha chain variable domain of TCR clone 87044 (TRAV17, TRAJ23)
CATDAEDNQG

SEQ ID NO: 174088 - protein, 12 aa, Homo sapiens
  CDR3 for beta chain variable domain of TCR clone 87044 (TRBV2, TRBJ2-1)
CAKREGYNEQFF

SEQ ID NO: 174089 - protein, 13 aa, Homo sapiens
  CDR3 for alpha chain variable domain of TCR clone 87045 (TRAV16, TRAJ34)
CITVLSHTDKLIF

SEQ ID NO: 174090 - protein, 13 aa, Homo sapiens
  CDR3 for beta chain variable domain of TCR clone 87045 (TRBV19, TRBJ1-2)
CASSVPGQDGYTF

SEQ ID NO: 174091 - protein, 17 aa, Homo sapiens
  CDR3 for alpha chain variable domain of TCR clone 87046 (TRAV26-2, TRAJ42)
CILRDVGYGGSQGNLIF

SEQ ID NO: 174092 - protein, 17 aa, Homo sapiens
  CDR3 for beta chain variable domain of TCR clone 87046 (TRBV13, TRBJ2-3)
CASSLSRVAGGRNTQYF

SEQ ID NO: 174093 - protein, 16 aa, Homo sapiens
  CDR3 for alpha chain variable domain of TCR clone 87047 (TRAV30, TRAJ24)
CGTEIVDADSWGKFQL

SEQ ID NO: 174094 - protein, 14 aa, Homo sapiens
  CDR3 for beta chain variable domain of TCR clone 87047 (TRBV19, TRBJ2-1)
CASPTFVLSGEQFF

SEQ ID NO: 174095 - protein, 15 aa, Homo sapiens
  CDR3 for alpha chain variable domain of TCR clone 87048 (TRAV4, TRAJ17)
CLVGDIGAAGNTLTF

SEQ ID NO: 174096 - protein, 14 aa, Homo sapiens
  CDR3 for beta chain variable domain of TCR clone 87048 (TRBV6-3, TRBJ2-7)
CASSYSVRVYEQYF

SEQ ID NO: 174097 - protein, 13 aa, Homo sapiens
  CDR3 for alpha chain variable domain of TCR clone 87049 (TRAV12-2, TRAJ50)
CAVIVTYYDKVIF

SEQ ID NO: 174098 - protein, 14 aa, Homo sapiens
  CDR3 for beta chain variable domain of TCR clone 87049 (TRBV9, TRBJ2-1)
CASSVDPRGKEQFF

SEQ ID NO: 174099 - protein, 14 aa, Homo sapiens
  CDR3 for alpha chain variable domain of TCR clone 87050 (TRAV13-1, TRAJ44)
CAAKATGTASKLTF

SEQ ID NO: 174100 - protein, 15 aa, Homo sapiens
  CDR3 for beta chain variable domain of TCR clone 87050 (TRBV2, TRBJ2-1)
CASSELAGSYNEQFF

SEQ ID NO: 174101 - protein, 14 aa, Homo sapiens
  CDR3 for alpha chain variable domain of TCR clone 87051 (TRAV12-2, TRAJ13)
CAVKKTGGYQKVTF

SEQ ID NO: 174102 - protein, 15 aa, Homo sapiens
  CDR3 for beta chain variable domain of TCR clone 87051 (TRBV27, TRBJ2-1)
CASSNGGGSSNEQFF

SEQ ID NO: 174103 - protein, 13 aa, Homo sapiens
  CDR3 for alpha chain variable domain of TCR clone 87052 (TRAV22, TRAJ26)
CAVEHNYGQNFVF

SEQ ID NO: 174104 - protein, 16 aa, Homo sapiens
  CDR3 for beta chain variable domain of TCR clone 87052 (TRBV7-2, TRBJ2-6)
CASSERRAAGANVLTF

SEQ ID NO: 174105 - protein, 12 aa, Homo sapiens
  CDR3 for alpha chain variable domain of TCR clone 87053 (TRAV12-3, TRAJ17)
CAMTLTGNTLTF

SEQ ID NO: 174106 - protein, 15 aa, Homo sapiens
  CDR3 for beta chain variable domain of TCR clone 87053 (TRBV20-1, TRBJ2-7)
CSARDRVSGMDEQYL

SEQ ID NO: 174107 - protein, 14 aa, Homo sapiens
  CDR3 for alpha chain variable domain of TCR clone 87054 (TRAV21, TRAJ35)
CAVMPIGFGNVLHC

SEQ ID NO: 174108 - protein, 12 aa, Homo sapiens
  CDR3 for beta chain variable domain of TCR clone 87054 (TRBV7-9, TRBJ2-7)
FASSIKREEQYF

SEQ ID NO: 174109 - protein, 13 aa, Homo sapiens
  CDR3 for alpha chain variable domain of TCR clone 87055 (TRAV21, TRAJ27)
CAARPGNAGKSTV

SEQ ID NO: 174110 - protein, 14 aa, Homo sapiens
  CDR3 for beta chain variable domain of TCR clone 87055 (TRBV11-2, TRBJ2-7)
CASSLGAGAYEQYF

SEQ ID NO: 174111 - protein, 18 aa, Homo sapiens
  CDR3 for alpha chain variable domain of TCR clone 87056 (TRAV26-1, TRAJ52)
CIVRVAGAGVTSYGKLTF

SEQ ID NO: 174112 - protein, 13 aa, Homo sapiens
  CDR3 for beta chain variable domain of TCR clone 87056 (TRBV7-8, TRBJ1-2)
CASSAQSYYGYTF

SEQ ID NO: 174113 - protein, 12 aa, Homo sapiens
  CDR3 for alpha chain variable domain of TCR clone 87057 (TRAV13-1, TRAJ21)
CAAKEGFNKFYF

SEQ ID NO: 174114 - protein, 15 aa, Homo sapiens
  CDR3 for beta chain variable domain of TCR clone 87057 (TRBV12-4, TRBJ2-5)
CASSPPTGLQETQYV

SEQ ID NO: 174115 - protein, 14 aa, Homo sapiens
  CDR3 for alpha chain variable domain of TCR clone 87058 (TRAV17, TRAJ54)
CATDANQGAQKLVF

SEQ ID NO: 174116 - protein, 14 aa, Homo sapiens
  CDR3 for beta chain variable domain of TCR clone 87058 (TRBV28, TRBJ2-1)
CASSLVAPYNEQFF

SEQ ID NO: 174117 - protein, 14 aa, Homo sapiens
  CDR3 for alpha chain variable domain of TCR clone 87059 (TRAV1-2, TRAJ29)
CAVRELTSATPLVF

SEQ ID NO: 174118 - protein, 15 aa, Homo sapiens
  CDR3 for beta chain variable domain of TCR clone 87059 (TRBV2, TRBJ2-1)
CASSEEREGDNEQFF

SEQ ID NO: 174119 - protein, 12 aa, Homo sapiens
  CDR3 for alpha chain variable domain of TCR clone 87060 (TRAV3, TRAJ27)
CAVRDKAGKSTF

SEQ ID NO: 174120 - protein, 14 aa, Homo sapiens
  CDR3 for beta chain variable domain of TCR clone 87060 (TRBV5-1, TRBJ1-2)
CASSVDSTNYGYTV

SEQ ID NO: 174121 - protein, 13 aa, Homo sapiens
  CDR3 for alpha chain variable domain of TCR clone 87061 (TRAV12-1, TRAJ6)
CVVFPGGSYIPTF

SEQ ID NO: 174122 - protein, 14 aa, Homo sapiens
  CDR3 for beta chain variable domain of TCR clone 87061 (TRBV7-9, TRBJ2-2)
CASSLVQDTGELFF

SEQ ID NO: 174123 - protein, 13 aa, Homo sapiens
  CDR3 for alpha chain variable domain of TCR clone 87062 (TRAV17, TRAJ26)
CATVDNYGQNFVF

SEQ ID NO: 174124 - protein, 16 aa, Homo sapiens
  CDR3 for beta chain variable domain of TCR clone 87062 (TRBV2, TRBJ2-1)
CASSVGGSLSYNEQFF

SEQ ID NO: 174125 - protein, 15 aa, Homo sapiens
  CDR3 for alpha chain variable domain of TCR clone 87063 (TRAV25, TRAJ52)
CAGRPGGTSYGKLTF

SEQ ID NO: 174126 - protein, 17 aa, Homo sapiens
  CDR3 for beta chain variable domain of TCR clone 87063 (TRBV7-8, TRBJ2-6)
CASIAGTGGAGANVLTF

SEQ ID NO: 174127 - protein, 14 aa, Homo sapiens
  CDR3 for alpha chain variable domain of TCR clone 87064 (TRAV13-1, TRAJ45)
CAATSGGGADGLTF

SEQ ID NO: 174128 - protein, 15 aa, Homo sapiens
  CDR3 for beta chain variable domain of TCR clone 87064 (TRBV6-3, TRBJ2-7)
CASSSPGTVFYEQYF

SEQ ID NO: 174129 - protein, 15 aa, Homo sapiens
  CDR3 for alpha chain variable domain of TCR clone 87065 (TRAV17, TRAJ57)
GATGPSQGGSEKLVF

SEQ ID NO: 174130 - protein, 14 aa, Homo sapiens
  CDR3 for beta chain variable domain of TCR clone 87065 (TRBV12-5, TRBJ2-5)
CASGSRTHQETQYF

SEQ ID NO: 174131 - protein, 17 aa, Homo sapiens
  CDR3 for alpha chain variable domain of TCR clone 87066 (TRAV3, TRAJ42)
CAVRDRDYGGSQGILIF

SEQ ID NO: 174132 - protein, 15 aa, Homo sapiens
  CDR3 for beta chain variable domain of TCR clone 87066 (TRBV6-6, TRBJ2-7)
CASSYSYGGSYEQYF

SEQ ID NO: 174133 - protein, 13 aa, Homo sapiens
  CDR3 for alpha chain variable domain of TCR clone 87067 (TRAV8-4, TRAJ30)
CAVSVNRDDKIIF

SEQ ID NO: 174134 - protein, 17 aa, Homo sapiens
  CDR3 for beta chain variable domain of TCR clone 87067 (TRBV20-1, TRBJ2-2)
CSASGSGQGGLTGELFF

SEQ ID NO: 174135 - protein, 16 aa, Homo sapiens
  CDR3 for alpha chain variable domain of TCR clone 87068 (TRAV16, TRAJ52)
CALSAAGGTSYGKLTF

SEQ ID NO: 174136 - protein, 13 aa, Homo sapiens
  CDR3 for beta chain variable domain of TCR clone 87068 (TRBV19, TRBJ1-5)
CASSIGGEQPQHF

SEQ ID NO: 174137 - protein, 15 aa, Homo sapiens
  CDR3 for alpha chain variable domain of TCR clone 87069 (TRAV8-4, TRAJ37)
CAVSRGSGNTGKLIF

SEQ ID NO: 174138 - protein, 14 aa, Homo sapiens
  CDR3 for beta chain variable domain of TCR clone 87069 (TRBV25-1, TRBJ1-1)
CASTHLGGNTEAFF

SEQ ID NO: 174139 - protein, 15 aa, Homo sapiens
  CDR3 for alpha chain variable domain of TCR clone 87070 (TRAV25, TRAJ53)
CPTSNSGGSNYKLTF

SEQ ID NO: 174140 - protein, 14 aa, Homo sapiens
  CDR3 for beta chain variable domain of TCR clone 87070 (TRBV11-2, TRBJ2-3)
CASSRLDRTDTQYF

SEQ ID NO: 174141 - protein, 14 aa, Homo sapiens
  CDR3 for alpha chain variable domain of TCR clone 87071 (TRAV12-2, TRAJ33)
CAVKRARSNYQLIC

SEQ ID NO: 174142 - protein, 14 aa, Homo sapiens
  CDR3 for beta chain variable domain of TCR clone 87071 (TRBV13, TRBJ2-7)
CASSLKGASYEQYF

SEQ ID NO: 174143 - protein, 14 aa, Homo sapiens
  CDR3 for alpha chain variable domain of TCR clone 87072 (TRAV23/DV6, TRAJ27)
CAASRGTNAGKSTF

SEQ ID NO: 174144 - protein, 13 aa, Homo sapiens
  CDR3 for beta chain variable domain of TCR clone 87072 (TRBV20-1, TRBJ1-5)
CSASGRGNQPQHF

SEQ ID NO: 174145 - protein, 21 aa, Homo sapiens
  CDR3 for alpha chain variable domain of TCR clone 87073 (TRAV25, TRAJ53)
TATHTTDVGTGSGGSNYKLTF

SEQ ID NO: 174146 - protein, 16 aa, Homo sapiens
  CDR3 for beta chain variable domain of TCR clone 87073 (TRBV4-2, TRBJ2-3)
CASSLSSGGHTDTQYF

SEQ ID NO: 174147 - protein, 13 aa, Homo sapiens
  CDR3 for alpha chain variable domain of TCR clone 87074 (TRAV20, TRAJ37)
CAGCSSNTGKLVF

SEQ ID NO: 174148 - protein, 13 aa, Homo sapiens
  CDR3 for beta chain variable domain of TCR clone 87074 (TRBV10-3, TRBJ2-7)
CASKLAVNYEQYF

SEQ ID NO: 174149 - protein, 13 aa, Homo sapiens
  CDR3 for alpha chain variable domain of TCR clone 87075 (TRAV30, TRAJ39)
CGTEKNAGNMLTF

SEQ ID NO: 174150 - protein, 12 aa, Homo sapiens
  CDR3 for beta chain variable domain of TCR clone 87075 (TRBV11-2, TRBJ2-2)
CASSLGGGELFF

SEQ ID NO: 174151 - protein, 13 aa, Homo sapiens
  CDR3 for alpha chain variable domain of TCR clone 87076 (TRAV13-1, TRAJ40)
CAARTSGTYKYNF

SEQ ID NO: 174152 - protein, 17 aa, Homo sapiens
  CDR3 for beta chain variable domain of TCR clone 87076 (TRBV4-1, TRBJ2-3)
CASSQGYVSGGTDTQYF

SEQ ID NO: 174153 - protein, 16 aa, Homo sapiens
  CDR3 for alpha chain variable domain of TCR clone 87077 (TRAV20, TRAJ52)
CAVLPDGGNSYGKLTF

SEQ ID NO: 174154 - protein, 12 aa, Homo sapiens
  CDR3 for beta chain variable domain of TCR clone 87077 (TRBV19, TRBJ2-1)
CASSQISNEQFF

SEQ ID NO: 174155 - protein, 14 aa, Homo sapiens
  CDR3 for alpha chain variable domain of TCR clone 87078 (TRAV17, TRAJ35)
CATDRPGFGNVLNC

SEQ ID NO: 174156 - protein, 15 aa, Homo sapiens
  CDR3 for beta chain variable domain of TCR clone 87078 (TRBV28, TRBJ2-5)
CASSSGRVIQETQYF

SEQ ID NO: 174157 - protein, 16 aa, Homo sapiens
  CDR3 for alpha chain variable domain of TCR clone 87079 (TRAV16, TRAJ4)
CALSRMFSGGYNKLIF

SEQ ID NO: 174158 - protein, 14 aa, Homo sapiens
  CDR3 for beta chain variable domain of TCR clone 87079 (TRBV7-2, TRBJ2-3)
CASSQTGSSYTQYF

SEQ ID NO: 174159 - protein, 13 aa, Homo sapiens
  CDR3 for alpha chain variable domain of TCR clone 87080 (TRAV3, TRAJ20)
CAVRSLNDYKLSF

SEQ ID NO: 174160 - protein, 14 aa, Homo sapiens
  CDR3 for beta chain variable domain of TCR clone 87080 (TRBV28, TRBJ2-5)
CASSLGDRAETQYF

SEQ ID NO: 174161 - protein, 14 aa, Homo sapiens
  CDR3 for alpha chain variable domain of TCR clone 87081 (TRAV12-2, TRAJ9)
CAVKALEGGFKTIF

SEQ ID NO: 174162 - protein, 16 aa, Homo sapiens
  CDR3 for beta chain variable domain of TCR clone 87081 (TRBV19, TRBJ1-6)
CASSVAPVAGNSPLHF

SEQ ID NO: 174163 - protein, 16 aa, Homo sapiens
  CDR3 for alpha chain variable domain of TCR clone 87082 (TRAV30, TRAJ24)
CGTEIVDADSWGKFQF

SEQ ID NO: 174164 - protein, 13 aa, Homo sapiens
  CDR3 for beta chain variable domain of TCR clone 87082 (TRBV10-3, TRBJ2-7)
CASRLAVNYEQYF

SEQ ID NO: 174165 - protein, 12 aa, Homo sapiens
  CDR3 for alpha chain variable domain of TCR clone 87083 (TRAV13-1, TRAJ21)
CAAKEGFNKFYF

SEQ ID NO: 174166 - protein, 18 aa, Homo sapiens
  CDR3 for beta chain variable domain of TCR clone 87083 (TRBV20-1, TRBJ2-6)
CSAETTPTHGSGANGLTF

SEQ ID NO: 174167 - protein, 15 aa, Homo sapiens
  CDR3 for alpha chain variable domain of TCR clone 87084 (TRAV21, TRAJ53)
CATLNSGGSNYKLTF

SEQ ID NO: 174168 - protein, 19 aa, Homo sapiens
  CDR3 for beta chain variable domain of TCR clone 87084 (TRBV19, TRBJ2-5)
CASSIGQVTDFFLGETQYF

SEQ ID NO: 174169 - protein, 14 aa, Homo sapiens
  CDR3 for alpha chain variable domain of TCR clone 87085 (TRAV12-2, TRAJ45)
CAVNKVGGADGLTF

SEQ ID NO: 174170 - protein, 14 aa, Homo sapiens
  CDR3 for beta chain variable domain of TCR clone 87085 (TRBV20-1, TRBJ1-1)
CSAMGGTANTEAFF

SEQ ID NO: 174171 - protein, 13 aa, Homo sapiens
  CDR3 for alpha chain variable domain of TCR clone 87086 (TRAV13-1, TRAJ21)
CAASIYNFNKFHF

SEQ ID NO: 174172 - protein, 15 aa, Homo sapiens
  CDR3 for beta chain variable domain of TCR clone 87086 (TRBV7-8, TRBJ1-5)
CASSLAGQPNQPQHF

SEQ ID NO: 174173 - protein, 16 aa, Homo sapiens
  CDR3 for alpha chain variable domain of TCR clone 87087 (TRAV30, TRAJ24)
CSTEIVDADSWGKFQF

SEQ ID NO: 174174 - protein, 14 aa, Homo sapiens
  CDR3 for beta chain variable domain of TCR clone 87087 (TRBV7-9, TRBJ2-4)
CASSLAMGGNIQYF

SEQ ID NO: 174175 - protein, 15 aa, Homo sapiens
  CDR3 for alpha chain variable domain of TCR clone 87088 (TRAV13-1, TRAJ45)
CAAGGSGGGADGLTF

SEQ ID NO: 174176 - protein, 12 aa, Homo sapiens
  CDR3 for beta chain variable domain of TCR clone 87088 (TRBV11-2, TRBJ2-2)
CASSLGGGELFF

SEQ ID NO: 174177 - protein, 12 aa, Homo sapiens
  CDR3 for alpha chain variable domain of TCR clone 87089 (TRAV21, TRAJ17)
CAVIAAGNKLTF

SEQ ID NO: 174178 - protein, 17 aa, Homo sapiens
  CDR3 for beta chain variable domain of TCR clone 87089 (TRBV28, TRBJ2-5)
CASSRQGGLAGAETQYF

SEQ ID NO: 174179 - protein, 14 aa, Homo sapiens
  CDR3 for alpha chain variable domain of TCR clone 87090 (TRAV12-2, TRAJ13)
CAVKKTGGYRKVTL

SEQ ID NO: 174180 - protein, 15 aa, Homo sapiens
  CDR3 for beta chain variable domain of TCR clone 87090 (TRBV27, TRBJ2-1)
CASSNGGGSSNEQFF

SEQ ID NO: 174181 - protein, 14 aa, Homo sapiens
  CDR3 for alpha chain variable domain of TCR clone 87091 (TRAV20, TRAJ36)
CAVQAGTGANNLFF

SEQ ID NO: 174182 - protein, 16 aa, Homo sapiens
  CDR3 for beta chain variable domain of TCR clone 87091 (TRBV19, TRBJ2-6)
CASSMSGLSGANVLTF

SEQ ID NO: 174183 - protein, 20 aa, Homo sapiens
  CDR3 for alpha chain variable domain of TCR clone 87092 (TRAV2, TRAJ33)
CAFMDSNYQLIWGAGTKLTF

SEQ ID NO: 174184 - protein, 16 aa, Homo sapiens
  CDR3 for beta chain variable domain of TCR clone 87092 (TRBV2, TRBJ2-7)
CASSEPWTGPSYEQYF

SEQ ID NO: 174185 - protein, 13 aa, Homo sapiens
  CDR3 for alpha chain variable domain of TCR clone 87093 (TRAV12-3, TRAJ7)
CAMTPYGNNRLAF

SEQ ID NO: 174186 - protein, 16 aa, Homo sapiens
  CDR3 for beta chain variable domain of TCR clone 87093 (TRBV20-1, TRBJ1-4)
SSARPYGGELNEKLFF

SEQ ID NO: 174187 - protein, 14 aa, Homo sapiens
  CDR3 for alpha chain variable domain of TCR clone 87094 (TRAV12-2, TRAJ11)
CAVNRESEYSTLTF

SEQ ID NO: 174188 - protein, 10 aa, Homo sapiens
  CDR3 for beta chain variable domain of TCR clone 87094 (TRBV20-1, TRBJ2-5)
CSARFETQYF

SEQ ID NO: 174189 - protein, 13 aa, Homo sapiens
  CDR3 for alpha chain variable domain of TCR clone 87095 (TRAV13-1, TRAJ21)
CAASIYNFNKFYF

SEQ ID NO: 174190 - protein, 12 aa, Homo sapiens
  CDR3 for beta chain variable domain of TCR clone 87095 (TRBV11-2, TRBJ2-7)
CASSLPTYEQYF

SEQ ID NO: 174191 - protein, 17 aa, Homo sapiens
  CDR3 for alpha chain variable domain of TCR clone 87096 (TRAV13-1, TRAJ52)
CAAGRNAGGTSYGKLIF

SEQ ID NO: 174192 - protein, 13 aa, Homo sapiens
  CDR3 for beta chain variable domain of TCR clone 87096 (TRBV7-2, TRBJ1-1)
CASNLKGAKVAFF

SEQ ID NO: 174193 - protein, 13 aa, Homo sapiens
  CDR3 for alpha chain variable domain of TCR clone 87097 (TRAV23/DV6, TRAJ27)
CAASKPMPANQPL

SEQ ID NO: 174194 - protein, 14 aa, Homo sapiens
  CDR3 for beta chain variable domain of TCR clone 87097 (TRBV5-4, TRBJ1-1)
CASSLDSRRDEAFF

SEQ ID NO: 174195 - protein, 14 aa, Homo sapiens
  CDR3 for alpha chain variable domain of TCR clone 87098 (TRAV9-2, TRAJ39)
CALYIYNAGNMLTF

SEQ ID NO: 174196 - protein, 16 aa, Homo sapiens
  CDR3 for beta chain variable domain of TCR clone 87098 (TRBV4-1, TRBJ2-4)
CASSLLRGTAKNIQYF

SEQ ID NO: 174197 - protein, 12 aa, Homo sapiens
  CDR3 for alpha chain variable domain of TCR clone 87099 (TRAV13-1, TRAJ48)
CAANFGHEKLTF

SEQ ID NO: 174198 - protein, 13 aa, Homo sapiens
  CDR3 for beta chain variable domain of TCR clone 87099 (TRBV7-3, TRBJ1-1)
CASSQDWGAEAFF

SEQ ID NO: 174199 - protein, 13 aa, Homo sapiens
  CDR3 for alpha chain variable domain of TCR clone 87100 (TRAV8-3, TRAJ43)
CAVVPYNNNDMRF

SEQ ID NO: 174200 - protein, 17 aa, Homo sapiens
  CDR3 for beta chain variable domain of TCR clone 87100 (TRBV7-7, TRBJ1-1)
CASIGDRPNLEVTEAFF

SEQ ID NO: 174201 - protein, 16 aa, Homo sapiens
  CDR3 for alpha chain variable domain of TCR clone 87101 (TRAV8-3, TRAJ13)
CAVGAYPSGGYQKVTF

SEQ ID NO: 174202 - protein, 15 aa, Homo sapiens
  CDR3 for beta chain variable domain of TCR clone 87101 (TRBV19, TRBJ1-5)
CASSIVWTDNQPQHF

SEQ ID NO: 174203 - protein, 14 aa, Homo sapiens
  CDR3 for alpha chain variable domain of TCR clone 87102 (TRAV36/DV7, TRAJ57)
CAVGFPGGSEKLGF

SEQ ID NO: 174204 - protein, 12 aa, Homo sapiens
  CDR3 for beta chain variable domain of TCR clone 87102 (TRBV19, TRBJ2-7)
CASTSGTYEQYF

SEQ ID NO: 174205 - protein, 17 aa, Homo sapiens
  CDR3 for alpha chain variable domain of TCR clone 87103 (TRAV3, TRAJ42)
CAVRDRDYGGSQGNLIF

SEQ ID NO: 174206 - protein, 14 aa, Homo sapiens
  CDR3 for beta chain variable domain of TCR clone 87103 (TRBV2, TRBJ1-6)
CALSPSDPRSPLHF

SEQ ID NO: 174207 - protein, 12 aa, Homo sapiens
  CDR3 for alpha chain variable domain of TCR clone 87104 (TRAV17, TRAJ12)
CATLRSSYKLIF

SEQ ID NO: 174208 - protein, 14 aa, Homo sapiens
  CDR3 for beta chain variable domain of TCR clone 87104 (TRBV7-8, TRBJ2-3)
CASSFPDGQDTQYF

SEQ ID NO: 174209 - protein, 14 aa, Homo sapiens
  CDR3 for alpha chain variable domain of TCR clone 87105 (TRAV2, TRAJ37)
CAVDFTSNTGKLIF

SEQ ID NO: 174210 - protein, 14 aa, Homo sapiens
  CDR3 for beta chain variable domain of TCR clone 87105 (TRBV7-3, TRBJ2-1)
CASSLSGSYNEQFF

SEQ ID NO: 174211 - protein, 21 aa, Homo sapiens
  CDR3 for alpha chain variable domain of TCR clone 87106 (TRAV8-3, TRAJ6)
CAVGGEEATYLHLEEEQALLF

SEQ ID NO: 174212 - protein, 14 aa, Homo sapiens
  CDR3 for beta chain variable domain of TCR clone 87106 (TRBV5-1, TRBJ2-7)
CASSRGESLYEQYF

SEQ ID NO: 174213 - protein, 12 aa, Homo sapiens
  CDR3 for alpha chain variable domain of TCR clone 87107 (TRAV41, TRAJ58)
CAVETRGSRLTF

SEQ ID NO: 174214 - protein, 15 aa, Homo sapiens
  CDR3 for beta chain variable domain of TCR clone 87107 (TRBV29-1, TRBJ2-6)
CSVGDRGSGANVLTF

SEQ ID NO: 174215 - protein, 12 aa, Homo sapiens
  CDR3 for alpha chain variable domain of TCR clone 87108 (TRAV27, TRAJ36)
ASTPAGANNLFF

SEQ ID NO: 174216 - protein, 13 aa, Homo sapiens
  CDR3 for beta chain variable domain of TCR clone 87108 (TRBV7-9, TRBJ2-3)
CASSPGSTETQYF

SEQ ID NO: 174217 - protein, 13 aa, Homo sapiens
  CDR3 for alpha chain variable domain of TCR clone 87109 (TRAV2, TRAJ40)
CAVVTSGTYKYIF

SEQ ID NO: 174218 - protein, 15 aa, Homo sapiens
  CDR3 for beta chain variable domain of TCR clone 87109 (TRBV6-1, TRBJ2-4)
CASSEAVWTINIQYF

SEQ ID NO: 174219 - protein, 12 aa, Homo sapiens
  CDR3 for alpha chain variable domain of TCR clone 87110 (TRAV27, TRAJ9)
CAGESGGFKTIF

SEQ ID NO: 174220 - protein, 14 aa, Homo sapiens
  CDR3 for beta chain variable domain of TCR clone 87110 (TRBV4-1, TRBJ1-1)
CSSGRSGQSFEAFF

SEQ ID NO: 174221 - protein, 13 aa, Homo sapiens
  CDR3 for alpha chain variable domain of TCR clone 87111 (TRAV12-1, TRAJ7)
CVVNMRGNNRLAF

SEQ ID NO: 174222 - protein, 15 aa, Homo sapiens
  CDR3 for beta chain variable domain of TCR clone 87111 (TRBV6-3, TRBJ2-7)
CASSSPGTVFYEQYF

SEQ ID NO: 174223 - protein, 14 aa, Homo sapiens
  CDR3 for alpha chain variable domain of TCR clone 87112 (TRAV1-2, TRAJ6)
CAVSLSGGSSIPPF

SEQ ID NO: 174224 - protein, 15 aa, Homo sapiens
  CDR3 for beta chain variable domain of TCR clone 87112 (TRBV28, TRBJ2-7)
CASSPGGRGFYEQYF

SEQ ID NO: 174225 - protein, 14 aa, Homo sapiens
  CDR3 for alpha chain variable domain of TCR clone 87113 (TRAV38-1, TRAJ29)
CAFITPSGNTPLVF

SEQ ID NO: 174226 - protein, 14 aa, Homo sapiens
  CDR3 for beta chain variable domain of TCR clone 87113 (TRBV18, TRBJ2-7)
CTSSPRGGAYEQYF

SEQ ID NO: 174227 - protein, 16 aa, Homo sapiens
  CDR3 for alpha chain variable domain of TCR clone 87114 (TRAV26-1, TRAJ38)
CIVRVELVGNNRKLIW

SEQ ID NO: 174228 - protein, 14 aa, Homo sapiens
  CDR3 for beta chain variable domain of TCR clone 87114 (TRBV5-1, TRBJ2-3)
CASSPGLAADTQYF

SEQ ID NO: 174229 - protein, 16 aa, Homo sapiens
  CDR3 for alpha chain variable domain of TCR clone 87115 (TRAV20, TRAJ28)
CAVRDPSGAGSYQLTF

SEQ ID NO: 174230 - protein, 15 aa, Homo sapiens
  CDR3 for beta chain variable domain of TCR clone 87115 (TRBV19, TRBJ1-5)
CASSIVWADNQPQHF

SEQ ID NO: 174231 - protein, 15 aa, Homo sapiens
  CDR3 for alpha chain variable domain of TCR clone 87116 (TRAV17, TRAJ4)
CATGTWSGGYNKLIF

SEQ ID NO: 174232 - protein, 12 aa, Homo sapiens
  CDR3 for beta chain variable domain of TCR clone 87116 (TRBV3-1, TRBJ2-2)
CASSLFPGELFF

SEQ ID NO: 174233 - protein, 17 aa, Homo sapiens
  CDR3 for alpha chain variable domain of TCR clone 87117 (TRAV14/DV4, TRAJ4)
CAMREASGRGAYNKLIF

SEQ ID NO: 174234 - protein, 14 aa, Homo sapiens
  CDR3 for beta chain variable domain of TCR clone 87117 (TRBV19, TRBJ2-7)
CASSMGQGAIEQYF

SEQ ID NO: 174235 - protein, 12 aa, Homo sapiens
  CDR3 for alpha chain variable domain of TCR clone 87118 (TRAV8-4, TRAJ20)
CAVSDEDYKLSF

SEQ ID NO: 174236 - protein, 17 aa, Homo sapiens
  CDR3 for beta chain variable domain of TCR clone 87118 (TRBV12-4, TRBJ1-5)
CASSRHQAGGVNQPQHF

SEQ ID NO: 174237 - protein, 17 aa, Homo sapiens
  CDR3 for alpha chain variable domain of TCR clone 87119 (TRAV8-4, TRAJ53)
CAVSGPRSEGSDYKLTF

SEQ ID NO: 174238 - protein, 14 aa, Homo sapiens
  CDR3 for beta chain variable domain of TCR clone 87119 (TRBV7-3, TRBJ2-1)
CASSALAGGPEQFF

SEQ ID NO: 174239 - protein, 14 aa, Homo sapiens
  CDR3 for alpha chain variable domain of TCR clone 87120 (TRAV12-1, TRAJ9)
CVVTGYTGGFKTIF

SEQ ID NO: 174240 - protein, 13 aa, Homo sapiens
  CDR3 for beta chain variable domain of TCR clone 87120 (TRBV20-1, TRBJ1-1)
CSARAEGNTEAFF

SEQ ID NO: 174241 - protein, 12 aa, Homo sapiens
  CDR3 for alpha chain variable domain of TCR clone 87121 (TRAV13-1, TRAJ21)
FAAKEGFNKFYF

SEQ ID NO: 174242 - protein, 18 aa, Homo sapiens
  CDR3 for beta chain variable domain of TCR clone 87121 (TRBV20-1, TRBJ2-6)
CSAETTPTHGSGANVLTF

SEQ ID NO: 174243 - protein, 12 aa, Homo sapiens
  CDR3 for alpha chain variable domain of TCR clone 87122 (TRAV26-2, TRAJ21)
CIMKGNFNKFYF

SEQ ID NO: 174244 - protein, 14 aa, Homo sapiens
  CDR3 for beta chain variable domain of TCR clone 87122 (TRBV7-9, TRBJ1-1)
CASTPLQSYTEAFF

SEQ ID NO: 174245 - protein, 15 aa, Homo sapiens
  CDR3 for alpha chain variable domain of TCR clone 87123 (TRAV8-4, TRAJ37)
CAVTYGSSNPGKLIF

SEQ ID NO: 174246 - protein, 13 aa, Homo sapiens
  CDR3 for beta chain variable domain of TCR clone 87123 (TRBV12-4, TRBJ2-5)
CASSLGGSRTQYF

SEQ ID NO: 174247 - protein, 12 aa, Homo sapiens
  CDR3 for alpha chain variable domain of TCR clone 87124 (TRAV12-1, TRAJ40)
CVVYSGTYKYIF

SEQ ID NO: 174248 - protein, 14 aa, Homo sapiens
  CDR3 for beta chain variable domain of TCR clone 87124 (TRBV7-2, TRBJ1-1)
CASSFLTGTTEAFF

SEQ ID NO: 174249 - protein, 14 aa, Homo sapiens
  CDR3 for alpha chain variable domain of TCR clone 87125 (TRAV12-3, TRAJ10)
SHLPLTGGGNKLTF

SEQ ID NO: 174250 - protein, 16 aa, Homo sapiens
  CDR3 for beta chain variable domain of TCR clone 87125 (TRBV19, TRBJ1-2)
CASSIGLFRDAYGYTF

SEQ ID NO: 174251 - protein, 16 aa, Homo sapiens
  CDR3 for alpha chain variable domain of TCR clone 87126 (TRAV27, TRAJ13)
CAGAKSDSGGYQKVTY

SEQ ID NO: 174252 - protein, 15 aa, Homo sapiens
  CDR3 for beta chain variable domain of TCR clone 87126 (TRBV29-1, TRBJ2-1)
CSVGRHALFYNEQFF

SEQ ID NO: 174253 - protein, 15 aa, Homo sapiens
  CDR3 for alpha chain variable domain of TCR clone 87127 (TRAV25, TRAJ53)
CAATGGGGSNYKLTF

SEQ ID NO: 174254 - protein, 15 aa, Homo sapiens
  CDR3 for beta chain variable domain of TCR clone 87127 (TRBV20-1, TRBJ2-7)
CSARDRVSGMDEQYF

SEQ ID NO: 174255 - protein, 14 aa, Homo sapiens
  CDR3 for alpha chain variable domain of TCR clone 87128 (TRAV23/DV6, TRAJ40)
CAASLTSGTYKYIF

SEQ ID NO: 174256 - protein, 14 aa, Homo sapiens
  CDR3 for beta chain variable domain of TCR clone 87128 (TRBV5-1, TRBJ2-3)
CASSRGQGGDTQYF

SEQ ID NO: 174257 - protein, 14 aa, Homo sapiens
  CDR3 for alpha chain variable domain of TCR clone 87129 (TRAV12-2, TRAJ40)
CAVKIPSGTYKYIF

SEQ ID NO: 174258 - protein, 15 aa, Homo sapiens
  CDR3 for beta chain variable domain of TCR clone 87129 (TRBV19, TRBJ1-2)
CASSPTTGPVGGYTF

SEQ ID NO: 174259 - protein, 13 aa, Homo sapiens
  CDR3 for alpha chain variable domain of TCR clone 87130 (TRAV4, TRAJ33)
CLVGDMNNYQLIW

SEQ ID NO: 174260 - protein, 13 aa, Homo sapiens
  CDR3 for beta chain variable domain of TCR clone 87130 (TRBV15, TRBJ1-6)
CATSGGLNSPLHF

SEQ ID NO: 174261 - protein, 15 aa, Homo sapiens
  CDR3 for alpha chain variable domain of TCR clone 87131 (TRAV4, TRAJ39)
CLVGPNNNAGNMLTF

SEQ ID NO: 174262 - protein, 16 aa, Homo sapiens
  CDR3 for beta chain variable domain of TCR clone 87131 (TRBV13, TRBJ2-2)
RASSPRTGEHTGELFF

SEQ ID NO: 174263 - protein, 13 aa, Homo sapiens
  CDR3 for alpha chain variable domain of TCR clone 87132 (TRAV13-1, TRAJ40)
CAARTSGTYKYIF

SEQ ID NO: 174264 - protein, 17 aa, Homo sapiens
  CDR3 for beta chain variable domain of TCR clone 87132 (TRBV4-1, TRBJ2-3)
CASSQGYVSEGTDTQYF

SEQ ID NO: 174265 - protein, 15 aa, Homo sapiens
  CDR3 for alpha chain variable domain of TCR clone 87133 (TRAV38-1, TRAJ37)
CTFIFGSGNTGKLIF

SEQ ID NO: 174266 - protein, 12 aa, Homo sapiens
  CDR3 for beta chain variable domain of TCR clone 87133 (TRBV7-9, TRBJ2-7)
CASSLEGYEQYF

SEQ ID NO: 174267 - protein, 13 aa, Homo sapiens
  CDR3 for alpha chain variable domain of TCR clone 87134 (TRAV26-2, TRAJ43)
CILRAVNNNDMRF

SEQ ID NO: 174268 - protein, 15 aa, Homo sapiens
  CDR3 for beta chain variable domain of TCR clone 87134 (TRBV7-2, TRBJ2-1)
CTSTHGTGIYNEQFF

SEQ ID NO: 174269 - protein, 13 aa, Homo sapiens
  CDR3 for alpha chain variable domain of TCR clone 87135 (TRAV1-2, TRAJ12)
CAVSMDSSYKLIF

SEQ ID NO: 174270 - protein, 15 aa, Homo sapiens
  CDR3 for beta chain variable domain of TCR clone 87135 (TRBV27, TRBJ2-5)
CAGSLIPSGGETQYF

SEQ ID NO: 174271 - protein, 15 aa, Homo sapiens
  CDR3 for alpha chain variable domain of TCR clone 87136 (TRAV8-3, TRAJ40)
CALGPYTSGTYKYIF

SEQ ID NO: 174272 - protein, 16 aa, Homo sapiens
  CDR3 for beta chain variable domain of TCR clone 87136 (TRBV7-2, TRBJ2-7)
CASSLDPGGGSGEQYF

SEQ ID NO: 174273 - protein, 11 aa, Homo sapiens
  CDR3 for alpha chain variable domain of TCR clone 87137 (TRAV12-3, TRAJ20)
CAMTPRLQAQL

SEQ ID NO: 174274 - protein, 12 aa, Homo sapiens
  CDR3 for beta chain variable domain of TCR clone 87137 (TRBV7-8, TRBJ2-7)
CASSLGDREQYF

SEQ ID NO: 174275 - protein, 14 aa, Homo sapiens
  CDR3 for alpha chain variable domain of TCR clone 87138 (TRAV12-1, TRAJ10)
CVVNSAGGGNKLTF

SEQ ID NO: 174276 - protein, 14 aa, Homo sapiens
  CDR3 for beta chain variable domain of TCR clone 87138 (TRBV28, TRBJ1-2)
CASRIQGANYGYTF

SEQ ID NO: 174277 - protein, 14 aa, Homo sapiens
  CDR3 for alpha chain variable domain of TCR clone 87139 (TRAV26-1, TRAJ22)
CIVRVYGSARQLTF

SEQ ID NO: 174278 - protein, 17 aa, Homo sapiens
  CDR3 for beta chain variable domain of TCR clone 87139 (TRBV7-3, TRBJ2-3)
CASSPGGRAGFGDTQYF

SEQ ID NO: 174279 - protein, 16 aa, Homo sapiens
  CDR3 for alpha chain variable domain of TCR clone 87140 (TRAV30, TRAJ24)
CGTEIVDADSWGKFQF

SEQ ID NO: 174280 - protein, 18 aa, Homo sapiens
  CDR3 for beta chain variable domain of TCR clone 87140 (TRBV7-9, TRBJ2-7)
CASSLTTSGRRTWYEQYF

SEQ ID NO: 174281 - protein, 16 aa, Homo sapiens
  CDR3 for alpha chain variable domain of TCR clone 87141 (TRAV3, TRAJ10)
CAVRDMRAGGGSKLTF

SEQ ID NO: 174282 - protein, 15 aa, Homo sapiens
  CDR3 for beta chain variable domain of TCR clone 87141 (TRBV11-2, TRBJ1-6)
CASTGFGTAVSPLHF

SEQ ID NO: 174283 - protein, 14 aa, Homo sapiens
  CDR3 for alpha chain variable domain of TCR clone 87142 (TRAV12-3, TRAJ10)
SHLPLTGGGNKFTF

SEQ ID NO: 174284 - protein, 15 aa, Homo sapiens
  CDR3 for beta chain variable domain of TCR clone 87142 (TRBV20-1, TRBJ2-7)
CSARDRVSGMDEQYF

SEQ ID NO: 174285 - protein, 11 aa, Homo sapiens
  CDR3 for alpha chain variable domain of TCR clone 87143 (TRAV12-3, TRAJ16)
LTGGDGQKLLF

SEQ ID NO: 174286 - protein, 12 aa, Homo sapiens
  CDR3 for beta chain variable domain of TCR clone 87143 (TRBV14, TRBJ1-1)
CASSQLKGLAFF

SEQ ID NO: 174287 - protein, 12 aa, Homo sapiens
  CDR3 for alpha chain variable domain of TCR clone 87144 (TRAV3, TRAJ31)
CAARDGNARLMF

SEQ ID NO: 174288 - protein, 18 aa, Homo sapiens
  CDR3 for beta chain variable domain of TCR clone 87144 (TRBV7-2, TRBJ2-3)
CASSLKREGSGITDTQYF

SEQ ID NO: 174289 - protein, 14 aa, Homo sapiens
  CDR3 for alpha chain variable domain of TCR clone 87145 (TRAV12-2, TRAJ13)
CAVKKTGGYQKVTF

SEQ ID NO: 174290 - protein, 14 aa, Homo sapiens
  CDR3 for beta chain variable domain of TCR clone 87145 (TRBV7-6, TRBJ2-3)
CASSLGTVTGTQYF

SEQ ID NO: 174291 - protein, 16 aa, Homo sapiens
  CDR3 for alpha chain variable domain of TCR clone 87146 (TRAV3, TRAJ37)
CAVRPHGSGNTGKLIF

SEQ ID NO: 174292 - protein, 11 aa, Homo sapiens
  CDR3 for beta chain variable domain of TCR clone 87146 (TRBV10-3, TRBJ2-7)
CAISEGLEQYL

SEQ ID NO: 174293 - protein, 18 aa, Homo sapiens
  CDR3 for alpha chain variable domain of TCR clone 87147 (TRAV21, TRAJ52)
CAVRPSPAGGTSYGKLTF

SEQ ID NO: 174294 - protein, 14 aa, Homo sapiens
  CDR3 for beta chain variable domain of TCR clone 87147 (TRBV12-5, TRBJ2-5)
CASGSRTHQETKYF

SEQ ID NO: 174295 - protein, 13 aa, Homo sapiens
  CDR3 for alpha chain variable domain of TCR clone 87148 (TRAV13-2, TRAJ48)
CAEMDFGNEKLTF

SEQ ID NO: 174296 - protein, 17 aa, Homo sapiens
  CDR3 for beta chain variable domain of TCR clone 87148 (TRBV7-9, TRBJ1-6)
CASSSPDVEIHPSTLGT

SEQ ID NO: 174297 - protein, 16 aa, Homo sapiens
  CDR3 for alpha chain variable domain of TCR clone 87149 (TRAV23/DV6, TRAJ21)
CSASSGGGTTSTNFTL

SEQ ID NO: 174298 - protein, 11 aa, Homo sapiens
  CDR3 for beta chain variable domain of TCR clone 87149 (TRBV7-8, TRBJ2-7)
CASSLSLEQYF

SEQ ID NO: 174299 - protein, 23 aa, Homo sapiens
  CDR3 for alpha chain variable domain of TCR clone 87150 (TRAV26-1, )
CIADNAGKDHIQNPDPAVYQLRD

SEQ ID NO: 174300 - protein, 13 aa, Homo sapiens
  CDR3 for beta chain variable domain of TCR clone 87150 (TRBV20-1, TRBJ1-1)
CSARGGGNTEAFF

SEQ ID NO: 174301 - protein, 15 aa, Homo sapiens
  CDR3 for alpha chain variable domain of TCR clone 87151 (TRAV3, TRAJ13)
CAVRVYSGGYQKVTF

SEQ ID NO: 174302 - protein, 14 aa, Homo sapiens
  CDR3 for beta chain variable domain of TCR clone 87151 (TRBV7-2, TRBJ2-5)
CASSPRGSSETQYF

SEQ ID NO: 174303 - protein, 12 aa, Homo sapiens
  CDR3 for alpha chain variable domain of TCR clone 87152 (TRAV30, TRAJ43)
CGTEERGNDMRF

SEQ ID NO: 174304 - protein, 20 aa, Homo sapiens
  CDR3 for beta chain variable domain of TCR clone 87152 (TRBV7-8, TRBJ2-2)
CASSHLFPGPTIHITGELFF

SEQ ID NO: 174305 - protein, 14 aa, Homo sapiens
  CDR3 for alpha chain variable domain of TCR clone 87153 (TRAV12-3, TRAJ10)
SHLPLTGGGNKLTF

SEQ ID NO: 174306 - protein, 13 aa, Homo sapiens
  CDR3 for beta chain variable domain of TCR clone 87153 (TRBV5-7, TRBJ1-2)
CASSLIRAPGYTF

SEQ ID NO: 174307 - protein, 13 aa, Homo sapiens
  CDR3 for alpha chain variable domain of TCR clone 87154 (TRAV1-2, TRAJ12)
CAVSMDSSYKLIF

SEQ ID NO: 174308 - protein, 13 aa, Homo sapiens
  CDR3 for beta chain variable domain of TCR clone 87154 (TRBV14, TRBJ1-1)
CASSQEAGTEAFF

SEQ ID NO: 174309 - protein, 14 aa, Homo sapiens
  CDR3 for alpha chain variable domain of TCR clone 87155 (TRAV17, TRAJ54)
CAMDANRGAQKLVF

SEQ ID NO: 174310 - protein, 12 aa, Homo sapiens
  CDR3 for beta chain variable domain of TCR clone 87155 (TRBV7-9, TRBJ2-7)
CASSIKREEQYF

SEQ ID NO: 174311 - protein, 14 aa, Homo sapiens
  CDR3 for alpha chain variable domain of TCR clone 87156 (TRAV13-2, TRAJ16)
CAENNWEDGQKLLF

SEQ ID NO: 174312 - protein, 14 aa, Homo sapiens
  CDR3 for beta chain variable domain of TCR clone 87156 (TRBV7-9, TRBJ1-1)
CASSLGGLKTEAFL

SEQ ID NO: 174313 - protein, 16 aa, Homo sapiens
  CDR3 for alpha chain variable domain of TCR clone 87157 (TRAV1-2, TRAJ10)
CAVRGVLTGGGNKLTF

SEQ ID NO: 174314 - protein, 14 aa, Homo sapiens
  CDR3 for beta chain variable domain of TCR clone 87157 (TRBV20-1, TRBJ2-1)
CSAQIGGSANEQFF

SEQ ID NO: 174315 - protein, 13 aa, Homo sapiens
  CDR3 for alpha chain variable domain of TCR clone 87158 (TRAV27, TRAJ45)
CRSSGGGADGVTF

SEQ ID NO: 174316 - protein, 17 aa, Homo sapiens
  CDR3 for beta chain variable domain of TCR clone 87158 (TRBV11-2, TRBJ2-1)
CASSLYPPGVEYNEQFF

SEQ ID NO: 174317 - protein, 13 aa, Homo sapiens
  CDR3 for alpha chain variable domain of TCR clone 87159 (TRAV21, TRAJ15)
CAVANQAVTALIF

SEQ ID NO: 174318 - protein, 14 aa, Homo sapiens
  CDR3 for beta chain variable domain of TCR clone 87159 (TRBV27, TRBJ2-2)
CASSLGAATGELFF

SEQ ID NO: 174319 - protein, 14 aa, Homo sapiens
  CDR3 for alpha chain variable domain of TCR clone 87160 (TRAV12-1, TRAJ3)
CGAARYSSASKIIF

SEQ ID NO: 174320 - protein, 15 aa, Homo sapiens
  CDR3 for beta chain variable domain of TCR clone 87160 (TRBV7-2, TRBJ2-6)
CASSREGSGANVLTV

SEQ ID NO: 174321 - protein, 14 aa, Homo sapiens
  CDR3 for alpha chain variable domain of TCR clone 87161 (TRAV30, TRAJ26)
CGTEIVSYGQNFVF

SEQ ID NO: 174322 - protein, 17 aa, Homo sapiens
  CDR3 for beta chain variable domain of TCR clone 87161 (TRBV13, TRBJ2-3)
CASSLSRVAGGRNTQYF

SEQ ID NO: 174323 - protein, 11 aa, Homo sapiens
  CDR3 for alpha chain variable domain of TCR clone 87162 (TRAV3, TRAJ21)
CAVGNFNKFYF

SEQ ID NO: 174324 - protein, 17 aa, Homo sapiens
  CDR3 for beta chain variable domain of TCR clone 87162 (TRBV4-1, TRBJ2-7)
CASSRDPLGVRGGEQYF

SEQ ID NO: 174325 - protein, 14 aa, Homo sapiens
  CDR3 for alpha chain variable domain of TCR clone 87163 (TRAV12-1, TRAJ33)
CVVNPEDSNYQLIC

SEQ ID NO: 174326 - protein, 11 aa, Homo sapiens
  CDR3 for beta chain variable domain of TCR clone 87163 (TRBV7-6, TRBJ2-1)
CASSNYGEQFF

SEQ ID NO: 174327 - protein, 15 aa, Homo sapiens
  CDR3 for alpha chain variable domain of TCR clone 87164 (TRAV27, TRAJ38)
CAGRFNAGNNRKLIW

SEQ ID NO: 174328 - protein, 16 aa, Homo sapiens
  CDR3 for beta chain variable domain of TCR clone 87164 (TRBV12-4, TRBJ1-5)
CASSRPVGGSNQPQHF

SEQ ID NO: 174329 - protein, 14 aa, Homo sapiens
  CDR3 for alpha chain variable domain of TCR clone 87165 (TRAV29/DV5, TRAJ47)
CAASSIEYGNKLVF

SEQ ID NO: 174330 - protein, 15 aa, Homo sapiens
  CDR3 for beta chain variable domain of TCR clone 87165 (TRBV7-9, TRBJ2-5)
CASSLVSGSVETQYF

SEQ ID NO: 174331 - protein, 14 aa, Homo sapiens
  CDR3 for alpha chain variable domain of TCR clone 87166 (TRAV12-3, TRAJ10)
SHLPLTGGGNKLTF

SEQ ID NO: 174332 - protein, 15 aa, Homo sapiens
  CDR3 for beta chain variable domain of TCR clone 87166 (TRBV18, TRBJ2-5)
CASTDRGPRQETQYF

SEQ ID NO: 174333 - protein, 12 aa, Homo sapiens
  CDR3 for alpha chain variable domain of TCR clone 87167 (TRAV12-3, TRAJ41)
CAMSYSGYALNF

SEQ ID NO: 174334 - protein, 13 aa, Homo sapiens
  CDR3 for beta chain variable domain of TCR clone 87167 (TRBV7-3, TRBJ2-1)
CASSFDSYNEQFF

SEQ ID NO: 174335 - protein, 13 aa, Homo sapiens
  CDR3 for alpha chain variable domain of TCR clone 87168 (TRAV13-1, TRAJ43)
CAASLSTNNDMRF

SEQ ID NO: 174336 - protein, 14 aa, Homo sapiens
  CDR3 for beta chain variable domain of TCR clone 87168 (TRBV5-1, TRBJ2-5)
CASSLAGKQETQYF

SEQ ID NO: 174337 - protein, 14 aa, Homo sapiens
  CDR3 for alpha chain variable domain of TCR clone 87169 (TRAV12-1, TRAJ30)
CVVNIGGRDDKIIF

SEQ ID NO: 174338 - protein, 15 aa, Homo sapiens
  CDR3 for beta chain variable domain of TCR clone 87169 (TRBV12-5, TRBJ2-1)
CASGWAGGMSSSSGQ

SEQ ID NO: 174339 - protein, 15 aa, Homo sapiens
  CDR3 for alpha chain variable domain of TCR clone 87170 (TRAV13-1, TRAJ32)
CAASNGWWCYKQAHL

SEQ ID NO: 174340 - protein, 13 aa, Homo sapiens
  CDR3 for beta chain variable domain of TCR clone 87170 (TRBV7-9, TRBJ2-7)
CASSAPGGYEQYF

SEQ ID NO: 174341 - protein, 14 aa, Homo sapiens
  CDR3 for alpha chain variable domain of TCR clone 87171 (TRAV9-2, TRAJ39)
CALYIYNAGNMLTF

SEQ ID NO: 174342 - protein, 13 aa, Homo sapiens
  CDR3 for beta chain variable domain of TCR clone 87171 (TRBV19, TRBJ2-7)
CASSKQGGYEQYF

SEQ ID NO: 174343 - protein, 17 aa, Homo sapiens
  CDR3 for alpha chain variable domain of TCR clone 87172 (TRAV3, TRAJ6)
CAVRDGPRAGGSYIPTF

SEQ ID NO: 174344 - protein, 14 aa, Homo sapiens
  CDR3 for beta chain variable domain of TCR clone 87172 (TRBV7-2, TRBJ2-7)
CVSSPKTSFYEQYF

SEQ ID NO: 174345 - protein, 16 aa, Homo sapiens
  CDR3 for alpha chain variable domain of TCR clone 87173 (TRAV26-1, TRAJ45)
CIVEKYSGGGAGGLTF

SEQ ID NO: 174346 - protein, 13 aa, Homo sapiens
  CDR3 for beta chain variable domain of TCR clone 87173 (TRBV25-1, TRBJ2-5)
CASSESGRETQYF

SEQ ID NO: 174347 - protein, 13 aa, Homo sapiens
  CDR3 for alpha chain variable domain of TCR clone 87174 (TRAV20, TRAJ37)
CAGCSSNTGKLIF

SEQ ID NO: 174348 - protein, 11 aa, Homo sapiens
  CDR3 for beta chain variable domain of TCR clone 87174 (TRBV12-4, TRBJ2-3)
CASTATDQQYF

SEQ ID NO: 174349 - protein, 18 aa, Homo sapiens
  CDR3 for alpha chain variable domain of TCR clone 87175 (TRAV21, TRAJ52)
CAVRPSPAGGTSYGKLTF

SEQ ID NO: 174350 - protein, 15 aa, Homo sapiens
  CDR3 for beta chain variable domain of TCR clone 87175 (TRBV28, TRBJ2-5)
CASSPPWSYQETQYF

SEQ ID NO: 174351 - protein, 15 aa, Homo sapiens
  CDR3 for alpha chain variable domain of TCR clone 87176 (TRAV8-1, TRAJ6)
CAVNAGEGGSYIPTF

SEQ ID NO: 174352 - protein, 14 aa, Homo sapiens
  CDR3 for beta chain variable domain of TCR clone 87176 (TRBV25-1, TRBJ1-6)
CASSLSADISPLHF

SEQ ID NO: 174353 - protein, 14 aa, Homo sapiens
  CDR3 for alpha chain variable domain of TCR clone 87177 (TRAV1-2, TRAJ8)
CAVREDTGFQKLVF

SEQ ID NO: 174354 - protein, 14 aa, Homo sapiens
  CDR3 for beta chain variable domain of TCR clone 87177 (TRBV5-1, TRBJ2-1)
CASSLDGDWNEQFF

SEQ ID NO: 174355 - protein, 12 aa, Homo sapiens
  CDR3 for alpha chain variable domain of TCR clone 87178 (TRAV12-3, TRAJ17)
CAMTLTGNKLTF

SEQ ID NO: 174356 - protein, 17 aa, Homo sapiens
  CDR3 for beta chain variable domain of TCR clone 87178 (TRBV19, TRBJ2-7)
CASSISFYDSYPYEQYF

SEQ ID NO: 174357 - protein, 11 aa, Homo sapiens
  CDR3 for alpha chain variable domain of TCR clone 87179 (TRAV4, TRAJ23)
CLVAPGGKLIF

SEQ ID NO: 174358 - protein, 14 aa, Homo sapiens
  CDR3 for beta chain variable domain of TCR clone 87179 (TRBV7-2, TRBJ1-1)
CASSFLTGTTEAFF

SEQ ID NO: 174359 - protein, 20 aa, Homo sapiens
  CDR3 for alpha chain variable domain of TCR clone 87180 (TRAV12-3, TRAJ41)
SLFIRDSQPSDSATPEALNF

SEQ ID NO: 174360 - protein, 13 aa, Homo sapiens
  CDR3 for beta chain variable domain of TCR clone 87180 (TRBV27, TRBJ2-7)
CASSLTTGYEQYF

SEQ ID NO: 174361 - protein, 12 aa, Homo sapiens
  CDR3 for alpha chain variable domain of TCR clone 87181 (TRAV20, TRAJ45)
CAVRGGADGLTF

SEQ ID NO: 174362 - protein, 12 aa, Homo sapiens
  CDR3 for beta chain variable domain of TCR clone 87181 (TRBV11-2, TRBJ2-2)
CASSLGGGELFF

SEQ ID NO: 174363 - protein, 11 aa, Homo sapiens
  CDR3 for alpha chain variable domain of TCR clone 87182 (TRAV12-1, TRAJ33)
CVVMPRIATIS

SEQ ID NO: 174364 - protein, 12 aa, Homo sapiens
  CDR3 for beta chain variable domain of TCR clone 87182 (TRBV11-2, TRBJ2-2)
CASSLGGGELFF

SEQ ID NO: 174365 - protein, 13 aa, Homo sapiens
  CDR3 for alpha chain variable domain of TCR clone 87183 (TRAV13-1, TRAJ6)
CARGSGGSYKPTF

SEQ ID NO: 174366 - protein, 17 aa, Homo sapiens
  CDR3 for beta chain variable domain of TCR clone 87183 (TRBV7-8, TRBJ2-1)
CASSPPTGTLAYNEQFF

SEQ ID NO: 174367 - protein, 16 aa, Homo sapiens
  CDR3 for alpha chain variable domain of TCR clone 87184 (TRAV3, TRAJ10)
CAVRDIRAGGGNKLTF

SEQ ID NO: 174368 - protein, 19 aa, Homo sapiens
  CDR3 for beta chain variable domain of TCR clone 87184 (TRBV6-3, TRBJ1-2)
CASSYSKGRTGPPNYGYTF

SEQ ID NO: 174369 - protein, 12 aa, Homo sapiens
  CDR3 for alpha chain variable domain of TCR clone 87185 (TRAV21, TRAJ30)
CAVMNRDDKIIF

SEQ ID NO: 174370 - protein, 17 aa, Homo sapiens
  CDR3 for beta chain variable domain of TCR clone 87185 (TRBV5-1, TRBJ1-1)
CASRTIRTGGVNTEAFF

SEQ ID NO: 174371 - protein, 13 aa, Homo sapiens
  CDR3 for alpha chain variable domain of TCR clone 87186 (TRAV17, TRAJ5)
CALRGTGRGALTF

SEQ ID NO: 174372 - protein, 13 aa, Homo sapiens
  CDR3 for beta chain variable domain of TCR clone 87186 (TRBV11-2, TRBJ2-5)
CASSRGPSETQYF

SEQ ID NO: 174373 - protein, 15 aa, Homo sapiens
  CDR3 for alpha chain variable domain of TCR clone 87187 (TRAV3, TRAJ22)
CAVRDRGGSARQRTF

SEQ ID NO: 174374 - protein, 13 aa, Homo sapiens
  CDR3 for beta chain variable domain of TCR clone 87187 (TRBV7-3, TRBJ2-1)
CASSPVAYNEQFF

SEQ ID NO: 174375 - protein, 13 aa, Homo sapiens
  CDR3 for alpha chain variable domain of TCR clone 87188 (TRAV13-1, TRAJ5)
CAAEHTGRRALTF

SEQ ID NO: 174376 - protein, 16 aa, Homo sapiens
  CDR3 for beta chain variable domain of TCR clone 87188 (TRBV12-5, TRBJ2-5)
CASGPRTSGNQETQYF

SEQ ID NO: 174377 - protein, 14 aa, Homo sapiens
  CDR3 for alpha chain variable domain of TCR clone 87189 (TRAV16, TRAJ33)
CALSAMDSNYQLIW

SEQ ID NO: 174378 - protein, 15 aa, Homo sapiens
  CDR3 for beta chain variable domain of TCR clone 87189 (TRBV2, TRBJ2-1)
CASSELAGSYNEQFF

SEQ ID NO: 174379 - protein, 14 aa, Homo sapiens
  CDR3 for alpha chain variable domain of TCR clone 87190 (TRAV12-3, TRAJ10)
SHLPLTGGGNKLTF

SEQ ID NO: 174380 - protein, 16 aa, Homo sapiens
  CDR3 for beta chain variable domain of TCR clone 87190 (TRBV10-3, TRBJ2-1)
CAISLTSGNSYNEQFV

SEQ ID NO: 174381 - protein, 14 aa, Homo sapiens
  CDR3 for alpha chain variable domain of TCR clone 87191 (TRAV25, TRAJ42)
CAGNYGGSQGNLIF

SEQ ID NO: 174382 - protein, 15 aa, Homo sapiens
  CDR3 for beta chain variable domain of TCR clone 87191 (TRBV6-1, TRBJ2-6)
CASTGSRSGANDLTF

SEQ ID NO: 174383 - protein, 13 aa, Homo sapiens
  CDR3 for alpha chain variable domain of TCR clone 87192 (TRAV8-3, TRAJ28)
CAVGAVGSYQLTF

SEQ ID NO: 174384 - protein, 15 aa, Homo sapiens
  CDR3 for beta chain variable domain of TCR clone 87192 (TRBV7-9, TRBJ1-5)
CASSKGHQPNQPQHF

SEQ ID NO: 174385 - protein, 14 aa, Homo sapiens
  CDR3 for alpha chain variable domain of TCR clone 87193 (TRAV27, TRAJ37)
CAGQRPSNTGKLIF

SEQ ID NO: 174386 - protein, 17 aa, Homo sapiens
  CDR3 for beta chain variable domain of TCR clone 87193 (TRBV13, TRBJ2-3)
CASSLSRVAGGRNTQYF

SEQ ID NO: 174387 - protein, 13 aa, Homo sapiens
  CDR3 for alpha chain variable domain of TCR clone 87194 (TRAV29/DV5, TRAJ29)
CAASAAGKPPLVF

SEQ ID NO: 174388 - protein, 14 aa, Homo sapiens
  CDR3 for beta chain variable domain of TCR clone 87194 (TRBV19, TRBJ2-3)
CASSAPRGTDTQYF

SEQ ID NO: 174389 - protein, 14 aa, Homo sapiens
  CDR3 for alpha chain variable domain of TCR clone 87195 (TRAV12-2, TRAJ24)
CAVTPADSWGKLQF

SEQ ID NO: 174390 - protein, 16 aa, Homo sapiens
  CDR3 for beta chain variable domain of TCR clone 87195 (TRBV6-4, TRBJ2-3)
APSEGGRAGGTDTQYF

SEQ ID NO: 174391 - protein, 16 aa, Homo sapiens
  CDR3 for alpha chain variable domain of TCR clone 87196 (TRAV8-4, TRAJ9)
CAVTFNTGGFKKYLWS

SEQ ID NO: 174392 - protein, 15 aa, Homo sapiens
  CDR3 for beta chain variable domain of TCR clone 87196 (TRBV7-9, TRBJ2-2)
CASSPETGAGGELFF

SEQ ID NO: 174393 - protein, 14 aa, Homo sapiens
  CDR3 for alpha chain variable domain of TCR clone 87197 (TRAV8-3, TRAJ6)
CAVGASGGSYIPTF

SEQ ID NO: 174394 - protein, 17 aa, Homo sapiens
  CDR3 for beta chain variable domain of TCR clone 87197 (TRBV18, TRBJ2-2)
CASSSSDPWQNTGELFF

SEQ ID NO: 174395 - protein, 18 aa, Homo sapiens
  CDR3 for alpha chain variable domain of TCR clone 87198 (TRAV21, TRAJ52)
CAVRPSPAGGTSYGKLTF

SEQ ID NO: 174396 - protein, 13 aa, Homo sapiens
  CDR3 for beta chain variable domain of TCR clone 87198 (TRBV7-3, TRBJ1-1)
CASSQDLGAEAFF

SEQ ID NO: 174397 - protein, 13 aa, Homo sapiens
  CDR3 for alpha chain variable domain of TCR clone 87199 (TRAV3, TRAJ29)
CAVRDWGNTPLVF

SEQ ID NO: 174398 - protein, 16 aa, Homo sapiens
  CDR3 for beta chain variable domain of TCR clone 87199 (TRBV12-4, TRBJ1-5)
CASSRPVGGSNQPQHF

SEQ ID NO: 174399 - protein, 15 aa, Homo sapiens
  CDR3 for alpha chain variable domain of TCR clone 87200 (TRAV12-2, TRAJ53)
CAVNGGGGSNYKLTF

SEQ ID NO: 174400 - protein, 14 aa, Homo sapiens
  CDR3 for beta chain variable domain of TCR clone 87200 (TRBV10-3, TRBJ1-1)
CAISDGSGVTEAFF

SEQ ID NO: 174401 - protein, 14 aa, Homo sapiens
  CDR3 for alpha chain variable domain of TCR clone 87201 (TRAV13-1, TRAJ13)
CAASRVWGYQKVTF

SEQ ID NO: 174402 - protein, 17 aa, Homo sapiens
  CDR3 for beta chain variable domain of TCR clone 87201 (TRBV15, TRBJ1-5)
CATSRAPPGTRNQPQHF

SEQ ID NO: 174403 - protein, 14 aa, Homo sapiens
  CDR3 for alpha chain variable domain of TCR clone 87202 (TRAV2, TRAJ37)
CAVEGSSNTGKLIF

SEQ ID NO: 174404 - protein, 15 aa, Homo sapiens
  CDR3 for beta chain variable domain of TCR clone 87202 (TRBV24-1, TRBJ2-4)
CATSDPRDRANMQYF

SEQ ID NO: 174405 - protein, 12 aa, Homo sapiens
  CDR3 for alpha chain variable domain of TCR clone 87203 (TRAV26-1, TRAJ26)
CIVFIYGQNFVF

SEQ ID NO: 174406 - protein, 13 aa, Homo sapiens
  CDR3 for beta chain variable domain of TCR clone 87203 (TRBV27, TRBJ1-1)
CASSLAIGAEAFF

SEQ ID NO: 174407 - protein, 15 aa, Homo sapiens
  CDR3 for alpha chain variable domain of TCR clone 87204 (TRAV8-6, TRAJ37)
CAVIFSSGNTGKLIF

SEQ ID NO: 174408 - protein, 14 aa, Homo sapiens
  CDR3 for beta chain variable domain of TCR clone 87204 (TRBV4-1, TRBJ2-2)
CASSQAVNTGELFF

SEQ ID NO: 174409 - protein, 14 aa, Homo sapiens
  CDR3 for alpha chain variable domain of TCR clone 87205 (TRAV20, TRAJ32)
CCGRYGGATNKLIF

SEQ ID NO: 174410 - protein, 17 aa, Homo sapiens
  CDR3 for beta chain variable domain of TCR clone 87205 (TRBV11-2, TRBJ2-1)
CASSLYPPGVEYNEQFF

SEQ ID NO: 174411 - protein, 14 aa, Homo sapiens
  CDR3 for alpha chain variable domain of TCR clone 87206 (TRAV38-1, TRAJ40)
CALRPTSGTYKYIF

SEQ ID NO: 174412 - protein, 14 aa, Homo sapiens
  CDR3 for beta chain variable domain of TCR clone 87206 (TRBV25-1, TRBJ1-1)
CASTHLGGNTEGFF

SEQ ID NO: 174413 - protein, 13 aa, Homo sapiens
  CDR3 for alpha chain variable domain of TCR clone 87207 (TRAV8-3, TRAJ43)
CAVGPDNNNDMRF

SEQ ID NO: 174414 - protein, 14 aa, Homo sapiens
  CDR3 for beta chain variable domain of TCR clone 87207 (TRBV5-1, TRBJ2-1)
CASSLARDYNEQFF

SEQ ID NO: 174415 - protein, 14 aa, Homo sapiens
  CDR3 for alpha chain variable domain of TCR clone 87208 (TRAV2, TRAJ26)
CAGSPGDYGQNFVF

SEQ ID NO: 174416 - protein, 16 aa, Homo sapiens
  CDR3 for beta chain variable domain of TCR clone 87208 (TRBV13, TRBJ2-2)
CASSPRTGEHTGELFF

SEQ ID NO: 174417 - protein, 14 aa, Homo sapiens
  CDR3 for alpha chain variable domain of TCR clone 87209 (TRAV8-1, TRAJ39)
CAVNASNAGNMLTF

SEQ ID NO: 174418 - protein, 13 aa, Homo sapiens
  CDR3 for beta chain variable domain of TCR clone 87209 (TRBV2, TRBJ1-1)
CASSVLMNTEAFF

SEQ ID NO: 174419 - protein, 11 aa, Homo sapiens
  CDR3 for alpha chain variable domain of TCR clone 87210 (TRAV2, TRAJ13)
CASGGYQKVTF

SEQ ID NO: 174420 - protein, 14 aa, Homo sapiens
  CDR3 for beta chain variable domain of TCR clone 87210 (TRBV19, TRBJ2-1)
CARGARSFQWEQFF

SEQ ID NO: 174421 - protein, 14 aa, Homo sapiens
  CDR3 for alpha chain variable domain of TCR clone 87211 (TRAV13-1, TRAJ35)
CAASKGGFGNVLHC

SEQ ID NO: 174422 - protein, 15 aa, Homo sapiens
  CDR3 for beta chain variable domain of TCR clone 87211 (TRBV19, TRBJ2-3)
CAAGDTNAPNDTQYF

SEQ ID NO: 174423 - protein, 12 aa, Homo sapiens
  CDR3 for alpha chain variable domain of TCR clone 87212 (TRAV8-6, TRAJ11)
CAVSSGYRTLTF

SEQ ID NO: 174424 - protein, 11 aa, Homo sapiens
  CDR3 for beta chain variable domain of TCR clone 87212 (TRBV20-1, TRBJ1-5)
CSAQGDQPQHF

SEQ ID NO: 174425 - protein, 12 aa, Homo sapiens
  CDR3 for alpha chain variable domain of TCR clone 87213 (TRAV1-1, TRAJ24)
CAVRGSWGKFQF

SEQ ID NO: 174426 - protein, 12 aa, Homo sapiens
  CDR3 for beta chain variable domain of TCR clone 87213 (TRBV11-2, TRBJ2-2)
CASSLGGGELFL

SEQ ID NO: 174427 - protein, 12 aa, Homo sapiens
  CDR3 for alpha chain variable domain of TCR clone 87214 (TRAV3, TRAJ43)
CAVRDPNNDMRF

SEQ ID NO: 174428 - protein, 15 aa, Homo sapiens
  CDR3 for beta chain variable domain of TCR clone 87214 (TRBV27, TRBJ1-5)
CASSLATGFDQPQHF

SEQ ID NO: 174429 - protein, 13 aa, Homo sapiens
  CDR3 for alpha chain variable domain of TCR clone 87215 (TRAV2, TRAJ40)
CAVVTSGTYKYIF

SEQ ID NO: 174430 - protein, 14 aa, Homo sapiens
  CDR3 for beta chain variable domain of TCR clone 87215 (TRBV7-2, TRBJ2-7)
CASSLKTSFYEQYF

SEQ ID NO: 174431 - protein, 13 aa, Homo sapiens
  CDR3 for alpha chain variable domain of TCR clone 87216 (TRAV8-3, TRAJ28)
CAVGAVGSYQLTF

SEQ ID NO: 174432 - protein, 15 aa, Homo sapiens
  CDR3 for beta chain variable domain of TCR clone 87216 (TRBV7-9, TRBJ1-5)
CASSLGHQPNQPQHF

SEQ ID NO: 174433 - protein, 11 aa, Homo sapiens
  CDR3 for alpha chain variable domain of TCR clone 87217 (TRAV12-3, TRAJ43)
CAMSVSNDMRF

SEQ ID NO: 174434 - protein, 13 aa, Homo sapiens
  CDR3 for beta chain variable domain of TCR clone 87217 (TRBV7-3, TRBJ1-1)
CASSLTQGNEAFF

SEQ ID NO: 174435 - protein, 12 aa, Homo sapiens
  CDR3 for alpha chain variable domain of TCR clone 87218 (TRAV1-2, TRAJ29)
CAVPSGNTPLVF

SEQ ID NO: 174436 - protein, 12 aa, Homo sapiens
  CDR3 for beta chain variable domain of TCR clone 87218 (TRBV7-9, TRBJ1-1)
CASSPSSTEAFF

SEQ ID NO: 174437 - protein, 14 aa, Homo sapiens
  CDR3 for alpha chain variable domain of TCR clone 87219 (TRAV12-2, TRAJ13)
CAVKQTGGYQKVTF

SEQ ID NO: 174438 - protein, 15 aa, Homo sapiens
  CDR3 for beta chain variable domain of TCR clone 87219 (TRBV27, TRBJ2-1)
CASGNGGGSSNEQFF

SEQ ID NO: 174439 - protein, 10 aa, Homo sapiens
  CDR3 for alpha chain variable domain of TCR clone 87220 (TRAV23/DV6, TRAJ57)
CAASSTLSQG

SEQ ID NO: 174440 - protein, 16 aa, Homo sapiens
  CDR3 for beta chain variable domain of TCR clone 87220 (TRBV28, TRBJ1-5)
CASSFRGGYSNQPQHF

SEQ ID NO: 174441 - protein, 13 aa, Homo sapiens
  CDR3 for alpha chain variable domain of TCR clone 87221 (TRAV27, TRAJ49)
CAPRPYTGNQCCF

SEQ ID NO: 174442 - protein, 16 aa, Homo sapiens
  CDR3 for beta chain variable domain of TCR clone 87221 (TRBV4-1, TRBJ1-2)
CASSQDAGQVLYGYAF

SEQ ID NO: 174443 - protein, 16 aa, Homo sapiens
  CDR3 for alpha chain variable domain of TCR clone 87222 (TRAV30, TRAJ49)
SAAQRVGPNTGNQFYF

SEQ ID NO: 174444 - protein, 15 aa, Homo sapiens
  CDR3 for beta chain variable domain of TCR clone 87222 (TRBV2, TRBJ2-1)
CASSELAGSYNEQFL

SEQ ID NO: 174445 - protein, 13 aa, Homo sapiens
  CDR3 for alpha chain variable domain of TCR clone 87223 (TRAV13-2, TRAJ40)
CAEFTSGTYKYIF

SEQ ID NO: 174446 - protein, 16 aa, Homo sapiens
  CDR3 for beta chain variable domain of TCR clone 87223 (TRBV4-2, TRBJ1-1)
CASSQAGFGMNTEAFF

SEQ ID NO: 174447 - protein, 16 aa, Homo sapiens
  CDR3 for alpha chain variable domain of TCR clone 87224 (TRAV13-1, TRAJ48)
CAASIFGNFGNEKLTF

SEQ ID NO: 174448 - protein, 15 aa, Homo sapiens
  CDR3 for beta chain variable domain of TCR clone 87224 (TRBV2, TRBJ2-1)
CASSELAGSYNEQFF

SEQ ID NO: 174449 - protein, 14 aa, Homo sapiens
  CDR3 for alpha chain variable domain of TCR clone 87225 (TRAV13-1, TRAJ26)
CAASSAHYSQNFVF

SEQ ID NO: 174450 - protein, 17 aa, Homo sapiens
  CDR3 for beta chain variable domain of TCR clone 87225 (TRBV25-1, TRBJ2-5)
CASSRRGGRGGQETQYF

SEQ ID NO: 174451 - protein, 13 aa, Homo sapiens
  CDR3 for alpha chain variable domain of TCR clone 87226 (TRAV20, TRAJ37)
CAGCSSNTGKLIF

SEQ ID NO: 174452 - protein, 11 aa, Homo sapiens
  CDR3 for beta chain variable domain of TCR clone 87226 (TRBV12-4, TRBJ2-3)
CANTATDTQYF

SEQ ID NO: 174453 - protein, 18 aa, Homo sapiens
  CDR3 for alpha chain variable domain of TCR clone 87227 (TRAV21, TRAJ52)
CAVRPSPAGGTSYGKLTF

SEQ ID NO: 174454 - protein, 15 aa, Homo sapiens
  CDR3 for beta chain variable domain of TCR clone 87227 (TRBV12-4, TRBJ2-5)
CASTLNSGRGETQYF

SEQ ID NO: 174455 - protein, 14 aa, Homo sapiens
  CDR3 for alpha chain variable domain of TCR clone 87228 (TRAV12-3, TRAJ9)
CGMSPNTGGFKTIF

SEQ ID NO: 174456 - protein, 12 aa, Homo sapiens
  CDR3 for beta chain variable domain of TCR clone 87228 (TRBV19, TRBJ1-5)
CASSIAQQPQHF

SEQ ID NO: 174457 - protein, 16 aa, Homo sapiens
  CDR3 for alpha chain variable domain of TCR clone 87229 (TRAV3, TRAJ3)
CAVRDRAKSSASKIIF

SEQ ID NO: 174458 - protein, 14 aa, Homo sapiens
  CDR3 for beta chain variable domain of TCR clone 87229 (TRBV9, TRBJ1-5)
CASSGGDTNQPQHF

SEQ ID NO: 174459 - protein, 15 aa, Homo sapiens
  CDR3 for alpha chain variable domain of TCR clone 87230 (TRAV17, TRAJ57)
CATGPSQGGSEKLVF

SEQ ID NO: 174460 - protein, 13 aa, Homo sapiens
  CDR3 for beta chain variable domain of TCR clone 87230 (TRBV5-1, TRBJ2-1)
CASRPFGYNEQFF

SEQ ID NO: 174461 - protein, 11 aa, Homo sapiens
  CDR3 for alpha chain variable domain of TCR clone 87231 (TRAV20, TRAJ23)
CACNQGGKLIF

SEQ ID NO: 174462 - protein, 16 aa, Homo sapiens
  CDR3 for beta chain variable domain of TCR clone 87231 (TRBV7-8, TRBJ2-5)
CASSFGEQPAQETQYF

SEQ ID NO: 174463 - protein, 17 aa, Homo sapiens
  CDR3 for alpha chain variable domain of TCR clone 87232 (TRAV23/DV6, TRAJ58)
CAARLLRGETSGSRLTF

SEQ ID NO: 174464 - protein, 13 aa, Homo sapiens
  CDR3 for beta chain variable domain of TCR clone 87232 (TRBV7-9, TRBJ1-2)
CASSLKQNYGYTF

SEQ ID NO: 174465 - protein, 17 aa, Homo sapiens
  CDR3 for alpha chain variable domain of TCR clone 87233 (TRAV3, TRAJ42)
CAVRDRDYGGSQGNLIF

SEQ ID NO: 174466 - protein, 17 aa, Homo sapiens
  CDR3 for beta chain variable domain of TCR clone 87233 (TRBV18, TRBJ2-1)
CASSKGLSGGADNEQFF

SEQ ID NO: 174467 - protein, 15 aa, Homo sapiens
  CDR3 for alpha chain variable domain of TCR clone 87234 (TRAV35, TRAJ40)
CAGQLGTSGTYKDIF

SEQ ID NO: 174468 - protein, 14 aa, Homo sapiens
  CDR3 for beta chain variable domain of TCR clone 87234 (TRBV7-3, TRBJ2-1)
CASSLAGGTNEQFF

SEQ ID NO: 174469 - protein, 13 aa, Homo sapiens
  CDR3 for alpha chain variable domain of TCR clone 87235 (TRAV1-2, TRAJ9)
CAVPNTGGFKTIF

SEQ ID NO: 174470 - protein, 15 aa, Homo sapiens
  CDR3 for beta chain variable domain of TCR clone 87235 (TRBV7-3, TRBJ2-1)
CASSPTGGGEVEQFF

SEQ ID NO: 174471 - protein, 13 aa, Homo sapiens
  CDR3 for alpha chain variable domain of TCR clone 87236 (TRAV2, TRAJ29)
CAAQNSGHTPLVF

SEQ ID NO: 174472 - protein, 14 aa, Homo sapiens
  CDR3 for beta chain variable domain of TCR clone 87236 (TRBV7-9, TRBJ2-4)
CASSLAMGGNIQYF

SEQ ID NO: 174473 - protein, 14 aa, Homo sapiens
  CDR3 for alpha chain variable domain of TCR clone 87237 (TRAV13-1, TRAJ22)
CATSNGGSARQLTF

SEQ ID NO: 174474 - protein, 14 aa, Homo sapiens
  CDR3 for beta chain variable domain of TCR clone 87237 (TRBV18, TRBJ2-2)
CASSPGQNTGELFF

SEQ ID NO: 174475 - protein, 13 aa, Homo sapiens
  CDR3 for alpha chain variable domain of TCR clone 87238 (TRAV16, TRAJ37)
CALRGSNTGKLIF

SEQ ID NO: 174476 - protein, 10 aa, Homo sapiens
  CDR3 for beta chain variable domain of TCR clone 87238 (TRBV5-6, TRBJ2-7)
RASSGNEQYF

SEQ ID NO: 174477 - protein, 11 aa, Homo sapiens
  CDR3 for alpha chain variable domain of TCR clone 87239 (TRAV21, TRAJ48)
CAVDGNEKLTV

SEQ ID NO: 174478 - protein, 16 aa, Homo sapiens
  CDR3 for beta chain variable domain of TCR clone 87239 (TRBV19, TRBJ2-1)
CASSSKGTRSYNEQFF

SEQ ID NO: 174479 - protein, 11 aa, Homo sapiens
  CDR3 for alpha chain variable domain of TCR clone 87240 (TRAV3, TRAJ21)
CAVGNFNKFHF

SEQ ID NO: 174480 - protein, 16 aa, Homo sapiens
  CDR3 for beta chain variable domain of TCR clone 87240 (TRBV19, TRBJ2-1)
CASSRAGPSSYNEQFF

SEQ ID NO: 174481 - protein, 15 aa, Homo sapiens
  CDR3 for alpha chain variable domain of TCR clone 87241 (TRAV25, TRAJ52)
CAGRPGGTSYGKLTF

SEQ ID NO: 174482 - protein, 13 aa, Homo sapiens
  CDR3 for beta chain variable domain of TCR clone 87241 (TRBV19, TRBJ1-2)
CATEPTGRYGYTF

SEQ ID NO: 174483 - protein, 13 aa, Homo sapiens
  CDR3 for alpha chain variable domain of TCR clone 87242 (TRAV21, TRAJ15)
CAVRNQAGTALIF

SEQ ID NO: 174484 - protein, 16 aa, Homo sapiens
  CDR3 for beta chain variable domain of TCR clone 87242 (TRBV20-1, TRBJ2-5)
CSPGGTSGGHMETQYF

SEQ ID NO: 174485 - protein, 23 aa, Homo sapiens
  CDR3 for alpha chain variable domain of TCR clone 87243 (TRAV13-1, TRAJ49)
CGTSSILGQGQVLRSFQISRTLT

SEQ ID NO: 174486 - protein, 16 aa, Homo sapiens
  CDR3 for beta chain variable domain of TCR clone 87243 (TRBV5-1, TRBJ2-7)
CASRPSFSNNPYEQYF

SEQ ID NO: 174487 - protein, 14 aa, Homo sapiens
  CDR3 for alpha chain variable domain of TCR clone 87244 (TRAV26-1, TRAJ48)
CIVRVGFGNEKLTF

SEQ ID NO: 174488 - protein, 12 aa, Homo sapiens
  CDR3 for beta chain variable domain of TCR clone 87244 (TRBV11-2, TRBJ2-2)
CASSLGGGELFF

SEQ ID NO: 174489 - protein, 14 aa, Homo sapiens
  CDR3 for alpha chain variable domain of TCR clone 87245 (TRAV17, TRAJ57)
CATDPQGGSEKLVF

SEQ ID NO: 174490 - protein, 14 aa, Homo sapiens
  CDR3 for beta chain variable domain of TCR clone 87245 (TRBV27, TRBJ2-5)
CASSTLKGWETQYF

SEQ ID NO: 174491 - protein, 13 aa, Homo sapiens
  CDR3 for alpha chain variable domain of TCR clone 87246 (TRAV2, TRAJ5)
CAVPDTGRRALTF

SEQ ID NO: 174492 - protein, 15 aa, Homo sapiens
  CDR3 for beta chain variable domain of TCR clone 87246 (TRBV7-2, TRBJ2-2)
CASSTRTGYTGVLFF

SEQ ID NO: 174493 - protein, 15 aa, Homo sapiens
  CDR3 for alpha chain variable domain of TCR clone 87247 (TRAV12-1, TRAJ42)
CVVTRDGGSQGNLIF

SEQ ID NO: 174494 - protein, 14 aa, Homo sapiens
  CDR3 for beta chain variable domain of TCR clone 87247 (TRBV11-2, TRBJ2-3)
CAGSLGGGANTQYF

SEQ ID NO: 174495 - protein, 17 aa, Homo sapiens
  CDR3 for alpha chain variable domain of TCR clone 87248 (TRAV3, TRAJ6)
CAVRDGPRAGGSYIPTF

SEQ ID NO: 174496 - protein, 14 aa, Homo sapiens
  CDR3 for beta chain variable domain of TCR clone 87248 (TRBV2, TRBJ2-1)
CASSDRAYYNEQFF

SEQ ID NO: 174497 - protein, 14 aa, Homo sapiens
  CDR3 for alpha chain variable domain of TCR clone 87249 (TRAV8-3, TRAJ42)
CAVGAWGSQGNLIF

SEQ ID NO: 174498 - protein, 15 aa, Homo sapiens
  CDR3 for beta chain variable domain of TCR clone 87249 (TRBV15, TRBJ2-1)
CATSRADRGHNEQFF

SEQ ID NO: 174499 - protein, 15 aa, Homo sapiens
  CDR3 for alpha chain variable domain of TCR clone 87250 (TRAV27, TRAJ38)
CAARPNAGNNRKLIW

SEQ ID NO: 174500 - protein, 13 aa, Homo sapiens
  CDR3 for beta chain variable domain of TCR clone 87250 (TRBV12-5, TRBJ2-3)
CASGDRQSDTQYF

SEQ ID NO: 174501 - protein, 15 aa, Homo sapiens
  CDR3 for alpha chain variable domain of TCR clone 87251 (TRAV21, TRAJ52)
CAVRGGGTGYGKLTF

SEQ ID NO: 174502 - protein, 15 aa, Homo sapiens
  CDR3 for beta chain variable domain of TCR clone 87251 (TRBV18, TRBJ1-5)
CASSPSDRSNQPQHF

SEQ ID NO: 174503 - protein, 16 aa, Homo sapiens
  CDR3 for alpha chain variable domain of TCR clone 87252 (TRAV23/DV6, TRAJ9)
CAASIGGNTGGFKTIF

SEQ ID NO: 174504 - protein, 15 aa, Homo sapiens
  CDR3 for beta chain variable domain of TCR clone 87252 (TRBV15, TRBJ2-1)
CATSRPGQGLHEQFF

SEQ ID NO: 174505 - protein, 16 aa, Homo sapiens
  CDR3 for alpha chain variable domain of TCR clone 87253 (TRAV3, TRAJ10)
CAVRDMRAGGGNKPTF

SEQ ID NO: 174506 - protein, 15 aa, Homo sapiens
  CDR3 for beta chain variable domain of TCR clone 87253 (TRBV9, TRBJ1-6)
CASSVAGTGDSPLHF

SEQ ID NO: 174507 - protein, 16 aa, Homo sapiens
  CDR3 for alpha chain variable domain of TCR clone 87254 (TRAV29/DV5, TRAJ36)
CAASAHYQSGANNLFF

SEQ ID NO: 174508 - protein, 15 aa, Homo sapiens
  CDR3 for beta chain variable domain of TCR clone 87254 (TRBV7-8, TRBJ2-5)
CASSDAAGSQETQYF

SEQ ID NO: 174509 - protein, 14 aa, Homo sapiens
  CDR3 for alpha chain variable domain of TCR clone 87255 (TRAV1-2, TRAJ16)
CAVNRFSDGQKLLF

SEQ ID NO: 174510 - protein, 16 aa, Homo sapiens
  CDR3 for beta chain variable domain of TCR clone 87255 (TRBV11-2, TRBJ1-1)
CASSLRQGGEHSKTFF

SEQ ID NO: 174511 - protein, 11 aa, Homo sapiens
  CDR3 for alpha chain variable domain of TCR clone 87256 (TRAV13-2, TRAJ23)
CAESPRGKLIF

SEQ ID NO: 174512 - protein, 14 aa, Homo sapiens
  CDR3 for beta chain variable domain of TCR clone 87256 (TRBV7-2, TRBJ2-7)
CASSPKTSFYEQYF

SEQ ID NO: 174513 - protein, 14 aa, Homo sapiens
  CDR3 for alpha chain variable domain of TCR clone 87257 (TRAV16, TRAJ39)
CALSKNNAGNMLTF

SEQ ID NO: 174514 - protein, 16 aa, Homo sapiens
  CDR3 for beta chain variable domain of TCR clone 87257 (TRBV6-6, TRBJ2-1)
CASSHSFSGSYNEQFF

SEQ ID NO: 174515 - protein, 11 aa, Homo sapiens
  CDR3 for alpha chain variable domain of TCR clone 87258 (TRAV12-3, TRAJ26)
CAMSHGQNFVF

SEQ ID NO: 174516 - protein, 18 aa, Homo sapiens
  CDR3 for beta chain variable domain of TCR clone 87258 (TRBV6-6, TRBJ1-3)
CASSYSKWDSISGNTIYF

SEQ ID NO: 174517 - protein, 16 aa, Homo sapiens
  CDR3 for alpha chain variable domain of TCR clone 87259 (TRAV3, TRAJ37)
CAVRGKGSGNTGKLIF

SEQ ID NO: 174518 - protein, 21 aa, Homo sapiens
  CDR3 for beta chain variable domain of TCR clone 87259 (TRBV15, TRBJ2-1)
AWGTQPCTCVPPAEVDTDRFF

SEQ ID NO: 174519 - protein, 13 aa, Homo sapiens
  CDR3 for alpha chain variable domain of TCR clone 87260 (TRAV3, TRAJ3)
CAVADSSASKIIF

SEQ ID NO: 174520 - protein, 14 aa, Homo sapiens
  CDR3 for beta chain variable domain of TCR clone 87260 (TRBV12-4, TRBJ1-1)
CASTWTGHDTEAFF

SEQ ID NO: 174521 - protein, 12 aa, Homo sapiens
  CDR3 for alpha chain variable domain of TCR clone 87261 (TRAV8-4, TRAJ43)
CAVSVNNNDMRF

SEQ ID NO: 174522 - protein, 13 aa, Homo sapiens
  CDR3 for beta chain variable domain of TCR clone 87261 (TRBV10-3, TRBJ2-7)
CASKLAVNYEQYF

SEQ ID NO: 174523 - protein, 19 aa, Homo sapiens
  CDR3 for alpha chain variable domain of TCR clone 87262 (TRAV26-1, TRAJ52)
CIVRAHRNAGGTRYGKLTF

SEQ ID NO: 174524 - protein, 15 aa, Homo sapiens
  CDR3 for beta chain variable domain of TCR clone 87262 (TRBV29-1, TRBJ2-1)
CSGRDRKSSYNEQFF

SEQ ID NO: 174525 - protein, 11 aa, Homo sapiens
  CDR3 for alpha chain variable domain of TCR clone 87263 (TRAV26-1, TRAJ37)
CIVRVGRKLIF

SEQ ID NO: 174526 - protein, 16 aa, Homo sapiens
  CDR3 for beta chain variable domain of TCR clone 87263 (TRBV19, TRBJ2-2)
CASRSPGTGATGELFF

SEQ ID NO: 174527 - protein, 12 aa, Homo sapiens
  CDR3 for alpha chain variable domain of TCR clone 87264 (TRAV21, TRAJ31)
CAVWGNNARLMF

SEQ ID NO: 174528 - protein, 12 aa, Homo sapiens
  CDR3 for beta chain variable domain of TCR clone 87264 (TRBV12-4, TRBJ1-3)
CASSFSGNTIYF

SEQ ID NO: 174529 - protein, 16 aa, Homo sapiens
  CDR3 for alpha chain variable domain of TCR clone 87265 (TRAV12-3, TRAJ53)
CAMSPGSGGSNYKLTF

SEQ ID NO: 174530 - protein, 14 aa, Homo sapiens
  CDR3 for beta chain variable domain of TCR clone 87265 (TRBV9, TRBJ2-7)
CASSVGVGSYEQYF

SEQ ID NO: 174531 - protein, 14 aa, Homo sapiens
  CDR3 for alpha chain variable domain of TCR clone 87266 (TRAV12-1, TRAJ30)
CVVNIGGRDDKIIF

SEQ ID NO: 174532 - protein, 15 aa, Homo sapiens
  CDR3 for beta chain variable domain of TCR clone 87266 (TRBV7-3, TRBJ2-1)
CASSPTGGGEVEQFF

SEQ ID NO: 174533 - protein, 13 aa, Homo sapiens
  CDR3 for alpha chain variable domain of TCR clone 87267 (TRAV12-3, TRAJ54)
CAMFAQGAQKLVF

SEQ ID NO: 174534 - protein, 16 aa, Homo sapiens
  CDR3 for beta chain variable domain of TCR clone 87267 (TRBV7-6, TRBJ2-3)
CASSARRGGLGDTQYF

SEQ ID NO: 174535 - protein, 15 aa, Homo sapiens
  CDR3 for alpha chain variable domain of TCR clone 87268 (TRAV3, TRAJ47)
CAVRDIGEYGNKLVF

SEQ ID NO: 174536 - protein, 14 aa, Homo sapiens
  CDR3 for beta chain variable domain of TCR clone 87268 (TRBV13, TRBJ2-5)
CASSLERVGETQFF

SEQ ID NO: 174537 - protein, 12 aa, Homo sapiens
  CDR3 for alpha chain variable domain of TCR clone 87269 (TRAV12-3, TRAJ17)
CAMTLTGNKLTF

SEQ ID NO: 174538 - protein, 14 aa, Homo sapiens
  CDR3 for beta chain variable domain of TCR clone 87269 (TRBV10-3, TRBJ2-7)
CAISEKQGIGGQYF

SEQ ID NO: 174539 - protein, 16 aa, Homo sapiens
  CDR3 for alpha chain variable domain of TCR clone 87270 (TRAV4, TRAJ22)
CLVGDVYSGSARQLTF

SEQ ID NO: 174540 - protein, 16 aa, Homo sapiens
  CDR3 for beta chain variable domain of TCR clone 87270 (TRBV7-9, TRBJ2-1)
CASSDVAGGSYNEQFF

SEQ ID NO: 174541 - protein, 12 aa, Homo sapiens
  CDR3 for alpha chain variable domain of TCR clone 87271 (TRAV1-1, TRAJ30)
CAVRGRDDKIIF

SEQ ID NO: 174542 - protein, 13 aa, Homo sapiens
  CDR3 for beta chain variable domain of TCR clone 87271 (TRBV11-3, TRBJ2-7)
CASSLDKLYEQYV

SEQ ID NO: 174543 - protein, 13 aa, Homo sapiens
  CDR3 for alpha chain variable domain of TCR clone 87272 (TRAV12-2, TRAJ9)
CSVKWAGGFKTIF

SEQ ID NO: 174544 - protein, 15 aa, Homo sapiens
  CDR3 for beta chain variable domain of TCR clone 87272 (TRBV5-1, TRBJ1-4)
CASSLTADSDEKLFF

SEQ ID NO: 174545 - protein, 14 aa, Homo sapiens
  CDR3 for alpha chain variable domain of TCR clone 87273 (TRAV12-3, TRAJ33)
CAMSVPGSNYQLIW

SEQ ID NO: 174546 - protein, 15 aa, Homo sapiens
  CDR3 for beta chain variable domain of TCR clone 87273 (TRBV7-6, TRBJ2-1)
CASSSLAGEGNEQFF

SEQ ID NO: 174547 - protein, 13 aa, Homo sapiens
  CDR3 for alpha chain variable domain of TCR clone 87274 (TRAV1-2, TRAJ31)
CAVRPNNNARLMV

SEQ ID NO: 174548 - protein, 14 aa, Homo sapiens
  CDR3 for beta chain variable domain of TCR clone 87274 (TRBV11-2, TRBJ2-1)
CASSLSGPYNEQFF

SEQ ID NO: 174549 - protein, 15 aa, Homo sapiens
  CDR3 for alpha chain variable domain of TCR clone 87275 (TRAV13-1, TRAJ43)
CAASGGFGAGTGLTV

SEQ ID NO: 174550 - protein, 18 aa, Homo sapiens
  CDR3 for beta chain variable domain of TCR clone 87275 (TRBV11-2, TRBJ1-6)
CASSLAVQGLSLNSPLHF

SEQ ID NO: 174551 - protein, 12 aa, Homo sapiens
  CDR3 for alpha chain variable domain of TCR clone 87276 (TRAV12-3, TRAJ20)
CAMVRGDYKLSF

SEQ ID NO: 174552 - protein, 14 aa, Homo sapiens
  CDR3 for beta chain variable domain of TCR clone 87276 (TRBV7-8, TRBJ2-3)
CASSLEAGTDTQYF

SEQ ID NO: 174553 - protein, 12 aa, Homo sapiens
  CDR3 for alpha chain variable domain of TCR clone 87277 (TRAV2, TRAJ33)
CAVPDSNYQLIW

SEQ ID NO: 174554 - protein, 20 aa, Homo sapiens
  CDR3 for beta chain variable domain of TCR clone 87277 (TRBV19, TRBJ2-1)
CASSISRTVTSTRLNNEQFL

SEQ ID NO: 174555 - protein, 11 aa, Homo sapiens
  CDR3 for alpha chain variable domain of TCR clone 87278 (TRAV1-2, TRAJ31)
CAVKNNARLMF

SEQ ID NO: 174556 - protein, 14 aa, Homo sapiens
  CDR3 for beta chain variable domain of TCR clone 87278 (TRBV6-3, TRBJ1-1)
CASSNLLPGAEAFF

SEQ ID NO: 174557 - protein, 13 aa, Homo sapiens
  CDR3 for alpha chain variable domain of TCR clone 87279 (TRAV8-6, TRAJ49)
CAVSGQTGNQFYL

SEQ ID NO: 174558 - protein, 13 aa, Homo sapiens
  CDR3 for beta chain variable domain of TCR clone 87279 (TRBV10-2, TRBJ2-7)
CASSAESPYEQYF

SEQ ID NO: 174559 - protein, 16 aa, Homo sapiens
  CDR3 for alpha chain variable domain of TCR clone 87280 (TRAV13-1, TRAJ48)
CRKYRESNFGNEKLTF

SEQ ID NO: 174560 - protein, 17 aa, Homo sapiens
  CDR3 for beta chain variable domain of TCR clone 87280 (TRBV28, TRBJ2-1)
CASSSARQALTYNEQFF

SEQ ID NO: 174561 - protein, 15 aa, Homo sapiens
  CDR3 for alpha chain variable domain of TCR clone 87281 (TRAV12-3, TRAJ27)
CAMRAYNTNAGKSTF

SEQ ID NO: 174562 - protein, 14 aa, Homo sapiens
  CDR3 for beta chain variable domain of TCR clone 87281 (TRBV6-1, TRBJ1-3)
CASVQGGGGNTIYF

SEQ ID NO: 174563 - protein, 14 aa, Homo sapiens
  CDR3 for alpha chain variable domain of TCR clone 87282 (TRAV2, TRAJ9)
CAVEDRSGGFKTIF

SEQ ID NO: 174564 - protein, 15 aa, Homo sapiens
  CDR3 for beta chain variable domain of TCR clone 87282 (TRBV5-1, TRBJ2-1)
CASSPPRAPYNEQFF

SEQ ID NO: 174565 - protein, 18 aa, Homo sapiens
  CDR3 for alpha chain variable domain of TCR clone 87283 (TRAV35, TRAJ28)
CAGHNYSLSGAGSYQLTF

SEQ ID NO: 174566 - protein, 12 aa, Homo sapiens
  CDR3 for beta chain variable domain of TCR clone 87283 (TRBV7-9, TRBJ1-1)
CASSLEGTEAFF

SEQ ID NO: 174567 - protein, 14 aa, Homo sapiens
  CDR3 for alpha chain variable domain of TCR clone 87284 (TRAV26-1, TRAJ38)
CIADNAGNNRKLIW

SEQ ID NO: 174568 - protein, 11 aa, Homo sapiens
  CDR3 for beta chain variable domain of TCR clone 87284 (TRBV6-3, TRBJ2-3)
CATGQADTQYF

SEQ ID NO: 174569 - protein, 14 aa, Homo sapiens
  CDR3 for alpha chain variable domain of TCR clone 87285 (TRAV12-2, TRAJ9)
CAVNALEGGFKTIF

SEQ ID NO: 174570 - protein, 14 aa, Homo sapiens
  CDR3 for beta chain variable domain of TCR clone 87285 (TRBV19, TRBJ2-1)
CASPTFVLSGEQFF

SEQ ID NO: 174571 - protein, 13 aa, Homo sapiens
  CDR3 for alpha chain variable domain of TCR clone 87286 (TRAV12-1, TRAJ49)
CVVILNTGKQFYF

SEQ ID NO: 174572 - protein, 13 aa, Homo sapiens
  CDR3 for beta chain variable domain of TCR clone 87286 (TRBV10-3, TRBJ2-7)
CASKLAVNYEQYF

SEQ ID NO: 174573 - protein, 15 aa, Homo sapiens
  CDR3 for alpha chain variable domain of TCR clone 87287 (TRAV13-1, TRAJ17)
CSASIERAAGNKLTF

SEQ ID NO: 174574 - protein, 12 aa, Homo sapiens
  CDR3 for beta chain variable domain of TCR clone 87287 (TRBV5-7, TRBJ1-1)
CASSLGRGKAFF

SEQ ID NO: 174575 - protein, 12 aa, Homo sapiens
  CDR3 for alpha chain variable domain of TCR clone 87288 (TRAV16, TRAJ10)
CSRTGGGDKLTF

SEQ ID NO: 174576 - protein, 13 aa, Homo sapiens
  CDR3 for beta chain variable domain of TCR clone 87288 (TRBV7-9, TRBJ1-2)
CASSLKQNYGYTF

SEQ ID NO: 174577 - protein, 13 aa, Homo sapiens
  CDR3 for alpha chain variable domain of TCR clone 87289 (TRAV1-2, TRAJ9)
CAALNTGGFNTIF

SEQ ID NO: 174578 - protein, 13 aa, Homo sapiens
  CDR3 for beta chain variable domain of TCR clone 87289 (TRBV7-9, TRBJ1-2)
CASSLKQNYGYTF

SEQ ID NO: 174579 - protein, 12 aa, Homo sapiens
  CDR3 for alpha chain variable domain of TCR clone 87290 (TRAV1-1, TRAJ8)
CAGGTGFQKLVF

SEQ ID NO: 174580 - protein, 15 aa, Homo sapiens
  CDR3 for beta chain variable domain of TCR clone 87290 (TRBV11-2, TRBJ2-1)
CASSLGTSGLNEQFF

SEQ ID NO: 174581 - protein, 14 aa, Homo sapiens
  CDR3 for alpha chain variable domain of TCR clone 87291 (TRAV17, TRAJ8)
CATDLNTGFQKLVF

SEQ ID NO: 174582 - protein, 14 aa, Homo sapiens
  CDR3 for beta chain variable domain of TCR clone 87291 (TRBV7-2, TRBJ2-7)
CASSPKTSFYEQYF

SEQ ID NO: 174583 - protein, 14 aa, Homo sapiens
  CDR3 for alpha chain variable domain of TCR clone 87292 (TRAV29/DV5, TRAJ6)
CAARVSGGSYIPTF

SEQ ID NO: 174584 - protein, 16 aa, Homo sapiens
  CDR3 for beta chain variable domain of TCR clone 87292 (TRBV28, TRBJ2-7)
CASSPWVATGDLSQYF

SEQ ID NO: 174585 - protein, 13 aa, Homo sapiens
  CDR3 for alpha chain variable domain of TCR clone 87293 (TRAV8-4, TRAJ29)
CAVSATGNTPFVF

SEQ ID NO: 174586 - protein, 20 aa, Homo sapiens
  CDR3 for beta chain variable domain of TCR clone 87293 (TRBV11-3, TRBJ2-3)
LGTRPCISVPAAPITDTQYF

SEQ ID NO: 174587 - protein, 17 aa, Homo sapiens
  CDR3 for alpha chain variable domain of TCR clone 87294 (TRAV12-2, TRAJ48)
CAVNEGGSNFGNEKLTF

SEQ ID NO: 174588 - protein, 12 aa, Homo sapiens
  CDR3 for beta chain variable domain of TCR clone 87294 (TRBV7-9, TRBJ2-7)
CASSLEGYEQYF

SEQ ID NO: 174589 - protein, 14 aa, Homo sapiens
  CDR3 for alpha chain variable domain of TCR clone 87295 (TRAV12-2, TRAJ13)
CAVKKTGGYQKVTF

SEQ ID NO: 174590 - protein, 12 aa, Homo sapiens
  CDR3 for beta chain variable domain of TCR clone 87295 (TRBV5-1, TRBJ2-7)
CASSFRGYEQYF

SEQ ID NO: 174591 - protein, 14 aa, Homo sapiens
  CDR3 for alpha chain variable domain of TCR clone 87296 (TRAV1-2, TRAJ33)
CAVRAPDSNYQLIR

SEQ ID NO: 174592 - protein, 14 aa, Homo sapiens
  CDR3 for beta chain variable domain of TCR clone 87296 (TRBV11-3, TRBJ1-6)
CASSFSGGDSPLHF

SEQ ID NO: 174593 - protein, 15 aa, Homo sapiens
  CDR3 for alpha chain variable domain of TCR clone 87297 (TRAV17, TRAJ37)
CATDHGSSDTGKLIF

SEQ ID NO: 174594 - protein, 14 aa, Homo sapiens
  CDR3 for beta chain variable domain of TCR clone 87297 (TRBV7-2, TRBJ2-3)
CASSRTSGADTQYF

SEQ ID NO: 174595 - protein, 16 aa, Homo sapiens
  CDR3 for alpha chain variable domain of TCR clone 87298 (TRAV38-1, TRAJ37)
CAFKGDGSSYTGKLIF

SEQ ID NO: 174596 - protein, 13 aa, Homo sapiens
  CDR3 for beta chain variable domain of TCR clone 87298 (TRBV12-4, TRBJ2-5)
CASSLFRRETQYF

SEQ ID NO: 174597 - protein, 14 aa, Homo sapiens
  CDR3 for alpha chain variable domain of TCR clone 87299 (TRAV23/DV6, TRAJ11)
CAASLESGYSTLTF

SEQ ID NO: 174598 - protein, 13 aa, Homo sapiens
  CDR3 for beta chain variable domain of TCR clone 87299 (TRBV4-1, TRBJ2-5)
CASSLARGETQYF

SEQ ID NO: 174599 - protein, 11 aa, Homo sapiens
  CDR3 for alpha chain variable domain of TCR clone 87300 (TRAV3, TRAJ21)
CAVGNFNKFYF

SEQ ID NO: 174600 - protein, 15 aa, Homo sapiens
  CDR3 for beta chain variable domain of TCR clone 87300 (TRBV19, TRBJ1-2)
CVSSVGQVLNYGYTF

SEQ ID NO: 174601 - protein, 16 aa, Homo sapiens
  CDR3 for alpha chain variable domain of TCR clone 87301 (TRAV12-3, TRAJ53)
CAMSPGSGGSNYKLTF

SEQ ID NO: 174602 - protein, 14 aa, Homo sapiens
  CDR3 for beta chain variable domain of TCR clone 87301 (TRBV7-2, TRBJ1-1)
CASSFVTGTTEAFF

SEQ ID NO: 174603 - protein, 10 aa, Homo sapiens
  CDR3 for alpha chain variable domain of TCR clone 87302 (TRAV38-2/DV8, TRAJ40)
CASGTYKYIF

SEQ ID NO: 174604 - protein, 16 aa, Homo sapiens
  CDR3 for beta chain variable domain of TCR clone 87302 (TRBV4-1, TRBJ1-2)
CASSQDAGQVLYGYTF

SEQ ID NO: 174605 - protein, 17 aa, Homo sapiens
  CDR3 for alpha chain variable domain of TCR clone 87303 (TRAV12-3, TRAJ6)
CAMSARGGAGGSYIPTF

SEQ ID NO: 174606 - protein, 12 aa, Homo sapiens
  CDR3 for beta chain variable domain of TCR clone 87303 (TRBV12-4, TRBJ2-3)
CASSTLQDTQYF

SEQ ID NO: 174607 - protein, 14 aa, Homo sapiens
  CDR3 for alpha chain variable domain of TCR clone 87304 (TRAV27, TRAJ23)
CAEAFDNQGGKLIF

SEQ ID NO: 174608 - protein, 15 aa, Homo sapiens
  CDR3 for beta chain variable domain of TCR clone 87304 (TRBV7-3, TRBJ2-7)
CASSLTGQGKYEQYF

SEQ ID NO: 174609 - protein, 13 aa, Homo sapiens
  CDR3 for alpha chain variable domain of TCR clone 87305 (TRAV12-1, TRAJ26)
SATYLYYGKNFVF

SEQ ID NO: 174610 - protein, 15 aa, Homo sapiens
  CDR3 for beta chain variable domain of TCR clone 87305 (TRBV5-1, TRBJ2-6)
CASSLDPSGANVLTF

SEQ ID NO: 174611 - protein, 10 aa, Homo sapiens
  CDR3 for alpha chain variable domain of TCR clone 87306 (TRAV30, TRAJ48)
CGIGNEKLTF

SEQ ID NO: 174612 - protein, 15 aa, Homo sapiens
  CDR3 for beta chain variable domain of TCR clone 87306 (TRBV7-2, TRBJ2-3)
CASSSTGLETDTQYF

SEQ ID NO: 174613 - protein, 13 aa, Homo sapiens
  CDR3 for alpha chain variable domain of TCR clone 87307 (TRAV20, TRAJ20)
CAVQALNDYKLSF

SEQ ID NO: 174614 - protein, 15 aa, Homo sapiens
  CDR3 for beta chain variable domain of TCR clone 87307 (TRBV6-1, TRBJ2-4)
CASSEAVWTINIQYF

SEQ ID NO: 174615 - protein, 16 aa, Homo sapiens
  CDR3 for alpha chain variable domain of TCR clone 87308 (TRAV20, TRAJ38)
CAVQASNAGNNRKPIW

SEQ ID NO: 174616 - protein, 16 aa, Homo sapiens
  CDR3 for beta chain variable domain of TCR clone 87308 (TRBV7-8, TRBJ2-6)
CASRVGDSAGANVLTF

SEQ ID NO: 174617 - protein, 14 aa, Homo sapiens
  CDR3 for alpha chain variable domain of TCR clone 87309 (TRAV8-4, TRAJ17)
CAVSEGASGNKLTF

SEQ ID NO: 174618 - protein, 13 aa, Homo sapiens
  CDR3 for beta chain variable domain of TCR clone 87309 (TRBV19, TRBJ2-1)
CASSMYRVNEQFF

SEQ ID NO: 174619 - protein, 14 aa, Homo sapiens
  CDR3 for alpha chain variable domain of TCR clone 87310 (TRAV12-3, TRAJ58)
CVMSTETSGSRLTF

SEQ ID NO: 174620 - protein, 12 aa, Homo sapiens
  CDR3 for beta chain variable domain of TCR clone 87310 (TRBV7-8, TRBJ2-7)
CASSLGDREQYF

SEQ ID NO: 174621 - protein, 14 aa, Homo sapiens
  CDR3 for alpha chain variable domain of TCR clone 87311 (TRAV2, TRAJ26)
CAVERDNYGQNFVF

SEQ ID NO: 174622 - protein, 13 aa, Homo sapiens
  CDR3 for beta chain variable domain of TCR clone 87311 (TRBV12-4, TRBJ1-2)
CASSLRQGKGYTF

SEQ ID NO: 174623 - protein, 14 aa, Homo sapiens
  CDR3 for alpha chain variable domain of TCR clone 87312 (TRAV1-2, TRAJ16)
CAVNRFSDGQKLLF

SEQ ID NO: 174624 - protein, 16 aa, Homo sapiens
  CDR3 for beta chain variable domain of TCR clone 87312 (TRBV7-2, TRBJ2-1)
CASSLLAQLFSKGQFF

SEQ ID NO: 174625 - protein, 14 aa, Homo sapiens
  CDR3 for alpha chain variable domain of TCR clone 87313 (TRAV2, TRAJ9)
CAVEDRSGGFKTIF

SEQ ID NO: 174626 - protein, 13 aa, Homo sapiens
  CDR3 for beta chain variable domain of TCR clone 87313 (TRBV19, TRBJ1-2)
CASSVAGQDGYTF

SEQ ID NO: 174627 - protein, 12 aa, Homo sapiens
  CDR3 for alpha chain variable domain of TCR clone 87314 (TRAV21, TRAJ56)
CAVGVNRSKLTF

SEQ ID NO: 174628 - protein, 14 aa, Homo sapiens
  CDR3 for beta chain variable domain of TCR clone 87314 (TRBV7-2, TRBJ2-7)
CASRSQGAAYEQYF

SEQ ID NO: 174629 - protein, 15 aa, Homo sapiens
  CDR3 for alpha chain variable domain of TCR clone 87315 (TRAV26-2, TRAJ13)
CILRDLSGGYQKVTF

SEQ ID NO: 174630 - protein, 12 aa, Homo sapiens
  CDR3 for beta chain variable domain of TCR clone 87315 (TRBV20-1, TRBJ2-7)
CSAGLKMGEQYF

SEQ ID NO: 174631 - protein, 14 aa, Homo sapiens
  CDR3 for alpha chain variable domain of TCR clone 87316 (TRAV1-2, TRAJ8)
CAVREDTGFQKLVF

SEQ ID NO: 174632 - protein, 11 aa, Homo sapiens
  CDR3 for beta chain variable domain of TCR clone 87316 (TRBV7-9, TRBJ2-3)
CASSPTDTQYF

SEQ ID NO: 174633 - protein, 19 aa, Homo sapiens
  CDR3 for alpha chain variable domain of TCR clone 87317 (TRAV2, TRAJ20)
ILQVREADAAVYRDCKLSF

SEQ ID NO: 174634 - protein, 15 aa, Homo sapiens
  CDR3 for beta chain variable domain of TCR clone 87317 (TRBV9, TRBJ2-2)
CQQRHGKREHRGAVF

SEQ ID NO: 174635 - protein, 13 aa, Homo sapiens
  CDR3 for alpha chain variable domain of TCR clone 87318 (TRAV12-3, TRAJ29)
CAMTLSGNTPLVF

SEQ ID NO: 174636 - protein, 15 aa, Homo sapiens
  CDR3 for beta chain variable domain of TCR clone 87318 (TRBV5-1, TRBJ2-6)
CASSLDPSGANVLSF

SEQ ID NO: 174637 - protein, 16 aa, Homo sapiens
  CDR3 for alpha chain variable domain of TCR clone 87319 (TRAV30, TRAJ24)
CGTEIVDADSWGKLRF

SEQ ID NO: 174638 - protein, 14 aa, Homo sapiens
  CDR3 for beta chain variable domain of TCR clone 87319 (TRBV12-5, TRBJ2-5)
CASGSRTHQETQYF

SEQ ID NO: 174639 - protein, 12 aa, Homo sapiens
  CDR3 for alpha chain variable domain of TCR clone 87320 (TRAV8-3, TRAJ26)
CAGDNYGQNFVF

SEQ ID NO: 174640 - protein, 20 aa, Homo sapiens
  CDR3 for beta chain variable domain of TCR clone 87320 (TRBV28, TRBJ2-1)
CASTPIGRSPGLAGGNEQFF

SEQ ID NO: 174641 - protein, 13 aa, Homo sapiens
  CDR3 for alpha chain variable domain of TCR clone 87321 (TRAV8-6, TRAJ5)
CAVLYTGRRALTF

SEQ ID NO: 174642 - protein, 12 aa, Homo sapiens
  CDR3 for beta chain variable domain of TCR clone 87321 (TRBV7-9, TRBJ1-6)
CASSASESPLHF

SEQ ID NO: 174643 - protein, 14 aa, Homo sapiens
  CDR3 for alpha chain variable domain of TCR clone 87322 (TRAV12-3, TRAJ10)
SHLPLTGGGNKLTF

SEQ ID NO: 174644 - protein, 13 aa, Homo sapiens
  CDR3 for beta chain variable domain of TCR clone 87322 (TRBV18, TRBJ1-1)
CASSPETKPEAFF

SEQ ID NO: 174645 - protein, 13 aa, Homo sapiens
  CDR3 for alpha chain variable domain of TCR clone 87323 (TRAV12-1, TRAJ33)
CGDAPDSNYQLIW

SEQ ID NO: 174646 - protein, 13 aa, Homo sapiens
  CDR3 for beta chain variable domain of TCR clone 87323 (TRBV12-5, TRBJ2-3)
CASGDRQSDTQYF

SEQ ID NO: 174647 - protein, 14 aa, Homo sapiens
  CDR3 for alpha chain variable domain of TCR clone 87324 (TRAV19, TRAJ15)
CALRIEQAGTALIF

SEQ ID NO: 174648 - protein, 19 aa, Homo sapiens
  CDR3 for beta chain variable domain of TCR clone 87324 (TRBV28, TRBJ2-4)
CASSFQPGGPAHSKNIQCF

SEQ ID NO: 174649 - protein, 13 aa, Homo sapiens
  CDR3 for alpha chain variable domain of TCR clone 87325 (TRAV8-6, TRAJ54)
CAVSEEGAQKLVF

SEQ ID NO: 174650 - protein, 15 aa, Homo sapiens
  CDR3 for beta chain variable domain of TCR clone 87325 (TRBV27, TRBJ2-5)
CASSLYPRGGEAQYF

SEQ ID NO: 174651 - protein, 14 aa, Homo sapiens
  CDR3 for alpha chain variable domain of TCR clone 87326 (TRAV3, TRAJ36)
CAVRDGTGANNLFF

SEQ ID NO: 174652 - protein, 16 aa, Homo sapiens
  CDR3 for beta chain variable domain of TCR clone 87326 (TRBV7-3, TRBJ2-5)
CASIQPGGSGQETQYF

SEQ ID NO: 174653 - protein, 12 aa, Homo sapiens
  CDR3 for alpha chain variable domain of TCR clone 87327 (TRAV8-3, TRAJ20)
CAVGANDHKLSF

SEQ ID NO: 174654 - protein, 17 aa, Homo sapiens
  CDR3 for beta chain variable domain of TCR clone 87327 (TRBV13, TRBJ2-3)
CASSLSRVAGGRNTQYF

SEQ ID NO: 174655 - protein, 13 aa, Homo sapiens
  CDR3 for alpha chain variable domain of TCR clone 87328 (TRAV35, TRAJ57)
CAGSQGGSEKLVV

SEQ ID NO: 174656 - protein, 15 aa, Homo sapiens
  CDR3 for beta chain variable domain of TCR clone 87328 (TRBV20-1, TRBJ2-7)
CSARDRVSGMDEQYF

SEQ ID NO: 174657 - protein, 12 aa, Homo sapiens
  CDR3 for alpha chain variable domain of TCR clone 87329 (TRAV13-1, TRAJ49)
CAASPMGNQFYF

SEQ ID NO: 174658 - protein, 14 aa, Homo sapiens
  CDR3 for beta chain variable domain of TCR clone 87329 (TRBV6-1, TRBJ1-3)
CASVQGGGGNTIYF

SEQ ID NO: 174659 - protein, 13 aa, Homo sapiens
  CDR3 for alpha chain variable domain of TCR clone 87330 (TRAV13-1, TRAJ6)
CAASSGGSYLPTF

SEQ ID NO: 174660 - protein, 15 aa, Homo sapiens
  CDR3 for beta chain variable domain of TCR clone 87330 (TRBV12-4, TRBJ2-5)
CASSPPTGLQETQYF

SEQ ID NO: 174661 - protein, 13 aa, Homo sapiens
  CDR3 for alpha chain variable domain of TCR clone 87331 (TRAV13-1, TRAJ22)
CAASRGSARQLTF

SEQ ID NO: 174662 - protein, 13 aa, Homo sapiens
  CDR3 for beta chain variable domain of TCR clone 87331 (TRBV27, TRBJ2-7)
CASSLTTGYEQYF

SEQ ID NO: 174663 - protein, 12 aa, Homo sapiens
  CDR3 for alpha chain variable domain of TCR clone 87332 (TRAV26-1, TRAJ54)
CIGGWGAQKLVF

SEQ ID NO: 174664 - protein, 14 aa, Homo sapiens
  CDR3 for beta chain variable domain of TCR clone 87332 (TRBV11-2, TRBJ1-2)
CASSSGQAGDGDTF

SEQ ID NO: 174665 - protein, 15 aa, Homo sapiens
  CDR3 for alpha chain variable domain of TCR clone 87333 (TRAV13-1, TRAJ17)
CAASIERAAGNKLTF

SEQ ID NO: 174666 - protein, 13 aa, Homo sapiens
  CDR3 for beta chain variable domain of TCR clone 87333 (TRBV7-7, TRBJ2-3)
CASSLGRADTQYF

SEQ ID NO: 174667 - protein, 16 aa, Homo sapiens
  CDR3 for alpha chain variable domain of TCR clone 87334 (TRAV30, TRAJ24)
CGAEIVDADSWGKFQF

SEQ ID NO: 174668 - protein, 15 aa, Homo sapiens
  CDR3 for beta chain variable domain of TCR clone 87334 (TRBV19, TRBJ1-1)
CASSIRRQMNTEAFF

SEQ ID NO: 174669 - protein, 13 aa, Homo sapiens
  CDR3 for alpha chain variable domain of TCR clone 87335 (TRAV17, TRAJ54)
CATVIQGAQELVF

SEQ ID NO: 174670 - protein, 15 aa, Homo sapiens
  CDR3 for beta chain variable domain of TCR clone 87335 (TRBV13, TRBJ2-1)
CASSLLSGLNNEQFF

SEQ ID NO: 174671 - protein, 15 aa, Homo sapiens
  CDR3 for alpha chain variable domain of TCR clone 87336 (TRAV8-3, TRAJ6)
CAVGPLGGGSYIPTF

SEQ ID NO: 174672 - protein, 14 aa, Homo sapiens
  CDR3 for beta chain variable domain of TCR clone 87336 (TRBV19, TRBJ2-2)
CASSAGQGAGELFF

SEQ ID NO: 174673 - protein, 15 aa, Homo sapiens
  CDR3 for alpha chain variable domain of TCR clone 87337 (TRAV25, TRAJ52)
CAGRPGGTSCGKLTF

SEQ ID NO: 174674 - protein, 17 aa, Homo sapiens
  CDR3 for beta chain variable domain of TCR clone 87337 (TRBV7-8, TRBJ2-6)
CASSAGTGGAGANDLTF

SEQ ID NO: 174675 - protein, 13 aa, Homo sapiens
  CDR3 for alpha chain variable domain of TCR clone 87338 (TRAV12-1, TRAJ33)
CVDAPDSNYQLIW

SEQ ID NO: 174676 - protein, 15 aa, Homo sapiens
  CDR3 for beta chain variable domain of TCR clone 87338 (TRBV27, TRBJ2-1)
CASSNGGGSSNEQFF

SEQ ID NO: 174677 - protein, 17 aa, Homo sapiens
  CDR3 for alpha chain variable domain of TCR clone 87339 (TRAV8-6, TRAJ58)
CAVSSWVGETSGSRLTF

SEQ ID NO: 174678 - protein, 13 aa, Homo sapiens
  CDR3 for beta chain variable domain of TCR clone 87339 (TRBV27, TRBJ2-7)
CASSFVSSYEQYF

SEQ ID NO: 174679 - protein, 13 aa, Homo sapiens
  CDR3 for alpha chain variable domain of TCR clone 87340 (TRAV8-1, TRAJ30)
CAVIMNRDDKIIF

SEQ ID NO: 174680 - protein, 14 aa, Homo sapiens
  CDR3 for beta chain variable domain of TCR clone 87340 (TRBV7-2, TRBJ1-6)
CASSLQGDNSPLHF

SEQ ID NO: 174681 - protein, 13 aa, Homo sapiens
  CDR3 for alpha chain variable domain of TCR clone 87341 (TRAV21, TRAJ27)
CAARPGNAGKSTF

SEQ ID NO: 174682 - protein, 14 aa, Homo sapiens
  CDR3 for beta chain variable domain of TCR clone 87341 (TRBV7-8, TRBJ2-3)
CASSFKSSTDTQYF

SEQ ID NO: 174683 - protein, 13 aa, Homo sapiens
  CDR3 for alpha chain variable domain of TCR clone 87342 (TRAV21, TRAJ27)
CAARPGNAGKSTF

SEQ ID NO: 174684 - protein, 19 aa, Homo sapiens
  CDR3 for beta chain variable domain of TCR clone 87342 (TRBV7-2, TRBJ2-3)
CASSFLSRNWGGGTDTQYF

SEQ ID NO: 174685 - protein, 16 aa, Homo sapiens
  CDR3 for alpha chain variable domain of TCR clone 87343 (TRAV29/DV5, TRAJ36)
CAASAHYQSGANNLLF

SEQ ID NO: 174686 - protein, 16 aa, Homo sapiens
  CDR3 for beta chain variable domain of TCR clone 87343 (TRBV4-2, TRBJ2-3)
CASSQELAGDTDTQYF
